United States Patent Application Publication US 2014/0004565 A1 - sequence listing, part 91

SEQ ID NO: 2250539 - RNA, 19 nt, Artificial Sequence
  Description of Artificial Sequence: Synthetic oligonucleotide
ucagccgcccguuguagac

SEQ ID NO: 2250540 - RNA, 19 nt, Artificial Sequence
  Description of Artificial Sequence: Synthetic oligonucleotide
gggaggaacacaccgugug

SEQ ID NO: 2250541 - RNA, 19 nt, Artificial Sequence
  Description of Artificial Sequence: Synthetic oligonucleotide
uauucggagggaggaacac

SEQ ID NO: 2250542 - RNA, 19 nt, Artificial Sequence
  Description of Artificial Sequence: Synthetic oligonucleotide
ucucuccccacucauccuu

SEQ ID NO: 2250543 - RNA, 19 nt, Artificial Sequence
  Description of Artificial Sequence: Synthetic oligonucleotide
aagcaggagucaucgucau

SEQ ID NO: 2250544 - RNA, 19 nt, Artificial Sequence
  Description of Artificial Sequence: Synthetic oligonucleotide
cuccuaugguagaacagca

SEQ ID NO: 2250545 - RNA, 19 nt, Artificial Sequence
  Description of Artificial Sequence: Synthetic oligonucleotide
cuugcccauuccuccgucc

SEQ ID NO: 2250546 - RNA, 19 nt, Artificial Sequence
  Description of Artificial Sequence: Synthetic oligonucleotide
guagacgcgggucacccga

SEQ ID NO: 2250547 - RNA, 19 nt, Artificial Sequence
  Description of Artificial Sequence: Synthetic oligonucleotide
cuuagacacuaucgcuuug

SEQ ID NO: 2250548 - RNA, 19 nt, Artificial Sequence
  Description of Artificial Sequence: Synthetic oligonucleotide
cacacuucucuccccacuc

SEQ ID NO: 2250549 - RNA, 19 nt, Artificial Sequence
  Description of Artificial Sequence: Synthetic oligonucleotide
ugucguccuucuugaagac

SEQ ID NO: 2250550 - RNA, 19 nt, Artificial Sequence
  Description of Artificial Sequence: Synthetic oligonucleotide
cagcaugagcugcuugugc

SEQ ID NO: 2250551 - RNA, 19 nt, Artificial Sequence
  Description of Artificial Sequence: Synthetic oligonucleotide
gacgcgggucacccgagcc

SEQ ID NO: 2250552 - RNA, 19 nt, Artificial Sequence
  Description of Artificial Sequence: Synthetic oligonucleotide
gggguaaacaaucaucacu

SEQ ID NO: 2250553 - RNA, 19 nt, Artificial Sequence
  Description of Artificial Sequence: Synthetic oligonucleotide
ucuuuucaacgcaguguua

SEQ ID NO: 2250554 - RNA, 19 nt, Artificial Sequence
  Description of Artificial Sequence: Synthetic oligonucleotide
gucuccuaugguagaacag

SEQ ID NO: 2250555 - RNA, 19 nt, Artificial Sequence
  Description of Artificial Sequence: Synthetic oligonucleotide
gacagauccucuuuauuuu

SEQ ID NO: 2250556 - RNA, 19 nt, Artificial Sequence
  Description of Artificial Sequence: Synthetic oligonucleotide
gucuuuucaacgcaguguu

SEQ ID NO: 2250557 - RNA, 19 nt, Artificial Sequence
  Description of Artificial Sequence: Synthetic oligonucleotide
agacgcgggucacccgagc

SEQ ID NO: 2250558 - RNA, 19 nt, Artificial Sequence
  Description of Artificial Sequence: Synthetic oligonucleotide
cagauccucuuuauuuuca

SEQ ID NO: 2250559 - RNA, 19 nt, Artificial Sequence
  Description of Artificial Sequence: Synthetic oligonucleotide
ugggucgccacuugauguc

SEQ ID NO: 2250560 - RNA, 19 nt, Artificial Sequence
  Description of Artificial Sequence: Synthetic oligonucleotide
acgguggcagccccauggg

SEQ ID NO: 2250561 - RNA, 19 nt, Artificial Sequence
  Description of Artificial Sequence: Synthetic oligonucleotide
ucggagggaggaacacacc

SEQ ID NO: 2250562 - RNA, 19 nt, Artificial Sequence
  Description of Artificial Sequence: Synthetic oligonucleotide
acgaugauuuugguuuucu

SEQ ID NO: 2250563 - RNA, 19 nt, Artificial Sequence
  Description of Artificial Sequence: Synthetic oligonucleotide
cugugcagagccgaugcac

SEQ ID NO: 2250564 - RNA, 19 nt, Artificial Sequence
  Description of Artificial Sequence: Synthetic oligonucleotide
ggguacacacuucucuccc

SEQ ID NO: 2250565 - RNA, 19 nt, Artificial Sequence
  Description of Artificial Sequence: Synthetic oligonucleotide
ucauacgguggcagcccca

SEQ ID NO: 2250566 - RNA, 19 nt, Artificial Sequence
  Description of Artificial Sequence: Synthetic oligonucleotide
uccugucuccuaugguaga

SEQ ID NO: 2250567 - RNA, 19 nt, Artificial Sequence
  Description of Artificial Sequence: Synthetic oligonucleotide
cuucuucguucuucucagc

SEQ ID NO: 2250568 - RNA, 19 nt, Artificial Sequence
  Description of Artificial Sequence: Synthetic oligonucleotide
auauucggagggaggaaca

SEQ ID NO: 2250569 - RNA, 19 nt, Artificial Sequence
  Description of Artificial Sequence: Synthetic oligonucleotide
gucauacgguggcagcccc

SEQ ID NO: 2250570 - RNA, 19 nt, Artificial Sequence
  Description of Artificial Sequence: Synthetic oligonucleotide
ccauggggaguuuaagcag

SEQ ID NO: 2250571 - RNA, 19 nt, Artificial Sequence
  Description of Artificial Sequence: Synthetic oligonucleotide
cuccaugguaacaaagacu

SEQ ID NO: 2250572 - RNA, 19 nt, Artificial Sequence
  Description of Artificial Sequence: Synthetic oligonucleotide
uagacgcgggucacccgag

SEQ ID NO: 2250573 - RNA, 19 nt, Artificial Sequence
  Description of Artificial Sequence: Synthetic oligonucleotide
uucguucuucucagcuccu

SEQ ID NO: 2250574 - RNA, 19 nt, Artificial Sequence
  Description of Artificial Sequence: Synthetic oligonucleotide
uuaucggcccauggggagu

SEQ ID NO: 2250575 - RNA, 19 nt, Artificial Sequence
  Description of Artificial Sequence: Synthetic oligonucleotide
cucuucacgugcagcacca

SEQ ID NO: 2250576 - RNA, 19 nt, Artificial Sequence
  Description of Artificial Sequence: Synthetic oligonucleotide
gcccuugcauauucggagg

SEQ ID NO: 2250577 - RNA, 19 nt, Artificial Sequence
  Description of Artificial Sequence: Synthetic oligonucleotide
aucaucacugcgccucgaa

SEQ ID NO: 2250578 - RNA, 19 nt, Artificial Sequence
  Description of Artificial Sequence: Synthetic oligonucleotide
uuccccacguagucggaaa

SEQ ID NO: 2250579 - RNA, 19 nt, Artificial Sequence
  Description of Artificial Sequence: Synthetic oligonucleotide
caaauuccaugcggauggg

SEQ ID NO: 2250580 - RNA, 19 nt, Artificial Sequence
  Description of Artificial Sequence: Synthetic oligonucleotide
gguacacacuucucucccc

SEQ ID NO: 2250581 - RNA, 19 nt, Artificial Sequence
  Description of Artificial Sequence: Synthetic oligonucleotide
ucgucgccucucuucacgu

SEQ ID NO: 2250582 - RNA, 19 nt, Artificial Sequence
  Description of Artificial Sequence: Synthetic oligonucleotide
gagccgugagcuccuccag

SEQ ID NO: 2250583 - RNA, 19 nt, Artificial Sequence
  Description of Artificial Sequence: Synthetic oligonucleotide
gcagggaacacgcgggccc

SEQ ID NO: 2250584 - RNA, 19 nt, Artificial Sequence
  Description of Artificial Sequence: Synthetic oligonucleotide
cacccgagccgugagcucc

SEQ ID NO: 2250585 - RNA, 19 nt, Artificial Sequence
  Description of Artificial Sequence: Synthetic oligonucleotide
agggcaucuuucaccaucu

SEQ ID NO: 2250586 - RNA, 19 nt, Artificial Sequence
  Description of Artificial Sequence: Synthetic oligonucleotide
ucugcucgucagucagccc

SEQ ID NO: 2250587 - RNA, 19 nt, Artificial Sequence
  Description of Artificial Sequence: Synthetic oligonucleotide
gucagcccuugcauauucg

SEQ ID NO: 2250588 - RNA, 19 nt, Artificial Sequence
  Description of Artificial Sequence: Synthetic oligonucleotide
cccauggggaguuuaagca

SEQ ID NO: 2250589 - RNA, 19 nt, Artificial Sequence
  Description of Artificial Sequence: Synthetic oligonucleotide
cccaugaaaaugucuuuuc

SEQ ID NO: 2250590 - RNA, 19 nt, Artificial Sequence
  Description of Artificial Sequence: Synthetic oligonucleotide
guuguagacgcgggucacc

SEQ ID NO: 2250591 - RNA, 19 nt, Artificial Sequence
  Description of Artificial Sequence: Synthetic oligonucleotide
aguuccugacagauccucu

SEQ ID NO: 2250592 - RNA, 19 nt, Artificial Sequence
  Description of Artificial Sequence: Synthetic oligonucleotide
uucuaccgucuucuucaaa

SEQ ID NO: 2250593 - RNA, 19 nt, Artificial Sequence
  Description of Artificial Sequence: Synthetic oligonucleotide
ggagucaucgucauuuucu

SEQ ID NO: 2250594 - RNA, 19 nt, Artificial Sequence
  Description of Artificial Sequence: Synthetic oligonucleotide
cacucauccuucaguuuca

SEQ ID NO: 2250595 - RNA, 19 nt, Artificial Sequence
  Description of Artificial Sequence: Synthetic oligonucleotide
cucucgucgccucucuuca

SEQ ID NO: 2250596 - RNA, 19 nt, Artificial Sequence
  Description of Artificial Sequence: Synthetic oligonucleotide
agaggccggccugacccgc

SEQ ID NO: 2250597 - RNA, 19 nt, Artificial Sequence
  Description of Artificial Sequence: Synthetic oligonucleotide
ccuccguccaaugucgucc

SEQ ID NO: 2250598 - RNA, 19 nt, Artificial Sequence
  Description of Artificial Sequence: Synthetic oligonucleotide
cuugacgaugauuuugguu

SEQ ID NO: 2250599 - RNA, 19 nt, Artificial Sequence
  Description of Artificial Sequence: Synthetic oligonucleotide
ccaugaaaaugucuuuuca

SEQ ID NO: 2250600 - RNA, 19 nt, Artificial Sequence
  Description of Artificial Sequence: Synthetic oligonucleotide
ggggaguuuaagcaggagu

SEQ ID NO: 2250601 - RNA, 19 nt, Artificial Sequence
  Description of Artificial Sequence: Synthetic oligonucleotide
ccccaugggguaaacaauc

SEQ ID NO: 2250602 - RNA, 19 nt, Artificial Sequence
  Description of Artificial Sequence: Synthetic oligonucleotide
ugcccauuccuccguccaa

SEQ ID NO: 2250603 - RNA, 19 nt, Artificial Sequence
  Description of Artificial Sequence: Synthetic oligonucleotide
gaguuuaagcaggagucau

SEQ ID NO: 2250604 - RNA, 19 nt, Artificial Sequence
  Description of Artificial Sequence: Synthetic oligonucleotide
aacacaccgugugccgcca

SEQ ID NO: 2250605 - RNA, 19 nt, Artificial Sequence
  Description of Artificial Sequence: Synthetic oligonucleotide
agcuugcccauuccuccgu

SEQ ID NO: 2250606 - RNA, 19 nt, Artificial Sequence
  Description of Artificial Sequence: Synthetic oligonucleotide
ugccgccagaucuuccauc

SEQ ID NO: 2250607 - RNA, 19 nt, Artificial Sequence
  Description of Artificial Sequence: Synthetic oligonucleotide
uuuccccacguagucggaa

SEQ ID NO: 2250608 - RNA, 19 nt, Artificial Sequence
  Description of Artificial Sequence: Synthetic oligonucleotide
cugucuccuaugguagaac

SEQ ID NO: 2250609 - RNA, 19 nt, Artificial Sequence
  Description of Artificial Sequence: Synthetic oligonucleotide
ggaguuuaagcaggaguca

SEQ ID NO: 2250610 - RNA, 19 nt, Artificial Sequence
  Description of Artificial Sequence: Synthetic oligonucleotide
uuccuccguccaaugucgu

SEQ ID NO: 2250611 - RNA, 19 nt, Artificial Sequence
  Description of Artificial Sequence: Synthetic oligonucleotide
uccuccguccaaugucguc

SEQ ID NO: 2250612 - RNA, 19 nt, Artificial Sequence
  Description of Artificial Sequence: Synthetic oligonucleotide
cuaucgcuuuggcuucuuc

SEQ ID NO: 2250613 - RNA, 19 nt, Artificial Sequence
  Description of Artificial Sequence: Synthetic oligonucleotide
cucucuucacgugcagcac

SEQ ID NO: 2250614 - RNA, 19 nt, Artificial Sequence
  Description of Artificial Sequence: Synthetic oligonucleotide
ugccugaguuccugacaga

SEQ ID NO: 2250615 - RNA, 19 nt, Artificial Sequence
  Description of Artificial Sequence: Synthetic oligonucleotide
cagcccuugcauauucgga

SEQ ID NO: 2250616 - RNA, 19 nt, Artificial Sequence
  Description of Artificial Sequence: Synthetic oligonucleotide
cucgucagucagcccuugc

SEQ ID NO: 2250617 - RNA, 19 nt, Artificial Sequence
  Description of Artificial Sequence: Synthetic oligonucleotide
cagggaacacgcgggcccg

SEQ ID NO: 2250618 - RNA, 19 nt, Artificial Sequence
  Description of Artificial Sequence: Synthetic oligonucleotide
cacuggguacacacuucuc

SEQ ID NO: 2250619 - RNA, 19 nt, Artificial Sequence
  Description of Artificial Sequence: Synthetic oligonucleotide
gggucauacgguggcagcc

SEQ ID NO: 2250620 - RNA, 19 nt, Artificial Sequence
  Description of Artificial Sequence: Synthetic oligonucleotide
augcaccuucagccgcccg

SEQ ID NO: 2250621 - RNA, 19 nt, Artificial Sequence
  Description of Artificial Sequence: Synthetic oligonucleotide
ggaacacaccgugugccgc

SEQ ID NO: 2250622 - RNA, 19 nt, Artificial Sequence
  Description of Artificial Sequence: Synthetic oligonucleotide
caucucugugcagagccga

SEQ ID NO: 2250623 - RNA, 19 nt, Artificial Sequence
  Description of Artificial Sequence: Synthetic oligonucleotide
ggucauacgguggcagccc

SEQ ID NO: 2250624 - RNA, 19 nt, Artificial Sequence
  Description of Artificial Sequence: Synthetic oligonucleotide
auuuucucauuuggagcuu

SEQ ID NO: 2250625 - RNA, 19 nt, Artificial Sequence
  Description of Artificial Sequence: Synthetic oligonucleotide
ugcucgucagucagcccuu

SEQ ID NO: 2250626 - RNA, 19 nt, Artificial Sequence
  Description of Artificial Sequence: Synthetic oligonucleotide
cugggucgccacuugaugu

SEQ ID NO: 2250627 - RNA, 19 nt, Artificial Sequence
  Description of Artificial Sequence: Synthetic oligonucleotide
cuugaaucugcucgucagu

SEQ ID NO: 2250628 - RNA, 19 nt, Artificial Sequence
  Description of Artificial Sequence: Synthetic oligonucleotide
ggggucauacgguggcagc

SEQ ID NO: 2250629 - RNA, 19 nt, Artificial Sequence
  Description of Artificial Sequence: Synthetic oligonucleotide
ucucgucgccucucuucac

SEQ ID NO: 2250630 - RNA, 19 nt, Artificial Sequence
  Description of Artificial Sequence: Synthetic oligonucleotide
acguagucggaaagcuucu

SEQ ID NO: 2250631 - RNA, 19 nt, Artificial Sequence
  Description of Artificial Sequence: Synthetic oligonucleotide
uggcucucgucgccucucu

SEQ ID NO: 2250632 - RNA, 19 nt, Artificial Sequence
  Description of Artificial Sequence: Synthetic oligonucleotide
aggccggccugacccgcac

SEQ ID NO: 2250633 - RNA, 19 nt, Artificial Sequence
  Description of Artificial Sequence: Synthetic oligonucleotide
gguccagggcaucuuucac

SEQ ID NO: 2250634 - RNA, 19 nt, Artificial Sequence
  Description of Artificial Sequence: Synthetic oligonucleotide
cugcuggaucuugacgaug

SEQ ID NO: 2250635 - RNA, 19 nt, Artificial Sequence
  Description of Artificial Sequence: Synthetic oligonucleotide
caucugggucgccacuuga

SEQ ID NO: 2250636 - RNA, 19 nt, Artificial Sequence
  Description of Artificial Sequence: Synthetic oligonucleotide
ggccggggcacccugcccc

SEQ ID NO: 2250637 - RNA, 19 nt, Artificial Sequence
  Description of Artificial Sequence: Synthetic oligonucleotide
cagccgcccguuguagacg

SEQ ID NO: 2250638 - RNA, 19 nt, Artificial Sequence
  Description of Artificial Sequence: Synthetic oligonucleotide
auacgguggcagccccaug

SEQ ID NO: 2250639 - RNA, 19 nt, Artificial Sequence
  Description of Artificial Sequence: Synthetic oligonucleotide
cucccgggcgcuugcagca

SEQ ID NO: 2250640 - RNA, 19 nt, Artificial Sequence
  Description of Artificial Sequence: Synthetic oligonucleotide
ucuucacgugcagcaccac

SEQ ID NO: 2250641 - RNA, 19 nt, Artificial Sequence
  Description of Artificial Sequence: Synthetic oligonucleotide
gcucucgucgccucucuuc

SEQ ID NO: 2250642 - RNA, 19 nt, Artificial Sequence
  Description of Artificial Sequence: Synthetic oligonucleotide
agggaggaacacaccgugu

SEQ ID NO: 2250643 - RNA, 19 nt, Artificial Sequence
  Description of Artificial Sequence: Synthetic oligonucleotide
gggcgcuugcagcaggaac

SEQ ID NO: 2250644 - RNA, 19 nt, Artificial Sequence
  Description of Artificial Sequence: Synthetic oligonucleotide
acacaccgugugccgccag

SEQ ID NO: 2250645 - RNA, 19 nt, Artificial Sequence
  Description of Artificial Sequence: Synthetic oligonucleotide
acgcaguguuaucggccca

SEQ ID NO: 2250646 - RNA, 19 nt, Artificial Sequence
  Description of Artificial Sequence: Synthetic oligonucleotide
uaucggcccauggggaguu

SEQ ID NO: 2250647 - RNA, 19 nt, Artificial Sequence
  Description of Artificial Sequence: Synthetic oligonucleotide
ccgaugcaccuucagccgc

SEQ ID NO: 2250648 - RNA, 19 nt, Artificial Sequence
  Description of Artificial Sequence: Synthetic oligonucleotide
ccugaguuccugacagauc

SEQ ID NO: 2250649 - RNA, 19 nt, Artificial Sequence
  Description of Artificial Sequence: Synthetic oligonucleotide
gaaggccccgccgaggcgu

SEQ ID NO: 2250650 - RNA, 19 nt, Artificial Sequence
  Description of Artificial Sequence: Synthetic oligonucleotide
ucacccgagccgugagcuc

SEQ ID NO: 2250651 - RNA, 19 nt, Artificial Sequence
  Description of Artificial Sequence: Synthetic oligonucleotide
cgucgggcagggaacacgc

SEQ ID NO: 2250652 - RNA, 19 nt, Artificial Sequence
  Description of Artificial Sequence: Synthetic oligonucleotide
agcaggagucaucgucauu

SEQ ID NO: 2250653 - RNA, 19 nt, Artificial Sequence
  Description of Artificial Sequence: Synthetic oligonucleotide
cuucuaccgucuucuucaa

SEQ ID NO: 2250654 - RNA, 19 nt, Artificial Sequence
  Description of Artificial Sequence: Synthetic oligonucleotide
gaugggcucccgggccggg

SEQ ID NO: 2250655 - RNA, 19 nt, Artificial Sequence
  Description of Artificial Sequence: Synthetic oligonucleotide
gucacccgagccgugagcu

SEQ ID NO: 2250656 - RNA, 19 nt, Artificial Sequence
  Description of Artificial Sequence: Synthetic oligonucleotide
ggucacccgagccgugagc

SEQ ID NO: 2250657 - RNA, 19 nt, Artificial Sequence
  Description of Artificial Sequence: Synthetic oligonucleotide
ucguucuucucagcuccuu

SEQ ID NO: 2250658 - RNA, 19 nt, Artificial Sequence
  Description of Artificial Sequence: Synthetic oligonucleotide
ggcgcuugcagcaggaacu

SEQ ID NO: 2250659 - RNA, 19 nt, Artificial Sequence
  Description of Artificial Sequence: Synthetic oligonucleotide
cacgcgggcccgagaggcc

SEQ ID NO: 2250660 - RNA, 19 nt, Artificial Sequence
  Description of Artificial Sequence: Synthetic oligonucleotide
ccgaaggccccgccgaggc

SEQ ID NO: 2250661 - RNA, 19 nt, Artificial Sequence
  Description of Artificial Sequence: Synthetic oligonucleotide
ucgccacuugaugucuuuu

SEQ ID NO: 2250662 - RNA, 19 nt, Artificial Sequence
  Description of Artificial Sequence: Synthetic oligonucleotide
gucgggcagggaacacgcg

SEQ ID NO: 2250663 - RNA, 19 nt, Artificial Sequence
  Description of Artificial Sequence: Synthetic oligonucleotide
auggggucauacgguggca

SEQ ID NO: 2250664 - RNA, 19 nt, Artificial Sequence
  Description of Artificial Sequence: Synthetic oligonucleotide
gcgucgggcagggaacacg

SEQ ID NO: 2250665 - RNA, 19 nt, Artificial Sequence
  Description of Artificial Sequence: Synthetic oligonucleotide
cguucuucucagcuccuug

SEQ ID NO: 2250666 - RNA, 19 nt, Artificial Sequence
  Description of Artificial Sequence: Synthetic oligonucleotide
ggcccauggggaguuuaag

SEQ ID NO: 2250667 - RNA, 19 nt, Artificial Sequence
  Description of Artificial Sequence: Synthetic oligonucleotide
caccaccauggccgcgccg

SEQ ID NO: 2250668 - RNA, 19 nt, Artificial Sequence
  Description of Artificial Sequence: Synthetic oligonucleotide
caaugucguccuucuugaa

SEQ ID NO: 2250669 - RNA, 19 nt, Artificial Sequence
  Description of Artificial Sequence: Synthetic oligonucleotide
caccaucuccaugguaaca

SEQ ID NO: 2250670 - RNA, 19 nt, Artificial Sequence
  Description of Artificial Sequence: Synthetic oligonucleotide
gccucgaagcugguccagg

SEQ ID NO: 2250671 - RNA, 19 nt, Artificial Sequence
  Description of Artificial Sequence: Synthetic oligonucleotide
gccgccagaucuuccaucu

SEQ ID NO: 2250672 - RNA, 19 nt, Artificial Sequence
  Description of Artificial Sequence: Synthetic oligonucleotide
cacaccgugugccgccaga

SEQ ID NO: 2250673 - RNA, 19 nt, Artificial Sequence
  Description of Artificial Sequence: Synthetic oligonucleotide
ucggcccauggggaguuua

SEQ ID NO: 2250674 - RNA, 19 nt, Artificial Sequence
  Description of Artificial Sequence: Synthetic oligonucleotide
caccuucagccgcccguug

SEQ ID NO: 2250675 - RNA, 19 nt, Artificial Sequence
  Description of Artificial Sequence: Synthetic oligonucleotide
ucccgggcgcuugcagcag

SEQ ID NO: 2250676 - RNA, 19 nt, Artificial Sequence
  Description of Artificial Sequence: Synthetic oligonucleotide
cccguuguagacgcggguc

SEQ ID NO: 2250677 - RNA, 19 nt, Artificial Sequence
  Description of Artificial Sequence: Synthetic oligonucleotide
uccaugcggauggggucau

SEQ ID NO: 2250678 - RNA, 19 nt, Artificial Sequence
  Description of Artificial Sequence: Synthetic oligonucleotide
cccgccgaggcgucggggc

SEQ ID NO: 2250679 - RNA, 19 nt, Artificial Sequence
  Description of Artificial Sequence: Synthetic oligonucleotide
ccguuguagacgcggguca

SEQ ID NO: 2250680 - RNA, 19 nt, Artificial Sequence
  Description of Artificial Sequence: Synthetic oligonucleotide
ccccacguagucggaaagc

SEQ ID NO: 2250681 - RNA, 19 nt, Artificial Sequence
  Description of Artificial Sequence: Synthetic oligonucleotide
uccguccaaugucguccuu

SEQ ID NO: 2250682 - RNA, 19 nt, Artificial Sequence
  Description of Artificial Sequence: Synthetic oligonucleotide
acuaucgcuuuggcuucuu

SEQ ID NO: 2250683 - RNA, 19 nt, Artificial Sequence
  Description of Artificial Sequence: Synthetic oligonucleotide
ccgcccguuguagacgcgg

SEQ ID NO: 2250684 - RNA, 19 nt, Artificial Sequence
  Description of Artificial Sequence: Synthetic oligonucleotide
ggcccgagaggccggccug

SEQ ID NO: 2250685 - RNA, 19 nt, Artificial Sequence
  Description of Artificial Sequence: Synthetic oligonucleotide
gucguccuucuugaagacu

SEQ ID NO: 2250686 - RNA, 19 nt, Artificial Sequence
  Description of Artificial Sequence: Synthetic oligonucleotide
cuccguccaaugucguccu

SEQ ID NO: 2250687 - RNA, 19 nt, Artificial Sequence
  Description of Artificial Sequence: Synthetic oligonucleotide
ccguccaaugucguccuuc

SEQ ID NO: 2250688 - RNA, 19 nt, Artificial Sequence
  Description of Artificial Sequence: Synthetic oligonucleotide
gcucuugaaucugcucguc

SEQ ID NO: 2250689 - RNA, 19 nt, Artificial Sequence
  Description of Artificial Sequence: Synthetic oligonucleotide
gcuugcccauuccuccguc

SEQ ID NO: 2250690 - RNA, 19 nt, Artificial Sequence
  Description of Artificial Sequence: Synthetic oligonucleotide
cuggaucuugacgaugauu

SEQ ID NO: 2250691 - RNA, 19 nt, Artificial Sequence
  Description of Artificial Sequence: Synthetic oligonucleotide
ggaacacgcgggcccgaga

SEQ ID NO: 2250692 - RNA, 19 nt, Artificial Sequence
  Description of Artificial Sequence: Synthetic oligonucleotide
gcauauucggagggaggaa

SEQ ID NO: 2250693 - RNA, 19 nt, Artificial Sequence
  Description of Artificial Sequence: Synthetic oligonucleotide
gggaacacgcgggcccgag

SEQ ID NO: 2250694 - RNA, 19 nt, Artificial Sequence
  Description of Artificial Sequence: Synthetic oligonucleotide
gccgaaggccccgccgagg

SEQ ID NO: 2250695 - RNA, 19 nt, Artificial Sequence
  Description of Artificial Sequence: Synthetic oligonucleotide
cgagccgugagcuccucca

SEQ ID NO: 2250696 - RNA, 19 nt, Artificial Sequence
  Description of Artificial Sequence: Synthetic oligonucleotide
agcugguccagggcaucuu

SEQ ID NO: 2250697 - RNA, 19 nt, Artificial Sequence
  Description of Artificial Sequence: Synthetic oligonucleotide
ggaucuugacgaugauuuu

SEQ ID NO: 2250698 - RNA, 19 nt, Artificial Sequence
  Description of Artificial Sequence: Synthetic oligonucleotide
cauacgguggcagccccau

SEQ ID NO: 2250699 - RNA, 19 nt, Artificial Sequence
  Description of Artificial Sequence: Synthetic oligonucleotide
ccuugcauauucggaggga

SEQ ID NO: 2250700 - RNA, 19 nt, Artificial Sequence
  Description of Artificial Sequence: Synthetic oligonucleotide
cgcccguuguagacgcggg

SEQ ID NO: 2250701 - RNA, 19 nt, Artificial Sequence
  Description of Artificial Sequence: Synthetic oligonucleotide
gucgccacuugaugucuuu

SEQ ID NO: 2250702 - RNA, 19 nt, Artificial Sequence
  Description of Artificial Sequence: Synthetic oligonucleotide
ccgccgaggcgucggggcg

SEQ ID NO: 2250703 - RNA, 19 nt, Artificial Sequence
  Description of Artificial Sequence: Synthetic oligonucleotide
agggaacacgcgggcccga

SEQ ID NO: 2250704 - RNA, 19 nt, Artificial Sequence
  Description of Artificial Sequence: Synthetic oligonucleotide
cguuguagacgcgggucac

SEQ ID NO: 2250705 - RNA, 19 nt, Artificial Sequence
  Description of Artificial Sequence: Synthetic oligonucleotide
gcgccucgaagcuggucca

SEQ ID NO: 2250706 - RNA, 19 nt, Artificial Sequence
  Description of Artificial Sequence: Synthetic oligonucleotide
cugcgccucgaagcugguc

SEQ ID NO: 2250707 - RNA, 19 nt, Artificial Sequence
  Description of Artificial Sequence: Synthetic oligonucleotide
gaggccggccugacccgca

SEQ ID NO: 2250708 - RNA, 19 nt, Artificial Sequence
  Description of Artificial Sequence: Synthetic oligonucleotide
ccugucuccuaugguagaa

SEQ ID NO: 2250709 - RNA, 19 nt, Artificial Sequence
  Description of Artificial Sequence: Synthetic oligonucleotide
cagccccaugggguaaaca

SEQ ID NO: 2250710 - RNA, 19 nt, Artificial Sequence
  Description of Artificial Sequence: Synthetic oligonucleotide
acccgagccgugagcuccu

SEQ ID NO: 2250711 - RNA, 19 nt, Artificial Sequence
  Description of Artificial Sequence: Synthetic oligonucleotide
ccgagaggccggccugacc

SEQ ID NO: 2250712 - RNA, 19 nt, Artificial Sequence
  Description of Artificial Sequence: Synthetic oligonucleotide
ccgagccgugagcuccucc

SEQ ID NO: 2250713 - RNA, 19 nt, Artificial Sequence
  Description of Artificial Sequence: Synthetic oligonucleotide
gcggauggggucauacggu

SEQ ID NO: 2250714 - RNA, 19 nt, Artificial Sequence
  Description of Artificial Sequence: Synthetic oligonucleotide
cgcgccgaaggccccgccg

SEQ ID NO: 2250715 - RNA, 19 nt, Artificial Sequence
  Description of Artificial Sequence: Synthetic oligonucleotide
cggaaagcuucuucguucu

SEQ ID NO: 2250716 - RNA, 19 nt, Artificial Sequence
  Description of Artificial Sequence: Synthetic oligonucleotide
ggccccgccgaggcgucgg

SEQ ID NO: 2250717 - RNA, 19 nt, Artificial Sequence
  Description of Artificial Sequence: Synthetic oligonucleotide
ccaugggguaaacaaucau

SEQ ID NO: 2250718 - RNA, 19 nt, Artificial Sequence
  Description of Artificial Sequence: Synthetic oligonucleotide
ggccggccugacccgcacc

SEQ ID NO: 2250719 - RNA, 19 nt, Artificial Sequence
  Description of Artificial Sequence: Synthetic oligonucleotide
ccuucagccgcccguugua

SEQ ID NO: 2250720 - RNA, 19 nt, Artificial Sequence
  Description of Artificial Sequence: Synthetic oligonucleotide
gggccggggcacccugccc

SEQ ID NO: 2250721 - RNA, 19 nt, Artificial Sequence
  Description of Artificial Sequence: Synthetic oligonucleotide
cgucgccucucuucacgug

SEQ ID NO: 2250722 - RNA, 19 nt, Artificial Sequence
  Description of Artificial Sequence: Synthetic oligonucleotide
cguccaaugucguccuucu

SEQ ID NO: 2250723 - RNA, 19 nt, Artificial Sequence
  Description of Artificial Sequence: Synthetic oligonucleotide
cgaaggccccgccgaggcg

SEQ ID NO: 2250724 - RNA, 19 nt, Artificial Sequence
  Description of Artificial Sequence: Synthetic oligonucleotide
cgccacuugaugucuuuua

SEQ ID NO: 2250725 - RNA, 19 nt, Artificial Sequence
  Description of Artificial Sequence: Synthetic oligonucleotide
cacuaucgcuuuggcuucu

SEQ ID NO: 2250726 - RNA, 19 nt, Artificial Sequence
  Description of Artificial Sequence: Synthetic oligonucleotide
gggucgccacuugaugucu

SEQ ID NO: 2250727 - RNA, 19 nt, Artificial Sequence
  Description of Artificial Sequence: Synthetic oligonucleotide
cauuuggagcuugcccauu

SEQ ID NO: 2250728 - RNA, 19 nt, Artificial Sequence
  Description of Artificial Sequence: Synthetic oligonucleotide
ggcgucgggcagggaacac

SEQ ID NO: 2250729 - RNA, 19 nt, Artificial Sequence
  Description of Artificial Sequence: Synthetic oligonucleotide
cgugugccgccagaucuuc

SEQ ID NO: 2250730 - RNA, 19 nt, Artificial Sequence
  Description of Artificial Sequence: Synthetic oligonucleotide
ccccaugaaaaugucuuuu

SEQ ID NO: 2250731 - RNA, 19 nt, Artificial Sequence
  Description of Artificial Sequence: Synthetic oligonucleotide
gccccgccgaggcgucggg

SEQ ID NO: 2250732 - RNA, 19 nt, Artificial Sequence
  Description of Artificial Sequence: Synthetic oligonucleotide
uccgugcucccgggcgcuu

SEQ ID NO: 2250733 - RNA, 19 nt, Artificial Sequence
  Description of Artificial Sequence: Synthetic oligonucleotide
gcagccccaugggguaaac

SEQ ID NO: 2250734 - RNA, 19 nt, Artificial Sequence
  Description of Artificial Sequence: Synthetic oligonucleotide
gggcccgagaggccggccu

SEQ ID NO: 2250735 - RNA, 19 nt, Artificial Sequence
  Description of Artificial Sequence: Synthetic oligonucleotide
gcccguuguagacgcgggu

SEQ ID NO: 2250736 - RNA, 19 nt, Artificial Sequence
  Description of Artificial Sequence: Synthetic oligonucleotide
cgccucucuucacgugcag

SEQ ID NO: 2250737 - RNA, 19 nt, Artificial Sequence
  Description of Artificial Sequence: Synthetic oligonucleotide
gugcucccgggcgcuugca

SEQ ID NO: 2250738 - RNA, 19 nt, Artificial Sequence
  Description of Artificial Sequence: Synthetic oligonucleotide
ggcagccccaugggguaaa

SEQ ID NO: 2250739 - RNA, 19 nt, Artificial Sequence
  Description of Artificial Sequence: Synthetic oligonucleotide
gccgcccguuguagacgcg

SEQ ID NO: 2250740 - RNA, 19 nt, Artificial Sequence
  Description of Artificial Sequence: Synthetic oligonucleotide
ccgggcgcuugcagcagga

SEQ ID NO: 2250741 - RNA, 19 nt, Artificial Sequence
  Description of Artificial Sequence: Synthetic oligonucleotide
gcccauuccuccguccaau

SEQ ID NO: 2250742 - RNA, 19 nt, Artificial Sequence
  Description of Artificial Sequence: Synthetic oligonucleotide
aucggcccauggggaguuu

SEQ ID NO: 2250743 - RNA, 19 nt, Artificial Sequence
  Description of Artificial Sequence: Synthetic oligonucleotide
cccgagaggccggccugac

SEQ ID NO: 2250744 - RNA, 19 nt, Artificial Sequence
  Description of Artificial Sequence: Synthetic oligonucleotide
gcccgagaggccggccuga

SEQ ID NO: 2250745 - RNA, 19 nt, Artificial Sequence
  Description of Artificial Sequence: Synthetic oligonucleotide
ccccgccgaggcgucgggg

SEQ ID NO: 2250746 - RNA, 19 nt, Artificial Sequence
  Description of Artificial Sequence: Synthetic oligonucleotide
ccgugcucccgggcgcuug

SEQ ID NO: 2250747 - RNA, 19 nt, Artificial Sequence
  Description of Artificial Sequence: Synthetic oligonucleotide
gcgggucacccgagccgug

SEQ ID NO: 2250748 - RNA, 19 nt, Artificial Sequence
  Description of Artificial Sequence: Synthetic oligonucleotide
cggcccauggggaguuuaa

SEQ ID NO: 2250749 - RNA, 19 nt, Artificial Sequence
  Description of Artificial Sequence: Synthetic oligonucleotide
gccgaggcgucggggcguc

SEQ ID NO: 2250750 - RNA, 19 nt, Artificial Sequence
  Description of Artificial Sequence: Synthetic oligonucleotide
ggcucucgucgccucucuu

SEQ ID NO: 2250751 - RNA, 19 nt, Artificial Sequence
  Description of Artificial Sequence: Synthetic oligonucleotide
ggucgccacuugaugucuu

SEQ ID NO: 2250752 - RNA, 19 nt, Artificial Sequence
  Description of Artificial Sequence: Synthetic oligonucleotide
ccgcgccgaaggccccgcc

SEQ ID NO: 2250753 - RNA, 19 nt, Artificial Sequence
  Description of Artificial Sequence: Synthetic oligonucleotide
cgggucacccgagccguga

SEQ ID NO: 2250754 - RNA, 19 nt, Artificial Sequence
  Description of Artificial Sequence: Synthetic oligonucleotide
ccgaggcgucggggcgucg

SEQ ID NO: 2250755 - RNA, 19 nt, Artificial Sequence
  Description of Artificial Sequence: Synthetic oligonucleotide
cccgagccgugagcuccuc

SEQ ID NO: 2250756 - RNA, 19 nt, Artificial Sequence
  Description of Artificial Sequence: Synthetic oligonucleotide
cguagucggaaagcuucuu

SEQ ID NO: 2250757 - RNA, 19 nt, Artificial Sequence
  Description of Artificial Sequence: Synthetic oligonucleotide
ccaugcggauggggucaua

SEQ ID NO: 2250758 - RNA, 19 nt, Artificial Sequence
  Description of Artificial Sequence: Synthetic oligonucleotide
cgggcgcuugcagcaggaa

SEQ ID NO: 2250759 - RNA, 19 nt, Artificial Sequence
  Description of Artificial Sequence: Synthetic oligonucleotide
cgccgaggcgucggggcgu

SEQ ID NO: 2250760 - RNA, 19 nt, Artificial Sequence
  Description of Artificial Sequence: Synthetic oligonucleotide
aaucgcaaccccuaggccc

SEQ ID NO: 2250761 - RNA, 19 nt, Artificial Sequence
  Description of Artificial Sequence: Synthetic oligonucleotide
gaauaguucauccacacug

SEQ ID NO: 2250762 - RNA, 19 nt, Artificial Sequence
  Description of Artificial Sequence: Synthetic oligonucleotide
gaugaagucacuuggaaac

SEQ ID NO: 2250763 - RNA, 19 nt, Artificial Sequence
  Description of Artificial Sequence: Synthetic oligonucleotide
aaaccucacacucugucuc

SEQ ID NO: 2250764 - RNA, 19 nt, Artificial Sequence
  Description of Artificial Sequence: Synthetic oligonucleotide
uuggaaacgcccaacaagc

SEQ ID NO: 2250765 - RNA, 19 nt, Artificial Sequence
  Description of Artificial Sequence: Synthetic oligonucleotide
agaaaagucacugccaggg

SEQ ID NO: 2250766 - RNA, 19 nt, Artificial Sequence
  Description of Artificial Sequence: Synthetic oligonucleotide
acacuagugacccgaagcc

SEQ ID NO: 2250767 - RNA, 19 nt, Artificial Sequence
  Description of Artificial Sequence: Synthetic oligonucleotide
gaaggggugugcuagacag

SEQ ID NO: 2250768 - RNA, 19 nt, Artificial Sequence
  Description of Artificial Sequence: Synthetic oligonucleotide
cuuggaugaagucacuugg

SEQ ID NO: 2250769 - RNA, 19 nt, Artificial Sequence
  Description of Artificial Sequence: Synthetic oligonucleotide
ucaaucgcaaccccuaggc

SEQ ID NO: 2250770 - RNA, 19 nt, Artificial Sequence
  Description of Artificial Sequence: Synthetic oligonucleotide
aacagaauuuugggaaacc

SEQ ID NO: 2250771 - RNA, 19 nt, Artificial Sequence
  Description of Artificial Sequence: Synthetic oligonucleotide
ucaagaguggggaacuucc

SEQ ID NO: 2250772 - RNA, 19 nt, Artificial Sequence
  Description of Artificial Sequence: Synthetic oligonucleotide
ugaaaggcucuccuggccg

SEQ ID NO: 2250773 - RNA, 19 nt, Artificial Sequence
  Description of Artificial Sequence: Synthetic oligonucleotide
aauaguucauccacacugg

SEQ ID NO: 2250774 - RNA, 19 nt, Artificial Sequence
  Description of Artificial Sequence: Synthetic oligonucleotide
aggaauaguucauccacac

SEQ ID NO: 2250775 - RNA, 19 nt, Artificial Sequence
  Description of Artificial Sequence: Synthetic oligonucleotide
aagccggcuguacaagucc

SEQ ID NO: 2250776 - RNA, 19 nt, Artificial Sequence
  Description of Artificial Sequence: Synthetic oligonucleotide
gacacuagugacccgaagc

SEQ ID NO: 2250777 - RNA, 19 nt, Artificial Sequence
  Description of Artificial Sequence: Synthetic oligonucleotide
aaugcggacuccgucgugc

SEQ ID NO: 2250778 - RNA, 19 nt, Artificial Sequence
  Description of Artificial Sequence: Synthetic oligonucleotide
aauuuugggaaaccucaca

SEQ ID NO: 2250779 - RNA, 19 nt, Artificial Sequence
  Description of Artificial Sequence: Synthetic oligonucleotide
agcuucacccaguaguggc

SEQ ID NO: 2250780 - RNA, 19 nt, Artificial Sequence
  Description of Artificial Sequence: Synthetic oligonucleotide
uguacaaguccucaauuuc

SEQ ID NO: 2250781 - RNA, 19 nt, Artificial Sequence
  Description of Artificial Sequence: Synthetic oligonucleotide
guaggaauaguucauccac

SEQ ID NO: 2250782 - RNA, 19 nt, Artificial Sequence
  Description of Artificial Sequence: Synthetic oligonucleotide
ucacugcucagacacaggc

SEQ ID NO: 2250783 - RNA, 19 nt, Artificial Sequence
  Description of Artificial Sequence: Synthetic oligonucleotide
gagaucagagcgcugcagg

SEQ ID NO: 2250784 - RNA, 19 nt, Artificial Sequence
  Description of Artificial Sequence: Synthetic oligonucleotide
ucccaugucacugaggccc

SEQ ID NO: 2250785 - RNA, 19 nt, Artificial Sequence
  Description of Artificial Sequence: Synthetic oligonucleotide
uguugcgccgggaaguggg

SEQ ID NO: 2250786 - RNA, 19 nt, Artificial Sequence
  Description of Artificial Sequence: Synthetic oligonucleotide
aacuccucauccuccccgc

SEQ ID NO: 2250787 - RNA, 19 nt, Artificial Sequence
  Description of Artificial Sequence: Synthetic oligonucleotide
uucgcaugaugccagggcc

SEQ ID NO: 2250788 - RNA, 19 nt, Artificial Sequence
  Description of Artificial Sequence: Synthetic oligonucleotide
agaauuuugggaaaccuca

SEQ ID NO: 2250789 - RNA, 19 nt, Artificial Sequence
  Description of Artificial Sequence: Synthetic oligonucleotide
acgcccaacaagcuggggc

SEQ ID NO: 2250790 - RNA, 19 nt, Artificial Sequence
  Description of Artificial Sequence: Synthetic oligonucleotide
gucacucucugccagagcc

SEQ ID NO: 2250791 - RNA, 19 nt, Artificial Sequence
  Description of Artificial Sequence: Synthetic oligonucleotide
uccgauaagugcuucugcc

SEQ ID NO: 2250792 - RNA, 19 nt, Artificial Sequence
  Description of Artificial Sequence: Synthetic oligonucleotide
aagucacuuggaaacgccc

SEQ ID NO: 2250793 - RNA, 19 nt, Artificial Sequence
  Description of Artificial Sequence: Synthetic oligonucleotide
uucaaucgcaaccccuagg

SEQ ID NO: 2250794 - RNA, 19 nt, Artificial Sequence
  Description of Artificial Sequence: Synthetic oligonucleotide
gaacuagagagaguugggg

SEQ ID NO: 2250795 - RNA, 19 nt, Artificial Sequence
  Description of Artificial Sequence: Synthetic oligonucleotide
ucugccagagccucccugg

SEQ ID NO: 2250796 - RNA, 19 nt, Artificial Sequence
  Description of Artificial Sequence: Synthetic oligonucleotide
agggagaucagagcgcugc

SEQ ID NO: 2250797 - RNA, 19 nt, Artificial Sequence
  Description of Artificial Sequence: Synthetic oligonucleotide
ugcgcggucacucucugcc

SEQ ID NO: 2250798 - RNA, 19 nt, Artificial Sequence
  Description of Artificial Sequence: Synthetic oligonucleotide
cuguaggaauaguucaucc

SEQ ID NO: 2250799 - RNA, 19 nt, Artificial Sequence
  Description of Artificial Sequence: Synthetic oligonucleotide
ugugcuagacagaggaccu

SEQ ID NO: 2250800 - RNA, 19 nt, Artificial Sequence
  Description of Artificial Sequence: Synthetic oligonucleotide
ucuacaacucuguucguuc

SEQ ID NO: 2250801 - RNA, 19 nt, Artificial Sequence
  Description of Artificial Sequence: Synthetic oligonucleotide
cugaacagaauuuugggaa

SEQ ID NO: 2250802 - RNA, 19 nt, Artificial Sequence
  Description of Artificial Sequence: Synthetic oligonucleotide
guucguucuggucugagac

SEQ ID NO: 2250803 - RNA, 19 nt, Artificial Sequence
  Description of Artificial Sequence: Synthetic oligonucleotide
auaguucauccacacuggg

SEQ ID NO: 2250804 - RNA, 19 nt, Artificial Sequence
  Description of Artificial Sequence: Synthetic oligonucleotide
uaggaauaguucauccaca

SEQ ID NO: 2250805 - RNA, 19 nt, Artificial Sequence
  Description of Artificial Sequence: Synthetic oligonucleotide
gacaacauggcagcugggg

SEQ ID NO: 2250806 - RNA, 19 nt, Artificial Sequence
  Description of Artificial Sequence: Synthetic oligonucleotide
aagauucuuuugcuggcgu

SEQ ID NO: 2250807 - RNA, 19 nt, Artificial Sequence
  Description of Artificial Sequence: Synthetic oligonucleotide
cuccucacugcucagacac

SEQ ID NO: 2250808 - RNA, 19 nt, Artificial Sequence
  Description of Artificial Sequence: Synthetic oligonucleotide
gagaaaagucacugccagg

SEQ ID NO: 2250809 - RNA, 19 nt, Artificial Sequence
  Description of Artificial Sequence: Synthetic oligonucleotide
ugaacagaauuuugggaaa

SEQ ID NO: 2250810 - RNA, 19 nt, Artificial Sequence
  Description of Artificial Sequence: Synthetic oligonucleotide
gaugacucaagagugggga

SEQ ID NO: 2250811 - RNA, 19 nt, Artificial Sequence
  Description of Artificial Sequence: Synthetic oligonucleotide
ugucucagccuuuuggggu

SEQ ID NO: 2250812 - RNA, 19 nt, Artificial Sequence
  Description of Artificial Sequence: Synthetic oligonucleotide
ucugccgaagauucugcag

SEQ ID NO: 2250813 - RNA, 19 nt, Artificial Sequence
  Description of Artificial Sequence: Synthetic oligonucleotide
cucacacucugucucagcc

SEQ ID NO: 2250814 - RNA, 19 nt, Artificial Sequence
  Description of Artificial Sequence: Synthetic oligonucleotide
ugaugccagggccagggag

SEQ ID NO: 2250815 - RNA, 19 nt, Artificial Sequence
  Description of Artificial Sequence: Synthetic oligonucleotide
caagaagcaagaggaaggg

SEQ ID NO: 2250816 - RNA, 19 nt, Artificial Sequence
  Description of Artificial Sequence: Synthetic oligonucleotide
ucuuuugcuggcguugucc

SEQ ID NO: 2250817 - RNA, 19 nt, Artificial Sequence
  Description of Artificial Sequence: Synthetic oligonucleotide
ugagacacuagugacccga

SEQ ID NO: 2250818 - RNA, 19 nt, Artificial Sequence
  Description of Artificial Sequence: Synthetic oligonucleotide
cugccgaagauucugcagc

SEQ ID NO: 2250819 - RNA, 19 nt, Artificial Sequence
  Description of Artificial Sequence: Synthetic oligonucleotide
cuagcuucacccaguagug

SEQ ID NO: 2250820 - RNA, 19 nt, Artificial Sequence
  Description of Artificial Sequence: Synthetic oligonucleotide
ucuucaaucgcaaccccua

SEQ ID NO: 2250821 - RNA, 19 nt, Artificial Sequence
  Description of Artificial Sequence: Synthetic oligonucleotide
aagaagcaagaggaagggg

SEQ ID NO: 2250822 - RNA, 19 nt, Artificial Sequence
  Description of Artificial Sequence: Synthetic oligonucleotide
ugcuagacagaggaccugg

SEQ ID NO: 2250823 - RNA, 19 nt, Artificial Sequence
  Description of Artificial Sequence: Synthetic oligonucleotide
agcuuuagggaacuagaga

SEQ ID NO: 2250824 - RNA, 19 nt, Artificial Sequence
  Description of Artificial Sequence: Synthetic oligonucleotide
gauucuuuugcuggcguug

SEQ ID NO: 2250825 - RNA, 19 nt, Artificial Sequence
  Description of Artificial Sequence: Synthetic oligonucleotide
uagggaacuagagagaguu

SEQ ID NO: 2250826 - RNA, 19 nt, Artificial Sequence
  Description of Artificial Sequence: Synthetic oligonucleotide
agauaggugccagucuagc

SEQ ID NO: 2250827 - RNA, 19 nt, Artificial Sequence
  Description of Artificial Sequence: Synthetic oligonucleotide
uggcggcaggacaacaugg

SEQ ID NO: 2250828 - RNA, 19 nt, Artificial Sequence
  Description of Artificial Sequence: Synthetic oligonucleotide
acuagugacccgaagccgg

SEQ ID NO: 2250829 - RNA, 19 nt, Artificial Sequence
  Description of Artificial Sequence: Synthetic oligonucleotide
uuggaugaagucacuugga

SEQ ID NO: 2250830 - RNA, 19 nt, Artificial Sequence
  Description of Artificial Sequence: Synthetic oligonucleotide
gggaacuagagagaguugg

SEQ ID NO: 2250831 - RNA, 19 nt, Artificial Sequence
  Description of Artificial Sequence: Synthetic oligonucleotide
cagaauuuugggaaaccuc

SEQ ID NO: 2250832 - RNA, 19 nt, Artificial Sequence
  Description of Artificial Sequence: Synthetic oligonucleotide
ucugaggcguagcuguccc

SEQ ID NO: 2250833 - RNA, 19 nt, Artificial Sequence
  Description of Artificial Sequence: Synthetic oligonucleotide
gaagcuuuagggaacuaga

SEQ ID NO: 2250834 - RNA, 19 nt, Artificial Sequence
  Description of Artificial Sequence: Synthetic oligonucleotide
agagauaggugccagucua

SEQ ID NO: 2250835 - RNA, 19 nt, Artificial Sequence
  Description of Artificial Sequence: Synthetic oligonucleotide
ucccucuucagagauaggu

SEQ ID NO: 2250836 - RNA, 19 nt, Artificial Sequence
  Description of Artificial Sequence: Synthetic oligonucleotide
uuccgauaagugcuucugc

SEQ ID NO: 2250837 - RNA, 19 nt, Artificial Sequence
  Description of Artificial Sequence: Synthetic oligonucleotide
ugacccgaagccgggaucg

SEQ ID NO: 2250838 - RNA, 19 nt, Artificial Sequence
  Description of Artificial Sequence: Synthetic oligonucleotide
agacacaggcugcuguagg

SEQ ID NO: 2250839 - RNA, 19 nt, Artificial Sequence
  Description of Artificial Sequence: Synthetic oligonucleotide
auaggugccagucuagcuu

SEQ ID NO: 2250840 - RNA, 19 nt, Artificial Sequence
  Description of Artificial Sequence: Synthetic oligonucleotide
caugaugccagggccaggg

SEQ ID NO: 2250841 - RNA, 19 nt, Artificial Sequence
  Description of Artificial Sequence: Synthetic oligonucleotide
ucagagauaggugccaguc

SEQ ID NO: 2250842 - RNA, 19 nt, Artificial Sequence
  Description of Artificial Sequence: Synthetic oligonucleotide
acaacucuguucguucugg

SEQ ID NO: 2250843 - RNA, 19 nt, Artificial Sequence
  Description of Artificial Sequence: Synthetic oligonucleotide
gucgaagauucuuuugcug

SEQ ID NO: 2250844 - RNA, 19 nt, Artificial Sequence
  Description of Artificial Sequence: Synthetic oligonucleotide
augaagucacuuggaaacg

SEQ ID NO: 2250845 - RNA, 19 nt, Artificial Sequence
  Description of Artificial Sequence: Synthetic oligonucleotide
acagaauuuugggaaaccu

SEQ ID NO: 2250846 - RNA, 19 nt, Artificial Sequence
  Description of Artificial Sequence: Synthetic oligonucleotide
uccccuggagaaaagucac

SEQ ID NO: 2250847 - RNA, 19 nt, Artificial Sequence
  Description of Artificial Sequence: Synthetic oligonucleotide
gggugaaaggcucuccugg

SEQ ID NO: 2250848 - RNA, 19 nt, Artificial Sequence
  Description of Artificial Sequence: Synthetic oligonucleotide
cuucgcaugaugccagggc

SEQ ID NO: 2250849 - RNA, 19 nt, Artificial Sequence
  Description of Artificial Sequence: Synthetic oligonucleotide
aaccccuaggcccucugcu

SEQ ID NO: 2250850 - RNA, 19 nt, Artificial Sequence
  Description of Artificial Sequence: Synthetic oligonucleotide
ucuguagugccuccacuuc

SEQ ID NO: 2250851 - RNA, 19 nt, Artificial Sequence
  Description of Artificial Sequence: Synthetic oligonucleotide
aucagagcgcugcaggcug

SEQ ID NO: 2250852 - RNA, 19 nt, Artificial Sequence
  Description of Artificial Sequence: Synthetic oligonucleotide
uguccccuggagaaaaguc

SEQ ID NO: 2250853 - RNA, 19 nt, Artificial Sequence
  Description of Artificial Sequence: Synthetic oligonucleotide
ucguucuggucugagacac

SEQ ID NO: 2250854 - RNA, 19 nt, Artificial Sequence
  Description of Artificial Sequence: Synthetic oligonucleotide
ugaagggucuguagugccu

SEQ ID NO: 2250855 - RNA, 19 nt, Artificial Sequence
  Description of Artificial Sequence: Synthetic oligonucleotide
uggggcuacgauaccaggu

SEQ ID NO: 2250856 - RNA, 19 nt, Artificial Sequence
  Description of Artificial Sequence: Synthetic oligonucleotide
aagugcuucugccgaagau

SEQ ID NO: 2250857 - RNA, 19 nt, Artificial Sequence
  Description of Artificial Sequence: Synthetic oligonucleotide
aggggugugcuagacagag

SEQ ID NO: 2250858 - RNA, 19 nt, Artificial Sequence
  Description of Artificial Sequence: Synthetic oligonucleotide
uuuuggggugaaaggcucu

SEQ ID NO: 2250859 - RNA, 19 nt, Artificial Sequence
  Description of Artificial Sequence: Synthetic oligonucleotide
uccgucgaagauucuuuug

SEQ ID NO: 2250860 - RNA, 19 nt, Artificial Sequence
  Description of Artificial Sequence: Synthetic oligonucleotide
uggcguuguccucauuuug

SEQ ID NO: 2250861 - RNA, 19 nt, Artificial Sequence
  Description of Artificial Sequence: Synthetic oligonucleotide
gaccuggagggucuguagc

SEQ ID NO: 2250862 - RNA, 19 nt, Artificial Sequence
  Description of Artificial Sequence: Synthetic oligonucleotide
gaaaggcucuccuggccgc

SEQ ID NO: 2250863 - RNA, 19 nt, Artificial Sequence
  Description of Artificial Sequence: Synthetic oligonucleotide
gaauuuugggaaaccucac

SEQ ID NO: 2250864 - RNA, 19 nt, Artificial Sequence
  Description of Artificial Sequence: Synthetic oligonucleotide
uucguucuggucugagaca

SEQ ID NO: 2250865 - RNA, 19 nt, Artificial Sequence
  Description of Artificial Sequence: Synthetic oligonucleotide
ugacucaagaguggggaac

SEQ ID NO: 2250866 - RNA, 19 nt, Artificial Sequence
  Description of Artificial Sequence: Synthetic oligonucleotide
agugccuccacuuccgaua

SEQ ID NO: 2250867 - RNA, 19 nt, Artificial Sequence
  Description of Artificial Sequence: Synthetic oligonucleotide
cuggucugagacacuagug

SEQ ID NO: 2250868 - RNA, 19 nt, Artificial Sequence
  Description of Artificial Sequence: Synthetic oligonucleotide
cuagugacccgaagccggg

SEQ ID NO: 2250869 - RNA, 19 nt, Artificial Sequence
  Description of Artificial Sequence: Synthetic oligonucleotide
caagaguggggaacuuccc

SEQ ID NO: 2250870 - RNA, 19 nt, Artificial Sequence
  Description of Artificial Sequence: Synthetic oligonucleotide
ucuccgucgaagauucuuu

SEQ ID NO: 2250871 - RNA, 19 nt, Artificial Sequence
  Description of Artificial Sequence: Synthetic oligonucleotide
ugggcugggaugacucaag

SEQ ID NO: 2250872 - RNA, 19 nt, Artificial Sequence
  Description of Artificial Sequence: Synthetic oligonucleotide
uggaaacgcccaacaagcu

SEQ ID NO: 2250873 - RNA, 19 nt, Artificial Sequence
  Description of Artificial Sequence: Synthetic oligonucleotide
ggaagcuuuagggaacuag

SEQ ID NO: 2250874 - RNA, 19 nt, Artificial Sequence
  Description of Artificial Sequence: Synthetic oligonucleotide
gggugugcuagacagagga

SEQ ID NO: 2250875 - RNA, 19 nt, Artificial Sequence
  Description of Artificial Sequence: Synthetic oligonucleotide
cuucaaucgcaaccccuag

SEQ ID NO: 2250876 - RNA, 19 nt, Artificial Sequence
  Description of Artificial Sequence: Synthetic oligonucleotide
auaagugcuucugccgaag

SEQ ID NO: 2250877 - RNA, 19 nt, Artificial Sequence
  Description of Artificial Sequence: Synthetic oligonucleotide
gguuggaagcuuuagggaa

SEQ ID NO: 2250878 - RNA, 19 nt, Artificial Sequence
  Description of Artificial Sequence: Synthetic oligonucleotide
cagccuuuuggggugaaag

SEQ ID NO: 2250879 - RNA, 19 nt, Artificial Sequence
  Description of Artificial Sequence: Synthetic oligonucleotide
ucgcaugaugccagggcca

SEQ ID NO: 2250880 - RNA, 19 nt, Artificial Sequence
  Description of Artificial Sequence: Synthetic oligonucleotide
gugaaaggcucuccuggcc

SEQ ID NO: 2250881 - RNA, 19 nt, Artificial Sequence
  Description of Artificial Sequence: Synthetic oligonucleotide
acuuggaaacgcccaacaa

SEQ ID NO: 2250882 - RNA, 19 nt, Artificial Sequence
  Description of Artificial Sequence: Synthetic oligonucleotide
ggaaacgcccaacaagcug

SEQ ID NO: 2250883 - RNA, 19 nt, Artificial Sequence
  Description of Artificial Sequence: Synthetic oligonucleotide
augcggacuccgucgugcc

SEQ ID NO: 2250884 - RNA, 19 nt, Artificial Sequence
  Description of Artificial Sequence: Synthetic oligonucleotide
uucugccgaagauucugca

SEQ ID NO: 2250885 - RNA, 19 nt, Artificial Sequence
  Description of Artificial Sequence: Synthetic oligonucleotide
ucucugaggucaggggagg

SEQ ID NO: 2250886 - RNA, 19 nt, Artificial Sequence
  Description of Artificial Sequence: Synthetic oligonucleotide
gaaaccucacacucugucu

SEQ ID NO: 2250887 - RNA, 19 nt, Artificial Sequence
  Description of Artificial Sequence: Synthetic oligonucleotide
ggccgcaagaagcaagagg

SEQ ID NO: 2250888 - RNA, 19 nt, Artificial Sequence
  Description of Artificial Sequence: Synthetic oligonucleotide
uccgucgugccccuccucu

SEQ ID NO: 2250889 - RNA, 19 nt, Artificial Sequence
  Description of Artificial Sequence: Synthetic oligonucleotide
cuuccgauaagugcuucug

SEQ ID NO: 2250890 - RNA, 19 nt, Artificial Sequence
  Description of Artificial Sequence: Synthetic oligonucleotide
gccgcaagaagcaagagga

SEQ ID NO: 2250891 - RNA, 19 nt, Artificial Sequence
  Description of Artificial Sequence: Synthetic oligonucleotide
cacuagugacccgaagccg

SEQ ID NO: 2250892 - RNA, 19 nt, Artificial Sequence
  Description of Artificial Sequence: Synthetic oligonucleotide
ugcaucugaggcguagcug

SEQ ID NO: 2250893 - RNA, 19 nt, Artificial Sequence
  Description of Artificial Sequence: Synthetic oligonucleotide
agacacuagugacccgaag

SEQ ID NO: 2250894 - RNA, 19 nt, Artificial Sequence
  Description of Artificial Sequence: Synthetic oligonucleotide
ugccgaagauucugcagcu

SEQ ID NO: 2250895 - RNA, 19 nt, Artificial Sequence
  Description of Artificial Sequence: Synthetic oligonucleotide
gucucagccuuuuggggug

SEQ ID NO: 2250896 - RNA, 19 nt, Artificial Sequence
  Description of Artificial Sequence: Synthetic oligonucleotide
gaagcugcccuuggacagg

SEQ ID NO: 2250897 - RNA, 19 nt, Artificial Sequence
  Description of Artificial Sequence: Synthetic oligonucleotide
gaugcugcaucugaggcgu

SEQ ID NO: 2250898 - RNA, 19 nt, Artificial Sequence
  Description of Artificial Sequence: Synthetic oligonucleotide
caaucgcaaccccuaggcc

SEQ ID NO: 2250899 - RNA, 19 nt, Artificial Sequence
  Description of Artificial Sequence: Synthetic oligonucleotide
aagcaagaggaaggggugu

SEQ ID NO: 2250900 - RNA, 19 nt, Artificial Sequence
  Description of Artificial Sequence: Synthetic oligonucleotide
cucuguucguucuggucug

SEQ ID NO: 2250901 - RNA, 19 nt, Artificial Sequence
  Description of Artificial Sequence: Synthetic oligonucleotide
gauaagugcuucugccgaa

SEQ ID NO: 2250902 - RNA, 19 nt, Artificial Sequence
  Description of Artificial Sequence: Synthetic oligonucleotide
ugaggcguagcuguccccu

SEQ ID NO: 2250903 - RNA, 19 nt, Artificial Sequence
  Description of Artificial Sequence: Synthetic oligonucleotide
ucacugaggcccgaugcug

SEQ ID NO: 2250904 - RNA, 19 nt, Artificial Sequence
  Description of Artificial Sequence: Synthetic oligonucleotide
ggaacuagagagaguuggg

SEQ ID NO: 2250905 - RNA, 19 nt, Artificial Sequence
  Description of Artificial Sequence: Synthetic oligonucleotide
ccgucgaagauucuuuugc

SEQ ID NO: 2250906 - RNA, 19 nt, Artificial Sequence
  Description of Artificial Sequence: Synthetic oligonucleotide
uuggaagcuuuagggaacu

SEQ ID NO: 2250907 - RNA, 19 nt, Artificial Sequence
  Description of Artificial Sequence: Synthetic oligonucleotide
uggagggucuguagcuggc

SEQ ID NO: 2250908 - RNA, 19 nt, Artificial Sequence
  Description of Artificial Sequence: Synthetic oligonucleotide
gggaugacucaagaguggg

SEQ ID NO: 2250909 - RNA, 19 nt, Artificial Sequence
  Description of Artificial Sequence: Synthetic oligonucleotide
aguggcugaacagaauuuu

SEQ ID NO: 2250910 - RNA, 19 nt, Artificial Sequence
  Description of Artificial Sequence: Synthetic oligonucleotide
aggaaggggugugcuagac

SEQ ID NO: 2250911 - RNA, 19 nt, Artificial Sequence
  Description of Artificial Sequence: Synthetic oligonucleotide
ggugaaaggcucuccuggc

SEQ ID NO: 2250912 - RNA, 19 nt, Artificial Sequence
  Description of Artificial Sequence: Synthetic oligonucleotide
gaugccagggccagggaga

SEQ ID NO: 2250913 - RNA, 19 nt, Artificial Sequence
  Description of Artificial Sequence: Synthetic oligonucleotide
cccaaugcggacuccgucg

SEQ ID NO: 2250914 - RNA, 19 nt, Artificial Sequence
  Description of Artificial Sequence: Synthetic oligonucleotide
ccgauaagugcuucugccg

SEQ ID NO: 2250915 - RNA, 19 nt, Artificial Sequence
  Description of Artificial Sequence: Synthetic oligonucleotide
ugaggcccgaugcugcauc

SEQ ID NO: 2250916 - RNA, 19 nt, Artificial Sequence
  Description of Artificial Sequence: Synthetic oligonucleotide
aggcguagcuguccccugg

SEQ ID NO: 2250917 - RNA, 19 nt, Artificial Sequence
  Description of Artificial Sequence: Synthetic oligonucleotide
cuggggcuacgauaccagg

SEQ ID NO: 2250918 - RNA, 19 nt, Artificial Sequence
  Description of Artificial Sequence: Synthetic oligonucleotide
ggggcuacgauaccaggug

SEQ ID NO: 2250919 - RNA, 19 nt, Artificial Sequence
  Description of Artificial Sequence: Synthetic oligonucleotide
gacuccgucgugccccucc

SEQ ID NO: 2250920 - RNA, 19 nt, Artificial Sequence
  Description of Artificial Sequence: Synthetic oligonucleotide
uggacaggcggcgcuggcg

SEQ ID NO: 2250921 - RNA, 19 nt, Artificial Sequence
  Description of Artificial Sequence: Synthetic oligonucleotide
gcugggaugacucaagagu

SEQ ID NO: 2250922 - RNA, 19 nt, Artificial Sequence
  Description of Artificial Sequence: Synthetic oligonucleotide
cugcccuuggacaggcggc

SEQ ID NO: 2250923 - RNA, 19 nt, Artificial Sequence
  Description of Artificial Sequence: Synthetic oligonucleotide
auucuuuugcuggcguugu

SEQ ID NO: 2250924 - RNA, 19 nt, Artificial Sequence
  Description of Artificial Sequence: Synthetic oligonucleotide
gauaggugccagucuagcu

SEQ ID NO: 2250925 - RNA, 19 nt, Artificial Sequence
  Description of Artificial Sequence: Synthetic oligonucleotide
caagccggcuguacaaguc

SEQ ID NO: 2250926 - RNA, 19 nt, Artificial Sequence
  Description of Artificial Sequence: Synthetic oligonucleotide
gaaguggggaagcugcccu

SEQ ID NO: 2250927 - RNA, 19 nt, Artificial Sequence
  Description of Artificial Sequence: Synthetic oligonucleotide
agauucuuuugcuggcguu

SEQ ID NO: 2250928 - RNA, 19 nt, Artificial Sequence
  Description of Artificial Sequence: Synthetic oligonucleotide
ucccaagccggcuguacaa

SEQ ID NO: 2250929 - RNA, 19 nt, Artificial Sequence
  Description of Artificial Sequence: Synthetic oligonucleotide
guaguggcugaacagaauu

SEQ ID NO: 2250930 - RNA, 19 nt, Artificial Sequence
  Description of Artificial Sequence: Synthetic oligonucleotide
gaagggucuguagugccuc

SEQ ID NO: 2250931 - RNA, 19 nt, Artificial Sequence
  Description of Artificial Sequence: Synthetic oligonucleotide
ugcugcaucugaggcguag

SEQ ID NO: 2250932 - RNA, 19 nt, Artificial Sequence
  Description of Artificial Sequence: Synthetic oligonucleotide
ggaugaagucacuuggaaa

SEQ ID NO: 2250933 - RNA, 19 nt, Artificial Sequence
  Description of Artificial Sequence: Synthetic oligonucleotide
augacucaagaguggggaa

SEQ ID NO: 2250934 - RNA, 19 nt, Artificial Sequence
  Description of Artificial Sequence: Synthetic oligonucleotide
ucacuuggaaacgcccaac

SEQ ID NO: 2250935 - RNA, 19 nt, Artificial Sequence
  Description of Artificial Sequence: Synthetic oligonucleotide
uuuggggugaaaggcucuc

SEQ ID NO: 2250936 - RNA, 19 nt, Artificial Sequence
  Description of Artificial Sequence: Synthetic oligonucleotide
cugauugcagggguggcuc

SEQ ID NO: 2250937 - RNA, 19 nt, Artificial Sequence
  Description of Artificial Sequence: Synthetic oligonucleotide
gugcuucugccgaagauuc

SEQ ID NO: 2250938 - RNA, 19 nt, Artificial Sequence
  Description of Artificial Sequence: Synthetic oligonucleotide
ggacaggcggcgcuggcgg

SEQ ID NO: 2250939 - RNA, 19 nt, Artificial Sequence
  Description of Artificial Sequence: Synthetic oligonucleotide
aacauggcagcuggggcua

SEQ ID NO: 2250940 - RNA, 19 nt, Artificial Sequence
  Description of Artificial Sequence: Synthetic oligonucleotide
cuggcggcaggacaacaug

SEQ ID NO: 2250941 - RNA, 19 nt, Artificial Sequence
  Description of Artificial Sequence: Synthetic oligonucleotide
ugcugcgcggucacucucu

SEQ ID NO: 2250942 - RNA, 19 nt, Artificial Sequence
  Description of Artificial Sequence: Synthetic oligonucleotide
ugauugcagggguggcucu

SEQ ID NO: 2250943 - RNA, 19 nt, Artificial Sequence
  Description of Artificial Sequence: Synthetic oligonucleotide
gcuacgauaccaggugggg

SEQ ID NO: 2250944 - RNA, 19 nt, Artificial Sequence
  Description of Artificial Sequence: Synthetic oligonucleotide
cucaagaguggggaacuuc

SEQ ID NO: 2250945 - RNA, 19 nt, Artificial Sequence
  Description of Artificial Sequence: Synthetic oligonucleotide
uaggcccucugcugcgcgg

SEQ ID NO: 2250946 - RNA, 19 nt, Artificial Sequence
  Description of Artificial Sequence: Synthetic oligonucleotide
gggcuacgauaccaggugg

SEQ ID NO: 2250947 - RNA, 19 nt, Artificial Sequence
  Description of Artificial Sequence: Synthetic oligonucleotide
agugacccgaagccgggau

SEQ ID NO: 2250948 - RNA, 19 nt, Artificial Sequence
  Description of Artificial Sequence: Synthetic oligonucleotide
accccuaggcccucugcug

SEQ ID NO: 2250949 - RNA, 19 nt, Artificial Sequence
  Description of Artificial Sequence: Synthetic oligonucleotide
gcagcuggggcuacgauac

SEQ ID NO: 2250950 - RNA, 19 nt, Artificial Sequence
  Description of Artificial Sequence: Synthetic oligonucleotide
aggcuguugcgccgggaag

SEQ ID NO: 2250951 - RNA, 19 nt, Artificial Sequence
  Description of Artificial Sequence: Synthetic oligonucleotide
ggcuacgauaccagguggg

SEQ ID NO: 2250952 - RNA, 19 nt, Artificial Sequence
  Description of Artificial Sequence: Synthetic oligonucleotide
aacgcccaacaagcugggg

SEQ ID NO: 2250953 - RNA, 19 nt, Artificial Sequence
  Description of Artificial Sequence: Synthetic oligonucleotide
ugguuccuuggaugaaguc

SEQ ID NO: 2250954 - RNA, 19 nt, Artificial Sequence
  Description of Artificial Sequence: Synthetic oligonucleotide
ccgaugcugcaucugaggc

SEQ ID NO: 2250955 - RNA, 19 nt, Artificial Sequence
  Description of Artificial Sequence: Synthetic oligonucleotide
cugagacacuagugacccg

SEQ ID NO: 2250956 - RNA, 19 nt, Artificial Sequence
  Description of Artificial Sequence: Synthetic oligonucleotide
cuucacccaguaguggcug

SEQ ID NO: 2250957 - RNA, 19 nt, Artificial Sequence
  Description of Artificial Sequence: Synthetic oligonucleotide
ggaugacucaagagugggg

SEQ ID NO: 2250958 - RNA, 19 nt, Artificial Sequence
  Description of Artificial Sequence: Synthetic oligonucleotide
caguaguggcugaacagaa

SEQ ID NO: 2250959 - RNA, 19 nt, Artificial Sequence
  Description of Artificial Sequence: Synthetic oligonucleotide
cucccaugucacugaggcc

SEQ ID NO: 2250960 - RNA, 19 nt, Artificial Sequence
  Description of Artificial Sequence: Synthetic oligonucleotide
acugaggcccgaugcugca

SEQ ID NO: 2250961 - RNA, 19 nt, Artificial Sequence
  Description of Artificial Sequence: Synthetic oligonucleotide
aucgcaaccccuaggcccu

SEQ ID NO: 2250962 - RNA, 19 nt, Artificial Sequence
  Description of Artificial Sequence: Synthetic oligonucleotide
agcuggggcuacgauacca

SEQ ID NO: 2250963 - RNA, 19 nt, Artificial Sequence
  Description of Artificial Sequence: Synthetic oligonucleotide
acugggcugggaugacuca

SEQ ID NO: 2250964 - RNA, 19 nt, Artificial Sequence
  Description of Artificial Sequence: Synthetic oligonucleotide
aaaggcucuccuggccgca

SEQ ID NO: 2250965 - RNA, 19 nt, Artificial Sequence
  Description of Artificial Sequence: Synthetic oligonucleotide
ugcgccgggaaguggggaa

SEQ ID NO: 2250966 - RNA, 19 nt, Artificial Sequence
  Description of Artificial Sequence: Synthetic oligonucleotide
gcugguuccuuggaugaag

SEQ ID NO: 2250967 - RNA, 19 nt, Artificial Sequence
  Description of Artificial Sequence: Synthetic oligonucleotide
cgggaaguggggaagcugc

SEQ ID NO: 2250968 - RNA, 19 nt, Artificial Sequence
  Description of Artificial Sequence: Synthetic oligonucleotide
gcaucugaggcguagcugu

SEQ ID NO: 2250969 - RNA, 19 nt, Artificial Sequence
  Description of Artificial Sequence: Synthetic oligonucleotide
caaguccucaauuucuuuu

SEQ ID NO: 2250970 - RNA, 19 nt, Artificial Sequence
  Description of Artificial Sequence: Synthetic oligonucleotide
uagugccuccacuuccgau

SEQ ID NO: 2250971 - RNA, 19 nt, Artificial Sequence
  Description of Artificial Sequence: Synthetic oligonucleotide
ggggaagcugcccuuggac

SEQ ID NO: 2250972 - RNA, 19 nt, Artificial Sequence
  Description of Artificial Sequence: Synthetic oligonucleotide
cccgaugcugcaucugagg

SEQ ID NO: 2250973 - RNA, 19 nt, Artificial Sequence
  Description of Artificial Sequence: Synthetic oligonucleotide
gacucaagaguggggaacu

SEQ ID NO: 2250974 - RNA, 19 nt, Artificial Sequence
  Description of Artificial Sequence: Synthetic oligonucleotide
caaccccuaggcccucugc

SEQ ID NO: 2250975 - RNA, 19 nt, Artificial Sequence
  Description of Artificial Sequence: Synthetic oligonucleotide
gugccccuccucuucaauc

SEQ ID NO: 2250976 - RNA, 19 nt, Artificial Sequence
  Description of Artificial Sequence: Synthetic oligonucleotide
gaggcguagcuguccccug

SEQ ID NO: 2250977 - RNA, 19 nt, Artificial Sequence
  Description of Artificial Sequence: Synthetic oligonucleotide
cuguacaaguccucaauuu

SEQ ID NO: 2250978 - RNA, 19 nt, Artificial Sequence
  Description of Artificial Sequence: Synthetic oligonucleotide
cuguagcuggcacucuaca

SEQ ID NO: 2250979 - RNA, 19 nt, Artificial Sequence
  Description of Artificial Sequence: Synthetic oligonucleotide
cgaugcugcaucugaggcg

SEQ ID NO: 2250980 - RNA, 19 nt, Artificial Sequence
  Description of Artificial Sequence: Synthetic oligonucleotide
ggggugaaaggcucuccug

SEQ ID NO: 2250981 - RNA, 19 nt, Artificial Sequence
  Description of Artificial Sequence: Synthetic oligonucleotide
gaggaaggggugugcuaga

SEQ ID NO: 2250982 - RNA, 19 nt, Artificial Sequence
  Description of Artificial Sequence: Synthetic oligonucleotide
caucugaggcguagcuguc

SEQ ID NO: 2250983 - RNA, 19 nt, Artificial Sequence
  Description of Artificial Sequence: Synthetic oligonucleotide
aguaguggcugaacagaau

SEQ ID NO: 2250984 - RNA, 19 nt, Artificial Sequence
  Description of Artificial Sequence: Synthetic oligonucleotide
cugaggcguagcugucccc

SEQ ID NO: 2250985 - RNA, 19 nt, Artificial Sequence
  Description of Artificial Sequence: Synthetic oligonucleotide
cuccuggccgcaagaagca

SEQ ID NO: 2250986 - RNA, 19 nt, Artificial Sequence
  Description of Artificial Sequence: Synthetic oligonucleotide
caacaagcuggggcuuucc

SEQ ID NO: 2250987 - RNA, 19 nt, Artificial Sequence
  Description of Artificial Sequence: Synthetic oligonucleotide
cuacaacucuguucguucu

SEQ ID NO: 2250988 - RNA, 19 nt, Artificial Sequence
  Description of Artificial Sequence: Synthetic oligonucleotide
guugcgccgggaagugggg

SEQ ID NO: 2250989 - RNA, 19 nt, Artificial Sequence
  Description of Artificial Sequence: Synthetic oligonucleotide
cccgaagccgggaucgggg

SEQ ID NO: 2250990 - RNA, 19 nt, Artificial Sequence
  Description of Artificial Sequence: Synthetic oligonucleotide
aaggggugugcuagacaga

SEQ ID NO: 2250991 - RNA, 19 nt, Artificial Sequence
  Description of Artificial Sequence: Synthetic oligonucleotide
cucugcugcgcggucacuc

SEQ ID NO: 2250992 - RNA, 19 nt, Artificial Sequence
  Description of Artificial Sequence: Synthetic oligonucleotide
agggaacuagagagaguug

SEQ ID NO: 2250993 - RNA, 19 nt, Artificial Sequence
  Description of Artificial Sequence: Synthetic oligonucleotide
agcucagcccagaacuccu

SEQ ID NO: 2250994 - RNA, 19 nt, Artificial Sequence
  Description of Artificial Sequence: Synthetic oligonucleotide
gaagccgggaucggggucu

SEQ ID NO: 2250995 - RNA, 19 nt, Artificial Sequence
  Description of Artificial Sequence: Synthetic oligonucleotide
gaucagagcgcugcaggcu

SEQ ID NO: 2250996 - RNA, 19 nt, Artificial Sequence
  Description of Artificial Sequence: Synthetic oligonucleotide
ggugcugauugcaggggug

SEQ ID NO: 2250997 - RNA, 19 nt, Artificial Sequence
  Description of Artificial Sequence: Synthetic oligonucleotide
ccgaagauucugcagcuca

SEQ ID NO: 2250998 - RNA, 19 nt, Artificial Sequence
  Description of Artificial Sequence: Synthetic oligonucleotide
ugccuccacuuccgauaag

SEQ ID NO: 2250999 - RNA, 19 nt, Artificial Sequence
  Description of Artificial Sequence: Synthetic oligonucleotide
gggucuccgucgaagauuc

SEQ ID NO: 2251000 - RNA, 19 nt, Artificial Sequence
  Description of Artificial Sequence: Synthetic oligonucleotide
acuccgucgugccccuccu

SEQ ID NO: 2251001 - RNA, 19 nt, Artificial Sequence
  Description of Artificial Sequence: Synthetic oligonucleotide
gugacccgaagccgggauc

SEQ ID NO: 2251002 - RNA, 19 nt, Artificial Sequence
  Description of Artificial Sequence: Synthetic oligonucleotide
gucacugaggcccgaugcu

SEQ ID NO: 2251003 - RNA, 19 nt, Artificial Sequence
  Description of Artificial Sequence: Synthetic oligonucleotide
gugccuccacuuccgauaa

SEQ ID NO: 2251004 - RNA, 19 nt, Artificial Sequence
  Description of Artificial Sequence: Synthetic oligonucleotide
cugcaggcuguugcgccgg

SEQ ID NO: 2251005 - RNA, 19 nt, Artificial Sequence
  Description of Artificial Sequence: Synthetic oligonucleotide
gcuggggcuacgauaccag

SEQ ID NO: 2251006 - RNA, 19 nt, Artificial Sequence
  Description of Artificial Sequence: Synthetic oligonucleotide
ggaaggggugugcuagaca

SEQ ID NO: 2251007 - RNA, 19 nt, Artificial Sequence
  Description of Artificial Sequence: Synthetic oligonucleotide
ggaauaguucauccacacu

SEQ ID NO: 2251008 - RNA, 19 nt, Artificial Sequence
  Description of Artificial Sequence: Synthetic oligonucleotide
gcguuguccucauuuuguc

SEQ ID NO: 2251009 - RNA, 19 nt, Artificial Sequence
  Description of Artificial Sequence: Synthetic oligonucleotide
guagugccuccacuuccga

SEQ ID NO: 2251010 - RNA, 19 nt, Artificial Sequence
  Description of Artificial Sequence: Synthetic oligonucleotide
caaugcggacuccgucgug

SEQ ID NO: 2251011 - RNA, 19 nt, Artificial Sequence
  Description of Artificial Sequence: Synthetic oligonucleotide
uagugacccgaagccggga

SEQ ID NO: 2251012 - RNA, 19 nt, Artificial Sequence
  Description of Artificial Sequence: Synthetic oligonucleotide
gacccgaagccgggaucgg

SEQ ID NO: 2251013 - RNA, 19 nt, Artificial Sequence
  Description of Artificial Sequence: Synthetic oligonucleotide
gugcuagacagaggaccug

SEQ ID NO: 2251014 - RNA, 19 nt, Artificial Sequence
  Description of Artificial Sequence: Synthetic oligonucleotide
ugcugguuccuuggaugaa

SEQ ID NO: 2251015 - RNA, 19 nt, Artificial Sequence
  Description of Artificial Sequence: Synthetic oligonucleotide
cuguugcgccgggaagugg

SEQ ID NO: 2251016 - RNA, 19 nt, Artificial Sequence
  Description of Artificial Sequence: Synthetic oligonucleotide
ucagccuuuuggggugaaa

SEQ ID NO: 2251017 - RNA, 19 nt, Artificial Sequence
  Description of Artificial Sequence: Synthetic oligonucleotide
ccucuucaaucgcaacccc

SEQ ID NO: 2251018 - RNA, 19 nt, Artificial Sequence
  Description of Artificial Sequence: Synthetic oligonucleotide
auggcagcuggggcuacga

SEQ ID NO: 2251019 - RNA, 19 nt, Artificial Sequence
  Description of Artificial Sequence: Synthetic oligonucleotide
agggucuguagugccucca

SEQ ID NO: 2251020 - RNA, 19 nt, Artificial Sequence
  Description of Artificial Sequence: Synthetic oligonucleotide
gucgugccccuccucuuca

SEQ ID NO: 2251021 - RNA, 19 nt, Artificial Sequence
  Description of Artificial Sequence: Synthetic oligonucleotide
cgauaagugcuucugccga

SEQ ID NO: 2251022 - RNA, 19 nt, Artificial Sequence
  Description of Artificial Sequence: Synthetic oligonucleotide
acauggcagcuggggcuac

SEQ ID NO: 2251023 - RNA, 19 nt, Artificial Sequence
  Description of Artificial Sequence: Synthetic oligonucleotide
uggcagcuggggcuacgau

SEQ ID NO: 2251024 - RNA, 19 nt, Artificial Sequence
  Description of Artificial Sequence: Synthetic oligonucleotide
caggcuguugcgccgggaa

SEQ ID NO: 2251025 - RNA, 19 nt, Artificial Sequence
  Description of Artificial Sequence: Synthetic oligonucleotide
gccagucuagcuucaccca

SEQ ID NO: 2251026 - RNA, 19 nt, Artificial Sequence
  Description of Artificial Sequence: Synthetic oligonucleotide
uugcgccgggaagugggga

SEQ ID NO: 2251027 - RNA, 19 nt, Artificial Sequence
  Description of Artificial Sequence: Synthetic oligonucleotide
cugcgcggucacucucugc

SEQ ID NO: 2251028 - RNA, 19 nt, Artificial Sequence
  Description of Artificial Sequence: Synthetic oligonucleotide
ggcccgaugcugcaucuga

SEQ ID NO: 2251029 - RNA, 19 nt, Artificial Sequence
  Description of Artificial Sequence: Synthetic oligonucleotide
cagagauaggugccagucu

SEQ ID NO: 2251030 - RNA, 19 nt, Artificial Sequence
  Description of Artificial Sequence: Synthetic oligonucleotide
cuuucccucuucagagaua

SEQ ID NO: 2251031 - RNA, 19 nt, Artificial Sequence
  Description of Artificial Sequence: Synthetic oligonucleotide
agccggcuguacaaguccu

SEQ ID NO: 2251032 - RNA, 19 nt, Artificial Sequence
  Description of Artificial Sequence: Synthetic oligonucleotide
cacuuccgauaagugcuuc

SEQ ID NO: 2251033 - RNA, 19 nt, Artificial Sequence
  Description of Artificial Sequence: Synthetic oligonucleotide
gccgggaucggggucuccg

SEQ ID NO: 2251034 - RNA, 19 nt, Artificial Sequence
  Description of Artificial Sequence: Synthetic oligonucleotide
gcugcaucugaggcguagc

SEQ ID NO: 2251035 - RNA, 19 nt, Artificial Sequence
  Description of Artificial Sequence: Synthetic oligonucleotide
ggugugcuagacagaggac

SEQ ID NO: 2251036 - RNA, 19 nt, Artificial Sequence
  Description of Artificial Sequence: Synthetic oligonucleotide
gcggcaggacaacauggca

SEQ ID NO: 2251037 - RNA, 19 nt, Artificial Sequence
  Description of Artificial Sequence: Synthetic oligonucleotide
cccuucucccaugucacug

SEQ ID NO: 2251038 - RNA, 19 nt, Artificial Sequence
  Description of Artificial Sequence: Synthetic oligonucleotide
agagcgcugcaggcuguug

SEQ ID NO: 2251039 - RNA, 19 nt, Artificial Sequence
  Description of Artificial Sequence: Synthetic oligonucleotide
ccuucgcaugaugccaggg

SEQ ID NO: 2251040 - RNA, 19 nt, Artificial Sequence
  Description of Artificial Sequence: Synthetic oligonucleotide
gcuggcguuguccucauuu

SEQ ID NO: 2251041 - RNA, 19 nt, Artificial Sequence
  Description of Artificial Sequence: Synthetic oligonucleotide
cugcugcgcggucacucuc

SEQ ID NO: 2251042 - RNA, 19 nt, Artificial Sequence
  Description of Artificial Sequence: Synthetic oligonucleotide
uggaagcuuuagggaacua

SEQ ID NO: 2251043 - RNA, 19 nt, Artificial Sequence
  Description of Artificial Sequence: Synthetic oligonucleotide
ccuuuuggggugaaaggcu

SEQ ID NO: 2251044 - RNA, 19 nt, Artificial Sequence
  Description of Artificial Sequence: Synthetic oligonucleotide
ggaucggggucuccgucga

SEQ ID NO: 2251045 - RNA, 19 nt, Artificial Sequence
  Description of Artificial Sequence: Synthetic oligonucleotide
uccuggccgcaagaagcaa

SEQ ID NO: 2251046 - RNA, 19 nt, Artificial Sequence
  Description of Artificial Sequence: Synthetic oligonucleotide
ucgugccccuccucuucaa

SEQ ID NO: 2251047 - RNA, 19 nt, Artificial Sequence
  Description of Artificial Sequence: Synthetic oligonucleotide
acucaagaguggggaacuu

SEQ ID NO: 2251048 - RNA, 19 nt, Artificial Sequence
  Description of Artificial Sequence: Synthetic oligonucleotide
ggcguuguccucauuuugu

SEQ ID NO: 2251049 - RNA, 19 nt, Artificial Sequence
  Description of Artificial Sequence: Synthetic oligonucleotide
gcuguugcgccgggaagug

SEQ ID NO: 2251050 - RNA, 19 nt, Artificial Sequence
  Description of Artificial Sequence: Synthetic oligonucleotide
gggagaucagagcgcugca

SEQ ID NO: 2251051 - RNA, 19 nt, Artificial Sequence
  Description of Artificial Sequence: Synthetic oligonucleotide
cugaggucaggggaggggu

SEQ ID NO: 2251052 - RNA, 19 nt, Artificial Sequence
  Description of Artificial Sequence: Synthetic oligonucleotide
ggggugugcuagacagagg

SEQ ID NO: 2251053 - RNA, 19 nt, Artificial Sequence
  Description of Artificial Sequence: Synthetic oligonucleotide
gaggcccgaugcugcaucu

SEQ ID NO: 2251054 - RNA, 19 nt, Artificial Sequence
  Description of Artificial Sequence: Synthetic oligonucleotide
gcguagcuguccccuggag

SEQ ID NO: 2251055 - RNA, 19 nt, Artificial Sequence
  Description of Artificial Sequence: Synthetic oligonucleotide
cugggcugggaugacucaa

SEQ ID NO: 2251056 - RNA, 19 nt, Artificial Sequence
  Description of Artificial Sequence: Synthetic oligonucleotide
caacucuguucguucuggu

SEQ ID NO: 2251057 - RNA, 19 nt, Artificial Sequence
  Description of Artificial Sequence: Synthetic oligonucleotide
cacacugggcugggaugac

SEQ ID NO: 2251058 - RNA, 19 nt, Artificial Sequence
  Description of Artificial Sequence: Synthetic oligonucleotide
ggucuguagugccuccacu

SEQ ID NO: 2251059 - RNA, 19 nt, Artificial Sequence
  Description of Artificial Sequence: Synthetic oligonucleotide
gccccuccucuucaaucgc

SEQ ID NO: 2251060 - RNA, 19 nt, Artificial Sequence
  Description of Artificial Sequence: Synthetic oligonucleotide
aggcccgaugcugcaucug

SEQ ID NO: 2251061 - RNA, 19 nt, Artificial Sequence
  Description of Artificial Sequence: Synthetic oligonucleotide
gucuccgucgaagauucuu

SEQ ID NO: 2251062 - RNA, 19 nt, Artificial Sequence
  Description of Artificial Sequence: Synthetic oligonucleotide
gcugcgcggucacucucug

SEQ ID NO: 2251063 - RNA, 19 nt, Artificial Sequence
  Description of Artificial Sequence: Synthetic oligonucleotide
cuggcguuguccucauuuu

SEQ ID NO: 2251064 - RNA, 19 nt, Artificial Sequence
  Description of Artificial Sequence: Synthetic oligonucleotide
gcaaccccuaggcccucug

SEQ ID NO: 2251065 - RNA, 19 nt, Artificial Sequence
  Description of Artificial Sequence: Synthetic oligonucleotide
gaucggggucuccgucgaa

SEQ ID NO: 2251066 - RNA, 19 nt, Artificial Sequence
  Description of Artificial Sequence: Synthetic oligonucleotide
cccaagccggcuguacaag

SEQ ID NO: 2251067 - RNA, 19 nt, Artificial Sequence
  Description of Artificial Sequence: Synthetic oligonucleotide
ggugccagucuagcuucac

SEQ ID NO: 2251068 - RNA, 19 nt, Artificial Sequence
  Description of Artificial Sequence: Synthetic oligonucleotide
gcuagacagaggaccugga

SEQ ID NO: 2251069 - RNA, 19 nt, Artificial Sequence
  Description of Artificial Sequence: Synthetic oligonucleotide
gcuguccccuggagaaaag

SEQ ID NO: 2251070 - RNA, 19 nt, Artificial Sequence
  Description of Artificial Sequence: Synthetic oligonucleotide
ccccaaugcggacuccguc

SEQ ID NO: 2251071 - RNA, 19 nt, Artificial Sequence
  Description of Artificial Sequence: Synthetic oligonucleotide
cucugcugguuccuuggau

SEQ ID NO: 2251072 - RNA, 19 nt, Artificial Sequence
  Description of Artificial Sequence: Synthetic oligonucleotide
gcaugaugccagggccagg

SEQ ID NO: 2251073 - RNA, 19 nt, Artificial Sequence
  Description of Artificial Sequence: Synthetic oligonucleotide
cuccgucgaagauucuuuu

SEQ ID NO: 2251074 - RNA, 19 nt, Artificial Sequence
  Description of Artificial Sequence: Synthetic oligonucleotide
gggugcugauugcaggggu

SEQ ID NO: 2251075 - RNA, 19 nt, Artificial Sequence
  Description of Artificial Sequence: Synthetic oligonucleotide
agcugcccuuggacaggcg

SEQ ID NO: 2251076 - RNA, 19 nt, Artificial Sequence
  Description of Artificial Sequence: Synthetic oligonucleotide
agggguggcucugcugguu

SEQ ID NO: 2251077 - RNA, 19 nt, Artificial Sequence
  Description of Artificial Sequence: Synthetic oligonucleotide
ggcuguugcgccgggaagu

SEQ ID NO: 2251078 - RNA, 19 nt, Artificial Sequence
  Description of Artificial Sequence: Synthetic oligonucleotide
ccuuggacaggcggcgcug

SEQ ID NO: 2251079 - RNA, 19 nt, Artificial Sequence
  Description of Artificial Sequence: Synthetic oligonucleotide
cuccgucgugccccuccuc

SEQ ID NO: 2251080 - RNA, 19 nt, Artificial Sequence
  Description of Artificial Sequence: Synthetic oligonucleotide
ccaacaagcuggggcuuuc

SEQ ID NO: 2251081 - RNA, 19 nt, Artificial Sequence
  Description of Artificial Sequence: Synthetic oligonucleotide
ccgggaaguggggaagcug

SEQ ID NO: 2251082 - RNA, 19 nt, Artificial Sequence
  Description of Artificial Sequence: Synthetic oligonucleotide
gcugauugcagggguggcu

SEQ ID NO: 2251083 - RNA, 19 nt, Artificial Sequence
  Description of Artificial Sequence: Synthetic oligonucleotide
ugcuggcguuguccucauu

SEQ ID NO: 2251084 - RNA, 19 nt, Artificial Sequence
  Description of Artificial Sequence: Synthetic oligonucleotide
gcggucacucucugccaga

SEQ ID NO: 2251085 - RNA, 19 nt, Artificial Sequence
  Description of Artificial Sequence: Synthetic oligonucleotide
gcgccgggaaguggggaag

SEQ ID NO: 2251086 - RNA, 19 nt, Artificial Sequence
  Description of Artificial Sequence: Synthetic oligonucleotide
ccuaggcccucugcugcgc

SEQ ID NO: 2251087 - RNA, 19 nt, Artificial Sequence
  Description of Artificial Sequence: Synthetic oligonucleotide
ggagggguuggaagcuuua

SEQ ID NO: 2251088 - RNA, 19 nt, Artificial Sequence
  Description of Artificial Sequence: Synthetic oligonucleotide
ccgcaagaagcaagaggaa

SEQ ID NO: 2251089 - RNA, 19 nt, Artificial Sequence
  Description of Artificial Sequence: Synthetic oligonucleotide
ccagggagaucagagcgcu

SEQ ID NO: 2251090 - RNA, 19 nt, Artificial Sequence
  Description of Artificial Sequence: Synthetic oligonucleotide
ccaagccggcuguacaagu

SEQ ID NO: 2251091 - RNA, 19 nt, Artificial Sequence
  Description of Artificial Sequence: Synthetic oligonucleotide
cgucgugccccuccucuuc

SEQ ID NO: 2251092 - RNA, 19 nt, Artificial Sequence
  Description of Artificial Sequence: Synthetic oligonucleotide
gcgcggucacucucugcca

SEQ ID NO: 2251093 - RNA, 19 nt, Artificial Sequence
  Description of Artificial Sequence: Synthetic oligonucleotide
ccaaugcggacuccgucgu

SEQ ID NO: 2251094 - RNA, 19 nt, Artificial Sequence
  Description of Artificial Sequence: Synthetic oligonucleotide
ucgcaaccccuaggcccuc

SEQ ID NO: 2251095 - RNA, 19 nt, Artificial Sequence
  Description of Artificial Sequence: Synthetic oligonucleotide
gccggcuguacaaguccuc

SEQ ID NO: 2251096 - RNA, 19 nt, Artificial Sequence
  Description of Artificial Sequence: Synthetic oligonucleotide
ggucaggggagggguugga

SEQ ID NO: 2251097 - RNA, 19 nt, Artificial Sequence
  Description of Artificial Sequence: Synthetic oligonucleotide
cgaagccgggaucgggguc

SEQ ID NO: 2251098 - RNA, 19 nt, Artificial Sequence
  Description of Artificial Sequence: Synthetic oligonucleotide
gcccuuggacaggcggcgc

SEQ ID NO: 2251099 - RNA, 19 nt, Artificial Sequence
  Description of Artificial Sequence: Synthetic oligonucleotide
cucagccuuuuggggugaa

SEQ ID NO: 2251100 - RNA, 19 nt, Artificial Sequence
  Description of Artificial Sequence: Synthetic oligonucleotide
gggaaaccucacacucugu

SEQ ID NO: 2251101 - RNA, 19 nt, Artificial Sequence
  Description of Artificial Sequence: Synthetic oligonucleotide
cgccgggaaguggggaagc

SEQ ID NO: 2251102 - RNA, 19 nt, Artificial Sequence
  Description of Artificial Sequence: Synthetic oligonucleotide
ccgaagccgggaucggggu

SEQ ID NO: 2251103 - RNA, 19 nt, Artificial Sequence
  Description of Artificial Sequence: Synthetic oligonucleotide
gggagggguuggaagcuuu

SEQ ID NO: 2251104 - RNA, 19 nt, Artificial Sequence
  Description of Artificial Sequence: Synthetic oligonucleotide
cugaggcccgaugcugcau

SEQ ID NO: 2251105 - RNA, 19 nt, Artificial Sequence
  Description of Artificial Sequence: Synthetic oligonucleotide
ccacuuccgauaagugcuu

SEQ ID NO: 2251106 - RNA, 19 nt, Artificial Sequence
  Description of Artificial Sequence: Synthetic oligonucleotide
cccuuggacaggcggcgcu

SEQ ID NO: 2251107 - RNA, 19 nt, Artificial Sequence
  Description of Artificial Sequence: Synthetic oligonucleotide
gcgcuggcggcaggacaac

SEQ ID NO: 2251108 - RNA, 19 nt, Artificial Sequence
  Description of Artificial Sequence: Synthetic oligonucleotide
gcuucccaagccggcugua

SEQ ID NO: 2251109 - RNA, 19 nt, Artificial Sequence
  Description of Artificial Sequence: Synthetic oligonucleotide
gccgggaaguggggaagcu

SEQ ID NO: 2251110 - RNA, 19 nt, Artificial Sequence
  Description of Artificial Sequence: Synthetic oligonucleotide
cagagcgcugcaggcuguu

SEQ ID NO: 2251111 - RNA, 19 nt, Artificial Sequence
  Description of Artificial Sequence: Synthetic oligonucleotide
ggggagggguuggaagcuu

SEQ ID NO: 2251112 - RNA, 19 nt, Artificial Sequence
  Description of Artificial Sequence: Synthetic oligonucleotide
ggacuccgucgugccccuc

SEQ ID NO: 2251113 - RNA, 19 nt, Artificial Sequence
  Description of Artificial Sequence: Synthetic oligonucleotide
ggucuccgucgaagauucu

SEQ ID NO: 2251114 - RNA, 19 nt, Artificial Sequence
  Description of Artificial Sequence: Synthetic oligonucleotide
gcccaacaagcuggggcuu

SEQ ID NO: 2251115 - RNA, 19 nt, Artificial Sequence
  Description of Artificial Sequence: Synthetic oligonucleotide
cgugccccuccucuucaau

SEQ ID NO: 2251116 - RNA, 19 nt, Artificial Sequence
  Description of Artificial Sequence: Synthetic oligonucleotide
ccgucgugccccuccucuu

SEQ ID NO: 2251117 - RNA, 19 nt, Artificial Sequence
  Description of Artificial Sequence: Synthetic oligonucleotide
ccucugcugcgcggucacu

SEQ ID NO: 2251118 - RNA, 19 nt, Artificial Sequence
  Description of Artificial Sequence: Synthetic oligonucleotide
cgcaaccccuaggcccucu

SEQ ID NO: 2251119 - RNA, 19 nt, Artificial Sequence
  Description of Artificial Sequence: Synthetic oligonucleotide
aaaaccaacaugucuggcc

SEQ ID NO: 2251120 - RNA, 19 nt, Artificial Sequence
  Description of Artificial Sequence: Synthetic oligonucleotide
uauccucaaacucauaggg

SEQ ID NO: 2251121 - RNA, 19 nt, Artificial Sequence
  Description of Artificial Sequence: Synthetic oligonucleotide
cucaauagaccuaaggugg

SEQ ID NO: 2251122 - RNA, 19 nt, Artificial Sequence
  Description of Artificial Sequence: Synthetic oligonucleotide
ugagcguuggaauuaaagg

SEQ ID NO: 2251123 - RNA, 19 nt, Artificial Sequence
  Description of Artificial Sequence: Synthetic oligonucleotide
guaggagagagcuagaugc

SEQ ID NO: 2251124 - RNA, 19 nt, Artificial Sequence
  Description of Artificial Sequence: Synthetic oligonucleotide
ucuaagacugaguuaaucc

SEQ ID NO: 2251125 - RNA, 19 nt, Artificial Sequence
  Description of Artificial Sequence: Synthetic oligonucleotide
uuagcuggaauguucagag

SEQ ID NO: 2251126 - RNA, 19 nt, Artificial Sequence
  Description of Artificial Sequence: Synthetic oligonucleotide
aagaaucuaagacugaguu

SEQ ID NO: 2251127 - RNA, 19 nt, Artificial Sequence
  Description of Artificial Sequence: Synthetic oligonucleotide
agagcuagaugcuggaggc

SEQ ID NO: 2251128 - RNA, 19 nt, Artificial Sequence
  Description of Artificial Sequence: Synthetic oligonucleotide
uccucaauagaccuaaggu

SEQ ID NO: 2251129 - RNA, 19 nt, Artificial Sequence
  Description of Artificial Sequence: Synthetic oligonucleotide
aucugguugugccacagcc

SEQ ID NO: 2251130 - RNA, 19 nt, Artificial Sequence
  Description of Artificial Sequence: Synthetic oligonucleotide
guugaguugcuucaggcgg

SEQ ID NO: 2251131 - RNA, 19 nt, Artificial Sequence
  Description of Artificial Sequence: Synthetic oligonucleotide
gaaggcccaacucaggugg

SEQ ID NO: 2251132 - RNA, 19 nt, Artificial Sequence
  Description of Artificial Sequence: Synthetic oligonucleotide
aaagcacuggccaagcugg

SEQ ID NO: 2251133 - RNA, 19 nt, Artificial Sequence
  Description of Artificial Sequence: Synthetic oligonucleotide
agggacauaggcuaucugg

SEQ ID NO: 2251134 - RNA, 19 nt, Artificial Sequence
  Description of Artificial Sequence: Synthetic oligonucleotide
caugcaaagggccagcucc

SEQ ID NO: 2251135 - RNA, 19 nt, Artificial Sequence
  Description of Artificial Sequence: Synthetic oligonucleotide
aaaccaacaugucuggccu

SEQ ID NO: 2251136 - RNA, 19 nt, Artificial Sequence
  Description of Artificial Sequence: Synthetic oligonucleotide
gaaucuaagacugaguuaa

SEQ ID NO: 2251137 - RNA, 19 nt, Artificial Sequence
  Description of Artificial Sequence: Synthetic oligonucleotide
gaucgaagcccauuguggg

SEQ ID NO: 2251138 - RNA, 19 nt, Artificial Sequence
  Description of Artificial Sequence: Synthetic oligonucleotide
gagagcuagaugcuggagg

SEQ ID NO: 2251139 - RNA, 19 nt, Artificial Sequence
  Description of Artificial Sequence: Synthetic oligonucleotide
aagacaauucgucgggcag

SEQ ID NO: 2251140 - RNA, 19 nt, Artificial Sequence
  Description of Artificial Sequence: Synthetic oligonucleotide
uuccucaauagaccuaagg

SEQ ID NO: 2251141 - RNA, 19 nt, Artificial Sequence
  Description of Artificial Sequence: Synthetic oligonucleotide
uggaauguucagaggaagg

SEQ ID NO: 2251142 - RNA, 19 nt, Artificial Sequence
  Description of Artificial Sequence: Synthetic oligonucleotide
ugcauuguaggagagagcu

SEQ ID NO: 2251143 - RNA, 19 nt, Artificial Sequence
  Description of Artificial Sequence: Synthetic oligonucleotide
cucucuagugcauuguagg

SEQ ID NO: 2251144 - RNA, 19 nt, Artificial Sequence
  Description of Artificial Sequence: Synthetic oligonucleotide
ucuagugcauuguaggaga

SEQ ID NO: 2251145 - RNA, 19 nt, Artificial Sequence
  Description of Artificial Sequence: Synthetic oligonucleotide
cacuaauuuagcuggaaug

SEQ ID NO: 2251146 - RNA, 19 nt, Artificial Sequence
  Description of Artificial Sequence: Synthetic oligonucleotide
ucuuguaugggacacuaau

SEQ ID NO: 2251147 - RNA, 19 nt, Artificial Sequence
  Description of Artificial Sequence: Synthetic oligonucleotide
gggacacuaauuuagcugg

SEQ ID NO: 2251148 - RNA, 19 nt, Artificial Sequence
  Description of Artificial Sequence: Synthetic oligonucleotide
ugguuuugguccaagaauc

SEQ ID NO: 2251149 - RNA, 19 nt, Artificial Sequence
  Description of Artificial Sequence: Synthetic oligonucleotide
cugguugugacugagguag

SEQ ID NO: 2251150 - RNA, 19 nt, Artificial Sequence
  Description of Artificial Sequence: Synthetic oligonucleotide
aguuaauccuucccugugg

SEQ ID NO: 2251151 - RNA, 19 nt, Artificial Sequence
  Description of Artificial Sequence: Synthetic oligonucleotide
uuguaugggacacuaauuu

SEQ ID NO: 2251152 - RNA, 19 nt, Artificial Sequence
  Description of Artificial Sequence: Synthetic oligonucleotide
uuuugguccaagaaucuaa

SEQ ID NO: 2251153 - RNA, 19 nt, Artificial Sequence
  Description of Artificial Sequence: Synthetic oligonucleotide
cauuguaggagagagcuag

SEQ ID NO: 2251154 - RNA, 19 nt, Artificial Sequence
  Description of Artificial Sequence: Synthetic oligonucleotide
auggccucgagucugagug

SEQ ID NO: 2251155 - RNA, 19 nt, Artificial Sequence
  Description of Artificial Sequence: Synthetic oligonucleotide
agugcauuguaggagagag

SEQ ID NO: 2251156 - RNA, 19 nt, Artificial Sequence
  Description of Artificial Sequence: Synthetic oligonucleotide
uaggcuaucugguugugcc

SEQ ID NO: 2251157 - RNA, 19 nt, Artificial Sequence
  Description of Artificial Sequence: Synthetic oligonucleotide
aaggacaagccagccagcc

SEQ ID NO: 2251158 - RNA, 19 nt, Artificial Sequence
  Description of Artificial Sequence: Synthetic oligonucleotide
acuaauuuagcuggaaugu

SEQ ID NO: 2251159 - RNA, 19 nt, Artificial Sequence
  Description of Artificial Sequence: Synthetic oligonucleotide
ugaacugcacaaaaccaac

SEQ ID NO: 2251160 - RNA, 19 nt, Artificial Sequence
  Description of Artificial Sequence: Synthetic oligonucleotide
ugugcuaucaugccccacu

SEQ ID NO: 2251161 - RNA, 19 nt, Artificial Sequence
  Description of Artificial Sequence: Synthetic oligonucleotide
guuaauccuucccuguggg

SEQ ID NO: 2251162 - RNA, 19 nt, Artificial Sequence
  Description of Artificial Sequence: Synthetic oligonucleotide
ucacagauggccucgaguc

SEQ ID NO: 2251163 - RNA, 19 nt, Artificial Sequence
  Description of Artificial Sequence: Synthetic oligonucleotide
agacaaaccagucccagga

SEQ ID NO: 2251164 - RNA, 19 nt, Artificial Sequence
  Description of Artificial Sequence: Synthetic oligonucleotide
aggaucuugucugaacugc

SEQ ID NO: 2251165 - RNA, 19 nt, Artificial Sequence
  Description of Artificial Sequence: Synthetic oligonucleotide
aauagaccuaaggugguug

SEQ ID NO: 2251166 - RNA, 19 nt, Artificial Sequence
  Description of Artificial Sequence: Synthetic oligonucleotide
uucagaggaaggacaagcc

SEQ ID NO: 2251167 - RNA, 19 nt, Artificial Sequence
  Description of Artificial Sequence: Synthetic oligonucleotide
cuucacugagcucaaagac

SEQ ID NO: 2251168 - RNA, 19 nt, Artificial Sequence
  Description of Artificial Sequence: Synthetic oligonucleotide
cucauagggauccaccugc

SEQ ID NO: 2251169 - RNA, 19 nt, Artificial Sequence
  Description of Artificial Sequence: Synthetic oligonucleotide
agaccuaaggugguugucc

SEQ ID NO: 2251170 - RNA, 19 nt, Artificial Sequence
  Description of Artificial Sequence: Synthetic oligonucleotide
guaugggacacuaauuuag

SEQ ID NO: 2251171 - RNA, 19 nt, Artificial Sequence
  Description of Artificial Sequence: Synthetic oligonucleotide
gagugcuuccacuucacug

SEQ ID NO: 2251172 - RNA, 19 nt, Artificial Sequence
  Description of Artificial Sequence: Synthetic oligonucleotide
ucccaagagccaauguccg

SEQ ID NO: 2251173 - RNA, 19 nt, Artificial Sequence
  Description of Artificial Sequence: Synthetic oligonucleotide
cugagcguuggaauuaaag

SEQ ID NO: 2251174 - RNA, 19 nt, Artificial Sequence
  Description of Artificial Sequence: Synthetic oligonucleotide
uugagguugaguugcuuca

SEQ ID NO: 2251175 - RNA, 19 nt, Artificial Sequence
  Description of Artificial Sequence: Synthetic oligonucleotide
uuuagcuggaauguucaga

SEQ ID NO: 2251176 - RNA, 19 nt, Artificial Sequence
  Description of Artificial Sequence: Synthetic oligonucleotide
cuucaggcggcuuucacug

SEQ ID NO: 2251177 - RNA, 19 nt, Artificial Sequence
  Description of Artificial Sequence: Synthetic oligonucleotide
ugaaagcugaggauuuccu

SEQ ID NO: 2251178 - RNA, 19 nt, Artificial Sequence
  Description of Artificial Sequence: Synthetic oligonucleotide
cagaagacaauucgucggg

SEQ ID NO: 2251179 - RNA, 19 nt, Artificial Sequence
  Description of Artificial Sequence: Synthetic oligonucleotide
gggguuacaccccaaaucc

SEQ ID NO: 2251180 - RNA, 19 nt, Artificial Sequence
  Description of Artificial Sequence: Synthetic oligonucleotide
uugugggacacauccagca

SEQ ID NO: 2251181 - RNA, 19 nt, Artificial Sequence
  Description of Artificial Sequence: Synthetic oligonucleotide
ugaguuaauccuucccugu

SEQ ID NO: 2251182 - RNA, 19 nt, Artificial Sequence
  Description of Artificial Sequence: Synthetic oligonucleotide
agugucaggcaguccaggg

SEQ ID NO: 2251183 - RNA, 19 nt, Artificial Sequence
  Description of Artificial Sequence: Synthetic oligonucleotide
gcagaagacaauucgucgg

SEQ ID NO: 2251184 - RNA, 19 nt, Artificial Sequence
  Description of Artificial Sequence: Synthetic oligonucleotide
agacugaguuaauccuucc

SEQ ID NO: 2251185 - RNA, 19 nt, Artificial Sequence
  Description of Artificial Sequence: Synthetic oligonucleotide
uaucaugccccacucuugu

SEQ ID NO: 2251186 - RNA, 19 nt, Artificial Sequence
  Description of Artificial Sequence: Synthetic oligonucleotide
uuaauccuucccugugggg

SEQ ID NO: 2251187 - RNA, 19 nt, Artificial Sequence
  Description of Artificial Sequence: Synthetic oligonucleotide
uaagacugaguuaauccuu

SEQ ID NO: 2251188 - RNA, 19 nt, Artificial Sequence
  Description of Artificial Sequence: Synthetic oligonucleotide
ucucuagugcauuguagga

SEQ ID NO: 2251189 - RNA, 19 nt, Artificial Sequence
  Description of Artificial Sequence: Synthetic oligonucleotide
gaguuaggugguuguaucc

SEQ ID NO: 2251190 - RNA, 19 nt, Artificial Sequence
  Description of Artificial Sequence: Synthetic oligonucleotide
gacugaguuaauccuuccc

SEQ ID NO: 2251191 - RNA, 19 nt, Artificial Sequence
  Description of Artificial Sequence: Synthetic oligonucleotide
aaagggccagcuccagccg

SEQ ID NO: 2251192 - RNA, 19 nt, Artificial Sequence
  Description of Artificial Sequence: Synthetic oligonucleotide
aucuaagacugaguuaauc

SEQ ID NO: 2251193 - RNA, 19 nt, Artificial Sequence
  Description of Artificial Sequence: Synthetic oligonucleotide
guccaagaaucuaagacug

SEQ ID NO: 2251194 - RNA, 19 nt, Artificial Sequence
  Description of Artificial Sequence: Synthetic oligonucleotide
ugaguuaggugguuguauc

SEQ ID NO: 2251195 - RNA, 19 nt, Artificial Sequence
  Description of Artificial Sequence: Synthetic oligonucleotide
ggcagaagacaauucgucg

SEQ ID NO: 2251196 - RNA, 19 nt, Artificial Sequence
  Description of Artificial Sequence: Synthetic oligonucleotide
cugaguuaauccuucccug

SEQ ID NO: 2251197 - RNA, 19 nt, Artificial Sequence
  Description of Artificial Sequence: Synthetic oligonucleotide
caaagcacuggccaagcug

SEQ ID NO: 2251198 - RNA, 19 nt, Artificial Sequence
  Description of Artificial Sequence: Synthetic oligonucleotide
gaguuaauccuucccugug

SEQ ID NO: 2251199 - RNA, 19 nt, Artificial Sequence
  Description of Artificial Sequence: Synthetic oligonucleotide
gagcguuggaauuaaaggu

SEQ ID NO: 2251200 - RNA, 19 nt, Artificial Sequence
  Description of Artificial Sequence: Synthetic oligonucleotide
uguaugggacacuaauuua

SEQ ID NO: 2251201 - RNA, 19 nt, Artificial Sequence
  Description of Artificial Sequence: Synthetic oligonucleotide
uugaguugcuucaggcggc

SEQ ID NO: 2251202 - RNA, 19 nt, Artificial Sequence
  Description of Artificial Sequence: Synthetic oligonucleotide
gaauguucagaggaaggac

SEQ ID NO: 2251203 - RNA, 19 nt, Artificial Sequence
  Description of Artificial Sequence: Synthetic oligonucleotide
gagguugaguugcuucagg

SEQ ID NO: 2251204 - RNA, 19 nt, Artificial Sequence
  Description of Artificial Sequence: Synthetic oligonucleotide
cccauugugggacacaucc

SEQ ID NO: 2251205 - RNA, 19 nt, Artificial Sequence
  Description of Artificial Sequence: Synthetic oligonucleotide
aggugguuguccuucgaag

SEQ ID NO: 2251206 - RNA, 19 nt, Artificial Sequence
  Description of Artificial Sequence: Synthetic oligonucleotide
gguugaguugcuucaggcg

SEQ ID NO: 2251207 - RNA, 19 nt, Artificial Sequence
  Description of Artificial Sequence: Synthetic oligonucleotide
agcguuggaauuaaaggug

SEQ ID NO: 2251208 - RNA, 19 nt, Artificial Sequence
  Description of Artificial Sequence: Synthetic oligonucleotide
uccgacagugcugaaagcu

SEQ ID NO: 2251209 - RNA, 19 nt, Artificial Sequence
  Description of Artificial Sequence: Synthetic oligonucleotide
ugacaagcuuccgacagug

SEQ ID NO: 2251210 - RNA, 19 nt, Artificial Sequence
  Description of Artificial Sequence: Synthetic oligonucleotide
cuuccucacgugcucaggg

SEQ ID NO: 2251211 - RNA, 19 nt, Artificial Sequence
  Description of Artificial Sequence: Synthetic oligonucleotide
uguccacucaugguugagg

SEQ ID NO: 2251212 - RNA, 19 nt, Artificial Sequence
  Description of Artificial Sequence: Synthetic oligonucleotide
ccucaauagaccuaaggug

SEQ ID NO: 2251213 - RNA, 19 nt, Artificial Sequence
  Description of Artificial Sequence: Synthetic oligonucleotide
ggacacauccagcaggcgg

SEQ ID NO: 2251214 - RNA, 19 nt, Artificial Sequence
  Description of Artificial Sequence: Synthetic oligonucleotide
uucuccccagacaaaccag

SEQ ID NO: 2251215 - RNA, 19 nt, Artificial Sequence
  Description of Artificial Sequence: Synthetic oligonucleotide
uccuguuucuccccagaca

SEQ ID NO: 2251216 - RNA, 19 nt, Artificial Sequence
  Description of Artificial Sequence: Synthetic oligonucleotide
gugaaagcugaguuaggug

SEQ ID NO: 2251217 - RNA, 19 nt, Artificial Sequence
  Description of Artificial Sequence: Synthetic oligonucleotide
acgugcguugcgcugcagc

SEQ ID NO: 2251218 - RNA, 19 nt, Artificial Sequence
  Description of Artificial Sequence: Synthetic oligonucleotide
agugcugaaagcugaggau

SEQ ID NO: 2251219 - RNA, 19 nt, Artificial Sequence
  Description of Artificial Sequence: Synthetic oligonucleotide
ugcacaaaaccaacauguc

SEQ ID NO: 2251220 - RNA, 19 nt, Artificial Sequence
  Description of Artificial Sequence: Synthetic oligonucleotide
agagccaauguccgcagcu

SEQ ID NO: 2251221 - RNA, 19 nt, Artificial Sequence
  Description of Artificial Sequence: Synthetic oligonucleotide
acacuaauuuagcuggaau

SEQ ID NO: 2251222 - RNA, 19 nt, Artificial Sequence
  Description of Artificial Sequence: Synthetic oligonucleotide
agcuagaugcuggaggcuc

SEQ ID NO: 2251223 - RNA, 19 nt, Artificial Sequence
  Description of Artificial Sequence: Synthetic oligonucleotide
gaacucucuuuguagggca

SEQ ID NO: 2251224 - RNA, 19 nt, Artificial Sequence
  Description of Artificial Sequence: Synthetic oligonucleotide
uucccugugggguuacacc

SEQ ID NO: 2251225 - RNA, 19 nt, Artificial Sequence
  Description of Artificial Sequence: Synthetic oligonucleotide
gagagugacaagcuuccga

SEQ ID NO: 2251226 - RNA, 19 nt, Artificial Sequence
  Description of Artificial Sequence: Synthetic oligonucleotide
agacaauucgucgggcagg

SEQ ID NO: 2251227 - RNA, 19 nt, Artificial Sequence
  Description of Artificial Sequence: Synthetic oligonucleotide
agaaucuaagacugaguua

SEQ ID NO: 2251228 - RNA, 19 nt, Artificial Sequence
  Description of Artificial Sequence: Synthetic oligonucleotide
cucuagugcauuguaggag

SEQ ID NO: 2251229 - RNA, 19 nt, Artificial Sequence
  Description of Artificial Sequence: Synthetic oligonucleotide
auagaccuaaggugguugu

SEQ ID NO: 2251230 - RNA, 19 nt, Artificial Sequence
  Description of Artificial Sequence: Synthetic oligonucleotide
uccaagaaucuaagacuga

SEQ ID NO: 2251231 - RNA, 19 nt, Artificial Sequence
  Description of Artificial Sequence: Synthetic oligonucleotide
cuaaggugguuguccuucg

SEQ ID NO: 2251232 - RNA, 19 nt, Artificial Sequence
  Description of Artificial Sequence: Synthetic oligonucleotide
cagacaaaccagucccagg

SEQ ID NO: 2251233 - RNA, 19 nt, Artificial Sequence
  Description of Artificial Sequence: Synthetic oligonucleotide
caauucgucgggcaggcuc

SEQ ID NO: 2251234 - RNA, 19 nt, Artificial Sequence
  Description of Artificial Sequence: Synthetic oligonucleotide
caagcuuccgacagugcug

SEQ ID NO: 2251235 - RNA, 19 nt, Artificial Sequence
  Description of Artificial Sequence: Synthetic oligonucleotide
acaugucuggccuuccgga

SEQ ID NO: 2251236 - RNA, 19 nt, Artificial Sequence
  Description of Artificial Sequence: Synthetic oligonucleotide
ucauagggauccaccugcc

SEQ ID NO: 2251237 - RNA, 19 nt, Artificial Sequence
  Description of Artificial Sequence: Synthetic oligonucleotide
aauucgucgggcaggcucu

SEQ ID NO: 2251238 - RNA, 19 nt, Artificial Sequence
  Description of Artificial Sequence: Synthetic oligonucleotide
ccagggagcaugcaaaggg

SEQ ID NO: 2251239 - RNA, 19 nt, Artificial Sequence
  Description of Artificial Sequence: Synthetic oligonucleotide
ggaucgaagcccauugugg

SEQ ID NO: 2251240 - RNA, 19 nt, Artificial Sequence
  Description of Artificial Sequence: Synthetic oligonucleotide
gugugugcuaucaugcccc

SEQ ID NO: 2251241 - RNA, 19 nt, Artificial Sequence
  Description of Artificial Sequence: Synthetic oligonucleotide
agaaggcccaacucaggug

SEQ ID NO: 2251242 - RNA, 19 nt, Artificial Sequence
  Description of Artificial Sequence: Synthetic oligonucleotide
cugaaagcugaggauuucc

SEQ ID NO: 2251243 - RNA, 19 nt, Artificial Sequence
  Description of Artificial Sequence: Synthetic oligonucleotide
ucggagcuuccucacgugc

SEQ ID NO: 2251244 - RNA, 19 nt, Artificial Sequence
  Description of Artificial Sequence: Synthetic oligonucleotide
cugaacugcacaaaaccaa

SEQ ID NO: 2251245 - RNA, 19 nt, Artificial Sequence
  Description of Artificial Sequence: Synthetic oligonucleotide
cuaagacugaguuaauccu

SEQ ID NO: 2251246 - RNA, 19 nt, Artificial Sequence
  Description of Artificial Sequence: Synthetic oligonucleotide
uuaggugguuguaucccaa

SEQ ID NO: 2251247 - RNA, 19 nt, Artificial Sequence
  Description of Artificial Sequence: Synthetic oligonucleotide
cuaucaugccccacucuug

SEQ ID NO: 2251248 - RNA, 19 nt, Artificial Sequence
  Description of Artificial Sequence: Synthetic oligonucleotide
aagcuuccgacagugcuga

SEQ ID NO: 2251249 - RNA, 19 nt, Artificial Sequence
  Description of Artificial Sequence: Synthetic oligonucleotide
cuagugcauuguaggagag

SEQ ID NO: 2251250 - RNA, 19 nt, Artificial Sequence
  Description of Artificial Sequence: Synthetic oligonucleotide
aauccuucccugugggguu

SEQ ID NO: 2251251 - RNA, 19 nt, Artificial Sequence
  Description of Artificial Sequence: Synthetic oligonucleotide
ugcugaaagcugaggauuu

SEQ ID NO: 2251252 - RNA, 19 nt, Artificial Sequence
  Description of Artificial Sequence: Synthetic oligonucleotide
cuggagaaggcccaacuca

SEQ ID NO: 2251253 - RNA, 19 nt, Artificial Sequence
  Description of Artificial Sequence: Synthetic oligonucleotide
gacaauucgucgggcaggc

SEQ ID NO: 2251254 - RNA, 19 nt, Artificial Sequence
  Description of Artificial Sequence: Synthetic oligonucleotide
ugagguugaguugcuucag

SEQ ID NO: 2251255 - RNA, 19 nt, Artificial Sequence
  Description of Artificial Sequence: Synthetic oligonucleotide
ugugggguuacaccccaaa

SEQ ID NO: 2251256 - RNA, 19 nt, Artificial Sequence
  Description of Artificial Sequence: Synthetic oligonucleotide
gaauuaaaggugugugcua

SEQ ID NO: 2251257 - RNA, 19 nt, Artificial Sequence
  Description of Artificial Sequence: Synthetic oligonucleotide
ucgaagcccauugugggac

SEQ ID NO: 2251258 - RNA, 19 nt, Artificial Sequence
  Description of Artificial Sequence: Synthetic oligonucleotide
ugcguugcgcugcagcuuc

SEQ ID NO: 2251259 - RNA, 19 nt, Artificial Sequence
  Description of Artificial Sequence: Synthetic oligonucleotide
ggggugaaagcugaguuag

SEQ ID NO: 2251260 - RNA, 19 nt, Artificial Sequence
  Description of Artificial Sequence: Synthetic oligonucleotide
aacucagguggcagggauc

SEQ ID NO: 2251261 - RNA, 19 nt, Artificial Sequence
  Description of Artificial Sequence: Synthetic oligonucleotide
accaacaugucuggccuuc

SEQ ID NO: 2251262 - RNA, 19 nt, Artificial Sequence
  Description of Artificial Sequence: Synthetic oligonucleotide
uguccuucgaagguccagu

SEQ ID NO: 2251263 - RNA, 19 nt, Artificial Sequence
  Description of Artificial Sequence: Synthetic oligonucleotide
uaucugguugugccacagc

SEQ ID NO: 2251264 - RNA, 19 nt, Artificial Sequence
  Description of Artificial Sequence: Synthetic oligonucleotide
augccccacucuuguaugg

SEQ ID NO: 2251265 - RNA, 19 nt, Artificial Sequence
  Description of Artificial Sequence: Synthetic oligonucleotide
cacgugcucagggacauag

SEQ ID NO: 2251266 - RNA, 19 nt, Artificial Sequence
  Description of Artificial Sequence: Synthetic oligonucleotide
ugagagugacaagcuuccg

SEQ ID NO: 2251267 - RNA, 19 nt, Artificial Sequence
  Description of Artificial Sequence: Synthetic oligonucleotide
gguccaagaaucuaagacu

SEQ ID NO: 2251268 - RNA, 19 nt, Artificial Sequence
  Description of Artificial Sequence: Synthetic oligonucleotide
ucgggcaggcucucuagug

SEQ ID NO: 2251269 - RNA, 19 nt, Artificial Sequence
  Description of Artificial Sequence: Synthetic oligonucleotide
caacaugucuggccuuccg

SEQ ID NO: 2251270 - RNA, 19 nt, Artificial Sequence
  Description of Artificial Sequence: Synthetic oligonucleotide
agagccccagaugucacag

SEQ ID NO: 2251271 - RNA, 19 nt, Artificial Sequence
  Description of Artificial Sequence: Synthetic oligonucleotide
ccugagagugacaagcuuc

SEQ ID NO: 2251272 - RNA, 19 nt, Artificial Sequence
  Description of Artificial Sequence: Synthetic oligonucleotide
caugccccacucuuguaug

SEQ ID NO: 2251273 - RNA, 19 nt, Artificial Sequence
  Description of Artificial Sequence: Synthetic oligonucleotide
cucuuuguagggcagguua

SEQ ID NO: 2251274 - RNA, 19 nt, Artificial Sequence
  Description of Artificial Sequence: Synthetic oligonucleotide
uaaggugguuguccuucga

SEQ ID NO: 2251275 - RNA, 19 nt, Artificial Sequence
  Description of Artificial Sequence: Synthetic oligonucleotide
ccaagaaucuaagacugag

SEQ ID NO: 2251276 - RNA, 19 nt, Artificial Sequence
  Description of Artificial Sequence: Synthetic oligonucleotide
auguccgcagcuucuggca

SEQ ID NO: 2251277 - RNA, 19 nt, Artificial Sequence
  Description of Artificial Sequence: Synthetic oligonucleotide
aagacacaggugugguuuu

SEQ ID NO: 2251278 - RNA, 19 nt, Artificial Sequence
  Description of Artificial Sequence: Synthetic oligonucleotide
agccccagaugucacagau

SEQ ID NO: 2251279 - RNA, 19 nt, Artificial Sequence
  Description of Artificial Sequence: Synthetic oligonucleotide
aucgaagcccauuguggga

SEQ ID NO: 2251280 - RNA, 19 nt, Artificial Sequence
  Description of Artificial Sequence: Synthetic oligonucleotide
aguugcuucaggcggcuuu

SEQ ID NO: 2251281 - RNA, 19 nt, Artificial Sequence
  Description of Artificial Sequence: Synthetic oligonucleotide
ccccagacaaaccaguccc

SEQ ID NO: 2251282 - RNA, 19 nt, Artificial Sequence
  Description of Artificial Sequence: Synthetic oligonucleotide
caauguccgcagcuucugg

SEQ ID NO: 2251283 - RNA, 19 nt, Artificial Sequence
  Description of Artificial Sequence: Synthetic oligonucleotide
caaaaccaacaugucuggc

SEQ ID NO: 2251284 - RNA, 19 nt, Artificial Sequence
  Description of Artificial Sequence: Synthetic oligonucleotide
gacagugcugaaagcugag

SEQ ID NO: 2251285 - RNA, 19 nt, Artificial Sequence
  Description of Artificial Sequence: Synthetic oligonucleotide
ugcuaucaugccccacucu

SEQ ID NO: 2251286 - RNA, 19 nt, Artificial Sequence
  Description of Artificial Sequence: Synthetic oligonucleotide
aaccagucccaggaucuug

SEQ ID NO: 2251287 - RNA, 19 nt, Artificial Sequence
  Description of Artificial Sequence: Synthetic oligonucleotide
gggaucgaagcccauugug

SEQ ID NO: 2251288 - RNA, 19 nt, Artificial Sequence
  Description of Artificial Sequence: Synthetic oligonucleotide
ggaauuaaaggugugugcu

SEQ ID NO: 2251289 - RNA, 19 nt, Artificial Sequence
  Description of Artificial Sequence: Synthetic oligonucleotide
uuguccuucgaagguccag

SEQ ID NO: 2251290 - RNA, 19 nt, Artificial Sequence
  Description of Artificial Sequence: Synthetic oligonucleotide
cuaucugguugugccacag

SEQ ID NO: 2251291 - RNA, 19 nt, Artificial Sequence
  Description of Artificial Sequence: Synthetic oligonucleotide
cucgagucugagugcuucc

SEQ ID NO: 2251292 - RNA, 19 nt, Artificial Sequence
  Description of Artificial Sequence: Synthetic oligonucleotide
cacauggggugaaagcuga

SEQ ID NO: 2251293 - RNA, 19 nt, Artificial Sequence
  Description of Artificial Sequence: Synthetic oligonucleotide
guuguaucccaagagccaa

SEQ ID NO: 2251294 - RNA, 19 nt, Artificial Sequence
  Description of Artificial Sequence: Synthetic oligonucleotide
ugccccacucuuguauggg

SEQ ID NO: 2251295 - RNA, 19 nt, Artificial Sequence
  Description of Artificial Sequence: Synthetic oligonucleotide
ugugugcuaucaugcccca

SEQ ID NO: 2251296 - RNA, 19 nt, Artificial Sequence
  Description of Artificial Sequence: Synthetic oligonucleotide
ggaacucucuuuguagggc

SEQ ID NO: 2251297 - RNA, 19 nt, Artificial Sequence
  Description of Artificial Sequence: Synthetic oligonucleotide
ccacucaugguugagguug

SEQ ID NO: 2251298 - RNA, 19 nt, Artificial Sequence
  Description of Artificial Sequence: Synthetic oligonucleotide
ugcuucaggcggcuuucac

SEQ ID NO: 2251299 - RNA, 19 nt, Artificial Sequence
  Description of Artificial Sequence: Synthetic oligonucleotide
uuccgacagugcugaaagc

SEQ ID NO: 2251300 - RNA, 19 nt, Artificial Sequence
  Description of Artificial Sequence: Synthetic oligonucleotide
ucgagucugagugcuucca

SEQ ID NO: 2251301 - RNA, 19 nt, Artificial Sequence
  Description of Artificial Sequence: Synthetic oligonucleotide
uuguaucccaagagccaau

SEQ ID NO: 2251302 - RNA, 19 nt, Artificial Sequence
  Description of Artificial Sequence: Synthetic oligonucleotide
caggcucucuagugcauug

SEQ ID NO: 2251303 - RNA, 19 nt, Artificial Sequence
  Description of Artificial Sequence: Synthetic oligonucleotide
uagugcauuguaggagaga

SEQ ID NO: 2251304 - RNA, 19 nt, Artificial Sequence
  Description of Artificial Sequence: Synthetic oligonucleotide
ggacaagccagccagccaa

SEQ ID NO: 2251305 - RNA, 19 nt, Artificial Sequence
  Description of Artificial Sequence: Synthetic oligonucleotide
aaagcugaguuaggugguu

SEQ ID NO: 2251306 - RNA, 19 nt, Artificial Sequence
  Description of Artificial Sequence: Synthetic oligonucleotide
agggaucgaagcccauugu

SEQ ID NO: 2251307 - RNA, 19 nt, Artificial Sequence
  Description of Artificial Sequence: Synthetic oligonucleotide
auccucaaacucauaggga

SEQ ID NO: 2251308 - RNA, 19 nt, Artificial Sequence
  Description of Artificial Sequence: Synthetic oligonucleotide
ggauuuccucaauagaccu

SEQ ID NO: 2251309 - RNA, 19 nt, Artificial Sequence
  Description of Artificial Sequence: Synthetic oligonucleotide
aggacaagccagccagcca

SEQ ID NO: 2251310 - RNA, 19 nt, Artificial Sequence
  Description of Artificial Sequence: Synthetic oligonucleotide
gacacuaauuuagcuggaa

SEQ ID NO: 2251311 - RNA, 19 nt, Artificial Sequence
  Description of Artificial Sequence: Synthetic oligonucleotide
aggccucggagcuuccuca

SEQ ID NO: 2251312 - RNA, 19 nt, Artificial Sequence
  Description of Artificial Sequence: Synthetic oligonucleotide
ugccuucugagcguuggaa

SEQ ID NO: 2251313 - RNA, 19 nt, Artificial Sequence
  Description of Artificial Sequence: Synthetic oligonucleotide
caagaaucuaagacugagu

SEQ ID NO: 2251314 - RNA, 19 nt, Artificial Sequence
  Description of Artificial Sequence: Synthetic oligonucleotide
gguuguccuucgaaggucc

SEQ ID NO: 2251315 - RNA, 19 nt, Artificial Sequence
  Description of Artificial Sequence: Synthetic oligonucleotide
uucugagcguuggaauuaa

SEQ ID NO: 2251316 - RNA, 19 nt, Artificial Sequence
  Description of Artificial Sequence: Synthetic oligonucleotide
cuccccagacaaaccaguc

SEQ ID NO: 2251317 - RNA, 19 nt, Artificial Sequence
  Description of Artificial Sequence: Synthetic oligonucleotide
agguuauccucaaacucau

SEQ ID NO: 2251318 - RNA, 19 nt, Artificial Sequence
  Description of Artificial Sequence: Synthetic oligonucleotide
ugguugugacugagguaga

SEQ ID NO: 2251319 - RNA, 19 nt, Artificial Sequence
  Description of Artificial Sequence: Synthetic oligonucleotide
aaucuaagacugaguuaau

SEQ ID NO: 2251320 - RNA, 19 nt, Artificial Sequence
  Description of Artificial Sequence: Synthetic oligonucleotide
ucugagcguuggaauuaaa

SEQ ID NO: 2251321 - RNA, 19 nt, Artificial Sequence
  Description of Artificial Sequence: Synthetic oligonucleotide
cuccagccggccacgugcg

SEQ ID NO: 2251322 - RNA, 19 nt, Artificial Sequence
  Description of Artificial Sequence: Synthetic oligonucleotide
guagagcugcuccaggccu

SEQ ID NO: 2251323 - RNA, 19 nt, Artificial Sequence
  Description of Artificial Sequence: Synthetic oligonucleotide
ugaguugcuucaggcggcu

SEQ ID NO: 2251324 - RNA, 19 nt, Artificial Sequence
  Description of Artificial Sequence: Synthetic oligonucleotide
cuuguaugggacacuaauu

SEQ ID NO: 2251325 - RNA, 19 nt, Artificial Sequence
  Description of Artificial Sequence: Synthetic oligonucleotide
gaccuaaggugguuguccu

SEQ ID NO: 2251326 - RNA, 19 nt, Artificial Sequence
  Description of Artificial Sequence: Synthetic oligonucleotide
cagugucaggcaguccagg

SEQ ID NO: 2251327 - RNA, 19 nt, Artificial Sequence
  Description of Artificial Sequence: Synthetic oligonucleotide
cuucccugugggguuacac

SEQ ID NO: 2251328 - RNA, 19 nt, Artificial Sequence
  Description of Artificial Sequence: Synthetic oligonucleotide
gauuuccucaauagaccua

SEQ ID NO: 2251329 - RNA, 19 nt, Artificial Sequence
  Description of Artificial Sequence: Synthetic oligonucleotide
uagaccuaaggugguuguc

SEQ ID NO: 2251330 - RNA, 19 nt, Artificial Sequence
  Description of Artificial Sequence: Synthetic oligonucleotide
gcucucuagugcauuguag

SEQ ID NO: 2251331 - RNA, 19 nt, Artificial Sequence
  Description of Artificial Sequence: Synthetic oligonucleotide
gguuguaucccaagagcca

SEQ ID NO: 2251332 - RNA, 19 nt, Artificial Sequence
  Description of Artificial Sequence: Synthetic oligonucleotide
uagggcagguuauccucaa

SEQ ID NO: 2251333 - RNA, 19 nt, Artificial Sequence
  Description of Artificial Sequence: Synthetic oligonucleotide
gugcuaucaugccccacuc

SEQ ID NO: 2251334 - RNA, 19 nt, Artificial Sequence
  Description of Artificial Sequence: Synthetic oligonucleotide
gagcaugcaaagggccagc

SEQ ID NO: 2251335 - RNA, 19 nt, Artificial Sequence
  Description of Artificial Sequence: Synthetic oligonucleotide
cucggagcuuccucacgug

SEQ ID NO: 2251336 - RNA, 19 nt, Artificial Sequence
  Description of Artificial Sequence: Synthetic oligonucleotide
gugguuguccuucgaaggu

SEQ ID NO: 2251337 - RNA, 19 nt, Artificial Sequence
  Description of Artificial Sequence: Synthetic oligonucleotide
agcccauugugggacacau

SEQ ID NO: 2251338 - RNA, 19 nt, Artificial Sequence
  Description of Artificial Sequence: Synthetic oligonucleotide
gcaggcggaggccaaagca

SEQ ID NO: 2251339 - RNA, 19 nt, Artificial Sequence
  Description of Artificial Sequence: Synthetic oligonucleotide
agccaaagacacaggugug

SEQ ID NO: 2251340 - RNA, 19 nt, Artificial Sequence
  Description of Artificial Sequence: Synthetic oligonucleotide
cauccagcaggcggaggcc

SEQ ID NO: 2251341 - RNA, 19 nt, Artificial Sequence
  Description of Artificial Sequence: Synthetic oligonucleotide
ucgucgggcaggcucucua

SEQ ID NO: 2251342 - RNA, 19 nt, Artificial Sequence
  Description of Artificial Sequence: Synthetic oligonucleotide
cuuccacuucacugagcuc

SEQ ID NO: 2251343 - RNA, 19 nt, Artificial Sequence
  Description of Artificial Sequence: Synthetic oligonucleotide
ccacauggggugaaagcug

SEQ ID NO: 2251344 - RNA, 19 nt, Artificial Sequence
  Description of Artificial Sequence: Synthetic oligonucleotide
cuucucagguguccacuca

SEQ ID NO: 2251345 - RNA, 19 nt, Artificial Sequence
  Description of Artificial Sequence: Synthetic oligonucleotide
agcaugcaaagggccagcu

SEQ ID NO: 2251346 - RNA, 19 nt, Artificial Sequence
  Description of Artificial Sequence: Synthetic oligonucleotide
aaaccagucccaggaucuu

SEQ ID NO: 2251347 - RNA, 19 nt, Artificial Sequence
  Description of Artificial Sequence: Synthetic oligonucleotide
aagcccauugugggacaca

SEQ ID NO: 2251348 - RNA, 19 nt, Artificial Sequence
  Description of Artificial Sequence: Synthetic oligonucleotide
agacacaggugugguuuug

SEQ ID NO: 2251349 - RNA, 19 nt, Artificial Sequence
  Description of Artificial Sequence: Synthetic oligonucleotide
ggcuaucugguugugccac

SEQ ID NO: 2251350 - RNA, 19 nt, Artificial Sequence
  Description of Artificial Sequence: Synthetic oligonucleotide
cagccacauggggugaaag

SEQ ID NO: 2251351 - RNA, 19 nt, Artificial Sequence
  Description of Artificial Sequence: Synthetic oligonucleotide
cauaggcuaucugguugug

SEQ ID NO: 2251352 - RNA, 19 nt, Artificial Sequence
  Description of Artificial Sequence: Synthetic oligonucleotide
cagccggccacgugcguug

SEQ ID NO: 2251353 - RNA, 19 nt, Artificial Sequence
  Description of Artificial Sequence: Synthetic oligonucleotide
gcccaacucagguggcagg

SEQ ID NO: 2251354 - RNA, 19 nt, Artificial Sequence
  Description of Artificial Sequence: Synthetic oligonucleotide
ggagcuuccucacgugcuc

SEQ ID NO: 2251355 - RNA, 19 nt, Artificial Sequence
  Description of Artificial Sequence: Synthetic oligonucleotide
gacugagguagagcugcuc

SEQ ID NO: 2251356 - RNA, 19 nt, Artificial Sequence
  Description of Artificial Sequence: Synthetic oligonucleotide
aggcggaggccaaagcacu

SEQ ID NO: 2251357 - RNA, 19 nt, Artificial Sequence
  Description of Artificial Sequence: Synthetic oligonucleotide
cuucugagcguuggaauua

SEQ ID NO: 2251358 - RNA, 19 nt, Artificial Sequence
  Description of Artificial Sequence: Synthetic oligonucleotide
ccagacaaaccagucccag

SEQ ID NO: 2251359 - RNA, 19 nt, Artificial Sequence
  Description of Artificial Sequence: Synthetic oligonucleotide
ggccaaagcacuggccaag

SEQ ID NO: 2251360 - RNA, 19 nt, Artificial Sequence
  Description of Artificial Sequence: Synthetic oligonucleotide
gagggcagccacauggggu

SEQ ID NO: 2251361 - RNA, 19 nt, Artificial Sequence
  Description of Artificial Sequence: Synthetic oligonucleotide
gacaaaccagucccaggau

SEQ ID NO: 2251362 - RNA, 19 nt, Artificial Sequence
  Description of Artificial Sequence: Synthetic oligonucleotide
guguccacucaugguugag

SEQ ID NO: 2251363 - RNA, 19 nt, Artificial Sequence
  Description of Artificial Sequence: Synthetic oligonucleotide
acucaugguugagguugag

SEQ ID NO: 2251364 - RNA, 19 nt, Artificial Sequence
  Description of Artificial Sequence: Synthetic oligonucleotide
gauggccucgagucugagu

SEQ ID NO: 2251365 - RNA, 19 nt, Artificial Sequence
  Description of Artificial Sequence: Synthetic oligonucleotide
ggugugguuuugguccaag

SEQ ID NO: 2251366 - RNA, 19 nt, Artificial Sequence
  Description of Artificial Sequence: Synthetic oligonucleotide
ggaucuugucugaacugca

SEQ ID NO: 2251367 - RNA, 19 nt, Artificial Sequence
  Description of Artificial Sequence: Synthetic oligonucleotide
gcuaucaugccccacucuu

SEQ ID NO: 2251368 - RNA, 19 nt, Artificial Sequence
  Description of Artificial Sequence: Synthetic oligonucleotide
aggcucucuagugcauugu

SEQ ID NO: 2251369 - RNA, 19 nt, Artificial Sequence
  Description of Artificial Sequence: Synthetic oligonucleotide
gucccaggaucuugucuga

SEQ ID NO: 2251370 - RNA, 19 nt, Artificial Sequence
  Description of Artificial Sequence: Synthetic oligonucleotide
aucaugccccacucuugua

SEQ ID NO: 2251371 - RNA, 19 nt, Artificial Sequence
  Description of Artificial Sequence: Synthetic oligonucleotide
gggugaaagcugaguuagg

SEQ ID NO: 2251372 - RNA, 19 nt, Artificial Sequence
  Description of Artificial Sequence: Synthetic oligonucleotide
uugcuucaggcggcuuuca

SEQ ID NO: 2251373 - RNA, 19 nt, Artificial Sequence
  Description of Artificial Sequence: Synthetic oligonucleotide
cuaauuuagcuggaauguu

SEQ ID NO: 2251374 - RNA, 19 nt, Artificial Sequence
  Description of Artificial Sequence: Synthetic oligonucleotide
cccaagagccaauguccgc

SEQ ID NO: 2251375 - RNA, 19 nt, Artificial Sequence
  Description of Artificial Sequence: Synthetic oligonucleotide
gguguccacucaugguuga

SEQ ID NO: 2251376 - RNA, 19 nt, Artificial Sequence
  Description of Artificial Sequence: Synthetic oligonucleotide
ccccacucuuguaugggac

SEQ ID NO: 2251377 - RNA, 19 nt, Artificial Sequence
  Description of Artificial Sequence: Synthetic oligonucleotide
caccccaaauccaccaccu

SEQ ID NO: 2251378 - RNA, 19 nt, Artificial Sequence
  Description of Artificial Sequence: Synthetic oligonucleotide
auucgucgggcaggcucuc

SEQ ID NO: 2251379 - RNA, 19 nt, Artificial Sequence
  Description of Artificial Sequence: Synthetic oligonucleotide
gcggaggccaaagcacugg

SEQ ID NO: 2251380 - RNA, 19 nt, Artificial Sequence
  Description of Artificial Sequence: Synthetic oligonucleotide
cucuuguaugggacacuaa

SEQ ID NO: 2251381 - RNA, 19 nt, Artificial Sequence
  Description of Artificial Sequence: Synthetic oligonucleotide
gggacauaggcuaucuggu

SEQ ID NO: 2251382 - RNA, 19 nt, Artificial Sequence
  Description of Artificial Sequence: Synthetic oligonucleotide
agauggccucgagucugag

SEQ ID NO: 2251383 - RNA, 19 nt, Artificial Sequence
  Description of Artificial Sequence: Synthetic oligonucleotide
guccgcagcuucuggcaga

SEQ ID NO: 2251384 - RNA, 19 nt, Artificial Sequence
  Description of Artificial Sequence: Synthetic oligonucleotide
ucccaggaucuugucugaa

SEQ ID NO: 2251385 - RNA, 19 nt, Artificial Sequence
  Description of Artificial Sequence: Synthetic oligonucleotide
ccacucuuguaugggacac

SEQ ID NO: 2251386 - RNA, 19 nt, Artificial Sequence
  Description of Artificial Sequence: Synthetic oligonucleotide
gccacauggggugaaagcu

SEQ ID NO: 2251387 - RNA, 19 nt, Artificial Sequence
  Description of Artificial Sequence: Synthetic oligonucleotide
cagagccccagaugucaca

SEQ ID NO: 2251388 - RNA, 19 nt, Artificial Sequence
  Description of Artificial Sequence: Synthetic oligonucleotide
ggcccaacucagguggcag

SEQ ID NO: 2251389 - RNA, 19 nt, Artificial Sequence
  Description of Artificial Sequence: Synthetic oligonucleotide
gccucggagcuuccucacg

SEQ ID NO: 2251390 - RNA, 19 nt, Artificial Sequence
  Description of Artificial Sequence: Synthetic oligonucleotide
ccaggaucuugucugaacu

SEQ ID NO: 2251391 - RNA, 19 nt, Artificial Sequence
  Description of Artificial Sequence: Synthetic oligonucleotide
gccaaagcacuggccaagc

SEQ ID NO: 2251392 - RNA, 19 nt, Artificial Sequence
  Description of Artificial Sequence: Synthetic oligonucleotide
cugaguuaggugguuguau

SEQ ID NO: 2251393 - RNA, 19 nt, Artificial Sequence
  Description of Artificial Sequence: Synthetic oligonucleotide
ggcaguccagggagcaugc

SEQ ID NO: 2251394 - RNA, 19 nt, Artificial Sequence
  Description of Artificial Sequence: Synthetic oligonucleotide
agccggccacgugcguugc

SEQ ID NO: 2251395 - RNA, 19 nt, Artificial Sequence
  Description of Artificial Sequence: Synthetic oligonucleotide
cgcagcuucuggcagaaga

SEQ ID NO: 2251396 - RNA, 19 nt, Artificial Sequence
  Description of Artificial Sequence: Synthetic oligonucleotide
gcaugcaaagggccagcuc

SEQ ID NO: 2251397 - RNA, 19 nt, Artificial Sequence
  Description of Artificial Sequence: Synthetic oligonucleotide
guuguccuucgaaggucca

SEQ ID NO: 2251398 - RNA, 19 nt, Artificial Sequence
  Description of Artificial Sequence: Synthetic oligonucleotide
gacaagccagccagccaaa

SEQ ID NO: 2251399 - RNA, 19 nt, Artificial Sequence
  Description of Artificial Sequence: Synthetic oligonucleotide
aggcccaacucagguggca

SEQ ID NO: 2251400 - RNA, 19 nt, Artificial Sequence
  Description of Artificial Sequence: Synthetic oligonucleotide
ggcucucuagugcauugua

SEQ ID NO: 2251401 - RNA, 19 nt, Artificial Sequence
  Description of Artificial Sequence: Synthetic oligonucleotide
ccaauguccgcagcuucug

SEQ ID NO: 2251402 - RNA, 19 nt, Artificial Sequence
  Description of Artificial Sequence: Synthetic oligonucleotide
cacagauggccucgagucu

SEQ ID NO: 2251403 - RNA, 19 nt, Artificial Sequence
  Description of Artificial Sequence: Synthetic oligonucleotide
cucaugguugagguugagu

SEQ ID NO: 2251404 - RNA, 19 nt, Artificial Sequence
  Description of Artificial Sequence: Synthetic oligonucleotide
cauagggauccaccugccu

SEQ ID NO: 2251405 - RNA, 19 nt, Artificial Sequence
  Description of Artificial Sequence: Synthetic oligonucleotide
gcugaaagcugaggauuuc

SEQ ID NO: 2251406 - RNA, 19 nt, Artificial Sequence
  Description of Artificial Sequence: Synthetic oligonucleotide
ggguuacaccccaaaucca

SEQ ID NO: 2251407 - RNA, 19 nt, Artificial Sequence
  Description of Artificial Sequence: Synthetic oligonucleotide
cccacucuuguaugggaca

SEQ ID NO: 2251408 - RNA, 19 nt, Artificial Sequence
  Description of Artificial Sequence: Synthetic oligonucleotide
uucgucgggcaggcucucu

SEQ ID NO: 2251409 - RNA, 19 nt, Artificial Sequence
  Description of Artificial Sequence: Synthetic oligonucleotide
gggacacauccagcaggcg

SEQ ID NO: 2251410 - RNA, 19 nt, Artificial Sequence
  Description of Artificial Sequence: Synthetic oligonucleotide
ccucgagucugagugcuuc

SEQ ID NO: 2251411 - RNA, 19 nt, Artificial Sequence
  Description of Artificial Sequence: Synthetic oligonucleotide
acaauucgucgggcaggcu

SEQ ID NO: 2251412 - RNA, 19 nt, Artificial Sequence
  Description of Artificial Sequence: Synthetic oligonucleotide
caccuccuguuucucccca

SEQ ID NO: 2251413 - RNA, 19 nt, Artificial Sequence
  Description of Artificial Sequence: Synthetic oligonucleotide
ggacacuaauuuagcugga

SEQ ID NO: 2251414 - RNA, 19 nt, Artificial Sequence
  Description of Artificial Sequence: Synthetic oligonucleotide
cucucuuuguagggcaggu

SEQ ID NO: 2251415 - RNA, 19 nt, Artificial Sequence
  Description of Artificial Sequence: Synthetic oligonucleotide
ggccacgugcguugcgcug

SEQ ID NO: 2251416 - RNA, 19 nt, Artificial Sequence
  Description of Artificial Sequence: Synthetic oligonucleotide
gcguuggaauuaaaggugu

SEQ ID NO: 2251417 - RNA, 19 nt, Artificial Sequence
  Description of Artificial Sequence: Synthetic oligonucleotide
gugugcuaucaugccccac

SEQ ID NO: 2251418 - RNA, 19 nt, Artificial Sequence
  Description of Artificial Sequence: Synthetic oligonucleotide
ccaacaugucuggccuucc

SEQ ID NO: 2251419 - RNA, 19 nt, Artificial Sequence
  Description of Artificial Sequence: Synthetic oligonucleotide
gcuuccgacagugcugaaa

SEQ ID NO: 2251420 - RNA, 19 nt, Artificial Sequence
  Description of Artificial Sequence: Synthetic oligonucleotide
ccucacgugcucagggaca

SEQ ID NO: 2251421 - RNA, 19 nt, Artificial Sequence
  Description of Artificial Sequence: Synthetic oligonucleotide
cgagucugagugcuuccac

SEQ ID NO: 2251422 - RNA, 19 nt, Artificial Sequence
  Description of Artificial Sequence: Synthetic oligonucleotide
ggcggaggccaaagcacug

SEQ ID NO: 2251423 - RNA, 19 nt, Artificial Sequence
  Description of Artificial Sequence: Synthetic oligonucleotide
cacuggccaagcugguugu

SEQ ID NO: 2251424 - RNA, 19 nt, Artificial Sequence
  Description of Artificial Sequence: Synthetic oligonucleotide
gccccacucuuguauggga

SEQ ID NO: 2251425 - RNA, 19 nt, Artificial Sequence
  Description of Artificial Sequence: Synthetic oligonucleotide
ggccucggagcuuccucac

SEQ ID NO: 2251426 - RNA, 19 nt, Artificial Sequence
  Description of Artificial Sequence: Synthetic oligonucleotide
gagcuagaugcuggaggcu

SEQ ID NO: 2251427 - RNA, 19 nt, Artificial Sequence
  Description of Artificial Sequence: Synthetic oligonucleotide
ggacauaggcuaucugguu

SEQ ID NO: 2251428 - RNA, 19 nt, Artificial Sequence
  Description of Artificial Sequence: Synthetic oligonucleotide
ccugugggguuacacccca

SEQ ID NO: 2251429 - RNA, 19 nt, Artificial Sequence
  Description of Artificial Sequence: Synthetic oligonucleotide
cccagacaaaccaguccca

SEQ ID NO: 2251430 - RNA, 19 nt, Artificial Sequence
  Description of Artificial Sequence: Synthetic oligonucleotide
ccggccacgugcguugcgc

SEQ ID NO: 2251431 - RNA, 19 nt, Artificial Sequence
  Description of Artificial Sequence: Synthetic oligonucleotide
cgucgggcaggcucucuag

SEQ ID NO: 2251432 - RNA, 19 nt, Artificial Sequence
  Description of Artificial Sequence: Synthetic oligonucleotide
agcuuccgacagugcugaa

SEQ ID NO: 2251433 - RNA, 19 nt, Artificial Sequence
  Description of Artificial Sequence: Synthetic oligonucleotide
aggugugguuuugguccaa

SEQ ID NO: 2251434 - RNA, 19 nt, Artificial Sequence
  Description of Artificial Sequence: Synthetic oligonucleotide
cugugggguuacaccccaa

SEQ ID NO: 2251435 - RNA, 19 nt, Artificial Sequence
  Description of Artificial Sequence: Synthetic oligonucleotide
ccucggagcuuccucacgu

SEQ ID NO: 2251436 - RNA, 19 nt, Artificial Sequence
  Description of Artificial Sequence: Synthetic oligonucleotide
gcuagaugcuggaggcucu

SEQ ID NO: 2251437 - RNA, 19 nt, Artificial Sequence
  Description of Artificial Sequence: Synthetic oligonucleotide
gguuauccucaaacucaua

SEQ ID NO: 2251438 - RNA, 19 nt, Artificial Sequence
  Description of Artificial Sequence: Synthetic oligonucleotide
cacgugcguugcgcugcag

SEQ ID NO: 2251439 - RNA, 19 nt, Artificial Sequence
  Description of Artificial Sequence: Synthetic oligonucleotide
ggccucgagucugagugcu

SEQ ID NO: 2251440 - RNA, 19 nt, Artificial Sequence
  Description of Artificial Sequence: Synthetic oligonucleotide
gccggccacgugcguugcg

SEQ ID NO: 2251441 - RNA, 19 nt, Artificial Sequence
  Description of Artificial Sequence: Synthetic oligonucleotide
gcauuguaggagagagcua

SEQ ID NO: 2251442 - RNA, 19 nt, Artificial Sequence
  Description of Artificial Sequence: Synthetic oligonucleotide
cucagguggcagggaucga

SEQ ID NO: 2251443 - RNA, 19 nt, Artificial Sequence
  Description of Artificial Sequence: Synthetic oligonucleotide
cgugcguugcgcugcagcu

SEQ ID NO: 2251444 - RNA, 19 nt, Artificial Sequence
  Description of Artificial Sequence: Synthetic oligonucleotide
gcaguccagggagcaugca

SEQ ID NO: 2251445 - RNA, 19 nt, Artificial Sequence
  Description of Artificial Sequence: Synthetic oligonucleotide
gugcguugcgcugcagcuu

SEQ ID NO: 2251446 - RNA, 19 nt, Artificial Sequence
  Description of Artificial Sequence: Synthetic oligonucleotide
cguugcgcugcagcuucug

SEQ ID NO: 2251447 - RNA, 19 nt, Artificial Sequence
  Description of Artificial Sequence: Synthetic oligonucleotide
gcagggaucgaagcccauu

SEQ ID NO: 2251448 - RNA, 19 nt, Artificial Sequence
  Description of Artificial Sequence: Synthetic oligonucleotide
gaguugcuucaggcggcuu

SEQ ID NO: 2251449 - RNA, 19 nt, Artificial Sequence
  Description of Artificial Sequence: Synthetic oligonucleotide
ccacgugcguugcgcugca

SEQ ID NO: 2251450 - RNA, 19 nt, Artificial Sequence
  Description of Artificial Sequence: Synthetic oligonucleotide
caggcaguccagggagcau

SEQ ID NO: 2251451 - RNA, 19 nt, Artificial Sequence
  Description of Artificial Sequence: Synthetic oligonucleotide
ccagccggccacgugcguu

SEQ ID NO: 2251452 - RNA, 19 nt, Artificial Sequence
  Description of Artificial Sequence: Synthetic oligonucleotide
cggccacgugcguugcgcu

SEQ ID NO: 2251453 - RNA, 19 nt, Artificial Sequence
  Description of Artificial Sequence: Synthetic oligonucleotide
gccucgagucugagugcuu

SEQ ID NO: 2251454 - RNA, 19 nt, Artificial Sequence
  Description of Artificial Sequence: Synthetic oligonucleotide
aauucuacagauuugacgu

SEQ ID NO: 2251455 - RNA, 19 nt, Artificial Sequence
  Description of Artificial Sequence: Synthetic oligonucleotide
uuucauauaaacuagucca

SEQ ID NO: 2251456 - RNA, 19 nt, Artificial Sequence
  Description of Artificial Sequence: Synthetic oligonucleotide
uuuaagaguuaaaauaccg

SEQ ID NO: 2251457 - RNA, 19 nt, Artificial Sequence
  Description of Artificial Sequence: Synthetic oligonucleotide
aaaauaccgaacuuucccc

SEQ ID NO: 2251458 - RNA, 19 nt, Artificial Sequence
  Description of Artificial Sequence: Synthetic oligonucleotide
auuucauauaaacuagucc

SEQ ID NO: 2251459 - RNA, 19 nt, Artificial Sequence
  Description of Artificial Sequence: Synthetic oligonucleotide
aaagcaaggacauagccca

SEQ ID NO: 2251460 - RNA, 19 nt, Artificial Sequence
  Description of Artificial Sequence: Synthetic oligonucleotide
ucugcuagagcuaugauac

SEQ ID NO: 2251461 - RNA, 19 nt, Artificial Sequence
  Description of Artificial Sequence: Synthetic oligonucleotide
aaaauaacaauaaggaucu

SEQ ID NO: 2251462 - RNA, 19 nt, Artificial Sequence
  Description of Artificial Sequence: Synthetic oligonucleotide
agagcuaugauacccaaac

SEQ ID NO: 2251463 - RNA, 19 nt, Artificial Sequence
  Description of Artificial Sequence: Synthetic oligonucleotide
uauguuuuguuuaacuucc

SEQ ID NO: 2251464 - RNA, 19 nt, Artificial Sequence
  Description of Artificial Sequence: Synthetic oligonucleotide
uauagagaugacaaugagg

SEQ ID NO: 2251465 - RNA, 19 nt, Artificial Sequence
  Description of Artificial Sequence: Synthetic oligonucleotide
gaauucuacagauuugacg

SEQ ID NO: 2251466 - RNA, 19 nt, Artificial Sequence
  Description of Artificial Sequence: Synthetic oligonucleotide
aaacacauuguacugaagu

SEQ ID NO: 2251467 - RNA, 19 nt, Artificial Sequence
  Description of Artificial Sequence: Synthetic oligonucleotide
ucucgugaaagccauacgg

SEQ ID NO: 2251468 - RNA, 19 nt, Artificial Sequence
  Description of Artificial Sequence: Synthetic oligonucleotide
uuucauuuggagaaaacca

SEQ ID NO: 2251469 - RNA, 19 nt, Artificial Sequence
  Description of Artificial Sequence: Synthetic oligonucleotide
aggaguauagccaaaaucg

SEQ ID NO: 2251470 - RNA, 19 nt, Artificial Sequence
  Description of Artificial Sequence: Synthetic oligonucleotide
aauauggcaauggugaaag

SEQ ID NO: 2251471 - RNA, 19 nt, Artificial Sequence
  Description of Artificial Sequence: Synthetic oligonucleotide
uguaacuucacauguguag

SEQ ID NO: 2251472 - RNA, 19 nt, Artificial Sequence
  Description of Artificial Sequence: Synthetic oligonucleotide
acuugagugaucaauaugg

SEQ ID NO: 2251473 - RNA, 19 nt, Artificial Sequence
  Description of Artificial Sequence: Synthetic oligonucleotide
ugagugaucaauauggcaa

SEQ ID NO: 2251474 - RNA, 19 nt, Artificial Sequence
  Description of Artificial Sequence: Synthetic oligonucleotide
uucauuaagucugagacug

SEQ ID NO: 2251475 - RNA, 19 nt, Artificial Sequence
  Description of Artificial Sequence: Synthetic oligonucleotide
agcucuauaacuguuuugc

SEQ ID NO: 2251476 - RNA, 19 nt, Artificial Sequence
  Description of Artificial Sequence: Synthetic oligonucleotide
aguauuaguguuccuauag

SEQ ID NO: 2251477 - RNA, 19 nt, Artificial Sequence
  Description of Artificial Sequence: Synthetic oligonucleotide
uauuaguguuccuauagag

SEQ ID NO: 2251478 - RNA, 19 nt, Artificial Sequence
  Description of Artificial Sequence: Synthetic oligonucleotide
aguggauuuauauuuaaga

SEQ ID NO: 2251479 - RNA, 19 nt, Artificial Sequence
  Description of Artificial Sequence: Synthetic oligonucleotide
uuaagaguuaaaauaccga

SEQ ID NO: 2251480 - RNA, 19 nt, Artificial Sequence
  Description of Artificial Sequence: Synthetic oligonucleotide
uuugacguuacuaaacagu

SEQ ID NO: 2251481 - RNA, 19 nt, Artificial Sequence
  Description of Artificial Sequence: Synthetic oligonucleotide
guggauuuauauuuaagag

SEQ ID NO: 2251482 - RNA, 19 nt, Artificial Sequence
  Description of Artificial Sequence: Synthetic oligonucleotide
uggauuuauauuuaagagu

SEQ ID NO: 2251483 - RNA, 19 nt, Artificial Sequence
  Description of Artificial Sequence: Synthetic oligonucleotide
ucacccuucauuaagucug

SEQ ID NO: 2251484 - RNA, 19 nt, Artificial Sequence
  Description of Artificial Sequence: Synthetic oligonucleotide
caagccaugaugcagagac

SEQ ID NO: 2251485 - RNA, 19 nt, Artificial Sequence
  Description of Artificial Sequence: Synthetic oligonucleotide
uuaagucugagacugagua

SEQ ID NO: 2251486 - RNA, 19 nt, Artificial Sequence
  Description of Artificial Sequence: Synthetic oligonucleotide
uaagaguuaaaauaccgaa

SEQ ID NO: 2251487 - RNA, 19 nt, Artificial Sequence
  Description of Artificial Sequence: Synthetic oligonucleotide
uuaguguuccuauagagau

SEQ ID NO: 2251488 - RNA, 19 nt, Artificial Sequence
  Description of Artificial Sequence: Synthetic oligonucleotide
aaagcagucauaaacacau

SEQ ID NO: 2251489 - RNA, 19 nt, Artificial Sequence
  Description of Artificial Sequence: Synthetic oligonucleotide
aacuaguccaaguaauucu

SEQ ID NO: 2251490 - RNA, 19 nt, Artificial Sequence
  Description of Artificial Sequence: Synthetic oligonucleotide
aagaguuaaaauaccgaac

SEQ ID NO: 2251491 - RNA, 19 nt, Artificial Sequence
  Description of Artificial Sequence: Synthetic oligonucleotide
uauaaacuaguccaaguaa

SEQ ID NO: 2251492 - RNA, 19 nt, Artificial Sequence
  Description of Artificial Sequence: Synthetic oligonucleotide
aggaagcuaaauuugcaac

SEQ ID NO: 2251493 - RNA, 19 nt, Artificial Sequence
  Description of Artificial Sequence: Synthetic oligonucleotide
aaacuaguccaaguaauuc

SEQ ID NO: 2251494 - RNA, 19 nt, Artificial Sequence
  Description of Artificial Sequence: Synthetic oligonucleotide
aaagccauacgguauuuca

SEQ ID NO: 2251495 - RNA, 19 nt, Artificial Sequence
  Description of Artificial Sequence: Synthetic oligonucleotide
ucguagaugaaaauauaug

SEQ ID NO: 2251496 - RNA, 19 nt, Artificial Sequence
  Description of Artificial Sequence: Synthetic oligonucleotide
uuacuaaacaguaguugag

SEQ ID NO: 2251497 - RNA, 19 nt, Artificial Sequence
  Description of Artificial Sequence: Synthetic oligonucleotide
auuuaagaguuaaaauacc

SEQ ID NO: 2251498 - RNA, 19 nt, Artificial Sequence
  Description of Artificial Sequence: Synthetic oligonucleotide
uuguauaguccucugguug

SEQ ID NO: 2251499 - RNA, 19 nt, Artificial Sequence
  Description of Artificial Sequence: Synthetic oligonucleotide
uugaggacgauacaaggga

SEQ ID NO: 2251500 - RNA, 19 nt, Artificial Sequence
  Description of Artificial Sequence: Synthetic oligonucleotide
ucucuuauucguucgagug

SEQ ID NO: 2251501 - RNA, 19 nt, Artificial Sequence
  Description of Artificial Sequence: Synthetic oligonucleotide
agcuaugauacccaaaccu

SEQ ID NO: 2251502 - RNA, 19 nt, Artificial Sequence
  Description of Artificial Sequence: Synthetic oligonucleotide
aucaauauggcaaugguga

SEQ ID NO: 2251503 - RNA, 19 nt, Artificial Sequence
  Description of Artificial Sequence: Synthetic oligonucleotide
agccauacgguauuucagc

SEQ ID NO: 2251504 - RNA, 19 nt, Artificial Sequence
  Description of Artificial Sequence: Synthetic oligonucleotide
auauauguuuuguuuaacu

SEQ ID NO: 2251505 - RNA, 19 nt, Artificial Sequence
  Description of Artificial Sequence: Synthetic oligonucleotide
gacgauacaagggaugacg

SEQ ID NO: 2251506 - RNA, 19 nt, Artificial Sequence
  Description of Artificial Sequence: Synthetic oligonucleotide
aguaguugagcugaaccgc

SEQ ID NO: 2251507 - RNA, 19 nt, Artificial Sequence
  Description of Artificial Sequence: Synthetic oligonucleotide
acugaaguaguauuagugu

SEQ ID NO: 2251508 - RNA, 19 nt, Artificial Sequence
  Description of Artificial Sequence: Synthetic oligonucleotide
uccagaagcacucuuuaca

SEQ ID NO: 2251509 - RNA, 19 nt, Artificial Sequence
  Description of Artificial Sequence: Synthetic oligonucleotide
caaagcaaggacauagccc

SEQ ID NO: 2251510 - RNA, 19 nt, Artificial Sequence
  Description of Artificial Sequence: Synthetic oligonucleotide
aagggaugacgacaguuuc

SEQ ID NO: 2251511 - RNA, 19 nt, Artificial Sequence
  Description of Artificial Sequence: Synthetic oligonucleotide
ugacaaugaggccaagucc

SEQ ID NO: 2251512 - RNA, 19 nt, Artificial Sequence
  Description of Artificial Sequence: Synthetic oligonucleotide
aaaucgggaaaauaacaau

SEQ ID NO: 2251513 - RNA, 19 nt, Artificial Sequence
  Description of Artificial Sequence: Synthetic oligonucleotide
uguguaguuucccaagaca

SEQ ID NO: 2251514 - RNA, 19 nt, Artificial Sequence
  Description of Artificial Sequence: Synthetic oligonucleotide
cauugaggacgauacaagg

SEQ ID NO: 2251515 - RNA, 19 nt, Artificial Sequence
  Description of Artificial Sequence: Synthetic oligonucleotide
ugauucucuuauucguucg

SEQ ID NO: 2251516 - RNA, 19 nt, Artificial Sequence
  Description of Artificial Sequence: Synthetic oligonucleotide
agcuaaauuugcaaccucc

SEQ ID NO: 2251517 - RNA, 19 nt, Artificial Sequence
  Description of Artificial Sequence: Synthetic oligonucleotide
ucuauaacuguuuugccuu

SEQ ID NO: 2251518 - RNA, 19 nt, Artificial Sequence
  Description of Artificial Sequence: Synthetic oligonucleotide
uguacugaaguaguauuag

SEQ ID NO: 2251519 - RNA, 19 nt, Artificial Sequence
  Description of Artificial Sequence: Synthetic oligonucleotide
acagauuugacguuacuaa

SEQ ID NO: 2251520 - RNA, 19 nt, Artificial Sequence
  Description of Artificial Sequence: Synthetic oligonucleotide
aaauaccgaacuuucccca

SEQ ID NO: 2251521 - RNA, 19 nt, Artificial Sequence
  Description of Artificial Sequence: Synthetic oligonucleotide
agcagucauaaacacauug

SEQ ID NO: 2251522 - RNA, 19 nt, Artificial Sequence
  Description of Artificial Sequence: Synthetic oligonucleotide
gauuugacguuacuaaaca

SEQ ID NO: 2251523 - RNA, 19 nt, Artificial Sequence
  Description of Artificial Sequence: Synthetic oligonucleotide
augauucucuuauucguuc

SEQ ID NO: 2251524 - RNA, 19 nt, Artificial Sequence
  Description of Artificial Sequence: Synthetic oligonucleotide
aauaccgaacuuuccccag

SEQ ID NO: 2251525 - RNA, 19 nt, Artificial Sequence
  Description of Artificial Sequence: Synthetic oligonucleotide
aaaaucgggaaaauaacaa

SEQ ID NO: 2251526 - RNA, 19 nt, Artificial Sequence
  Description of Artificial Sequence: Synthetic oligonucleotide
aauaacaauaaggaucuuu

SEQ ID NO: 2251527 - RNA, 19 nt, Artificial Sequence
  Description of Artificial Sequence: Synthetic oligonucleotide
agcagaaugauucucuuau

SEQ ID NO: 2251528 - RNA, 19 nt, Artificial Sequence
  Description of Artificial Sequence: Synthetic oligonucleotide
caguaguugagcugaaccg

SEQ ID NO: 2251529 - RNA, 19 nt, Artificial Sequence
  Description of Artificial Sequence: Synthetic oligonucleotide
aaugaggccaaguccagaa

SEQ ID NO: 2251530 - RNA, 19 nt, Artificial Sequence
  Description of Artificial Sequence: Synthetic oligonucleotide
ugauacccaaaccugaaau

SEQ ID NO: 2251531 - RNA, 19 nt, Artificial Sequence
  Description of Artificial Sequence: Synthetic oligonucleotide
cucuggauaacucuguaac

SEQ ID NO: 2251532 - RNA, 19 nt, Artificial Sequence
  Description of Artificial Sequence: Synthetic oligonucleotide
ucccaagacagcuuguugc

SEQ ID NO: 2251533 - RNA, 19 nt, Artificial Sequence
  Description of Artificial Sequence: Synthetic oligonucleotide
auauaaacuaguccaagua

SEQ ID NO: 2251534 - RNA, 19 nt, Artificial Sequence
  Description of Artificial Sequence: Synthetic oligonucleotide
ugaucaauauggcaauggu

SEQ ID NO: 2251535 - RNA, 19 nt, Artificial Sequence
  Description of Artificial Sequence: Synthetic oligonucleotide
uugacguuacuaaacagua

SEQ ID NO: 2251536 - RNA, 19 nt, Artificial Sequence
  Description of Artificial Sequence: Synthetic oligonucleotide
agauuugacguuacuaaac

SEQ ID NO: 2251537 - RNA, 19 nt, Artificial Sequence
  Description of Artificial Sequence: Synthetic oligonucleotide
acuaaacaguaguugagcu

SEQ ID NO: 2251538 - RNA, 19 nt, Artificial Sequence
  Description of Artificial Sequence: Synthetic oligonucleotide
ugggaugagaagaauggcu

SEQ ID NO: 2251539 - RNA, 19 nt, Artificial Sequence
  Description of Artificial Sequence: Synthetic oligonucleotide
aaccugaaaucaaaagggg

SEQ ID NO: 2251540 - RNA, 19 nt, Artificial Sequence
  Description of Artificial Sequence: Synthetic oligonucleotide
gaguauagccaaaaucggg

SEQ ID NO: 2251541 - RNA, 19 nt, Artificial Sequence
  Description of Artificial Sequence: Synthetic oligonucleotide
ucauauaaacuaguccaag

SEQ ID NO: 2251542 - RNA, 19 nt, Artificial Sequence
  Description of Artificial Sequence: Synthetic oligonucleotide
aacacauuguacugaagua

SEQ ID NO: 2251543 - RNA, 19 nt, Artificial Sequence
  Description of Artificial Sequence: Synthetic oligonucleotide
gaggaguauagccaaaauc

SEQ ID NO: 2251544 - RNA, 19 nt, Artificial Sequence
  Description of Artificial Sequence: Synthetic oligonucleotide
auuugcaaccuccuuucuc

SEQ ID NO: 2251545 - RNA, 19 nt, Artificial Sequence
  Description of Artificial Sequence: Synthetic oligonucleotide
aagcuaaauuugcaaccuc

SEQ ID NO: 2251546 - RNA, 19 nt, Artificial Sequence
  Description of Artificial Sequence: Synthetic oligonucleotide
uucauauaaacuaguccaa

SEQ ID NO: 2251547 - RNA, 19 nt, Artificial Sequence
  Description of Artificial Sequence: Synthetic oligonucleotide
auuugacguuacuaaacag

SEQ ID NO: 2251548 - RNA, 19 nt, Artificial Sequence
  Description of Artificial Sequence: Synthetic oligonucleotide
ucuuuacaggguuuucucc

SEQ ID NO: 2251549 - RNA, 19 nt, Artificial Sequence
  Description of Artificial Sequence: Synthetic oligonucleotide
agcgacaaauuucauauaa

SEQ ID NO: 2251550 - RNA, 19 nt, Artificial Sequence
  Description of Artificial Sequence: Synthetic oligonucleotide
ucacauacauuucuucagu

SEQ ID NO: 2251551 - RNA, 19 nt, Artificial Sequence
  Description of Artificial Sequence: Synthetic oligonucleotide
acaguuucauugcacuuag

SEQ ID NO: 2251552 - RNA, 19 nt, Artificial Sequence
  Description of Artificial Sequence: Synthetic oligonucleotide
uuuuacuuccaucguagau

SEQ ID NO: 2251553 - RNA, 19 nt, Artificial Sequence
  Description of Artificial Sequence: Synthetic oligonucleotide
gucauaaacacauuguacu

SEQ ID NO: 2251554 - RNA, 19 nt, Artificial Sequence
  Description of Artificial Sequence: Synthetic oligonucleotide
acuucacauguguaguuuc

SEQ ID NO: 2251555 - RNA, 19 nt, Artificial Sequence
  Description of Artificial Sequence: Synthetic oligonucleotide
ggugaaagaggucaucccg

SEQ ID NO: 2251556 - RNA, 19 nt, Artificial Sequence
  Description of Artificial Sequence: Synthetic oligonucleotide
ucuuauucguucgagugga

SEQ ID NO: 2251557 - RNA, 19 nt, Artificial Sequence
  Description of Artificial Sequence: Synthetic oligonucleotide
gauacaagggaugacgaca

SEQ ID NO: 2251558 - RNA, 19 nt, Artificial Sequence
  Description of Artificial Sequence: Synthetic oligonucleotide
acacauuguacugaaguag

SEQ ID NO: 2251559 - RNA, 19 nt, Artificial Sequence
  Description of Artificial Sequence: Synthetic oligonucleotide
uacuaaacaguaguugagc

SEQ ID NO: 2251560 - RNA, 19 nt, Artificial Sequence
  Description of Artificial Sequence: Synthetic oligonucleotide
gggaaaauaacaauaagga

SEQ ID NO: 2251561 - RNA, 19 nt, Artificial Sequence
  Description of Artificial Sequence: Synthetic oligonucleotide
aguugagcugaaccgcagc

SEQ ID NO: 2251562 - RNA, 19 nt, Artificial Sequence
  Description of Artificial Sequence: Synthetic oligonucleotide
guuucauugcacuuaguga

SEQ ID NO: 2251563 - RNA, 19 nt, Artificial Sequence
  Description of Artificial Sequence: Synthetic oligonucleotide
auugaggacgauacaaggg

SEQ ID NO: 2251564 - RNA, 19 nt, Artificial Sequence
  Description of Artificial Sequence: Synthetic oligonucleotide
cuaaacaguaguugagcug

SEQ ID NO: 2251565 - RNA, 19 nt, Artificial Sequence
  Description of Artificial Sequence: Synthetic oligonucleotide
acucuguaacuucacaugu

SEQ ID NO: 2251566 - RNA, 19 nt, Artificial Sequence
  Description of Artificial Sequence: Synthetic oligonucleotide
gaucaauauggcaauggug

SEQ ID NO: 2251567 - RNA, 19 nt, Artificial Sequence
  Description of Artificial Sequence: Synthetic oligonucleotide
ugcacuuagugaauucuac

SEQ ID NO: 2251568 - RNA, 19 nt, Artificial Sequence
  Description of Artificial Sequence: Synthetic oligonucleotide
agccaugaugcagagacac

SEQ ID NO: 2251569 - RNA, 19 nt, Artificial Sequence
  Description of Artificial Sequence: Synthetic oligonucleotide
ggaagcuaaauuugcaacc

SEQ ID NO: 2251570 - RNA, 19 nt, Artificial Sequence
  Description of Artificial Sequence: Synthetic oligonucleotide
caaaaucgggaaaauaaca

SEQ ID NO: 2251571 - RNA, 19 nt, Artificial Sequence
  Description of Artificial Sequence: Synthetic oligonucleotide
aaucgggaaaauaacaaua

SEQ ID NO: 2251572 - RNA, 19 nt, Artificial Sequence
  Description of Artificial Sequence: Synthetic oligonucleotide
acauguguaguuucccaag

SEQ ID NO: 2251573 - RNA, 19 nt, Artificial Sequence
  Description of Artificial Sequence: Synthetic oligonucleotide
uaggagguuguauaguccu

SEQ ID NO: 2251574 - RNA, 19 nt, Artificial Sequence
  Description of Artificial Sequence: Synthetic oligonucleotide
uccugggaugagaagaaug

SEQ ID NO: 2251575 - RNA, 19 nt, Artificial Sequence
  Description of Artificial Sequence: Synthetic oligonucleotide
ugacguuacuaaacaguag

SEQ ID NO: 2251576 - RNA, 19 nt, Artificial Sequence
  Description of Artificial Sequence: Synthetic oligonucleotide
cuugagugaucaauauggc

SEQ ID NO: 2251577 - RNA, 19 nt, Artificial Sequence
  Description of Artificial Sequence: Synthetic oligonucleotide
gauacccaaaccugaaauc

SEQ ID NO: 2251578 - RNA, 19 nt, Artificial Sequence
  Description of Artificial Sequence: Synthetic oligonucleotide
uggcaauggugaaagaggu

SEQ ID NO: 2251579 - RNA, 19 nt, Artificial Sequence
  Description of Artificial Sequence: Synthetic oligonucleotide
auuguacugaaguaguauu

SEQ ID NO: 2251580 - RNA, 19 nt, Artificial Sequence
  Description of Artificial Sequence: Synthetic oligonucleotide
cuauagagaugacaaugag

SEQ ID NO: 2251581 - RNA, 19 nt, Artificial Sequence
  Description of Artificial Sequence: Synthetic oligonucleotide
caggagcccagcaacagcg

SEQ ID NO: 2251582 - RNA, 19 nt, Artificial Sequence
  Description of Artificial Sequence: Synthetic oligonucleotide
uguucucuacaguagaauu

SEQ ID NO: 2251583 - RNA, 19 nt, Artificial Sequence
  Description of Artificial Sequence: Synthetic oligonucleotide
uaugauacccaaaccugaa

SEQ ID NO: 2251584 - RNA, 19 nt, Artificial Sequence
  Description of Artificial Sequence: Synthetic oligonucleotide
ugcuagagcuaugauaccc

SEQ ID NO: 2251585 - RNA, 19 nt, Artificial Sequence
  Description of Artificial Sequence: Synthetic oligonucleotide
uucucuacaguagaauugu

SEQ ID NO: 2251586 - RNA, 19 nt, Artificial Sequence
  Description of Artificial Sequence: Synthetic oligonucleotide
uauucguucgaguggauuu

SEQ ID NO: 2251587 - RNA, 19 nt, Artificial Sequence
  Description of Artificial Sequence: Synthetic oligonucleotide
aguauagccaaaaucggga

SEQ ID NO: 2251588 - RNA, 19 nt, Artificial Sequence
  Description of Artificial Sequence: Synthetic oligonucleotide
cgggaaaauaacaauaagg

SEQ ID NO: 2251589 - RNA, 19 nt, Artificial Sequence
  Description of Artificial Sequence: Synthetic oligonucleotide
uguuccuauagagaugaca

SEQ ID NO: 2251590 - RNA, 19 nt, Artificial Sequence
  Description of Artificial Sequence: Synthetic oligonucleotide
gacguuacuaaacaguagu

SEQ ID NO: 2251591 - RNA, 19 nt, Artificial Sequence
  Description of Artificial Sequence: Synthetic oligonucleotide
aguuaaaauaccgaacuuu

SEQ ID NO: 2251592 - RNA, 19 nt, Artificial Sequence
  Description of Artificial Sequence: Synthetic oligonucleotide
auagcccagcacuugagug

SEQ ID NO: 2251593 - RNA, 19 nt, Artificial Sequence
  Description of Artificial Sequence: Synthetic oligonucleotide
uuuguucucuacaguagaa

SEQ ID NO: 2251594 - RNA, 19 nt, Artificial Sequence
  Description of Artificial Sequence: Synthetic oligonucleotide
ucuggauaacucuguaacu

SEQ ID NO: 2251595 - RNA, 19 nt, Artificial Sequence
  Description of Artificial Sequence: Synthetic oligonucleotide
auaacaauaaggaucuuuu

SEQ ID NO: 2251596 - RNA, 19 nt, Artificial Sequence
  Description of Artificial Sequence: Synthetic oligonucleotide
ugaauucuacagauuugac

SEQ ID NO: 2251597 - RNA, 19 nt, Artificial Sequence
  Description of Artificial Sequence: Synthetic oligonucleotide
gugaucaauauggcaaugg

SEQ ID NO: 2251598 - RNA, 19 nt, Artificial Sequence
  Description of Artificial Sequence: Synthetic oligonucleotide
auacccaaaccugaaauca

SEQ ID NO: 2251599 - RNA, 19 nt, Artificial Sequence
  Description of Artificial Sequence: Synthetic oligonucleotide
uucucgugaaagccauacg

SEQ ID NO: 2251600 - RNA, 19 nt, Artificial Sequence
  Description of Artificial Sequence: Synthetic oligonucleotide
gaaugauucucuuauucgu

SEQ ID NO: 2251601 - RNA, 19 nt, Artificial Sequence
  Description of Artificial Sequence: Synthetic oligonucleotide
cuucacauguguaguuucc

SEQ ID NO: 2251602 - RNA, 19 nt, Artificial Sequence
  Description of Artificial Sequence: Synthetic oligonucleotide
uuccuaggagguuguauag

SEQ ID NO: 2251603 - RNA, 19 nt, Artificial Sequence
  Description of Artificial Sequence: Synthetic oligonucleotide
uucugcuagagcuaugaua

SEQ ID NO: 2251604 - RNA, 19 nt, Artificial Sequence
  Description of Artificial Sequence: Synthetic oligonucleotide
cuaggagguuguauagucc

SEQ ID NO: 2251605 - RNA, 19 nt, Artificial Sequence
  Description of Artificial Sequence: Synthetic oligonucleotide
aaagaggcaucacccuuca

SEQ ID NO: 2251606 - RNA, 19 nt, Artificial Sequence
  Description of Artificial Sequence: Synthetic oligonucleotide
guuccuauagagaugacaa

SEQ ID NO: 2251607 - RNA, 19 nt, Artificial Sequence
  Description of Artificial Sequence: Synthetic oligonucleotide
ucuacagauuugacguuac

SEQ ID NO: 2251608 - RNA, 19 nt, Artificial Sequence
  Description of Artificial Sequence: Synthetic oligonucleotide
agagacacaguccaaccaa

SEQ ID NO: 2251609 - RNA, 19 nt, Artificial Sequence
  Description of Artificial Sequence: Synthetic oligonucleotide
agaggcaucacccuucauu

SEQ ID NO: 2251610 - RNA, 19 nt, Artificial Sequence
  Description of Artificial Sequence: Synthetic oligonucleotide
uucaaagaggcaucacccu

SEQ ID NO: 2251611 - RNA, 19 nt, Artificial Sequence
  Description of Artificial Sequence: Synthetic oligonucleotide
acgacaguuucauugcacu

SEQ ID NO: 2251612 - RNA, 19 nt, Artificial Sequence
  Description of Artificial Sequence: Synthetic oligonucleotide
ugcacugguucacaagcca

SEQ ID NO: 2251613 - RNA, 19 nt, Artificial Sequence
  Description of Artificial Sequence: Synthetic oligonucleotide
auaaacuaguccaaguaau

SEQ ID NO: 2251614 - RNA, 19 nt, Artificial Sequence
  Description of Artificial Sequence: Synthetic oligonucleotide
aggguuuucuccugggaug

SEQ ID NO: 2251615 - RNA, 19 nt, Artificial Sequence
  Description of Artificial Sequence: Synthetic oligonucleotide
aguaguauuaguguuccua

SEQ ID NO: 2251616 - RNA, 19 nt, Artificial Sequence
  Description of Artificial Sequence: Synthetic oligonucleotide
uugugccuccacauugagg

SEQ ID NO: 2251617 - RNA, 19 nt, Artificial Sequence
  Description of Artificial Sequence: Synthetic oligonucleotide
uggauaacucuguaacuuc

SEQ ID NO: 2251618 - RNA, 19 nt, Artificial Sequence
  Description of Artificial Sequence: Synthetic oligonucleotide
uccaucguagaugaaaaua

SEQ ID NO: 2251619 - RNA, 19 nt, Artificial Sequence
  Description of Artificial Sequence: Synthetic oligonucleotide
cauuaagucugagacugag

SEQ ID NO: 2251620 - RNA, 19 nt, Artificial Sequence
  Description of Artificial Sequence: Synthetic oligonucleotide
auagccaaaaucgggaaaa

SEQ ID NO: 2251621 - RNA, 19 nt, Artificial Sequence
  Description of Artificial Sequence: Synthetic oligonucleotide
guucucuacaguagaauug

SEQ ID NO: 2251622 - RNA, 19 nt, Artificial Sequence
  Description of Artificial Sequence: Synthetic oligonucleotide
uacagauuugacguuacua

SEQ ID NO: 2251623 - RNA, 19 nt, Artificial Sequence
  Description of Artificial Sequence: Synthetic oligonucleotide
gugaauucuacagauuuga

SEQ ID NO: 2251624 - RNA, 19 nt, Artificial Sequence
  Description of Artificial Sequence: Synthetic oligonucleotide
gaguggauuuauauuuaag

SEQ ID NO: 2251625 - RNA, 19 nt, Artificial Sequence
  Description of Artificial Sequence: Synthetic oligonucleotide
cagaagaggaguauagcca

SEQ ID NO: 2251626 - RNA, 19 nt, Artificial Sequence
  Description of Artificial Sequence: Synthetic oligonucleotide
aagccauacgguauuucag

SEQ ID NO: 2251627 - RNA, 19 nt, Artificial Sequence
  Description of Artificial Sequence: Synthetic oligonucleotide
uucucuuauucguucgagu

SEQ ID NO: 2251628 - RNA, 19 nt, Artificial Sequence
  Description of Artificial Sequence: Synthetic oligonucleotide
aauuugcaaccuccuuucu

SEQ ID NO: 2251629 - RNA, 19 nt, Artificial Sequence
  Description of Artificial Sequence: Synthetic oligonucleotide
cuaugauacccaaaccuga

SEQ ID NO: 2251630 - RNA, 19 nt, Artificial Sequence
  Description of Artificial Sequence: Synthetic oligonucleotide
aguuuguucucuacaguag

SEQ ID NO: 2251631 - RNA, 19 nt, Artificial Sequence
  Description of Artificial Sequence: Synthetic oligonucleotide
ugccuccacauugaggacg

SEQ ID NO: 2251632 - RNA, 19 nt, Artificial Sequence
  Description of Artificial Sequence: Synthetic oligonucleotide
auacaagggaugacgacag

SEQ ID NO: 2251633 - RNA, 19 nt, Artificial Sequence
  Description of Artificial Sequence: Synthetic oligonucleotide
gguucacaagccaugaugc

SEQ ID NO: 2251634 - RNA, 19 nt, Artificial Sequence
  Description of Artificial Sequence: Synthetic oligonucleotide
ggaucuuuucauuuggaga

SEQ ID NO: 2251635 - RNA, 19 nt, Artificial Sequence
  Description of Artificial Sequence: Synthetic oligonucleotide
uaguguuccuauagagaug

SEQ ID NO: 2251636 - RNA, 19 nt, Artificial Sequence
  Description of Artificial Sequence: Synthetic oligonucleotide
cucuuuacaggguuuucuc

SEQ ID NO: 2251637 - RNA, 19 nt, Artificial Sequence
  Description of Artificial Sequence: Synthetic oligonucleotide
aguccaaccaaagcaagga

SEQ ID NO: 2251638 - RNA, 19 nt, Artificial Sequence
  Description of Artificial Sequence: Synthetic oligonucleotide
ucaauauggcaauggugaa

SEQ ID NO: 2251639 - RNA, 19 nt, Artificial Sequence
  Description of Artificial Sequence: Synthetic oligonucleotide
uucacauguguaguuuccc

SEQ ID NO: 2251640 - RNA, 19 nt, Artificial Sequence
  Description of Artificial Sequence: Synthetic oligonucleotide
acauugaggacgauacaag

SEQ ID NO: 2251641 - RNA, 19 nt, Artificial Sequence
  Description of Artificial Sequence: Synthetic oligonucleotide
agcaaggacauagcccagc

SEQ ID NO: 2251642 - RNA, 19 nt, Artificial Sequence
  Description of Artificial Sequence: Synthetic oligonucleotide
guauuaguguuccuauaga

SEQ ID NO: 2251643 - RNA, 19 nt, Artificial Sequence
  Description of Artificial Sequence: Synthetic oligonucleotide
uagagaugacaaugaggcc

SEQ ID NO: 2251644 - RNA, 19 nt, Artificial Sequence
  Description of Artificial Sequence: Synthetic oligonucleotide
cccgaaagcagucauaaac

SEQ ID NO: 2251645 - RNA, 19 nt, Artificial Sequence
  Description of Artificial Sequence: Synthetic oligonucleotide
gaggcaucacccuucauua

SEQ ID NO: 2251646 - RNA, 19 nt, Artificial Sequence
  Description of Artificial Sequence: Synthetic oligonucleotide
gagcuaugauacccaaacc

SEQ ID NO: 2251647 - RNA, 19 nt, Artificial Sequence
  Description of Artificial Sequence: Synthetic oligonucleotide
ucgugaaagccauacggua

SEQ ID NO: 2251648 - RNA, 19 nt, Artificial Sequence
  Description of Artificial Sequence: Synthetic oligonucleotide
cuucucgugaaagccauac

SEQ ID NO: 2251649 - RNA, 19 nt, Artificial Sequence
  Description of Artificial Sequence: Synthetic oligonucleotide
ggaguauagccaaaaucgg

SEQ ID NO: 2251650 - RNA, 19 nt, Artificial Sequence
  Description of Artificial Sequence: Synthetic oligonucleotide
gauaacucuguaacuucac

SEQ ID NO: 2251651 - RNA, 19 nt, Artificial Sequence
  Description of Artificial Sequence: Synthetic oligonucleotide
ucucuggauaacucuguaa

SEQ ID NO: 2251652 - RNA, 19 nt, Artificial Sequence
  Description of Artificial Sequence: Synthetic oligonucleotide
auucucuuauucguucgag

SEQ ID NO: 2251653 - RNA, 19 nt, Artificial Sequence
  Description of Artificial Sequence: Synthetic oligonucleotide
uaguugagcugaaccgcag

SEQ ID NO: 2251654 - RNA, 19 nt, Artificial Sequence
  Description of Artificial Sequence: Synthetic oligonucleotide
ugaggacgauacaagggau

SEQ ID NO: 2251655 - RNA, 19 nt, Artificial Sequence
  Description of Artificial Sequence: Synthetic oligonucleotide
cacuugagugaucaauaug

SEQ ID NO: 2251656 - RNA, 19 nt, Artificial Sequence
  Description of Artificial Sequence: Synthetic oligonucleotide
ccaaaccugaaaucaaaag

SEQ ID NO: 2251657 - RNA, 19 nt, Artificial Sequence
  Description of Artificial Sequence: Synthetic oligonucleotide
ucgaguggauuuauauuua

SEQ ID NO: 2251658 - RNA, 19 nt, Artificial Sequence
  Description of Artificial Sequence: Synthetic oligonucleotide
uugcacuuagugaauucua

SEQ ID NO: 2251659 - RNA, 19 nt, Artificial Sequence
  Description of Artificial Sequence: Synthetic oligonucleotide
ugacgacaguuucauugca

SEQ ID NO: 2251660 - RNA, 19 nt, Artificial Sequence
  Description of Artificial Sequence: Synthetic oligonucleotide
ucauuaagucugagacuga

SEQ ID NO: 2251661 - RNA, 19 nt, Artificial Sequence
  Description of Artificial Sequence: Synthetic oligonucleotide
gcaauggugaaagagguca

SEQ ID NO: 2251662 - RNA, 19 nt, Artificial Sequence
  Description of Artificial Sequence: Synthetic oligonucleotide
acucuuuacaggguuuucu

SEQ ID NO: 2251663 - RNA, 19 nt, Artificial Sequence
  Description of Artificial Sequence: Synthetic oligonucleotide
uugagcugaaccgcagcag

SEQ ID NO: 2251664 - RNA, 19 nt, Artificial Sequence
  Description of Artificial Sequence: Synthetic oligonucleotide
gacagcuuguugccuuucc

SEQ ID NO: 2251665 - RNA, 19 nt, Artificial Sequence
  Description of Artificial Sequence: Synthetic oligonucleotide
uccaaguaauucugcuaga

SEQ ID NO: 2251666 - RNA, 19 nt, Artificial Sequence
  Description of Artificial Sequence: Synthetic oligonucleotide
uccuucucgugaaagccau

SEQ ID NO: 2251667 - RNA, 19 nt, Artificial Sequence
  Description of Artificial Sequence: Synthetic oligonucleotide
aucgggaaaauaacaauaa

SEQ ID NO: 2251668 - RNA, 19 nt, Artificial Sequence
  Description of Artificial Sequence: Synthetic oligonucleotide
aggacgauacaagggauga

SEQ ID NO: 2251669 - RNA, 19 nt, Artificial Sequence
  Description of Artificial Sequence: Synthetic oligonucleotide
cauauaaacuaguccaagu

SEQ ID NO: 2251670 - RNA, 19 nt, Artificial Sequence
  Description of Artificial Sequence: Synthetic oligonucleotide
uucuacagauuugacguua

SEQ ID NO: 2251671 - RNA, 19 nt, Artificial Sequence
  Description of Artificial Sequence: Synthetic oligonucleotide
gguaaaguuuguucucuac

SEQ ID NO: 2251672 - RNA, 19 nt, Artificial Sequence
  Description of Artificial Sequence: Synthetic oligonucleotide
gcuuugugccuccacauug

SEQ ID NO: 2251673 - RNA, 19 nt, Artificial Sequence
  Description of Artificial Sequence: Synthetic oligonucleotide
aguccucugguuggaagcg

SEQ ID NO: 2251674 - RNA, 19 nt, Artificial Sequence
  Description of Artificial Sequence: Synthetic oligonucleotide
cauugcacuuagugaauuc

SEQ ID NO: 2251675 - RNA, 19 nt, Artificial Sequence
  Description of Artificial Sequence: Synthetic oligonucleotide
cauacgguauuucagcucu

SEQ ID NO: 2251676 - RNA, 19 nt, Artificial Sequence
  Description of Artificial Sequence: Synthetic oligonucleotide
ggaugagaagaauggcucc

SEQ ID NO: 2251677 - RNA, 19 nt, Artificial Sequence
  Description of Artificial Sequence: Synthetic oligonucleotide
aacuucacauguguaguuu

SEQ ID NO: 2251678 - RNA, 19 nt, Artificial Sequence
  Description of Artificial Sequence: Synthetic oligonucleotide
ugaaccgcagcagcaggag

SEQ ID NO: 2251679 - RNA, 19 nt, Artificial Sequence
  Description of Artificial Sequence: Synthetic oligonucleotide
gagguuguauaguccucug

SEQ ID NO: 2251680 - RNA, 19 nt, Artificial Sequence
  Description of Artificial Sequence: Synthetic oligonucleotide
aaguaguauuaguguuccu

SEQ ID NO: 2251681 - RNA, 19 nt, Artificial Sequence
  Description of Artificial Sequence: Synthetic oligonucleotide
gaggacgauacaagggaug

SEQ ID NO: 2251682 - RNA, 19 nt, Artificial Sequence
  Description of Artificial Sequence: Synthetic oligonucleotide
gaagcuaaauuugcaaccu

SEQ ID NO: 2251683 - RNA, 19 nt, Artificial Sequence
  Description of Artificial Sequence: Synthetic oligonucleotide
uaauucugcuagagcuaug

SEQ ID NO: 2251684 - RNA, 19 nt, Artificial Sequence
  Description of Artificial Sequence: Synthetic oligonucleotide
uaacuucacauguguaguu

SEQ ID NO: 2251685 - RNA, 19 nt, Artificial Sequence
  Description of Artificial Sequence: Synthetic oligonucleotide
cuauaacuguuuugccuuc

SEQ ID NO: 2251686 - RNA, 19 nt, Artificial Sequence
  Description of Artificial Sequence: Synthetic oligonucleotide
agaggaguauagccaaaau

SEQ ID NO: 2251687 - RNA, 19 nt, Artificial Sequence
  Description of Artificial Sequence: Synthetic oligonucleotide
uuguucucuacaguagaau

SEQ ID NO: 2251688 - RNA, 19 nt, Artificial Sequence
  Description of Artificial Sequence: Synthetic oligonucleotide
uaguauuaguguuccuaua

SEQ ID NO: 2251689 - RNA, 19 nt, Artificial Sequence
  Description of Artificial Sequence: Synthetic oligonucleotide
uagagcuaugauacccaaa

SEQ ID NO: 2251690 - RNA, 19 nt, Artificial Sequence
  Description of Artificial Sequence: Synthetic oligonucleotide
uaccgaacuuuccccagaa

SEQ ID NO: 2251691 - RNA, 19 nt, Artificial Sequence
  Description of Artificial Sequence: Synthetic oligonucleotide
uuccuauagagaugacaau

SEQ ID NO: 2251692 - RNA, 19 nt, Artificial Sequence
  Description of Artificial Sequence: Synthetic oligonucleotide
cuuuacaggguuuucuccu

SEQ ID NO: 2251693 - RNA, 19 nt, Artificial Sequence
  Description of Artificial Sequence: Synthetic oligonucleotide
cacauugaggacgauacaa

SEQ ID NO: 2251694 - RNA, 19 nt, Artificial Sequence
  Description of Artificial Sequence: Synthetic oligonucleotide
guaguauuaguguuccuau

SEQ ID NO: 2251695 - RNA, 19 nt, Artificial Sequence
  Description of Artificial Sequence: Synthetic oligonucleotide
guauagccaaaaucgggaa

SEQ ID NO: 2251696 - RNA, 19 nt, Artificial Sequence
  Description of Artificial Sequence: Synthetic oligonucleotide
uuugccuucucuggauaac

SEQ ID NO: 2251697 - RNA, 19 nt, Artificial Sequence
  Description of Artificial Sequence: Synthetic oligonucleotide
gacgacaguuucauugcac

SEQ ID NO: 2251698 - RNA, 19 nt, Artificial Sequence
  Description of Artificial Sequence: Synthetic oligonucleotide
aucccgaaagcagucauaa

SEQ ID NO: 2251699 - RNA, 19 nt, Artificial Sequence
  Description of Artificial Sequence: Synthetic oligonucleotide
augauacccaaaccugaaa

SEQ ID NO: 2251700 - RNA, 19 nt, Artificial Sequence
  Description of Artificial Sequence: Synthetic oligonucleotide
caggaagcuaaauuugcaa

SEQ ID NO: 2251701 - RNA, 19 nt, Artificial Sequence
  Description of Artificial Sequence: Synthetic oligonucleotide
agugaucaauauggcaaug

SEQ ID NO: 2251702 - RNA, 19 nt, Artificial Sequence
  Description of Artificial Sequence: Synthetic oligonucleotide
cauguguaguuucccaaga

SEQ ID NO: 2251703 - RNA, 19 nt, Artificial Sequence
  Description of Artificial Sequence: Synthetic oligonucleotide
auaccgaacuuuccccaga

SEQ ID NO: 2251704 - RNA, 19 nt, Artificial Sequence
  Description of Artificial Sequence: Synthetic oligonucleotide
gugagcaccagcccggcga

SEQ ID NO: 2251705 - RNA, 19 nt, Artificial Sequence
  Description of Artificial Sequence: Synthetic oligonucleotide
gaaccgcagcagcaggagc

SEQ ID NO: 2251706 - RNA, 19 nt, Artificial Sequence
  Description of Artificial Sequence: Synthetic oligonucleotide
acaguccaaccaaagcaag

SEQ ID NO: 2251707 - RNA, 19 nt, Artificial Sequence
  Description of Artificial Sequence: Synthetic oligonucleotide
ugccuucucuggauaacuc

SEQ ID NO: 2251708 - RNA, 19 nt, Artificial Sequence
  Description of Artificial Sequence: Synthetic oligonucleotide
agaggucaucccgaaagca

SEQ ID NO: 2251709 - RNA, 19 nt, Artificial Sequence
  Description of Artificial Sequence: Synthetic oligonucleotide
uuauucguucgaguggauu

SEQ ID NO: 2251710 - RNA, 19 nt, Artificial Sequence
  Description of Artificial Sequence: Synthetic oligonucleotide
ccuaggagguuguauaguc

SEQ ID NO: 2251711 - RNA, 19 nt, Artificial Sequence
  Description of Artificial Sequence: Synthetic oligonucleotide
auuaagucugagacugagu

SEQ ID NO: 2251712 - RNA, 19 nt, Artificial Sequence
  Description of Artificial Sequence: Synthetic oligonucleotide
cagcucuauaacuguuuug

SEQ ID NO: 2251713 - RNA, 19 nt, Artificial Sequence
  Description of Artificial Sequence: Synthetic oligonucleotide
aguaauucugcuagagcua

SEQ ID NO: 2251714 - RNA, 19 nt, Artificial Sequence
  Description of Artificial Sequence: Synthetic oligonucleotide
aagcgacaaauuucauaua

SEQ ID NO: 2251715 - RNA, 19 nt, Artificial Sequence
  Description of Artificial Sequence: Synthetic oligonucleotide
cacaagccaugaugcagag

SEQ ID NO: 2251716 - RNA, 19 nt, Artificial Sequence
  Description of Artificial Sequence: Synthetic oligonucleotide
cauuuucaaagaggcauca

SEQ ID NO: 2251717 - RNA, 19 nt, Artificial Sequence
  Description of Artificial Sequence: Synthetic oligonucleotide
cacauuguacugaaguagu

SEQ ID NO: 2251718 - RNA, 19 nt, Artificial Sequence
  Description of Artificial Sequence: Synthetic oligonucleotide
agacacaguccaaccaaag

SEQ ID NO: 2251719 - RNA, 19 nt, Artificial Sequence
  Description of Artificial Sequence: Synthetic oligonucleotide
ugguaaaguuuguucucua

SEQ ID NO: 2251720 - RNA, 19 nt, Artificial Sequence
  Description of Artificial Sequence: Synthetic oligonucleotide
guaacuucacauguguagu

SEQ ID NO: 2251721 - RNA, 19 nt, Artificial Sequence
  Description of Artificial Sequence: Synthetic oligonucleotide
acgauacaagggaugacga

SEQ ID NO: 2251722 - RNA, 19 nt, Artificial Sequence
  Description of Artificial Sequence: Synthetic oligonucleotide
guagaugaaaauauauguu

SEQ ID NO: 2251723 - RNA, 19 nt, Artificial Sequence
  Description of Artificial Sequence: Synthetic oligonucleotide
uccuaggagguuguauagu

SEQ ID NO: 2251724 - RNA, 19 nt, Artificial Sequence
  Description of Artificial Sequence: Synthetic oligonucleotide
gggaugagaagaauggcuc

SEQ ID NO: 2251725 - RNA, 19 nt, Artificial Sequence
  Description of Artificial Sequence: Synthetic oligonucleotide
ucauugcacuuagugaauu

SEQ ID NO: 2251726 - RNA, 19 nt, Artificial Sequence
  Description of Artificial Sequence: Synthetic oligonucleotide
agcacuugagugaucaaua

SEQ ID NO: 2251727 - RNA, 19 nt, Artificial Sequence
  Description of Artificial Sequence: Synthetic oligonucleotide
aaguccagaagcacucuuu

SEQ ID NO: 2251728 - RNA, 19 nt, Artificial Sequence
  Description of Artificial Sequence: Synthetic oligonucleotide
ccaaguaauucugcuagag

SEQ ID NO: 2251729 - RNA, 19 nt, Artificial Sequence
  Description of Artificial Sequence: Synthetic oligonucleotide
guucacaagccaugaugca

SEQ ID NO: 2251730 - RNA, 19 nt, Artificial Sequence
  Description of Artificial Sequence: Synthetic oligonucleotide
uuucccaagacagcuuguu

SEQ ID NO: 2251731 - RNA, 19 nt, Artificial Sequence
  Description of Artificial Sequence: Synthetic oligonucleotide
gaaagccauacgguauuuc

SEQ ID NO: 2251732 - RNA, 19 nt, Artificial Sequence
  Description of Artificial Sequence: Synthetic oligonucleotide
cgugcacugguucacaagc

SEQ ID NO: 2251733 - RNA, 19 nt, Artificial Sequence
  Description of Artificial Sequence: Synthetic oligonucleotide
agcugaaccgcagcagcag

SEQ ID NO: 2251734 - RNA, 19 nt, Artificial Sequence
  Description of Artificial Sequence: Synthetic oligonucleotide
gcacugguaaaguuuguuc

SEQ ID NO: 2251735 - RNA, 19 nt, Artificial Sequence
  Description of Artificial Sequence: Synthetic oligonucleotide
accgaacuuuccccagaag

SEQ ID NO: 2251736 - RNA, 19 nt, Artificial Sequence
  Description of Artificial Sequence: Synthetic oligonucleotide
gauuuauauuuaagaguua

SEQ ID NO: 2251737 - RNA, 19 nt, Artificial Sequence
  Description of Artificial Sequence: Synthetic oligonucleotide
ccgaaagcagucauaaaca

SEQ ID NO: 2251738 - RNA, 19 nt, Artificial Sequence
  Description of Artificial Sequence: Synthetic oligonucleotide
ugcuuugugccuccacauu

SEQ ID NO: 2251739 - RNA, 19 nt, Artificial Sequence
  Description of Artificial Sequence: Synthetic oligonucleotide
agugagcaccagcccggcg

SEQ ID NO: 2251740 - RNA, 19 nt, Artificial Sequence
  Description of Artificial Sequence: Synthetic oligonucleotide
guaguugagcugaaccgca

SEQ ID NO: 2251741 - RNA, 19 nt, Artificial Sequence
  Description of Artificial Sequence: Synthetic oligonucleotide
aggucaucccgaaagcagu

SEQ ID NO: 2251742 - RNA, 19 nt, Artificial Sequence
  Description of Artificial Sequence: Synthetic oligonucleotide
agcaggagcccagcaacag

SEQ ID NO: 2251743 - RNA, 19 nt, Artificial Sequence
  Description of Artificial Sequence: Synthetic oligonucleotide
caucguagaugaaaauaua

SEQ ID NO: 2251744 - RNA, 19 nt, Artificial Sequence
  Description of Artificial Sequence: Synthetic oligonucleotide
gagugaucaauauggcaau

SEQ ID NO: 2251745 - RNA, 19 nt, Artificial Sequence
  Description of Artificial Sequence: Synthetic oligonucleotide
cagagacacaguccaacca

SEQ ID NO: 2251746 - RNA, 19 nt, Artificial Sequence
  Description of Artificial Sequence: Synthetic oligonucleotide
uacgguauuucagcucuau

SEQ ID NO: 2251747 - RNA, 19 nt, Artificial Sequence
  Description of Artificial Sequence: Synthetic oligonucleotide
ucucuacaguagaauuguu

SEQ ID NO: 2251748 - RNA, 19 nt, Artificial Sequence
  Description of Artificial Sequence: Synthetic oligonucleotide
cugcuagagcuaugauacc

SEQ ID NO: 2251749 - RNA, 19 nt, Artificial Sequence
  Description of Artificial Sequence: Synthetic oligonucleotide
auucugcuagagcuaugau

SEQ ID NO: 2251750 - RNA, 19 nt, Artificial Sequence
  Description of Artificial Sequence: Synthetic oligonucleotide
caaggacauagcccagcac

SEQ ID NO: 2251751 - RNA, 19 nt, Artificial Sequence
  Description of Artificial Sequence: Synthetic oligonucleotide
cugaaguaguauuaguguu

SEQ ID NO: 2251752 - RNA, 19 nt, Artificial Sequence
  Description of Artificial Sequence: Synthetic oligonucleotide
gcugaaccgcagcagcagg

SEQ ID NO: 2251753 - RNA, 19 nt, Artificial Sequence
  Description of Artificial Sequence: Synthetic oligonucleotide
cuguuuugccuucucugga

SEQ ID NO: 2251754 - RNA, 19 nt, Artificial Sequence
  Description of Artificial Sequence: Synthetic oligonucleotide
gcacuuagugaauucuaca

SEQ ID NO: 2251755 - RNA, 19 nt, Artificial Sequence
  Description of Artificial Sequence: Synthetic oligonucleotide
guacugaaguaguauuagu

SEQ ID NO: 2251756 - RNA, 19 nt, Artificial Sequence
  Description of Artificial Sequence: Synthetic oligonucleotide
cuagagcuaugauacccaa

SEQ ID NO: 2251757 - RNA, 19 nt, Artificial Sequence
  Description of Artificial Sequence: Synthetic oligonucleotide
ccgaacuuuccccagaaga

SEQ ID NO: 2251758 - RNA, 19 nt, Artificial Sequence
  Description of Artificial Sequence: Synthetic oligonucleotide
aggagguuguauaguccuc

SEQ ID NO: 2251759 - RNA, 19 nt, Artificial Sequence
  Description of Artificial Sequence: Synthetic oligonucleotide
ggauaacucuguaacuuca

SEQ ID NO: 2251760 - RNA, 19 nt, Artificial Sequence
  Description of Artificial Sequence: Synthetic oligonucleotide
acauagcccagcacuugag

SEQ ID NO: 2251761 - RNA, 19 nt, Artificial Sequence
  Description of Artificial Sequence: Synthetic oligonucleotide
cguuacuaaacaguaguug

SEQ ID NO: 2251762 - RNA, 19 nt, Artificial Sequence
  Description of Artificial Sequence: Synthetic oligonucleotide
cucgugaaagccauacggu

SEQ ID NO: 2251763 - RNA, 19 nt, Artificial Sequence
  Description of Artificial Sequence: Synthetic oligonucleotide
uggaagcgacaaauuucau

SEQ ID NO: 2251764 - RNA, 19 nt, Artificial Sequence
  Description of Artificial Sequence: Synthetic oligonucleotide
agggaugacgacaguuuca

SEQ ID NO: 2251765 - RNA, 19 nt, Artificial Sequence
  Description of Artificial Sequence: Synthetic oligonucleotide
gcaaccuccuuucuccuuc

SEQ ID NO: 2251766 - RNA, 19 nt, Artificial Sequence
  Description of Artificial Sequence: Synthetic oligonucleotide
ccaagggccacaucuccgc

SEQ ID NO: 2251767 - RNA, 19 nt, Artificial Sequence
  Description of Artificial Sequence: Synthetic oligonucleotide
cugaaccgcagcagcagga

SEQ ID NO: 2251768 - RNA, 19 nt, Artificial Sequence
  Description of Artificial Sequence: Synthetic oligonucleotide
aggagcccagcaacagcgc

SEQ ID NO: 2251769 - RNA, 19 nt, Artificial Sequence
  Description of Artificial Sequence: Synthetic oligonucleotide
caauauggcaauggugaaa

SEQ ID NO: 2251770 - RNA, 19 nt, Artificial Sequence
  Description of Artificial Sequence: Synthetic oligonucleotide
cucuacaguagaauuguuu

SEQ ID NO: 2251771 - RNA, 19 nt, Artificial Sequence
  Description of Artificial Sequence: Synthetic oligonucleotide
auucguucgaguggauuua

SEQ ID NO: 2251772 - RNA, 19 nt, Artificial Sequence
  Description of Artificial Sequence: Synthetic oligonucleotide
guucgaguggauuuauauu

SEQ ID NO: 2251773 - RNA, 19 nt, Artificial Sequence
  Description of Artificial Sequence: Synthetic oligonucleotide
aaauaacaauaaggaucuu

SEQ ID NO: 2251774 - RNA, 19 nt, Artificial Sequence
  Description of Artificial Sequence: Synthetic oligonucleotide
ucguucgaguggauuuaua

SEQ ID NO: 2251775 - RNA, 19 nt, Artificial Sequence
  Description of Artificial Sequence: Synthetic oligonucleotide
acguuacuaaacaguaguu

SEQ ID NO: 2251776 - RNA, 19 nt, Artificial Sequence
  Description of Artificial Sequence: Synthetic oligonucleotide
uucguucgaguggauuuau

SEQ ID NO: 2251777 - RNA, 19 nt, Artificial Sequence
  Description of Artificial Sequence: Synthetic oligonucleotide
acgguauuucagcucuaua

SEQ ID NO: 2251778 - RNA, 19 nt, Artificial Sequence
  Description of Artificial Sequence: Synthetic oligonucleotide
ggcgaccagcagcagaaug

SEQ ID NO: 2251779 - RNA, 19 nt, Artificial Sequence
  Description of Artificial Sequence: Synthetic oligonucleotide
agccaaaaucgggaaaaua

SEQ ID NO: 2251780 - RNA, 19 nt, Artificial Sequence
  Description of Artificial Sequence: Synthetic oligonucleotide
aagccaugaugcagagaca

SEQ ID NO: 2251781 - RNA, 19 nt, Artificial Sequence
  Description of Artificial Sequence: Synthetic oligonucleotide
cauuguacugaaguaguau

SEQ ID NO: 2251782 - RNA, 19 nt, Artificial Sequence
  Description of Artificial Sequence: Synthetic oligonucleotide
acauuguacugaaguagua

SEQ ID NO: 2251783 - RNA, 19 nt, Artificial Sequence
  Description of Artificial Sequence: Synthetic oligonucleotide
gguuggaagcgacaaauuu

SEQ ID NO: 2251784 - RNA, 19 nt, Artificial Sequence
  Description of Artificial Sequence: Synthetic oligonucleotide
ugcaaccuccuuucuccuu

SEQ ID NO: 2251785 - RNA, 19 nt, Artificial Sequence
  Description of Artificial Sequence: Synthetic oligonucleotide
cuggauaacucuguaacuu

SEQ ID NO: 2251786 - RNA, 19 nt, Artificial Sequence
  Description of Artificial Sequence: Synthetic oligonucleotide
cuaaauuugcaaccuccuu

SEQ ID NO: 2251787 - RNA, 19 nt, Artificial Sequence
  Description of Artificial Sequence: Synthetic oligonucleotide
ccaucguagaugaaaauau

SEQ ID NO: 2251788 - RNA, 19 nt, Artificial Sequence
  Description of Artificial Sequence: Synthetic oligonucleotide
gaagaggaguauagccaaa

SEQ ID NO: 2251789 - RNA, 19 nt, Artificial Sequence
  Description of Artificial Sequence: Synthetic oligonucleotide
gugaaagccauacgguauu

SEQ ID NO: 2251790 - RNA, 19 nt, Artificial Sequence
  Description of Artificial Sequence: Synthetic oligonucleotide
gcuagagcuaugauaccca

SEQ ID NO: 2251791 - RNA, 19 nt, Artificial Sequence
  Description of Artificial Sequence: Synthetic oligonucleotide
cugguuggaagcgacaaau

SEQ ID NO: 2251792 - RNA, 19 nt, Artificial Sequence
  Description of Artificial Sequence: Synthetic oligonucleotide
ccauacgguauuucagcuc

SEQ ID NO: 2251793 - RNA, 19 nt, Artificial Sequence
  Description of Artificial Sequence: Synthetic oligonucleotide
aggcaucacccuucauuaa

SEQ ID NO: 2251794 - RNA, 19 nt, Artificial Sequence
  Description of Artificial Sequence: Synthetic oligonucleotide
caugaugcagagacacagu

SEQ ID NO: 2251795 - RNA, 19 nt, Artificial Sequence
  Description of Artificial Sequence: Synthetic oligonucleotide
gcaggagcccagcaacagc

SEQ ID NO: 2251796 - RNA, 19 nt, Artificial Sequence
  Description of Artificial Sequence: Synthetic oligonucleotide
ccaggaagcuaaauuugca

SEQ ID NO: 2251797 - RNA, 19 nt, Artificial Sequence
  Description of Artificial Sequence: Synthetic oligonucleotide
agcccagcacuugagugau

SEQ ID NO: 2251798 - RNA, 19 nt, Artificial Sequence
  Description of Artificial Sequence: Synthetic oligonucleotide
gaagcacucuuuacagggu

SEQ ID NO: 2251799 - RNA, 19 nt, Artificial Sequence
  Description of Artificial Sequence: Synthetic oligonucleotide
gcgaccagcagcagaauga

SEQ ID NO: 2251800 - RNA, 19 nt, Artificial Sequence
  Description of Artificial Sequence: Synthetic oligonucleotide
cacccuucauuaagucuga

SEQ ID NO: 2251801 - RNA, 19 nt, Artificial Sequence
  Description of Artificial Sequence: Synthetic oligonucleotide
cagugcuuugugccuccac

SEQ ID NO: 2251802 - RNA, 19 nt, Artificial Sequence
  Description of Artificial Sequence: Synthetic oligonucleotide
acaagccaugaugcagaga

SEQ ID NO: 2251803 - RNA, 19 nt, Artificial Sequence
  Description of Artificial Sequence: Synthetic oligonucleotide
cauagcccagcacuugagu

SEQ ID NO: 2251804 - RNA, 19 nt, Artificial Sequence
  Description of Artificial Sequence: Synthetic oligonucleotide
cgauacaagggaugacgac

SEQ ID NO: 2251805 - RNA, 19 nt, Artificial Sequence
  Description of Artificial Sequence: Synthetic oligonucleotide
gcuaaauuugcaaccuccu

SEQ ID NO: 2251806 - RNA, 19 nt, Artificial Sequence
  Description of Artificial Sequence: Synthetic oligonucleotide
ccaaccaaagcaaggacau

SEQ ID NO: 2251807 - RNA, 19 nt, Artificial Sequence
  Description of Artificial Sequence: Synthetic oligonucleotide
agucugagacugaguauuu

SEQ ID NO: 2251808 - RNA, 19 nt, Artificial Sequence
  Description of Artificial Sequence: Synthetic oligonucleotide
caucccgaaagcagucaua

SEQ ID NO: 2251809 - RNA, 19 nt, Artificial Sequence
  Description of Artificial Sequence: Synthetic oligonucleotide
caaugaggccaaguccaga

SEQ ID NO: 2251810 - RNA, 19 nt, Artificial Sequence
  Description of Artificial Sequence: Synthetic oligonucleotide
gugcuuugugccuccacau

SEQ ID NO: 2251811 - RNA, 19 nt, Artificial Sequence
  Description of Artificial Sequence: Synthetic oligonucleotide
caaugacagugagcaccag

SEQ ID NO: 2251812 - RNA, 19 nt, Artificial Sequence
  Description of Artificial Sequence: Synthetic oligonucleotide
gugccuccacauugaggac

SEQ ID NO: 2251813 - RNA, 19 nt, Artificial Sequence
  Description of Artificial Sequence: Synthetic oligonucleotide
cccaaaccugaaaucaaaa

SEQ ID NO: 2251814 - RNA, 19 nt, Artificial Sequence
  Description of Artificial Sequence: Synthetic oligonucleotide
cagcuuguugccuuuccau

SEQ ID NO: 2251815 - RNA, 19 nt, Artificial Sequence
  Description of Artificial Sequence: Synthetic oligonucleotide
gccauacgguauuucagcu

SEQ ID NO: 2251816 - RNA, 19 nt, Artificial Sequence
  Description of Artificial Sequence: Synthetic oligonucleotide
caauggugaaagaggucau

SEQ ID NO: 2251817 - RNA, 19 nt, Artificial Sequence
  Description of Artificial Sequence: Synthetic oligonucleotide
ggucaucccgaaagcaguc

SEQ ID NO: 2251818 - RNA, 19 nt, Artificial Sequence
  Description of Artificial Sequence: Synthetic oligonucleotide
cagugagcaccagcccggc

SEQ ID NO: 2251819 - RNA, 19 nt, Artificial Sequence
  Description of Artificial Sequence: Synthetic oligonucleotide
ggcaauggugaaagagguc

SEQ ID NO: 2251820 - RNA, 19 nt, Artificial Sequence
  Description of Artificial Sequence: Synthetic oligonucleotide
cagcgccgccaccaagggc

SEQ ID NO: 2251821 - RNA, 19 nt, Artificial Sequence
  Description of Artificial Sequence: Synthetic oligonucleotide
ccgugcacugguucacaag

SEQ ID NO: 2251822 - RNA, 19 nt, Artificial Sequence
  Description of Artificial Sequence: Synthetic oligonucleotide
gcuuguugccuuuccauuu

SEQ ID NO: 2251823 - RNA, 19 nt, Artificial Sequence
  Description of Artificial Sequence: Synthetic oligonucleotide
ggggccgugcacugguuca

SEQ ID NO: 2251824 - RNA, 19 nt, Artificial Sequence
  Description of Artificial Sequence: Synthetic oligonucleotide
ggacgauacaagggaugac

SEQ ID NO: 2251825 - RNA, 19 nt, Artificial Sequence
  Description of Artificial Sequence: Synthetic oligonucleotide
gcacuugagugaucaauau

SEQ ID NO: 2251826 - RNA, 19 nt, Artificial Sequence
  Description of Artificial Sequence: Synthetic oligonucleotide
gggaugacgacaguuucau

SEQ ID NO: 2251827 - RNA, 19 nt, Artificial Sequence
  Description of Artificial Sequence: Synthetic oligonucleotide
cguucgaguggauuuauau

SEQ ID NO: 2251828 - RNA, 19 nt, Artificial Sequence
  Description of Artificial Sequence: Synthetic oligonucleotide
guguuccuauagagaugac

SEQ ID NO: 2251829 - RNA, 19 nt, Artificial Sequence
  Description of Artificial Sequence: Synthetic oligonucleotide
guuucccaagacagcuugu

SEQ ID NO: 2251830 - RNA, 19 nt, Artificial Sequence
  Description of Artificial Sequence: Synthetic oligonucleotide
cuuauucguucgaguggau

SEQ ID NO: 2251831 - RNA, 19 nt, Artificial Sequence
  Description of Artificial Sequence: Synthetic oligonucleotide
caaccuccuuucuccuucu

SEQ ID NO: 2251832 - RNA, 19 nt, Artificial Sequence
  Description of Artificial Sequence: Synthetic oligonucleotide
auacgguauuucagcucua

SEQ ID NO: 2251833 - RNA, 19 nt, Artificial Sequence
  Description of Artificial Sequence: Synthetic oligonucleotide
cgugaaagccauacgguau

SEQ ID NO: 2251834 - RNA, 19 nt, Artificial Sequence
  Description of Artificial Sequence: Synthetic oligonucleotide
ccacaucuccgcgccgccg

SEQ ID NO: 2251835 - RNA, 19 nt, Artificial Sequence
  Description of Artificial Sequence: Synthetic oligonucleotide
gucugagacugaguauuuu

SEQ ID NO: 2251836 - RNA, 19 nt, Artificial Sequence
  Description of Artificial Sequence: Synthetic oligonucleotide
gcaacagcgccgccaccaa

SEQ ID NO: 2251837 - RNA, 19 nt, Artificial Sequence
  Description of Artificial Sequence: Synthetic oligonucleotide
gccgugcacugguucacaa

SEQ ID NO: 2251838 - RNA, 19 nt, Artificial Sequence
  Description of Artificial Sequence: Synthetic oligonucleotide
gggccgugcacugguucac

SEQ ID NO: 2251839 - RNA, 19 nt, Artificial Sequence
  Description of Artificial Sequence: Synthetic oligonucleotide
cccggcgaccagcagcaga

SEQ ID NO: 2251840 - RNA, 19 nt, Artificial Sequence
  Description of Artificial Sequence: Synthetic oligonucleotide
ggccgugcacugguucaca

SEQ ID NO: 2251841 - RNA, 19 nt, Artificial Sequence
  Description of Artificial Sequence: Synthetic oligonucleotide
ggaugacgacaguuucauu

SEQ ID NO: 2251842 - RNA, 19 nt, Artificial Sequence
  Description of Artificial Sequence: Synthetic oligonucleotide
ccagcacuugagugaucaa

SEQ ID NO: 2251843 - RNA, 19 nt, Artificial Sequence
  Description of Artificial Sequence: Synthetic oligonucleotide
cuccugggaugagaagaau

SEQ ID NO: 2251844 - RNA, 19 nt, Artificial Sequence
  Description of Artificial Sequence: Synthetic oligonucleotide
ccuucucgugaaagccaua

SEQ ID NO: 2251845 - RNA, 19 nt, Artificial Sequence
  Description of Artificial Sequence: Synthetic oligonucleotide
gcccagcacuugagugauc

SEQ ID NO: 2251846 - RNA, 19 nt, Artificial Sequence
  Description of Artificial Sequence: Synthetic oligonucleotide
gcgccgccaccaagggcca

SEQ ID NO: 2251847 - RNA, 19 nt, Artificial Sequence
  Description of Artificial Sequence: Synthetic oligonucleotide
gcccggcgaccagcagcag

SEQ ID NO: 2251848 - RNA, 19 nt, Artificial Sequence
  Description of Artificial Sequence: Synthetic oligonucleotide
cggcgaccagcagcagaau

SEQ ID NO: 2251849 - RNA, 19 nt, Artificial Sequence
  Description of Artificial Sequence: Synthetic oligonucleotide
auuaaaaucauacaacaac

SEQ ID NO: 2251850 - RNA, 19 nt, Artificial Sequence
  Description of Artificial Sequence: Synthetic oligonucleotide
uguauuuccaauuagcugc

SEQ ID NO: 2251851 - RNA, 19 nt, Artificial Sequence
  Description of Artificial Sequence: Synthetic oligonucleotide
aaucauacaacaaccaagc

SEQ ID NO: 2251852 - RNA, 19 nt, Artificial Sequence
  Description of Artificial Sequence: Synthetic oligonucleotide
ucauacaacaaccaagcgg

SEQ ID NO: 2251853 - RNA, 19 nt, Artificial Sequence
  Description of Artificial Sequence: Synthetic oligonucleotide
cauacaacaaccaagcggc

SEQ ID NO: 2251854 - RNA, 19 nt, Artificial Sequence
  Description of Artificial Sequence: Synthetic oligonucleotide
uguaacuacgccaacuucg

SEQ ID NO: 2251855 - RNA, 19 nt, Artificial Sequence
  Description of Artificial Sequence: Synthetic oligonucleotide
ucuauaccaauuaaaauca

SEQ ID NO: 2251856 - RNA, 19 nt, Artificial Sequence
  Description of Artificial Sequence: Synthetic oligonucleotide
aauggcaacguucagucuc

SEQ ID NO: 2251857 - RNA, 19 nt, Artificial Sequence
  Description of Artificial Sequence: Synthetic oligonucleotide
gaaaauaguaauguggcgg

SEQ ID NO: 2251858 - RNA, 19 nt, Artificial Sequence
  Description of Artificial Sequence: Synthetic oligonucleotide
aauuagcugccucauagcg

SEQ ID NO: 2251859 - RNA, 19 nt, Artificial Sequence
  Description of Artificial Sequence: Synthetic oligonucleotide
ugguuaauagccuuaaaag

SEQ ID NO: 2251860 - RNA, 19 nt, Artificial Sequence
  Description of Artificial Sequence: Synthetic oligonucleotide
gaggguuugaaaucaaucg

SEQ ID NO: 2251861 - RNA, 19 nt, Artificial Sequence
  Description of Artificial Sequence: Synthetic oligonucleotide
gaauccaauaauuugucag

SEQ ID NO: 2251862 - RNA, 19 nt, Artificial Sequence
  Description of Artificial Sequence: Synthetic oligonucleotide
uucugugugacaauuacug

SEQ ID NO: 2251863 - RNA, 19 nt, Artificial Sequence
  Description of Artificial Sequence: Synthetic oligonucleotide
aaaucauacaacaaccaag

SEQ ID NO: 2251864 - RNA, 19 nt, Artificial Sequence
  Description of Artificial Sequence: Synthetic oligonucleotide
agcacuguuuuauuuauac

SEQ ID NO: 2251865 - RNA, 19 nt, Artificial Sequence
  Description of Artificial Sequence: Synthetic oligonucleotide
uuuuauuuauacagagucc

SEQ ID NO: 2251866 - RNA, 19 nt, Artificial Sequence
  Description of Artificial Sequence: Synthetic oligonucleotide
caaucuuuuccucugacgg

SEQ ID NO: 2251867 - RNA, 19 nt, Artificial Sequence
  Description of Artificial Sequence: Synthetic oligonucleotide
aaaauaguaauguggcggu

SEQ ID NO: 2251868 - RNA, 19 nt, Artificial Sequence
  Description of Artificial Sequence: Synthetic oligonucleotide
uccuaaccaauucagaggc

SEQ ID NO: 2251869 - RNA, 19 nt, Artificial Sequence
  Description of Artificial Sequence: Synthetic oligonucleotide
uuuauacagaguccuaacc

SEQ ID NO: 2251870 - RNA, 19 nt, Artificial Sequence
  Description of Artificial Sequence: Synthetic oligonucleotide
uaauguggcggucaaaacc

SEQ ID NO: 2251871 - RNA, 19 nt, Artificial Sequence
  Description of Artificial Sequence: Synthetic oligonucleotide
aauguggcggucaaaaccg

SEQ ID NO: 2251872 - RNA, 19 nt, Artificial Sequence
  Description of Artificial Sequence: Synthetic oligonucleotide
uguaauugcaguuuccacu

SEQ ID NO: 2251873 - RNA, 19 nt, Artificial Sequence
  Description of Artificial Sequence: Synthetic oligonucleotide
aaaucaaucgacagaacag

SEQ ID NO: 2251874 - RNA, 19 nt, Artificial Sequence
  Description of Artificial Sequence: Synthetic oligonucleotide
uuuucaacuguaacuacgc

SEQ ID NO: 2251875 - RNA, 19 nt, Artificial Sequence
  Description of Artificial Sequence: Synthetic oligonucleotide
gagaaaauaguaauguggc

SEQ ID NO: 2251876 - RNA, 19 nt, Artificial Sequence
  Description of Artificial Sequence: Synthetic oligonucleotide
uuguucuucgucuauacca

SEQ ID NO: 2251877 - RNA, 19 nt, Artificial Sequence
  Description of Artificial Sequence: Synthetic oligonucleotide
gaauuuaggauuuucaacu

SEQ ID NO: 2251878 - RNA, 19 nt, Artificial Sequence
  Description of Artificial Sequence: Synthetic oligonucleotide
gauuugguagacuaauggc

SEQ ID NO: 2251879 - RNA, 19 nt, Artificial Sequence
  Description of Artificial Sequence: Synthetic oligonucleotide
acuuguacacuugagggcc

SEQ ID NO: 2251880 - RNA, 19 nt, Artificial Sequence
  Description of Artificial Sequence: Synthetic oligonucleotide
ugaauuuaggauuuucaac

SEQ ID NO: 2251881 - RNA, 19 nt, Artificial Sequence
  Description of Artificial Sequence: Synthetic oligonucleotide
uugguuaauagccuuaaaa

SEQ ID NO: 2251882 - RNA, 19 nt, Artificial Sequence
  Description of Artificial Sequence: Synthetic oligonucleotide
auuuauacagaguccuaac

SEQ ID NO: 2251883 - RNA, 19 nt, Artificial Sequence
  Description of Artificial Sequence: Synthetic oligonucleotide
gaaaucaaucgacagaaca

SEQ ID NO: 2251884 - RNA, 19 nt, Artificial Sequence
  Description of Artificial Sequence: Synthetic oligonucleotide
uauucuacuugguagaguc

SEQ ID NO: 2251885 - RNA, 19 nt, Artificial Sequence
  Description of Artificial Sequence: Synthetic oligonucleotide
aguccuaaccaauucagag

SEQ ID NO: 2251886 - RNA, 19 nt, Artificial Sequence
  Description of Artificial Sequence: Synthetic oligonucleotide
uauuuguauuuccaauuag

SEQ ID NO: 2251887 - RNA, 19 nt, Artificial Sequence
  Description of Artificial Sequence: Synthetic oligonucleotide
uaauuugucagguacuuuc

SEQ ID NO: 2251888 - RNA, 19 nt, Artificial Sequence
  Description of Artificial Sequence: Synthetic oligonucleotide
gaacaagugagucacggug

SEQ ID NO: 2251889 - RNA, 19 nt, Artificial Sequence
  Description of Artificial Sequence: Synthetic oligonucleotide
aggauuuucaacuguaacu

SEQ ID NO: 2251890 - RNA, 19 nt, Artificial Sequence
  Description of Artificial Sequence: Synthetic oligonucleotide
ucaacuguaacuacgccaa

SEQ ID NO: 2251891 - RNA, 19 nt, Artificial Sequence
  Description of Artificial Sequence: Synthetic oligonucleotide
aacaagugagucacggugc

SEQ ID NO: 2251892 - RNA, 19 nt, Artificial Sequence
  Description of Artificial Sequence: Synthetic oligonucleotide
uugaaaucaaucgacagaa

SEQ ID NO: 2251893 - RNA, 19 nt, Artificial Sequence
  Description of Artificial Sequence: Synthetic oligonucleotide
ucaaucgacagaacaguag

SEQ ID NO: 2251894 - RNA, 19 nt, Artificial Sequence
  Description of Artificial Sequence: Synthetic oligonucleotide
ucgacagaacaguagacag

SEQ ID NO: 2251895 - RNA, 19 nt, Artificial Sequence
  Description of Artificial Sequence: Synthetic oligonucleotide
gagaauucugaauuuagga

SEQ ID NO: 2251896 - RNA, 19 nt, Artificial Sequence
  Description of Artificial Sequence: Synthetic oligonucleotide
cuguuuuauuuauacagag

SEQ ID NO: 2251897 - RNA, 19 nt, Artificial Sequence
  Description of Artificial Sequence: Synthetic oligonucleotide
uucaacuguaacuacgcca

SEQ ID NO: 2251898 - RNA, 19 nt, Artificial Sequence
  Description of Artificial Sequence: Synthetic oligonucleotide
uuagcugccucauagcgug

SEQ ID NO: 2251899 - RNA, 19 nt, Artificial Sequence
  Description of Artificial Sequence: Synthetic oligonucleotide
guuaauagccuuaaaagca

SEQ ID NO: 2251900 - RNA, 19 nt, Artificial Sequence
  Description of Artificial Sequence: Synthetic oligonucleotide
uagacuaauggcaacguuc

SEQ ID NO: 2251901 - RNA, 19 nt, Artificial Sequence
  Description of Artificial Sequence: Synthetic oligonucleotide
uagacuugagaaauaucag

SEQ ID NO: 2251902 - RNA, 19 nt, Artificial Sequence
  Description of Artificial Sequence: Synthetic oligonucleotide
uuguauuuccaauuagcug

SEQ ID NO: 2251903 - RNA, 19 nt, Artificial Sequence
  Description of Artificial Sequence: Synthetic oligonucleotide
ucgucuauaccaauuaaaa

SEQ ID NO: 2251904 - RNA, 19 nt, Artificial Sequence
  Description of Artificial Sequence: Synthetic oligonucleotide
auagcgugcccucuguacc

SEQ ID NO: 2251905 - RNA, 19 nt, Artificial Sequence
  Description of Artificial Sequence: Synthetic oligonucleotide
uuauuuugaacaagugagu

SEQ ID NO: 2251906 - RNA, 19 nt, Artificial Sequence
  Description of Artificial Sequence: Synthetic oligonucleotide
uucagucucucucugcuag

SEQ ID NO: 2251907 - RNA, 19 nt, Artificial Sequence
  Description of Artificial Sequence: Synthetic oligonucleotide
agaauucugaauuuaggau

SEQ ID NO: 2251908 - RNA, 19 nt, Artificial Sequence
  Description of Artificial Sequence: Synthetic oligonucleotide
uucuacuugguagagucgg

SEQ ID NO: 2251909 - RNA, 19 nt, Artificial Sequence
  Description of Artificial Sequence: Synthetic oligonucleotide
uugcuguuaccaaacaccc

SEQ ID NO: 2251910 - RNA, 19 nt, Artificial Sequence
  Description of Artificial Sequence: Synthetic oligonucleotide
uuugguagacuaauggcaa

SEQ ID NO: 2251911 - RNA, 19 nt, Artificial Sequence
  Description of Artificial Sequence: Synthetic oligonucleotide
uuaauagccuuaaaagcau

SEQ ID NO: 2251912 - RNA, 19 nt, Artificial Sequence
  Description of Artificial Sequence: Synthetic oligonucleotide
aaucaaucgacagaacagu

SEQ ID NO: 2251913 - RNA, 19 nt, Artificial Sequence
  Description of Artificial Sequence: Synthetic oligonucleotide
ggauuugguagacuaaugg

SEQ ID NO: 2251914 - RNA, 19 nt, Artificial Sequence
  Description of Artificial Sequence: Synthetic oligonucleotide
auuuucaacuguaacuacg

SEQ ID NO: 2251915 - RNA, 19 nt, Artificial Sequence
  Description of Artificial Sequence: Synthetic oligonucleotide
uuuaggauuuucaacugua

SEQ ID NO: 2251916 - RNA, 19 nt, Artificial Sequence
  Description of Artificial Sequence: Synthetic oligonucleotide
aaagcacuguuuuauuuau

SEQ ID NO: 2251917 - RNA, 19 nt, Artificial Sequence
  Description of Artificial Sequence: Synthetic oligonucleotide
cacaguaguagccugcagg

SEQ ID NO: 2251918 - RNA, 19 nt, Artificial Sequence
  Description of Artificial Sequence: Synthetic oligonucleotide
cacacuuguacacuugagg

SEQ ID NO: 2251919 - RNA, 19 nt, Artificial Sequence
  Description of Artificial Sequence: Synthetic oligonucleotide
agaaauaucagcaauucuu

SEQ ID NO: 2251920 - RNA, 19 nt, Artificial Sequence
  Description of Artificial Sequence: Synthetic oligonucleotide
uuuccaauuagcugccuca

SEQ ID NO: 2251921 - RNA, 19 nt, Artificial Sequence
  Description of Artificial Sequence: Synthetic oligonucleotide
aauaguaauguggcgguca

SEQ ID NO: 2251922 - RNA, 19 nt, Artificial Sequence
  Description of Artificial Sequence: Synthetic oligonucleotide
aagugagucacggugcuag

SEQ ID NO: 2251923 - RNA, 19 nt, Artificial Sequence
  Description of Artificial Sequence: Synthetic oligonucleotide
auguaauugcaguuuccac

SEQ ID NO: 2251924 - RNA, 19 nt, Artificial Sequence
  Description of Artificial Sequence: Synthetic oligonucleotide
auuuugaacaagugaguca

SEQ ID NO: 2251925 - RNA, 19 nt, Artificial Sequence
  Description of Artificial Sequence: Synthetic oligonucleotide
caggcaaguggcaucaugg

SEQ ID NO: 2251926 - RNA, 19 nt, Artificial Sequence
  Description of Artificial Sequence: Synthetic oligonucleotide
ugacaauuacugcacaauc

SEQ ID NO: 2251927 - RNA, 19 nt, Artificial Sequence
  Description of Artificial Sequence: Synthetic oligonucleotide
uauuuugaacaagugaguc

SEQ ID NO: 2251928 - RNA, 19 nt, Artificial Sequence
  Description of Artificial Sequence: Synthetic oligonucleotide
ugaggguuugaaaucaauc

SEQ ID NO: 2251929 - RNA, 19 nt, Artificial Sequence
  Description of Artificial Sequence: Synthetic oligonucleotide
uauaccaauuaaaaucaua

SEQ ID NO: 2251930 - RNA, 19 nt, Artificial Sequence
  Description of Artificial Sequence: Synthetic oligonucleotide
guccuaaccaauucagagg

SEQ ID NO: 2251931 - RNA, 19 nt, Artificial Sequence
  Description of Artificial Sequence: Synthetic oligonucleotide
uaggauuuucaacuguaac

SEQ ID NO: 2251932 - RNA, 19 nt, Artificial Sequence
  Description of Artificial Sequence: Synthetic oligonucleotide
auuuccaauuagcugccuc

SEQ ID NO: 2251933 - RNA, 19 nt, Artificial Sequence
  Description of Artificial Sequence: Synthetic oligonucleotide
uucgucuauaccaauuaaa

SEQ ID NO: 2251934 - RNA, 19 nt, Artificial Sequence
  Description of Artificial Sequence: Synthetic oligonucleotide
gacuugagaaauaucagca

SEQ ID NO: 2251935 - RNA, 19 nt, Artificial Sequence
  Description of Artificial Sequence: Synthetic oligonucleotide
uuaaaagcauauucuacuu

SEQ ID NO: 2251936 - RNA, 19 nt, Artificial Sequence
  Description of Artificial Sequence: Synthetic oligonucleotide
aauaauuugucagguacuu

SEQ ID NO: 2251937 - RNA, 19 nt, Artificial Sequence
  Description of Artificial Sequence: Synthetic oligonucleotide
aaucgacagaacaguagac

SEQ ID NO: 2251938 - RNA, 19 nt, Artificial Sequence
  Description of Artificial Sequence: Synthetic oligonucleotide
aaccaagcggccucauuuc

SEQ ID NO: 2251939 - RNA, 19 nt, Artificial Sequence
  Description of Artificial Sequence: Synthetic oligonucleotide
uugagaaauaucagcaauu

SEQ ID NO: 2251940 - RNA, 19 nt, Artificial Sequence
  Description of Artificial Sequence: Synthetic oligonucleotide
uauuuauacagaguccuaa

SEQ ID NO: 2251941 - RNA, 19 nt, Artificial Sequence
  Description of Artificial Sequence: Synthetic oligonucleotide
uaaccaauucagaggcagg

SEQ ID NO: 2251942 - RNA, 19 nt, Artificial Sequence
  Description of Artificial Sequence: Synthetic oligonucleotide
auuugguagacuaauggca

SEQ ID NO: 2251943 - RNA, 19 nt, Artificial Sequence
  Description of Artificial Sequence: Synthetic oligonucleotide
ugucaucccagucaucaca

SEQ ID NO: 2251944 - RNA, 19 nt, Artificial Sequence
  Description of Artificial Sequence: Synthetic oligonucleotide
acaaggugggcaucgaucu

SEQ ID NO: 2251945 - RNA, 19 nt, Artificial Sequence
  Description of Artificial Sequence: Synthetic oligonucleotide
agagaauucugaauuuagg

SEQ ID NO: 2251946 - RNA, 19 nt, Artificial Sequence
  Description of Artificial Sequence: Synthetic oligonucleotide
uuucaaggaagcugguuga

SEQ ID NO: 2251947 - RNA, 19 nt, Artificial Sequence
  Description of Artificial Sequence: Synthetic oligonucleotide
ucauggauuugguagacua

SEQ ID NO: 2251948 - RNA, 19 nt, Artificial Sequence
  Description of Artificial Sequence: Synthetic oligonucleotide
ugguagacuaauggcaacg

SEQ ID NO: 2251949 - RNA, 19 nt, Artificial Sequence
  Description of Artificial Sequence: Synthetic oligonucleotide
ugagaaauaucagcaauuc

SEQ ID NO: 2251950 - RNA, 19 nt, Artificial Sequence
  Description of Artificial Sequence: Synthetic oligonucleotide
aacuacgccaacuucgauu

SEQ ID NO: 2251951 - RNA, 19 nt, Artificial Sequence
  Description of Artificial Sequence: Synthetic oligonucleotide
caaggaagcugguugauuc

SEQ ID NO: 2251952 - RNA, 19 nt, Artificial Sequence
  Description of Artificial Sequence: Synthetic oligonucleotide
cuaaccaauucagaggcag

SEQ ID NO: 2251953 - RNA, 19 nt, Artificial Sequence
  Description of Artificial Sequence: Synthetic oligonucleotide
gagagaauucugaauuuag

SEQ ID NO: 2251954 - RNA, 19 nt, Artificial Sequence
  Description of Artificial Sequence: Synthetic oligonucleotide
uguucuucgucuauaccaa

SEQ ID NO: 2251955 - RNA, 19 nt, Artificial Sequence
  Description of Artificial Sequence: Synthetic oligonucleotide
gcuguuaccaaacacccag

SEQ ID NO: 2251956 - RNA, 19 nt, Artificial Sequence
  Description of Artificial Sequence: Synthetic oligonucleotide
ucccagucaucacacagcc

SEQ ID NO: 2251957 - RNA, 19 nt, Artificial Sequence
  Description of Artificial Sequence: Synthetic oligonucleotide
uuaacuccugcugcggugg

SEQ ID NO: 2251958 - RNA, 19 nt, Artificial Sequence
  Description of Artificial Sequence: Synthetic oligonucleotide
aucauacaacaaccaagcg

SEQ ID NO: 2251959 - RNA, 19 nt, Artificial Sequence
  Description of Artificial Sequence: Synthetic oligonucleotide
ugugaguccuccuugguua

SEQ ID NO: 2251960 - RNA, 19 nt, Artificial Sequence
  Description of Artificial Sequence: Synthetic oligonucleotide
uuucaacuguaacuacgcc

SEQ ID NO: 2251961 - RNA, 19 nt, Artificial Sequence
  Description of Artificial Sequence: Synthetic oligonucleotide
uucaguuauuuugaacaag

SEQ ID NO: 2251962 - RNA, 19 nt, Artificial Sequence
  Description of Artificial Sequence: Synthetic oligonucleotide
aaagccacaguaguagccu

SEQ ID NO: 2251963 - RNA, 19 nt, Artificial Sequence
  Description of Artificial Sequence: Synthetic oligonucleotide
agaugugaguccuccuugg

SEQ ID NO: 2251964 - RNA, 19 nt, Artificial Sequence
  Description of Artificial Sequence: Synthetic oligonucleotide
ucugugugacaauuacugc

SEQ ID NO: 2251965 - RNA, 19 nt, Artificial Sequence
  Description of Artificial Sequence: Synthetic oligonucleotide
uuugaacaagugagucacg

SEQ ID NO: 2251966 - RNA, 19 nt, Artificial Sequence
  Description of Artificial Sequence: Synthetic oligonucleotide
caacuucgauuucugaggg

SEQ ID NO: 2251967 - RNA, 19 nt, Artificial Sequence
  Description of Artificial Sequence: Synthetic oligonucleotide
uuuaacuccugcugcggug

SEQ ID NO: 2251968 - RNA, 19 nt, Artificial Sequence
  Description of Artificial Sequence: Synthetic oligonucleotide
ucugcguguagacuugaga

SEQ ID NO: 2251969 - RNA, 19 nt, Artificial Sequence
  Description of Artificial Sequence: Synthetic oligonucleotide
ucaaaaccggcgcuggaac

SEQ ID NO: 2251970 - RNA, 19 nt, Artificial Sequence
  Description of Artificial Sequence: Synthetic oligonucleotide
uuaggauuuucaacuguaa

SEQ ID NO: 2251971 - RNA, 19 nt, Artificial Sequence
  Description of Artificial Sequence: Synthetic oligonucleotide
uagagcaacaaggugggca

SEQ ID NO: 2251972 - RNA, 19 nt, Artificial Sequence
  Description of Artificial Sequence: Synthetic oligonucleotide
ccaauaauuugucagguac

SEQ ID NO: 2251973 - RNA, 19 nt, Artificial Sequence
  Description of Artificial Sequence: Synthetic oligonucleotide
gauuuucaacuguaacuac

SEQ ID NO: 2251974 - RNA, 19 nt, Artificial Sequence
  Description of Artificial Sequence: Synthetic oligonucleotide
uccucugacggccacagau

SEQ ID NO: 2251975 - RNA, 19 nt, Artificial Sequence
  Description of Artificial Sequence: Synthetic oligonucleotide
ugcuagaauccaauaauuu

SEQ ID NO: 2251976 - RNA, 19 nt, Artificial Sequence
  Description of Artificial Sequence: Synthetic oligonucleotide
acaguagacaggcauguaa

SEQ ID NO: 2251977 - RNA, 19 nt, Artificial Sequence
  Description of Artificial Sequence: Synthetic oligonucleotide
aagcauauucuacuuggua

SEQ ID NO: 2251978 - RNA, 19 nt, Artificial Sequence
  Description of Artificial Sequence: Synthetic oligonucleotide
uggauuugguagacuaaug

SEQ ID NO: 2251979 - RNA, 19 nt, Artificial Sequence
  Description of Artificial Sequence: Synthetic oligonucleotide
acggccacagaugugaguc

SEQ ID NO: 2251980 - RNA, 19 nt, Artificial Sequence
  Description of Artificial Sequence: Synthetic oligonucleotide
uguuuaacuccugcugcgg

SEQ ID NO: 2251981 - RNA, 19 nt, Artificial Sequence
  Description of Artificial Sequence: Synthetic oligonucleotide
aaauaguaauguggcgguc

SEQ ID NO: 2251982 - RNA, 19 nt, Artificial Sequence
  Description of Artificial Sequence: Synthetic oligonucleotide
acuacgccaacuucgauuu

SEQ ID NO: 2251983 - RNA, 19 nt, Artificial Sequence
  Description of Artificial Sequence: Synthetic oligonucleotide
aguaauguggcggucaaaa

SEQ ID NO: 2251984 - RNA, 19 nt, Artificial Sequence
  Description of Artificial Sequence: Synthetic oligonucleotide
ccaacuucgauuucugagg

SEQ ID NO: 2251985 - RNA, 19 nt, Artificial Sequence
  Description of Artificial Sequence: Synthetic oligonucleotide
aacuguaacuacgccaacu

SEQ ID NO: 2251986 - RNA, 19 nt, Artificial Sequence
  Description of Artificial Sequence: Synthetic oligonucleotide
aaccaauucagaggcagga

SEQ ID NO: 2251987 - RNA, 19 nt, Artificial Sequence
  Description of Artificial Sequence: Synthetic oligonucleotide
cacuuguacacuugagggc

SEQ ID NO: 2251988 - RNA, 19 nt, Artificial Sequence
  Description of Artificial Sequence: Synthetic oligonucleotide
ugugacaauuacugcacaa

SEQ ID NO: 2251989 - RNA, 19 nt, Artificial Sequence
  Description of Artificial Sequence: Synthetic oligonucleotide
cugugugacaauuacugca

SEQ ID NO: 2251990 - RNA, 19 nt, Artificial Sequence
  Description of Artificial Sequence: Synthetic oligonucleotide
aacguucagucucucucug

SEQ ID NO: 2251991 - RNA, 19 nt, Artificial Sequence
  Description of Artificial Sequence: Synthetic oligonucleotide
uguagacuugagaaauauc

SEQ ID NO: 2251992 - RNA, 19 nt, Artificial Sequence
  Description of Artificial Sequence: Synthetic oligonucleotide
auagccguauuuguauuuc

SEQ ID NO: 2251993 - RNA, 19 nt, Artificial Sequence
  Description of Artificial Sequence: Synthetic oligonucleotide
ucugcugucagcugucauc

SEQ ID NO: 2251994 - RNA, 19 nt, Artificial Sequence
  Description of Artificial Sequence: Synthetic oligonucleotide
ccaauuagcugccucauag

SEQ ID NO: 2251995 - RNA, 19 nt, Artificial Sequence
  Description of Artificial Sequence: Synthetic oligonucleotide
uucugucuguuuaacuccu

SEQ ID NO: 2251996 - RNA, 19 nt, Artificial Sequence
  Description of Artificial Sequence: Synthetic oligonucleotide
uacuugguagagucggccc

SEQ ID NO: 2251997 - RNA, 19 nt, Artificial Sequence
  Description of Artificial Sequence: Synthetic oligonucleotide
aauagccuuaaaagcauau

SEQ ID NO: 2251998 - RNA, 19 nt, Artificial Sequence
  Description of Artificial Sequence: Synthetic oligonucleotide
cacuguuuguucaaauguc

SEQ ID NO: 2251999 - RNA, 19 nt, Artificial Sequence
  Description of Artificial Sequence: Synthetic oligonucleotide
agaguccuaaccaauucag

SEQ ID NO: 2252000 - RNA, 19 nt, Artificial Sequence
  Description of Artificial Sequence: Synthetic oligonucleotide
agcaauucuuuuacacagc

SEQ ID NO: 2252001 - RNA, 19 nt, Artificial Sequence
  Description of Artificial Sequence: Synthetic oligonucleotide
caaucgacagaacaguaga

SEQ ID NO: 2252002 - RNA, 19 nt, Artificial Sequence
  Description of Artificial Sequence: Synthetic oligonucleotide
cugaauuuaggauuuucaa

SEQ ID NO: 2252003 - RNA, 19 nt, Artificial Sequence
  Description of Artificial Sequence: Synthetic oligonucleotide
aauguccaaucaaauuucu

SEQ ID NO: 2252004 - RNA, 19 nt, Artificial Sequence
  Description of Artificial Sequence: Synthetic oligonucleotide
gcugcgguggcuuuaaagc

SEQ ID NO: 2252005 - RNA, 19 nt, Artificial Sequence
  Description of Artificial Sequence: Synthetic oligonucleotide
aucacacuuguacacuuga

SEQ ID NO: 2252006 - RNA, 19 nt, Artificial Sequence
  Description of Artificial Sequence: Synthetic oligonucleotide
ucccacuauuucaagcaca

SEQ ID NO: 2252007 - RNA, 19 nt, Artificial Sequence
  Description of Artificial Sequence: Synthetic oligonucleotide
ugcgguggcuuuaaagcca

SEQ ID NO: 2252008 - RNA, 19 nt, Artificial Sequence
  Description of Artificial Sequence: Synthetic oligonucleotide
caggaucacacuuguacac

SEQ ID NO: 2252009 - RNA, 19 nt, Artificial Sequence
  Description of Artificial Sequence: Synthetic oligonucleotide
gagguuccaucuucaaccc

SEQ ID NO: 2252010 - RNA, 19 nt, Artificial Sequence
  Description of Artificial Sequence: Synthetic oligonucleotide
ugcugcgguggcuuuaaag

SEQ ID NO: 2252011 - RNA, 19 nt, Artificial Sequence
  Description of Artificial Sequence: Synthetic oligonucleotide
agcaacaaggugggcaucg

SEQ ID NO: 2252012 - RNA, 19 nt, Artificial Sequence
  Description of Artificial Sequence: Synthetic oligonucleotide
acuauuucaagcacacacu

SEQ ID NO: 2252013 - RNA, 19 nt, Artificial Sequence
  Description of Artificial Sequence: Synthetic oligonucleotide
ucuacuugguagagucggc

SEQ ID NO: 2252014 - RNA, 19 nt, Artificial Sequence
  Description of Artificial Sequence: Synthetic oligonucleotide
caguuauuuugaacaagug

SEQ ID NO: 2252015 - RNA, 19 nt, Artificial Sequence
  Description of Artificial Sequence: Synthetic oligonucleotide
agucacggugcuagaaucc

SEQ ID NO: 2252016 - RNA, 19 nt, Artificial Sequence
  Description of Artificial Sequence: Synthetic oligonucleotide
aaaaccggcgcuggaacca

SEQ ID NO: 2252017 - RNA, 19 nt, Artificial Sequence
  Description of Artificial Sequence: Synthetic oligonucleotide
ugagucacggugcuagaau

SEQ ID NO: 2252018 - RNA, 19 nt, Artificial Sequence
  Description of Artificial Sequence: Synthetic oligonucleotide
gccaacuucgauuucugag

SEQ ID NO: 2252019 - RNA, 19 nt, Artificial Sequence
  Description of Artificial Sequence: Synthetic oligonucleotide
acguucagucucucucugc

SEQ ID NO: 2252020 - RNA, 19 nt, Artificial Sequence
  Description of Artificial Sequence: Synthetic oligonucleotide
agacuaauggcaacguuca

SEQ ID NO: 2252021 - RNA, 19 nt, Artificial Sequence
  Description of Artificial Sequence: Synthetic oligonucleotide
aucgacagaacaguagaca

SEQ ID NO: 2252022 - RNA, 19 nt, Artificial Sequence
  Description of Artificial Sequence: Synthetic oligonucleotide
uucgauuucugaggguuug

SEQ ID NO: 2252023 - RNA, 19 nt, Artificial Sequence
  Description of Artificial Sequence: Synthetic oligonucleotide
aaagcauauucuacuuggu

SEQ ID NO: 2252024 - RNA, 19 nt, Artificial Sequence
  Description of Artificial Sequence: Synthetic oligonucleotide
agaacaguagacaggcaug

SEQ ID NO: 2252025 - RNA, 19 nt, Artificial Sequence
  Description of Artificial Sequence: Synthetic oligonucleotide
gagucggcccucuggagag

SEQ ID NO: 2252026 - RNA, 19 nt, Artificial Sequence
  Description of Artificial Sequence: Synthetic oligonucleotide
caauucagaggcaggagga

SEQ ID NO: 2252027 - RNA, 19 nt, Artificial Sequence
  Description of Artificial Sequence: Synthetic oligonucleotide
gagucacggugcuagaauc

SEQ ID NO: 2252028 - RNA, 19 nt, Artificial Sequence
  Description of Artificial Sequence: Synthetic oligonucleotide
caagcggccucauuucagc

SEQ ID NO: 2252029 - RNA, 19 nt, Artificial Sequence
  Description of Artificial Sequence: Synthetic oligonucleotide
uucccacuauuucaagcac

SEQ ID NO: 2252030 - RNA, 19 nt, Artificial Sequence
  Description of Artificial Sequence: Synthetic oligonucleotide
ccaauucagaggcaggagg

SEQ ID NO: 2252031 - RNA, 19 nt, Artificial Sequence
  Description of Artificial Sequence: Synthetic oligonucleotide
ugagagaauucugaauuua

SEQ ID NO: 2252032 - RNA, 19 nt, Artificial Sequence
  Description of Artificial Sequence: Synthetic oligonucleotide
cugcguguagacuugagaa

SEQ ID NO: 2252033 - RNA, 19 nt, Artificial Sequence
  Description of Artificial Sequence: Synthetic oligonucleotide
uucuucgucuauaccaauu

SEQ ID NO: 2252034 - RNA, 19 nt, Artificial Sequence
  Description of Artificial Sequence: Synthetic oligonucleotide
acuugguagagucggcccu

SEQ ID NO: 2252035 - RNA, 19 nt, Artificial Sequence
  Description of Artificial Sequence: Synthetic oligonucleotide
caaaaccggcgcuggaacc

SEQ ID NO: 2252036 - RNA, 19 nt, Artificial Sequence
  Description of Artificial Sequence: Synthetic oligonucleotide
uaauagccuuaaaagcaua

SEQ ID NO: 2252037 - RNA, 19 nt, Artificial Sequence
  Description of Artificial Sequence: Synthetic oligonucleotide
cugcugucagcugucaucc

SEQ ID NO: 2252038 - RNA, 19 nt, Artificial Sequence
  Description of Artificial Sequence: Synthetic oligonucleotide
uucuuuuacacagcauguc

SEQ ID NO: 2252039 - RNA, 19 nt, Artificial Sequence
  Description of Artificial Sequence: Synthetic oligonucleotide
ugcguguagacuugagaaa

SEQ ID NO: 2252040 - RNA, 19 nt, Artificial Sequence
  Description of Artificial Sequence: Synthetic oligonucleotide
acaagugagucacggugcu

SEQ ID NO: 2252041 - RNA, 19 nt, Artificial Sequence
  Description of Artificial Sequence: Synthetic oligonucleotide
uagccguauuuguauuucc

SEQ ID NO: 2252042 - RNA, 19 nt, Artificial Sequence
  Description of Artificial Sequence: Synthetic oligonucleotide
guuaccaaacacccaggca

SEQ ID NO: 2252043 - RNA, 19 nt, Artificial Sequence
  Description of Artificial Sequence: Synthetic oligonucleotide
acagaugugaguccuccuu

SEQ ID NO: 2252044 - RNA, 19 nt, Artificial Sequence
  Description of Artificial Sequence: Synthetic oligonucleotide
caccccguagcacacacac

SEQ ID NO: 2252045 - RNA, 19 nt, Artificial Sequence
  Description of Artificial Sequence: Synthetic oligonucleotide
gguacuuucuucuguguga

SEQ ID NO: 2252046 - RNA, 19 nt, Artificial Sequence
  Description of Artificial Sequence: Synthetic oligonucleotide
agagucggcccucuggaga

SEQ ID NO: 2252047 - RNA, 19 nt, Artificial Sequence
  Description of Artificial Sequence: Synthetic oligonucleotide
aacuucgauuucugagggu

SEQ ID NO: 2252048 - RNA, 19 nt, Artificial Sequence
  Description of Artificial Sequence: Synthetic oligonucleotide
acuucgauuucugaggguu

SEQ ID NO: 2252049 - RNA, 19 nt, Artificial Sequence
  Description of Artificial Sequence: Synthetic oligonucleotide
cauguaauugcaguuucca

SEQ ID NO: 2252050 - RNA, 19 nt, Artificial Sequence
  Description of Artificial Sequence: Synthetic oligonucleotide
cuacuugguagagucggcc

SEQ ID NO: 2252051 - RNA, 19 nt, Artificial Sequence
  Description of Artificial Sequence: Synthetic oligonucleotide
uugguagacuaauggcaac

SEQ ID NO: 2252052 - RNA, 19 nt, Artificial Sequence
  Description of Artificial Sequence: Synthetic oligonucleotide
auaguaauguggcggucaa

SEQ ID NO: 2252053 - RNA, 19 nt, Artificial Sequence
  Description of Artificial Sequence: Synthetic oligonucleotide
auggauuugguagacuaau

SEQ ID NO: 2252054 - RNA, 19 nt, Artificial Sequence
  Description of Artificial Sequence: Synthetic oligonucleotide
uggcggucaaaaccggcgc

SEQ ID NO: 2252055 - RNA, 19 nt, Artificial Sequence
  Description of Artificial Sequence: Synthetic oligonucleotide
ugcuguuaccaaacaccca

SEQ ID NO: 2252056 - RNA, 19 nt, Artificial Sequence
  Description of Artificial Sequence: Synthetic oligonucleotide
cagaugugaguccuccuug

SEQ ID NO: 2252057 - RNA, 19 nt, Artificial Sequence
  Description of Artificial Sequence: Synthetic oligonucleotide
gcuagagcaacaagguggg

SEQ ID NO: 2252058 - RNA, 19 nt, Artificial Sequence
  Description of Artificial Sequence: Synthetic oligonucleotide
guaauguggcggucaaaac

SEQ ID NO: 2252059 - RNA, 19 nt, Artificial Sequence
  Description of Artificial Sequence: Synthetic oligonucleotide
ucauuucagcauucugcgu

SEQ ID NO: 2252060 - RNA, 19 nt, Artificial Sequence
  Description of Artificial Sequence: Synthetic oligonucleotide
agccaauguuuucaguuau

SEQ ID NO: 2252061 - RNA, 19 nt, Artificial Sequence
  Description of Artificial Sequence: Synthetic oligonucleotide
cuuuaaagccacaguagua

SEQ ID NO: 2252062 - RNA, 19 nt, Artificial Sequence
  Description of Artificial Sequence: Synthetic oligonucleotide
cauucugcguguagacuug

SEQ ID NO: 2252063 - RNA, 19 nt, Artificial Sequence
  Description of Artificial Sequence: Synthetic oligonucleotide
cucuggagagaaaauagua

SEQ ID NO: 2252064 - RNA, 19 nt, Artificial Sequence
  Description of Artificial Sequence: Synthetic oligonucleotide
aaaccggcgcuggaaccac

SEQ ID NO: 2252065 - RNA, 19 nt, Artificial Sequence
  Description of Artificial Sequence: Synthetic oligonucleotide
gcauauucuacuugguaga

SEQ ID NO: 2252066 - RNA, 19 nt, Artificial Sequence
  Description of Artificial Sequence: Synthetic oligonucleotide
gacuaauggcaacguucag

SEQ ID NO: 2252067 - RNA, 19 nt, Artificial Sequence
  Description of Artificial Sequence: Synthetic oligonucleotide
uccuaaaagcacuguuuua

SEQ ID NO: 2252068 - RNA, 19 nt, Artificial Sequence
  Description of Artificial Sequence: Synthetic oligonucleotide
gagaaauaucagcaauucu

SEQ ID NO: 2252069 - RNA, 19 nt, Artificial Sequence
  Description of Artificial Sequence: Synthetic oligonucleotide
uucugcguguagacuugag

SEQ ID NO: 2252070 - RNA, 19 nt, Artificial Sequence
  Description of Artificial Sequence: Synthetic oligonucleotide
auucuacuugguagagucg

SEQ ID NO: 2252071 - RNA, 19 nt, Artificial Sequence
  Description of Artificial Sequence: Synthetic oligonucleotide
gcaacguucagucucucuc

SEQ ID NO: 2252072 - RNA, 19 nt, Artificial Sequence
  Description of Artificial Sequence: Synthetic oligonucleotide
gaucacacuuguacacuug

SEQ ID NO: 2252073 - RNA, 19 nt, Artificial Sequence
  Description of Artificial Sequence: Synthetic oligonucleotide
ucuuuuccucugacggcca

SEQ ID NO: 2252074 - RNA, 19 nt, Artificial Sequence
  Description of Artificial Sequence: Synthetic oligonucleotide
cucuguaccugggaucugc

SEQ ID NO: 2252075 - RNA, 19 nt, Artificial Sequence
  Description of Artificial Sequence: Synthetic oligonucleotide
ggagagaaaauaguaaugu

SEQ ID NO: 2252076 - RNA, 19 nt, Artificial Sequence
  Description of Artificial Sequence: Synthetic oligonucleotide
ucauagccguauuuguauu

SEQ ID NO: 2252077 - RNA, 19 nt, Artificial Sequence
  Description of Artificial Sequence: Synthetic oligonucleotide
uaauugcaguuuccacugu

SEQ ID NO: 2252078 - RNA, 19 nt, Artificial Sequence
  Description of Artificial Sequence: Synthetic oligonucleotide
augauguugguuugcuguu

SEQ ID NO: 2252079 - RNA, 19 nt, Artificial Sequence
  Description of Artificial Sequence: Synthetic oligonucleotide
accaauucagaggcaggag

SEQ ID NO: 2252080 - RNA, 19 nt, Artificial Sequence
  Description of Artificial Sequence: Synthetic oligonucleotide
ucugacggccacagaugug

SEQ ID NO: 2252081 - RNA, 19 nt, Artificial Sequence
  Description of Artificial Sequence: Synthetic oligonucleotide
auacaacaaccaagcggcc

SEQ ID NO: 2252082 - RNA, 19 nt, Artificial Sequence
  Description of Artificial Sequence: Synthetic oligonucleotide
auuagcugccucauagcgu

SEQ ID NO: 2252083 - RNA, 19 nt, Artificial Sequence
  Description of Artificial Sequence: Synthetic oligonucleotide
gguggcuuuaaagccacag

SEQ ID NO: 2252084 - RNA, 19 nt, Artificial Sequence
  Description of Artificial Sequence: Synthetic oligonucleotide
ugggcaucgaucucugcuu

SEQ ID NO: 2252085 - RNA, 19 nt, Artificial Sequence
  Description of Artificial Sequence: Synthetic oligonucleotide
cagaguccuaaccaauuca

SEQ ID NO: 2252086 - RNA, 19 nt, Artificial Sequence
  Description of Artificial Sequence: Synthetic oligonucleotide
cuucugagagaauucugaa

SEQ ID NO: 2252087 - RNA, 19 nt, Artificial Sequence
  Description of Artificial Sequence: Synthetic oligonucleotide
auauucuacuugguagagu

SEQ ID NO: 2252088 - RNA, 19 nt, Artificial Sequence
  Description of Artificial Sequence: Synthetic oligonucleotide
cuguaacuacgccaacuuc

SEQ ID NO: 2252089 - RNA, 19 nt, Artificial Sequence
  Description of Artificial Sequence: Synthetic oligonucleotide
guaacuacgccaacuucga

SEQ ID NO: 2252090 - RNA, 19 nt, Artificial Sequence
  Description of Artificial Sequence: Synthetic oligonucleotide
aaccacgggacauggcguu

SEQ ID NO: 2252091 - RNA, 19 nt, Artificial Sequence
  Description of Artificial Sequence: Synthetic oligonucleotide
uagagucggcccucuggag

SEQ ID NO: 2252092 - RNA, 19 nt, Artificial Sequence
  Description of Artificial Sequence: Synthetic oligonucleotide
caacccagaggccucuaug

SEQ ID NO: 2252093 - RNA, 19 nt, Artificial Sequence
  Description of Artificial Sequence: Synthetic oligonucleotide
cucuaugauguugguuugc

SEQ ID NO: 2252094 - RNA, 19 nt, Artificial Sequence
  Description of Artificial Sequence: Synthetic oligonucleotide
gagugggagagguuccauc

SEQ ID NO: 2252095 - RNA, 19 nt, Artificial Sequence
  Description of Artificial Sequence: Synthetic oligonucleotide
gguugauucugucuguuua

SEQ ID NO: 2252096 - RNA, 19 nt, Artificial Sequence
  Description of Artificial Sequence: Synthetic oligonucleotide
ucagucucucucugcuaga

SEQ ID NO: 2252097 - RNA, 19 nt, Artificial Sequence
  Description of Artificial Sequence: Synthetic oligonucleotide
cugacggccacagauguga

SEQ ID NO: 2252098 - RNA, 19 nt, Artificial Sequence
  Description of Artificial Sequence: Synthetic oligonucleotide
ggugcuagaauccaauaau

SEQ ID NO: 2252099 - RNA, 19 nt, Artificial Sequence
  Description of Artificial Sequence: Synthetic oligonucleotide
gguuugaaaucaaucgaca

SEQ ID NO: 2252100 - RNA, 19 nt, Artificial Sequence
  Description of Artificial Sequence: Synthetic oligonucleotide
uccaauuagcugccucaua

SEQ ID NO: 2252101 - RNA, 19 nt, Artificial Sequence
  Description of Artificial Sequence: Synthetic oligonucleotide
accaagcggccucauuuca

SEQ ID NO: 2252102 - RNA, 19 nt, Artificial Sequence
  Description of Artificial Sequence: Synthetic oligonucleotide
ggcauguaauugcaguuuc

SEQ ID NO: 2252103 - RNA, 19 nt, Artificial Sequence
  Description of Artificial Sequence: Synthetic oligonucleotide
uagcgugcccucuguaccu

SEQ ID NO: 2252104 - RNA, 19 nt, Artificial Sequence
  Description of Artificial Sequence: Synthetic oligonucleotide
caucauggauuugguagac

SEQ ID NO: 2252105 - RNA, 19 nt, Artificial Sequence
  Description of Artificial Sequence: Synthetic oligonucleotide
gcaucauggauuugguaga

SEQ ID NO: 2252106 - RNA, 19 nt, Artificial Sequence
  Description of Artificial Sequence: Synthetic oligonucleotide
cauggauuugguagacuaa

SEQ ID NO: 2252107 - RNA, 19 nt, Artificial Sequence
  Description of Artificial Sequence: Synthetic oligonucleotide
aggaaucucauagccguau

SEQ ID NO: 2252108 - RNA, 19 nt, Artificial Sequence
  Description of Artificial Sequence: Synthetic oligonucleotide
cacacacugcaccccguag

SEQ ID NO: 2252109 - RNA, 19 nt, Artificial Sequence
  Description of Artificial Sequence: Synthetic oligonucleotide
ucaacccagaggccucuau

SEQ ID NO: 2252110 - RNA, 19 nt, Artificial Sequence
  Description of Artificial Sequence: Synthetic oligonucleotide
cucauagccguauuuguau

SEQ ID NO: 2252111 - RNA, 19 nt, Artificial Sequence
  Description of Artificial Sequence: Synthetic oligonucleotide
ucacggugcuagaauccaa

SEQ ID NO: 2252112 - RNA, 19 nt, Artificial Sequence
  Description of Artificial Sequence: Synthetic oligonucleotide
uuccaauuagcugccucau

SEQ ID NO: 2252113 - RNA, 19 nt, Artificial Sequence
  Description of Artificial Sequence: Synthetic oligonucleotide
ggaggagugggagagguuc

SEQ ID NO: 2252114 - RNA, 19 nt, Artificial Sequence
  Description of Artificial Sequence: Synthetic oligonucleotide
gaguccuaaccaauucaga

SEQ ID NO: 2252115 - RNA, 19 nt, Artificial Sequence
  Description of Artificial Sequence: Synthetic oligonucleotide
agcauucugcguguagacu

SEQ ID NO: 2252116 - RNA, 19 nt, Artificial Sequence
  Description of Artificial Sequence: Synthetic oligonucleotide
ucgauuucugaggguuuga

SEQ ID NO: 2252117 - RNA, 19 nt, Artificial Sequence
  Description of Artificial Sequence: Synthetic oligonucleotide
uaacuacgccaacuucgau

SEQ ID NO: 2252118 - RNA, 19 nt, Artificial Sequence
  Description of Artificial Sequence: Synthetic oligonucleotide
cuucgucuauaccaauuaa

SEQ ID NO: 2252119 - RNA, 19 nt, Artificial Sequence
  Description of Artificial Sequence: Synthetic oligonucleotide
ugauguugguuugcuguua

SEQ ID NO: 2252120 - RNA, 19 nt, Artificial Sequence
  Description of Artificial Sequence: Synthetic oligonucleotide
ugguugauucugucuguuu

SEQ ID NO: 2252121 - RNA, 19 nt, Artificial Sequence
  Description of Artificial Sequence: Synthetic oligonucleotide
uucaaggaagcugguugau

SEQ ID NO: 2252122 - RNA, 19 nt, Artificial Sequence
  Description of Artificial Sequence: Synthetic oligonucleotide
agugagucacggugcuaga

SEQ ID NO: 2252123 - RNA, 19 nt, Artificial Sequence
  Description of Artificial Sequence: Synthetic oligonucleotide
cuguaccugggaucugcug

SEQ ID NO: 2252124 - RNA, 19 nt, Artificial Sequence
  Description of Artificial Sequence: Synthetic oligonucleotide
uaacuccugcugcgguggc

SEQ ID NO: 2252125 - RNA, 19 nt, Artificial Sequence
  Description of Artificial Sequence: Synthetic oligonucleotide
gugggcaucgaucucugcu

SEQ ID NO: 2252126 - RNA, 19 nt, Artificial Sequence
  Description of Artificial Sequence: Synthetic oligonucleotide
uggcaucauggauuuggua

SEQ ID NO: 2252127 - RNA, 19 nt, Artificial Sequence
  Description of Artificial Sequence: Synthetic oligonucleotide
aucaaucgacagaacagua

SEQ ID NO: 2252128 - RNA, 19 nt, Artificial Sequence
  Description of Artificial Sequence: Synthetic oligonucleotide
gugugacaauuacugcaca

SEQ ID NO: 2252129 - RNA, 19 nt, Artificial Sequence
  Description of Artificial Sequence: Synthetic oligonucleotide
cgacagaacaguagacagg

SEQ ID NO: 2252130 - RNA, 19 nt, Artificial Sequence
  Description of Artificial Sequence: Synthetic oligonucleotide
gucaucacacagccaaugu

SEQ ID NO: 2252131 - RNA, 19 nt, Artificial Sequence
  Description of Artificial Sequence: Synthetic oligonucleotide
gucagguacuuucuucugu

SEQ ID NO: 2252132 - RNA, 19 nt, Artificial Sequence
  Description of Artificial Sequence: Synthetic oligonucleotide
aucauggauuugguagacu

SEQ ID NO: 2252133 - RNA, 19 nt, Artificial Sequence
  Description of Artificial Sequence: Synthetic oligonucleotide
cuucugugugacaauuacu

SEQ ID NO: 2252134 - RNA, 19 nt, Artificial Sequence
  Description of Artificial Sequence: Synthetic oligonucleotide
agguuccaucuucaaccca

SEQ ID NO: 2252135 - RNA, 19 nt, Artificial Sequence
  Description of Artificial Sequence: Synthetic oligonucleotide
aacaguagacaggcaugua

SEQ ID NO: 2252136 - RNA, 19 nt, Artificial Sequence
  Description of Artificial Sequence: Synthetic oligonucleotide
gcacuguuuuauuuauaca

SEQ ID NO: 2252137 - RNA, 19 nt, Artificial Sequence
  Description of Artificial Sequence: Synthetic oligonucleotide
auggcaacguucagucucu

SEQ ID NO: 2252138 - RNA, 19 nt, Artificial Sequence
  Description of Artificial Sequence: Synthetic oligonucleotide
cuugguagagucggcccuc

SEQ ID NO: 2252139 - RNA, 19 nt, Artificial Sequence
  Description of Artificial Sequence: Synthetic oligonucleotide
acggugcuagaauccaaua

SEQ ID NO: 2252140 - RNA, 19 nt, Artificial Sequence
  Description of Artificial Sequence: Synthetic oligonucleotide
gucaaaaccggcgcuggaa

SEQ ID NO: 2252141 - RNA, 19 nt, Artificial Sequence
  Description of Artificial Sequence: Synthetic oligonucleotide
acccagaggccucuaugau

SEQ ID NO: 2252142 - RNA, 19 nt, Artificial Sequence
  Description of Artificial Sequence: Synthetic oligonucleotide
gucacggugcuagaaucca

SEQ ID NO: 2252143 - RNA, 19 nt, Artificial Sequence
  Description of Artificial Sequence: Synthetic oligonucleotide
uguccacaggaaucucaua

SEQ ID NO: 2252144 - RNA, 19 nt, Artificial Sequence
  Description of Artificial Sequence: Synthetic oligonucleotide
ccguagcacacacaccagg

SEQ ID NO: 2252145 - RNA, 19 nt, Artificial Sequence
  Description of Artificial Sequence: Synthetic oligonucleotide
ccccguagcacacacacca

SEQ ID NO: 2252146 - RNA, 19 nt, Artificial Sequence
  Description of Artificial Sequence: Synthetic oligonucleotide
gcauguaauugcaguuucc

SEQ ID NO: 2252147 - RNA, 19 nt, Artificial Sequence
  Description of Artificial Sequence: Synthetic oligonucleotide
ugcugucagcugucauccc

SEQ ID NO: 2252148 - RNA, 19 nt, Artificial Sequence
  Description of Artificial Sequence: Synthetic oligonucleotide
aguagccugcaggaucaca

SEQ ID NO: 2252149 - RNA, 19 nt, Artificial Sequence
  Description of Artificial Sequence: Synthetic oligonucleotide
ugguagagucggcccucug

SEQ ID NO: 2252150 - RNA, 19 nt, Artificial Sequence
  Description of Artificial Sequence: Synthetic oligonucleotide
accccguagcacacacacc

SEQ ID NO: 2252151 - RNA, 19 nt, Artificial Sequence
  Description of Artificial Sequence: Synthetic oligonucleotide
caaccaagcggccucauuu

SEQ ID NO: 2252152 - RNA, 19 nt, Artificial Sequence
  Description of Artificial Sequence: Synthetic oligonucleotide
cuaaaagcacuguuuuauu

SEQ ID NO: 2252153 - RNA, 19 nt, Artificial Sequence
  Description of Artificial Sequence: Synthetic oligonucleotide
gugacaauuacugcacaau

SEQ ID NO: 2252154 - RNA, 19 nt, Artificial Sequence
  Description of Artificial Sequence: Synthetic oligonucleotide
aagcacuguuuuauuuaua

SEQ ID NO: 2252155 - RNA, 19 nt, Artificial Sequence
  Description of Artificial Sequence: Synthetic oligonucleotide
caacguucagucucucucu

SEQ ID NO: 2252156 - RNA, 19 nt, Artificial Sequence
  Description of Artificial Sequence: Synthetic oligonucleotide
gccguauuuguauuuccaa

SEQ ID NO: 2252157 - RNA, 19 nt, Artificial Sequence
  Description of Artificial Sequence: Synthetic oligonucleotide
guguagacuugagaaauau

SEQ ID NO: 2252158 - RNA, 19 nt, Artificial Sequence
  Description of Artificial Sequence: Synthetic oligonucleotide
accggcgcuggaaccacgg

SEQ ID NO: 2252159 - RNA, 19 nt, Artificial Sequence
  Description of Artificial Sequence: Synthetic oligonucleotide
auucugcguguagacuuga

SEQ ID NO: 2252160 - RNA, 19 nt, Artificial Sequence
  Description of Artificial Sequence: Synthetic oligonucleotide
ccaagcggccucauuucag

SEQ ID NO: 2252161 - RNA, 19 nt, Artificial Sequence
  Description of Artificial Sequence: Synthetic oligonucleotide
cuagagcaacaaggugggc

SEQ ID NO: 2252162 - RNA, 19 nt, Artificial Sequence
  Description of Artificial Sequence: Synthetic oligonucleotide
accacgggacauggcguuc

SEQ ID NO: 2252163 - RNA, 19 nt, Artificial Sequence
  Description of Artificial Sequence: Synthetic oligonucleotide
uaguaauguggcggucaaa

SEQ ID NO: 2252164 - RNA, 19 nt, Artificial Sequence
  Description of Artificial Sequence: Synthetic oligonucleotide
aaccggcgcuggaaccacg

SEQ ID NO: 2252165 - RNA, 19 nt, Artificial Sequence
  Description of Artificial Sequence: Synthetic oligonucleotide
gaucugcugucagcuguca

SEQ ID NO: 2252166 - RNA, 19 nt, Artificial Sequence
  Description of Artificial Sequence: Synthetic oligonucleotide
ugagggccuuguucuucgu

SEQ ID NO: 2252167 - RNA, 19 nt, Artificial Sequence
  Description of Artificial Sequence: Synthetic oligonucleotide
aacaaccaagcggccucau

SEQ ID NO: 2252168 - RNA, 19 nt, Artificial Sequence
  Description of Artificial Sequence: Synthetic oligonucleotide
uuccucugacggccacaga

SEQ ID NO: 2252169 - RNA, 19 nt, Artificial Sequence
  Description of Artificial Sequence: Synthetic oligonucleotide
guagacuaauggcaacguu

SEQ ID NO: 2252170 - RNA, 19 nt, Artificial Sequence
  Description of Artificial Sequence: Synthetic oligonucleotide
aaguggcaucauggauuug

SEQ ID NO: 2252171 - RNA, 19 nt, Artificial Sequence
  Description of Artificial Sequence: Synthetic oligonucleotide
gugcuagaauccaauaauu

SEQ ID NO: 2252172 - RNA, 19 nt, Artificial Sequence
  Description of Artificial Sequence: Synthetic oligonucleotide
ccaggcaaguggcaucaug

SEQ ID NO: 2252173 - RNA, 19 nt, Artificial Sequence
  Description of Artificial Sequence: Synthetic oligonucleotide
gugagucacggugcuagaa

SEQ ID NO: 2252174 - RNA, 19 nt, Artificial Sequence
  Description of Artificial Sequence: Synthetic oligonucleotide
gcaaguggcaucauggauu

SEQ ID NO: 2252175 - RNA, 19 nt, Artificial Sequence
  Description of Artificial Sequence: Synthetic oligonucleotide
cauggcguucccacuauuu

SEQ ID NO: 2252176 - RNA, 19 nt, Artificial Sequence
  Description of Artificial Sequence: Synthetic oligonucleotide
cacggugcuagaauccaau

SEQ ID NO: 2252177 - RNA, 19 nt, Artificial Sequence
  Description of Artificial Sequence: Synthetic oligonucleotide
cugaggguuugaaaucaau

SEQ ID NO: 2252178 - RNA, 19 nt, Artificial Sequence
  Description of Artificial Sequence: Synthetic oligonucleotide
gacauggcguucccacuau

SEQ ID NO: 2252179 - RNA, 19 nt, Artificial Sequence
  Description of Artificial Sequence: Synthetic oligonucleotide
cgggacauggcguucccac

SEQ ID NO: 2252180 - RNA, 19 nt, Artificial Sequence
  Description of Artificial Sequence: Synthetic oligonucleotide
gcguucccacuauuucaag

SEQ ID NO: 2252181 - RNA, 19 nt, Artificial Sequence
  Description of Artificial Sequence: Synthetic oligonucleotide
ggagagguuccaucuucaa

SEQ ID NO: 2252182 - RNA, 19 nt, Artificial Sequence
  Description of Artificial Sequence: Synthetic oligonucleotide
ggcguucccacuauuucaa

SEQ ID NO: 2252183 - RNA, 19 nt, Artificial Sequence
  Description of Artificial Sequence: Synthetic oligonucleotide
ugaguccuccuugguuaau

SEQ ID NO: 2252184 - RNA, 19 nt, Artificial Sequence
  Description of Artificial Sequence: Synthetic oligonucleotide
gguagacuaauggcaacgu

SEQ ID NO: 2252185 - RNA, 19 nt, Artificial Sequence
  Description of Artificial Sequence: Synthetic oligonucleotide
gcggucaaaaccggcgcug

SEQ ID NO: 2252186 - RNA, 19 nt, Artificial Sequence
  Description of Artificial Sequence: Synthetic oligonucleotide
agcgugcccucuguaccug

SEQ ID NO: 2252187 - RNA, 19 nt, Artificial Sequence
  Description of Artificial Sequence: Synthetic oligonucleotide
cuacgccaacuucgauuuc

SEQ ID NO: 2252188 - RNA, 19 nt, Artificial Sequence
  Description of Artificial Sequence: Synthetic oligonucleotide
ggcaaguggcaucauggau

SEQ ID NO: 2252189 - RNA, 19 nt, Artificial Sequence
  Description of Artificial Sequence: Synthetic oligonucleotide
ggaucacacuuguacacuu

SEQ ID NO: 2252190 - RNA, 19 nt, Artificial Sequence
  Description of Artificial Sequence: Synthetic oligonucleotide
gcguguagacuugagaaau

SEQ ID NO: 2252191 - RNA, 19 nt, Artificial Sequence
  Description of Artificial Sequence: Synthetic oligonucleotide
guucuucgucuauaccaau

SEQ ID NO: 2252192 - RNA, 19 nt, Artificial Sequence
  Description of Artificial Sequence: Synthetic oligonucleotide
ggucaaaaccggcgcugga

SEQ ID NO: 2252193 - RNA, 19 nt, Artificial Sequence
  Description of Artificial Sequence: Synthetic oligonucleotide
ggaucugcugucagcuguc

SEQ ID NO: 2252194 - RNA, 19 nt, Artificial Sequence
  Description of Artificial Sequence: Synthetic oligonucleotide
caggaaucucauagccgua

SEQ ID NO: 2252195 - RNA, 19 nt, Artificial Sequence
  Description of Artificial Sequence: Synthetic oligonucleotide
uaguagccugcaggaucac

SEQ ID NO: 2252196 - RNA, 19 nt, Artificial Sequence
  Description of Artificial Sequence: Synthetic oligonucleotide
cccguagcacacacaccag

SEQ ID NO: 2252197 - RNA, 19 nt, Artificial Sequence
  Description of Artificial Sequence: Synthetic oligonucleotide
gcgugcccucuguaccugg

SEQ ID NO: 2252198 - RNA, 19 nt, Artificial Sequence
  Description of Artificial Sequence: Synthetic oligonucleotide
uucaacccagaggccucua

SEQ ID NO: 2252199 - RNA, 19 nt, Artificial Sequence
  Description of Artificial Sequence: Synthetic oligonucleotide
ccucuggagagaaaauagu

SEQ ID NO: 2252200 - RNA, 19 nt, Artificial Sequence
  Description of Artificial Sequence: Synthetic oligonucleotide
gcgguggcuuuaaagccac

SEQ ID NO: 2252201 - RNA, 19 nt, Artificial Sequence
  Description of Artificial Sequence: Synthetic oligonucleotide
guggcaucauggauuuggu

SEQ ID NO: 2252202 - RNA, 19 nt, Artificial Sequence
  Description of Artificial Sequence: Synthetic oligonucleotide
acgggacauggcguuccca

SEQ ID NO: 2252203 - RNA, 19 nt, Artificial Sequence
  Description of Artificial Sequence: Synthetic oligonucleotide
uccugcugcgguggcuuua

SEQ ID NO: 2252204 - RNA, 19 nt, Artificial Sequence
  Description of Artificial Sequence: Synthetic oligonucleotide
ccguauuuguauuuccaau

SEQ ID NO: 2252205 - RNA, 19 nt, Artificial Sequence
  Description of Artificial Sequence: Synthetic oligonucleotide
ccacgggacauggcguucc

SEQ ID NO: 2252206 - RNA, 19 nt, Artificial Sequence
  Description of Artificial Sequence: Synthetic oligonucleotide
cgugcccucuguaccuggg

SEQ ID NO: 2252207 - RNA, 19 nt, Artificial Sequence
  Description of Artificial Sequence: Synthetic oligonucleotide
uggcaacguucagucucuc

SEQ ID NO: 2252208 - RNA, 19 nt, Artificial Sequence
  Description of Artificial Sequence: Synthetic oligonucleotide
gcccucuggagagaaaaua

SEQ ID NO: 2252209 - RNA, 19 nt, Artificial Sequence
  Description of Artificial Sequence: Synthetic oligonucleotide
cgucuauaccaauuaaaau

SEQ ID NO: 2252210 - RNA, 19 nt, Artificial Sequence
  Description of Artificial Sequence: Synthetic oligonucleotide
caacaaggugggcaucgau

SEQ ID NO: 2252211 - RNA, 19 nt, Artificial Sequence
  Description of Artificial Sequence: Synthetic oligonucleotide
cggugcuagaauccaauaa

SEQ ID NO: 2252212 - RNA, 19 nt, Artificial Sequence
  Description of Artificial Sequence: Synthetic oligonucleotide
cggucaaaaccggcgcugg

SEQ ID NO: 2252213 - RNA, 19 nt, Artificial Sequence
  Description of Artificial Sequence: Synthetic oligonucleotide
ccaauguuuucaguuauuu

SEQ ID NO: 2252214 - RNA, 19 nt, Artificial Sequence
  Description of Artificial Sequence: Synthetic oligonucleotide
gucggcccucuggagagaa

SEQ ID NO: 2252215 - RNA, 19 nt, Artificial Sequence
  Description of Artificial Sequence: Synthetic oligonucleotide
ggcggucaaaaccggcgcu

SEQ ID NO: 2252216 - RNA, 19 nt, Artificial Sequence
  Description of Artificial Sequence: Synthetic oligonucleotide
gggacauggcguucccacu

SEQ ID NO: 2252217 - RNA, 19 nt, Artificial Sequence
  Description of Artificial Sequence: Synthetic oligonucleotide
cguucagucucucucugcu

SEQ ID NO: 2252218 - RNA, 19 nt, Artificial Sequence
  Description of Artificial Sequence: Synthetic oligonucleotide
gcaacaaggugggcaucga

SEQ ID NO: 2252219 - RNA, 19 nt, Artificial Sequence
  Description of Artificial Sequence: Synthetic oligonucleotide
ggcaucgaucucugcuucu

SEQ ID NO: 2252220 - RNA, 19 nt, Artificial Sequence
  Description of Artificial Sequence: Synthetic oligonucleotide
cugcaggaucacacuugua

SEQ ID NO: 2252221 - RNA, 19 nt, Artificial Sequence
  Description of Artificial Sequence: Synthetic oligonucleotide
gcacacacugcaccccgua

SEQ ID NO: 2252222 - RNA, 19 nt, Artificial Sequence
  Description of Artificial Sequence: Synthetic oligonucleotide
caagugagucacggugcua

SEQ ID NO: 2252223 - RNA, 19 nt, Artificial Sequence
  Description of Artificial Sequence: Synthetic oligonucleotide
ccggcgcuggaaccacggg

SEQ ID NO: 2252224 - RNA, 19 nt, Artificial Sequence
  Description of Artificial Sequence: Synthetic oligonucleotide
gccuuguucuucgucuaua

SEQ ID NO: 2252225 - RNA, 19 nt, Artificial Sequence
  Description of Artificial Sequence: Synthetic oligonucleotide
gcggccucauuucagcauu

SEQ ID NO: 2252226 - RNA, 19 nt, Artificial Sequence
  Description of Artificial Sequence: Synthetic oligonucleotide
cguguagacuugagaaaua

SEQ ID NO: 2252227 - RNA, 19 nt, Artificial Sequence
  Description of Artificial Sequence: Synthetic oligonucleotide
cccucuguaccugggaucu

SEQ ID NO: 2252228 - RNA, 19 nt, Artificial Sequence
  Description of Artificial Sequence: Synthetic oligonucleotide
gcgcuggaaccacgggaca

SEQ ID NO: 2252229 - RNA, 19 nt, Artificial Sequence
  Description of Artificial Sequence: Synthetic oligonucleotide
ccacuauuucaagcacaca

SEQ ID NO: 2252230 - RNA, 19 nt, Artificial Sequence
  Description of Artificial Sequence: Synthetic oligonucleotide
ccugcugcgguggcuuuaa

SEQ ID NO: 2252231 - RNA, 19 nt, Artificial Sequence
  Description of Artificial Sequence: Synthetic oligonucleotide
cugcugcgguggcuuuaaa

SEQ ID NO: 2252232 - RNA, 19 nt, Artificial Sequence
  Description of Artificial Sequence: Synthetic oligonucleotide
ggccucuaugauguugguu

SEQ ID NO: 2252233 - RNA, 19 nt, Artificial Sequence
  Description of Artificial Sequence: Synthetic oligonucleotide
gcaccccguagcacacaca

SEQ ID NO: 2252234 - RNA, 19 nt, Artificial Sequence
  Description of Artificial Sequence: Synthetic oligonucleotide
ggcccucuggagagaaaau

SEQ ID NO: 2252235 - RNA, 19 nt, Artificial Sequence
  Description of Artificial Sequence: Synthetic oligonucleotide
cgguggcuuuaaagccaca

SEQ ID NO: 2252236 - RNA, 19 nt, Artificial Sequence
  Description of Artificial Sequence: Synthetic oligonucleotide
cgcuggaaccacgggacau

SEQ ID NO: 2252237 - RNA, 19 nt, Artificial Sequence
  Description of Artificial Sequence: Synthetic oligonucleotide
cccaggcaaguggcaucau

SEQ ID NO: 2252238 - RNA, 19 nt, Artificial Sequence
  Description of Artificial Sequence: Synthetic oligonucleotide
aauuuuauaauucaaaguu

SEQ ID NO: 2252239 - RNA, 19 nt, Artificial Sequence
  Description of Artificial Sequence: Synthetic oligonucleotide
uuuuauaauucaaaguugc

SEQ ID NO: 2252240 - RNA, 19 nt, Artificial Sequence
  Description of Artificial Sequence: Synthetic oligonucleotide
uauaauucaaaguugccug

SEQ ID NO: 2252241 - RNA, 19 nt, Artificial Sequence
  Description of Artificial Sequence: Synthetic oligonucleotide
ugugguaggaaccaucccg

SEQ ID NO: 2252242 - RNA, 19 nt, Artificial Sequence
  Description of Artificial Sequence: Synthetic oligonucleotide
uucagugugguucaagagg

SEQ ID NO: 2252243 - RNA, 19 nt, Artificial Sequence
  Description of Artificial Sequence: Synthetic oligonucleotide
aauucaaaguugccuggcc

SEQ ID NO: 2252244 - RNA, 19 nt, Artificial Sequence
  Description of Artificial Sequence: Synthetic oligonucleotide
aacagaauuuuauaauuca

SEQ ID NO: 2252245 - RNA, 19 nt, Artificial Sequence
  Description of Artificial Sequence: Synthetic oligonucleotide
cuagcaaguccucagaggg

SEQ ID NO: 2252246 - RNA, 19 nt, Artificial Sequence
  Description of Artificial Sequence: Synthetic oligonucleotide
aaacagaauuuuauaauuc

SEQ ID NO: 2252247 - RNA, 19 nt, Artificial Sequence
  Description of Artificial Sequence: Synthetic oligonucleotide
uuuauaauucaaaguugcc

SEQ ID NO: 2252248 - RNA, 19 nt, Artificial Sequence
  Description of Artificial Sequence: Synthetic oligonucleotide
uuuuaauucuccccagacc

SEQ ID NO: 2252249 - RNA, 19 nt, Artificial Sequence
  Description of Artificial Sequence: Synthetic oligonucleotide
guaggaaccaucccgagag

SEQ ID NO: 2252250 - RNA, 19 nt, Artificial Sequence
  Description of Artificial Sequence: Synthetic oligonucleotide
uuauaauucaaaguugccu

SEQ ID NO: 2252251 - RNA, 19 nt, Artificial Sequence
  Description of Artificial Sequence: Synthetic oligonucleotide
uugaauucaggugauuggg

SEQ ID NO: 2252252 - RNA, 19 nt, Artificial Sequence
  Description of Artificial Sequence: Synthetic oligonucleotide
auaauucaaaguugccugg

SEQ ID NO: 2252253 - RNA, 19 nt, Artificial Sequence
  Description of Artificial Sequence: Synthetic oligonucleotide
cuggaggagaggaagaucc

SEQ ID NO: 2252254 - RNA, 19 nt, Artificial Sequence
  Description of Artificial Sequence: Synthetic oligonucleotide
cuugaauucaggugauugg

SEQ ID NO: 2252255 - RNA, 19 nt, Artificial Sequence
  Description of Artificial Sequence: Synthetic oligonucleotide
ugaauucaggugauugggg

SEQ ID NO: 2252256 - RNA, 19 nt, Artificial Sequence
  Description of Artificial Sequence: Synthetic oligonucleotide
uucaagaggagagauaacu

SEQ ID NO: 2252257 - RNA, 19 nt, Artificial Sequence
  Description of Artificial Sequence: Synthetic oligonucleotide
ucaagaggagagauaacug

SEQ ID NO: 2252258 - RNA, 19 nt, Artificial Sequence
  Description of Artificial Sequence: Synthetic oligonucleotide
aaccaagauucacugcagg

SEQ ID NO: 2252259 - RNA, 19 nt, Artificial Sequence
  Description of Artificial Sequence: Synthetic oligonucleotide
acgucuugaauucagguga

SEQ ID NO: 2252260 - RNA, 19 nt, Artificial Sequence
  Description of Artificial Sequence: Synthetic oligonucleotide
aagaggaggggcccucucc

SEQ ID NO: 2252261 - RNA, 19 nt, Artificial Sequence
  Description of Artificial Sequence: Synthetic oligonucleotide
ucuugaauucaggugauug

SEQ ID NO: 2252262 - RNA, 19 nt, Artificial Sequence
  Description of Artificial Sequence: Synthetic oligonucleotide
gagagauacccauggauug

SEQ ID NO: 2252263 - RNA, 19 nt, Artificial Sequence
  Description of Artificial Sequence: Synthetic oligonucleotide
ucuuccugaaacucgcugc

SEQ ID NO: 2252264 - RNA, 19 nt, Artificial Sequence
  Description of Artificial Sequence: Synthetic oligonucleotide
accaagauucacugcaggg

SEQ ID NO: 2252265 - RNA, 19 nt, Artificial Sequence
  Description of Artificial Sequence: Synthetic oligonucleotide
aaaggaggccccuucccuc

SEQ ID NO: 2252266 - RNA, 19 nt, Artificial Sequence
  Description of Artificial Sequence: Synthetic oligonucleotide
aaggaggccccuucccucc

SEQ ID NO: 2252267 - RNA, 19 nt, Artificial Sequence
  Description of Artificial Sequence: Synthetic oligonucleotide
agugugguaggaaccaucc

SEQ ID NO: 2252268 - RNA, 19 nt, Artificial Sequence
  Description of Artificial Sequence: Synthetic oligonucleotide
ucagacgucuugaauucag

SEQ ID NO: 2252269 - RNA, 19 nt, Artificial Sequence
  Description of Artificial Sequence: Synthetic oligonucleotide
agcucuuagcaccugcaac

SEQ ID NO: 2252270 - RNA, 19 nt, Artificial Sequence
  Description of Artificial Sequence: Synthetic oligonucleotide
agauccugggucuucagug

SEQ ID NO: 2252271 - RNA, 19 nt, Artificial Sequence
  Description of Artificial Sequence: Synthetic oligonucleotide
gacgucuugaauucaggug

SEQ ID NO: 2252272 - RNA, 19 nt, Artificial Sequence
  Description of Artificial Sequence: Synthetic oligonucleotide
cauggauuggccugugggg

SEQ ID NO: 2252273 - RNA, 19 nt, Artificial Sequence
  Description of Artificial Sequence: Synthetic oligonucleotide
cuagcagugugguaggaac

SEQ ID NO: 2252274 - RNA, 19 nt, Artificial Sequence
  Description of Artificial Sequence: Synthetic oligonucleotide
uuaauucuccccagaccag

SEQ ID NO: 2252275 - RNA, 19 nt, Artificial Sequence
  Description of Artificial Sequence: Synthetic oligonucleotide
auggauuggccuguggggc

SEQ ID NO: 2252276 - RNA, 19 nt, Artificial Sequence
  Description of Artificial Sequence: Synthetic oligonucleotide
caagauucacugcagggac

SEQ ID NO: 2252277 - RNA, 19 nt, Artificial Sequence
  Description of Artificial Sequence: Synthetic oligonucleotide
uaauucuccccagaccagg

SEQ ID NO: 2252278 - RNA, 19 nt, Artificial Sequence
  Description of Artificial Sequence: Synthetic oligonucleotide
agcuccaucgggcuggguc

SEQ ID NO: 2252279 - RNA, 19 nt, Artificial Sequence
  Description of Artificial Sequence: Synthetic oligonucleotide
accaucccgagagauaccc

SEQ ID NO: 2252280 - RNA, 19 nt, Artificial Sequence
  Description of Artificial Sequence: Synthetic oligonucleotide
agggaaccaagauucacug

SEQ ID NO: 2252281 - RNA, 19 nt, Artificial Sequence
  Description of Artificial Sequence: Synthetic oligonucleotide
agaggagagauaacugggc

SEQ ID NO: 2252282 - RNA, 19 nt, Artificial Sequence
  Description of Artificial Sequence: Synthetic oligonucleotide
auucaaaguugccuggccu

SEQ ID NO: 2252283 - RNA, 19 nt, Artificial Sequence
  Description of Artificial Sequence: Synthetic oligonucleotide
gaaccaucccgagagauac

SEQ ID NO: 2252284 - RNA, 19 nt, Artificial Sequence
  Description of Artificial Sequence: Synthetic oligonucleotide
ugaggccugggcuagcaag

SEQ ID NO: 2252285 - RNA, 19 nt, Artificial Sequence
  Description of Artificial Sequence: Synthetic oligonucleotide
agauucacugcagggacgg

SEQ ID NO: 2252286 - RNA, 19 nt, Artificial Sequence
  Description of Artificial Sequence: Synthetic oligonucleotide
auacccauggauuggccug

SEQ ID NO: 2252287 - RNA, 19 nt, Artificial Sequence
  Description of Artificial Sequence: Synthetic oligonucleotide
uccacguaggccugugggg

SEQ ID NO: 2252288 - RNA, 19 nt, Artificial Sequence
  Description of Artificial Sequence: Synthetic oligonucleotide
ucagccgcauucuugggga

SEQ ID NO: 2252289 - RNA, 19 nt, Artificial Sequence
  Description of Artificial Sequence: Synthetic oligonucleotide
gagauaacugggcauccac

SEQ ID NO: 2252290 - RNA, 19 nt, Artificial Sequence
  Description of Artificial Sequence: Synthetic oligonucleotide
uaauucaaaguugccuggc

SEQ ID NO: 2252291 - RNA, 19 nt, Artificial Sequence
  Description of Artificial Sequence: Synthetic oligonucleotide
aagauccugggucuucagu

SEQ ID NO: 2252292 - RNA, 19 nt, Artificial Sequence
  Description of Artificial Sequence: Synthetic oligonucleotide
uucaaaguugccuggccuc

SEQ ID NO: 2252293 - RNA, 19 nt, Artificial Sequence
  Description of Artificial Sequence: Synthetic oligonucleotide
uugccuggccucaaaggag

SEQ ID NO: 2252294 - RNA, 19 nt, Artificial Sequence
  Description of Artificial Sequence: Synthetic oligonucleotide
cuuccugaaacucgcugcc

SEQ ID NO: 2252295 - RNA, 19 nt, Artificial Sequence
  Description of Artificial Sequence: Synthetic oligonucleotide
agagauacccauggauugg

SEQ ID NO: 2252296 - RNA, 19 nt, Artificial Sequence
  Description of Artificial Sequence: Synthetic oligonucleotide
ugggucuucagugugguuc

SEQ ID NO: 2252297 - RNA, 19 nt, Artificial Sequence
  Description of Artificial Sequence: Synthetic oligonucleotide
agacgucuugaauucaggu

SEQ ID NO: 2252298 - RNA, 19 nt, Artificial Sequence
  Description of Artificial Sequence: Synthetic oligonucleotide
ugggcuagcaaguccucag

SEQ ID NO: 2252299 - RNA, 19 nt, Artificial Sequence
  Description of Artificial Sequence: Synthetic oligonucleotide
aagauucacugcagggacg

SEQ ID NO: 2252300 - RNA, 19 nt, Artificial Sequence
  Description of Artificial Sequence: Synthetic oligonucleotide
ugggcauccacuuuccuuu

SEQ ID NO: 2252301 - RNA, 19 nt, Artificial Sequence
  Description of Artificial Sequence: Synthetic oligonucleotide
gaagucgugaggccugggc

SEQ ID NO: 2252302 - RNA, 19 nt, Artificial Sequence
  Description of Artificial Sequence: Synthetic oligonucleotide
uccgaggcaacacccaggu

SEQ ID NO: 2252303 - RNA, 19 nt, Artificial Sequence
  Description of Artificial Sequence: Synthetic oligonucleotide
ugagcucuuagcaccugca

SEQ ID NO: 2252304 - RNA, 19 nt, Artificial Sequence
  Description of Artificial Sequence: Synthetic oligonucleotide
gaggagagauaacugggca

SEQ ID NO: 2252305 - RNA, 19 nt, Artificial Sequence
  Description of Artificial Sequence: Synthetic oligonucleotide
cugaaacucgcugccaucc

SEQ ID NO: 2252306 - RNA, 19 nt, Artificial Sequence
  Description of Artificial Sequence: Synthetic oligonucleotide
cuccacguaggccuguggg

SEQ ID NO: 2252307 - RNA, 19 nt, Artificial Sequence
  Description of Artificial Sequence: Synthetic oligonucleotide
cauccgagucuucagcagc

SEQ ID NO: 2252308 - RNA, 19 nt, Artificial Sequence
  Description of Artificial Sequence: Synthetic oligonucleotide
agaggaacccgugagggcu

SEQ ID NO: 2252309 - RNA, 19 nt, Artificial Sequence
  Description of Artificial Sequence: Synthetic oligonucleotide
uuaggcucagacgucuuga

SEQ ID NO: 2252310 - RNA, 19 nt, Artificial Sequence
  Description of Artificial Sequence: Synthetic oligonucleotide
acucgcugccauccgaguc

SEQ ID NO: 2252311 - RNA, 19 nt, Artificial Sequence
  Description of Artificial Sequence: Synthetic oligonucleotide
ugccauccgagucuucagc

SEQ ID NO: 2252312 - RNA, 19 nt, Artificial Sequence
  Description of Artificial Sequence: Synthetic oligonucleotide
agaggagguagcaggugcc

SEQ ID NO: 2252313 - RNA, 19 nt, Artificial Sequence
  Description of Artificial Sequence: Synthetic oligonucleotide
cagacgucuugaauucagg

SEQ ID NO: 2252314 - RNA, 19 nt, Artificial Sequence
  Description of Artificial Sequence: Synthetic oligonucleotide
aaacucgcugccauccgag

SEQ ID NO: 2252315 - RNA, 19 nt, Artificial Sequence
  Description of Artificial Sequence: Synthetic oligonucleotide
cucagccgcauucuugggg

SEQ ID NO: 2252316 - RNA, 19 nt, Artificial Sequence
  Description of Artificial Sequence: Synthetic oligonucleotide
ucuccccagaccaggaaaa

SEQ ID NO: 2252317 - RNA, 19 nt, Artificial Sequence
  Description of Artificial Sequence: Synthetic oligonucleotide
uucuccccagaccaggaaa

SEQ ID NO: 2252318 - RNA, 19 nt, Artificial Sequence
  Description of Artificial Sequence: Synthetic oligonucleotide
ugugguucaagaggagaga

SEQ ID NO: 2252319 - RNA, 19 nt, Artificial Sequence
  Description of Artificial Sequence: Synthetic oligonucleotide
gaaccaagauucacugcag

SEQ ID NO: 2252320 - RNA, 19 nt, Artificial Sequence
  Description of Artificial Sequence: Synthetic oligonucleotide
cuggccucaaaggaggccc

SEQ ID NO: 2252321 - RNA, 19 nt, Artificial Sequence
  Description of Artificial Sequence: Synthetic oligonucleotide
gcuagcaaguccucagagg

SEQ ID NO: 2252322 - RNA, 19 nt, Artificial Sequence
  Description of Artificial Sequence: Synthetic oligonucleotide
uggaccacacugccccacg

SEQ ID NO: 2252323 - RNA, 19 nt, Artificial Sequence
  Description of Artificial Sequence: Synthetic oligonucleotide
ugcagaagucgugaggccu

SEQ ID NO: 2252324 - RNA, 19 nt, Artificial Sequence
  Description of Artificial Sequence: Synthetic oligonucleotide
gaggcaacacccagguucc

SEQ ID NO: 2252325 - RNA, 19 nt, Artificial Sequence
  Description of Artificial Sequence: Synthetic oligonucleotide
auccgagucuucagcagcc

SEQ ID NO: 2252326 - RNA, 19 nt, Artificial Sequence
  Description of Artificial Sequence: Synthetic oligonucleotide
ggggcuagcagugugguag

SEQ ID NO: 2252327 - RNA, 19 nt, Artificial Sequence
  Description of Artificial Sequence: Synthetic oligonucleotide
uccugaaacucgcugccau

SEQ ID NO: 2252328 - RNA, 19 nt, Artificial Sequence
  Description of Artificial Sequence: Synthetic oligonucleotide
uuccuuuucugcugccuga

SEQ ID NO: 2252329 - RNA, 19 nt, Artificial Sequence
  Description of Artificial Sequence: Synthetic oligonucleotide
gacgggaggcggcugagug

SEQ ID NO: 2252330 - RNA, 19 nt, Artificial Sequence
  Description of Artificial Sequence: Synthetic oligonucleotide
gguucaagaggagagauaa

SEQ ID NO: 2252331 - RNA, 19 nt, Artificial Sequence
  Description of Artificial Sequence: Synthetic oligonucleotide
guagcaggugccgggaagg

SEQ ID NO: 2252332 - RNA, 19 nt, Artificial Sequence
  Description of Artificial Sequence: Synthetic oligonucleotide
ucaaaguugccuggccuca

SEQ ID NO: 2252333 - RNA, 19 nt, Artificial Sequence
  Description of Artificial Sequence: Synthetic oligonucleotide
aggagagauaacugggcau

SEQ ID NO: 2252334 - RNA, 19 nt, Artificial Sequence
  Description of Artificial Sequence: Synthetic oligonucleotide
gauggaguggaggccgggg

SEQ ID NO: 2252335 - RNA, 19 nt, Artificial Sequence
  Description of Artificial Sequence: Synthetic oligonucleotide
ucuuagcaccugcaacaca

SEQ ID NO: 2252336 - RNA, 19 nt, Artificial Sequence
  Description of Artificial Sequence: Synthetic oligonucleotide
gucuuccugaaacucgcug

SEQ ID NO: 2252337 - RNA, 19 nt, Artificial Sequence
  Description of Artificial Sequence: Synthetic oligonucleotide
accacacugccccacggug

SEQ ID NO: 2252338 - RNA, 19 nt, Artificial Sequence
  Description of Artificial Sequence: Synthetic oligonucleotide
acgguggagcuccaucggg

SEQ ID NO: 2252339 - RNA, 19 nt, Artificial Sequence
  Description of Artificial Sequence: Synthetic oligonucleotide
ugcaacacagggucuuccu

SEQ ID NO: 2252340 - RNA, 19 nt, Artificial Sequence
  Description of Artificial Sequence: Synthetic oligonucleotide
ggcuggaccacacugcccc

SEQ ID NO: 2252341 - RNA, 19 nt, Artificial Sequence
  Description of Artificial Sequence: Synthetic oligonucleotide
gagagauaacugggcaucc

SEQ ID NO: 2252342 - RNA, 19 nt, Artificial Sequence
  Description of Artificial Sequence: Synthetic oligonucleotide
ugggguccgaggcaacacc

SEQ ID NO: 2252343 - RNA, 19 nt, Artificial Sequence
  Description of Artificial Sequence: Synthetic oligonucleotide
gaagauccugggucuucag

SEQ ID NO: 2252344 - RNA, 19 nt, Artificial Sequence
  Description of Artificial Sequence: Synthetic oligonucleotide
cugagcucugcccucugag

SEQ ID NO: 2252345 - RNA, 19 nt, Artificial Sequence
  Description of Artificial Sequence: Synthetic oligonucleotide
gcucuuagcaccugcaaca

SEQ ID NO: 2252346 - RNA, 19 nt, Artificial Sequence
  Description of Artificial Sequence: Synthetic oligonucleotide
cacugagauggugaccugg

SEQ ID NO: 2252347 - RNA, 19 nt, Artificial Sequence
  Description of Artificial Sequence: Synthetic oligonucleotide
ccucugagcucuuagcacc

SEQ ID NO: 2252348 - RNA, 19 nt, Artificial Sequence
  Description of Artificial Sequence: Synthetic oligonucleotide
agaggaggggcccucucca

SEQ ID NO: 2252349 - RNA, 19 nt, Artificial Sequence
  Description of Artificial Sequence: Synthetic oligonucleotide
gauaacugggcauccacuu

SEQ ID NO: 2252350 - RNA, 19 nt, Artificial Sequence
  Description of Artificial Sequence: Synthetic oligonucleotide
gauacccauggauuggccu

SEQ ID NO: 2252351 - RNA, 19 nt, Artificial Sequence
  Description of Artificial Sequence: Synthetic oligonucleotide
gacccgggaggugagcugg

SEQ ID NO: 2252352 - RNA, 19 nt, Artificial Sequence
  Description of Artificial Sequence: Synthetic oligonucleotide
gaggagguagcaggugccg

SEQ ID NO: 2252353 - RNA, 19 nt, Artificial Sequence
  Description of Artificial Sequence: Synthetic oligonucleotide
ugguaggaaccaucccgag

SEQ ID NO: 2252354 - RNA, 19 nt, Artificial Sequence
  Description of Artificial Sequence: Synthetic oligonucleotide
cugagcucuuagcaccugc

SEQ ID NO: 2252355 - RNA, 19 nt, Artificial Sequence
  Description of Artificial Sequence: Synthetic oligonucleotide
uccaggcgucaccagcucc

SEQ ID NO: 2252356 - RNA, 19 nt, Artificial Sequence
  Description of Artificial Sequence: Synthetic oligonucleotide
gcaccugcaacacaggguc

SEQ ID NO: 2252357 - RNA, 19 nt, Artificial Sequence
  Description of Artificial Sequence: Synthetic oligonucleotide
ugcccucugagcucuuagc

SEQ ID NO: 2252358 - RNA, 19 nt, Artificial Sequence
  Description of Artificial Sequence: Synthetic oligonucleotide
ggagguagcaggugccggg

SEQ ID NO: 2252359 - RNA, 19 nt, Artificial Sequence
  Description of Artificial Sequence: Synthetic oligonucleotide
ccugcagaagucgugaggc

SEQ ID NO: 2252360 - RNA, 19 nt, Artificial Sequence
  Description of Artificial Sequence: Synthetic oligonucleotide
aaccaucccgagagauacc

SEQ ID NO: 2252361 - RNA, 19 nt, Artificial Sequence
  Description of Artificial Sequence: Synthetic oligonucleotide
cugagauggugaccugggg

SEQ ID NO: 2252362 - RNA, 19 nt, Artificial Sequence
  Description of Artificial Sequence: Synthetic oligonucleotide
acggaggauggaguggagg

SEQ ID NO: 2252363 - RNA, 19 nt, Artificial Sequence
  Description of Artificial Sequence: Synthetic oligonucleotide
gaacccgugagggcugggg

SEQ ID NO: 2252364 - RNA, 19 nt, Artificial Sequence
  Description of Artificial Sequence: Synthetic oligonucleotide
auaacugggcauccacuuu

SEQ ID NO: 2252365 - RNA, 19 nt, Artificial Sequence
  Description of Artificial Sequence: Synthetic oligonucleotide
ugguucaagaggagagaua

SEQ ID NO: 2252366 - RNA, 19 nt, Artificial Sequence
  Description of Artificial Sequence: Synthetic oligonucleotide
aacucgcugccauccgagu

SEQ ID NO: 2252367 - RNA, 19 nt, Artificial Sequence
  Description of Artificial Sequence: Synthetic oligonucleotide
cuuuucugcugccugagcu

SEQ ID NO: 2252368 - RNA, 19 nt, Artificial Sequence
  Description of Artificial Sequence: Synthetic oligonucleotide
agauaacugggcauccacu

SEQ ID NO: 2252369 - RNA, 19 nt, Artificial Sequence
  Description of Artificial Sequence: Synthetic oligonucleotide
cacgguggggcuagcagug

SEQ ID NO: 2252370 - RNA, 19 nt, Artificial Sequence
  Description of Artificial Sequence: Synthetic oligonucleotide
cgaggcaacacccagguuc

SEQ ID NO: 2252371 - RNA, 19 nt, Artificial Sequence
  Description of Artificial Sequence: Synthetic oligonucleotide
uuggggacccgggagguga

SEQ ID NO: 2252372 - RNA, 19 nt, Artificial Sequence
  Description of Artificial Sequence: Synthetic oligonucleotide
ggcuagcaaguccucagag

SEQ ID NO: 2252373 - RNA, 19 nt, Artificial Sequence
  Description of Artificial Sequence: Synthetic oligonucleotide
cagaggaacccgugagggc

SEQ ID NO: 2252374 - RNA, 19 nt, Artificial Sequence
  Description of Artificial Sequence: Synthetic oligonucleotide
cagugugguaggaaccauc

SEQ ID NO: 2252375 - RNA, 19 nt, Artificial Sequence
  Description of Artificial Sequence: Synthetic oligonucleotide
ggagagauaacugggcauc

SEQ ID NO: 2252376 - RNA, 19 nt, Artificial Sequence
  Description of Artificial Sequence: Synthetic oligonucleotide
cacgguggagcuccaucgg

SEQ ID NO: 2252377 - RNA, 19 nt, Artificial Sequence
  Description of Artificial Sequence: Synthetic oligonucleotide
aggaagauccugggucuuc

SEQ ID NO: 2252378 - RNA, 19 nt, Artificial Sequence
  Description of Artificial Sequence: Synthetic oligonucleotide
ccagaggaacccgugaggg

SEQ ID NO: 2252379 - RNA, 19 nt, Artificial Sequence
  Description of Artificial Sequence: Synthetic oligonucleotide
ucccgccuuaggcucagac

SEQ ID NO: 2252380 - RNA, 19 nt, Artificial Sequence
  Description of Artificial Sequence: Synthetic oligonucleotide
ugcagggacgggaggcggc

SEQ ID NO: 2252381 - RNA, 19 nt, Artificial Sequence
  Description of Artificial Sequence: Synthetic oligonucleotide
ccacgguggagcuccaucg

SEQ ID NO: 2252382 - RNA, 19 nt, Artificial Sequence
  Description of Artificial Sequence: Synthetic oligonucleotide
gguagcaggugccgggaag

SEQ ID NO: 2252383 - RNA, 19 nt, Artificial Sequence
  Description of Artificial Sequence: Synthetic oligonucleotide
aggagguagcaggugccgg

SEQ ID NO: 2252384 - RNA, 19 nt, Artificial Sequence
  Description of Artificial Sequence: Synthetic oligonucleotide
cucuuagcaccugcaacac

SEQ ID NO: 2252385 - RNA, 19 nt, Artificial Sequence
  Description of Artificial Sequence: Synthetic oligonucleotide
agucgugaggccugggcua

SEQ ID NO: 2252386 - RNA, 19 nt, Artificial Sequence
  Description of Artificial Sequence: Synthetic oligonucleotide
gcaggugccgggaaggcgg

SEQ ID NO: 2252387 - RNA, 19 nt, Artificial Sequence
  Description of Artificial Sequence: Synthetic oligonucleotide
gagggagccuggccugagg

SEQ ID NO: 2252388 - RNA, 19 nt, Artificial Sequence
  Description of Artificial Sequence: Synthetic oligonucleotide
agagauaacugggcaucca

SEQ ID NO: 2252389 - RNA, 19 nt, Artificial Sequence
  Description of Artificial Sequence: Synthetic oligonucleotide
gugugguaggaaccauccc

SEQ ID NO: 2252390 - RNA, 19 nt, Artificial Sequence
  Description of Artificial Sequence: Synthetic oligonucleotide
uggccucaaaggaggcccc

SEQ ID NO: 2252391 - RNA, 19 nt, Artificial Sequence
  Description of Artificial Sequence: Synthetic oligonucleotide
gcucagacgucuugaauuc

SEQ ID NO: 2252392 - RNA, 19 nt, Artificial Sequence
  Description of Artificial Sequence: Synthetic oligonucleotide
ggcgucaccagcucccgcc

SEQ ID NO: 2252393 - RNA, 19 nt, Artificial Sequence
  Description of Artificial Sequence: Synthetic oligonucleotide
ggagcagugguccaggcgu

SEQ ID NO: 2252394 - RNA, 19 nt, Artificial Sequence
  Description of Artificial Sequence: Synthetic oligonucleotide
gugguaggaaccaucccga

SEQ ID NO: 2252395 - RNA, 19 nt, Artificial Sequence
  Description of Artificial Sequence: Synthetic oligonucleotide
agcaccugcaacacagggu

SEQ ID NO: 2252396 - RNA, 19 nt, Artificial Sequence
  Description of Artificial Sequence: Synthetic oligonucleotide
cugccauccgagucuucag

SEQ ID NO: 2252397 - RNA, 19 nt, Artificial Sequence
  Description of Artificial Sequence: Synthetic oligonucleotide
agcaggugccgggaaggcg

SEQ ID NO: 2252398 - RNA, 19 nt, Artificial Sequence
  Description of Artificial Sequence: Synthetic oligonucleotide
gauucacugcagggacggg

SEQ ID NO: 2252399 - RNA, 19 nt, Artificial Sequence
  Description of Artificial Sequence: Synthetic oligonucleotide
gccuguggggcccagagga

SEQ ID NO: 2252400 - RNA, 19 nt, Artificial Sequence
  Description of Artificial Sequence: Synthetic oligonucleotide
cauucuuggggacccggga

SEQ ID NO: 2252401 - RNA, 19 nt, Artificial Sequence
  Description of Artificial Sequence: Synthetic oligonucleotide
cagugugguucaagaggag

SEQ ID NO: 2252402 - RNA, 19 nt, Artificial Sequence
  Description of Artificial Sequence: Synthetic oligonucleotide
gucuucagugugguucaag

SEQ ID NO: 2252403 - RNA, 19 nt, Artificial Sequence
  Description of Artificial Sequence: Synthetic oligonucleotide
cagggaaccaagauucacu

SEQ ID NO: 2252404 - RNA, 19 nt, Artificial Sequence
  Description of Artificial Sequence: Synthetic oligonucleotide
gguaggaaccaucccgaga

SEQ ID NO: 2252405 - RNA, 19 nt, Artificial Sequence
  Description of Artificial Sequence: Synthetic oligonucleotide
uuccugaaacucgcugcca

SEQ ID NO: 2252406 - RNA, 19 nt, Artificial Sequence
  Description of Artificial Sequence: Synthetic oligonucleotide
aggcgucaccagcucccgc

SEQ ID NO: 2252407 - RNA, 19 nt, Artificial Sequence
  Description of Artificial Sequence: Synthetic oligonucleotide
gagcucuuagcaccugcaa

SEQ ID NO: 2252408 - RNA, 19 nt, Artificial Sequence
  Description of Artificial Sequence: Synthetic oligonucleotide
gggaaccaagauucacugc

SEQ ID NO: 2252409 - RNA, 19 nt, Artificial Sequence
  Description of Artificial Sequence: Synthetic oligonucleotide
cucagagggagccuggccu

SEQ ID NO: 2252410 - RNA, 19 nt, Artificial Sequence
  Description of Artificial Sequence: Synthetic oligonucleotide
uacccauggauuggccugu

SEQ ID NO: 2252411 - RNA, 19 nt, Artificial Sequence
  Description of Artificial Sequence: Synthetic oligonucleotide
guccgaggcaacacccagg

SEQ ID NO: 2252412 - RNA, 19 nt, Artificial Sequence
  Description of Artificial Sequence: Synthetic oligonucleotide
auucuccccagaccaggaa

SEQ ID NO: 2252413 - RNA, 19 nt, Artificial Sequence
  Description of Artificial Sequence: Synthetic oligonucleotide
aggggcccucuccacguag

SEQ ID NO: 2252414 - RNA, 19 nt, Artificial Sequence
  Description of Artificial Sequence: Synthetic oligonucleotide
aggcucagacgucuugaau

SEQ ID NO: 2252415 - RNA, 19 nt, Artificial Sequence
  Description of Artificial Sequence: Synthetic oligonucleotide
gguggggcuagcagugugg

SEQ ID NO: 2252416 - RNA, 19 nt, Artificial Sequence
  Description of Artificial Sequence: Synthetic oligonucleotide
gggucuuccugaaacucgc

SEQ ID NO: 2252417 - RNA, 19 nt, Artificial Sequence
  Description of Artificial Sequence: Synthetic oligonucleotide
acugccccacgguggagcu

SEQ ID NO: 2252418 - RNA, 19 nt, Artificial Sequence
  Description of Artificial Sequence: Synthetic oligonucleotide
cggaggauggaguggaggc

SEQ ID NO: 2252419 - RNA, 19 nt, Artificial Sequence
  Description of Artificial Sequence: Synthetic oligonucleotide
cgagucuucagcagccugc

SEQ ID NO: 2252420 - RNA, 19 nt, Artificial Sequence
  Description of Artificial Sequence: Synthetic oligonucleotide
ucugagcucuuagcaccug

SEQ ID NO: 2252421 - RNA, 19 nt, Artificial Sequence
  Description of Artificial Sequence: Synthetic oligonucleotide
cccgccuuaggcucagacg

SEQ ID NO: 2252422 - RNA, 19 nt, Artificial Sequence
  Description of Artificial Sequence: Synthetic oligonucleotide
gcccagaggaacccgugag

SEQ ID NO: 2252423 - RNA, 19 nt, Artificial Sequence
  Description of Artificial Sequence: Synthetic oligonucleotide
ggcacugagauggugaccu

SEQ ID NO: 2252424 - RNA, 19 nt, Artificial Sequence
  Description of Artificial Sequence: Synthetic oligonucleotide
aggcuggaccacacugccc

SEQ ID NO: 2252425 - RNA, 19 nt, Artificial Sequence
  Description of Artificial Sequence: Synthetic oligonucleotide
ccaggcgucaccagcuccc

SEQ ID NO: 2252426 - RNA, 19 nt, Artificial Sequence
  Description of Artificial Sequence: Synthetic oligonucleotide
gucgugaggccugggcuag

SEQ ID NO: 2252427 - RNA, 19 nt, Artificial Sequence
  Description of Artificial Sequence: Synthetic oligonucleotide
cacugccccacgguggagc

SEQ ID NO: 2252428 - RNA, 19 nt, Artificial Sequence
  Description of Artificial Sequence: Synthetic oligonucleotide
gauggugaccuggggagua

SEQ ID NO: 2252429 - RNA, 19 nt, Artificial Sequence
  Description of Artificial Sequence: Synthetic oligonucleotide
ggcucagacgucuugaauu

SEQ ID NO: 2252430 - RNA, 19 nt, Artificial Sequence
  Description of Artificial Sequence: Synthetic oligonucleotide
cagcucccgccuuaggcuc

SEQ ID NO: 2252431 - RNA, 19 nt, Artificial Sequence
  Description of Artificial Sequence: Synthetic oligonucleotide
ggaccacacugccccacgg

SEQ ID NO: 2252432 - RNA, 19 nt, Artificial Sequence
  Description of Artificial Sequence: Synthetic oligonucleotide
cuguggggcccagaggaac

SEQ ID NO: 2252433 - RNA, 19 nt, Artificial Sequence
  Description of Artificial Sequence: Synthetic oligonucleotide
gggcuagcagugugguagg

SEQ ID NO: 2252434 - RNA, 19 nt, Artificial Sequence
  Description of Artificial Sequence: Synthetic oligonucleotide
gcaacacccagguuccauc

SEQ ID NO: 2252435 - RNA, 19 nt, Artificial Sequence
  Description of Artificial Sequence: Synthetic oligonucleotide
agggacgggaggcggcuga

SEQ ID NO: 2252436 - RNA, 19 nt, Artificial Sequence
  Description of Artificial Sequence: Synthetic oligonucleotide
cccagaggaacccgugagg

SEQ ID NO: 2252437 - RNA, 19 nt, Artificial Sequence
  Description of Artificial Sequence: Synthetic oligonucleotide
gaggaggggcccucuccac

SEQ ID NO: 2252438 - RNA, 19 nt, Artificial Sequence
  Description of Artificial Sequence: Synthetic oligonucleotide
agaagucgugaggccuggg

SEQ ID NO: 2252439 - RNA, 19 nt, Artificial Sequence
  Description of Artificial Sequence: Synthetic oligonucleotide
gaggaacccgugagggcug

SEQ ID NO: 2252440 - RNA, 19 nt, Artificial Sequence
  Description of Artificial Sequence: Synthetic oligonucleotide
cccugcaagaggaggggcc

SEQ ID NO: 2252441 - RNA, 19 nt, Artificial Sequence
  Description of Artificial Sequence: Synthetic oligonucleotide
auggugaccuggggaguag

SEQ ID NO: 2252442 - RNA, 19 nt, Artificial Sequence
  Description of Artificial Sequence: Synthetic oligonucleotide
agauggugaccuggggagu

SEQ ID NO: 2252443 - RNA, 19 nt, Artificial Sequence
  Description of Artificial Sequence: Synthetic oligonucleotide
gggcccugcaagaggaggg

SEQ ID NO: 2252444 - RNA, 19 nt, Artificial Sequence
  Description of Artificial Sequence: Synthetic oligonucleotide
ccaagauucacugcaggga

SEQ ID NO: 2252445 - RNA, 19 nt, Artificial Sequence
  Description of Artificial Sequence: Synthetic oligonucleotide
ccauccgagucuucagcag

SEQ ID NO: 2252446 - RNA, 19 nt, Artificial Sequence
  Description of Artificial Sequence: Synthetic oligonucleotide
gugaccuggggaguagaga

SEQ ID NO: 2252447 - RNA, 19 nt, Artificial Sequence
  Description of Artificial Sequence: Synthetic oligonucleotide
caucccgagagauacccau

SEQ ID NO: 2252448 - RNA, 19 nt, Artificial Sequence
  Description of Artificial Sequence: Synthetic oligonucleotide
gagguagcaggugccggga

SEQ ID NO: 2252449 - RNA, 19 nt, Artificial Sequence
  Description of Artificial Sequence: Synthetic oligonucleotide
uggugaccuggggaguaga

SEQ ID NO: 2252450 - RNA, 19 nt, Artificial Sequence
  Description of Artificial Sequence: Synthetic oligonucleotide
cugcagggacgggaggcgg

SEQ ID NO: 2252451 - RNA, 19 nt, Artificial Sequence
  Description of Artificial Sequence: Synthetic oligonucleotide
aggaacccgugagggcugg

SEQ ID NO: 2252452 - RNA, 19 nt, Artificial Sequence
  Description of Artificial Sequence: Synthetic oligonucleotide
uccgagucuucagcagccu

SEQ ID NO: 2252453 - RNA, 19 nt, Artificial Sequence
  Description of Artificial Sequence: Synthetic oligonucleotide
accugcaacacagggucuu

SEQ ID NO: 2252454 - RNA, 19 nt, Artificial Sequence
  Description of Artificial Sequence: Synthetic oligonucleotide
ggaggcggcugaguggcgg

SEQ ID NO: 2252455 - RNA, 19 nt, Artificial Sequence
  Description of Artificial Sequence: Synthetic oligonucleotide
cacggaggauggaguggag

SEQ ID NO: 2252456 - RNA, 19 nt, Artificial Sequence
  Description of Artificial Sequence: Synthetic oligonucleotide
gcagaagucgugaggccug

SEQ ID NO: 2252457 - RNA, 19 nt, Artificial Sequence
  Description of Artificial Sequence: Synthetic oligonucleotide
cucgcugccauccgagucu

SEQ ID NO: 2252458 - RNA, 19 nt, Artificial Sequence
  Description of Artificial Sequence: Synthetic oligonucleotide
caggugccgggaaggcggc

SEQ ID NO: 2252459 - RNA, 19 nt, Artificial Sequence
  Description of Artificial Sequence: Synthetic oligonucleotide
ggaagauccugggucuuca

SEQ ID NO: 2252460 - RNA, 19 nt, Artificial Sequence
  Description of Artificial Sequence: Synthetic oligonucleotide
gaggccccuucccuccuca

SEQ ID NO: 2252461 - RNA, 19 nt, Artificial Sequence
  Description of Artificial Sequence: Synthetic oligonucleotide
cugggguccgaggcaacac

SEQ ID NO: 2252462 - RNA, 19 nt, Artificial Sequence
  Description of Artificial Sequence: Synthetic oligonucleotide
ccugcaagaggaggggccc

SEQ ID NO: 2252463 - RNA, 19 nt, Artificial Sequence
  Description of Artificial Sequence: Synthetic oligonucleotide
ggagccacgguggggcuag

SEQ ID NO: 2252464 - RNA, 19 nt, Artificial Sequence
  Description of Artificial Sequence: Synthetic oligonucleotide
gugguucaagaggagagau

SEQ ID NO: 2252465 - RNA, 19 nt, Artificial Sequence
  Description of Artificial Sequence: Synthetic oligonucleotide
ggagggcccugcaagagga

SEQ ID NO: 2252466 - RNA, 19 nt, Artificial Sequence
  Description of Artificial Sequence: Synthetic oligonucleotide
gggguccgaggcaacaccc

SEQ ID NO: 2252467 - RNA, 19 nt, Artificial Sequence
  Description of Artificial Sequence: Synthetic oligonucleotide
caggcgucaccagcucccg

SEQ ID NO: 2252468 - RNA, 19 nt, Artificial Sequence
  Description of Artificial Sequence: Synthetic oligonucleotide
ggccugggcuagcaagucc

SEQ ID NO: 2252469 - RNA, 19 nt, Artificial Sequence
  Description of Artificial Sequence: Synthetic oligonucleotide
gccgcauucuuggggaccc

SEQ ID NO: 2252470 - RNA, 19 nt, Artificial Sequence
  Description of Artificial Sequence: Synthetic oligonucleotide
cuggaccacacugccccac

SEQ ID NO: 2252471 - RNA, 19 nt, Artificial Sequence
  Description of Artificial Sequence: Synthetic oligonucleotide
gcccacggaggauggagug

SEQ ID NO: 2252472 - RNA, 19 nt, Artificial Sequence
  Description of Artificial Sequence: Synthetic oligonucleotide
agguagcaggugccgggaa

SEQ ID NO: 2252473 - RNA, 19 nt, Artificial Sequence
  Description of Artificial Sequence: Synthetic oligonucleotide
gggaggcccacggaggaug

SEQ ID NO: 2252474 - RNA, 19 nt, Artificial Sequence
  Description of Artificial Sequence: Synthetic oligonucleotide
cuggccugaggcaggcgga

SEQ ID NO: 2252475 - RNA, 19 nt, Artificial Sequence
  Description of Artificial Sequence: Synthetic oligonucleotide
ggcccugcaagaggagggg

SEQ ID NO: 2252476 - RNA, 19 nt, Artificial Sequence
  Description of Artificial Sequence: Synthetic oligonucleotide
ccagggaaccaagauucac

SEQ ID NO: 2252477 - RNA, 19 nt, Artificial Sequence
  Description of Artificial Sequence: Synthetic oligonucleotide
ccugaaacucgcugccauc

SEQ ID NO: 2252478 - RNA, 19 nt, Artificial Sequence
  Description of Artificial Sequence: Synthetic oligonucleotide
gaggccugggcuagcaagu

SEQ ID NO: 2252479 - RNA, 19 nt, Artificial Sequence
  Description of Artificial Sequence: Synthetic oligonucleotide
gugccgggaaggcggccag

SEQ ID NO: 2252480 - RNA, 19 nt, Artificial Sequence
  Description of Artificial Sequence: Synthetic oligonucleotide
cucagacgucuugaauuca

SEQ ID NO: 2252481 - RNA, 19 nt, Artificial Sequence
  Description of Artificial Sequence: Synthetic oligonucleotide
ggcggagcagugguccagg

SEQ ID NO: 2252482 - RNA, 19 nt, Artificial Sequence
  Description of Artificial Sequence: Synthetic oligonucleotide
uggggcuagcaguguggua

SEQ ID NO: 2252483 - RNA, 19 nt, Artificial Sequence
  Description of Artificial Sequence: Synthetic oligonucleotide
cagccgcauucuuggggac

SEQ ID NO: 2252484 - RNA, 19 nt, Artificial Sequence
  Description of Artificial Sequence: Synthetic oligonucleotide
ggagaggaagauccugggu

SEQ ID NO: 2252485 - RNA, 19 nt, Artificial Sequence
  Description of Artificial Sequence: Synthetic oligonucleotide
gcuggggcagcuggagagg

SEQ ID NO: 2252486 - RNA, 19 nt, Artificial Sequence
  Description of Artificial Sequence: Synthetic oligonucleotide
caccagcucccgccuuagg

SEQ ID NO: 2252487 - RNA, 19 nt, Artificial Sequence
  Description of Artificial Sequence: Synthetic oligonucleotide
gagcagugguccaggcguc

SEQ ID NO: 2252488 - RNA, 19 nt, Artificial Sequence
  Description of Artificial Sequence: Synthetic oligonucleotide
gccgggaaggcggccaggg

SEQ ID NO: 2252489 - RNA, 19 nt, Artificial Sequence
  Description of Artificial Sequence: Synthetic oligonucleotide
cugggcuagcaaguccuca

SEQ ID NO: 2252490 - RNA, 19 nt, Artificial Sequence
  Description of Artificial Sequence: Synthetic oligonucleotide
aggugccgggaaggcggcc

SEQ ID NO: 2252491 - RNA, 19 nt, Artificial Sequence
  Description of Artificial Sequence: Synthetic oligonucleotide
ccgccuuaggcucagacgu

SEQ ID NO: 2252492 - RNA, 19 nt, Artificial Sequence
  Description of Artificial Sequence: Synthetic oligonucleotide
gggcuagcaaguccucaga

SEQ ID NO: 2252493 - RNA, 19 nt, Artificial Sequence
  Description of Artificial Sequence: Synthetic oligonucleotide
cugggcauccacuuuccuu

SEQ ID NO: 2252494 - RNA, 19 nt, Artificial Sequence
  Description of Artificial Sequence: Synthetic oligonucleotide
ggccccuucccuccucagc

SEQ ID NO: 2252495 - RNA, 19 nt, Artificial Sequence
  Description of Artificial Sequence: Synthetic oligonucleotide
aggaggccccuucccuccu

SEQ ID NO: 2252496 - RNA, 19 nt, Artificial Sequence
  Description of Artificial Sequence: Synthetic oligonucleotide
cgguggagcuccaucgggc

SEQ ID NO: 2252497 - RNA, 19 nt, Artificial Sequence
  Description of Artificial Sequence: Synthetic oligonucleotide
guccaggcgucaccagcuc

SEQ ID NO: 2252498 - RNA, 19 nt, Artificial Sequence
  Description of Artificial Sequence: Synthetic oligonucleotide
ggggcccucuccacguagg

SEQ ID NO: 2252499 - RNA, 19 nt, Artificial Sequence
  Description of Artificial Sequence: Synthetic oligonucleotide
gguggagcuccaucgggcu

SEQ ID NO: 2252500 - RNA, 19 nt, Artificial Sequence
  Description of Artificial Sequence: Synthetic oligonucleotide
cccacggaggauggagugg

SEQ ID NO: 2252501 - RNA, 19 nt, Artificial Sequence
  Description of Artificial Sequence: Synthetic oligonucleotide
ggcauccacuuuccuuuuc

SEQ ID NO: 2252502 - RNA, 19 nt, Artificial Sequence
  Description of Artificial Sequence: Synthetic oligonucleotide
cccauggauuggccugugg

SEQ ID NO: 2252503 - RNA, 19 nt, Artificial Sequence
  Description of Artificial Sequence: Synthetic oligonucleotide
ccucagccgcauucuuggg

SEQ ID NO: 2252504 - RNA, 19 nt, Artificial Sequence
  Description of Artificial Sequence: Synthetic oligonucleotide
ggaaccaucccgagagaua

SEQ ID NO: 2252505 - RNA, 19 nt, Artificial Sequence
  Description of Artificial Sequence: Synthetic oligonucleotide
cuggggcagcuggagagga

SEQ ID NO: 2252506 - RNA, 19 nt, Artificial Sequence
  Description of Artificial Sequence: Synthetic oligonucleotide
auuggccuguggggcccag

SEQ ID NO: 2252507 - RNA, 19 nt, Artificial Sequence
  Description of Artificial Sequence: Synthetic oligonucleotide
gcuagcagugugguaggaa

SEQ ID NO: 2252508 - RNA, 19 nt, Artificial Sequence
  Description of Artificial Sequence: Synthetic oligonucleotide
ucgcugccauccgagucuu

SEQ ID NO: 2252509 - RNA, 19 nt, Artificial Sequence
  Description of Artificial Sequence: Synthetic oligonucleotide
ucgugaggccugggcuagc

SEQ ID NO: 2252510 - RNA, 19 nt, Artificial Sequence
  Description of Artificial Sequence: Synthetic oligonucleotide
ugggaggcccacggaggau

SEQ ID NO: 2252511 - RNA, 19 nt, Artificial Sequence
  Description of Artificial Sequence: Synthetic oligonucleotide
gcacugagauggugaccug

SEQ ID NO: 2252512 - RNA, 19 nt, Artificial Sequence
  Description of Artificial Sequence: Synthetic oligonucleotide
cgggaggcggcugaguggc

SEQ ID NO: 2252513 - RNA, 19 nt, Artificial Sequence
  Description of Artificial Sequence: Synthetic oligonucleotide
acacugccccacgguggag

SEQ ID NO: 2252514 - RNA, 19 nt, Artificial Sequence
  Description of Artificial Sequence: Synthetic oligonucleotide
cgagagauacccauggauu

SEQ ID NO: 2252515 - RNA, 19 nt, Artificial Sequence
  Description of Artificial Sequence: Synthetic oligonucleotide
gggcacugagauggugacc

SEQ ID NO: 2252516 - RNA, 19 nt, Artificial Sequence
  Description of Artificial Sequence: Synthetic oligonucleotide
ggugccgggaaggcggcca

SEQ ID NO: 2252517 - RNA, 19 nt, Artificial Sequence
  Description of Artificial Sequence: Synthetic oligonucleotide
agccacgguggggcuagca

SEQ ID NO: 2252518 - RNA, 19 nt, Artificial Sequence
  Description of Artificial Sequence: Synthetic oligonucleotide
acgguggggcuagcagugu

SEQ ID NO: 2252519 - RNA, 19 nt, Artificial Sequence
  Description of Artificial Sequence: Synthetic oligonucleotide
ccgagagauacccauggau

SEQ ID NO: 2252520 - RNA, 19 nt, Artificial Sequence
  Description of Artificial Sequence: Synthetic oligonucleotide
ggaggggcccucuccacgu

SEQ ID NO: 2252521 - RNA, 19 nt, Artificial Sequence
  Description of Artificial Sequence: Synthetic oligonucleotide
ggagcuccaucgggcuggg

SEQ ID NO: 2252522 - RNA, 19 nt, Artificial Sequence
  Description of Artificial Sequence: Synthetic oligonucleotide
ccacggaggauggagugga

SEQ ID NO: 2252523 - RNA, 19 nt, Artificial Sequence
  Description of Artificial Sequence: Synthetic oligonucleotide
ccgggaggugagcuggcug

SEQ ID NO: 2252524 - RNA, 19 nt, Artificial Sequence
  Description of Artificial Sequence: Synthetic oligonucleotide
gguccaggcgucaccagcu

SEQ ID NO: 2252525 - RNA, 19 nt, Artificial Sequence
  Description of Artificial Sequence: Synthetic oligonucleotide
agcucccgccuuaggcuca

SEQ ID NO: 2252526 - RNA, 19 nt, Artificial Sequence
  Description of Artificial Sequence: Synthetic oligonucleotide
guggggcuagcaguguggu

SEQ ID NO: 2252527 - RNA, 19 nt, Artificial Sequence
  Description of Artificial Sequence: Synthetic oligonucleotide
cgcauucuuggggacccgg

SEQ ID NO: 2252528 - RNA, 19 nt, Artificial Sequence
  Description of Artificial Sequence: Synthetic oligonucleotide
ccagcucccgccuuaggcu

SEQ ID NO: 2252529 - RNA, 19 nt, Artificial Sequence
  Description of Artificial Sequence: Synthetic oligonucleotide
gccugggcuagcaaguccu

SEQ ID NO: 2252530 - RNA, 19 nt, Artificial Sequence
  Description of Artificial Sequence: Synthetic oligonucleotide
gcccugcaagaggaggggc

SEQ ID NO: 2252531 - RNA, 19 nt, Artificial Sequence
  Description of Artificial Sequence: Synthetic oligonucleotide
gcugggguccgaggcaaca

SEQ ID NO: 2252532 - RNA, 19 nt, Artificial Sequence
  Description of Artificial Sequence: Synthetic oligonucleotide
ccgggaaggcggccagggg

SEQ ID NO: 2252533 - RNA, 19 nt, Artificial Sequence
  Description of Artificial Sequence: Synthetic oligonucleotide
gaggaagauccugggucuu

SEQ ID NO: 2252534 - RNA, 19 nt, Artificial Sequence
  Description of Artificial Sequence: Synthetic oligonucleotide
cagagggagccuggccuga

SEQ ID NO: 2252535 - RNA, 19 nt, Artificial Sequence
  Description of Artificial Sequence: Synthetic oligonucleotide
ggaacccgugagggcuggg

SEQ ID NO: 2252536 - RNA, 19 nt, Artificial Sequence
  Description of Artificial Sequence: Synthetic oligonucleotide
aggcaacacccagguucca

SEQ ID NO: 2252537 - RNA, 19 nt, Artificial Sequence
  Description of Artificial Sequence: Synthetic oligonucleotide
gccuuaggcucagacgucu

SEQ ID NO: 2252538 - RNA, 19 nt, Artificial Sequence
  Description of Artificial Sequence: Synthetic oligonucleotide
gaggggcccucuccacgua

SEQ ID NO: 2252539 - RNA, 19 nt, Artificial Sequence
  Description of Artificial Sequence: Synthetic oligonucleotide
gggacgggaggcggcugag

SEQ ID NO: 2252540 - RNA, 19 nt, Artificial Sequence
  Description of Artificial Sequence: Synthetic oligonucleotide
gaggcccacggaggaugga

SEQ ID NO: 2252541 - RNA, 19 nt, Artificial Sequence
  Description of Artificial Sequence: Synthetic oligonucleotide
cagggacgggaggcggcug

SEQ ID NO: 2252542 - RNA, 19 nt, Artificial Sequence
  Description of Artificial Sequence: Synthetic oligonucleotide
ggguccgaggcaacaccca

SEQ ID NO: 2252543 - RNA, 19 nt, Artificial Sequence
  Description of Artificial Sequence: Synthetic oligonucleotide
ggccugaggcaggcggagc

SEQ ID NO: 2252544 - RNA, 19 nt, Artificial Sequence
  Description of Artificial Sequence: Synthetic oligonucleotide
ccaucccgagagauaccca

SEQ ID NO: 2252545 - RNA, 19 nt, Artificial Sequence
  Description of Artificial Sequence: Synthetic oligonucleotide
ccacgguggggcuagcagu

SEQ ID NO: 2252546 - RNA, 19 nt, Artificial Sequence
  Description of Artificial Sequence: Synthetic oligonucleotide
ggaggccccuucccuccuc

SEQ ID NO: 2252547 - RNA, 19 nt, Artificial Sequence
  Description of Artificial Sequence: Synthetic oligonucleotide
cgguggggcuagcagugug

SEQ ID NO: 2252548 - RNA, 19 nt, Artificial Sequence
  Description of Artificial Sequence: Synthetic oligonucleotide
gcucccgccuuaggcucag

SEQ ID NO: 2252549 - RNA, 19 nt, Artificial Sequence
  Description of Artificial Sequence: Synthetic oligonucleotide
ggcagcuggagaggaggua

SEQ ID NO: 2252550 - RNA, 19 nt, Artificial Sequence
  Description of Artificial Sequence: Synthetic oligonucleotide
ggcaacacccagguuccau

SEQ ID NO: 2252551 - RNA, 19 nt, Artificial Sequence
  Description of Artificial Sequence: Synthetic oligonucleotide
cgccuuaggcucagacguc

SEQ ID NO: 2252552 - RNA, 19 nt, Artificial Sequence
  Description of Artificial Sequence: Synthetic oligonucleotide
gagccacgguggggcuagc

SEQ ID NO: 2252553 - RNA, 19 nt, Artificial Sequence
  Description of Artificial Sequence: Synthetic oligonucleotide
ggucuuccugaaacucgcu

SEQ ID NO: 2252554 - RNA, 19 nt, Artificial Sequence
  Description of Artificial Sequence: Synthetic oligonucleotide
ccuguggggcccagaggaa

SEQ ID NO: 2252555 - RNA, 19 nt, Artificial Sequence
  Description of Artificial Sequence: Synthetic oligonucleotide
cugcaagaggaggggcccu

SEQ ID NO: 2252556 - RNA, 19 nt, Artificial Sequence
  Description of Artificial Sequence: Synthetic oligonucleotide
ccgcauucuuggggacccg

SEQ ID NO: 2252557 - RNA, 19 nt, Artificial Sequence
  Description of Artificial Sequence: Synthetic oligonucleotide
ggucuucagugugguucaa

SEQ ID NO: 2252558 - RNA, 19 nt, Artificial Sequence
  Description of Artificial Sequence: Synthetic oligonucleotide
gcgucaccagcucccgccu

SEQ ID NO: 2252559 - RNA, 19 nt, Artificial Sequence
  Description of Artificial Sequence: Synthetic oligonucleotide
gggcagcuggagaggaggu

SEQ ID NO: 2252560 - RNA, 19 nt, Artificial Sequence
  Description of Artificial Sequence: Synthetic oligonucleotide
cugggucuucagugugguu

SEQ ID NO: 2252561 - RNA, 19 nt, Artificial Sequence
  Description of Artificial Sequence: Synthetic oligonucleotide
cgucuugaauucaggugau

SEQ ID NO: 2252562 - RNA, 19 nt, Artificial Sequence
  Description of Artificial Sequence: Synthetic oligonucleotide
gcagugugguaggaaccau

SEQ ID NO: 2252563 - RNA, 19 nt, Artificial Sequence
  Description of Artificial Sequence: Synthetic oligonucleotide
ggggcccagaggaacccgu

SEQ ID NO: 2252564 - RNA, 19 nt, Artificial Sequence
  Description of Artificial Sequence: Synthetic oligonucleotide
gcagggacgggaggcggcu

SEQ ID NO: 2252565 - RNA, 19 nt, Artificial Sequence
  Description of Artificial Sequence: Synthetic oligonucleotide
ggcugggguccgaggcaac

SEQ ID NO: 2252566 - RNA, 19 nt, Artificial Sequence
  Description of Artificial Sequence: Synthetic oligonucleotide
gggcauccacuuuccuuuu

SEQ ID NO: 2252567 - RNA, 19 nt, Artificial Sequence
  Description of Artificial Sequence: Synthetic oligonucleotide
ggccucaaaggaggccccu

SEQ ID NO: 2252568 - RNA, 19 nt, Artificial Sequence
  Description of Artificial Sequence: Synthetic oligonucleotide
ccaucgggcugggucccca

SEQ ID NO: 2252569 - RNA, 19 nt, Artificial Sequence
  Description of Artificial Sequence: Synthetic oligonucleotide
ccuuaggcucagacgucuu

SEQ ID NO: 2252570 - RNA, 19 nt, Artificial Sequence
  Description of Artificial Sequence: Synthetic oligonucleotide
ggacgggaggcggcugagu

SEQ ID NO: 2252571 - RNA, 19 nt, Artificial Sequence
  Description of Artificial Sequence: Synthetic oligonucleotide
gagcuccaucgggcugggu

SEQ ID NO: 2252572 - RNA, 19 nt, Artificial Sequence
  Description of Artificial Sequence: Synthetic oligonucleotide
cucccgccuuaggcucaga

SEQ ID NO: 2252573 - RNA, 19 nt, Artificial Sequence
  Description of Artificial Sequence: Synthetic oligonucleotide
cucugcccucugagcucuu

SEQ ID NO: 2252574 - RNA, 19 nt, Artificial Sequence
  Description of Artificial Sequence: Synthetic oligonucleotide
ccucuccacguaggccugu

SEQ ID NO: 2252575 - RNA, 19 nt, Artificial Sequence
  Description of Artificial Sequence: Synthetic oligonucleotide
ccgaggcaacacccagguu

SEQ ID NO: 2252576 - RNA, 19 nt, Artificial Sequence
  Description of Artificial Sequence: Synthetic oligonucleotide
cgucaccagcucccgccuu

SEQ ID NO: 2252577 - RNA, 19 nt, Artificial Sequence
  Description of Artificial Sequence: Synthetic oligonucleotide
aacagaguagcccagaguc

SEQ ID NO: 2252578 - RNA, 19 nt, Artificial Sequence
  Description of Artificial Sequence: Synthetic oligonucleotide
gaugauacaauuuuccccg

SEQ ID NO: 2252579 - RNA, 19 nt, Artificial Sequence
  Description of Artificial Sequence: Synthetic oligonucleotide
aauccuugggguuccagcc

SEQ ID NO: 2252580 - RNA, 19 nt, Artificial Sequence
  Description of Artificial Sequence: Synthetic oligonucleotide
aaaguuggacucccgaucg

SEQ ID NO: 2252581 - RNA, 19 nt, Artificial Sequence
  Description of Artificial Sequence: Synthetic oligonucleotide
aaugcccuuacucugauga

SEQ ID NO: 2252582 - RNA, 19 nt, Artificial Sequence
  Description of Artificial Sequence: Synthetic oligonucleotide
uggauauuuggccaagccg

SEQ ID NO: 2252583 - RNA, 19 nt, Artificial Sequence
  Description of Artificial Sequence: Synthetic oligonucleotide
ucgagaaccaccaacaguc

SEQ ID NO: 2252584 - RNA, 19 nt, Artificial Sequence
  Description of Artificial Sequence: Synthetic oligonucleotide
ucucucuucugaaaguugg

SEQ ID NO: 2252585 - RNA, 19 nt, Artificial Sequence
  Description of Artificial Sequence: Synthetic oligonucleotide
agugcuuugggccacgggg

SEQ ID NO: 2252586 - RNA, 19 nt, Artificial Sequence
  Description of Artificial Sequence: Synthetic oligonucleotide
acgacucagaugcagaagg

SEQ ID NO: 2252587 - RNA, 19 nt, Artificial Sequence
  Description of Artificial Sequence: Synthetic oligonucleotide
gauacaauuuuccccgccc

SEQ ID NO: 2252588 - RNA, 19 nt, Artificial Sequence
  Description of Artificial Sequence: Synthetic oligonucleotide
uccaucagugcuuugggcc

SEQ ID NO: 2252589 - RNA, 19 nt, Artificial Sequence
  Description of Artificial Sequence: Synthetic oligonucleotide
aauaucccagccccaggac

SEQ ID NO: 2252590 - RNA, 19 nt, Artificial Sequence
  Description of Artificial Sequence: Synthetic oligonucleotide
aaacagcgcuuacacaggg

SEQ ID NO: 2252591 - RNA, 19 nt, Artificial Sequence
  Description of Artificial Sequence: Synthetic oligonucleotide
ggauauuuggccaagccgg

SEQ ID NO: 2252592 - RNA, 19 nt, Artificial Sequence
  Description of Artificial Sequence: Synthetic oligonucleotide
uaguggucgaccugcagcg

SEQ ID NO: 2252593 - RNA, 19 nt, Artificial Sequence
  Description of Artificial Sequence: Synthetic oligonucleotide
uggaccgucgcccuugccg

SEQ ID NO: 2252594 - RNA, 19 nt, Artificial Sequence
  Description of Artificial Sequence: Synthetic oligonucleotide
acgucgauguucucggagc

SEQ ID NO: 2252595 - RNA, 19 nt, Artificial Sequence
  Description of Artificial Sequence: Synthetic oligonucleotide
ugaucucccaggcaugcag

SEQ ID NO: 2252596 - RNA, 19 nt, Artificial Sequence
  Description of Artificial Sequence: Synthetic oligonucleotide
uccaugucgagaaccacca

SEQ ID NO: 2252597 - RNA, 19 nt, Artificial Sequence
  Description of Artificial Sequence: Synthetic oligonucleotide
uacagagccugcgaggugg

SEQ ID NO: 2252598 - RNA, 19 nt, Artificial Sequence
  Description of Artificial Sequence: Synthetic oligonucleotide
aguaaccccucuuuccccg

SEQ ID NO: 2252599 - RNA, 19 nt, Artificial Sequence
  Description of Artificial Sequence: Synthetic oligonucleotide
gaaaguuggacucccgauc

SEQ ID NO: 2252600 - RNA, 19 nt, Artificial Sequence
  Description of Artificial Sequence: Synthetic oligonucleotide
cuucuuuggcccauguagc

SEQ ID NO: 2252601 - RNA, 19 nt, Artificial Sequence
  Description of Artificial Sequence: Synthetic oligonucleotide
accaccaacagucucucug

SEQ ID NO: 2252602 - RNA, 19 nt, Artificial Sequence
  Description of Artificial Sequence: Synthetic oligonucleotide
ucgaguaaccccucuuucc

SEQ ID NO: 2252603 - RNA, 19 nt, Artificial Sequence
  Description of Artificial Sequence: Synthetic oligonucleotide
agcgcuuacacagggauag

SEQ ID NO: 2252604 - RNA, 19 nt, Artificial Sequence
  Description of Artificial Sequence: Synthetic oligonucleotide
auuuuccccgcccaauauc

SEQ ID NO: 2252605 - RNA, 19 nt, Artificial Sequence
  Description of Artificial Sequence: Synthetic oligonucleotide
uagcugcucacccugaggu

SEQ ID NO: 2252606 - RNA, 19 nt, Artificial Sequence
  Description of Artificial Sequence: Synthetic oligonucleotide
ugauacaauuuuccccgcc

SEQ ID NO: 2252607 - RNA, 19 nt, Artificial Sequence
  Description of Artificial Sequence: Synthetic oligonucleotide
cucggagcaauccuugggg

SEQ ID NO: 2252608 - RNA, 19 nt, Artificial Sequence
  Description of Artificial Sequence: Synthetic oligonucleotide
agggauagaggguccugcc

SEQ ID NO: 2252609 - RNA, 19 nt, Artificial Sequence
  Description of Artificial Sequence: Synthetic oligonucleotide
augauacaauuuuccccgc

SEQ ID NO: 2252610 - RNA, 19 nt, Artificial Sequence
  Description of Artificial Sequence: Synthetic oligonucleotide
caugucgagaaccaccaac

SEQ ID NO: 2252611 - RNA, 19 nt, Artificial Sequence
  Description of Artificial Sequence: Synthetic oligonucleotide
uaucucccagcgcauggcg

SEQ ID NO: 2252612 - RNA, 19 nt, Artificial Sequence
  Description of Artificial Sequence: Synthetic oligonucleotide
auggcgcacacacagacga

SEQ ID NO: 2252613 - RNA, 19 nt, Artificial Sequence
  Description of Artificial Sequence: Synthetic oligonucleotide
caugaggugagcagccggg

SEQ ID NO: 2252614 - RNA, 19 nt, Artificial Sequence
  Description of Artificial Sequence: Synthetic oligonucleotide
ugucgagaaccaccaacag

SEQ ID NO: 2252615 - RNA, 19 nt, Artificial Sequence
  Description of Artificial Sequence: Synthetic oligonucleotide
gauauuuggccaagccggg

SEQ ID NO: 2252616 - RNA, 19 nt, Artificial Sequence
  Description of Artificial Sequence: Synthetic oligonucleotide
aaaggcagaguggauauuu

SEQ ID NO: 2252617 - RNA, 19 nt, Artificial Sequence
  Description of Artificial Sequence: Synthetic oligonucleotide
uacacagggauagaggguc

SEQ ID NO: 2252618 - RNA, 19 nt, Artificial Sequence
  Description of Artificial Sequence: Synthetic oligonucleotide
ugaaaguuggacucccgau

SEQ ID NO: 2252619 - RNA, 19 nt, Artificial Sequence
  Description of Artificial Sequence: Synthetic oligonucleotide
caaacagcgcuuacacagg

SEQ ID NO: 2252620 - RNA, 19 nt, Artificial Sequence
  Description of Artificial Sequence: Synthetic oligonucleotide
caauccuugggguuccagc

SEQ ID NO: 2252621 - RNA, 19 nt, Artificial Sequence
  Description of Artificial Sequence: Synthetic oligonucleotide
ucgggaggagagaagucag

SEQ ID NO: 2252622 - RNA, 19 nt, Artificial Sequence
  Description of Artificial Sequence: Synthetic oligonucleotide
ggagucucucuucugaaag

SEQ ID NO: 2252623 - RNA, 19 nt, Artificial Sequence
  Description of Artificial Sequence: Synthetic oligonucleotide
ugcaagggccgucuggccc

SEQ ID NO: 2252624 - RNA, 19 nt, Artificial Sequence
  Description of Artificial Sequence: Synthetic oligonucleotide
guggauauuuggccaagcc

SEQ ID NO: 2252625 - RNA, 19 nt, Artificial Sequence
  Description of Artificial Sequence: Synthetic oligonucleotide
cuugccgucccuaacgcuc

SEQ ID NO: 2252626 - RNA, 19 nt, Artificial Sequence
  Description of Artificial Sequence: Synthetic oligonucleotide
uuacucugaugauacaauu

SEQ ID NO: 2252627 - RNA, 19 nt, Artificial Sequence
  Description of Artificial Sequence: Synthetic oligonucleotide
caaaagcgccgcauagugg

SEQ ID NO: 2252628 - RNA, 19 nt, Artificial Sequence
  Description of Artificial Sequence: Synthetic oligonucleotide
cucggcucuucuuuggccc

SEQ ID NO: 2252629 - RNA, 19 nt, Artificial Sequence
  Description of Artificial Sequence: Synthetic oligonucleotide
aguggauauuuggccaagc

SEQ ID NO: 2252630 - RNA, 19 nt, Artificial Sequence
  Description of Artificial Sequence: Synthetic oligonucleotide
ugcuuugggccacggggcg

SEQ ID NO: 2252631 - RNA, 19 nt, Artificial Sequence
  Description of Artificial Sequence: Synthetic oligonucleotide
gaaggccggucccagguag

SEQ ID NO: 2252632 - RNA, 19 nt, Artificial Sequence
  Description of Artificial Sequence: Synthetic oligonucleotide
cuaacgcucgcccucuccc

SEQ ID NO: 2252633 - RNA, 19 nt, Artificial Sequence
  Description of Artificial Sequence: Synthetic oligonucleotide
uauuuggccaagccgggua

SEQ ID NO: 2252634 - RNA, 19 nt, Artificial Sequence
  Description of Artificial Sequence: Synthetic oligonucleotide
acagcgcuuacacagggau

SEQ ID NO: 2252635 - RNA, 19 nt, Artificial Sequence
  Description of Artificial Sequence: Synthetic oligonucleotide
aggguccugcccuucaguc

SEQ ID NO: 2252636 - RNA, 19 nt, Artificial Sequence
  Description of Artificial Sequence: Synthetic oligonucleotide
cuugcaagggccgucuggc

SEQ ID NO: 2252637 - RNA, 19 nt, Artificial Sequence
  Description of Artificial Sequence: Synthetic oligonucleotide
uugccgucccuaacgcucg

SEQ ID NO: 2252638 - RNA, 19 nt, Artificial Sequence
  Description of Artificial Sequence: Synthetic oligonucleotide
uggcccauguagcggaugc

SEQ ID NO: 2252639 - RNA, 19 nt, Artificial Sequence
  Description of Artificial Sequence: Synthetic oligonucleotide
agggauugugguuccucgg

SEQ ID NO: 2252640 - RNA, 19 nt, Artificial Sequence
  Description of Artificial Sequence: Synthetic oligonucleotide
aggagagaagucaggguac

SEQ ID NO: 2252641 - RNA, 19 nt, Artificial Sequence
  Description of Artificial Sequence: Synthetic oligonucleotide
ucaggguacagagccugcg

SEQ ID NO: 2252642 - RNA, 19 nt, Artificial Sequence
  Description of Artificial Sequence: Synthetic oligonucleotide
auaucccagccccaggacu

SEQ ID NO: 2252643 - RNA, 19 nt, Artificial Sequence
  Description of Artificial Sequence: Synthetic oligonucleotide
cucccgaucgugcccaugg

SEQ ID NO: 2252644 - RNA, 19 nt, Artificial Sequence
  Description of Artificial Sequence: Synthetic oligonucleotide
uguucucggagcaauccuu

SEQ ID NO: 2252645 - RNA, 19 nt, Artificial Sequence
  Description of Artificial Sequence: Synthetic oligonucleotide
agaaccaccaacagucucu

SEQ ID NO: 2252646 - RNA, 19 nt, Artificial Sequence
  Description of Artificial Sequence: Synthetic oligonucleotide
uccccggacuccaucagug

SEQ ID NO: 2252647 - RNA, 19 nt, Artificial Sequence
  Description of Artificial Sequence: Synthetic oligonucleotide
aaccccucuuuccccggac

SEQ ID NO: 2252648 - RNA, 19 nt, Artificial Sequence
  Description of Artificial Sequence: Synthetic oligonucleotide
ugggguuccagccguggug

SEQ ID NO: 2252649 - RNA, 19 nt, Artificial Sequence
  Description of Artificial Sequence: Synthetic oligonucleotide
ucucuggcaccacuagcug

SEQ ID NO: 2252650 - RNA, 19 nt, Artificial Sequence
  Description of Artificial Sequence: Synthetic oligonucleotide
uuggacucccgaucgugcc

SEQ ID NO: 2252651 - RNA, 19 nt, Artificial Sequence
  Description of Artificial Sequence: Synthetic oligonucleotide
cauguagcggaugcggacc

SEQ ID NO: 2252652 - RNA, 19 nt, Artificial Sequence
  Description of Artificial Sequence: Synthetic oligonucleotide
gaguaaccccucuuucccc

SEQ ID NO: 2252653 - RNA, 19 nt, Artificial Sequence
  Description of Artificial Sequence: Synthetic oligonucleotide
uggucgaccugcagcgggg

SEQ ID NO: 2252654 - RNA, 19 nt, Artificial Sequence
  Description of Artificial Sequence: Synthetic oligonucleotide
acagacgacucagaugcag

SEQ ID NO: 2252655 - RNA, 19 nt, Artificial Sequence
  Description of Artificial Sequence: Synthetic oligonucleotide
agaugcagaagggauugug

SEQ ID NO: 2252656 - RNA, 19 nt, Artificial Sequence
  Description of Artificial Sequence: Synthetic oligonucleotide
agccggguaucucccagcg

SEQ ID NO: 2252657 - RNA, 19 nt, Artificial Sequence
  Description of Artificial Sequence: Synthetic oligonucleotide
agaguggauauuuggccaa

SEQ ID NO: 2252658 - RNA, 19 nt, Artificial Sequence
  Description of Artificial Sequence: Synthetic oligonucleotide
augucgagaaccaccaaca

SEQ ID NO: 2252659 - RNA, 19 nt, Artificial Sequence
  Description of Artificial Sequence: Synthetic oligonucleotide
cagaguggauauuuggcca

SEQ ID NO: 2252660 - RNA, 19 nt, Artificial Sequence
  Description of Artificial Sequence: Synthetic oligonucleotide
uuccucggcucuucuuugg

SEQ ID NO: 2252661 - RNA, 19 nt, Artificial Sequence
  Description of Artificial Sequence: Synthetic oligonucleotide
uuccuugacgucgauguuc

SEQ ID NO: 2252662 - RNA, 19 nt, Artificial Sequence
  Description of Artificial Sequence: Synthetic oligonucleotide
cauggcgcacacacagacg

SEQ ID NO: 2252663 - RNA, 19 nt, Artificial Sequence
  Description of Artificial Sequence: Synthetic oligonucleotide
cucuggcaccacuagcugc

SEQ ID NO: 2252664 - RNA, 19 nt, Artificial Sequence
  Description of Artificial Sequence: Synthetic oligonucleotide
auguucucggagcaauccu

SEQ ID NO: 2252665 - RNA, 19 nt, Artificial Sequence
  Description of Artificial Sequence: Synthetic oligonucleotide
ucucccagcgcauggcgca

SEQ ID NO: 2252666 - RNA, 19 nt, Artificial Sequence
  Description of Artificial Sequence: Synthetic oligonucleotide
aggccccucgaguaacccc

SEQ ID NO: 2252667 - RNA, 19 nt, Artificial Sequence
  Description of Artificial Sequence: Synthetic oligonucleotide
uggcccaugaggugagcag

SEQ ID NO: 2252668 - RNA, 19 nt, Artificial Sequence
  Description of Artificial Sequence: Synthetic oligonucleotide
uuuccccggacuccaucag

SEQ ID NO: 2252669 - RNA, 19 nt, Artificial Sequence
  Description of Artificial Sequence: Synthetic oligonucleotide
uccacggaaggccgguccc

SEQ ID NO: 2252670 - RNA, 19 nt, Artificial Sequence
  Description of Artificial Sequence: Synthetic oligonucleotide
ucgcugggccccuagguca

SEQ ID NO: 2252671 - RNA, 19 nt, Artificial Sequence
  Description of Artificial Sequence: Synthetic oligonucleotide
gagaaccaccaacagucuc

SEQ ID NO: 2252672 - RNA, 19 nt, Artificial Sequence
  Description of Artificial Sequence: Synthetic oligonucleotide
guggucgaccugcagcggg

SEQ ID NO: 2252673 - RNA, 19 nt, Artificial Sequence
  Description of Artificial Sequence: Synthetic oligonucleotide
agucaggguacagagccug

SEQ ID NO: 2252674 - RNA, 19 nt, Artificial Sequence
  Description of Artificial Sequence: Synthetic oligonucleotide
accacggcgugugugcccc

SEQ ID NO: 2252675 - RNA, 19 nt, Artificial Sequence
  Description of Artificial Sequence: Synthetic oligonucleotide
uggacucccgaucgugccc

SEQ ID NO: 2252676 - RNA, 19 nt, Artificial Sequence
  Description of Artificial Sequence: Synthetic oligonucleotide
gacgacucagaugcagaag

SEQ ID NO: 2252677 - RNA, 19 nt, Artificial Sequence
  Description of Artificial Sequence: Synthetic oligonucleotide
uccuugggguuccagccgu

SEQ ID NO: 2252678 - RNA, 19 nt, Artificial Sequence
  Description of Artificial Sequence: Synthetic oligonucleotide
ucggagcaauccuuggggu

SEQ ID NO: 2252679 - RNA, 19 nt, Artificial Sequence
  Description of Artificial Sequence: Synthetic oligonucleotide
agacgacucagaugcagaa

SEQ ID NO: 2252680 - RNA, 19 nt, Artificial Sequence
  Description of Artificial Sequence: Synthetic oligonucleotide
ugcccauggaccgucgccc

SEQ ID NO: 2252681 - RNA, 19 nt, Artificial Sequence
  Description of Artificial Sequence: Synthetic oligonucleotide
agaguccccuccuccaugu

SEQ ID NO: 2252682 - RNA, 19 nt, Artificial Sequence
  Description of Artificial Sequence: Synthetic oligonucleotide
guagcggaugcggaccugg

SEQ ID NO: 2252683 - RNA, 19 nt, Artificial Sequence
  Description of Artificial Sequence: Synthetic oligonucleotide
caacagucucucuggcacc

SEQ ID NO: 2252684 - RNA, 19 nt, Artificial Sequence
  Description of Artificial Sequence: Synthetic oligonucleotide
cucgaguaaccccucuuuc

SEQ ID NO: 2252685 - RNA, 19 nt, Artificial Sequence
  Description of Artificial Sequence: Synthetic oligonucleotide
caccacuagcugcucaccc

SEQ ID NO: 2252686 - RNA, 19 nt, Artificial Sequence
  Description of Artificial Sequence: Synthetic oligonucleotide
ucaaugcccuuacucugau

SEQ ID NO: 2252687 - RNA, 19 nt, Artificial Sequence
  Description of Artificial Sequence: Synthetic oligonucleotide
gacucagaugcagaaggga

SEQ ID NO: 2252688 - RNA, 19 nt, Artificial Sequence
  Description of Artificial Sequence: Synthetic oligonucleotide
uuccccgcccaauauccca

SEQ ID NO: 2252689 - RNA, 19 nt, Artificial Sequence
  Description of Artificial Sequence: Synthetic oligonucleotide
ccaaaagcgccgcauagug

SEQ ID NO: 2252690 - RNA, 19 nt, Artificial Sequence
  Description of Artificial Sequence: Synthetic oligonucleotide
uagcgcuucauggcagggg

SEQ ID NO: 2252691 - RNA, 19 nt, Artificial Sequence
  Description of Artificial Sequence: Synthetic oligonucleotide
ucgauguucucggagcaau

SEQ ID NO: 2252692 - RNA, 19 nt, Artificial Sequence
  Description of Artificial Sequence: Synthetic oligonucleotide
cugaaaguuggacucccga

SEQ ID NO: 2252693 - RNA, 19 nt, Artificial Sequence
  Description of Artificial Sequence: Synthetic oligonucleotide
cucaaugcccuuacucuga

SEQ ID NO: 2252694 - RNA, 19 nt, Artificial Sequence
  Description of Artificial Sequence: Synthetic oligonucleotide
caggcaugcaggccccucg

SEQ ID NO: 2252695 - RNA, 19 nt, Artificial Sequence
  Description of Artificial Sequence: Synthetic oligonucleotide
uaacgcucgcccucucccc

SEQ ID NO: 2252696 - RNA, 19 nt, Artificial Sequence
  Description of Artificial Sequence: Synthetic oligonucleotide
aucucccagcgcauggcgc

SEQ ID NO: 2252697 - RNA, 19 nt, Artificial Sequence
  Description of Artificial Sequence: Synthetic oligonucleotide
gggauugugguuccucggc

SEQ ID NO: 2252698 - RNA, 19 nt, Artificial Sequence
  Description of Artificial Sequence: Synthetic oligonucleotide
ugugccccucugcuccagg

SEQ ID NO: 2252699 - RNA, 19 nt, Artificial Sequence
  Description of Artificial Sequence: Synthetic oligonucleotide
ucuuuccccggacuccauc

SEQ ID NO: 2252700 - RNA, 19 nt, Artificial Sequence
  Description of Artificial Sequence: Synthetic oligonucleotide
ggguacagagccugcgagg

SEQ ID NO: 2252701 - RNA, 19 nt, Artificial Sequence
  Description of Artificial Sequence: Synthetic oligonucleotide
uagaggguccugcccuuca

SEQ ID NO: 2252702 - RNA, 19 nt, Artificial Sequence
  Description of Artificial Sequence: Synthetic oligonucleotide
ccaccaacagucucucugg

SEQ ID NO: 2252703 - RNA, 19 nt, Artificial Sequence
  Description of Artificial Sequence: Synthetic oligonucleotide
gaagggauugugguuccuc

SEQ ID NO: 2252704 - RNA, 19 nt, Artificial Sequence
  Description of Artificial Sequence: Synthetic oligonucleotide
gagagaagucaggguacag

SEQ ID NO: 2252705 - RNA, 19 nt, Artificial Sequence
  Description of Artificial Sequence: Synthetic oligonucleotide
cagggauagaggguccugc

SEQ ID NO: 2252706 - RNA, 19 nt, Artificial Sequence
  Description of Artificial Sequence: Synthetic oligonucleotide
gguagcgcuucauggcagg

SEQ ID NO: 2252707 - RNA, 19 nt, Artificial Sequence
  Description of Artificial Sequence: Synthetic oligonucleotide
guaaccccucuuuccccgg

SEQ ID NO: 2252708 - RNA, 19 nt, Artificial Sequence
  Description of Artificial Sequence: Synthetic oligonucleotide
gaguggauauuuggccaag

SEQ ID NO: 2252709 - RNA, 19 nt, Artificial Sequence
  Description of Artificial Sequence: Synthetic oligonucleotide
guuggacucccgaucgugc

SEQ ID NO: 2252710 - RNA, 19 nt, Artificial Sequence
  Description of Artificial Sequence: Synthetic oligonucleotide
ccgaucgugcccauggacc

SEQ ID NO: 2252711 - RNA, 19 nt, Artificial Sequence
  Description of Artificial Sequence: Synthetic oligonucleotide
agaguagcccagagucccc

SEQ ID NO: 2252712 - RNA, 19 nt, Artificial Sequence
  Description of Artificial Sequence: Synthetic oligonucleotide
cuuacucugaugauacaau

SEQ ID NO: 2252713 - RNA, 19 nt, Artificial Sequence
  Description of Artificial Sequence: Synthetic oligonucleotide
gcagaagggauugugguuc

SEQ ID NO: 2252714 - RNA, 19 nt, Artificial Sequence
  Description of Artificial Sequence: Synthetic oligonucleotide
gagggcgguggccacgccc

SEQ ID NO: 2252715 - RNA, 19 nt, Artificial Sequence
  Description of Artificial Sequence: Synthetic oligonucleotide
ugcccuuacucugaugaua

SEQ ID NO: 2252716 - RNA, 19 nt, Artificial Sequence
  Description of Artificial Sequence: Synthetic oligonucleotide
ugcccaaaagcgccgcaua

SEQ ID NO: 2252717 - RNA, 19 nt, Artificial Sequence
  Description of Artificial Sequence: Synthetic oligonucleotide
uuccccggacuccaucagu

SEQ ID NO: 2252718 - RNA, 19 nt, Artificial Sequence
  Description of Artificial Sequence: Synthetic oligonucleotide
guuccagccguggugucgc

SEQ ID NO: 2252719 - RNA, 19 nt, Artificial Sequence
  Description of Artificial Sequence: Synthetic oligonucleotide
cucgggaggagagaaguca

SEQ ID NO: 2252720 - RNA, 19 nt, Artificial Sequence
  Description of Artificial Sequence: Synthetic oligonucleotide
ggccgucuggcccaugagg

SEQ ID NO: 2252721 - RNA, 19 nt, Artificial Sequence
  Description of Artificial Sequence: Synthetic oligonucleotide
guccacggaaggccggucc

SEQ ID NO: 2252722 - RNA, 19 nt, Artificial Sequence
  Description of Artificial Sequence: Synthetic oligonucleotide
gcauggcgcacacacagac

SEQ ID NO: 2252723 - RNA, 19 nt, Artificial Sequence
  Description of Artificial Sequence: Synthetic oligonucleotide
cagguagcgcuucauggca

SEQ ID NO: 2252724 - RNA, 19 nt, Artificial Sequence
  Description of Artificial Sequence: Synthetic oligonucleotide
caugcaggccccucgagua

SEQ ID NO: 2252725 - RNA, 19 nt, Artificial Sequence
  Description of Artificial Sequence: Synthetic oligonucleotide
uuggccaagccggguaucu

SEQ ID NO: 2252726 - RNA, 19 nt, Artificial Sequence
  Description of Artificial Sequence: Synthetic oligonucleotide
uugcaagggccgucuggcc

SEQ ID NO: 2252727 - RNA, 19 nt, Artificial Sequence
  Description of Artificial Sequence: Synthetic oligonucleotide
cagacgacucagaugcaga

SEQ ID NO: 2252728 - RNA, 19 nt, Artificial Sequence
  Description of Artificial Sequence: Synthetic oligonucleotide
gcccuugccgucccuaacg

SEQ ID NO: 2252729 - RNA, 19 nt, Artificial Sequence
  Description of Artificial Sequence: Synthetic oligonucleotide
gccggucccagguaggugc

SEQ ID NO: 2252730 - RNA, 19 nt, Artificial Sequence
  Description of Artificial Sequence: Synthetic oligonucleotide
cuuugggccacggggcgcc

SEQ ID NO: 2252731 - RNA, 19 nt, Artificial Sequence
  Description of Artificial Sequence: Synthetic oligonucleotide
ucgaccugcagcggggcga

SEQ ID NO: 2252732 - RNA, 19 nt, Artificial Sequence
  Description of Artificial Sequence: Synthetic oligonucleotide
gguccugcccuucagucca

SEQ ID NO: 2252733 - RNA, 19 nt, Artificial Sequence
  Description of Artificial Sequence: Synthetic oligonucleotide
gggauagaggguccugccc

SEQ ID NO: 2252734 - RNA, 19 nt, Artificial Sequence
  Description of Artificial Sequence: Synthetic oligonucleotide
ucagugcuuugggccacgg

SEQ ID NO: 2252735 - RNA, 19 nt, Artificial Sequence
  Description of Artificial Sequence: Synthetic oligonucleotide
uaaccccucuuuccccgga

SEQ ID NO: 2252736 - RNA, 19 nt, Artificial Sequence
  Description of Artificial Sequence: Synthetic oligonucleotide
acggggcgccgcucaaagc

SEQ ID NO: 2252737 - RNA, 19 nt, Artificial Sequence
  Description of Artificial Sequence: Synthetic oligonucleotide
ccucaaugcccuuacucug

SEQ ID NO: 2252738 - RNA, 19 nt, Artificial Sequence
  Description of Artificial Sequence: Synthetic oligonucleotide
aucgugcccauggaccguc

SEQ ID NO: 2252739 - RNA, 19 nt, Artificial Sequence
  Description of Artificial Sequence: Synthetic oligonucleotide
aaggccggucccagguagg

SEQ ID NO: 2252740 - RNA, 19 nt, Artificial Sequence
  Description of Artificial Sequence: Synthetic oligonucleotide
ggccaagccggguaucucc

SEQ ID NO: 2252741 - RNA, 19 nt, Artificial Sequence
  Description of Artificial Sequence: Synthetic oligonucleotide
gggccccuaggucaggagg

SEQ ID NO: 2252742 - RNA, 19 nt, Artificial Sequence
  Description of Artificial Sequence: Synthetic oligonucleotide
gugcuuugggccacggggc

SEQ ID NO: 2252743 - RNA, 19 nt, Artificial Sequence
  Description of Artificial Sequence: Synthetic oligonucleotide
cgaguaaccccucuuuccc

SEQ ID NO: 2252744 - RNA, 19 nt, Artificial Sequence
  Description of Artificial Sequence: Synthetic oligonucleotide
ucucccaggcaugcaggcc

SEQ ID NO: 2252745 - RNA, 19 nt, Artificial Sequence
  Description of Artificial Sequence: Synthetic oligonucleotide
guagcgcuucauggcaggg

SEQ ID NO: 2252746 - RNA, 19 nt, Artificial Sequence
  Description of Artificial Sequence: Synthetic oligonucleotide
auagaggguccugcccuuc

SEQ ID NO: 2252747 - RNA, 19 nt, Artificial Sequence
  Description of Artificial Sequence: Synthetic oligonucleotide
gagucucucuucugaaagu

SEQ ID NO: 2252748 - RNA, 19 nt, Artificial Sequence
  Description of Artificial Sequence: Synthetic oligonucleotide
agguccagcuggguacugg

SEQ ID NO: 2252749 - RNA, 19 nt, Artificial Sequence
  Description of Artificial Sequence: Synthetic oligonucleotide
uagcggaugcggaccuggc

SEQ ID NO: 2252750 - RNA, 19 nt, Artificial Sequence
  Description of Artificial Sequence: Synthetic oligonucleotide
auauuuggccaagccgggu

SEQ ID NO: 2252751 - RNA, 19 nt, Artificial Sequence
  Description of Artificial Sequence: Synthetic oligonucleotide
gucgagaaccaccaacagu

SEQ ID NO: 2252752 - RNA, 19 nt, Artificial Sequence
  Description of Artificial Sequence: Synthetic oligonucleotide
agcggaugcggaccuggca

SEQ ID NO: 2252753 - RNA, 19 nt, Artificial Sequence
  Description of Artificial Sequence: Synthetic oligonucleotide
ccgcucaaagcacagcccc

SEQ ID NO: 2252754 - RNA, 19 nt, Artificial Sequence
  Description of Artificial Sequence: Synthetic oligonucleotide
cacggggcgccgcucaaag

SEQ ID NO: 2252755 - RNA, 19 nt, Artificial Sequence
  Description of Artificial Sequence: Synthetic oligonucleotide
gagcaauccuugggguucc

SEQ ID NO: 2252756 - RNA, 19 nt, Artificial Sequence
  Description of Artificial Sequence: Synthetic oligonucleotide
cugccccuugcaagggccg

SEQ ID NO: 2252757 - RNA, 19 nt, Artificial Sequence
  Description of Artificial Sequence: Synthetic oligonucleotide
ggagcaauccuugggguuc

SEQ ID NO: 2252758 - RNA, 19 nt, Artificial Sequence
  Description of Artificial Sequence: Synthetic oligonucleotide
gcggaugcggaccuggcac

SEQ ID NO: 2252759 - RNA, 19 nt, Artificial Sequence
  Description of Artificial Sequence: Synthetic oligonucleotide
agggccgucuggcccauga

SEQ ID NO: 2252760 - RNA, 19 nt, Artificial Sequence
  Description of Artificial Sequence: Synthetic oligonucleotide
ucgugcccauggaccgucg

SEQ ID NO: 2252761 - RNA, 19 nt, Artificial Sequence
  Description of Artificial Sequence: Synthetic oligonucleotide
auggaccgucgcccuugcc

SEQ ID NO: 2252762 - RNA, 19 nt, Artificial Sequence
  Description of Artificial Sequence: Synthetic oligonucleotide
ccagccguggugucgcugg

SEQ ID NO: 2252763 - RNA, 19 nt, Artificial Sequence
  Description of Artificial Sequence: Synthetic oligonucleotide
ccaugaggugagcagccgg

SEQ ID NO: 2252764 - RNA, 19 nt, Artificial Sequence
  Description of Artificial Sequence: Synthetic oligonucleotide
cagugcuuugggccacggg

SEQ ID NO: 2252765 - RNA, 19 nt, Artificial Sequence
  Description of Artificial Sequence: Synthetic oligonucleotide
gcccauguagcggaugcgg

SEQ ID NO: 2252766 - RNA, 19 nt, Artificial Sequence
  Description of Artificial Sequence: Synthetic oligonucleotide
ggcacuggccccaaacagc

SEQ ID NO: 2252767 - RNA, 19 nt, Artificial Sequence
  Description of Artificial Sequence: Synthetic oligonucleotide
gucccuaacgcucgcccuc

SEQ ID NO: 2252768 - RNA, 19 nt, Artificial Sequence
  Description of Artificial Sequence: Synthetic oligonucleotide
gucgaccugcagcggggcg

SEQ ID NO: 2252769 - RNA, 19 nt, Artificial Sequence
  Description of Artificial Sequence: Synthetic oligonucleotide
ggccccuaggucaggaggg

SEQ ID NO: 2252770 - RNA, 19 nt, Artificial Sequence
  Description of Artificial Sequence: Synthetic oligonucleotide
aguggucgaccugcagcgg

SEQ ID NO: 2252771 - RNA, 19 nt, Artificial Sequence
  Description of Artificial Sequence: Synthetic oligonucleotide
cgcccaauaucccagcccc

SEQ ID NO: 2252772 - RNA, 19 nt, Artificial Sequence
  Description of Artificial Sequence: Synthetic oligonucleotide
ugugugccccucugcucca

SEQ ID NO: 2252773 - RNA, 19 nt, Artificial Sequence
  Description of Artificial Sequence: Synthetic oligonucleotide
cgaucgugcccauggaccg

SEQ ID NO: 2252774 - RNA, 19 nt, Artificial Sequence
  Description of Artificial Sequence: Synthetic oligonucleotide
acagggauagaggguccug

SEQ ID NO: 2252775 - RNA, 19 nt, Artificial Sequence
  Description of Artificial Sequence: Synthetic oligonucleotide
guacagagccugcgaggug

SEQ ID NO: 2252776 - RNA, 19 nt, Artificial Sequence
  Description of Artificial Sequence: Synthetic oligonucleotide
agguagcgcuucauggcag

SEQ ID NO: 2252777 - RNA, 19 nt, Artificial Sequence
  Description of Artificial Sequence: Synthetic oligonucleotide
gguuccagccguggugucg

SEQ ID NO: 2252778 - RNA, 19 nt, Artificial Sequence
  Description of Artificial Sequence: Synthetic oligonucleotide
caaugcccuuacucugaug

SEQ ID NO: 2252779 - RNA, 19 nt, Artificial Sequence
  Description of Artificial Sequence: Synthetic oligonucleotide
aucagugcuuugggccacg

SEQ ID NO: 2252780 - RNA, 19 nt, Artificial Sequence
  Description of Artificial Sequence: Synthetic oligonucleotide
ugcaggccccucgaguaac

SEQ ID NO: 2252781 - RNA, 19 nt, Artificial Sequence
  Description of Artificial Sequence: Synthetic oligonucleotide
ccuugcaagggccgucugg

SEQ ID NO: 2252782 - RNA, 19 nt, Artificial Sequence
  Description of Artificial Sequence: Synthetic oligonucleotide
caggggccagcugaucucc

SEQ ID NO: 2252783 - RNA, 19 nt, Artificial Sequence
  Description of Artificial Sequence: Synthetic oligonucleotide
ccauguagcggaugcggac

SEQ ID NO: 2252784 - RNA, 19 nt, Artificial Sequence
  Description of Artificial Sequence: Synthetic oligonucleotide
uggcgcacacacagacgac

SEQ ID NO: 2252785 - RNA, 19 nt, Artificial Sequence
  Description of Artificial Sequence: Synthetic oligonucleotide
augcccuuacucugaugau

SEQ ID NO: 2252786 - RNA, 19 nt, Artificial Sequence
  Description of Artificial Sequence: Synthetic oligonucleotide
cuggggagucucucuucug

SEQ ID NO: 2252787 - RNA, 19 nt, Artificial Sequence
  Description of Artificial Sequence: Synthetic oligonucleotide
caccucgcuggcucgccag

SEQ ID NO: 2252788 - RNA, 19 nt, Artificial Sequence
  Description of Artificial Sequence: Synthetic oligonucleotide
ggguccugcccuucagucc

SEQ ID NO: 2252789 - RNA, 19 nt, Artificial Sequence
  Description of Artificial Sequence: Synthetic oligonucleotide
cauggaccgucgcccuugc

SEQ ID NO: 2252790 - RNA, 19 nt, Artificial Sequence
  Description of Artificial Sequence: Synthetic oligonucleotide
ccggguaucucccagcgca

SEQ ID NO: 2252791 - RNA, 19 nt, Artificial Sequence
  Description of Artificial Sequence: Synthetic oligonucleotide
uuuggccaagccggguauc

SEQ ID NO: 2252792 - RNA, 19 nt, Artificial Sequence
  Description of Artificial Sequence: Synthetic oligonucleotide
caagcgggcuugcugggga

SEQ ID NO: 2252793 - RNA, 19 nt, Artificial Sequence
  Description of Artificial Sequence: Synthetic oligonucleotide
cugcagcggggcgagggcg

SEQ ID NO: 2252794 - RNA, 19 nt, Artificial Sequence
  Description of Artificial Sequence: Synthetic oligonucleotide
gcggaccuggcacuggccc

SEQ ID NO: 2252795 - RNA, 19 nt, Artificial Sequence
  Description of Artificial Sequence: Synthetic oligonucleotide
ucccuaacgcucgcccucu

SEQ ID NO: 2252796 - RNA, 19 nt, Artificial Sequence
  Description of Artificial Sequence: Synthetic oligonucleotide
ccuucaguccacggaaggc

SEQ ID NO: 2252797 - RNA, 19 nt, Artificial Sequence
  Description of Artificial Sequence: Synthetic oligonucleotide
gccguggugucgcugggcc

SEQ ID NO: 2252798 - RNA, 19 nt, Artificial Sequence
  Description of Artificial Sequence: Synthetic oligonucleotide
cgcauaguggucgaccugc

SEQ ID NO: 2252799 - RNA, 19 nt, Artificial Sequence
  Description of Artificial Sequence: Synthetic oligonucleotide
aguccacggaaggccgguc

SEQ ID NO: 2252800 - RNA, 19 nt, Artificial Sequence
  Description of Artificial Sequence: Synthetic oligonucleotide
cgacucagaugcagaaggg

SEQ ID NO: 2252801 - RNA, 19 nt, Artificial Sequence
  Description of Artificial Sequence: Synthetic oligonucleotide
agcugaucucccaggcaug

SEQ ID NO: 2252802 - RNA, 19 nt, Artificial Sequence
  Description of Artificial Sequence: Synthetic oligonucleotide
cagcugaucucccaggcau

SEQ ID NO: 2252803 - RNA, 19 nt, Artificial Sequence
  Description of Artificial Sequence: Synthetic oligonucleotide
agcgccgcauaguggucga

SEQ ID NO: 2252804 - RNA, 19 nt, Artificial Sequence
  Description of Artificial Sequence: Synthetic oligonucleotide
ccuuacucugaugauacaa

SEQ ID NO: 2252805 - RNA, 19 nt, Artificial Sequence
  Description of Artificial Sequence: Synthetic oligonucleotide
cacggaaggccggucccag

SEQ ID NO: 2252806 - RNA, 19 nt, Artificial Sequence
  Description of Artificial Sequence: Synthetic oligonucleotide
augcaggccccucgaguaa

SEQ ID NO: 2252807 - RNA, 19 nt, Artificial Sequence
  Description of Artificial Sequence: Synthetic oligonucleotide
gguacagagccugcgaggu

SEQ ID NO: 2252808 - RNA, 19 nt, Artificial Sequence
  Description of Artificial Sequence: Synthetic oligonucleotide
ccaucagugcuuugggcca

SEQ ID NO: 2252809 - RNA, 19 nt, Artificial Sequence
  Description of Artificial Sequence: Synthetic oligonucleotide
ucgcccuugccgucccuaa

SEQ ID NO: 2252810 - RNA, 19 nt, Artificial Sequence
  Description of Artificial Sequence: Synthetic oligonucleotide
agaagggauugugguuccu

SEQ ID NO: 2252811 - RNA, 19 nt, Artificial Sequence
  Description of Artificial Sequence: Synthetic oligonucleotide
agucucucuggcaccacua

SEQ ID NO: 2252812 - RNA, 19 nt, Artificial Sequence
  Description of Artificial Sequence: Synthetic oligonucleotide
cacuggccccaaacagcgc

SEQ ID NO: 2252813 - RNA, 19 nt, Artificial Sequence
  Description of Artificial Sequence: Synthetic oligonucleotide
uccagccguggugucgcug

SEQ ID NO: 2252814 - RNA, 19 nt, Artificial Sequence
  Description of Artificial Sequence: Synthetic oligonucleotide
aggggccagcugaucuccc

SEQ ID NO: 2252815 - RNA, 19 nt, Artificial Sequence
  Description of Artificial Sequence: Synthetic oligonucleotide
ccuaacgcucgcccucucc

SEQ ID NO: 2252816 - RNA, 19 nt, Artificial Sequence
  Description of Artificial Sequence: Synthetic oligonucleotide
ugccgucccuaacgcucgc

SEQ ID NO: 2252817 - RNA, 19 nt, Artificial Sequence
  Description of Artificial Sequence: Synthetic oligonucleotide
gauagaggguccugcccuu

SEQ ID NO: 2252818 - RNA, 19 nt, Artificial Sequence
  Description of Artificial Sequence: Synthetic oligonucleotide
ccuccaagcgggcuugcug

SEQ ID NO: 2252819 - RNA, 19 nt, Artificial Sequence
  Description of Artificial Sequence: Synthetic oligonucleotide
ggugucgcugggccccuag

SEQ ID NO: 2252820 - RNA, 19 nt, Artificial Sequence
  Description of Artificial Sequence: Synthetic oligonucleotide
uuugggccacggggcgccg

SEQ ID NO: 2252821 - RNA, 19 nt, Artificial Sequence
  Description of Artificial Sequence: Synthetic oligonucleotide
caggccccucgaguaaccc

SEQ ID NO: 2252822 - RNA, 19 nt, Artificial Sequence
  Description of Artificial Sequence: Synthetic oligonucleotide
ggcgugugugccccucugc

SEQ ID NO: 2252823 - RNA, 19 nt, Artificial Sequence
  Description of Artificial Sequence: Synthetic oligonucleotide
ggauugugguuccucggcu

SEQ ID NO: 2252824 - RNA, 19 nt, Artificial Sequence
  Description of Artificial Sequence: Synthetic oligonucleotide
ccgcccaauaucccagccc

SEQ ID NO: 2252825 - RNA, 19 nt, Artificial Sequence
  Description of Artificial Sequence: Synthetic oligonucleotide
ucuggcccaugaggugagc

SEQ ID NO: 2252826 - RNA, 19 nt, Artificial Sequence
  Description of Artificial Sequence: Synthetic oligonucleotide
gggagucucucuucugaaa

SEQ ID NO: 2252827 - RNA, 19 nt, Artificial Sequence
  Description of Artificial Sequence: Synthetic oligonucleotide
ccgucccuaacgcucgccc

SEQ ID NO: 2252828 - RNA, 19 nt, Artificial Sequence
  Description of Artificial Sequence: Synthetic oligonucleotide
cuggcucgccagccggcag

SEQ ID NO: 2252829 - RNA, 19 nt, Artificial Sequence
  Description of Artificial Sequence: Synthetic oligonucleotide
cagccguggugucgcuggg

SEQ ID NO: 2252830 - RNA, 19 nt, Artificial Sequence
  Description of Artificial Sequence: Synthetic oligonucleotide
gguuccucggcucuucuuu

SEQ ID NO: 2252831 - RNA, 19 nt, Artificial Sequence
  Description of Artificial Sequence: Synthetic oligonucleotide
cccuugccgucccuaacgc

SEQ ID NO: 2252832 - RNA, 19 nt, Artificial Sequence
  Description of Artificial Sequence: Synthetic oligonucleotide
gccgcucaaagcacagccc

SEQ ID NO: 2252833 - RNA, 19 nt, Artificial Sequence
  Description of Artificial Sequence: Synthetic oligonucleotide
ggcccauguagcggaugcg

SEQ ID NO: 2252834 - RNA, 19 nt, Artificial Sequence
  Description of Artificial Sequence: Synthetic oligonucleotide
acccuccaagcgggcuugc

SEQ ID NO: 2252835 - RNA, 19 nt, Artificial Sequence
  Description of Artificial Sequence: Synthetic oligonucleotide
aggccggucccagguaggu

SEQ ID NO: 2252836 - RNA, 19 nt, Artificial Sequence
  Description of Artificial Sequence: Synthetic oligonucleotide
gaguagcccagaguccccu

SEQ ID NO: 2252837 - RNA, 19 nt, Artificial Sequence
  Description of Artificial Sequence: Synthetic oligonucleotide
gucgauguucucggagcaa

SEQ ID NO: 2252838 - RNA, 19 nt, Artificial Sequence
  Description of Artificial Sequence: Synthetic oligonucleotide
cccucuuuccccggacucc

SEQ ID NO: 2252839 - RNA, 19 nt, Artificial Sequence
  Description of Artificial Sequence: Synthetic oligonucleotide
ggguaucucccagcgcaug

SEQ ID NO: 2252840 - RNA, 19 nt, Artificial Sequence
  Description of Artificial Sequence: Synthetic oligonucleotide
ggaugcggaccuggcacug

SEQ ID NO: 2252841 - RNA, 19 nt, Artificial Sequence
  Description of Artificial Sequence: Synthetic oligonucleotide
cagcgcuuacacagggaua

SEQ ID NO: 2252842 - RNA, 19 nt, Artificial Sequence
  Description of Artificial Sequence: Synthetic oligonucleotide
ggacucccgaucgugccca

SEQ ID NO: 2252843 - RNA, 19 nt, Artificial Sequence
  Description of Artificial Sequence: Synthetic oligonucleotide
ggaccgucgcccuugccgu

SEQ ID NO: 2252844 - RNA, 19 nt, Artificial Sequence
  Description of Artificial Sequence: Synthetic oligonucleotide
agcgggcuugcuggggagu

SEQ ID NO: 2252845 - RNA, 19 nt, Artificial Sequence
  Description of Artificial Sequence: Synthetic oligonucleotide
gaccgucgcccuugccguc

SEQ ID NO: 2252846 - RNA, 19 nt, Artificial Sequence
  Description of Artificial Sequence: Synthetic oligonucleotide
cccauguagcggaugcgga

SEQ ID NO: 2252847 - RNA, 19 nt, Artificial Sequence
  Description of Artificial Sequence: Synthetic oligonucleotide
acucccgaucgugcccaug

SEQ ID NO: 2252848 - RNA, 19 nt, Artificial Sequence
  Description of Artificial Sequence: Synthetic oligonucleotide
ccccggacuccaucagugc

SEQ ID NO: 2252849 - RNA, 19 nt, Artificial Sequence
  Description of Artificial Sequence: Synthetic oligonucleotide
uuccagccguggugucgcu

SEQ ID NO: 2252850 - RNA, 19 nt, Artificial Sequence
  Description of Artificial Sequence: Synthetic oligonucleotide
cccgcccaauaucccagcc

SEQ ID NO: 2252851 - RNA, 19 nt, Artificial Sequence
  Description of Artificial Sequence: Synthetic oligonucleotide
ggcucgccagccggcaggg

SEQ ID NO: 2252852 - RNA, 19 nt, Artificial Sequence
  Description of Artificial Sequence: Synthetic oligonucleotide
ggcgccgcucaaagcacag

SEQ ID NO: 2252853 - RNA, 19 nt, Artificial Sequence
  Description of Artificial Sequence: Synthetic oligonucleotide
gccgcauaguggucgaccu

SEQ ID NO: 2252854 - RNA, 19 nt, Artificial Sequence
  Description of Artificial Sequence: Synthetic oligonucleotide
ccauggaccgucgcccuug

SEQ ID NO: 2252855 - RNA, 19 nt, Artificial Sequence
  Description of Artificial Sequence: Synthetic oligonucleotide
gccccuaggucaggagggg

SEQ ID NO: 2252856 - RNA, 19 nt, Artificial Sequence
  Description of Artificial Sequence: Synthetic oligonucleotide
gccccaaacagcgcuuaca

SEQ ID NO: 2252857 - RNA, 19 nt, Artificial Sequence
  Description of Artificial Sequence: Synthetic oligonucleotide
gcccuucaguccacggaag

SEQ ID NO: 2252858 - RNA, 19 nt, Artificial Sequence
  Description of Artificial Sequence: Synthetic oligonucleotide
cgauguucucggagcaauc

SEQ ID NO: 2252859 - RNA, 19 nt, Artificial Sequence
  Description of Artificial Sequence: Synthetic oligonucleotide
ggcgcacacacagacgacu

SEQ ID NO: 2252860 - RNA, 19 nt, Artificial Sequence
  Description of Artificial Sequence: Synthetic oligonucleotide
ggaccuggcacuggcccca

SEQ ID NO: 2252861 - RNA, 19 nt, Artificial Sequence
  Description of Artificial Sequence: Synthetic oligonucleotide
ccgucuggcccaugaggug

SEQ ID NO: 2252862 - RNA, 19 nt, Artificial Sequence
  Description of Artificial Sequence: Synthetic oligonucleotide
gccggguaucucccagcgc

SEQ ID NO: 2252863 - RNA, 19 nt, Artificial Sequence
  Description of Artificial Sequence: Synthetic oligonucleotide
agcaauccuugggguucca

SEQ ID NO: 2252864 - RNA, 19 nt, Artificial Sequence
  Description of Artificial Sequence: Synthetic oligonucleotide
gcuuugggccacggggcgc

SEQ ID NO: 2252865 - RNA, 19 nt, Artificial Sequence
  Description of Artificial Sequence: Synthetic oligonucleotide
ggucgaccugcagcggggc

SEQ ID NO: 2252866 - RNA, 19 nt, Artificial Sequence
  Description of Artificial Sequence: Synthetic oligonucleotide
ggggcgagggcgguggcca

SEQ ID NO: 2252867 - RNA, 19 nt, Artificial Sequence
  Description of Artificial Sequence: Synthetic oligonucleotide
gaucgugcccauggaccgu

SEQ ID NO: 2252868 - RNA, 19 nt, Artificial Sequence
  Description of Artificial Sequence: Synthetic oligonucleotide
ccggucccagguaggugcc

SEQ ID NO: 2252869 - RNA, 19 nt, Artificial Sequence
  Description of Artificial Sequence: Synthetic oligonucleotide
gcgcacacacagacgacuc

SEQ ID NO: 2252870 - RNA, 19 nt, Artificial Sequence
  Description of Artificial Sequence: Synthetic oligonucleotide
cggggcgccgcucaaagca

SEQ ID NO: 2252871 - RNA, 19 nt, Artificial Sequence
  Description of Artificial Sequence: Synthetic oligonucleotide
cccgcaccucgcuggcucg

SEQ ID NO: 2252872 - RNA, 19 nt, Artificial Sequence
  Description of Artificial Sequence: Synthetic oligonucleotide
gugugccccucugcuccag

SEQ ID NO: 2252873 - RNA, 19 nt, Artificial Sequence
  Description of Artificial Sequence: Synthetic oligonucleotide
ggccccaaacagcgcuuac

SEQ ID NO: 2252874 - RNA, 19 nt, Artificial Sequence
  Description of Artificial Sequence: Synthetic oligonucleotide
gcgugugugccccucugcu

SEQ ID NO: 2252875 - RNA, 19 nt, Artificial Sequence
  Description of Artificial Sequence: Synthetic oligonucleotide
ccuccaugucgagaaccac

SEQ ID NO: 2252876 - RNA, 19 nt, Artificial Sequence
  Description of Artificial Sequence: Synthetic oligonucleotide
cggaccuggcacuggcccc

SEQ ID NO: 2252877 - RNA, 19 nt, Artificial Sequence
  Description of Artificial Sequence: Synthetic oligonucleotide
gugguuccucggcucuucu

SEQ ID NO: 2252878 - RNA, 19 nt, Artificial Sequence
  Description of Artificial Sequence: Synthetic oligonucleotide
gggguuccagccguggugu

SEQ ID NO: 2252879 - RNA, 19 nt, Artificial Sequence
  Description of Artificial Sequence: Synthetic oligonucleotide
ggccccucgaguaaccccu

SEQ ID NO: 2252880 - RNA, 19 nt, Artificial Sequence
  Description of Artificial Sequence: Synthetic oligonucleotide
ccgcauaguggucgaccug

SEQ ID NO: 2252881 - RNA, 19 nt, Artificial Sequence
  Description of Artificial Sequence: Synthetic oligonucleotide
cacggcgugugugccccuc

SEQ ID NO: 2252882 - RNA, 19 nt, Artificial Sequence
  Description of Artificial Sequence: Synthetic oligonucleotide
gcugcccaaaagcgccgca

SEQ ID NO: 2252883 - RNA, 19 nt, Artificial Sequence
  Description of Artificial Sequence: Synthetic oligonucleotide
cgucgauguucucggagca

SEQ ID NO: 2252884 - RNA, 19 nt, Artificial Sequence
  Description of Artificial Sequence: Synthetic oligonucleotide
cacagggauagaggguccu

SEQ ID NO: 2252885 - RNA, 19 nt, Artificial Sequence
  Description of Artificial Sequence: Synthetic oligonucleotide
ggagcagacaggagcuccu

SEQ ID NO: 2252886 - RNA, 19 nt, Artificial Sequence
  Description of Artificial Sequence: Synthetic oligonucleotide
ggaaggccggucccaggua

SEQ ID NO: 2252887 - RNA, 19 nt, Artificial Sequence
  Description of Artificial Sequence: Synthetic oligonucleotide
cccuuccuugacgucgaug

SEQ ID NO: 2252888 - RNA, 19 nt, Artificial Sequence
  Description of Artificial Sequence: Synthetic oligonucleotide
ggggcgccgcucaaagcac

SEQ ID NO: 2252889 - RNA, 19 nt, Artificial Sequence
  Description of Artificial Sequence: Synthetic oligonucleotide
ccccgcaccucgcuggcuc

SEQ ID NO: 2252890 - RNA, 19 nt, Artificial Sequence
  Description of Artificial Sequence: Synthetic oligonucleotide
ccccgcccaauaucccagc

SEQ ID NO: 2252891 - RNA, 19 nt, Artificial Sequence
  Description of Artificial Sequence: Synthetic oligonucleotide
cuuccuugacgucgauguu

SEQ ID NO: 2252892 - RNA, 19 nt, Artificial Sequence
  Description of Artificial Sequence: Synthetic oligonucleotide
aagggccgucuggcccaug

SEQ ID NO: 2252893 - RNA, 19 nt, Artificial Sequence
  Description of Artificial Sequence: Synthetic oligonucleotide
cccagcgcauggcgcacac

SEQ ID NO: 2252894 - RNA, 19 nt, Artificial Sequence
  Description of Artificial Sequence: Synthetic oligonucleotide
ggccacggggcgccgcuca

SEQ ID NO: 2252895 - RNA, 19 nt, Artificial Sequence
  Description of Artificial Sequence: Synthetic oligonucleotide
cgugcccauggaccgucgc

SEQ ID NO: 2252896 - RNA, 19 nt, Artificial Sequence
  Description of Artificial Sequence: Synthetic oligonucleotide
gucgcccuugccgucccua

SEQ ID NO: 2252897 - RNA, 19 nt, Artificial Sequence
  Description of Artificial Sequence: Synthetic oligonucleotide
cccuuacucugaugauaca

SEQ ID NO: 2252898 - RNA, 19 nt, Artificial Sequence
  Description of Artificial Sequence: Synthetic oligonucleotide
ggccggucccagguaggug

SEQ ID NO: 2252899 - RNA, 19 nt, Artificial Sequence
  Description of Artificial Sequence: Synthetic oligonucleotide
cugcccaaaagcgccgcau

SEQ ID NO: 2252900 - RNA, 19 nt, Artificial Sequence
  Description of Artificial Sequence: Synthetic oligonucleotide
gcucacccugagguccagc

SEQ ID NO: 2252901 - RNA, 19 nt, Artificial Sequence
  Description of Artificial Sequence: Synthetic oligonucleotide
gcccucgggaggagagaag

SEQ ID NO: 2252902 - RNA, 19 nt, Artificial Sequence
  Description of Artificial Sequence: Synthetic oligonucleotide
gccgucccuaacgcucgcc

SEQ ID NO: 2252903 - RNA, 19 nt, Artificial Sequence
  Description of Artificial Sequence: Synthetic oligonucleotide
ggacccuccaagcgggcuu

SEQ ID NO: 2252904 - RNA, 19 nt, Artificial Sequence
  Description of Artificial Sequence: Synthetic oligonucleotide
gcgggcuugcuggggaguc

SEQ ID NO: 2252905 - RNA, 19 nt, Artificial Sequence
  Description of Artificial Sequence: Synthetic oligonucleotide
gcaccucgcuggcucgcca

SEQ ID NO: 2252906 - RNA, 19 nt, Artificial Sequence
  Description of Artificial Sequence: Synthetic oligonucleotide
gcgccgcucaaagcacagc

SEQ ID NO: 2252907 - RNA, 19 nt, Artificial Sequence
  Description of Artificial Sequence: Synthetic oligonucleotide
cgcacacacagacgacuca

SEQ ID NO: 2252908 - RNA, 19 nt, Artificial Sequence
  Description of Artificial Sequence: Synthetic oligonucleotide
cagaugcagaagggauugu

SEQ ID NO: 2252909 - RNA, 19 nt, Artificial Sequence
  Description of Artificial Sequence: Synthetic oligonucleotide
ccucgaguaaccccucuuu

SEQ ID NO: 2252910 - RNA, 19 nt, Artificial Sequence
  Description of Artificial Sequence: Synthetic oligonucleotide
caguccacggaaggccggu

SEQ ID NO: 2252911 - RNA, 19 nt, Artificial Sequence
  Description of Artificial Sequence: Synthetic oligonucleotide
cccucgggaggagagaagu

SEQ ID NO: 2252912 - RNA, 19 nt, Artificial Sequence
  Description of Artificial Sequence: Synthetic oligonucleotide
caaaggcagaguggauauu

SEQ ID NO: 2252913 - RNA, 19 nt, Artificial Sequence
  Description of Artificial Sequence: Synthetic oligonucleotide
gcccaauaucccagcccca

SEQ ID NO: 2252914 - RNA, 19 nt, Artificial Sequence
  Description of Artificial Sequence: Synthetic oligonucleotide
gggcgccgcucaaagcaca

SEQ ID NO: 2252915 - RNA, 19 nt, Artificial Sequence
  Description of Artificial Sequence: Synthetic oligonucleotide
cccaaaagcgccgcauagu

SEQ ID NO: 2252916 - RNA, 19 nt, Artificial Sequence
  Description of Artificial Sequence: Synthetic oligonucleotide
ggggacccuccaagcgggc

SEQ ID NO: 2252917 - RNA, 19 nt, Artificial Sequence
  Description of Artificial Sequence: Synthetic oligonucleotide
cgaccugcagcggggcgag

SEQ ID NO: 2252918 - RNA, 19 nt, Artificial Sequence
  Description of Artificial Sequence: Synthetic oligonucleotide
ccaugucgagaaccaccaa

SEQ ID NO: 2252919 - RNA, 19 nt, Artificial Sequence
  Description of Artificial Sequence: Synthetic oligonucleotide
cucuuuccccggacuccau

SEQ ID NO: 2252920 - RNA, 19 nt, Artificial Sequence
  Description of Artificial Sequence: Synthetic oligonucleotide
gggcgagggcgguggccac

SEQ ID NO: 2252921 - RNA, 19 nt, Artificial Sequence
  Description of Artificial Sequence: Synthetic oligonucleotide
gcgcuuacacagggauaga

SEQ ID NO: 2252922 - RNA, 19 nt, Artificial Sequence
  Description of Artificial Sequence: Synthetic oligonucleotide
gacucccgaucgugcccau

SEQ ID NO: 2252923 - RNA, 19 nt, Artificial Sequence
  Description of Artificial Sequence: Synthetic oligonucleotide
cgagaaccaccaacagucu

SEQ ID NO: 2252924 - RNA, 19 nt, Artificial Sequence
  Description of Artificial Sequence: Synthetic oligonucleotide
gcccauggaccgucgcccu

SEQ ID NO: 2252925 - RNA, 19 nt, Artificial Sequence
  Description of Artificial Sequence: Synthetic oligonucleotide
uggugucgcugggccccua

SEQ ID NO: 2252926 - RNA, 19 nt, Artificial Sequence
  Description of Artificial Sequence: Synthetic oligonucleotide
cgcccuugccgucccuaac

SEQ ID NO: 2252927 - RNA, 19 nt, Artificial Sequence
  Description of Artificial Sequence: Synthetic oligonucleotide
ccuugccgucccuaacgcu

SEQ ID NO: 2252928 - RNA, 19 nt, Artificial Sequence
  Description of Artificial Sequence: Synthetic oligonucleotide
ccggacuccaucagugcuu

SEQ ID NO: 2252929 - RNA, 19 nt, Artificial Sequence
  Description of Artificial Sequence: Synthetic oligonucleotide
gggacccuccaagcgggcu

SEQ ID NO: 2252930 - RNA, 19 nt, Artificial Sequence
  Description of Artificial Sequence: Synthetic oligonucleotide
cggaaggccggucccaggu

SEQ ID NO: 2252931 - RNA, 19 nt, Artificial Sequence
  Description of Artificial Sequence: Synthetic oligonucleotide
cggcgugugugccccucug

SEQ ID NO: 2252932 - RNA, 19 nt, Artificial Sequence
  Description of Artificial Sequence: Synthetic oligonucleotide
cccaggacucgcuguugcu

SEQ ID NO: 2252933 - RNA, 19 nt, Artificial Sequence
  Description of Artificial Sequence: Synthetic oligonucleotide
cgcaccucgcuggcucgcc

SEQ ID NO: 2252934 - RNA, 19 nt, Artificial Sequence
  Description of Artificial Sequence: Synthetic oligonucleotide
cccuaacgcucgcccucuc

SEQ ID NO: 2252935 - RNA, 19 nt, Artificial Sequence
  Description of Artificial Sequence: Synthetic oligonucleotide
gcggggcgagggcgguggc

SEQ ID NO: 2252936 - RNA, 19 nt, Artificial Sequence
  Description of Artificial Sequence: Synthetic oligonucleotide
cgucccuaacgcucgcccu

SEQ ID NO: 2252937 - RNA, 19 nt, Artificial Sequence
  Description of Artificial Sequence: Synthetic oligonucleotide
gccccucgaguaaccccuc

SEQ ID NO: 2252938 - RNA, 19 nt, Artificial Sequence
  Description of Artificial Sequence: Synthetic oligonucleotide
gccacggggcgccgcucaa

SEQ ID NO: 2252939 - RNA, 19 nt, Artificial Sequence
  Description of Artificial Sequence: Synthetic oligonucleotide
cggagcaauccuugggguu

SEQ ID NO: 2252940 - RNA, 19 nt, Artificial Sequence
  Description of Artificial Sequence: Synthetic oligonucleotide
gcgccgcauaguggucgac

SEQ ID NO: 2252941 - RNA, 19 nt, Artificial Sequence
  Description of Artificial Sequence: Synthetic oligonucleotide
cccucgaguaaccccucuu

SEQ ID NO: 2252942 - RNA, 19 nt, Artificial Sequence
  Description of Artificial Sequence: Synthetic oligonucleotide
ccagcgcauggcgcacaca

SEQ ID NO: 2252943 - RNA, 19 nt, Artificial Sequence
  Description of Artificial Sequence: Synthetic oligonucleotide
caagggccgucuggcccau

SEQ ID NO: 2252944 - RNA, 19 nt, Artificial Sequence
  Description of Artificial Sequence: Synthetic oligonucleotide
ccccucgaguaaccccucu

SEQ ID NO: 2252945 - RNA, 19 nt, Artificial Sequence
  Description of Artificial Sequence: Synthetic oligonucleotide
gggccacggggcgccgcuc

SEQ ID NO: 2252946 - RNA, 19 nt, Artificial Sequence
  Description of Artificial Sequence: Synthetic oligonucleotide
ccacggggcgccgcucaaa

SEQ ID NO: 2252947 - RNA, 19 nt, Artificial Sequence
  Description of Artificial Sequence: Synthetic oligonucleotide
cccauggaccgucgcccuu

SEQ ID NO: 2252948 - RNA, 19 nt, Artificial Sequence
  Description of Artificial Sequence: Synthetic oligonucleotide
ccacggcgugugugccccu

SEQ ID NO: 2252949 - RNA, 19 nt, Artificial Sequence
  Description of Artificial Sequence: Synthetic oligonucleotide
ccccuuccuugacgucgau

SEQ ID NO: 2252950 - RNA, 19 nt, Artificial Sequence
  Description of Artificial Sequence: Synthetic oligonucleotide
aauaacaugagaugaggcc

SEQ ID NO: 2252951 - RNA, 19 nt, Artificial Sequence
  Description of Artificial Sequence: Synthetic oligonucleotide
aaaauaacaugagaugagg

SEQ ID NO: 2252952 - RNA, 19 nt, Artificial Sequence
  Description of Artificial Sequence: Synthetic oligonucleotide
auaacaugagaugaggccc

SEQ ID NO: 2252953 - RNA, 19 nt, Artificial Sequence
  Description of Artificial Sequence: Synthetic oligonucleotide
uuauccucuauccggaagg

SEQ ID NO: 2252954 - RNA, 19 nt, Artificial Sequence
  Description of Artificial Sequence: Synthetic oligonucleotide
aaauaacaugagaugaggc

SEQ ID NO: 2252955 - RNA, 19 nt, Artificial Sequence
  Description of Artificial Sequence: Synthetic oligonucleotide
agcuguuuauccucuaucc

SEQ ID NO: 2252956 - RNA, 19 nt, Artificial Sequence
  Description of Artificial Sequence: Synthetic oligonucleotide
ugcacugcaaacuccagcg

SEQ ID NO: 2252957 - RNA, 19 nt, Artificial Sequence
  Description of Artificial Sequence: Synthetic oligonucleotide
acuucuacacucuggacac

SEQ ID NO: 2252958 - RNA, 19 nt, Artificial Sequence
  Description of Artificial Sequence: Synthetic oligonucleotide
gagauccccauacugaugg

SEQ ID NO: 2252959 - RNA, 19 nt, Artificial Sequence
  Description of Artificial Sequence: Synthetic oligonucleotide
aucaggguuaaaauggucc

SEQ ID NO: 2252960 - RNA, 19 nt, Artificial Sequence
  Description of Artificial Sequence: Synthetic oligonucleotide
ucaacaaccaggcuucggc

SEQ ID NO: 2252961 - RNA, 19 nt, Artificial Sequence
  Description of Artificial Sequence: Synthetic oligonucleotide
aguccuuucggccuucacc

SEQ ID NO: 2252962 - RNA, 19 nt, Artificial Sequence
  Description of Artificial Sequence: Synthetic oligonucleotide
auggacguggaauccaugc

SEQ ID NO: 2252963 - RNA, 19 nt, Artificial Sequence
  Description of Artificial Sequence: Synthetic oligonucleotide
aaacaguuaggguccagag

SEQ ID NO: 2252964 - RNA, 19 nt, Artificial Sequence
  Description of Artificial Sequence: Synthetic oligonucleotide
uccaauugcacuucuacac

SEQ ID NO: 2252965 - RNA, 19 nt, Artificial Sequence
  Description of Artificial Sequence: Synthetic oligonucleotide
uauugcaaucccuugugag

SEQ ID NO: 2252966 - RNA, 19 nt, Artificial Sequence
  Description of Artificial Sequence: Synthetic oligonucleotide
uccacaauggcuacugcag

SEQ ID NO: 2252967 - RNA, 19 nt, Artificial Sequence
  Description of Artificial Sequence: Synthetic oligonucleotide
aucacaagagcagaucugc

SEQ ID NO: 2252968 - RNA, 19 nt, Artificial Sequence
  Description of Artificial Sequence: Synthetic oligonucleotide
ugugagauccccauacuga

SEQ ID NO: 2252969 - RNA, 19 nt, Artificial Sequence
  Description of Artificial Sequence: Synthetic oligonucleotide
gauguagucaaaccgccug

SEQ ID NO: 2252970 - RNA, 19 nt, Artificial Sequence
  Description of Artificial Sequence: Synthetic oligonucleotide
ugaucuuggauaagggaug

SEQ ID NO: 2252971 - RNA, 19 nt, Artificial Sequence
  Description of Artificial Sequence: Synthetic oligonucleotide
uccgaagccauccuggaug

SEQ ID NO: 2252972 - RNA, 19 nt, Artificial Sequence
  Description of Artificial Sequence: Synthetic oligonucleotide
agauucuguaacuggccgc

SEQ ID NO: 2252973 - RNA, 19 nt, Artificial Sequence
  Description of Artificial Sequence: Synthetic oligonucleotide
gauaguaaggccaucacaa

SEQ ID NO: 2252974 - RNA, 19 nt, Artificial Sequence
  Description of Artificial Sequence: Synthetic oligonucleotide
aaucccuugugagaucccc

SEQ ID NO: 2252975 - RNA, 19 nt, Artificial Sequence
  Description of Artificial Sequence: Synthetic oligonucleotide
uagucaaaccgccugggcc

SEQ ID NO: 2252976 - RNA, 19 nt, Artificial Sequence
  Description of Artificial Sequence: Synthetic oligonucleotide
aucaaugguccccucaauc

SEQ ID NO: 2252977 - RNA, 19 nt, Artificial Sequence
  Description of Artificial Sequence: Synthetic oligonucleotide
uguuuauccucuauccgga

SEQ ID NO: 2252978 - RNA, 19 nt, Artificial Sequence
  Description of Artificial Sequence: Synthetic oligonucleotide
uuuauccucuauccggaag

SEQ ID NO: 2252979 - RNA, 19 nt, Artificial Sequence
  Description of Artificial Sequence: Synthetic oligonucleotide
ucaggguuaaaaugguccc

SEQ ID NO: 2252980 - RNA, 19 nt, Artificial Sequence
  Description of Artificial Sequence: Synthetic oligonucleotide
cuggauguagucaaaccgc

SEQ ID NO: 2252981 - RNA, 19 nt, Artificial Sequence
  Description of Artificial Sequence: Synthetic oligonucleotide
ugaucagaggugagcaggg

SEQ ID NO: 2252982 - RNA, 19 nt, Artificial Sequence
  Description of Artificial Sequence: Synthetic oligonucleotide
uacugcagcucccagauuc

SEQ ID NO: 2252983 - RNA, 19 nt, Artificial Sequence
  Description of Artificial Sequence: Synthetic oligonucleotide
ucuucccuggcccagguca

SEQ ID NO: 2252984 - RNA, 19 nt, Artificial Sequence
  Description of Artificial Sequence: Synthetic oligonucleotide
ugugaucuuggauaaggga

SEQ ID NO: 2252985 - RNA, 19 nt, Artificial Sequence
  Description of Artificial Sequence: Synthetic oligonucleotide
agcgcuugcaccuccuggc

SEQ ID NO: 2252986 - RNA, 19 nt, Artificial Sequence
  Description of Artificial Sequence: Synthetic oligonucleotide
ucuuggauaagggaugucu

SEQ ID NO: 2252987 - RNA, 19 nt, Artificial Sequence
  Description of Artificial Sequence: Synthetic oligonucleotide
uugggguucuggaaaaggc

SEQ ID NO: 2252988 - RNA, 19 nt, Artificial Sequence
  Description of Artificial Sequence: Synthetic oligonucleotide
uuugguucuccaauugcac

SEQ ID NO: 2252989 - RNA, 19 nt, Artificial Sequence
  Description of Artificial Sequence: Synthetic oligonucleotide
uggauguagucaaaccgcc

SEQ ID NO: 2252990 - RNA, 19 nt, Artificial Sequence
  Description of Artificial Sequence: Synthetic oligonucleotide
cuggaaaaggccagcagag

SEQ ID NO: 2252991 - RNA, 19 nt, Artificial Sequence
  Description of Artificial Sequence: Synthetic oligonucleotide
auugcaaucccuugugaga

SEQ ID NO: 2252992 - RNA, 19 nt, Artificial Sequence
  Description of Artificial Sequence: Synthetic oligonucleotide
aagaguggucugcaccaac

SEQ ID NO: 2252993 - RNA, 19 nt, Artificial Sequence
  Description of Artificial Sequence: Synthetic oligonucleotide
aacaccauuugguucucca

SEQ ID NO: 2252994 - RNA, 19 nt, Artificial Sequence
  Description of Artificial Sequence: Synthetic oligonucleotide
aaaacaguuaggguccaga

SEQ ID NO: 2252995 - RNA, 19 nt, Artificial Sequence
  Description of Artificial Sequence: Synthetic oligonucleotide
uaggaaucggaccacccca

SEQ ID NO: 2252996 - RNA, 19 nt, Artificial Sequence
  Description of Artificial Sequence: Synthetic oligonucleotide
agauaguaaggccaucaca

SEQ ID NO: 2252997 - RNA, 19 nt, Artificial Sequence
  Description of Artificial Sequence: Synthetic oligonucleotide
gcuucggccaaucacaucc

SEQ ID NO: 2252998 - RNA, 19 nt, Artificial Sequence
  Description of Artificial Sequence: Synthetic oligonucleotide
uccagcgcacacauggucc

SEQ ID NO: 2252999 - RNA, 19 nt, Artificial Sequence
  Description of Artificial Sequence: Synthetic oligonucleotide
gaagccauccuggauguag

SEQ ID NO: 2253000 - RNA, 19 nt, Artificial Sequence
  Description of Artificial Sequence: Synthetic oligonucleotide
uggauaagggaugucuucc

SEQ ID NO: 2253001 - RNA, 19 nt, Artificial Sequence
  Description of Artificial Sequence: Synthetic oligonucleotide
agcucccagauucuguaac

SEQ ID NO: 2253002 - RNA, 19 nt, Artificial Sequence
  Description of Artificial Sequence: Synthetic oligonucleotide
auaguaaggccaucacaag

SEQ ID NO: 2253003 - RNA, 19 nt, Artificial Sequence
  Description of Artificial Sequence: Synthetic oligonucleotide
caugcccuugaguacagcc

SEQ ID NO: 2253004 - RNA, 19 nt, Artificial Sequence
  Description of Artificial Sequence: Synthetic oligonucleotide
uguaggaaucggaccaccc

SEQ ID NO: 2253005 - RNA, 19 nt, Artificial Sequence
  Description of Artificial Sequence: Synthetic oligonucleotide
aacaaccaggcuucggcca

SEQ ID NO: 2253006 - RNA, 19 nt, Artificial Sequence
  Description of Artificial Sequence: Synthetic oligonucleotide
cauuugguucuccaauugc

SEQ ID NO: 2253007 - RNA, 19 nt, Artificial Sequence
  Description of Artificial Sequence: Synthetic oligonucleotide
uccugugcuuuccaggagc

SEQ ID NO: 2253008 - RNA, 19 nt, Artificial Sequence
  Description of Artificial Sequence: Synthetic oligonucleotide
acguggaauccaugcagcc

SEQ ID NO: 2253009 - RNA, 19 nt, Artificial Sequence
  Description of Artificial Sequence: Synthetic oligonucleotide
cuucaccagcaauaggccg

SEQ ID NO: 2253010 - RNA, 19 nt, Artificial Sequence
  Description of Artificial Sequence: Synthetic oligonucleotide
ucugcagguagauuucaac

SEQ ID NO: 2253011 - RNA, 19 nt, Artificial Sequence
  Description of Artificial Sequence: Synthetic oligonucleotide
auaagggaugucuucccug

SEQ ID NO: 2253012 - RNA, 19 nt, Artificial Sequence
  Description of Artificial Sequence: Synthetic oligonucleotide
ugaggcccugaucagaggu

SEQ ID NO: 2253013 - RNA, 19 nt, Artificial Sequence
  Description of Artificial Sequence: Synthetic oligonucleotide
uucuggaaaaggccagcag

SEQ ID NO: 2253014 - RNA, 19 nt, Artificial Sequence
  Description of Artificial Sequence: Synthetic oligonucleotide
cugaucagaggugagcagg

SEQ ID NO: 2253015 - RNA, 19 nt, Artificial Sequence
  Description of Artificial Sequence: Synthetic oligonucleotide
uguaacuggccgcugccca

SEQ ID NO: 2253016 - RNA, 19 nt, Artificial Sequence
  Description of Artificial Sequence: Synthetic oligonucleotide
uaugguguuagagcucucc

SEQ ID NO: 2253017 - RNA, 19 nt, Artificial Sequence
  Description of Artificial Sequence: Synthetic oligonucleotide
ucuguaacuggccgcugcc

SEQ ID NO: 2253018 - RNA, 19 nt, Artificial Sequence
  Description of Artificial Sequence: Synthetic oligonucleotide
ugcagguagauuucaacua

SEQ ID NO: 2253019 - RNA, 19 nt, Artificial Sequence
  Description of Artificial Sequence: Synthetic oligonucleotide
uucuguaacuggccgcugc

SEQ ID NO: 2253020 - RNA, 19 nt, Artificial Sequence
  Description of Artificial Sequence: Synthetic oligonucleotide
guugccgagaucuccccgg

SEQ ID NO: 2253021 - RNA, 19 nt, Artificial Sequence
  Description of Artificial Sequence: Synthetic oligonucleotide
cagguagauuucaacuagg

SEQ ID NO: 2253022 - RNA, 19 nt, Artificial Sequence
  Description of Artificial Sequence: Synthetic oligonucleotide
gaugaggcccugaucagag

SEQ ID NO: 2253023 - RNA, 19 nt, Artificial Sequence
  Description of Artificial Sequence: Synthetic oligonucleotide
uacugauggacguggaauc

SEQ ID NO: 2253024 - RNA, 19 nt, Artificial Sequence
  Description of Artificial Sequence: Synthetic oligonucleotide
gauguugccgagaucuccc

SEQ ID NO: 2253025 - RNA, 19 nt, Artificial Sequence
  Description of Artificial Sequence: Synthetic oligonucleotide
aauccgaagccauccugga

SEQ ID NO: 2253026 - RNA, 19 nt, Artificial Sequence
  Description of Artificial Sequence: Synthetic oligonucleotide
uugaguacagccugccuuc

SEQ ID NO: 2253027 - RNA, 19 nt, Artificial Sequence
  Description of Artificial Sequence: Synthetic oligonucleotide
cuauccggaagguggcucg

SEQ ID NO: 2253028 - RNA, 19 nt, Artificial Sequence
  Description of Artificial Sequence: Synthetic oligonucleotide
uguugccgagaucuccccg

SEQ ID NO: 2253029 - RNA, 19 nt, Artificial Sequence
  Description of Artificial Sequence: Synthetic oligonucleotide
uccaggccaucaauggucc

SEQ ID NO: 2253030 - RNA, 19 nt, Artificial Sequence
  Description of Artificial Sequence: Synthetic oligonucleotide
guaggaaucggaccacccc

SEQ ID NO: 2253031 - RNA, 19 nt, Artificial Sequence
  Description of Artificial Sequence: Synthetic oligonucleotide
agaguuuccugugaucuug

SEQ ID NO: 2253032 - RNA, 19 nt, Artificial Sequence
  Description of Artificial Sequence: Synthetic oligonucleotide
caauugcacuucuacacuc

SEQ ID NO: 2253033 - RNA, 19 nt, Artificial Sequence
  Description of Artificial Sequence: Synthetic oligonucleotide
guggaauccaugcagccca

SEQ ID NO: 2253034 - RNA, 19 nt, Artificial Sequence
  Description of Artificial Sequence: Synthetic oligonucleotide
gugcaaugaugccacaggc

SEQ ID NO: 2253035 - RNA, 19 nt, Artificial Sequence
  Description of Artificial Sequence: Synthetic oligonucleotide
guccuuucggccuucacca

SEQ ID NO: 2253036 - RNA, 19 nt, Artificial Sequence
  Description of Artificial Sequence: Synthetic oligonucleotide
ugggcugaguccuuucggc

SEQ ID NO: 2253037 - RNA, 19 nt, Artificial Sequence
  Description of Artificial Sequence: Synthetic oligonucleotide
uggacguggaauccaugca

SEQ ID NO: 2253038 - RNA, 19 nt, Artificial Sequence
  Description of Artificial Sequence: Synthetic oligonucleotide
aacuggccgcugcccaugc

SEQ ID NO: 2253039 - RNA, 19 nt, Artificial Sequence
  Description of Artificial Sequence: Synthetic oligonucleotide
ccugccaccccuuucaggg

SEQ ID NO: 2253040 - RNA, 19 nt, Artificial Sequence
  Description of Artificial Sequence: Synthetic oligonucleotide
gcuguuuauccucuauccg

SEQ ID NO: 2253041 - RNA, 19 nt, Artificial Sequence
  Description of Artificial Sequence: Synthetic oligonucleotide
auguugccgagaucucccc

SEQ ID NO: 2253042 - RNA, 19 nt, Artificial Sequence
  Description of Artificial Sequence: Synthetic oligonucleotide
aaucggaccaccccacgua

SEQ ID NO: 2253043 - RNA, 19 nt, Artificial Sequence
  Description of Artificial Sequence: Synthetic oligonucleotide
gcagguagauuucaacuag

SEQ ID NO: 2253044 - RNA, 19 nt, Artificial Sequence
  Description of Artificial Sequence: Synthetic oligonucleotide
caacaaccaggcuucggcc

SEQ ID NO: 2253045 - RNA, 19 nt, Artificial Sequence
  Description of Artificial Sequence: Synthetic oligonucleotide
ugguguuagagcucuccac

SEQ ID NO: 2253046 - RNA, 19 nt, Artificial Sequence
  Description of Artificial Sequence: Synthetic oligonucleotide
acugcaaacuccagcgcac

SEQ ID NO: 2253047 - RNA, 19 nt, Artificial Sequence
  Description of Artificial Sequence: Synthetic oligonucleotide
uugcaaucccuugugagau

SEQ ID NO: 2253048 - RNA, 19 nt, Artificial Sequence
  Description of Artificial Sequence: Synthetic oligonucleotide
ggacguggaauccaugcag

SEQ ID NO: 2253049 - RNA, 19 nt, Artificial Sequence
  Description of Artificial Sequence: Synthetic oligonucleotide
uugugcaccgcguccacac

SEQ ID NO: 2253050 - RNA, 19 nt, Artificial Sequence
  Description of Artificial Sequence: Synthetic oligonucleotide
gagaugaggcccugaucag

SEQ ID NO: 2253051 - RNA, 19 nt, Artificial Sequence
  Description of Artificial Sequence: Synthetic oligonucleotide
ucacaagagcagaucugcu

SEQ ID NO: 2253052 - RNA, 19 nt, Artificial Sequence
  Description of Artificial Sequence: Synthetic oligonucleotide
uguuagagcucuccacaau

SEQ ID NO: 2253053 - RNA, 19 nt, Artificial Sequence
  Description of Artificial Sequence: Synthetic oligonucleotide
ccggucaguauccugaggg

SEQ ID NO: 2253054 - RNA, 19 nt, Artificial Sequence
  Description of Artificial Sequence: Synthetic oligonucleotide
uccucccagauaguaaggc

SEQ ID NO: 2253055 - RNA, 19 nt, Artificial Sequence
  Description of Artificial Sequence: Synthetic oligonucleotide
ccgcaaaacaguuaggguc

SEQ ID NO: 2253056 - RNA, 19 nt, Artificial Sequence
  Description of Artificial Sequence: Synthetic oligonucleotide
augguccccucaaucaggc

SEQ ID NO: 2253057 - RNA, 19 nt, Artificial Sequence
  Description of Artificial Sequence: Synthetic oligonucleotide
gguguuagagcucuccaca

SEQ ID NO: 2253058 - RNA, 19 nt, Artificial Sequence
  Description of Artificial Sequence: Synthetic oligonucleotide
aguccccuguuuccucugc

SEQ ID NO: 2253059 - RNA, 19 nt, Artificial Sequence
  Description of Artificial Sequence: Synthetic oligonucleotide
gaccaccccacguauggug

SEQ ID NO: 2253060 - RNA, 19 nt, Artificial Sequence
  Description of Artificial Sequence: Synthetic oligonucleotide
ggccgcaaaacaguuaggg

SEQ ID NO: 2253061 - RNA, 19 nt, Artificial Sequence
  Description of Artificial Sequence: Synthetic oligonucleotide
cugcacugcaaacuccagc

SEQ ID NO: 2253062 - RNA, 19 nt, Artificial Sequence
  Description of Artificial Sequence: Synthetic oligonucleotide
aggguuaaaauggucccca

SEQ ID NO: 2253063 - RNA, 19 nt, Artificial Sequence
  Description of Artificial Sequence: Synthetic oligonucleotide
caggccaaccucuucccag

SEQ ID NO: 2253064 - RNA, 19 nt, Artificial Sequence
  Description of Artificial Sequence: Synthetic oligonucleotide
gagaucuccccggugccgg

SEQ ID NO: 2253065 - RNA, 19 nt, Artificial Sequence
  Description of Artificial Sequence: Synthetic oligonucleotide
uccccauacugauggacgu

SEQ ID NO: 2253066 - RNA, 19 nt, Artificial Sequence
  Description of Artificial Sequence: Synthetic oligonucleotide
ccugugaucuuggauaagg

SEQ ID NO: 2253067 - RNA, 19 nt, Artificial Sequence
  Description of Artificial Sequence: Synthetic oligonucleotide
uguuuccucugcagguaga

SEQ ID NO: 2253068 - RNA, 19 nt, Artificial Sequence
  Description of Artificial Sequence: Synthetic oligonucleotide
uccggaagguggcucggcc

SEQ ID NO: 2253069 - RNA, 19 nt, Artificial Sequence
  Description of Artificial Sequence: Synthetic oligonucleotide
cacguaugguguuagagcu

SEQ ID NO: 2253070 - RNA, 19 nt, Artificial Sequence
  Description of Artificial Sequence: Synthetic oligonucleotide
ggaagaguggucugcacca

SEQ ID NO: 2253071 - RNA, 19 nt, Artificial Sequence
  Description of Artificial Sequence: Synthetic oligonucleotide
gggaagaguggucugcacc

SEQ ID NO: 2253072 - RNA, 19 nt, Artificial Sequence
  Description of Artificial Sequence: Synthetic oligonucleotide
cgcaaaacaguuagggucc

SEQ ID NO: 2253073 - RNA, 19 nt, Artificial Sequence
  Description of Artificial Sequence: Synthetic oligonucleotide
ucccagauaguaaggccau

SEQ ID NO: 2253074 - RNA, 19 nt, Artificial Sequence
  Description of Artificial Sequence: Synthetic oligonucleotide
agauguuccaucaggguua

SEQ ID NO: 2253075 - RNA, 19 nt, Artificial Sequence
  Description of Artificial Sequence: Synthetic oligonucleotide
ucggccaaucacaucccac

SEQ ID NO: 2253076 - RNA, 19 nt, Artificial Sequence
  Description of Artificial Sequence: Synthetic oligonucleotide
ccacguaugguguuagagc

SEQ ID NO: 2253077 - RNA, 19 nt, Artificial Sequence
  Description of Artificial Sequence: Synthetic oligonucleotide
cugggcugaguccuuucgg

SEQ ID NO: 2253078 - RNA, 19 nt, Artificial Sequence
  Description of Artificial Sequence: Synthetic oligonucleotide
aaaaugguccccacagcua

SEQ ID NO: 2253079 - RNA, 19 nt, Artificial Sequence
  Description of Artificial Sequence: Synthetic oligonucleotide
gaguggucugcaccaacac

SEQ ID NO: 2253080 - RNA, 19 nt, Artificial Sequence
  Description of Artificial Sequence: Synthetic oligonucleotide
agcaauaggccggccucgc

SEQ ID NO: 2253081 - RNA, 19 nt, Artificial Sequence
  Description of Artificial Sequence: Synthetic oligonucleotide
gauccccauacugauggac

SEQ ID NO: 2253082 - RNA, 19 nt, Artificial Sequence
  Description of Artificial Sequence: Synthetic oligonucleotide
ugcaaacuccagcgcacac

SEQ ID NO: 2253083 - RNA, 19 nt, Artificial Sequence
  Description of Artificial Sequence: Synthetic oligonucleotide
acacauggucccaccgucc

SEQ ID NO: 2253084 - RNA, 19 nt, Artificial Sequence
  Description of Artificial Sequence: Synthetic oligonucleotide
cuccaauugcacuucuaca

SEQ ID NO: 2253085 - RNA, 19 nt, Artificial Sequence
  Description of Artificial Sequence: Synthetic oligonucleotide
uccucugcagguagauuuc

SEQ ID NO: 2253086 - RNA, 19 nt, Artificial Sequence
  Description of Artificial Sequence: Synthetic oligonucleotide
cacacauggucccaccguc

SEQ ID NO: 2253087 - RNA, 19 nt, Artificial Sequence
  Description of Artificial Sequence: Synthetic oligonucleotide
ggauaagggaugucuuccc

SEQ ID NO: 2253088 - RNA, 19 nt, Artificial Sequence
  Description of Artificial Sequence: Synthetic oligonucleotide
acagcuauugcaaucccuu

SEQ ID NO: 2253089 - RNA, 19 nt, Artificial Sequence
  Description of Artificial Sequence: Synthetic oligonucleotide
agccauccuggauguaguc

SEQ ID NO: 2253090 - RNA, 19 nt, Artificial Sequence
  Description of Artificial Sequence: Synthetic oligonucleotide
aucaacaaccaggcuucgg

SEQ ID NO: 2253091 - RNA, 19 nt, Artificial Sequence
  Description of Artificial Sequence: Synthetic oligonucleotide
caauaggccggccucgcuc

SEQ ID NO: 2253092 - RNA, 19 nt, Artificial Sequence
  Description of Artificial Sequence: Synthetic oligonucleotide
uucggccaaucacauccca

SEQ ID NO: 2253093 - RNA, 19 nt, Artificial Sequence
  Description of Artificial Sequence: Synthetic oligonucleotide
agcagaucugcuugggguu

SEQ ID NO: 2253094 - RNA, 19 nt, Artificial Sequence
  Description of Artificial Sequence: Synthetic oligonucleotide
gauaagggaugucuucccu

SEQ ID NO: 2253095 - RNA, 19 nt, Artificial Sequence
  Description of Artificial Sequence: Synthetic oligonucleotide
ccucgcuccucccagauag

SEQ ID NO: 2253096 - RNA, 19 nt, Artificial Sequence
  Description of Artificial Sequence: Synthetic oligonucleotide
cucuccacaauggcuacug

SEQ ID NO: 2253097 - RNA, 19 nt, Artificial Sequence
  Description of Artificial Sequence: Synthetic oligonucleotide
agcaucagccaggauguug

SEQ ID NO: 2253098 - RNA, 19 nt, Artificial Sequence
  Description of Artificial Sequence: Synthetic oligonucleotide
caggauguugccgagaucu

SEQ ID NO: 2253099 - RNA, 19 nt, Artificial Sequence
  Description of Artificial Sequence: Synthetic oligonucleotide
cuccucccagauaguaagg

SEQ ID NO: 2253100 - RNA, 19 nt, Artificial Sequence
  Description of Artificial Sequence: Synthetic oligonucleotide
cuuucggccuucaccagca

SEQ ID NO: 2253101 - RNA, 19 nt, Artificial Sequence
  Description of Artificial Sequence: Synthetic oligonucleotide
caggguuaaaauggucccc

SEQ ID NO: 2253102 - RNA, 19 nt, Artificial Sequence
  Description of Artificial Sequence: Synthetic oligonucleotide
gagcgugcaaugaugccac

SEQ ID NO: 2253103 - RNA, 19 nt, Artificial Sequence
  Description of Artificial Sequence: Synthetic oligonucleotide
caggccaucaauggucccc

SEQ ID NO: 2253104 - RNA, 19 nt, Artificial Sequence
  Description of Artificial Sequence: Synthetic oligonucleotide
ugcaccgcguccacacagc

SEQ ID NO: 2253105 - RNA, 19 nt, Artificial Sequence
  Description of Artificial Sequence: Synthetic oligonucleotide
ccagauucuguaacuggcc

SEQ ID NO: 2253106 - RNA, 19 nt, Artificial Sequence
  Description of Artificial Sequence: Synthetic oligonucleotide
aaguccccuguuuccucug

SEQ ID NO: 2253107 - RNA, 19 nt, Artificial Sequence
  Description of Artificial Sequence: Synthetic oligonucleotide
aggaaucggaccaccccac

SEQ ID NO: 2253108 - RNA, 19 nt, Artificial Sequence
  Description of Artificial Sequence: Synthetic oligonucleotide
agcagagcgugcaaugaug

SEQ ID NO: 2253109 - RNA, 19 nt, Artificial Sequence
  Description of Artificial Sequence: Synthetic oligonucleotide
cugcaccaacaccauuugg

SEQ ID NO: 2253110 - RNA, 19 nt, Artificial Sequence
  Description of Artificial Sequence: Synthetic oligonucleotide
ucuauccggaagguggcuc

SEQ ID NO: 2253111 - RNA, 19 nt, Artificial Sequence
  Description of Artificial Sequence: Synthetic oligonucleotide
gugaucuuggauaagggau

SEQ ID NO: 2253112 - RNA, 19 nt, Artificial Sequence
  Description of Artificial Sequence: Synthetic oligonucleotide
cuucggccaaucacauccc

SEQ ID NO: 2253113 - RNA, 19 nt, Artificial Sequence
  Description of Artificial Sequence: Synthetic oligonucleotide
cagggucuugugcaccgcg

SEQ ID NO: 2253114 - RNA, 19 nt, Artificial Sequence
  Description of Artificial Sequence: Synthetic oligonucleotide
cagcuauugcaaucccuug

SEQ ID NO: 2253115 - RNA, 19 nt, Artificial Sequence
  Description of Artificial Sequence: Synthetic oligonucleotide
uauccucuauccggaaggu

SEQ ID NO: 2253116 - RNA, 19 nt, Artificial Sequence
  Description of Artificial Sequence: Synthetic oligonucleotide
gguuaaaaugguccccaca

SEQ ID NO: 2253117 - RNA, 19 nt, Artificial Sequence
  Description of Artificial Sequence: Synthetic oligonucleotide
aacaugagaugaggcccug

SEQ ID NO: 2253118 - RNA, 19 nt, Artificial Sequence
  Description of Artificial Sequence: Synthetic oligonucleotide
ggggacaaaauaacaugag

SEQ ID NO: 2253119 - RNA, 19 nt, Artificial Sequence
  Description of Artificial Sequence: Synthetic oligonucleotide
agaguggucugcaccaaca

SEQ ID NO: 2253120 - RNA, 19 nt, Artificial Sequence
  Description of Artificial Sequence: Synthetic oligonucleotide
aagccauccuggauguagu

SEQ ID NO: 2253121 - RNA, 19 nt, Artificial Sequence
  Description of Artificial Sequence: Synthetic oligonucleotide
gugcaccgcguccacacag

SEQ ID NO: 2253122 - RNA, 19 nt, Artificial Sequence
  Description of Artificial Sequence: Synthetic oligonucleotide
ugccggucaguauccugag

SEQ ID NO: 2253123 - RNA, 19 nt, Artificial Sequence
  Description of Artificial Sequence: Synthetic oligonucleotide
uauccggaagguggcucgg

SEQ ID NO: 2253124 - RNA, 19 nt, Artificial Sequence
  Description of Artificial Sequence: Synthetic oligonucleotide
gcaaucccuugugagaucc

SEQ ID NO: 2253125 - RNA, 19 nt, Artificial Sequence
  Description of Artificial Sequence: Synthetic oligonucleotide
acaaccaggcuucggccaa

SEQ ID NO: 2253126 - RNA, 19 nt, Artificial Sequence
  Description of Artificial Sequence: Synthetic oligonucleotide
guucagaggucagcuguag

SEQ ID NO: 2253127 - RNA, 19 nt, Artificial Sequence
  Description of Artificial Sequence: Synthetic oligonucleotide
ccuucaccagcaauaggcc

SEQ ID NO: 2253128 - RNA, 19 nt, Artificial Sequence
  Description of Artificial Sequence: Synthetic oligonucleotide
accgccugggccgcaaaac

SEQ ID NO: 2253129 - RNA, 19 nt, Artificial Sequence
  Description of Artificial Sequence: Synthetic oligonucleotide
caaaguccccuguuuccuc

SEQ ID NO: 2253130 - RNA, 19 nt, Artificial Sequence
  Description of Artificial Sequence: Synthetic oligonucleotide
aguuuccugugaucuugga

SEQ ID NO: 2253131 - RNA, 19 nt, Artificial Sequence
  Description of Artificial Sequence: Synthetic oligonucleotide
uucggccuucaccagcaau

SEQ ID NO: 2253132 - RNA, 19 nt, Artificial Sequence
  Description of Artificial Sequence: Synthetic oligonucleotide
cucccagauucuguaacug

SEQ ID NO: 2253133 - RNA, 19 nt, Artificial Sequence
  Description of Artificial Sequence: Synthetic oligonucleotide
uccuuucggccuucaccag

SEQ ID NO: 2253134 - RNA, 19 nt, Artificial Sequence
  Description of Artificial Sequence: Synthetic oligonucleotide
agaugaggcccugaucaga

SEQ ID NO: 2253135 - RNA, 19 nt, Artificial Sequence
  Description of Artificial Sequence: Synthetic oligonucleotide
ugaguacagccugccuucc

SEQ ID NO: 2253136 - RNA, 19 nt, Artificial Sequence
  Description of Artificial Sequence: Synthetic oligonucleotide
aggccaaccucuucccaga

SEQ ID NO: 2253137 - RNA, 19 nt, Artificial Sequence
  Description of Artificial Sequence: Synthetic oligonucleotide
agcgcacacauggucccac

SEQ ID NO: 2253138 - RNA, 19 nt, Artificial Sequence
  Description of Artificial Sequence: Synthetic oligonucleotide
gauggacguggaauccaug

SEQ ID NO: 2253139 - RNA, 19 nt, Artificial Sequence
  Description of Artificial Sequence: Synthetic oligonucleotide
ugcccaugcccuugaguac

SEQ ID NO: 2253140 - RNA, 19 nt, Artificial Sequence
  Description of Artificial Sequence: Synthetic oligonucleotide
gucaguauccugagggcuc

SEQ ID NO: 2253141 - RNA, 19 nt, Artificial Sequence
  Description of Artificial Sequence: Synthetic oligonucleotide
cuguaggaaucggaccacc

SEQ ID NO: 2253142 - RNA, 19 nt, Artificial Sequence
  Description of Artificial Sequence: Synthetic oligonucleotide
ugugcaccgcguccacaca

SEQ ID NO: 2253143 - RNA, 19 nt, Artificial Sequence
  Description of Artificial Sequence: Synthetic oligonucleotide
guguuagagcucuccacaa

SEQ ID NO: 2253144 - RNA, 19 nt, Artificial Sequence
  Description of Artificial Sequence: Synthetic oligonucleotide
ccugugcuuuccaggagcg

SEQ ID NO: 2253145 - RNA, 19 nt, Artificial Sequence
  Description of Artificial Sequence: Synthetic oligonucleotide
aucggaccaccccacguau

SEQ ID NO: 2253146 - RNA, 19 nt, Artificial Sequence
  Description of Artificial Sequence: Synthetic oligonucleotide
ucggaccaccccacguaug

SEQ ID NO: 2253147 - RNA, 19 nt, Artificial Sequence
  Description of Artificial Sequence: Synthetic oligonucleotide
ggauguugccgagaucucc

SEQ ID NO: 2253148 - RNA, 19 nt, Artificial Sequence
  Description of Artificial Sequence: Synthetic oligonucleotide
cuugaguacagccugccuu

SEQ ID NO: 2253149 - RNA, 19 nt, Artificial Sequence
  Description of Artificial Sequence: Synthetic oligonucleotide
acuggccgcugcccaugcc

SEQ ID NO: 2253150 - RNA, 19 nt, Artificial Sequence
  Description of Artificial Sequence: Synthetic oligonucleotide
cccacagcuauugcaaucc

SEQ ID NO: 2253151 - RNA, 19 nt, Artificial Sequence
  Description of Artificial Sequence: Synthetic oligonucleotide
ggaaucggaccaccccacg

SEQ ID NO: 2253152 - RNA, 19 nt, Artificial Sequence
  Description of Artificial Sequence: Synthetic oligonucleotide
caaucaggcagaguucaga

SEQ ID NO: 2253153 - RNA, 19 nt, Artificial Sequence
  Description of Artificial Sequence: Synthetic oligonucleotide
gcagagcgugcaaugaugc

SEQ ID NO: 2253154 - RNA, 19 nt, Artificial Sequence
  Description of Artificial Sequence: Synthetic oligonucleotide
caucagccaggauguugcc

SEQ ID NO: 2253155 - RNA, 19 nt, Artificial Sequence
  Description of Artificial Sequence: Synthetic oligonucleotide
acguaugguguuagagcuc

SEQ ID NO: 2253156 - RNA, 19 nt, Artificial Sequence
  Description of Artificial Sequence: Synthetic oligonucleotide
gaagguggcucggccauca

SEQ ID NO: 2253157 - RNA, 19 nt, Artificial Sequence
  Description of Artificial Sequence: Synthetic oligonucleotide
caaucccuugugagauccc

SEQ ID NO: 2253158 - RNA, 19 nt, Artificial Sequence
  Description of Artificial Sequence: Synthetic oligonucleotide
ugguccccacagcuauugc

SEQ ID NO: 2253159 - RNA, 19 nt, Artificial Sequence
  Description of Artificial Sequence: Synthetic oligonucleotide
cuccagcgcacacaugguc

SEQ ID NO: 2253160 - RNA, 19 nt, Artificial Sequence
  Description of Artificial Sequence: Synthetic oligonucleotide
cagcaauaggccggccucg

SEQ ID NO: 2253161 - RNA, 19 nt, Artificial Sequence
  Description of Artificial Sequence: Synthetic oligonucleotide
uugccgagaucuccccggu

SEQ ID NO: 2253162 - RNA, 19 nt, Artificial Sequence
  Description of Artificial Sequence: Synthetic oligonucleotide
ggucaucugcacugcaaac

SEQ ID NO: 2253163 - RNA, 19 nt, Artificial Sequence
  Description of Artificial Sequence: Synthetic oligonucleotide
gaaucggaccaccccacgu

SEQ ID NO: 2253164 - RNA, 19 nt, Artificial Sequence
  Description of Artificial Sequence: Synthetic oligonucleotide
acaggccaaccucuuccca

SEQ ID NO: 2253165 - RNA, 19 nt, Artificial Sequence
  Description of Artificial Sequence: Synthetic oligonucleotide
cauacugauggacguggaa

SEQ ID NO: 2253166 - RNA, 19 nt, Artificial Sequence
  Description of Artificial Sequence: Synthetic oligonucleotide
augcccuugaguacagccu

SEQ ID NO: 2253167 - RNA, 19 nt, Artificial Sequence
  Description of Artificial Sequence: Synthetic oligonucleotide
gucaucugcacugcaaacu

SEQ ID NO: 2253168 - RNA, 19 nt, Artificial Sequence
  Description of Artificial Sequence: Synthetic oligonucleotide
auccggaagguggcucggc

SEQ ID NO: 2253169 - RNA, 19 nt, Artificial Sequence
  Description of Artificial Sequence: Synthetic oligonucleotide
gugagauccccauacugau

SEQ ID NO: 2253170 - RNA, 19 nt, Artificial Sequence
  Description of Artificial Sequence: Synthetic oligonucleotide
cucccucaucaacaaccag

SEQ ID NO: 2253171 - RNA, 19 nt, Artificial Sequence
  Description of Artificial Sequence: Synthetic oligonucleotide
gugccggucaguauccuga

SEQ ID NO: 2253172 - RNA, 19 nt, Artificial Sequence
  Description of Artificial Sequence: Synthetic oligonucleotide
caaacuccagcgcacacau

SEQ ID NO: 2253173 - RNA, 19 nt, Artificial Sequence
  Description of Artificial Sequence: Synthetic oligonucleotide
caaaacaguuaggguccag

SEQ ID NO: 2253174 - RNA, 19 nt, Artificial Sequence
  Description of Artificial Sequence: Synthetic oligonucleotide
caucaacaaccaggcuucg

SEQ ID NO: 2253175 - RNA, 19 nt, Artificial Sequence
  Description of Artificial Sequence: Synthetic oligonucleotide
gguccccacagcuauugca

SEQ ID NO: 2253176 - RNA, 19 nt, Artificial Sequence
  Description of Artificial Sequence: Synthetic oligonucleotide
aggauguugccgagaucuc

SEQ ID NO: 2253177 - RNA, 19 nt, Artificial Sequence
  Description of Artificial Sequence: Synthetic oligonucleotide
guuuauccucuauccggaa

SEQ ID NO: 2253178 - RNA, 19 nt, Artificial Sequence
  Description of Artificial Sequence: Synthetic oligonucleotide
ugccgagaucuccccggug

SEQ ID NO: 2253179 - RNA, 19 nt, Artificial Sequence
  Description of Artificial Sequence: Synthetic oligonucleotide
cuuggauaagggaugucuu

SEQ ID NO: 2253180 - RNA, 19 nt, Artificial Sequence
  Description of Artificial Sequence: Synthetic oligonucleotide
gcucccaugagauguucca

SEQ ID NO: 2253181 - RNA, 19 nt, Artificial Sequence
  Description of Artificial Sequence: Synthetic oligonucleotide
cccacguaugguguuagag

SEQ ID NO: 2253182 - RNA, 19 nt, Artificial Sequence
  Description of Artificial Sequence: Synthetic oligonucleotide
gggcugaguccuuucggcc

SEQ ID NO: 2253183 - RNA, 19 nt, Artificial Sequence
  Description of Artificial Sequence: Synthetic oligonucleotide
uccccucaaucaggcagag

SEQ ID NO: 2253184 - RNA, 19 nt, Artificial Sequence
  Description of Artificial Sequence: Synthetic oligonucleotide
aggccaucaaugguccccu

SEQ ID NO: 2253185 - RNA, 19 nt, Artificial Sequence
  Description of Artificial Sequence: Synthetic oligonucleotide
gauguuccaucaggguuaa

SEQ ID NO: 2253186 - RNA, 19 nt, Artificial Sequence
  Description of Artificial Sequence: Synthetic oligonucleotide
cacacagcucugacagguc

SEQ ID NO: 2253187 - RNA, 19 nt, Artificial Sequence
  Description of Artificial Sequence: Synthetic oligonucleotide
augccacaggccaaccucu

SEQ ID NO: 2253188 - RNA, 19 nt, Artificial Sequence
  Description of Artificial Sequence: Synthetic oligonucleotide
cacaccuucagcuguuuau

SEQ ID NO: 2253189 - RNA, 19 nt, Artificial Sequence
  Description of Artificial Sequence: Synthetic oligonucleotide
guccccacagcuauugcaa

SEQ ID NO: 2253190 - RNA, 19 nt, Artificial Sequence
  Description of Artificial Sequence: Synthetic oligonucleotide
ccuuucggccuucaccagc

SEQ ID NO: 2253191 - RNA, 19 nt, Artificial Sequence
  Description of Artificial Sequence: Synthetic oligonucleotide
caaugaugccacaggccaa

SEQ ID NO: 2253192 - RNA, 19 nt, Artificial Sequence
  Description of Artificial Sequence: Synthetic oligonucleotide
caggucaucugcacugcaa

SEQ ID NO: 2253193 - RNA, 19 nt, Artificial Sequence
  Description of Artificial Sequence: Synthetic oligonucleotide
accaccccacguauggugu

SEQ ID NO: 2253194 - RNA, 19 nt, Artificial Sequence
  Description of Artificial Sequence: Synthetic oligonucleotide
ucagggucuugugcaccgc

SEQ ID NO: 2253195 - RNA, 19 nt, Artificial Sequence
  Description of Artificial Sequence: Synthetic oligonucleotide
cuucuacacucuggacacc

SEQ ID NO: 2253196 - RNA, 19 nt, Artificial Sequence
  Description of Artificial Sequence: Synthetic oligonucleotide
ccugaucagaggugagcag

SEQ ID NO: 2253197 - RNA, 19 nt, Artificial Sequence
  Description of Artificial Sequence: Synthetic oligonucleotide
ccagcgcacacaugguccc

SEQ ID NO: 2253198 - RNA, 19 nt, Artificial Sequence
  Description of Artificial Sequence: Synthetic oligonucleotide
accccacguaugguguuag

SEQ ID NO: 2253199 - RNA, 19 nt, Artificial Sequence
  Description of Artificial Sequence: Synthetic oligonucleotide
cgucccgggaauccgaagc

SEQ ID NO: 2253200 - RNA, 19 nt, Artificial Sequence
  Description of Artificial Sequence: Synthetic oligonucleotide
ggguuaaaaugguccccac

SEQ ID NO: 2253201 - RNA, 19 nt, Artificial Sequence
  Description of Artificial Sequence: Synthetic oligonucleotide
caugagaugaggcccugau

SEQ ID NO: 2253202 - RNA, 19 nt, Artificial Sequence
  Description of Artificial Sequence: Synthetic oligonucleotide
gcuacugcagcucccagau

SEQ ID NO: 2253203 - RNA, 19 nt, Artificial Sequence
  Description of Artificial Sequence: Synthetic oligonucleotide
cacagcuauugcaaucccu

SEQ ID NO: 2253204 - RNA, 19 nt, Artificial Sequence
  Description of Artificial Sequence: Synthetic oligonucleotide
ucgcuccucccagauagua

SEQ ID NO: 2253205 - RNA, 19 nt, Artificial Sequence
  Description of Artificial Sequence: Synthetic oligonucleotide
aaaccgccugggccgcaaa

SEQ ID NO: 2253206 - RNA, 19 nt, Artificial Sequence
  Description of Artificial Sequence: Synthetic oligonucleotide
cuugcaccuccuggcuggg

SEQ ID NO: 2253207 - RNA, 19 nt, Artificial Sequence
  Description of Artificial Sequence: Synthetic oligonucleotide
aucccuugugagaucccca

SEQ ID NO: 2253208 - RNA, 19 nt, Artificial Sequence
  Description of Artificial Sequence: Synthetic oligonucleotide
caacaccauuugguucucc

SEQ ID NO: 2253209 - RNA, 19 nt, Artificial Sequence
  Description of Artificial Sequence: Synthetic oligonucleotide
gaagaguggucugcaccaa

SEQ ID NO: 2253210 - RNA, 19 nt, Artificial Sequence
  Description of Artificial Sequence: Synthetic oligonucleotide
acaugagaugaggcccuga

SEQ ID NO: 2253211 - RNA, 19 nt, Artificial Sequence
  Description of Artificial Sequence: Synthetic oligonucleotide
cuugugagauccccauacu

SEQ ID NO: 2253212 - RNA, 19 nt, Artificial Sequence
  Description of Artificial Sequence: Synthetic oligonucleotide
uuucggccuucaccagcaa

SEQ ID NO: 2253213 - RNA, 19 nt, Artificial Sequence
  Description of Artificial Sequence: Synthetic oligonucleotide
cugacaggucaucugcacu

SEQ ID NO: 2253214 - RNA, 19 nt, Artificial Sequence
  Description of Artificial Sequence: Synthetic oligonucleotide
cucggccaucagcaucagc

SEQ ID NO: 2253215 - RNA, 19 nt, Artificial Sequence
  Description of Artificial Sequence: Synthetic oligonucleotide
gcgugcaaugaugccacag

SEQ ID NO: 2253216 - RNA, 19 nt, Artificial Sequence
  Description of Artificial Sequence: Synthetic oligonucleotide
ggucagcuguaggaaucgg

SEQ ID NO: 2253217 - RNA, 19 nt, Artificial Sequence
  Description of Artificial Sequence: Synthetic oligonucleotide
cccggugccggucaguauc

SEQ ID NO: 2253218 - RNA, 19 nt, Artificial Sequence
  Description of Artificial Sequence: Synthetic oligonucleotide
ggucccaccgucccgggaa

SEQ ID NO: 2253219 - RNA, 19 nt, Artificial Sequence
  Description of Artificial Sequence: Synthetic oligonucleotide
agggucuugugcaccgcgu

SEQ ID NO: 2253220 - RNA, 19 nt, Artificial Sequence
  Description of Artificial Sequence: Synthetic oligonucleotide
ccaucacaagagcagaucu

SEQ ID NO: 2253221 - RNA, 19 nt, Artificial Sequence
  Description of Artificial Sequence: Synthetic oligonucleotide
gccaucacaagagcagauc

SEQ ID NO: 2253222 - RNA, 19 nt, Artificial Sequence
  Description of Artificial Sequence: Synthetic oligonucleotide
caccgcguccacacagcuc

SEQ ID NO: 2253223 - RNA, 19 nt, Artificial Sequence
  Description of Artificial Sequence: Synthetic oligonucleotide
cguggaauccaugcagccc

SEQ ID NO: 2253224 - RNA, 19 nt, Artificial Sequence
  Description of Artificial Sequence: Synthetic oligonucleotide
gggucuugugcaccgcguc

SEQ ID NO: 2253225 - RNA, 19 nt, Artificial Sequence
  Description of Artificial Sequence: Synthetic oligonucleotide
agaucugcuugggguucug

SEQ ID NO: 2253226 - RNA, 19 nt, Artificial Sequence
  Description of Artificial Sequence: Synthetic oligonucleotide
agcgugcaaugaugccaca

SEQ ID NO: 2253227 - RNA, 19 nt, Artificial Sequence
  Description of Artificial Sequence: Synthetic oligonucleotide
gccggucaguauccugagg

SEQ ID NO: 2253228 - RNA, 19 nt, Artificial Sequence
  Description of Artificial Sequence: Synthetic oligonucleotide
acuccagcgcacacauggu

SEQ ID NO: 2253229 - RNA, 19 nt, Artificial Sequence
  Description of Artificial Sequence: Synthetic oligonucleotide
ggcagaguucagaggucag

SEQ ID NO: 2253230 - RNA, 19 nt, Artificial Sequence
  Description of Artificial Sequence: Synthetic oligonucleotide
cgggaauccgaagccaucc

SEQ ID NO: 2253231 - RNA, 19 nt, Artificial Sequence
  Description of Artificial Sequence: Synthetic oligonucleotide
ggccaaccucuucccagag

SEQ ID NO: 2253232 - RNA, 19 nt, Artificial Sequence
  Description of Artificial Sequence: Synthetic oligonucleotide
ggcugggaagaguggucug

SEQ ID NO: 2253233 - RNA, 19 nt, Artificial Sequence
  Description of Artificial Sequence: Synthetic oligonucleotide
ccacagcuauugcaauccc

SEQ ID NO: 2253234 - RNA, 19 nt, Artificial Sequence
  Description of Artificial Sequence: Synthetic oligonucleotide
uccccggugccggucagua

SEQ ID NO: 2253235 - RNA, 19 nt, Artificial Sequence
  Description of Artificial Sequence: Synthetic oligonucleotide
auaggccggccucgcuccu

SEQ ID NO: 2253236 - RNA, 19 nt, Artificial Sequence
  Description of Artificial Sequence: Synthetic oligonucleotide
ggucaguauccugagggcu

SEQ ID NO: 2253237 - RNA, 19 nt, Artificial Sequence
  Description of Artificial Sequence: Synthetic oligonucleotide
cugcaaacuccagcgcaca

SEQ ID NO: 2253238 - RNA, 19 nt, Artificial Sequence
  Description of Artificial Sequence: Synthetic oligonucleotide
cggucaguauccugagggc

SEQ ID NO: 2253239 - RNA, 19 nt, Artificial Sequence
  Description of Artificial Sequence: Synthetic oligonucleotide
ggagcgcuugcaccuccug

SEQ ID NO: 2253240 - RNA, 19 nt, Artificial Sequence
  Description of Artificial Sequence: Synthetic oligonucleotide
ccgagaucuccccggugcc

SEQ ID NO: 2253241 - RNA, 19 nt, Artificial Sequence
  Description of Artificial Sequence: Synthetic oligonucleotide
ccggugccggucaguaucc

SEQ ID NO: 2253242 - RNA, 19 nt, Artificial Sequence
  Description of Artificial Sequence: Synthetic oligonucleotide
ccccacagcuauugcaauc

SEQ ID NO: 2253243 - RNA, 19 nt, Artificial Sequence
  Description of Artificial Sequence: Synthetic oligonucleotide
gccgcaaaacaguuagggu

SEQ ID NO: 2253244 - RNA, 19 nt, Artificial Sequence
  Description of Artificial Sequence: Synthetic oligonucleotide
ccugagggcucccaugaga

SEQ ID NO: 2253245 - RNA, 19 nt, Artificial Sequence
  Description of Artificial Sequence: Synthetic oligonucleotide
ccaaccucuucccagaguu

SEQ ID NO: 2253246 - RNA, 19 nt, Artificial Sequence
  Description of Artificial Sequence: Synthetic oligonucleotide
gaucuccccggugccgguc

SEQ ID NO: 2253247 - RNA, 19 nt, Artificial Sequence
  Description of Artificial Sequence: Synthetic oligonucleotide
ucaaaccgccugggccgca

SEQ ID NO: 2253248 - RNA, 19 nt, Artificial Sequence
  Description of Artificial Sequence: Synthetic oligonucleotide
caccgucccgggaauccga

SEQ ID NO: 2253249 - RNA, 19 nt, Artificial Sequence
  Description of Artificial Sequence: Synthetic oligonucleotide
gggccgcaaaacaguuagg

SEQ ID NO: 2253250 - RNA, 19 nt, Artificial Sequence
  Description of Artificial Sequence: Synthetic oligonucleotide
gcaaaguccccuguuuccu

SEQ ID NO: 2253251 - RNA, 19 nt, Artificial Sequence
  Description of Artificial Sequence: Synthetic oligonucleotide
cagcucccagauucuguaa

SEQ ID NO: 2253252 - RNA, 19 nt, Artificial Sequence
  Description of Artificial Sequence: Synthetic oligonucleotide
cccaccgucccgggaaucc

SEQ ID NO: 2253253 - RNA, 19 nt, Artificial Sequence
  Description of Artificial Sequence: Synthetic oligonucleotide
ccccuuucagggucuugug

SEQ ID NO: 2253254 - RNA, 19 nt, Artificial Sequence
  Description of Artificial Sequence: Synthetic oligonucleotide
uucccuggcccaggucauc

SEQ ID NO: 2253255 - RNA, 19 nt, Artificial Sequence
  Description of Artificial Sequence: Synthetic oligonucleotide
gcgcacacauggucccacc

SEQ ID NO: 2253256 - RNA, 19 nt, Artificial Sequence
  Description of Artificial Sequence: Synthetic oligonucleotide
guaugguguuagagcucuc

SEQ ID NO: 2253257 - RNA, 19 nt, Artificial Sequence
  Description of Artificial Sequence: Synthetic oligonucleotide
ccaucaggguuaaaauggu

SEQ ID NO: 2253258 - RNA, 19 nt, Artificial Sequence
  Description of Artificial Sequence: Synthetic oligonucleotide
caucaaugguccccucaau

SEQ ID NO: 2253259 - RNA, 19 nt, Artificial Sequence
  Description of Artificial Sequence: Synthetic oligonucleotide
aggagcgcuugcaccuccu

SEQ ID NO: 2253260 - RNA, 19 nt, Artificial Sequence
  Description of Artificial Sequence: Synthetic oligonucleotide
ccaggccaucaaugguccc

SEQ ID NO: 2253261 - RNA, 19 nt, Artificial Sequence
  Description of Artificial Sequence: Synthetic oligonucleotide
ccauacugauggacgugga

SEQ ID NO: 2253262 - RNA, 19 nt, Artificial Sequence
  Description of Artificial Sequence: Synthetic oligonucleotide
ggauguagucaaaccgccu

SEQ ID NO: 2253263 - RNA, 19 nt, Artificial Sequence
  Description of Artificial Sequence: Synthetic oligonucleotide
ccaccgucccgggaauccg

SEQ ID NO: 2253264 - RNA, 19 nt, Artificial Sequence
  Description of Artificial Sequence: Synthetic oligonucleotide
ccggccucgcuccucccag

SEQ ID NO: 2253265 - RNA, 19 nt, Artificial Sequence
  Description of Artificial Sequence: Synthetic oligonucleotide
ggcccugaucagaggugag

SEQ ID NO: 2253266 - RNA, 19 nt, Artificial Sequence
  Description of Artificial Sequence: Synthetic oligonucleotide
accgucccgggaauccgaa

SEQ ID NO: 2253267 - RNA, 19 nt, Artificial Sequence
  Description of Artificial Sequence: Synthetic oligonucleotide
ucccaccgucccgggaauc

SEQ ID NO: 2253268 - RNA, 19 nt, Artificial Sequence
  Description of Artificial Sequence: Synthetic oligonucleotide
cgagaucuccccggugccg

SEQ ID NO: 2253269 - RNA, 19 nt, Artificial Sequence
  Description of Artificial Sequence: Synthetic oligonucleotide
caccccuuucagggucuug

SEQ ID NO: 2253270 - RNA, 19 nt, Artificial Sequence
  Description of Artificial Sequence: Synthetic oligonucleotide
cguaugguguuagagcucu

SEQ ID NO: 2253271 - RNA, 19 nt, Artificial Sequence
  Description of Artificial Sequence: Synthetic oligonucleotide
cggccuucaccagcaauag

SEQ ID NO: 2253272 - RNA, 19 nt, Artificial Sequence
  Description of Artificial Sequence: Synthetic oligonucleotide
ccccauacugauggacgug

SEQ ID NO: 2253273 - RNA, 19 nt, Artificial Sequence
  Description of Artificial Sequence: Synthetic oligonucleotide
ccggaagguggcucggcca

SEQ ID NO: 2253274 - RNA, 19 nt, Artificial Sequence
  Description of Artificial Sequence: Synthetic oligonucleotide
agggcucccaugagauguu

SEQ ID NO: 2253275 - RNA, 19 nt, Artificial Sequence
  Description of Artificial Sequence: Synthetic oligonucleotide
gcugcccaugcccuugagu

SEQ ID NO: 2253276 - RNA, 19 nt, Artificial Sequence
  Description of Artificial Sequence: Synthetic oligonucleotide
cucccaugagauguuccau

SEQ ID NO: 2253277 - RNA, 19 nt, Artificial Sequence
  Description of Artificial Sequence: Synthetic oligonucleotide
caaaccgccugggccgcaa

SEQ ID NO: 2253278 - RNA, 19 nt, Artificial Sequence
  Description of Artificial Sequence: Synthetic oligonucleotide
ccgucccgggaauccgaag

SEQ ID NO: 2253279 - RNA, 19 nt, Artificial Sequence
  Description of Artificial Sequence: Synthetic oligonucleotide
ccgaagccauccuggaugu

SEQ ID NO: 2253280 - RNA, 19 nt, Artificial Sequence
  Description of Artificial Sequence: Synthetic oligonucleotide
ccucugcagguagauuuca

SEQ ID NO: 2253281 - RNA, 19 nt, Artificial Sequence
  Description of Artificial Sequence: Synthetic oligonucleotide
ggaagguggcucggccauc

SEQ ID NO: 2253282 - RNA, 19 nt, Artificial Sequence
  Description of Artificial Sequence: Synthetic oligonucleotide
caccccacguaugguguua

SEQ ID NO: 2253283 - RNA, 19 nt, Artificial Sequence
  Description of Artificial Sequence: Synthetic oligonucleotide
cccagauaguaaggccauc

SEQ ID NO: 2253284 - RNA, 19 nt, Artificial Sequence
  Description of Artificial Sequence: Synthetic oligonucleotide
cugccaccccuuucagggu

SEQ ID NO: 2253285 - RNA, 19 nt, Artificial Sequence
  Description of Artificial Sequence: Synthetic oligonucleotide
cucgcuccucccagauagu

SEQ ID NO: 2253286 - RNA, 19 nt, Artificial Sequence
  Description of Artificial Sequence: Synthetic oligonucleotide
ggccaucaaugguccccuc

SEQ ID NO: 2253287 - RNA, 19 nt, Artificial Sequence
  Description of Artificial Sequence: Synthetic oligonucleotide
gggcucccaugagauguuc

SEQ ID NO: 2253288 - RNA, 19 nt, Artificial Sequence
  Description of Artificial Sequence: Synthetic oligonucleotide
gcaauaggccggccucgcu

SEQ ID NO: 2253289 - RNA, 19 nt, Artificial Sequence
  Description of Artificial Sequence: Synthetic oligonucleotide
gcaccgcguccacacagcu

SEQ ID NO: 2253290 - RNA, 19 nt, Artificial Sequence
  Description of Artificial Sequence: Synthetic oligonucleotide
ccaagcaaaguccccuguu

SEQ ID NO: 2253291 - RNA, 19 nt, Artificial Sequence
  Description of Artificial Sequence: Synthetic oligonucleotide
gcgcuugcaccuccuggcu

SEQ ID NO: 2253292 - RNA, 19 nt, Artificial Sequence
  Description of Artificial Sequence: Synthetic oligonucleotide
gucccaccgucccgggaau

SEQ ID NO: 2253293 - RNA, 19 nt, Artificial Sequence
  Description of Artificial Sequence: Synthetic oligonucleotide
cccaagcaaaguccccugu

SEQ ID NO: 2253294 - RNA, 19 nt, Artificial Sequence
  Description of Artificial Sequence: Synthetic oligonucleotide
ccugggccgcaaaacaguu

SEQ ID NO: 2253295 - RNA, 19 nt, Artificial Sequence
  Description of Artificial Sequence: Synthetic oligonucleotide
cccgggaauccgaagccau

SEQ ID NO: 2253296 - RNA, 19 nt, Artificial Sequence
  Description of Artificial Sequence: Synthetic oligonucleotide
cccuugugagauccccaua

SEQ ID NO: 2253297 - RNA, 19 nt, Artificial Sequence
  Description of Artificial Sequence: Synthetic oligonucleotide
ccucaucaacaaccaggcu

SEQ ID NO: 2253298 - RNA, 19 nt, Artificial Sequence
  Description of Artificial Sequence: Synthetic oligonucleotide
ccccacguaugguguuaga

SEQ ID NO: 2253299 - RNA, 19 nt, Artificial Sequence
  Description of Artificial Sequence: Synthetic oligonucleotide
ggaccaccccacguauggu

SEQ ID NO: 2253300 - RNA, 19 nt, Artificial Sequence
  Description of Artificial Sequence: Synthetic oligonucleotide
ggccggccucgcuccuccc

SEQ ID NO: 2253301 - RNA, 19 nt, Artificial Sequence
  Description of Artificial Sequence: Synthetic oligonucleotide
ggccagcagagcgugcaau

SEQ ID NO: 2253302 - RNA, 19 nt, Artificial Sequence
  Description of Artificial Sequence: Synthetic oligonucleotide
cgcugcccaugcccuugag

SEQ ID NO: 2253303 - RNA, 19 nt, Artificial Sequence
  Description of Artificial Sequence: Synthetic oligonucleotide
gccugccuuccugugcuuu

SEQ ID NO: 2253304 - RNA, 19 nt, Artificial Sequence
  Description of Artificial Sequence: Synthetic oligonucleotide
cagcaucagccaggauguu

SEQ ID NO: 2253305 - RNA, 19 nt, Artificial Sequence
  Description of Artificial Sequence: Synthetic oligonucleotide
cggccucgcuccucccaga

SEQ ID NO: 2253306 - RNA, 19 nt, Artificial Sequence
  Description of Artificial Sequence: Synthetic oligonucleotide
gggcugggcugaguccuuu

SEQ ID NO: 2253307 - RNA, 19 nt, Artificial Sequence
  Description of Artificial Sequence: Synthetic oligonucleotide
ccccucaaucaggcagagu

SEQ ID NO: 2253308 - RNA, 19 nt, Artificial Sequence
  Description of Artificial Sequence: Synthetic oligonucleotide
ccccggugccggucaguau

SEQ ID NO: 2253309 - RNA, 19 nt, Artificial Sequence
  Description of Artificial Sequence: Synthetic oligonucleotide
auaaacauaaauuuggcuc

SEQ ID NO: 2253310 - RNA, 19 nt, Artificial Sequence
  Description of Artificial Sequence: Synthetic oligonucleotide
aaguccacuuaucagagcc

SEQ ID NO: 2253311 - RNA, 19 nt, Artificial Sequence
  Description of Artificial Sequence: Synthetic oligonucleotide
aauggaauaggccaucaug

SEQ ID NO: 2253312 - RNA, 19 nt, Artificial Sequence
  Description of Artificial Sequence: Synthetic oligonucleotide
uccaauuuguacaagauau

SEQ ID NO: 2253313 - RNA, 19 nt, Artificial Sequence
  Description of Artificial Sequence: Synthetic oligonucleotide
acuuauucccucuucaaac

SEQ ID NO: 2253314 - RNA, 19 nt, Artificial Sequence
  Description of Artificial Sequence: Synthetic oligonucleotide
agauaaaauaagcccaucg

SEQ ID NO: 2253315 - RNA, 19 nt, Artificial Sequence
  Description of Artificial Sequence: Synthetic oligonucleotide
uaaauauggguccuucugg

SEQ ID NO: 2253316 - RNA, 19 nt, Artificial Sequence
  Description of Artificial Sequence: Synthetic oligonucleotide
gauaaaauaagcccaucgc

SEQ ID NO: 2253317 - RNA, 19 nt, Artificial Sequence
  Description of Artificial Sequence: Synthetic oligonucleotide
uaaagcauagcauccaaag

SEQ ID NO: 2253318 - RNA, 19 nt, Artificial Sequence
  Description of Artificial Sequence: Synthetic oligonucleotide
aagaucaucccaaucaugg

SEQ ID NO: 2253319 - RNA, 19 nt, Artificial Sequence
  Description of Artificial Sequence: Synthetic oligonucleotide
augacaauaaauauggguc

SEQ ID NO: 2253320 - RNA, 19 nt, Artificial Sequence
  Description of Artificial Sequence: Synthetic oligonucleotide
acucaaauaaagcauagca

SEQ ID NO: 2253321 - RNA, 19 nt, Artificial Sequence
  Description of Artificial Sequence: Synthetic oligonucleotide
agagaauuguaacuccucc

SEQ ID NO: 2253322 - RNA, 19 nt, Artificial Sequence
  Description of Artificial Sequence: Synthetic oligonucleotide
aacccaaguucauggaugc

SEQ ID NO: 2253323 - RNA, 19 nt, Artificial Sequence
  Description of Artificial Sequence: Synthetic oligonucleotide
ucugcaucaauccagaguu

SEQ ID NO: 2253324 - RNA, 19 nt, Artificial Sequence
  Description of Artificial Sequence: Synthetic oligonucleotide
aacccauuuucauaugcac

SEQ ID NO: 2253325 - RNA, 19 nt, Artificial Sequence
  Description of Artificial Sequence: Synthetic oligonucleotide
aauuguaacuccuccugag

SEQ ID NO: 2253326 - RNA, 19 nt, Artificial Sequence
  Description of Artificial Sequence: Synthetic oligonucleotide
aaggcuagguuucauuggg

SEQ ID NO: 2253327 - RNA, 19 nt, Artificial Sequence
  Description of Artificial Sequence: Synthetic oligonucleotide
aaaaccagaaugcuguuau

SEQ ID NO: 2253328 - RNA, 19 nt, Artificial Sequence
  Description of Artificial Sequence: Synthetic oligonucleotide
aacacaugacaauaaauau

SEQ ID NO: 2253329 - RNA, 19 nt, Artificial Sequence
  Description of Artificial Sequence: Synthetic oligonucleotide
aaccaaucuucucauacag

SEQ ID NO: 2253330 - RNA, 19 nt, Artificial Sequence
  Description of Artificial Sequence: Synthetic oligonucleotide
uucauugggcaauagagca

SEQ ID NO: 2253331 - RNA, 19 nt, Artificial Sequence
  Description of Artificial Sequence: Synthetic oligonucleotide
uaaauuuggcuccaauuug

SEQ ID NO: 2253332 - RNA, 19 nt, Artificial Sequence
  Description of Artificial Sequence: Synthetic oligonucleotide
caugaaagcaccaacugac

SEQ ID NO: 2253333 - RNA, 19 nt, Artificial Sequence
  Description of Artificial Sequence: Synthetic oligonucleotide
auauuuuccaaacacuaga

SEQ ID NO: 2253334 - RNA, 19 nt, Artificial Sequence
  Description of Artificial Sequence: Synthetic oligonucleotide
auggaauaggccaucaugc

SEQ ID NO: 2253335 - RNA, 19 nt, Artificial Sequence
  Description of Artificial Sequence: Synthetic oligonucleotide
uucucauacagaaauccgc

SEQ ID NO: 2253336 - RNA, 19 nt, Artificial Sequence
  Description of Artificial Sequence: Synthetic oligonucleotide
aaugcuguuauugcugcac

SEQ ID NO: 2253337 - RNA, 19 nt, Artificial Sequence
  Description of Artificial Sequence: Synthetic oligonucleotide
uugaucugcaucaauccag

SEQ ID NO: 2253338 - RNA, 19 nt, Artificial Sequence
  Description of Artificial Sequence: Synthetic oligonucleotide
aguacauaaaucuguucuc

SEQ ID NO: 2253339 - RNA, 19 nt, Artificial Sequence
  Description of Artificial Sequence: Synthetic oligonucleotide
gaaaccaaucuucucauac

SEQ ID NO: 2253340 - RNA, 19 nt, Artificial Sequence
  Description of Artificial Sequence: Synthetic oligonucleotide
uccaagacaccaaagagaa

SEQ ID NO: 2253341 - RNA, 19 nt, Artificial Sequence
  Description of Artificial Sequence: Synthetic oligonucleotide
uauaaacauaaauuuggcu

SEQ ID NO: 2253342 - RNA, 19 nt, Artificial Sequence
  Description of Artificial Sequence: Synthetic oligonucleotide
uuagaucuucuucuucucg

SEQ ID NO: 2253343 - RNA, 19 nt, Artificial Sequence
  Description of Artificial Sequence: Synthetic oligonucleotide
aaacacuagagacgccagc

SEQ ID NO: 2253344 - RNA, 19 nt, Artificial Sequence
  Description of Artificial Sequence: Synthetic oligonucleotide
cugagauaaacauuccugc

SEQ ID NO: 2253345 - RNA, 19 nt, Artificial Sequence
  Description of Artificial Sequence: Synthetic oligonucleotide
uuuguacaagauauuuucc

SEQ ID NO: 2253346 - RNA, 19 nt, Artificial Sequence
  Description of Artificial Sequence: Synthetic oligonucleotide
uuucauugggcaauagagc

SEQ ID NO: 2253347 - RNA, 19 nt, Artificial Sequence
  Description of Artificial Sequence: Synthetic oligonucleotide
aacucaaauaaagcauagc

SEQ ID NO: 2253348 - RNA, 19 nt, Artificial Sequence
  Description of Artificial Sequence: Synthetic oligonucleotide
uucuucucgucuuugagug

SEQ ID NO: 2253349 - RNA, 19 nt, Artificial Sequence
  Description of Artificial Sequence: Synthetic oligonucleotide
cuaaccagaaaacacauga

SEQ ID NO: 2253350 - RNA, 19 nt, Artificial Sequence
  Description of Artificial Sequence: Synthetic oligonucleotide
agccauuuacaacuaacac

SEQ ID NO: 2253351 - RNA, 19 nt, Artificial Sequence
  Description of Artificial Sequence: Synthetic oligonucleotide
aauaaauauggguccuucu

SEQ ID NO: 2253352 - RNA, 19 nt, Artificial Sequence
  Description of Artificial Sequence: Synthetic oligonucleotide
ugggcaauagagcaguuug

SEQ ID NO: 2253353 - RNA, 19 nt, Artificial Sequence
  Description of Artificial Sequence: Synthetic oligonucleotide
guugggaugauacucauuc

SEQ ID NO: 2253354 - RNA, 19 nt, Artificial Sequence
  Description of Artificial Sequence: Synthetic oligonucleotide
ucuacuauucuaaccagaa

SEQ ID NO: 2253355 - RNA, 19 nt, Artificial Sequence
  Description of Artificial Sequence: Synthetic oligonucleotide
uuugagugcucccagagau

SEQ ID NO: 2253356 - RNA, 19 nt, Artificial Sequence
  Description of Artificial Sequence: Synthetic oligonucleotide
aaaccuauggcaucuacua

SEQ ID NO: 2253357 - RNA, 19 nt, Artificial Sequence
  Description of Artificial Sequence: Synthetic oligonucleotide
uucaaacccauuuucauau

SEQ ID NO: 2253358 - RNA, 19 nt, Artificial Sequence
  Description of Artificial Sequence: Synthetic oligonucleotide
uuauugcugcaccaaaacc

SEQ ID NO: 2253359 - RNA, 19 nt, Artificial Sequence
  Description of Artificial Sequence: Synthetic oligonucleotide
aagaccggagaugaguccc

SEQ ID NO: 2253360 - RNA, 19 nt, Artificial Sequence
  Description of Artificial Sequence: Synthetic oligonucleotide
ucuucucauacagaaaucc

SEQ ID NO: 2253361 - RNA, 19 nt, Artificial Sequence
  Description of Artificial Sequence: Synthetic oligonucleotide
aaagagcaaaguagcacgc

SEQ ID NO: 2253362 - RNA, 19 nt, Artificial Sequence
  Description of Artificial Sequence: Synthetic oligonucleotide
aaagcauagcauccaaaga

SEQ ID NO: 2253363 - RNA, 19 nt, Artificial Sequence
  Description of Artificial Sequence: Synthetic oligonucleotide
uuaucagagcccauaggcc

SEQ ID NO: 2253364 - RNA, 19 nt, Artificial Sequence
  Description of Artificial Sequence: Synthetic oligonucleotide
uggaaguugguccaagaca

SEQ ID NO: 2253365 - RNA, 19 nt, Artificial Sequence
  Description of Artificial Sequence: Synthetic oligonucleotide
aauccagaguuugcaaggc

SEQ ID NO: 2253366 - RNA, 19 nt, Artificial Sequence
  Description of Artificial Sequence: Synthetic oligonucleotide
gauauuuuccaaacacuag

SEQ ID NO: 2253367 - RNA, 19 nt, Artificial Sequence
  Description of Artificial Sequence: Synthetic oligonucleotide
uacucauuccagcagagaa

SEQ ID NO: 2253368 - RNA, 19 nt, Artificial Sequence
  Description of Artificial Sequence: Synthetic oligonucleotide
gaugauacucauuccagca

SEQ ID NO: 2253369 - RNA, 19 nt, Artificial Sequence
  Description of Artificial Sequence: Synthetic oligonucleotide
ugggaugauacucauucca

SEQ ID NO: 2253370 - RNA, 19 nt, Artificial Sequence
  Description of Artificial Sequence: Synthetic oligonucleotide
acagcuaagcaucuccggg

SEQ ID NO: 2253371 - RNA, 19 nt, Artificial Sequence
  Description of Artificial Sequence: Synthetic oligonucleotide
aauaaagcauagcauccaa

SEQ ID NO: 2253372 - RNA, 19 nt, Artificial Sequence
  Description of Artificial Sequence: Synthetic oligonucleotide
aacuccuccugagauaaac

SEQ ID NO: 2253373 - RNA, 19 nt, Artificial Sequence
  Description of Artificial Sequence: Synthetic oligonucleotide
aauagagcaguuuguuccu

SEQ ID NO: 2253374 - RNA, 19 nt, Artificial Sequence
  Description of Artificial Sequence: Synthetic oligonucleotide
uccucugugccaaugaggu

SEQ ID NO: 2253375 - RNA, 19 nt, Artificial Sequence
  Description of Artificial Sequence: Synthetic oligonucleotide
auaugcacagcuaagcauc

SEQ ID NO: 2253376 - RNA, 19 nt, Artificial Sequence
  Description of Artificial Sequence: Synthetic oligonucleotide
cuuauucccucuucaaacc

SEQ ID NO: 2253377 - RNA, 19 nt, Artificial Sequence
  Description of Artificial Sequence: Synthetic oligonucleotide
agucccaguguacuuauuc

SEQ ID NO: 2253378 - RNA, 19 nt, Artificial Sequence
  Description of Artificial Sequence: Synthetic oligonucleotide
ccagagauaaaauaagccc

SEQ ID NO: 2253379 - RNA, 19 nt, Artificial Sequence
  Description of Artificial Sequence: Synthetic oligonucleotide
aaagcugcugcccacucga

SEQ ID NO: 2253380 - RNA, 19 nt, Artificial Sequence
  Description of Artificial Sequence: Synthetic oligonucleotide
caauccagaguuugcaagg

SEQ ID NO: 2253381 - RNA, 19 nt, Artificial Sequence
  Description of Artificial Sequence: Synthetic oligonucleotide
cuucucauacagaaauccg

SEQ ID NO: 2253382 - RNA, 19 nt, Artificial Sequence
  Description of Artificial Sequence: Synthetic oligonucleotide
uguacaagauauuuuccaa

SEQ ID NO: 2253383 - RNA, 19 nt, Artificial Sequence
  Description of Artificial Sequence: Synthetic oligonucleotide
ugcacagcuaagcaucucc

SEQ ID NO: 2253384 - RNA, 19 nt, Artificial Sequence
  Description of Artificial Sequence: Synthetic oligonucleotide
ucccagagauaaaauaagc

SEQ ID NO: 2253385 - RNA, 19 nt, Artificial Sequence
  Description of Artificial Sequence: Synthetic oligonucleotide
uuccaaacacuagagacgc

SEQ ID NO: 2253386 - RNA, 19 nt, Artificial Sequence
  Description of Artificial Sequence: Synthetic oligonucleotide
augcaacccaaguucaugg

SEQ ID NO: 2253387 - RNA, 19 nt, Artificial Sequence
  Description of Artificial Sequence: Synthetic oligonucleotide
auaagcccaucgcaagucc

SEQ ID NO: 2253388 - RNA, 19 nt, Artificial Sequence
  Description of Artificial Sequence: Synthetic oligonucleotide
aacuaacaccaguaccagg

SEQ ID NO: 2253389 - RNA, 19 nt, Artificial Sequence
  Description of Artificial Sequence: Synthetic oligonucleotide
auauggguccuucuggaag

SEQ ID NO: 2253390 - RNA, 19 nt, Artificial Sequence
  Description of Artificial Sequence: Synthetic oligonucleotide
gaaaguugggaugauacuc

SEQ ID NO: 2253391 - RNA, 19 nt, Artificial Sequence
  Description of Artificial Sequence: Synthetic oligonucleotide
acaacuaacaccaguacca

SEQ ID NO: 2253392 - RNA, 19 nt, Artificial Sequence
  Description of Artificial Sequence: Synthetic oligonucleotide
uaucagagcccauaggccu

SEQ ID NO: 2253393 - RNA, 19 nt, Artificial Sequence
  Description of Artificial Sequence: Synthetic oligonucleotide
uuauucccucuucaaaccc

SEQ ID NO: 2253394 - RNA, 19 nt, Artificial Sequence
  Description of Artificial Sequence: Synthetic oligonucleotide
cagagauaaaauaagccca

SEQ ID NO: 2253395 - RNA, 19 nt, Artificial Sequence
  Description of Artificial Sequence: Synthetic oligonucleotide
aaauaaagcauagcaucca

SEQ ID NO: 2253396 - RNA, 19 nt, Artificial Sequence
  Description of Artificial Sequence: Synthetic oligonucleotide
caucaugcaacccaaguuc

SEQ ID NO: 2253397 - RNA, 19 nt, Artificial Sequence
  Description of Artificial Sequence: Synthetic oligonucleotide
ugguccaagacaccaaaga

SEQ ID NO: 2253398 - RNA, 19 nt, Artificial Sequence
  Description of Artificial Sequence: Synthetic oligonucleotide
ugacuuuuaaugugcaaaa

SEQ ID NO: 2253399 - RNA, 19 nt, Artificial Sequence
  Description of Artificial Sequence: Synthetic oligonucleotide
aacaagaccggagaugagu

SEQ ID NO: 2253400 - RNA, 19 nt, Artificial Sequence
  Description of Artificial Sequence: Synthetic oligonucleotide
gaauaggccaucaugcaac

SEQ ID NO: 2253401 - RNA, 19 nt, Artificial Sequence
  Description of Artificial Sequence: Synthetic oligonucleotide
caaacccauuuucauaugc

SEQ ID NO: 2253402 - RNA, 19 nt, Artificial Sequence
  Description of Artificial Sequence: Synthetic oligonucleotide
aucaugguauugcuggcuc

SEQ ID NO: 2253403 - RNA, 19 nt, Artificial Sequence
  Description of Artificial Sequence: Synthetic oligonucleotide
cuaaagagcaaaguagcac

SEQ ID NO: 2253404 - RNA, 19 nt, Artificial Sequence
  Description of Artificial Sequence: Synthetic oligonucleotide
aaaguugggaugauacuca

SEQ ID NO: 2253405 - RNA, 19 nt, Artificial Sequence
  Description of Artificial Sequence: Synthetic oligonucleotide
aacauuccugcuauaaaca

SEQ ID NO: 2253406 - RNA, 19 nt, Artificial Sequence
  Description of Artificial Sequence: Synthetic oligonucleotide
uguuauugcugcaccaaaa

SEQ ID NO: 2253407 - RNA, 19 nt, Artificial Sequence
  Description of Artificial Sequence: Synthetic oligonucleotide
uucuaaccagaaaacacau

SEQ ID NO: 2253408 - RNA, 19 nt, Artificial Sequence
  Description of Artificial Sequence: Synthetic oligonucleotide
guuauugcugcaccaaaac

SEQ ID NO: 2253409 - RNA, 19 nt, Artificial Sequence
  Description of Artificial Sequence: Synthetic oligonucleotide
ucauugggcaauagagcag

SEQ ID NO: 2253410 - RNA, 19 nt, Artificial Sequence
  Description of Artificial Sequence: Synthetic oligonucleotide
agguucugagcuuuagauc

SEQ ID NO: 2253411 - RNA, 19 nt, Artificial Sequence
  Description of Artificial Sequence: Synthetic oligonucleotide
auucuaaccagaaaacaca

SEQ ID NO: 2253412 - RNA, 19 nt, Artificial Sequence
  Description of Artificial Sequence: Synthetic oligonucleotide
acauggcacuaacaagacc

SEQ ID NO: 2253413 - RNA, 19 nt, Artificial Sequence
  Description of Artificial Sequence: Synthetic oligonucleotide
auaggccuugcaaagcugc

SEQ ID NO: 2253414 - RNA, 19 nt, Artificial Sequence
  Description of Artificial Sequence: Synthetic oligonucleotide
ucuaaccagaaaacacaug

SEQ ID NO: 2253415 - RNA, 19 nt, Artificial Sequence
  Description of Artificial Sequence: Synthetic oligonucleotide
aaagcaccaacugaccaca

SEQ ID NO: 2253416 - RNA, 19 nt, Artificial Sequence
  Description of Artificial Sequence: Synthetic oligonucleotide
aucgcaaguccacuuauca

SEQ ID NO: 2253417 - RNA, 19 nt, Artificial Sequence
  Description of Artificial Sequence: Synthetic oligonucleotide
aaagucucccagaugucuc

SEQ ID NO: 2253418 - RNA, 19 nt, Artificial Sequence
  Description of Artificial Sequence: Synthetic oligonucleotide
acacaugacaauaaauaug

SEQ ID NO: 2253419 - RNA, 19 nt, Artificial Sequence
  Description of Artificial Sequence: Synthetic oligonucleotide
cuaagcaucuccgggaaag

SEQ ID NO: 2253420 - RNA, 19 nt, Artificial Sequence
  Description of Artificial Sequence: Synthetic oligonucleotide
aagaauggaauaggccauc

SEQ ID NO: 2253421 - RNA, 19 nt, Artificial Sequence
  Description of Artificial Sequence: Synthetic oligonucleotide
ucccaguguacuuauuccc

SEQ ID NO: 2253422 - RNA, 19 nt, Artificial Sequence
  Description of Artificial Sequence: Synthetic oligonucleotide
agcauccaaagaucauccc

SEQ ID NO: 2253423 - RNA, 19 nt, Artificial Sequence
  Description of Artificial Sequence: Synthetic oligonucleotide
caacucaaauaaagcauag

SEQ ID NO: 2253424 - RNA, 19 nt, Artificial Sequence
  Description of Artificial Sequence: Synthetic oligonucleotide
aagccauuuacaacuaaca

SEQ ID NO: 2253425 - RNA, 19 nt, Artificial Sequence
  Description of Artificial Sequence: Synthetic oligonucleotide
aaaaccuauggcaucuacu

SEQ ID NO: 2253426 - RNA, 19 nt, Artificial Sequence
  Description of Artificial Sequence: Synthetic oligonucleotide
accacauggcacuaacaag

SEQ ID NO: 2253427 - RNA, 19 nt, Artificial Sequence
  Description of Artificial Sequence: Synthetic oligonucleotide
caaggcuagguuucauugg

SEQ ID NO: 2253428 - RNA, 19 nt, Artificial Sequence
  Description of Artificial Sequence: Synthetic oligonucleotide
aucugcaucaauccagagu

SEQ ID NO: 2253429 - RNA, 19 nt, Artificial Sequence
  Description of Artificial Sequence: Synthetic oligonucleotide
gcaucuacuauucuaacca

SEQ ID NO: 2253430 - RNA, 19 nt, Artificial Sequence
  Description of Artificial Sequence: Synthetic oligonucleotide
ugcaucaauccagaguuug

SEQ ID NO: 2253431 - RNA, 19 nt, Artificial Sequence
  Description of Artificial Sequence: Synthetic oligonucleotide
gaagccauuuacaacuaac

SEQ ID NO: 2253432 - RNA, 19 nt, Artificial Sequence
  Description of Artificial Sequence: Synthetic oligonucleotide
auccgcccagcauuggucc

SEQ ID NO: 2253433 - RNA, 19 nt, Artificial Sequence
  Description of Artificial Sequence: Synthetic oligonucleotide
auuggucccaugaaagcac

SEQ ID NO: 2253434 - RNA, 19 nt, Artificial Sequence
  Description of Artificial Sequence: Synthetic oligonucleotide
acgccagcaacucaaauaa

SEQ ID NO: 2253435 - RNA, 19 nt, Artificial Sequence
  Description of Artificial Sequence: Synthetic oligonucleotide
aaguugguccaagacacca

SEQ ID NO: 2253436 - RNA, 19 nt, Artificial Sequence
  Description of Artificial Sequence: Synthetic oligonucleotide
aaugguccaagaauggaau

SEQ ID NO: 2253437 - RNA, 19 nt, Artificial Sequence
  Description of Artificial Sequence: Synthetic oligonucleotide
uacagaaauccgcccagca

SEQ ID NO: 2253438 - RNA, 19 nt, Artificial Sequence
  Description of Artificial Sequence: Synthetic oligonucleotide
cuaacaagaccggagauga

SEQ ID NO: 2253439 - RNA, 19 nt, Artificial Sequence
  Description of Artificial Sequence: Synthetic oligonucleotide
caugacaauaaauaugggu

SEQ ID NO: 2253440 - RNA, 19 nt, Artificial Sequence
  Description of Artificial Sequence: Synthetic oligonucleotide
acuaacaagaccggagaug

SEQ ID NO: 2253441 - RNA, 19 nt, Artificial Sequence
  Description of Artificial Sequence: Synthetic oligonucleotide
aaauccgcccagcauuggu

SEQ ID NO: 2253442 - RNA, 19 nt, Artificial Sequence
  Description of Artificial Sequence: Synthetic oligonucleotide
gagauaaacauuccugcua

SEQ ID NO: 2253443 - RNA, 19 nt, Artificial Sequence
  Description of Artificial Sequence: Synthetic oligonucleotide
ugagguucugagcuuuaga

SEQ ID NO: 2253444 - RNA, 19 nt, Artificial Sequence
  Description of Artificial Sequence: Synthetic oligonucleotide
cagcaacucaaauaaagca

SEQ ID NO: 2253445 - RNA, 19 nt, Artificial Sequence
  Description of Artificial Sequence: Synthetic oligonucleotide
agcauuggucccaugaaag

SEQ ID NO: 2253446 - RNA, 19 nt, Artificial Sequence
  Description of Artificial Sequence: Synthetic oligonucleotide
uggaauaggccaucaugca

SEQ ID NO: 2253447 - RNA, 19 nt, Artificial Sequence
  Description of Artificial Sequence: Synthetic oligonucleotide
cucugugccaaugagguuc

SEQ ID NO: 2253448 - RNA, 19 nt, Artificial Sequence
  Description of Artificial Sequence: Synthetic oligonucleotide
caucuacuauucuaaccag

SEQ ID NO: 2253449 - RNA, 19 nt, Artificial Sequence
  Description of Artificial Sequence: Synthetic oligonucleotide
ccugagauaaacauuccug

SEQ ID NO: 2253450 - RNA, 19 nt, Artificial Sequence
  Description of Artificial Sequence: Synthetic oligonucleotide
ucgcaaguccacuuaucag

SEQ ID NO: 2253451 - RNA, 19 nt, Artificial Sequence
  Description of Artificial Sequence: Synthetic oligonucleotide
gauacucauuccagcagag

SEQ ID NO: 2253452 - RNA, 19 nt, Artificial Sequence
  Description of Artificial Sequence: Synthetic oligonucleotide
acaagaccggagaugaguc

SEQ ID NO: 2253453 - RNA, 19 nt, Artificial Sequence
  Description of Artificial Sequence: Synthetic oligonucleotide
ggaaguugguccaagacac

SEQ ID NO: 2253454 - RNA, 19 nt, Artificial Sequence
  Description of Artificial Sequence: Synthetic oligonucleotide
aauccgcccagcauugguc

SEQ ID NO: 2253455 - RNA, 19 nt, Artificial Sequence
  Description of Artificial Sequence: Synthetic oligonucleotide
uaugcacagcuaagcaucu

SEQ ID NO: 2253456 - RNA, 19 nt, Artificial Sequence
  Description of Artificial Sequence: Synthetic oligonucleotide
agcaacucaaauaaagcau

SEQ ID NO: 2253457 - RNA, 19 nt, Artificial Sequence
  Description of Artificial Sequence: Synthetic oligonucleotide
gguucugagcuuuagaucu

SEQ ID NO: 2253458 - RNA, 19 nt, Artificial Sequence
  Description of Artificial Sequence: Synthetic oligonucleotide
agaugucucucuugaaccu

SEQ ID NO: 2253459 - RNA, 19 nt, Artificial Sequence
  Description of Artificial Sequence: Synthetic oligonucleotide
cacuuaucagagcccauag

SEQ ID NO: 2253460 - RNA, 19 nt, Artificial Sequence
  Description of Artificial Sequence: Synthetic oligonucleotide
cacgcagcugugauuaaag

SEQ ID NO: 2253461 - RNA, 19 nt, Artificial Sequence
  Description of Artificial Sequence: Synthetic oligonucleotide
uagagcaguuuguuccucc

SEQ ID NO: 2253462 - RNA, 19 nt, Artificial Sequence
  Description of Artificial Sequence: Synthetic oligonucleotide
auacagaaauccgcccagc

SEQ ID NO: 2253463 - RNA, 19 nt, Artificial Sequence
  Description of Artificial Sequence: Synthetic oligonucleotide
ugcugcugacaccaguaca

SEQ ID NO: 2253464 - RNA, 19 nt, Artificial Sequence
  Description of Artificial Sequence: Synthetic oligonucleotide
gagcugacuuuuaaugugc

SEQ ID NO: 2253465 - RNA, 19 nt, Artificial Sequence
  Description of Artificial Sequence: Synthetic oligonucleotide
uugggaugauacucauucc

SEQ ID NO: 2253466 - RNA, 19 nt, Artificial Sequence
  Description of Artificial Sequence: Synthetic oligonucleotide
cacagcuaagcaucuccgg

SEQ ID NO: 2253467 - RNA, 19 nt, Artificial Sequence
  Description of Artificial Sequence: Synthetic oligonucleotide
gucccaguguacuuauucc

SEQ ID NO: 2253468 - RNA, 19 nt, Artificial Sequence
  Description of Artificial Sequence: Synthetic oligonucleotide
ucaugguauugcuggcucc

SEQ ID NO: 2253469 - RNA, 19 nt, Artificial Sequence
  Description of Artificial Sequence: Synthetic oligonucleotide
aauggggacagguccuaaa

SEQ ID NO: 2253470 - RNA, 19 nt, Artificial Sequence
  Description of Artificial Sequence: Synthetic oligonucleotide
ccagcaacucaaauaaagc

SEQ ID NO: 2253471 - RNA, 19 nt, Artificial Sequence
  Description of Artificial Sequence: Synthetic oligonucleotide
guacaagauauuuuccaaa

SEQ ID NO: 2253472 - RNA, 19 nt, Artificial Sequence
  Description of Artificial Sequence: Synthetic oligonucleotide
aaccuauggcaucuacuau

SEQ ID NO: 2253473 - RNA, 19 nt, Artificial Sequence
  Description of Artificial Sequence: Synthetic oligonucleotide
uaagcccaucgcaagucca

SEQ ID NO: 2253474 - RNA, 19 nt, Artificial Sequence
  Description of Artificial Sequence: Synthetic oligonucleotide
ggcaucuacuauucuaacc

SEQ ID NO: 2253475 - RNA, 19 nt, Artificial Sequence
  Description of Artificial Sequence: Synthetic oligonucleotide
aagcccaucgcaaguccac

SEQ ID NO: 2253476 - RNA, 19 nt, Artificial Sequence
  Description of Artificial Sequence: Synthetic oligonucleotide
ccagagcugacuuuuaaug

SEQ ID NO: 2253477 - RNA, 19 nt, Artificial Sequence
  Description of Artificial Sequence: Synthetic oligonucleotide
ugacaccaguacauaaauc

SEQ ID NO: 2253478 - RNA, 19 nt, Artificial Sequence
  Description of Artificial Sequence: Synthetic oligonucleotide
uccgggaaaguugggauga

SEQ ID NO: 2253479 - RNA, 19 nt, Artificial Sequence
  Description of Artificial Sequence: Synthetic oligonucleotide
ugcuguuauugcugcacca

SEQ ID NO: 2253480 - RNA, 19 nt, Artificial Sequence
  Description of Artificial Sequence: Synthetic oligonucleotide
uguaacuccuccugagaua

SEQ ID NO: 2253481 - RNA, 19 nt, Artificial Sequence
  Description of Artificial Sequence: Synthetic oligonucleotide
ggaugauacucauuccagc

SEQ ID NO: 2253482 - RNA, 19 nt, Artificial Sequence
  Description of Artificial Sequence: Synthetic oligonucleotide
aaguugggaugauacucau

SEQ ID NO: 2253483 - RNA, 19 nt, Artificial Sequence
  Description of Artificial Sequence: Synthetic oligonucleotide
gcaaggcuagguuucauug

SEQ ID NO: 2253484 - RNA, 19 nt, Artificial Sequence
  Description of Artificial Sequence: Synthetic oligonucleotide
gacgccagcaacucaaaua

SEQ ID NO: 2253485 - RNA, 19 nt, Artificial Sequence
  Description of Artificial Sequence: Synthetic oligonucleotide
ucuccgggaaaguugggau

SEQ ID NO: 2253486 - RNA, 19 nt, Artificial Sequence
  Description of Artificial Sequence: Synthetic oligonucleotide
aguagcacgcagcugugau

SEQ ID NO: 2253487 - RNA, 19 nt, Artificial Sequence
  Description of Artificial Sequence: Synthetic oligonucleotide
agaguuugcaaggcuaggu

SEQ ID NO: 2253488 - RNA, 19 nt, Artificial Sequence
  Description of Artificial Sequence: Synthetic oligonucleotide
gagguucugagcuuuagau

SEQ ID NO: 2253489 - RNA, 19 nt, Artificial Sequence
  Description of Artificial Sequence: Synthetic oligonucleotide
cugacuuuuaaugugcaaa

SEQ ID NO: 2253490 - RNA, 19 nt, Artificial Sequence
  Description of Artificial Sequence: Synthetic oligonucleotide
caaaaccuauggcaucuac

SEQ ID NO: 2253491 - RNA, 19 nt, Artificial Sequence
  Description of Artificial Sequence: Synthetic oligonucleotide
acagaaauccgcccagcau

SEQ ID NO: 2253492 - RNA, 19 nt, Artificial Sequence
  Description of Artificial Sequence: Synthetic oligonucleotide
agagauaaaauaagcccau

SEQ ID NO: 2253493 - RNA, 19 nt, Artificial Sequence
  Description of Artificial Sequence: Synthetic oligonucleotide
cacuagagacgccagcaac

SEQ ID NO: 2253494 - RNA, 19 nt, Artificial Sequence
  Description of Artificial Sequence: Synthetic oligonucleotide
gggaaaguugggaugauac

SEQ ID NO: 2253495 - RNA, 19 nt, Artificial Sequence
  Description of Artificial Sequence: Synthetic oligonucleotide
cucaaauaaagcauagcau

SEQ ID NO: 2253496 - RNA, 19 nt, Artificial Sequence
  Description of Artificial Sequence: Synthetic oligonucleotide
cacauggcacuaacaagac

SEQ ID NO: 2253497 - RNA, 19 nt, Artificial Sequence
  Description of Artificial Sequence: Synthetic oligonucleotide
ugucucucuugaaccuucc

SEQ ID NO: 2253498 - RNA, 19 nt, Artificial Sequence
  Description of Artificial Sequence: Synthetic oligonucleotide
ugcaacccaaguucaugga

SEQ ID NO: 2253499 - RNA, 19 nt, Artificial Sequence
  Description of Artificial Sequence: Synthetic oligonucleotide
ucccaaucaugguauugcu

SEQ ID NO: 2253500 - RNA, 19 nt, Artificial Sequence
  Description of Artificial Sequence: Synthetic oligonucleotide
ucgucuuugagugcuccca

SEQ ID NO: 2253501 - RNA, 19 nt, Artificial Sequence
  Description of Artificial Sequence: Synthetic oligonucleotide
ccaaagagaauuguaacuc

SEQ ID NO: 2253502 - RNA, 19 nt, Artificial Sequence
  Description of Artificial Sequence: Synthetic oligonucleotide
agaugagucccaguguacu

SEQ ID NO: 2253503 - RNA, 19 nt, Artificial Sequence
  Description of Artificial Sequence: Synthetic oligonucleotide
caagaccggagaugagucc

SEQ ID NO: 2253504 - RNA, 19 nt, Artificial Sequence
  Description of Artificial Sequence: Synthetic oligonucleotide
aucuucucauacagaaauc

SEQ ID NO: 2253505 - RNA, 19 nt, Artificial Sequence
  Description of Artificial Sequence: Synthetic oligonucleotide
caaagcugcugcccacucg

SEQ ID NO: 2253506 - RNA, 19 nt, Artificial Sequence
  Description of Artificial Sequence: Synthetic oligonucleotide
caugcaacccaaguucaug

SEQ ID NO: 2253507 - RNA, 19 nt, Artificial Sequence
  Description of Artificial Sequence: Synthetic oligonucleotide
uagcacgcagcugugauua

SEQ ID NO: 2253508 - RNA, 19 nt, Artificial Sequence
  Description of Artificial Sequence: Synthetic oligonucleotide
uuugcaaggcuagguuuca

SEQ ID NO: 2253509 - RNA, 19 nt, Artificial Sequence
  Description of Artificial Sequence: Synthetic oligonucleotide
acaugacaauaaauauggg

SEQ ID NO: 2253510 - RNA, 19 nt, Artificial Sequence
  Description of Artificial Sequence: Synthetic oligonucleotide
caccaacugaccacauggc

SEQ ID NO: 2253511 - RNA, 19 nt, Artificial Sequence
  Description of Artificial Sequence: Synthetic oligonucleotide
guuugcaaggcuagguuuc

SEQ ID NO: 2253512 - RNA, 19 nt, Artificial Sequence
  Description of Artificial Sequence: Synthetic oligonucleotide
aucaucccaaucaugguau

SEQ ID NO: 2253513 - RNA, 19 nt, Artificial Sequence
  Description of Artificial Sequence: Synthetic oligonucleotide
cagguccuaaagagcaaag

SEQ ID NO: 2253514 - RNA, 19 nt, Artificial Sequence
  Description of Artificial Sequence: Synthetic oligonucleotide
ggcacuaacaagaccggag

SEQ ID NO: 2253515 - RNA, 19 nt, Artificial Sequence
  Description of Artificial Sequence: Synthetic oligonucleotide
agaaauccgcccagcauug

SEQ ID NO: 2253516 - RNA, 19 nt, Artificial Sequence
  Description of Artificial Sequence: Synthetic oligonucleotide
cagaaaacacaugacaaua

SEQ ID NO: 2253517 - RNA, 19 nt, Artificial Sequence
  Description of Artificial Sequence: Synthetic oligonucleotide
auaggccaucaugcaaccc

SEQ ID NO: 2253518 - RNA, 19 nt, Artificial Sequence
  Description of Artificial Sequence: Synthetic oligonucleotide
gguccuaaagagcaaagua

SEQ ID NO: 2253519 - RNA, 19 nt, Artificial Sequence
  Description of Artificial Sequence: Synthetic oligonucleotide
aaaguagcacgcagcugug

SEQ ID NO: 2253520 - RNA, 19 nt, Artificial Sequence
  Description of Artificial Sequence: Synthetic oligonucleotide
cauuggucccaugaaagca

SEQ ID NO: 2253521 - RNA, 19 nt, Artificial Sequence
  Description of Artificial Sequence: Synthetic oligonucleotide
agcagagaagccauuuaca

SEQ ID NO: 2253522 - RNA, 19 nt, Artificial Sequence
  Description of Artificial Sequence: Synthetic oligonucleotide
cauaggccuugcaaagcug

SEQ ID NO: 2253523 - RNA, 19 nt, Artificial Sequence
  Description of Artificial Sequence: Synthetic oligonucleotide
agcaccaacugaccacaug

SEQ ID NO: 2253524 - RNA, 19 nt, Artificial Sequence
  Description of Artificial Sequence: Synthetic oligonucleotide
cugcaccaaaaccuauggc

SEQ ID NO: 2253525 - RNA, 19 nt, Artificial Sequence
  Description of Artificial Sequence: Synthetic oligonucleotide
uggcaucuacuauucuaac

SEQ ID NO: 2253526 - RNA, 19 nt, Artificial Sequence
  Description of Artificial Sequence: Synthetic oligonucleotide
gucccaugaaagcaccaac

SEQ ID NO: 2253527 - RNA, 19 nt, Artificial Sequence
  Description of Artificial Sequence: Synthetic oligonucleotide
aucaugcaacccaaguuca

SEQ ID NO: 2253528 - RNA, 19 nt, Artificial Sequence
  Description of Artificial Sequence: Synthetic oligonucleotide
gcauccaaagaucauccca

SEQ ID NO: 2253529 - RNA, 19 nt, Artificial Sequence
  Description of Artificial Sequence: Synthetic oligonucleotide
ucucgucuuugagugcucc

SEQ ID NO: 2253530 - RNA, 19 nt, Artificial Sequence
  Description of Artificial Sequence: Synthetic oligonucleotide
agcuaagcaucuccgggaa

SEQ ID NO: 2253531 - RNA, 19 nt, Artificial Sequence
  Description of Artificial Sequence: Synthetic oligonucleotide
ucaugcaacccaaguucau

SEQ ID NO: 2253532 - RNA, 19 nt, Artificial Sequence
  Description of Artificial Sequence: Synthetic oligonucleotide
gcaucuccgggaaaguugg

SEQ ID NO: 2253533 - RNA, 19 nt, Artificial Sequence
  Description of Artificial Sequence: Synthetic oligonucleotide
uucauggaugcugcugaca

SEQ ID NO: 2253534 - RNA, 19 nt, Artificial Sequence
  Description of Artificial Sequence: Synthetic oligonucleotide
acccauuuucauaugcaca

SEQ ID NO: 2253535 - RNA, 19 nt, Artificial Sequence
  Description of Artificial Sequence: Synthetic oligonucleotide
cugugucuugaucugcauc

SEQ ID NO: 2253536 - RNA, 19 nt, Artificial Sequence
  Description of Artificial Sequence: Synthetic oligonucleotide
gggaugauacucauuccag

SEQ ID NO: 2253537 - RNA, 19 nt, Artificial Sequence
  Description of Artificial Sequence: Synthetic oligonucleotide
ugcaaggcuagguuucauu

SEQ ID NO: 2253538 - RNA, 19 nt, Artificial Sequence
  Description of Artificial Sequence: Synthetic oligonucleotide
ggccuugcaaagcugcugc

SEQ ID NO: 2253539 - RNA, 19 nt, Artificial Sequence
  Description of Artificial Sequence: Synthetic oligonucleotide
gguuucauugggcaauaga

SEQ ID NO: 2253540 - RNA, 19 nt, Artificial Sequence
  Description of Artificial Sequence: Synthetic oligonucleotide
agagacgccagcaacucaa

SEQ ID NO: 2253541 - RNA, 19 nt, Artificial Sequence
  Description of Artificial Sequence: Synthetic oligonucleotide
gaaagucucccagaugucu

SEQ ID NO: 2253542 - RNA, 19 nt, Artificial Sequence
  Description of Artificial Sequence: Synthetic oligonucleotide
guacuuauucccucuucaa

SEQ ID NO: 2253543 - RNA, 19 nt, Artificial Sequence
  Description of Artificial Sequence: Synthetic oligonucleotide
auccagaguuugcaaggcu

SEQ ID NO: 2253544 - RNA, 19 nt, Artificial Sequence
  Description of Artificial Sequence: Synthetic oligonucleotide
uccaaacacuagagacgcc

SEQ ID NO: 2253545 - RNA, 19 nt, Artificial Sequence
  Description of Artificial Sequence: Synthetic oligonucleotide
aauuuggcuccaauuugua

SEQ ID NO: 2253546 - RNA, 19 nt, Artificial Sequence
  Description of Artificial Sequence: Synthetic oligonucleotide
auggcacuaacaagaccgg

SEQ ID NO: 2253547 - RNA, 19 nt, Artificial Sequence
  Description of Artificial Sequence: Synthetic oligonucleotide
cucgucuuugagugcuccc

SEQ ID NO: 2253548 - RNA, 19 nt, Artificial Sequence
  Description of Artificial Sequence: Synthetic oligonucleotide
cuccgggaaaguugggaug

SEQ ID NO: 2253549 - RNA, 19 nt, Artificial Sequence
  Description of Artificial Sequence: Synthetic oligonucleotide
cugcuaucacagcuccagg

SEQ ID NO: 2253550 - RNA, 19 nt, Artificial Sequence
  Description of Artificial Sequence: Synthetic oligonucleotide
agguccuaaagagcaaagu

SEQ ID NO: 2253551 - RNA, 19 nt, Artificial Sequence
  Description of Artificial Sequence: Synthetic oligonucleotide
aggcuagguuucauugggc

SEQ ID NO: 2253552 - RNA, 19 nt, Artificial Sequence
  Description of Artificial Sequence: Synthetic oligonucleotide
aguguacuuauucccucuu

SEQ ID NO: 2253553 - RNA, 19 nt, Artificial Sequence
  Description of Artificial Sequence: Synthetic oligonucleotide
gcauuggucccaugaaagc

SEQ ID NO: 2253554 - RNA, 19 nt, Artificial Sequence
  Description of Artificial Sequence: Synthetic oligonucleotide
cuagagacgccagcaacuc

SEQ ID NO: 2253555 - RNA, 19 nt, Artificial Sequence
  Description of Artificial Sequence: Synthetic oligonucleotide
ugcccacucgaaaccaauc

SEQ ID NO: 2253556 - RNA, 19 nt, Artificial Sequence
  Description of Artificial Sequence: Synthetic oligonucleotide
agacaccaaagagaauugu

SEQ ID NO: 2253557 - RNA, 19 nt, Artificial Sequence
  Description of Artificial Sequence: Synthetic oligonucleotide
gcaauagagcaguuuguuc

SEQ ID NO: 2253558 - RNA, 19 nt, Artificial Sequence
  Description of Artificial Sequence: Synthetic oligonucleotide
gaaauccgcccagcauugg

SEQ ID NO: 2253559 - RNA, 19 nt, Artificial Sequence
  Description of Artificial Sequence: Synthetic oligonucleotide
ccuauggcaucuacuauuc

SEQ ID NO: 2253560 - RNA, 19 nt, Artificial Sequence
  Description of Artificial Sequence: Synthetic oligonucleotide
acgcagcugugauuaaagu

SEQ ID NO: 2253561 - RNA, 19 nt, Artificial Sequence
  Description of Artificial Sequence: Synthetic oligonucleotide
gcuaucacagcuccaggca

SEQ ID NO: 2253562 - RNA, 19 nt, Artificial Sequence
  Description of Artificial Sequence: Synthetic oligonucleotide
ucucccagaugucucucuu

SEQ ID NO: 2253563 - RNA, 19 nt, Artificial Sequence
  Description of Artificial Sequence: Synthetic oligonucleotide
ggcuccaauuuguacaaga

SEQ ID NO: 2253564 - RNA, 19 nt, Artificial Sequence
  Description of Artificial Sequence: Synthetic oligonucleotide
caucccaaucaugguauug

SEQ ID NO: 2253565 - RNA, 19 nt, Artificial Sequence
  Description of Artificial Sequence: Synthetic oligonucleotide
uaagcaucuccgggaaagu

SEQ ID NO: 2253566 - RNA, 19 nt, Artificial Sequence
  Description of Artificial Sequence: Synthetic oligonucleotide
auuuucauaugcacagcua

SEQ ID NO: 2253567 - RNA, 19 nt, Artificial Sequence
  Description of Artificial Sequence: Synthetic oligonucleotide
guguacuuauucccucuuc

SEQ ID NO: 2253568 - RNA, 19 nt, Artificial Sequence
  Description of Artificial Sequence: Synthetic oligonucleotide
auugcugcaccaaaaccua

SEQ ID NO: 2253569 - RNA, 19 nt, Artificial Sequence
  Description of Artificial Sequence: Synthetic oligonucleotide
ccacucgaaaccaaucuuc

SEQ ID NO: 2253570 - RNA, 19 nt, Artificial Sequence
  Description of Artificial Sequence: Synthetic oligonucleotide
cagcuaagcaucuccggga

SEQ ID NO: 2253571 - RNA, 19 nt, Artificial Sequence
  Description of Artificial Sequence: Synthetic oligonucleotide
cauuccugcuauaaacaua

SEQ ID NO: 2253572 - RNA, 19 nt, Artificial Sequence
  Description of Artificial Sequence: Synthetic oligonucleotide
caucgcaaguccacuuauc

SEQ ID NO: 2253573 - RNA, 19 nt, Artificial Sequence
  Description of Artificial Sequence: Synthetic oligonucleotide
uugagugcucccagagaua

SEQ ID NO: 2253574 - RNA, 19 nt, Artificial Sequence
  Description of Artificial Sequence: Synthetic oligonucleotide
ggaauaggccaucaugcaa

SEQ ID NO: 2253575 - RNA, 19 nt, Artificial Sequence
  Description of Artificial Sequence: Synthetic oligonucleotide
gcacuaacaagaccggaga

SEQ ID NO: 2253576 - RNA, 19 nt, Artificial Sequence
  Description of Artificial Sequence: Synthetic oligonucleotide
ccggagaugagucccagug

SEQ ID NO: 2253577 - RNA, 19 nt, Artificial Sequence
  Description of Artificial Sequence: Synthetic oligonucleotide
aucuccgggaaaguuggga

SEQ ID NO: 2253578 - RNA, 19 nt, Artificial Sequence
  Description of Artificial Sequence: Synthetic oligonucleotide
gguauugcuggcucccuuc

SEQ ID NO: 2253579 - RNA, 19 nt, Artificial Sequence
  Description of Artificial Sequence: Synthetic oligonucleotide
cucccagaugucucucuug

SEQ ID NO: 2253580 - RNA, 19 nt, Artificial Sequence
  Description of Artificial Sequence: Synthetic oligonucleotide
cuuugagugcucccagaga

SEQ ID NO: 2253581 - RNA, 19 nt, Artificial Sequence
  Description of Artificial Sequence: Synthetic oligonucleotide
guucauggaugcugcugac

SEQ ID NO: 2253582 - RNA, 19 nt, Artificial Sequence
  Description of Artificial Sequence: Synthetic oligonucleotide
aaguagcacgcagcuguga

SEQ ID NO: 2253583 - RNA, 19 nt, Artificial Sequence
  Description of Artificial Sequence: Synthetic oligonucleotide
gcccauaggccuugcaaag

SEQ ID NO: 2253584 - RNA, 19 nt, Artificial Sequence
  Description of Artificial Sequence: Synthetic oligonucleotide
aagcaucuccgggaaaguu

SEQ ID NO: 2253585 - RNA, 19 nt, Artificial Sequence
  Description of Artificial Sequence: Synthetic oligonucleotide
guccacuuaucagagccca

SEQ ID NO: 2253586 - RNA, 19 nt, Artificial Sequence
  Description of Artificial Sequence: Synthetic oligonucleotide
agccagagcugacuuuuaa

SEQ ID NO: 2253587 - RNA, 19 nt, Artificial Sequence
  Description of Artificial Sequence: Synthetic oligonucleotide
uggcacuaacaagaccgga

SEQ ID NO: 2253588 - RNA, 19 nt, Artificial Sequence
  Description of Artificial Sequence: Synthetic oligonucleotide
uugcugcaccaaaaccuau

SEQ ID NO: 2253589 - RNA, 19 nt, Artificial Sequence
  Description of Artificial Sequence: Synthetic oligonucleotide
gcacagcuaagcaucuccg

SEQ ID NO: 2253590 - RNA, 19 nt, Artificial Sequence
  Description of Artificial Sequence: Synthetic oligonucleotide
accaaucuucucauacaga

SEQ ID NO: 2253591 - RNA, 19 nt, Artificial Sequence
  Description of Artificial Sequence: Synthetic oligonucleotide
acuccuccugagauaaaca

SEQ ID NO: 2253592 - RNA, 19 nt, Artificial Sequence
  Description of Artificial Sequence: Synthetic oligonucleotide
gcauagcauccaaagauca

SEQ ID NO: 2253593 - RNA, 19 nt, Artificial Sequence
  Description of Artificial Sequence: Synthetic oligonucleotide
cagaaauccgcccagcauu

SEQ ID NO: 2253594 - RNA, 19 nt, Artificial Sequence
  Description of Artificial Sequence: Synthetic oligonucleotide
uugggcaauagagcaguuu

SEQ ID NO: 2253595 - RNA, 19 nt, Artificial Sequence
  Description of Artificial Sequence: Synthetic oligonucleotide
caucuccgggaaaguuggg

SEQ ID NO: 2253596 - RNA, 19 nt, Artificial Sequence
  Description of Artificial Sequence: Synthetic oligonucleotide
gucuuugagugcucccaga

SEQ ID NO: 2253597 - RNA, 19 nt, Artificial Sequence
  Description of Artificial Sequence: Synthetic oligonucleotide
cacucgaaaccaaucuucu

SEQ ID NO: 2253598 - RNA, 19 nt, Artificial Sequence
  Description of Artificial Sequence: Synthetic oligonucleotide
agacgccagcaacucaaau

SEQ ID NO: 2253599 - RNA, 19 nt, Artificial Sequence
  Description of Artificial Sequence: Synthetic oligonucleotide
aucacagcuccaggcaccu

SEQ ID NO: 2253600 - RNA, 19 nt, Artificial Sequence
  Description of Artificial Sequence: Synthetic oligonucleotide
agcugacuuuuaaugugca

SEQ ID NO: 2253601 - RNA, 19 nt, Artificial Sequence
  Description of Artificial Sequence: Synthetic oligonucleotide
cgcaaguccacuuaucaga

SEQ ID NO: 2253602 - RNA, 19 nt, Artificial Sequence
  Description of Artificial Sequence: Synthetic oligonucleotide
uucucgucuuugagugcuc

SEQ ID NO: 2253603 - RNA, 19 nt, Artificial Sequence
  Description of Artificial Sequence: Synthetic oligonucleotide
uccgcccagcauugguccc

SEQ ID NO: 2253604 - RNA, 19 nt, Artificial Sequence
  Description of Artificial Sequence: Synthetic oligonucleotide
cauugggcaauagagcagu

SEQ ID NO: 2253605 - RNA, 19 nt, Artificial Sequence
  Description of Artificial Sequence: Synthetic oligonucleotide
uagguuucauugggcaaua

SEQ ID NO: 2253606 - RNA, 19 nt, Artificial Sequence
  Description of Artificial Sequence: Synthetic oligonucleotide
caccaguaccaggagccag

SEQ ID NO: 2253607 - RNA, 19 nt, Artificial Sequence
  Description of Artificial Sequence: Synthetic oligonucleotide
cccaaucaugguauugcug

SEQ ID NO: 2253608 - RNA, 19 nt, Artificial Sequence
  Description of Artificial Sequence: Synthetic oligonucleotide
cagcauuggucccaugaaa

SEQ ID NO: 2253609 - RNA, 19 nt, Artificial Sequence
  Description of Artificial Sequence: Synthetic oligonucleotide
cugacaccaguacauaaau

SEQ ID NO: 2253610 - RNA, 19 nt, Artificial Sequence
  Description of Artificial Sequence: Synthetic oligonucleotide
ccaguacauaaaucuguuc

SEQ ID NO: 2253611 - RNA, 19 nt, Artificial Sequence
  Description of Artificial Sequence: Synthetic oligonucleotide
guaccaggagccagagcug

SEQ ID NO: 2253612 - RNA, 19 nt, Artificial Sequence
  Description of Artificial Sequence: Synthetic oligonucleotide
gaugagucccaguguacuu

SEQ ID NO: 2253613 - RNA, 19 nt, Artificial Sequence
  Description of Artificial Sequence: Synthetic oligonucleotide
gaccggagaugagucccag

SEQ ID NO: 2253614 - RNA, 19 nt, Artificial Sequence
  Description of Artificial Sequence: Synthetic oligonucleotide
agagcccauaggccuugca

SEQ ID NO: 2253615 - RNA, 19 nt, Artificial Sequence
  Description of Artificial Sequence: Synthetic oligonucleotide
agguuucauugggcaauag

SEQ ID NO: 2253616 - RNA, 19 nt, Artificial Sequence
  Description of Artificial Sequence: Synthetic oligonucleotide
uggcuccaauuuguacaag

SEQ ID NO: 2253617 - RNA, 19 nt, Artificial Sequence
  Description of Artificial Sequence: Synthetic oligonucleotide
gcuagguuucauugggcaa

SEQ ID NO: 2253618 - RNA, 19 nt, Artificial Sequence
  Description of Artificial Sequence: Synthetic oligonucleotide
accggagaugagucccagu

SEQ ID NO: 2253619 - RNA, 19 nt, Artificial Sequence
  Description of Artificial Sequence: Synthetic oligonucleotide
cauagcauccaaagaucau

SEQ ID NO: 2253620 - RNA, 19 nt, Artificial Sequence
  Description of Artificial Sequence: Synthetic oligonucleotide
caguaccaggagccagagc

SEQ ID NO: 2253621 - RNA, 19 nt, Artificial Sequence
  Description of Artificial Sequence: Synthetic oligonucleotide
guauugcuggcucccuucu

SEQ ID NO: 2253622 - RNA, 19 nt, Artificial Sequence
  Description of Artificial Sequence: Synthetic oligonucleotide
caguguacuuauucccucu

SEQ ID NO: 2253623 - RNA, 19 nt, Artificial Sequence
  Description of Artificial Sequence: Synthetic oligonucleotide
gcugacaccaguacauaaa

SEQ ID NO: 2253624 - RNA, 19 nt, Artificial Sequence
  Description of Artificial Sequence: Synthetic oligonucleotide
augguauugcuggcucccu

SEQ ID NO: 2253625 - RNA, 19 nt, Artificial Sequence
  Description of Artificial Sequence: Synthetic oligonucleotide
aggagccagagcugacuuu

SEQ ID NO: 2253626 - RNA, 19 nt, Artificial Sequence
  Description of Artificial Sequence: Synthetic oligonucleotide
aacugaccacauggcacua

SEQ ID NO: 2253627 - RNA, 19 nt, Artificial Sequence
  Description of Artificial Sequence: Synthetic oligonucleotide
ccuccucugugccaaugag

SEQ ID NO: 2253628 - RNA, 19 nt, Artificial Sequence
  Description of Artificial Sequence: Synthetic oligonucleotide
gacagguccuaaagagcaa

SEQ ID NO: 2253629 - RNA, 19 nt, Artificial Sequence
  Description of Artificial Sequence: Synthetic oligonucleotide
cccagcauuggucccauga

SEQ ID NO: 2253630 - RNA, 19 nt, Artificial Sequence
  Description of Artificial Sequence: Synthetic oligonucleotide
agcccaucgcaaguccacu

SEQ ID NO: 2253631 - RNA, 19 nt, Artificial Sequence
  Description of Artificial Sequence: Synthetic oligonucleotide
acugaccacauggcacuaa

SEQ ID NO: 2253632 - RNA, 19 nt, Artificial Sequence
  Description of Artificial Sequence: Synthetic oligonucleotide
gccaucaugcaacccaagu

SEQ ID NO: 2253633 - RNA, 19 nt, Artificial Sequence
  Description of Artificial Sequence: Synthetic oligonucleotide
uugcaaggcuagguuucau

SEQ ID NO: 2253634 - RNA, 19 nt, Artificial Sequence
  Description of Artificial Sequence: Synthetic oligonucleotide
agaccggagaugaguccca

SEQ ID NO: 2253635 - RNA, 19 nt, Artificial Sequence
  Description of Artificial Sequence: Synthetic oligonucleotide
cccauaggccuugcaaagc

SEQ ID NO: 2253636 - RNA, 19 nt, Artificial Sequence
  Description of Artificial Sequence: Synthetic oligonucleotide
cgucuuugagugcucccag

SEQ ID NO: 2253637 - RNA, 19 nt, Artificial Sequence
  Description of Artificial Sequence: Synthetic oligonucleotide
caguuuguuccuccucugu

SEQ ID NO: 2253638 - RNA, 19 nt, Artificial Sequence
  Description of Artificial Sequence: Synthetic oligonucleotide
ggucccaugaaagcaccaa

SEQ ID NO: 2253639 - RNA, 19 nt, Artificial Sequence
  Description of Artificial Sequence: Synthetic oligonucleotide
acccaaguucauggaugcu

SEQ ID NO: 2253640 - RNA, 19 nt, Artificial Sequence
  Description of Artificial Sequence: Synthetic oligonucleotide
aagcaccaacugaccacau

SEQ ID NO: 2253641 - RNA, 19 nt, Artificial Sequence
  Description of Artificial Sequence: Synthetic oligonucleotide
gcccacucgaaaccaaucu

SEQ ID NO: 2253642 - RNA, 19 nt, Artificial Sequence
  Description of Artificial Sequence: Synthetic oligonucleotide
agcacgcagcugugauuaa

SEQ ID NO: 2253643 - RNA, 19 nt, Artificial Sequence
  Description of Artificial Sequence: Synthetic oligonucleotide
gagacgccagcaacucaaa

SEQ ID NO: 2253644 - RNA, 19 nt, Artificial Sequence
  Description of Artificial Sequence: Synthetic oligonucleotide
gcuggcucccuucuuuucu

SEQ ID NO: 2253645 - RNA, 19 nt, Artificial Sequence
  Description of Artificial Sequence: Synthetic oligonucleotide
ccaguaccaggagccagag

SEQ ID NO: 2253646 - RNA, 19 nt, Artificial Sequence
  Description of Artificial Sequence: Synthetic oligonucleotide
ccagcauuggucccaugaa

SEQ ID NO: 2253647 - RNA, 19 nt, Artificial Sequence
  Description of Artificial Sequence: Synthetic oligonucleotide
auugggcaauagagcaguu

SEQ ID NO: 2253648 - RNA, 19 nt, Artificial Sequence
  Description of Artificial Sequence: Synthetic oligonucleotide
ggagccagagcugacuuuu

SEQ ID NO: 2253649 - RNA, 19 nt, Artificial Sequence
  Description of Artificial Sequence: Synthetic oligonucleotide
gccagagcugacuuuuaau

SEQ ID NO: 2253650 - RNA, 19 nt, Artificial Sequence
  Description of Artificial Sequence: Synthetic oligonucleotide
cagagcccauaggccuugc

SEQ ID NO: 2253651 - RNA, 19 nt, Artificial Sequence
  Description of Artificial Sequence: Synthetic oligonucleotide
ccaucaugcaacccaaguu

SEQ ID NO: 2253652 - RNA, 19 nt, Artificial Sequence
  Description of Artificial Sequence: Synthetic oligonucleotide
gcuaagcaucuccgggaaa

SEQ ID NO: 2253653 - RNA, 19 nt, Artificial Sequence
  Description of Artificial Sequence: Synthetic oligonucleotide
gagugcucccagagauaaa

SEQ ID NO: 2253654 - RNA, 19 nt, Artificial Sequence
  Description of Artificial Sequence: Synthetic oligonucleotide
ccaauuuguacaagauauu

SEQ ID NO: 2253655 - RNA, 19 nt, Artificial Sequence
  Description of Artificial Sequence: Synthetic oligonucleotide
cugcccacucgaaaccaau

SEQ ID NO: 2253656 - RNA, 19 nt, Artificial Sequence
  Description of Artificial Sequence: Synthetic oligonucleotide
cugcugacaccaguacaua

SEQ ID NO: 2253657 - RNA, 19 nt, Artificial Sequence
  Description of Artificial Sequence: Synthetic oligonucleotide
gggcaauagagcaguuugu

SEQ ID NO: 2253658 - RNA, 19 nt, Artificial Sequence
  Description of Artificial Sequence: Synthetic oligonucleotide
ccacuuaucagagcccaua

SEQ ID NO: 2253659 - RNA, 19 nt, Artificial Sequence
  Description of Artificial Sequence: Synthetic oligonucleotide
gcacgcagcugugauuaaa

SEQ ID NO: 2253660 - RNA, 19 nt, Artificial Sequence
  Description of Artificial Sequence: Synthetic oligonucleotide
cccaucgcaaguccacuua

SEQ ID NO: 2253661 - RNA, 19 nt, Artificial Sequence
  Description of Artificial Sequence: Synthetic oligonucleotide
gugcucccagagauaaaau

SEQ ID NO: 2253662 - RNA, 19 nt, Artificial Sequence
  Description of Artificial Sequence: Synthetic oligonucleotide
cugcaucaauccagaguuu

SEQ ID NO: 2253663 - RNA, 19 nt, Artificial Sequence
  Description of Artificial Sequence: Synthetic oligonucleotide
ccaucgcaaguccacuuau

SEQ ID NO: 2253664 - RNA, 19 nt, Artificial Sequence
  Description of Artificial Sequence: Synthetic oligonucleotide
cccacucgaaaccaaucuu

SEQ ID NO: 2253665 - RNA, 19 nt, Artificial Sequence
  Description of Artificial Sequence: Synthetic oligonucleotide
gcccaucgcaaguccacuu

SEQ ID NO: 2253666 - RNA, 19 nt, Artificial Sequence
  Description of Artificial Sequence: Synthetic oligonucleotide
caggcaccugugucuugau

SEQ ID NO: 2253667 - RNA, 19 nt, Artificial Sequence
  Description of Artificial Sequence: Synthetic oligonucleotide
ccaagacaccaaagagaau

SEQ ID NO: 2253668 - RNA, 19 nt, Artificial Sequence
  Description of Artificial Sequence: Synthetic oligonucleotide
ccgcccagcauugguccca

SEQ ID NO: 2253669 - RNA, 19 nt, Artificial Sequence
  Description of Artificial Sequence: Synthetic oligonucleotide
cgggaaaguugggaugaua

SEQ ID NO: 2253670 - RNA, 19 nt, Artificial Sequence
  Description of Artificial Sequence: Synthetic oligonucleotide
ccgggaaaguugggaugau

SEQ ID NO: 2253671 - RNA, 19 nt, Artificial Sequence
  Description of Artificial Sequence: Synthetic oligonucleotide
aaaugaguccuccaaagcc

SEQ ID NO: 2253672 - RNA, 19 nt, Artificial Sequence
  Description of Artificial Sequence: Synthetic oligonucleotide
uauauuuaagacccgaggg

SEQ ID NO: 2253673 - RNA, 19 nt, Artificial Sequence
  Description of Artificial Sequence: Synthetic oligonucleotide
cuuaauuugaucaaagcug

SEQ ID NO: 2253674 - RNA, 19 nt, Artificial Sequence
  Description of Artificial Sequence: Synthetic oligonucleotide
caggcuauauuuaagaccc

SEQ ID NO: 2253675 - RNA, 19 nt, Artificial Sequence
  Description of Artificial Sequence: Synthetic oligonucleotide
uuauucacuagacaagcag

SEQ ID NO: 2253676 - RNA, 19 nt, Artificial Sequence
  Description of Artificial Sequence: Synthetic oligonucleotide
aaagagaagaggcagugcu

SEQ ID NO: 2253677 - RNA, 19 nt, Artificial Sequence
  Description of Artificial Sequence: Synthetic oligonucleotide
uuaauuugaucaaagcugu

SEQ ID NO: 2253678 - RNA, 19 nt, Artificial Sequence
  Description of Artificial Sequence: Synthetic oligonucleotide
aaacucaaaugacagaaca

SEQ ID NO: 2253679 - RNA, 19 nt, Artificial Sequence
  Description of Artificial Sequence: Synthetic oligonucleotide
agaguaucuccuuugauag

SEQ ID NO: 2253680 - RNA, 19 nt, Artificial Sequence
  Description of Artificial Sequence: Synthetic oligonucleotide
aaagccuucgggaugagac

SEQ ID NO: 2253681 - RNA, 19 nt, Artificial Sequence
  Description of Artificial Sequence: Synthetic oligonucleotide
gaaaaugaguccuccaaag

SEQ ID NO: 2253682 - RNA, 19 nt, Artificial Sequence
  Description of Artificial Sequence: Synthetic oligonucleotide
agcaguggcauuuccaacc

SEQ ID NO: 2253683 - RNA, 19 nt, Artificial Sequence
  Description of Artificial Sequence: Synthetic oligonucleotide
aaccgucugauagacaugc

SEQ ID NO: 2253684 - RNA, 19 nt, Artificial Sequence
  Description of Artificial Sequence: Synthetic oligonucleotide
aagagaacuuucauugugc

SEQ ID NO: 2253685 - RNA, 19 nt, Artificial Sequence
  Description of Artificial Sequence: Synthetic oligonucleotide
cuuugauaguuccacaggg

SEQ ID NO: 2253686 - RNA, 19 nt, Artificial Sequence
  Description of Artificial Sequence: Synthetic oligonucleotide
cuauauuuaagacccgagg

SEQ ID NO: 2253687 - RNA, 19 nt, Artificial Sequence
  Description of Artificial Sequence: Synthetic oligonucleotide
gauaguuccacagggaaag

SEQ ID NO: 2253688 - RNA, 19 nt, Artificial Sequence
  Description of Artificial Sequence: Synthetic oligonucleotide
accugaauauacuccaggc

SEQ ID NO: 2253689 - RNA, 19 nt, Artificial Sequence
  Description of Artificial Sequence: Synthetic oligonucleotide
uaagagaacuuucauugug

SEQ ID NO: 2253690 - RNA, 19 nt, Artificial Sequence
  Description of Artificial Sequence: Synthetic oligonucleotide
aacaccugaauauacucca

SEQ ID NO: 2253691 - RNA, 19 nt, Artificial Sequence
  Description of Artificial Sequence: Synthetic oligonucleotide
uuuuggaagaguaucuccu

SEQ ID NO: 2253692 - RNA, 19 nt, Artificial Sequence
  Description of Artificial Sequence: Synthetic oligonucleotide
uuucugacaaacugggaag

SEQ ID NO: 2253693 - RNA, 19 nt, Artificial Sequence
  Description of Artificial Sequence: Synthetic oligonucleotide
uccaaacucagcuucacug

SEQ ID NO: 2253694 - RNA, 19 nt, Artificial Sequence
  Description of Artificial Sequence: Synthetic oligonucleotide
aauuaguguagcuuccagu

SEQ ID NO: 2253695 - RNA, 19 nt, Artificial Sequence
  Description of Artificial Sequence: Synthetic oligonucleotide
aaagcugucaccagauaac

SEQ ID NO: 2253696 - RNA, 19 nt, Artificial Sequence
  Description of Artificial Sequence: Synthetic oligonucleotide
acaugcaugcuuuccaugg

SEQ ID NO: 2253697 - RNA, 19 nt, Artificial Sequence
  Description of Artificial Sequence: Synthetic oligonucleotide
agaacuuucauugugccug

SEQ ID NO: 2253698 - RNA, 19 nt, Artificial Sequence
  Description of Artificial Sequence: Synthetic oligonucleotide
uauucacuagacaagcagu

SEQ ID NO: 2253699 - RNA, 19 nt, Artificial Sequence
  Description of Artificial Sequence: Synthetic oligonucleotide
auggcuacgaacuuaauuu

SEQ ID NO: 2253700 - RNA, 19 nt, Artificial Sequence
  Description of Artificial Sequence: Synthetic oligonucleotide
ucacuagacaagcaguggc

SEQ ID NO: 2253701 - RNA, 19 nt, Artificial Sequence
  Description of Artificial Sequence: Synthetic oligonucleotide
gauauauggguccuggcca

SEQ ID NO: 2253702 - RNA, 19 nt, Artificial Sequence
  Description of Artificial Sequence: Synthetic oligonucleotide
auauuuaagacccgaggga

SEQ ID NO: 2253703 - RNA, 19 nt, Artificial Sequence
  Description of Artificial Sequence: Synthetic oligonucleotide
aauggcuacgaacuuaauu

SEQ ID NO: 2253704 - RNA, 19 nt, Artificial Sequence
  Description of Artificial Sequence: Synthetic oligonucleotide
uauacuccaggcuauauuu

SEQ ID NO: 2253705 - RNA, 19 nt, Artificial Sequence
  Description of Artificial Sequence: Synthetic oligonucleotide
acggaggacagugacaugc

SEQ ID NO: 2253706 - RNA, 19 nt, Artificial Sequence
  Description of Artificial Sequence: Synthetic oligonucleotide
uccuuugauaguuccacag

SEQ ID NO: 2253707 - RNA, 19 nt, Artificial Sequence
  Description of Artificial Sequence: Synthetic oligonucleotide
auccaggccgauuuuauuc

SEQ ID NO: 2253708 - RNA, 19 nt, Artificial Sequence
  Description of Artificial Sequence: Synthetic oligonucleotide
cauagcacgaguuguacug

SEQ ID NO: 2253709 - RNA, 19 nt, Artificial Sequence
  Description of Artificial Sequence: Synthetic oligonucleotide
uccaaccacauacacagac

SEQ ID NO: 2253710 - RNA, 19 nt, Artificial Sequence
  Description of Artificial Sequence: Synthetic oligonucleotide
ucucauagaagcucuccag

SEQ ID NO: 2253711 - RNA, 19 nt, Artificial Sequence
  Description of Artificial Sequence: Synthetic oligonucleotide
agcaagcuguccuaggcac

SEQ ID NO: 2253712 - RNA, 19 nt, Artificial Sequence
  Description of Artificial Sequence: Synthetic oligonucleotide
gauuccaggguguggaacc

SEQ ID NO: 2253713 - RNA, 19 nt, Artificial Sequence
  Description of Artificial Sequence: Synthetic oligonucleotide
uugauaguuccacagggaa

SEQ ID NO: 2253714 - RNA, 19 nt, Artificial Sequence
  Description of Artificial Sequence: Synthetic oligonucleotide
uauuuaagacccgagggac

SEQ ID NO: 2253715 - RNA, 19 nt, Artificial Sequence
  Description of Artificial Sequence: Synthetic oligonucleotide
uuccaguccauacaauccc

SEQ ID NO: 2253716 - RNA, 19 nt, Artificial Sequence
  Description of Artificial Sequence: Synthetic oligonucleotide
cuuggcaucuuucaauaag

SEQ ID NO: 2253717 - RNA, 19 nt, Artificial Sequence
  Description of Artificial Sequence: Synthetic oligonucleotide
uuugauaguuccacaggga

SEQ ID NO: 2253718 - RNA, 19 nt, Artificial Sequence
  Description of Artificial Sequence: Synthetic oligonucleotide
gaacuuaauuugaucaaag

SEQ ID NO: 2253719 - RNA, 19 nt, Artificial Sequence
  Description of Artificial Sequence: Synthetic oligonucleotide
cuuccaguccauacaaucc

SEQ ID NO: 2253720 - RNA, 19 nt, Artificial Sequence
  Description of Artificial Sequence: Synthetic oligonucleotide
auagacaugcaugcuuucc

SEQ ID NO: 2253721 - RNA, 19 nt, Artificial Sequence
  Description of Artificial Sequence: Synthetic oligonucleotide
ugacagaacaggaauuagu

SEQ ID NO: 2253722 - RNA, 19 nt, Artificial Sequence
  Description of Artificial Sequence: Synthetic oligonucleotide
ugaaaaugaguccuccaaa

SEQ ID NO: 2253723 - RNA, 19 nt, Artificial Sequence
  Description of Artificial Sequence: Synthetic oligonucleotide
auuuuauucacuagacaag

SEQ ID NO: 2253724 - RNA, 19 nt, Artificial Sequence
  Description of Artificial Sequence: Synthetic oligonucleotide
uccauacaaucccagcucc

SEQ ID NO: 2253725 - RNA, 19 nt, Artificial Sequence
  Description of Artificial Sequence: Synthetic oligonucleotide
uuuauucacuagacaagca

SEQ ID NO: 2253726 - RNA, 19 nt, Artificial Sequence
  Description of Artificial Sequence: Synthetic oligonucleotide
uaguguagcuuccagucca

SEQ ID NO: 2253727 - RNA, 19 nt, Artificial Sequence
  Description of Artificial Sequence: Synthetic oligonucleotide
aguccauacaaucccagcu

SEQ ID NO: 2253728 - RNA, 19 nt, Artificial Sequence
  Description of Artificial Sequence: Synthetic oligonucleotide
gucugauagacaugcaugc

SEQ ID NO: 2253729 - RNA, 19 nt, Artificial Sequence
  Description of Artificial Sequence: Synthetic oligonucleotide
uucgggaugagacagcuuu

SEQ ID NO: 2253730 - RNA, 19 nt, Artificial Sequence
  Description of Artificial Sequence: Synthetic oligonucleotide
auauauggguccuggccac

SEQ ID NO: 2253731 - RNA, 19 nt, Artificial Sequence
  Description of Artificial Sequence: Synthetic oligonucleotide
uggagcaaauauauucagc

SEQ ID NO: 2253732 - RNA, 19 nt, Artificial Sequence
  Description of Artificial Sequence: Synthetic oligonucleotide
ggagcaaauauauucagca

SEQ ID NO: 2253733 - RNA, 19 nt, Artificial Sequence
  Description of Artificial Sequence: Synthetic oligonucleotide
aaucccagcuccuggauau

SEQ ID NO: 2253734 - RNA, 19 nt, Artificial Sequence
  Description of Artificial Sequence: Synthetic oligonucleotide
guguggaaccgucugauag

SEQ ID NO: 2253735 - RNA, 19 nt, Artificial Sequence
  Description of Artificial Sequence: Synthetic oligonucleotide
uuuauuguccugcuccaaa

SEQ ID NO: 2253736 - RNA, 19 nt, Artificial Sequence
  Description of Artificial Sequence: Synthetic oligonucleotide
auucucauagaagcucucc

SEQ ID NO: 2253737 - RNA, 19 nt, Artificial Sequence
  Description of Artificial Sequence: Synthetic oligonucleotide
uuuccugaugccugcagcc

SEQ ID NO: 2253738 - RNA, 19 nt, Artificial Sequence
  Description of Artificial Sequence: Synthetic oligonucleotide
ccauucuucaguuuuauug

SEQ ID NO: 2253739 - RNA, 19 nt, Artificial Sequence
  Description of Artificial Sequence: Synthetic oligonucleotide
aaugaguccuccaaagccu

SEQ ID NO: 2253740 - RNA, 19 nt, Artificial Sequence
  Description of Artificial Sequence: Synthetic oligonucleotide
aagcaguggcauuuccaac

SEQ ID NO: 2253741 - RNA, 19 nt, Artificial Sequence
  Description of Artificial Sequence: Synthetic oligonucleotide
uuaguguagcuuccagucc

SEQ ID NO: 2253742 - RNA, 19 nt, Artificial Sequence
  Description of Artificial Sequence: Synthetic oligonucleotide
caggaauuaguguagcuuc

SEQ ID NO: 2253743 - RNA, 19 nt, Artificial Sequence
  Description of Artificial Sequence: Synthetic oligonucleotide
aaugacagaacaggaauua

SEQ ID NO: 2253744 - RNA, 19 nt, Artificial Sequence
  Description of Artificial Sequence: Synthetic oligonucleotide
uuuaagacccgagggacug

SEQ ID NO: 2253745 - RNA, 19 nt, Artificial Sequence
  Description of Artificial Sequence: Synthetic oligonucleotide
uguagcuuccaguccauac

SEQ ID NO: 2253746 - RNA, 19 nt, Artificial Sequence
  Description of Artificial Sequence: Synthetic oligonucleotide
uccaagcuggacuccacgg

SEQ ID NO: 2253747 - RNA, 19 nt, Artificial Sequence
  Description of Artificial Sequence: Synthetic oligonucleotide
aacaggaauuaguguagcu

SEQ ID NO: 2253748 - RNA, 19 nt, Artificial Sequence
  Description of Artificial Sequence: Synthetic oligonucleotide
ugauagacaugcaugcuuu

SEQ ID NO: 2253749 - RNA, 19 nt, Artificial Sequence
  Description of Artificial Sequence: Synthetic oligonucleotide
auacaaucccagcuccugg

SEQ ID NO: 2253750 - RNA, 19 nt, Artificial Sequence
  Description of Artificial Sequence: Synthetic oligonucleotide
uggcaucuuucaauaagag

SEQ ID NO: 2253751 - RNA, 19 nt, Artificial Sequence
  Description of Artificial Sequence: Synthetic oligonucleotide
gcaucuuucaauaagagaa

SEQ ID NO: 2253752 - RNA, 19 nt, Artificial Sequence
  Description of Artificial Sequence: Synthetic oligonucleotide
uaucuccuuugauaguucc

SEQ ID NO: 2253753 - RNA, 19 nt, Artificial Sequence
  Description of Artificial Sequence: Synthetic oligonucleotide
uuauuguccugcuccaaac

SEQ ID NO: 2253754 - RNA, 19 nt, Artificial Sequence
  Description of Artificial Sequence: Synthetic oligonucleotide
uucacuagacaagcagugg

SEQ ID NO: 2253755 - RNA, 19 nt, Artificial Sequence
  Description of Artificial Sequence: Synthetic oligonucleotide
agugacaugcuucuccaga

SEQ ID NO: 2253756 - RNA, 19 nt, Artificial Sequence
  Description of Artificial Sequence: Synthetic oligonucleotide
ucagagacuuuucccauuc

SEQ ID NO: 2253757 - RNA, 19 nt, Artificial Sequence
  Description of Artificial Sequence: Synthetic oligonucleotide
uuggcauuccauuuguuuu

SEQ ID NO: 2253758 - RNA, 19 nt, Artificial Sequence
  Description of Artificial Sequence: Synthetic oligonucleotide
augcaugcuuuccaugggg

SEQ ID NO: 2253759 - RNA, 19 nt, Artificial Sequence
  Description of Artificial Sequence: Synthetic oligonucleotide
uacccugauucucauagaa

SEQ ID NO: 2253760 - RNA, 19 nt, Artificial Sequence
  Description of Artificial Sequence: Synthetic oligonucleotide
ucuuucaauaagagaacuu

SEQ ID NO: 2253761 - RNA, 19 nt, Artificial Sequence
  Description of Artificial Sequence: Synthetic oligonucleotide
ggauauauggguccuggcc

SEQ ID NO: 2253762 - RNA, 19 nt, Artificial Sequence
  Description of Artificial Sequence: Synthetic oligonucleotide
auggggaucccuuuguccu

SEQ ID NO: 2253763 - RNA, 19 nt, Artificial Sequence
  Description of Artificial Sequence: Synthetic oligonucleotide
gaacuuucauugugccugg

SEQ ID NO: 2253764 - RNA, 19 nt, Artificial Sequence
  Description of Artificial Sequence: Synthetic oligonucleotide
guuguacuggggccaaugg

SEQ ID NO: 2253765 - RNA, 19 nt, Artificial Sequence
  Description of Artificial Sequence: Synthetic oligonucleotide
uauuguccugcuccaaacu

SEQ ID NO: 2253766 - RNA, 19 nt, Artificial Sequence
  Description of Artificial Sequence: Synthetic oligonucleotide
augagacagcuuuucugac

SEQ ID NO: 2253767 - RNA, 19 nt, Artificial Sequence
  Description of Artificial Sequence: Synthetic oligonucleotide
agcuccuggauauaugggu

SEQ ID NO: 2253768 - RNA, 19 nt, Artificial Sequence
  Description of Artificial Sequence: Synthetic oligonucleotide
cccugauucucauagaagc

SEQ ID NO: 2253769 - RNA, 19 nt, Artificial Sequence
  Description of Artificial Sequence: Synthetic oligonucleotide
ugauaguuccacagggaaa

SEQ ID NO: 2253770 - RNA, 19 nt, Artificial Sequence
  Description of Artificial Sequence: Synthetic oligonucleotide
aaacugggaagagacaaaa

SEQ ID NO: 2253771 - RNA, 19 nt, Artificial Sequence
  Description of Artificial Sequence: Synthetic oligonucleotide
aggaauuaguguagcuucc

SEQ ID NO: 2253772 - RNA, 19 nt, Artificial Sequence
  Description of Artificial Sequence: Synthetic oligonucleotide
uguggaaccgucugauaga

SEQ ID NO: 2253773 - RNA, 19 nt, Artificial Sequence
  Description of Artificial Sequence: Synthetic oligonucleotide
ugaucaaagcugucaccag

SEQ ID NO: 2253774 - RNA, 19 nt, Artificial Sequence
  Description of Artificial Sequence: Synthetic oligonucleotide
gaucaaagcugucaccaga

SEQ ID NO: 2253775 - RNA, 19 nt, Artificial Sequence
  Description of Artificial Sequence: Synthetic oligonucleotide
gugacaugcuucuccagag

SEQ ID NO: 2253776 - RNA, 19 nt, Artificial Sequence
  Description of Artificial Sequence: Synthetic oligonucleotide
cuggagcaaauauauucag

SEQ ID NO: 2253777 - RNA, 19 nt, Artificial Sequence
  Description of Artificial Sequence: Synthetic oligonucleotide
cagaacaggaauuagugua

SEQ ID NO: 2253778 - RNA, 19 nt, Artificial Sequence
  Description of Artificial Sequence: Synthetic oligonucleotide
accagauaacaccugaaua

SEQ ID NO: 2253779 - RNA, 19 nt, Artificial Sequence
  Description of Artificial Sequence: Synthetic oligonucleotide
uggcuacgaacuuaauuug

SEQ ID NO: 2253780 - RNA, 19 nt, Artificial Sequence
  Description of Artificial Sequence: Synthetic oligonucleotide
gcaaauauauucagcaagc

SEQ ID NO: 2253781 - RNA, 19 nt, Artificial Sequence
  Description of Artificial Sequence: Synthetic oligonucleotide
uccaggccgauuuuauuca

SEQ ID NO: 2253782 - RNA, 19 nt, Artificial Sequence
  Description of Artificial Sequence: Synthetic oligonucleotide
auucacuagacaagcagug

SEQ ID NO: 2253783 - RNA, 19 nt, Artificial Sequence
  Description of Artificial Sequence: Synthetic oligonucleotide
gaugcuggcugggauaccc

SEQ ID NO: 2253784 - RNA, 19 nt, Artificial Sequence
  Description of Artificial Sequence: Synthetic oligonucleotide
ugcaugcuuuccaugggga

SEQ ID NO: 2253785 - RNA, 19 nt, Artificial Sequence
  Description of Artificial Sequence: Synthetic oligonucleotide
uggccuagguuccaagcug

SEQ ID NO: 2253786 - RNA, 19 nt, Artificial Sequence
  Description of Artificial Sequence: Synthetic oligonucleotide
ucugggcuccauccuagag

SEQ ID NO: 2253787 - RNA, 19 nt, Artificial Sequence
  Description of Artificial Sequence: Synthetic oligonucleotide
cuggauauauggguccugg

SEQ ID NO: 2253788 - RNA, 19 nt, Artificial Sequence
  Description of Artificial Sequence: Synthetic oligonucleotide
ccaggcuauauuuaagacc

SEQ ID NO: 2253789 - RNA, 19 nt, Artificial Sequence
  Description of Artificial Sequence: Synthetic oligonucleotide
acgaacuuaauuugaucaa

SEQ ID NO: 2253790 - RNA, 19 nt, Artificial Sequence
  Description of Artificial Sequence: Synthetic oligonucleotide
cuacgaacuuaauuugauc

SEQ ID NO: 2253791 - RNA, 19 nt, Artificial Sequence
  Description of Artificial Sequence: Synthetic oligonucleotide
cacgaguuguacuggggcc

SEQ ID NO: 2253792 - RNA, 19 nt, Artificial Sequence
  Description of Artificial Sequence: Synthetic oligonucleotide
ucugacaaacugggaagag

SEQ ID NO: 2253793 - RNA, 19 nt, Artificial Sequence
  Description of Artificial Sequence: Synthetic oligonucleotide
aagcugucaccagauaaca

SEQ ID NO: 2253794 - RNA, 19 nt, Artificial Sequence
  Description of Artificial Sequence: Synthetic oligonucleotide
uuucagagacuuuucccau

SEQ ID NO: 2253795 - RNA, 19 nt, Artificial Sequence
  Description of Artificial Sequence: Synthetic oligonucleotide
gacuccacggaggacagug

SEQ ID NO: 2253796 - RNA, 19 nt, Artificial Sequence
  Description of Artificial Sequence: Synthetic oligonucleotide
gugaaaaugaguccuccaa

SEQ ID NO: 2253797 - RNA, 19 nt, Artificial Sequence
  Description of Artificial Sequence: Synthetic oligonucleotide
cuccuggauauaugggucc

SEQ ID NO: 2253798 - RNA, 19 nt, Artificial Sequence
  Description of Artificial Sequence: Synthetic oligonucleotide
auauacuccaggcuauauu

SEQ ID NO: 2253799 - RNA, 19 nt, Artificial Sequence
  Description of Artificial Sequence: Synthetic oligonucleotide
caugcaugcuuuccauggg

SEQ ID NO: 2253800 - RNA, 19 nt, Artificial Sequence
  Description of Artificial Sequence: Synthetic oligonucleotide
gacaugcaugcuuuccaug

SEQ ID NO: 2253801 - RNA, 19 nt, Artificial Sequence
  Description of Artificial Sequence: Synthetic oligonucleotide
uucugacaaacugggaaga

SEQ ID NO: 2253802 - RNA, 19 nt, Artificial Sequence
  Description of Artificial Sequence: Synthetic oligonucleotide
gaaagagaagaggcagugc

SEQ ID NO: 2253803 - RNA, 19 nt, Artificial Sequence
  Description of Artificial Sequence: Synthetic oligonucleotide
aagccuucgggaugagaca

SEQ ID NO: 2253804 - RNA, 19 nt, Artificial Sequence
  Description of Artificial Sequence: Synthetic oligonucleotide
gccuggagcaaauauauuc

SEQ ID NO: 2253805 - RNA, 19 nt, Artificial Sequence
  Description of Artificial Sequence: Synthetic oligonucleotide
auagcacgaguuguacugg

SEQ ID NO: 2253806 - RNA, 19 nt, Artificial Sequence
  Description of Artificial Sequence: Synthetic oligonucleotide
auuuccaaccacauacaca

SEQ ID NO: 2253807 - RNA, 19 nt, Artificial Sequence
  Description of Artificial Sequence: Synthetic oligonucleotide
agagacuuuucccauucuu

SEQ ID NO: 2253808 - RNA, 19 nt, Artificial Sequence
  Description of Artificial Sequence: Synthetic oligonucleotide
agacccgagggacugaaaa

SEQ ID NO: 2253809 - RNA, 19 nt, Artificial Sequence
  Description of Artificial Sequence: Synthetic oligonucleotide
uggauauauggguccuggc

SEQ ID NO: 2253810 - RNA, 19 nt, Artificial Sequence
  Description of Artificial Sequence: Synthetic oligonucleotide
aacuuucauugugccuggc

SEQ ID NO: 2253811 - RNA, 19 nt, Artificial Sequence
  Description of Artificial Sequence: Synthetic oligonucleotide
aaugugaugcuggcuggga

SEQ ID NO: 2253812 - RNA, 19 nt, Artificial Sequence
  Description of Artificial Sequence: Synthetic oligonucleotide
ucugauagacaugcaugcu

SEQ ID NO: 2253813 - RNA, 19 nt, Artificial Sequence
  Description of Artificial Sequence: Synthetic oligonucleotide
ucaccagauaacaccugaa

SEQ ID NO: 2253814 - RNA, 19 nt, Artificial Sequence
  Description of Artificial Sequence: Synthetic oligonucleotide
uuagcggccauagcacgag

SEQ ID NO: 2253815 - RNA, 19 nt, Artificial Sequence
  Description of Artificial Sequence: Synthetic oligonucleotide
cuccaggcuauauuuaaga

SEQ ID NO: 2253816 - RNA, 19 nt, Artificial Sequence
  Description of Artificial Sequence: Synthetic oligonucleotide
caaaugacagaacaggaau

SEQ ID NO: 2253817 - RNA, 19 nt, Artificial Sequence
  Description of Artificial Sequence: Synthetic oligonucleotide
cauacaaucccagcuccug

SEQ ID NO: 2253818 - RNA, 19 nt, Artificial Sequence
  Description of Artificial Sequence: Synthetic oligonucleotide
caguccauacaaucccagc

SEQ ID NO: 2253819 - RNA, 19 nt, Artificial Sequence
  Description of Artificial Sequence: Synthetic oligonucleotide
agcagcaagcuguccuagg

SEQ ID NO: 2253820 - RNA, 19 nt, Artificial Sequence
  Description of Artificial Sequence: Synthetic oligonucleotide
guccauacaaucccagcuc

SEQ ID NO: 2253821 - RNA, 19 nt, Artificial Sequence
  Description of Artificial Sequence: Synthetic oligonucleotide
ugucaccagauaacaccug

SEQ ID NO: 2253822 - RNA, 19 nt, Artificial Sequence
  Description of Artificial Sequence: Synthetic oligonucleotide
agcacuuuccugaugccug

SEQ ID NO: 2253823 - RNA, 19 nt, Artificial Sequence
  Description of Artificial Sequence: Synthetic oligonucleotide
gauagacaugcaugcuuuc

SEQ ID NO: 2253824 - RNA, 19 nt, Artificial Sequence
  Description of Artificial Sequence: Synthetic oligonucleotide
uccacggaggacagugaca

SEQ ID NO: 2253825 - RNA, 19 nt, Artificial Sequence
  Description of Artificial Sequence: Synthetic oligonucleotide
aaccacauacacagacuug

SEQ ID NO: 2253826 - RNA, 19 nt, Artificial Sequence
  Description of Artificial Sequence: Synthetic oligonucleotide
cauccuagaggcagcagca

SEQ ID NO: 2253827 - RNA, 19 nt, Artificial Sequence
  Description of Artificial Sequence: Synthetic oligonucleotide
ccgauuuuauucacuagac

SEQ ID NO: 2253828 - RNA, 19 nt, Artificial Sequence
  Description of Artificial Sequence: Synthetic oligonucleotide
ggaaagagaagaggcagug

SEQ ID NO: 2253829 - RNA, 19 nt, Artificial Sequence
  Description of Artificial Sequence: Synthetic oligonucleotide
ccuuugauaguuccacagg

SEQ ID NO: 2253830 - RNA, 19 nt, Artificial Sequence
  Description of Artificial Sequence: Synthetic oligonucleotide
aguuguacuggggccaaug

SEQ ID NO: 2253831 - RNA, 19 nt, Artificial Sequence
  Description of Artificial Sequence: Synthetic oligonucleotide
cuagguuccaagcuggacu

SEQ ID NO: 2253832 - RNA, 19 nt, Artificial Sequence
  Description of Artificial Sequence: Synthetic oligonucleotide
agccuucgggaugagacag

SEQ ID NO: 2253833 - RNA, 19 nt, Artificial Sequence
  Description of Artificial Sequence: Synthetic oligonucleotide
ugggacucucugcugugca

SEQ ID NO: 2253834 - RNA, 19 nt, Artificial Sequence
  Description of Artificial Sequence: Synthetic oligonucleotide
gcuauauuuaagacccgag

SEQ ID NO: 2253835 - RNA, 19 nt, Artificial Sequence
  Description of Artificial Sequence: Synthetic oligonucleotide
cauuuccacugugugcucc

SEQ ID NO: 2253836 - RNA, 19 nt, Artificial Sequence
  Description of Artificial Sequence: Synthetic oligonucleotide
cagagccccucucugauuc

SEQ ID NO: 2253837 - RNA, 19 nt, Artificial Sequence
  Description of Artificial Sequence: Synthetic oligonucleotide
cacuagacaagcaguggca

SEQ ID NO: 2253838 - RNA, 19 nt, Artificial Sequence
  Description of Artificial Sequence: Synthetic oligonucleotide
aggccgauuuuauucacua

SEQ ID NO: 2253839 - RNA, 19 nt, Artificial Sequence
  Description of Artificial Sequence: Synthetic oligonucleotide
gugcaccuggccuagguuc

SEQ ID NO: 2253840 - RNA, 19 nt, Artificial Sequence
  Description of Artificial Sequence: Synthetic oligonucleotide
cuuucaauaagagaacuuu

SEQ ID NO: 2253841 - RNA, 19 nt, Artificial Sequence
  Description of Artificial Sequence: Synthetic oligonucleotide
gauucugggcuccauccua

SEQ ID NO: 2253842 - RNA, 19 nt, Artificial Sequence
  Description of Artificial Sequence: Synthetic oligonucleotide
ggcaucuuucaauaagaga

SEQ ID NO: 2253843 - RNA, 19 nt, Artificial Sequence
  Description of Artificial Sequence: Synthetic oligonucleotide
gcuuccacugcccugggac

SEQ ID NO: 2253844 - RNA, 19 nt, Artificial Sequence
  Description of Artificial Sequence: Synthetic oligonucleotide
gguucccuuggauuccagg

SEQ ID NO: 2253845 - RNA, 19 nt, Artificial Sequence
  Description of Artificial Sequence: Synthetic oligonucleotide
ccauccuagaggcagcagc

SEQ ID NO: 2253846 - RNA, 19 nt, Artificial Sequence
  Description of Artificial Sequence: Synthetic oligonucleotide
gcagcucacaggcaggccc

SEQ ID NO: 2253847 - RNA, 19 nt, Artificial Sequence
  Description of Artificial Sequence: Synthetic oligonucleotide
acuggggccaauggcuacg

SEQ ID NO: 2253848 - RNA, 19 nt, Artificial Sequence
  Description of Artificial Sequence: Synthetic oligonucleotide
auuuaagacccgagggacu

SEQ ID NO: 2253849 - RNA, 19 nt, Artificial Sequence
  Description of Artificial Sequence: Synthetic oligonucleotide
ggaaccgucugauagacau

SEQ ID NO: 2253850 - RNA, 19 nt, Artificial Sequence
  Description of Artificial Sequence: Synthetic oligonucleotide
aucaaagcugucaccagau

SEQ ID NO: 2253851 - RNA, 19 nt, Artificial Sequence
  Description of Artificial Sequence: Synthetic oligonucleotide
uacacagacuuggcauucc

SEQ ID NO: 2253852 - RNA, 19 nt, Artificial Sequence
  Description of Artificial Sequence: Synthetic oligonucleotide
uccaggguguggaaccguc

SEQ ID NO: 2253853 - RNA, 19 nt, Artificial Sequence
  Description of Artificial Sequence: Synthetic oligonucleotide
gcagcaagcuguccuaggc

SEQ ID NO: 2253854 - RNA, 19 nt, Artificial Sequence
  Description of Artificial Sequence: Synthetic oligonucleotide
uucagagacuuuucccauu

SEQ ID NO: 2253855 - RNA, 19 nt, Artificial Sequence
  Description of Artificial Sequence: Synthetic oligonucleotide
acuccaggcuauauuuaag

SEQ ID NO: 2253856 - RNA, 19 nt, Artificial Sequence
  Description of Artificial Sequence: Synthetic oligonucleotide
ggcuccauccuagaggcag

SEQ ID NO: 2253857 - RNA, 19 nt, Artificial Sequence
  Description of Artificial Sequence: Synthetic oligonucleotide
cuccacggaggacagugac

SEQ ID NO: 2253858 - RNA, 19 nt, Artificial Sequence
  Description of Artificial Sequence: Synthetic oligonucleotide
gcacgaguuguacuggggc

SEQ ID NO: 2253859 - RNA, 19 nt, Artificial Sequence
  Description of Artificial Sequence: Synthetic oligonucleotide
acccugauucucauagaag

SEQ ID NO: 2253860 - RNA, 19 nt, Artificial Sequence
  Description of Artificial Sequence: Synthetic oligonucleotide
ccuggagcaaauauauuca

SEQ ID NO: 2253861 - RNA, 19 nt, Artificial Sequence
  Description of Artificial Sequence: Synthetic oligonucleotide
guggaaccgucugauagac

SEQ ID NO: 2253862 - RNA, 19 nt, Artificial Sequence
  Description of Artificial Sequence: Synthetic oligonucleotide
auacccugauucucauaga

SEQ ID NO: 2253863 - RNA, 19 nt, Artificial Sequence
  Description of Artificial Sequence: Synthetic oligonucleotide
acgaguuguacuggggcca

SEQ ID NO: 2253864 - RNA, 19 nt, Artificial Sequence
  Description of Artificial Sequence: Synthetic oligonucleotide
augugaugcuggcugggau

SEQ ID NO: 2253865 - RNA, 19 nt, Artificial Sequence
  Description of Artificial Sequence: Synthetic oligonucleotide
cuuagcggccauagcacga

SEQ ID NO: 2253866 - RNA, 19 nt, Artificial Sequence
  Description of Artificial Sequence: Synthetic oligonucleotide
cucucugauucugggcucc

SEQ ID NO: 2253867 - RNA, 19 nt, Artificial Sequence
  Description of Artificial Sequence: Synthetic oligonucleotide
uccuggauauauggguccu

SEQ ID NO: 2253868 - RNA, 19 nt, Artificial Sequence
  Description of Artificial Sequence: Synthetic oligonucleotide
ggugaaaaugaguccucca

SEQ ID NO: 2253869 - RNA, 19 nt, Artificial Sequence
  Description of Artificial Sequence: Synthetic oligonucleotide
uggcauuuccaaccacaua

SEQ ID NO: 2253870 - RNA, 19 nt, Artificial Sequence
  Description of Artificial Sequence: Synthetic oligonucleotide
gauucucauagaagcucuc

SEQ ID NO: 2253871 - RNA, 19 nt, Artificial Sequence
  Description of Artificial Sequence: Synthetic oligonucleotide
gacaaacugggaagagaca

SEQ ID NO: 2253872 - RNA, 19 nt, Artificial Sequence
  Description of Artificial Sequence: Synthetic oligonucleotide
gcccuuagcggccauagca

SEQ ID NO: 2253873 - RNA, 19 nt, Artificial Sequence
  Description of Artificial Sequence: Synthetic oligonucleotide
cugacaaacugggaagaga

SEQ ID NO: 2253874 - RNA, 19 nt, Artificial Sequence
  Description of Artificial Sequence: Synthetic oligonucleotide
uggaaccgucugauagaca

SEQ ID NO: 2253875 - RNA, 19 nt, Artificial Sequence
  Description of Artificial Sequence: Synthetic oligonucleotide
agcaagcuuuucugcauuu

SEQ ID NO: 2253876 - RNA, 19 nt, Artificial Sequence
  Description of Artificial Sequence: Synthetic oligonucleotide
ccuuagcggccauagcacg

SEQ ID NO: 2253877 - RNA, 19 nt, Artificial Sequence
  Description of Artificial Sequence: Synthetic oligonucleotide
acaccugaauauacuccag

SEQ ID NO: 2253878 - RNA, 19 nt, Artificial Sequence
  Description of Artificial Sequence: Synthetic oligonucleotide
agguuccaagcuggacucc

SEQ ID NO: 2253879 - RNA, 19 nt, Artificial Sequence
  Description of Artificial Sequence: Synthetic oligonucleotide
gaaccgucugauagacaug

SEQ ID NO: 2253880 - RNA, 19 nt, Artificial Sequence
  Description of Artificial Sequence: Synthetic oligonucleotide
ccagauaacaccugaauau

SEQ ID NO: 2253881 - RNA, 19 nt, Artificial Sequence
  Description of Artificial Sequence: Synthetic oligonucleotide
auauggguccuggccacug

SEQ ID NO: 2253882 - RNA, 19 nt, Artificial Sequence
  Description of Artificial Sequence: Synthetic oligonucleotide
aggcccuuagcggccauag

SEQ ID NO: 2253883 - RNA, 19 nt, Artificial Sequence
  Description of Artificial Sequence: Synthetic oligonucleotide
cuuggcauuccauuuguuu

SEQ ID NO: 2253884 - RNA, 19 nt, Artificial Sequence
  Description of Artificial Sequence: Synthetic oligonucleotide
ggccgauuuuauucacuag

SEQ ID NO: 2253885 - RNA, 19 nt, Artificial Sequence
  Description of Artificial Sequence: Synthetic oligonucleotide
ggccuagguuccaagcugg

SEQ ID NO: 2253886 - RNA, 19 nt, Artificial Sequence
  Description of Artificial Sequence: Synthetic oligonucleotide
ggcuauauuuaagacccga

SEQ ID NO: 2253887 - RNA, 19 nt, Artificial Sequence
  Description of Artificial Sequence: Synthetic oligonucleotide
ugcauccaggccgauuuua

SEQ ID NO: 2253888 - RNA, 19 nt, Artificial Sequence
  Description of Artificial Sequence: Synthetic oligonucleotide
uuaagacccgagggacuga

SEQ ID NO: 2253889 - RNA, 19 nt, Artificial Sequence
  Description of Artificial Sequence: Synthetic oligonucleotide
uucugggcuccauccuaga

SEQ ID NO: 2253890 - RNA, 19 nt, Artificial Sequence
  Description of Artificial Sequence: Synthetic oligonucleotide
ucgggaugagacagcuuuu

SEQ ID NO: 2253891 - RNA, 19 nt, Artificial Sequence
  Description of Artificial Sequence: Synthetic oligonucleotide
cuccuuugauaguuccaca

SEQ ID NO: 2253892 - RNA, 19 nt, Artificial Sequence
  Description of Artificial Sequence: Synthetic oligonucleotide
cuuguggugugggacucuc

SEQ ID NO: 2253893 - RNA, 19 nt, Artificial Sequence
  Description of Artificial Sequence: Synthetic oligonucleotide
uggauuccaggguguggaa

SEQ ID NO: 2253894 - RNA, 19 nt, Artificial Sequence
  Description of Artificial Sequence: Synthetic oligonucleotide
uauauggguccuggccacu

SEQ ID NO: 2253895 - RNA, 19 nt, Artificial Sequence
  Description of Artificial Sequence: Synthetic oligonucleotide
ucauugugccuggcagccc

SEQ ID NO: 2253896 - RNA, 19 nt, Artificial Sequence
  Description of Artificial Sequence: Synthetic oligonucleotide
caaccacauacacagacuu

SEQ ID NO: 2253897 - RNA, 19 nt, Artificial Sequence
  Description of Artificial Sequence: Synthetic oligonucleotide
ccuggccuagguuccaagc

SEQ ID NO: 2253898 - RNA, 19 nt, Artificial Sequence
  Description of Artificial Sequence: Synthetic oligonucleotide
guaucuccuuugauaguuc

SEQ ID NO: 2253899 - RNA, 19 nt, Artificial Sequence
  Description of Artificial Sequence: Synthetic oligonucleotide
cugauagacaugcaugcuu

SEQ ID NO: 2253900 - RNA, 19 nt, Artificial Sequence
  Description of Artificial Sequence: Synthetic oligonucleotide
aggcuauauuuaagacccg

SEQ ID NO: 2253901 - RNA, 19 nt, Artificial Sequence
  Description of Artificial Sequence: Synthetic oligonucleotide
cacagggaaggagcuggcc

SEQ ID NO: 2253902 - RNA, 19 nt, Artificial Sequence
  Description of Artificial Sequence: Synthetic oligonucleotide
cccuuagcggccauagcac

SEQ ID NO: 2253903 - RNA, 19 nt, Artificial Sequence
  Description of Artificial Sequence: Synthetic oligonucleotide
ccacauacacagacuuggc

SEQ ID NO: 2253904 - RNA, 19 nt, Artificial Sequence
  Description of Artificial Sequence: Synthetic oligonucleotide
cagcaagcuguccuaggca

SEQ ID NO: 2253905 - RNA, 19 nt, Artificial Sequence
  Description of Artificial Sequence: Synthetic oligonucleotide
gcggccauagcacgaguug

SEQ ID NO: 2253906 - RNA, 19 nt, Artificial Sequence
  Description of Artificial Sequence: Synthetic oligonucleotide
auaguuccacagggaaaga

SEQ ID NO: 2253907 - RNA, 19 nt, Artificial Sequence
  Description of Artificial Sequence: Synthetic oligonucleotide
ugugcuccuucugcaucca

SEQ ID NO: 2253908 - RNA, 19 nt, Artificial Sequence
  Description of Artificial Sequence: Synthetic oligonucleotide
gaguaucuccuuugauagu

SEQ ID NO: 2253909 - RNA, 19 nt, Artificial Sequence
  Description of Artificial Sequence: Synthetic oligonucleotide
ccaauggcuacgaacuuaa

SEQ ID NO: 2253910 - RNA, 19 nt, Artificial Sequence
  Description of Artificial Sequence: Synthetic oligonucleotide
ggcuacgaacuuaauuuga

SEQ ID NO: 2253911 - RNA, 19 nt, Artificial Sequence
  Description of Artificial Sequence: Synthetic oligonucleotide
uccuaggcacagggaagga

SEQ ID NO: 2253912 - RNA, 19 nt, Artificial Sequence
  Description of Artificial Sequence: Synthetic oligonucleotide
cauugugccuggcagcccu

SEQ ID NO: 2253913 - RNA, 19 nt, Artificial Sequence
  Description of Artificial Sequence: Synthetic oligonucleotide
gccccucucugauucuggg

SEQ ID NO: 2253914 - RNA, 19 nt, Artificial Sequence
  Description of Artificial Sequence: Synthetic oligonucleotide
agggaaggagcuggcccag

SEQ ID NO: 2253915 - RNA, 19 nt, Artificial Sequence
  Description of Artificial Sequence: Synthetic oligonucleotide
auacuccaggcuauauuua

SEQ ID NO: 2253916 - RNA, 19 nt, Artificial Sequence
  Description of Artificial Sequence: Synthetic oligonucleotide
ugcccugggacuggugaaa

SEQ ID NO: 2253917 - RNA, 19 nt, Artificial Sequence
  Description of Artificial Sequence: Synthetic oligonucleotide
uagcggccauagcacgagu

SEQ ID NO: 2253918 - RNA, 19 nt, Artificial Sequence
  Description of Artificial Sequence: Synthetic oligonucleotide
uggggaucccuuuguccuu

SEQ ID NO: 2253919 - RNA, 19 nt, Artificial Sequence
  Description of Artificial Sequence: Synthetic oligonucleotide
ggauuccaggguguggaac

SEQ ID NO: 2253920 - RNA, 19 nt, Artificial Sequence
  Description of Artificial Sequence: Synthetic oligonucleotide
gcuccuggauauauggguc

SEQ ID NO: 2253921 - RNA, 19 nt, Artificial Sequence
  Description of Artificial Sequence: Synthetic oligonucleotide
gugggacucucugcugugc

SEQ ID NO: 2253922 - RNA, 19 nt, Artificial Sequence
  Description of Artificial Sequence: Synthetic oligonucleotide
caccagauaacaccugaau

SEQ ID NO: 2253923 - RNA, 19 nt, Artificial Sequence
  Description of Artificial Sequence: Synthetic oligonucleotide
agccagggcuuguggugug

SEQ ID NO: 2253924 - RNA, 19 nt, Artificial Sequence
  Description of Artificial Sequence: Synthetic oligonucleotide
ggaucccuuuguccuugag

SEQ ID NO: 2253925 - RNA, 19 nt, Artificial Sequence
  Description of Artificial Sequence: Synthetic oligonucleotide
caaucccagcuccuggaua

SEQ ID NO: 2253926 - RNA, 19 nt, Artificial Sequence
  Description of Artificial Sequence: Synthetic oligonucleotide
uucugcauccaggccgauu

SEQ ID NO: 2253927 - RNA, 19 nt, Artificial Sequence
  Description of Artificial Sequence: Synthetic oligonucleotide
gccauagcacgaguuguac

SEQ ID NO: 2253928 - RNA, 19 nt, Artificial Sequence
  Description of Artificial Sequence: Synthetic oligonucleotide
aguguagcuuccaguccau

SEQ ID NO: 2253929 - RNA, 19 nt, Artificial Sequence
  Description of Artificial Sequence: Synthetic oligonucleotide
cacggaggacagugacaug

SEQ ID NO: 2253930 - RNA, 19 nt, Artificial Sequence
  Description of Artificial Sequence: Synthetic oligonucleotide
auccuagaggcagcagcaa

SEQ ID NO: 2253931 - RNA, 19 nt, Artificial Sequence
  Description of Artificial Sequence: Synthetic oligonucleotide
ccaggccgauuuuauucac

SEQ ID NO: 2253932 - RNA, 19 nt, Artificial Sequence
  Description of Artificial Sequence: Synthetic oligonucleotide
ccccucucugauucugggc

SEQ ID NO: 2253933 - RNA, 19 nt, Artificial Sequence
  Description of Artificial Sequence: Synthetic oligonucleotide
acuccacggaggacaguga

SEQ ID NO: 2253934 - RNA, 19 nt, Artificial Sequence
  Description of Artificial Sequence: Synthetic oligonucleotide
ggggaucccuuuguccuug

SEQ ID NO: 2253935 - RNA, 19 nt, Artificial Sequence
  Description of Artificial Sequence: Synthetic oligonucleotide
agcggccauagcacgaguu

SEQ ID NO: 2253936 - RNA, 19 nt, Artificial Sequence
  Description of Artificial Sequence: Synthetic oligonucleotide
gcuacgaacuuaauuugau

SEQ ID NO: 2253937 - RNA, 19 nt, Artificial Sequence
  Description of Artificial Sequence: Synthetic oligonucleotide
gggacuggugaaaaugagu

SEQ ID NO: 2253938 - RNA, 19 nt, Artificial Sequence
  Description of Artificial Sequence: Synthetic oligonucleotide
caggccgauuuuauucacu

SEQ ID NO: 2253939 - RNA, 19 nt, Artificial Sequence
  Description of Artificial Sequence: Synthetic oligonucleotide
cuccauccuagaggcagca

SEQ ID NO: 2253940 - RNA, 19 nt, Artificial Sequence
  Description of Artificial Sequence: Synthetic oligonucleotide
gggaugagacagcuuuucu

SEQ ID NO: 2253941 - RNA, 19 nt, Artificial Sequence
  Description of Artificial Sequence: Synthetic oligonucleotide
cgaacuuaauuugaucaaa

SEQ ID NO: 2253942 - RNA, 19 nt, Artificial Sequence
  Description of Artificial Sequence: Synthetic oligonucleotide
ccucucugauucugggcuc

SEQ ID NO: 2253943 - RNA, 19 nt, Artificial Sequence
  Description of Artificial Sequence: Synthetic oligonucleotide
cccucucugauucugggcu

SEQ ID NO: 2253944 - RNA, 19 nt, Artificial Sequence
  Description of Artificial Sequence: Synthetic oligonucleotide
ccuuggauuccagggugug

SEQ ID NO: 2253945 - RNA, 19 nt, Artificial Sequence
  Description of Artificial Sequence: Synthetic oligonucleotide
accgucugauagacaugca

SEQ ID NO: 2253946 - RNA, 19 nt, Artificial Sequence
  Description of Artificial Sequence: Synthetic oligonucleotide
cagcacuuuccugaugccu

SEQ ID NO: 2253947 - RNA, 19 nt, Artificial Sequence
  Description of Artificial Sequence: Synthetic oligonucleotide
ggcccuuagcggccauagc

SEQ ID NO: 2253948 - RNA, 19 nt, Artificial Sequence
  Description of Artificial Sequence: Synthetic oligonucleotide
cagguucccuuggauucca

SEQ ID NO: 2253949 - RNA, 19 nt, Artificial Sequence
  Description of Artificial Sequence: Synthetic oligonucleotide
cagcucacaggcaggcccu

SEQ ID NO: 2253950 - RNA, 19 nt, Artificial Sequence
  Description of Artificial Sequence: Synthetic oligonucleotide
ggcuuguggugugggacuc

SEQ ID NO: 2253951 - RNA, 19 nt, Artificial Sequence
  Description of Artificial Sequence: Synthetic oligonucleotide
ggauacccugauucucaua

SEQ ID NO: 2253952 - RNA, 19 nt, Artificial Sequence
  Description of Artificial Sequence: Synthetic oligonucleotide
cuggcugggauacccugau

SEQ ID NO: 2253953 - RNA, 19 nt, Artificial Sequence
  Description of Artificial Sequence: Synthetic oligonucleotide
cuggggccaauggcuacga

SEQ ID NO: 2253954 - RNA, 19 nt, Artificial Sequence
  Description of Artificial Sequence: Synthetic oligonucleotide
gcuguccuaggcacaggga

SEQ ID NO: 2253955 - RNA, 19 nt, Artificial Sequence
  Description of Artificial Sequence: Synthetic oligonucleotide
cucugcugugcagcucaca

SEQ ID NO: 2253956 - RNA, 19 nt, Artificial Sequence
  Description of Artificial Sequence: Synthetic oligonucleotide
cagcaagcuuuucugcauu

SEQ ID NO: 2253957 - RNA, 19 nt, Artificial Sequence
  Description of Artificial Sequence: Synthetic oligonucleotide
cgggaugagacagcuuuuc

SEQ ID NO: 2253958 - RNA, 19 nt, Artificial Sequence
  Description of Artificial Sequence: Synthetic oligonucleotide
ccauagcacgaguuguacu

SEQ ID NO: 2253959 - RNA, 19 nt, Artificial Sequence
  Description of Artificial Sequence: Synthetic oligonucleotide
ggccauagcacgaguugua

SEQ ID NO: 2253960 - RNA, 19 nt, Artificial Sequence
  Description of Artificial Sequence: Synthetic oligonucleotide
gccuucgggaugagacagc

SEQ ID NO: 2253961 - RNA, 19 nt, Artificial Sequence
  Description of Artificial Sequence: Synthetic oligonucleotide
ccgucugauagacaugcau

SEQ ID NO: 2253962 - RNA, 19 nt, Artificial Sequence
  Description of Artificial Sequence: Synthetic oligonucleotide
gggauacccugauucucau

SEQ ID NO: 2253963 - RNA, 19 nt, Artificial Sequence
  Description of Artificial Sequence: Synthetic oligonucleotide
guguagcuuccaguccaua

SEQ ID NO: 2253964 - RNA, 19 nt, Artificial Sequence
  Description of Artificial Sequence: Synthetic oligonucleotide
ccacggaggacagugacau

SEQ ID NO: 2253965 - RNA, 19 nt, Artificial Sequence
  Description of Artificial Sequence: Synthetic oligonucleotide
gggaucccuuuguccuuga

SEQ ID NO: 2253966 - RNA, 19 nt, Artificial Sequence
  Description of Artificial Sequence: Synthetic oligonucleotide
ccauacaaucccagcuccu

SEQ ID NO: 2253967 - RNA, 19 nt, Artificial Sequence
  Description of Artificial Sequence: Synthetic oligonucleotide
gcauccaggccgauuuuau

SEQ ID NO: 2253968 - RNA, 19 nt, Artificial Sequence
  Description of Artificial Sequence: Synthetic oligonucleotide
cuucgggaugagacagcuu

SEQ ID NO: 2253969 - RNA, 19 nt, Artificial Sequence
  Description of Artificial Sequence: Synthetic oligonucleotide
gccuagguuccaagcugga

SEQ ID NO: 2253970 - RNA, 19 nt, Artificial Sequence
  Description of Artificial Sequence: Synthetic oligonucleotide
caccuggccuagguuccaa

SEQ ID NO: 2253971 - RNA, 19 nt, Artificial Sequence
  Description of Artificial Sequence: Synthetic oligonucleotide
cccuuggauuccagggugu

SEQ ID NO: 2253972 - RNA, 19 nt, Artificial Sequence
  Description of Artificial Sequence: Synthetic oligonucleotide
ccaggguguggaaccgucu

SEQ ID NO: 2253973 - RNA, 19 nt, Artificial Sequence
  Description of Artificial Sequence: Synthetic oligonucleotide
gcaccuggccuagguucca

SEQ ID NO: 2253974 - RNA, 19 nt, Artificial Sequence
  Description of Artificial Sequence: Synthetic oligonucleotide
caggcccuuagcggccaua

SEQ ID NO: 2253975 - RNA, 19 nt, Artificial Sequence
  Description of Artificial Sequence: Synthetic oligonucleotide
cgaguuguacuggggccaa

SEQ ID NO: 2253976 - RNA, 19 nt, Artificial Sequence
  Description of Artificial Sequence: Synthetic oligonucleotide
ggccuggagcaaauauauu

SEQ ID NO: 2253977 - RNA, 19 nt, Artificial Sequence
  Description of Artificial Sequence: Synthetic oligonucleotide
gcaggcccuuagcggccau

SEQ ID NO: 2253978 - RNA, 19 nt, Artificial Sequence
  Description of Artificial Sequence: Synthetic oligonucleotide
ucaaagaagaccuuggcgg

SEQ ID NO: 2253979 - RNA, 19 nt, Artificial Sequence
  Description of Artificial Sequence: Synthetic oligonucleotide
aaacaaaccuuccagauca

SEQ ID NO: 2253980 - RNA, 19 nt, Artificial Sequence
  Description of Artificial Sequence: Synthetic oligonucleotide
uaugauacgacucaaauuu

SEQ ID NO: 2253981 - RNA, 19 nt, Artificial Sequence
  Description of Artificial Sequence: Synthetic oligonucleotide
acaaaagacagcuaguggg

SEQ ID NO: 2253982 - RNA, 19 nt, Artificial Sequence
  Description of Artificial Sequence: Synthetic oligonucleotide
uccagaucagccaacaugg

SEQ ID NO: 2253983 - RNA, 19 nt, Artificial Sequence
  Description of Artificial Sequence: Synthetic oligonucleotide
ugaaacuaaacaaaagaca

SEQ ID NO: 2253984 - RNA, 19 nt, Artificial Sequence
  Description of Artificial Sequence: Synthetic oligonucleotide
aagaauuauaugaacaaag

SEQ ID NO: 2253985 - RNA, 19 nt, Artificial Sequence
  Description of Artificial Sequence: Synthetic oligonucleotide
aacaaaagacagcuagugg

SEQ ID NO: 2253986 - RNA, 19 nt, Artificial Sequence
  Description of Artificial Sequence: Synthetic oligonucleotide
aacugagugaaacuaaaca

SEQ ID NO: 2253987 - RNA, 19 nt, Artificial Sequence
  Description of Artificial Sequence: Synthetic oligonucleotide
aauacaacauguuugccau

SEQ ID NO: 2253988 - RNA, 19 nt, Artificial Sequence
  Description of Artificial Sequence: Synthetic oligonucleotide
gaacaaagaaugcuaagcc

SEQ ID NO: 2253989 - RNA, 19 nt, Artificial Sequence
  Description of Artificial Sequence: Synthetic oligonucleotide
gaugacauacaacauauga

SEQ ID NO: 2253990 - RNA, 19 nt, Artificial Sequence
  Description of Artificial Sequence: Synthetic oligonucleotide
ugaacaaagaaugcuaagc

SEQ ID NO: 2253991 - RNA, 19 nt, Artificial Sequence
  Description of Artificial Sequence: Synthetic oligonucleotide
ugccauccaaccaugaggg

SEQ ID NO: 2253992 - RNA, 19 nt, Artificial Sequence
  Description of Artificial Sequence: Synthetic oligonucleotide
uuauaugaacaaagaaugc

SEQ ID NO: 2253993 - RNA, 19 nt, Artificial Sequence
  Description of Artificial Sequence: Synthetic oligonucleotide
aucaaagaagaccuuggcg

SEQ ID NO: 2253994 - RNA, 19 nt, Artificial Sequence
  Description of Artificial Sequence: Synthetic oligonucleotide
aacaaagaaugcuaagccu

SEQ ID NO: 2253995 - RNA, 19 nt, Artificial Sequence
  Description of Artificial Sequence: Synthetic oligonucleotide
uugccauccaaccaugagg

SEQ ID NO: 2253996 - RNA, 19 nt, Artificial Sequence
  Description of Artificial Sequence: Synthetic oligonucleotide
aaacaaaagacagcuagug

SEQ ID NO: 2253997 - RNA, 19 nt, Artificial Sequence
  Description of Artificial Sequence: Synthetic oligonucleotide
ucaccuuucucaaacaaac

SEQ ID NO: 2253998 - RNA, 19 nt, Artificial Sequence
  Description of Artificial Sequence: Synthetic oligonucleotide
auacccguagccuuucucc

SEQ ID NO: 2253999 - RNA, 19 nt, Artificial Sequence
  Description of Artificial Sequence: Synthetic oligonucleotide
uauaugaacaaagaaugcu

SEQ ID NO: 2254000 - RNA, 19 nt, Artificial Sequence
  Description of Artificial Sequence: Synthetic oligonucleotide
gauacuuccuuuauacccg

SEQ ID NO: 2254001 - RNA, 19 nt, Artificial Sequence
  Description of Artificial Sequence: Synthetic oligonucleotide
uugacgauggugcagucag

SEQ ID NO: 2254002 - RNA, 19 nt, Artificial Sequence
  Description of Artificial Sequence: Synthetic oligonucleotide
aaaaucugaugacauacaa

SEQ ID NO: 2254003 - RNA, 19 nt, Artificial Sequence
  Description of Artificial Sequence: Synthetic oligonucleotide
acauacaacauaugauacg

SEQ ID NO: 2254004 - RNA, 19 nt, Artificial Sequence
  Description of Artificial Sequence: Synthetic oligonucleotide
ucuaucuugccacuguuga

SEQ ID NO: 2254005 - RNA, 19 nt, Artificial Sequence
  Description of Artificial Sequence: Synthetic oligonucleotide
agaaugcuaagccucauug

SEQ ID NO: 2254006 - RNA, 19 nt, Artificial Sequence
  Description of Artificial Sequence: Synthetic oligonucleotide
aaaggguguuuucacaucu

SEQ ID NO: 2254007 - RNA, 19 nt, Artificial Sequence
  Description of Artificial Sequence: Synthetic oligonucleotide
gaguguaccacagucaucc

SEQ ID NO: 2254008 - RNA, 19 nt, Artificial Sequence
  Description of Artificial Sequence: Synthetic oligonucleotide
aaaucugaugacauacaac

SEQ ID NO: 2254009 - RNA, 19 nt, Artificial Sequence
  Description of Artificial Sequence: Synthetic oligonucleotide
aaugcuaagccucauugua

SEQ ID NO: 2254010 - RNA, 19 nt, Artificial Sequence
  Description of Artificial Sequence: Synthetic oligonucleotide
ugagugaaacuaaacaaaa

SEQ ID NO: 2254011 - RNA, 19 nt, Artificial Sequence
  Description of Artificial Sequence: Synthetic oligonucleotide
ugauacgacucaaauuucc

SEQ ID NO: 2254012 - RNA, 19 nt, Artificial Sequence
  Description of Artificial Sequence: Synthetic oligonucleotide
acugagugaaacuaaacaa

SEQ ID NO: 2254013 - RNA, 19 nt, Artificial Sequence
  Description of Artificial Sequence: Synthetic oligonucleotide
aaagacagcuaguggguag

SEQ ID NO: 2254014 - RNA, 19 nt, Artificial Sequence
  Description of Artificial Sequence: Synthetic oligonucleotide
uaugaacaaagaaugcuaa

SEQ ID NO: 2254015 - RNA, 19 nt, Artificial Sequence
  Description of Artificial Sequence: Synthetic oligonucleotide
uggguagugaugaacacac

SEQ ID NO: 2254016 - RNA, 19 nt, Artificial Sequence
  Description of Artificial Sequence: Synthetic oligonucleotide
acaaagaaugcuaagccuc

SEQ ID NO: 2254017 - RNA, 19 nt, Artificial Sequence
  Description of Artificial Sequence: Synthetic oligonucleotide
aauucuacccacaucuuug

SEQ ID NO: 2254018 - RNA, 19 nt, Artificial Sequence
  Description of Artificial Sequence: Synthetic oligonucleotide
uccaaucuucacaucaaag

SEQ ID NO: 2254019 - RNA, 19 nt, Artificial Sequence
  Description of Artificial Sequence: Synthetic oligonucleotide
guagaaguggcugcgaugg

SEQ ID NO: 2254020 - RNA, 19 nt, Artificial Sequence
  Description of Artificial Sequence: Synthetic oligonucleotide
cucgauggaagauacuucc

SEQ ID NO: 2254021 - RNA, 19 nt, Artificial Sequence
  Description of Artificial Sequence: Synthetic oligonucleotide
agagcaucaagacacagaa

SEQ ID NO: 2254022 - RNA, 19 nt, Artificial Sequence
  Description of Artificial Sequence: Synthetic oligonucleotide
aagaccuuggcggucaccg

SEQ ID NO: 2254023 - RNA, 19 nt, Artificial Sequence
  Description of Artificial Sequence: Synthetic oligonucleotide
acaaggaacugagugaaac

SEQ ID NO: 2254024 - RNA, 19 nt, Artificial Sequence
  Description of Artificial Sequence: Synthetic oligonucleotide
agggaccucaacuacaaag

SEQ ID NO: 2254025 - RNA, 19 nt, Artificial Sequence
  Description of Artificial Sequence: Synthetic oligonucleotide
agaucagccaacauggagg

SEQ ID NO: 2254026 - RNA, 19 nt, Artificial Sequence
  Description of Artificial Sequence: Synthetic oligonucleotide
aaguucuauggaguguacc

SEQ ID NO: 2254027 - RNA, 19 nt, Artificial Sequence
  Description of Artificial Sequence: Synthetic oligonucleotide
uuccuuuauacccguagcc

SEQ ID NO: 2254028 - RNA, 19 nt, Artificial Sequence
  Description of Artificial Sequence: Synthetic oligonucleotide
aaaugggcggucaugauca

SEQ ID NO: 2254029 - RNA, 19 nt, Artificial Sequence
  Description of Artificial Sequence: Synthetic oligonucleotide
aguucuauggaguguacca

SEQ ID NO: 2254030 - RNA, 19 nt, Artificial Sequence
  Description of Artificial Sequence: Synthetic oligonucleotide
aacuacaaaggguguuuuc

SEQ ID NO: 2254031 - RNA, 19 nt, Artificial Sequence
  Description of Artificial Sequence: Synthetic oligonucleotide
ugcagucaguaaaugggcg

SEQ ID NO: 2254032 - RNA, 19 nt, Artificial Sequence
  Description of Artificial Sequence: Synthetic oligonucleotide
gguuacaaggaacugagug

SEQ ID NO: 2254033 - RNA, 19 nt, Artificial Sequence
  Description of Artificial Sequence: Synthetic oligonucleotide
ucuauggaguguaccacag

SEQ ID NO: 2254034 - RNA, 19 nt, Artificial Sequence
  Description of Artificial Sequence: Synthetic oligonucleotide
accuuucucaaacaaaccu

SEQ ID NO: 2254035 - RNA, 19 nt, Artificial Sequence
  Description of Artificial Sequence: Synthetic oligonucleotide
acaacauaugauacgacuc

SEQ ID NO: 2254036 - RNA, 19 nt, Artificial Sequence
  Description of Artificial Sequence: Synthetic oligonucleotide
aaagaggccaaugacaauu

SEQ ID NO: 2254037 - RNA, 19 nt, Artificial Sequence
  Description of Artificial Sequence: Synthetic oligonucleotide
uuugccauccaaccaugag

SEQ ID NO: 2254038 - RNA, 19 nt, Artificial Sequence
  Description of Artificial Sequence: Synthetic oligonucleotide
uggugcagucaguaaaugg

SEQ ID NO: 2254039 - RNA, 19 nt, Artificial Sequence
  Description of Artificial Sequence: Synthetic oligonucleotide
acuuccuuuauacccguag

SEQ ID NO: 2254040 - RNA, 19 nt, Artificial Sequence
  Description of Artificial Sequence: Synthetic oligonucleotide
uuaccugucaagaauuaua

SEQ ID NO: 2254041 - RNA, 19 nt, Artificial Sequence
  Description of Artificial Sequence: Synthetic oligonucleotide
ugucaagaauuauaugaac

SEQ ID NO: 2254042 - RNA, 19 nt, Artificial Sequence
  Description of Artificial Sequence: Synthetic oligonucleotide
agugaugaacacacggacc

SEQ ID NO: 2254043 - RNA, 19 nt, Artificial Sequence
  Description of Artificial Sequence: Synthetic oligonucleotide
guuacaaggaacugaguga

SEQ ID NO: 2254044 - RNA, 19 nt, Artificial Sequence
  Description of Artificial Sequence: Synthetic oligonucleotide
ucuuggguaccacuuuucc

SEQ ID NO: 2254045 - RNA, 19 nt, Artificial Sequence
  Description of Artificial Sequence: Synthetic oligonucleotide
augcucauuccuccggugc

SEQ ID NO: 2254046 - RNA, 19 nt, Artificial Sequence
  Description of Artificial Sequence: Synthetic oligonucleotide
agucaucccauccaggacu

SEQ ID NO: 2254047 - RNA, 19 nt, Artificial Sequence
  Description of Artificial Sequence: Synthetic oligonucleotide
aggccaaugacaauucuac

SEQ ID NO: 2254048 - RNA, 19 nt, Artificial Sequence
  Description of Artificial Sequence: Synthetic oligonucleotide
uaccugucaagaauuauau

SEQ ID NO: 2254049 - RNA, 19 nt, Artificial Sequence
  Description of Artificial Sequence: Synthetic oligonucleotide
agaauuauaugaacaaaga

SEQ ID NO: 2254050 - RNA, 19 nt, Artificial Sequence
  Description of Artificial Sequence: Synthetic oligonucleotide
uaaaugggcggucaugauc

SEQ ID NO: 2254051 - RNA, 19 nt, Artificial Sequence
  Description of Artificial Sequence: Synthetic oligonucleotide
gacauacaacauaugauac

SEQ ID NO: 2254052 - RNA, 19 nt, Artificial Sequence
  Description of Artificial Sequence: Synthetic oligonucleotide
gucucuagcagugaagucc

SEQ ID NO: 2254053 - RNA, 19 nt, Artificial Sequence
  Description of Artificial Sequence: Synthetic oligonucleotide
uuccaaauacaacauguuu

SEQ ID NO: 2254054 - RNA, 19 nt, Artificial Sequence
  Description of Artificial Sequence: Synthetic oligonucleotide
agagccacaaaguuuucca

SEQ ID NO: 2254055 - RNA, 19 nt, Artificial Sequence
  Description of Artificial Sequence: Synthetic oligonucleotide
augcugacccacccaaugc

SEQ ID NO: 2254056 - RNA, 19 nt, Artificial Sequence
  Description of Artificial Sequence: Synthetic oligonucleotide
caucaagacacagaaaauc

SEQ ID NO: 2254057 - RNA, 19 nt, Artificial Sequence
  Description of Artificial Sequence: Synthetic oligonucleotide
accucaacuacaaagggug

SEQ ID NO: 2254058 - RNA, 19 nt, Artificial Sequence
  Description of Artificial Sequence: Synthetic oligonucleotide
aaaugcucauuccuccggu

SEQ ID NO: 2254059 - RNA, 19 nt, Artificial Sequence
  Description of Artificial Sequence: Synthetic oligonucleotide
gauacgacucaaauuuccc

SEQ ID NO: 2254060 - RNA, 19 nt, Artificial Sequence
  Description of Artificial Sequence: Synthetic oligonucleotide
aguggguagugaugaacac

SEQ ID NO: 2254061 - RNA, 19 nt, Artificial Sequence
  Description of Artificial Sequence: Synthetic oligonucleotide
agacacagaaaaucugaug

SEQ ID NO: 2254062 - RNA, 19 nt, Artificial Sequence
  Description of Artificial Sequence: Synthetic oligonucleotide
uaagccucauuguagucac

SEQ ID NO: 2254063 - RNA, 19 nt, Artificial Sequence
  Description of Artificial Sequence: Synthetic oligonucleotide
uucuauggaguguaccaca

SEQ ID NO: 2254064 - RNA, 19 nt, Artificial Sequence
  Description of Artificial Sequence: Synthetic oligonucleotide
aguaaaugggcggucauga

SEQ ID NO: 2254065 - RNA, 19 nt, Artificial Sequence
  Description of Artificial Sequence: Synthetic oligonucleotide
uagugagcgguagaagugg

SEQ ID NO: 2254066 - RNA, 19 nt, Artificial Sequence
  Description of Artificial Sequence: Synthetic oligonucleotide
auaugauacgacucaaauu

SEQ ID NO: 2254067 - RNA, 19 nt, Artificial Sequence
  Description of Artificial Sequence: Synthetic oligonucleotide
aucaagacacagaaaaucu

SEQ ID NO: 2254068 - RNA, 19 nt, Artificial Sequence
  Description of Artificial Sequence: Synthetic oligonucleotide
uggaguguaccacagucau

SEQ ID NO: 2254069 - RNA, 19 nt, Artificial Sequence
  Description of Artificial Sequence: Synthetic oligonucleotide
cuuccuuuauacccguagc

SEQ ID NO: 2254070 - RNA, 19 nt, Artificial Sequence
  Description of Artificial Sequence: Synthetic oligonucleotide
uuaauauaaagagcaucaa

SEQ ID NO: 2254071 - RNA, 19 nt, Artificial Sequence
  Description of Artificial Sequence: Synthetic oligonucleotide
agggaccucgcuuucggac

SEQ ID NO: 2254072 - RNA, 19 nt, Artificial Sequence
  Description of Artificial Sequence: Synthetic oligonucleotide
aaggaacugagugaaacua

SEQ ID NO: 2254073 - RNA, 19 nt, Artificial Sequence
  Description of Artificial Sequence: Synthetic oligonucleotide
augacucgauggaagauac

SEQ ID NO: 2254074 - RNA, 19 nt, Artificial Sequence
  Description of Artificial Sequence: Synthetic oligonucleotide
ugcugacccacccaaugcc

SEQ ID NO: 2254075 - RNA, 19 nt, Artificial Sequence
  Description of Artificial Sequence: Synthetic oligonucleotide
ugcuaagccucauuguagu

SEQ ID NO: 2254076 - RNA, 19 nt, Artificial Sequence
  Description of Artificial Sequence: Synthetic oligonucleotide
guaccacuuuuccaaagag

SEQ ID NO: 2254077 - RNA, 19 nt, Artificial Sequence
  Description of Artificial Sequence: Synthetic oligonucleotide
aaagaagaccuuggcgguc

SEQ ID NO: 2254078 - RNA, 19 nt, Artificial Sequence
  Description of Artificial Sequence: Synthetic oligonucleotide
cauggagguuacaaggaac

SEQ ID NO: 2254079 - RNA, 19 nt, Artificial Sequence
  Description of Artificial Sequence: Synthetic oligonucleotide
auacgacucaaauuucccu

SEQ ID NO: 2254080 - RNA, 19 nt, Artificial Sequence
  Description of Artificial Sequence: Synthetic oligonucleotide
ugaaguucuauggagugua

SEQ ID NO: 2254081 - RNA, 19 nt, Artificial Sequence
  Description of Artificial Sequence: Synthetic oligonucleotide
gguguuuucacaucuaucu

SEQ ID NO: 2254082 - RNA, 19 nt, Artificial Sequence
  Description of Artificial Sequence: Synthetic oligonucleotide
acgggcgcaacccuggauc

SEQ ID NO: 2254083 - RNA, 19 nt, Artificial Sequence
  Description of Artificial Sequence: Synthetic oligonucleotide
gccacaaaguuuuccaccg

SEQ ID NO: 2254084 - RNA, 19 nt, Artificial Sequence
  Description of Artificial Sequence: Synthetic oligonucleotide
cugagugaaacuaaacaaa

SEQ ID NO: 2254085 - RNA, 19 nt, Artificial Sequence
  Description of Artificial Sequence: Synthetic oligonucleotide
gucuccaaucuucacauca

SEQ ID NO: 2254086 - RNA, 19 nt, Artificial Sequence
  Description of Artificial Sequence: Synthetic oligonucleotide
cucauuguagucaccuuuc

SEQ ID NO: 2254087 - RNA, 19 nt, Artificial Sequence
  Description of Artificial Sequence: Synthetic oligonucleotide
cuacaaaggguguuuucac

SEQ ID NO: 2254088 - RNA, 19 nt, Artificial Sequence
  Description of Artificial Sequence: Synthetic oligonucleotide
ugagcgguagaaguggcug

SEQ ID NO: 2254089 - RNA, 19 nt, Artificial Sequence
  Description of Artificial Sequence: Synthetic oligonucleotide
cauuucugucaccagucag

SEQ ID NO: 2254090 - RNA, 19 nt, Artificial Sequence
  Description of Artificial Sequence: Synthetic oligonucleotide
uuucggacgcccgaggacc

SEQ ID NO: 2254091 - RNA, 19 nt, Artificial Sequence
  Description of Artificial Sequence: Synthetic oligonucleotide
uccuuuauacccguagccu

SEQ ID NO: 2254092 - RNA, 19 nt, Artificial Sequence
  Description of Artificial Sequence: Synthetic oligonucleotide
gaagacacgagcgugccga

SEQ ID NO: 2254093 - RNA, 19 nt, Artificial Sequence
  Description of Artificial Sequence: Synthetic oligonucleotide
acagcuaguggguagugau

SEQ ID NO: 2254094 - RNA, 19 nt, Artificial Sequence
  Description of Artificial Sequence: Synthetic oligonucleotide
uacgacucaaauuucccuu

SEQ ID NO: 2254095 - RNA, 19 nt, Artificial Sequence
  Description of Artificial Sequence: Synthetic oligonucleotide
cagaucagccaacauggag

SEQ ID NO: 2254096 - RNA, 19 nt, Artificial Sequence
  Description of Artificial Sequence: Synthetic oligonucleotide
aaugacaauucuacccaca

SEQ ID NO: 2254097 - RNA, 19 nt, Artificial Sequence
  Description of Artificial Sequence: Synthetic oligonucleotide
aagaggccaaugacaauuc

SEQ ID NO: 2254098 - RNA, 19 nt, Artificial Sequence
  Description of Artificial Sequence: Synthetic oligonucleotide
ugaugacauacaacauaug

SEQ ID NO: 2254099 - RNA, 19 nt, Artificial Sequence
  Description of Artificial Sequence: Synthetic oligonucleotide
aaccuuccagaucagccaa

SEQ ID NO: 2254100 - RNA, 19 nt, Artificial Sequence
  Description of Artificial Sequence: Synthetic oligonucleotide
caacauaugauacgacuca

SEQ ID NO: 2254101 - RNA, 19 nt, Artificial Sequence
  Description of Artificial Sequence: Synthetic oligonucleotide
auaugaacaaagaaugcua

SEQ ID NO: 2254102 - RNA, 19 nt, Artificial Sequence
  Description of Artificial Sequence: Synthetic oligonucleotide
ucaucaggaaaugucucac

SEQ ID NO: 2254103 - RNA, 19 nt, Artificial Sequence
  Description of Artificial Sequence: Synthetic oligonucleotide
ucauuguagucaccuuucu

SEQ ID NO: 2254104 - RNA, 19 nt, Artificial Sequence
  Description of Artificial Sequence: Synthetic oligonucleotide
ucuccaaucuucacaucaa

SEQ ID NO: 2254105 - RNA, 19 nt, Artificial Sequence
  Description of Artificial Sequence: Synthetic oligonucleotide
aagagcaucaagacacaga

SEQ ID NO: 2254106 - RNA, 19 nt, Artificial Sequence
  Description of Artificial Sequence: Synthetic oligonucleotide
acaucuaucuugccacugu

SEQ ID NO: 2254107 - RNA, 19 nt, Artificial Sequence
  Description of Artificial Sequence: Synthetic oligonucleotide
uccggugccgucucuagca

SEQ ID NO: 2254108 - RNA, 19 nt, Artificial Sequence
  Description of Artificial Sequence: Synthetic oligonucleotide
aacauaugauacgacucaa

SEQ ID NO: 2254109 - RNA, 19 nt, Artificial Sequence
  Description of Artificial Sequence: Synthetic oligonucleotide
augaucauccguugcuuga

SEQ ID NO: 2254110 - RNA, 19 nt, Artificial Sequence
  Description of Artificial Sequence: Synthetic oligonucleotide
augacauacaacauaugau

SEQ ID NO: 2254111 - RNA, 19 nt, Artificial Sequence
  Description of Artificial Sequence: Synthetic oligonucleotide
aggacuuuuccaaauacaa

SEQ ID NO: 2254112 - RNA, 19 nt, Artificial Sequence
  Description of Artificial Sequence: Synthetic oligonucleotide
gggaccucaacuacaaagg

SEQ ID NO: 2254113 - RNA, 19 nt, Artificial Sequence
  Description of Artificial Sequence: Synthetic oligonucleotide
cugucaagaauuauaugaa

SEQ ID NO: 2254114 - RNA, 19 nt, Artificial Sequence
  Description of Artificial Sequence: Synthetic oligonucleotide
aagaaugcuaagccucauu

SEQ ID NO: 2254115 - RNA, 19 nt, Artificial Sequence
  Description of Artificial Sequence: Synthetic oligonucleotide
caucaggaaaugucucacc

SEQ ID NO: 2254116 - RNA, 19 nt, Artificial Sequence
  Description of Artificial Sequence: Synthetic oligonucleotide
gacccgggaucauagugag

SEQ ID NO: 2254117 - RNA, 19 nt, Artificial Sequence
  Description of Artificial Sequence: Synthetic oligonucleotide
caaauuucccuuuaccugu

SEQ ID NO: 2254118 - RNA, 19 nt, Artificial Sequence
  Description of Artificial Sequence: Synthetic oligonucleotide
aguguaccacagucauccc

SEQ ID NO: 2254119 - RNA, 19 nt, Artificial Sequence
  Description of Artificial Sequence: Synthetic oligonucleotide
acagaaaaucugaugacau

SEQ ID NO: 2254120 - RNA, 19 nt, Artificial Sequence
  Description of Artificial Sequence: Synthetic oligonucleotide
gaccuuggcggucaccgag

SEQ ID NO: 2254121 - RNA, 19 nt, Artificial Sequence
  Description of Artificial Sequence: Synthetic oligonucleotide
caugaucauccguugcuug

SEQ ID NO: 2254122 - RNA, 19 nt, Artificial Sequence
  Description of Artificial Sequence: Synthetic oligonucleotide
gacucaaauuucccuuuac

SEQ ID NO: 2254123 - RNA, 19 nt, Artificial Sequence
  Description of Artificial Sequence: Synthetic oligonucleotide
agcgugccgagccccaggc

SEQ ID NO: 2254124 - RNA, 19 nt, Artificial Sequence
  Description of Artificial Sequence: Synthetic oligonucleotide
caugcugacccacccaaug

SEQ ID NO: 2254125 - RNA, 19 nt, Artificial Sequence
  Description of Artificial Sequence: Synthetic oligonucleotide
caccuuucucaaacaaacc

SEQ ID NO: 2254126 - RNA, 19 nt, Artificial Sequence
  Description of Artificial Sequence: Synthetic oligonucleotide
gcagucaguaaaugggcgg

SEQ ID NO: 2254127 - RNA, 19 nt, Artificial Sequence
  Description of Artificial Sequence: Synthetic oligonucleotide
ggaccucaacuacaaaggg

SEQ ID NO: 2254128 - RNA, 19 nt, Artificial Sequence
  Description of Artificial Sequence: Synthetic oligonucleotide
gauggcacgggcgcaaccc

SEQ ID NO: 2254129 - RNA, 19 nt, Artificial Sequence
  Description of Artificial Sequence: Synthetic oligonucleotide
agcuaguggguagugauga

SEQ ID NO: 2254130 - RNA, 19 nt, Artificial Sequence
  Description of Artificial Sequence: Synthetic oligonucleotide
ucaacuacaaaggguguuu

SEQ ID NO: 2254131 - RNA, 19 nt, Artificial Sequence
  Description of Artificial Sequence: Synthetic oligonucleotide
uauacccguagccuuucuc

SEQ ID NO: 2254132 - RNA, 19 nt, Artificial Sequence
  Description of Artificial Sequence: Synthetic oligonucleotide
auggagguuacaaggaacu

SEQ ID NO: 2254133 - RNA, 19 nt, Artificial Sequence
  Description of Artificial Sequence: Synthetic oligonucleotide
ucauccguugcuugaaguu

SEQ ID NO: 2254134 - RNA, 19 nt, Artificial Sequence
  Description of Artificial Sequence: Synthetic oligonucleotide
auagugagcgguagaagug

SEQ ID NO: 2254135 - RNA, 19 nt, Artificial Sequence
  Description of Artificial Sequence: Synthetic oligonucleotide
aucauccguugcuugaagu

SEQ ID NO: 2254136 - RNA, 19 nt, Artificial Sequence
  Description of Artificial Sequence: Synthetic oligonucleotide
aagacagcuaguggguagu

SEQ ID NO: 2254137 - RNA, 19 nt, Artificial Sequence
  Description of Artificial Sequence: Synthetic oligonucleotide
caaugacaauucuacccac

SEQ ID NO: 2254138 - RNA, 19 nt, Artificial Sequence
  Description of Artificial Sequence: Synthetic oligonucleotide
cauagugagcgguagaagu

SEQ ID NO: 2254139 - RNA, 19 nt, Artificial Sequence
  Description of Artificial Sequence: Synthetic oligonucleotide
cuagcagugaaguccccuc

SEQ ID NO: 2254140 - RNA, 19 nt, Artificial Sequence
  Description of Artificial Sequence: Synthetic oligonucleotide
cccgggaucauagugagcg

SEQ ID NO: 2254141 - RNA, 19 nt, Artificial Sequence
  Description of Artificial Sequence: Synthetic oligonucleotide
ucaggaaaugucucaccau

SEQ ID NO: 2254142 - RNA, 19 nt, Artificial Sequence
  Description of Artificial Sequence: Synthetic oligonucleotide
acucgauggaagauacuuc

SEQ ID NO: 2254143 - RNA, 19 nt, Artificial Sequence
  Description of Artificial Sequence: Synthetic oligonucleotide
uugccagagccacaaaguu

SEQ ID NO: 2254144 - RNA, 19 nt, Artificial Sequence
  Description of Artificial Sequence: Synthetic oligonucleotide
guagugaugaacacacgga

SEQ ID NO: 2254145 - RNA, 19 nt, Artificial Sequence
  Description of Artificial Sequence: Synthetic oligonucleotide
cccgaagaagacacgagcg

SEQ ID NO: 2254146 - RNA, 19 nt, Artificial Sequence
  Description of Artificial Sequence: Synthetic oligonucleotide
aucauagugagcgguagaa

SEQ ID NO: 2254147 - RNA, 19 nt, Artificial Sequence
  Description of Artificial Sequence: Synthetic oligonucleotide
cuaucuugccacuguugac

SEQ ID NO: 2254148 - RNA, 19 nt, Artificial Sequence
  Description of Artificial Sequence: Synthetic oligonucleotide
cucaucaggaaaugucuca

SEQ ID NO: 2254149 - RNA, 19 nt, Artificial Sequence
  Description of Artificial Sequence: Synthetic oligonucleotide
uuuaccugucaagaauuau

SEQ ID NO: 2254150 - RNA, 19 nt, Artificial Sequence
  Description of Artificial Sequence: Synthetic oligonucleotide
accugucaagaauuauaug

SEQ ID NO: 2254151 - RNA, 19 nt, Artificial Sequence
  Description of Artificial Sequence: Synthetic oligonucleotide
cuaguggguagugaugaac

SEQ ID NO: 2254152 - RNA, 19 nt, Artificial Sequence
  Description of Artificial Sequence: Synthetic oligonucleotide
ucaguaaaugggcggucau

SEQ ID NO: 2254153 - RNA, 19 nt, Artificial Sequence
  Description of Artificial Sequence: Synthetic oligonucleotide
agugagcgguagaaguggc

SEQ ID NO: 2254154 - RNA, 19 nt, Artificial Sequence
  Description of Artificial Sequence: Synthetic oligonucleotide
uccuguuuuccaacauuuc

SEQ ID NO: 2254155 - RNA, 19 nt, Artificial Sequence
  Description of Artificial Sequence: Synthetic oligonucleotide
uuuccaccgucuuggguac

SEQ ID NO: 2254156 - RNA, 19 nt, Artificial Sequence
  Description of Artificial Sequence: Synthetic oligonucleotide
caugagggcuuggucaagg

SEQ ID NO: 2254157 - RNA, 19 nt, Artificial Sequence
  Description of Artificial Sequence: Synthetic oligonucleotide
ucuagcagugaaguccccu

SEQ ID NO: 2254158 - RNA, 19 nt, Artificial Sequence
  Description of Artificial Sequence: Synthetic oligonucleotide
augauacgacucaaauuuc

SEQ ID NO: 2254159 - RNA, 19 nt, Artificial Sequence
  Description of Artificial Sequence: Synthetic oligonucleotide
augcuaagccucauuguag

SEQ ID NO: 2254160 - RNA, 19 nt, Artificial Sequence
  Description of Artificial Sequence: Synthetic oligonucleotide
aaaagacagcuagugggua

SEQ ID NO: 2254161 - RNA, 19 nt, Artificial Sequence
  Description of Artificial Sequence: Synthetic oligonucleotide
gaucauagugagcgguaga

SEQ ID NO: 2254162 - RNA, 19 nt, Artificial Sequence
  Description of Artificial Sequence: Synthetic oligonucleotide
aagacacgagcgugccgag

SEQ ID NO: 2254163 - RNA, 19 nt, Artificial Sequence
  Description of Artificial Sequence: Synthetic oligonucleotide
cauaugauacgacucaaau

SEQ ID NO: 2254164 - RNA, 19 nt, Artificial Sequence
  Description of Artificial Sequence: Synthetic oligonucleotide
acuguugacgauggugcag

SEQ ID NO: 2254165 - RNA, 19 nt, Artificial Sequence
  Description of Artificial Sequence: Synthetic oligonucleotide
caaaggguguuuucacauc

SEQ ID NO: 2254166 - RNA, 19 nt, Artificial Sequence
  Description of Artificial Sequence: Synthetic oligonucleotide
gaugacucgauggaagaua

SEQ ID NO: 2254167 - RNA, 19 nt, Artificial Sequence
  Description of Artificial Sequence: Synthetic oligonucleotide
agcgguagaaguggcugcg

SEQ ID NO: 2254168 - RNA, 19 nt, Artificial Sequence
  Description of Artificial Sequence: Synthetic oligonucleotide
ccaacauggagguuacaag

SEQ ID NO: 2254169 - RNA, 19 nt, Artificial Sequence
  Description of Artificial Sequence: Synthetic oligonucleotide
auacuuccuuuauacccgu

SEQ ID NO: 2254170 - RNA, 19 nt, Artificial Sequence
  Description of Artificial Sequence: Synthetic oligonucleotide
caggacuuuuccaaauaca

SEQ ID NO: 2254171 - RNA, 19 nt, Artificial Sequence
  Description of Artificial Sequence: Synthetic oligonucleotide
aguggcugcgauggcacgg

SEQ ID NO: 2254172 - RNA, 19 nt, Artificial Sequence
  Description of Artificial Sequence: Synthetic oligonucleotide
ugaugaacacacggaccag

SEQ ID NO: 2254173 - RNA, 19 nt, Artificial Sequence
  Description of Artificial Sequence: Synthetic oligonucleotide
guucuauggaguguaccac

SEQ ID NO: 2254174 - RNA, 19 nt, Artificial Sequence
  Description of Artificial Sequence: Synthetic oligonucleotide
gaucagccaacauggaggu

SEQ ID NO: 2254175 - RNA, 19 nt, Artificial Sequence
  Description of Artificial Sequence: Synthetic oligonucleotide
gacccacccaaugccauag

SEQ ID NO: 2254176 - RNA, 19 nt, Artificial Sequence
  Description of Artificial Sequence: Synthetic oligonucleotide
gaaugcuaagccucauugu

SEQ ID NO: 2254177 - RNA, 19 nt, Artificial Sequence
  Description of Artificial Sequence: Synthetic oligonucleotide
ugccauagugcuucaguuu

SEQ ID NO: 2254178 - RNA, 19 nt, Artificial Sequence
  Description of Artificial Sequence: Synthetic oligonucleotide
accaugagggcuuggucaa

SEQ ID NO: 2254179 - RNA, 19 nt, Artificial Sequence
  Description of Artificial Sequence: Synthetic oligonucleotide
acacgagcgugccgagccc

SEQ ID NO: 2254180 - RNA, 19 nt, Artificial Sequence
  Description of Artificial Sequence: Synthetic oligonucleotide
gggaccucgcuuucggacg

SEQ ID NO: 2254181 - RNA, 19 nt, Artificial Sequence
  Description of Artificial Sequence: Synthetic oligonucleotide
cugucaccagucagggacc

SEQ ID NO: 2254182 - RNA, 19 nt, Artificial Sequence
  Description of Artificial Sequence: Synthetic oligonucleotide
uggagguuacaaggaacug

SEQ ID NO: 2254183 - RNA, 19 nt, Artificial Sequence
  Description of Artificial Sequence: Synthetic oligonucleotide
ucccuuuaccugucaagaa

SEQ ID NO: 2254184 - RNA, 19 nt, Artificial Sequence
  Description of Artificial Sequence: Synthetic oligonucleotide
gguaccacuuuuccaaaga

SEQ ID NO: 2254185 - RNA, 19 nt, Artificial Sequence
  Description of Artificial Sequence: Synthetic oligonucleotide
agaggccaaugacaauucu

SEQ ID NO: 2254186 - RNA, 19 nt, Artificial Sequence
  Description of Artificial Sequence: Synthetic oligonucleotide
ugaucauccguugcuugaa

SEQ ID NO: 2254187 - RNA, 19 nt, Artificial Sequence
  Description of Artificial Sequence: Synthetic oligonucleotide
gguagaaguggcugcgaug

SEQ ID NO: 2254188 - RNA, 19 nt, Artificial Sequence
  Description of Artificial Sequence: Synthetic oligonucleotide
caaaagacagcuagugggu

SEQ ID NO: 2254189 - RNA, 19 nt, Artificial Sequence
  Description of Artificial Sequence: Synthetic oligonucleotide
cuuucggacgcccgaggac

SEQ ID NO: 2254190 - RNA, 19 nt, Artificial Sequence
  Description of Artificial Sequence: Synthetic oligonucleotide
caggaaaugucucaccaua

SEQ ID NO: 2254191 - RNA, 19 nt, Artificial Sequence
  Description of Artificial Sequence: Synthetic oligonucleotide
uuuauacccguagccuuuc

SEQ ID NO: 2254192 - RNA, 19 nt, Artificial Sequence
  Description of Artificial Sequence: Synthetic oligonucleotide
acgacucaaauuucccuuu

SEQ ID NO: 2254193 - RNA, 19 nt, Artificial Sequence
  Description of Artificial Sequence: Synthetic oligonucleotide
ccacccaaugccauagugc

SEQ ID NO: 2254194 - RNA, 19 nt, Artificial Sequence
  Description of Artificial Sequence: Synthetic oligonucleotide
aacaaaccuuccagaucag

SEQ ID NO: 2254195 - RNA, 19 nt, Artificial Sequence
  Description of Artificial Sequence: Synthetic oligonucleotide
uucuacccacaucuuuguc

SEQ ID NO: 2254196 - RNA, 19 nt, Artificial Sequence
  Description of Artificial Sequence: Synthetic oligonucleotide
ccaaugacaauucuaccca

SEQ ID NO: 2254197 - RNA, 19 nt, Artificial Sequence
  Description of Artificial Sequence: Synthetic oligonucleotide
ucaccgagggaccucgcuu

SEQ ID NO: 2254198 - RNA, 19 nt, Artificial Sequence
  Description of Artificial Sequence: Synthetic oligonucleotide
aucuaucuugccacuguug

SEQ ID NO: 2254199 - RNA, 19 nt, Artificial Sequence
  Description of Artificial Sequence: Synthetic oligonucleotide
ggucaugaucauccguugc

SEQ ID NO: 2254200 - RNA, 19 nt, Artificial Sequence
  Description of Artificial Sequence: Synthetic oligonucleotide
agaagaccuuggcggucac

SEQ ID NO: 2254201 - RNA, 19 nt, Artificial Sequence
  Description of Artificial Sequence: Synthetic oligonucleotide
uuauacccguagccuuucu

SEQ ID NO: 2254202 - RNA, 19 nt, Artificial Sequence
  Description of Artificial Sequence: Synthetic oligonucleotide
ugaugacucgauggaagau

SEQ ID NO: 2254203 - RNA, 19 nt, Artificial Sequence
  Description of Artificial Sequence: Synthetic oligonucleotide
cacccaaugccauagugcu

SEQ ID NO: 2254204 - RNA, 19 nt, Artificial Sequence
  Description of Artificial Sequence: Synthetic oligonucleotide
ggcuuggucaaggugauga

SEQ ID NO: 2254205 - RNA, 19 nt, Artificial Sequence
  Description of Artificial Sequence: Synthetic oligonucleotide
uucggacgcccgaggaccc

SEQ ID NO: 2254206 - RNA, 19 nt, Artificial Sequence
  Description of Artificial Sequence: Synthetic oligonucleotide
uccccuccuuggaucauga

SEQ ID NO: 2254207 - RNA, 19 nt, Artificial Sequence
  Description of Artificial Sequence: Synthetic oligonucleotide
gacucgauggaagauacuu

SEQ ID NO: 2254208 - RNA, 19 nt, Artificial Sequence
  Description of Artificial Sequence: Synthetic oligonucleotide
auggaguguaccacaguca

SEQ ID NO: 2254209 - RNA, 19 nt, Artificial Sequence
  Description of Artificial Sequence: Synthetic oligonucleotide
gaccccgaagaagacacga

SEQ ID NO: 2254210 - RNA, 19 nt, Artificial Sequence
  Description of Artificial Sequence: Synthetic oligonucleotide
gaaguucuauggaguguac

SEQ ID NO: 2254211 - RNA, 19 nt, Artificial Sequence
  Description of Artificial Sequence: Synthetic oligonucleotide
ugacucgauggaagauacu

SEQ ID NO: 2254212 - RNA, 19 nt, Artificial Sequence
  Description of Artificial Sequence: Synthetic oligonucleotide
cagcuaguggguagugaug

SEQ ID NO: 2254213 - RNA, 19 nt, Artificial Sequence
  Description of Artificial Sequence: Synthetic oligonucleotide
gagccccaggcagagcacg

SEQ ID NO: 2254214 - RNA, 19 nt, Artificial Sequence
  Description of Artificial Sequence: Synthetic oligonucleotide
ugccgucucuagcagugaa

SEQ ID NO: 2254215 - RNA, 19 nt, Artificial Sequence
  Description of Artificial Sequence: Synthetic oligonucleotide
cagucaucccauccaggac

SEQ ID NO: 2254216 - RNA, 19 nt, Artificial Sequence
  Description of Artificial Sequence: Synthetic oligonucleotide
agacacgagcgugccgagc

SEQ ID NO: 2254217 - RNA, 19 nt, Artificial Sequence
  Description of Artificial Sequence: Synthetic oligonucleotide
caguaaaugggcggucaug

SEQ ID NO: 2254218 - RNA, 19 nt, Artificial Sequence
  Description of Artificial Sequence: Synthetic oligonucleotide
ccaggacuuuuccaaauac

SEQ ID NO: 2254219 - RNA, 19 nt, Artificial Sequence
  Description of Artificial Sequence: Synthetic oligonucleotide
auccguugcuugaaguucu

SEQ ID NO: 2254220 - RNA, 19 nt, Artificial Sequence
  Description of Artificial Sequence: Synthetic oligonucleotide
augucucaccauaaaugcu

SEQ ID NO: 2254221 - RNA, 19 nt, Artificial Sequence
  Description of Artificial Sequence: Synthetic oligonucleotide
uggguaccacuuuuccaaa

SEQ ID NO: 2254222 - RNA, 19 nt, Artificial Sequence
  Description of Artificial Sequence: Synthetic oligonucleotide
guggguagugaugaacaca

SEQ ID NO: 2254223 - RNA, 19 nt, Artificial Sequence
  Description of Artificial Sequence: Synthetic oligonucleotide
cuuuaccugucaagaauua

SEQ ID NO: 2254224 - RNA, 19 nt, Artificial Sequence
  Description of Artificial Sequence: Synthetic oligonucleotide
gggacccgggaucauagug

SEQ ID NO: 2254225 - RNA, 19 nt, Artificial Sequence
  Description of Artificial Sequence: Synthetic oligonucleotide
gacgauggugcagucagua

SEQ ID NO: 2254226 - RNA, 19 nt, Artificial Sequence
  Description of Artificial Sequence: Synthetic oligonucleotide
acauaugauacgacucaaa

SEQ ID NO: 2254227 - RNA, 19 nt, Artificial Sequence
  Description of Artificial Sequence: Synthetic oligonucleotide
caacauguuugccauccaa

SEQ ID NO: 2254228 - RNA, 19 nt, Artificial Sequence
  Description of Artificial Sequence: Synthetic oligonucleotide
gaggccaaugacaauucua

SEQ ID NO: 2254229 - RNA, 19 nt, Artificial Sequence
  Description of Artificial Sequence: Synthetic oligonucleotide
aggaacugagugaaacuaa

SEQ ID NO: 2254230 - RNA, 19 nt, Artificial Sequence
  Description of Artificial Sequence: Synthetic oligonucleotide
aggaaaugucucaccauaa

SEQ ID NO: 2254231 - RNA, 19 nt, Artificial Sequence
  Description of Artificial Sequence: Synthetic oligonucleotide
ccacuuuuccaaagaggcc

SEQ ID NO: 2254232 - RNA, 19 nt, Artificial Sequence
  Description of Artificial Sequence: Synthetic oligonucleotide
cagccaacauggagguuac

SEQ ID NO: 2254233 - RNA, 19 nt, Artificial Sequence
  Description of Artificial Sequence: Synthetic oligonucleotide
accgagggaccucgcuuuc

SEQ ID NO: 2254234 - RNA, 19 nt, Artificial Sequence
  Description of Artificial Sequence: Synthetic oligonucleotide
cagacggggacccgggauc

SEQ ID NO: 2254235 - RNA, 19 nt, Artificial Sequence
  Description of Artificial Sequence: Synthetic oligonucleotide
caaggaacugagugaaacu

SEQ ID NO: 2254236 - RNA, 19 nt, Artificial Sequence
  Description of Artificial Sequence: Synthetic oligonucleotide
cagucagggaccucaacua

SEQ ID NO: 2254237 - RNA, 19 nt, Artificial Sequence
  Description of Artificial Sequence: Synthetic oligonucleotide
ugacgauggugcagucagu

SEQ ID NO: 2254238 - RNA, 19 nt, Artificial Sequence
  Description of Artificial Sequence: Synthetic oligonucleotide
accucgcuuucggacgccc

SEQ ID NO: 2254239 - RNA, 19 nt, Artificial Sequence
  Description of Artificial Sequence: Synthetic oligonucleotide
acgauggugcagucaguaa

SEQ ID NO: 2254240 - RNA, 19 nt, Artificial Sequence
  Description of Artificial Sequence: Synthetic oligonucleotide
gucaccuuucucaaacaaa

SEQ ID NO: 2254241 - RNA, 19 nt, Artificial Sequence
  Description of Artificial Sequence: Synthetic oligonucleotide
guugccagagccacaaagu

SEQ ID NO: 2254242 - RNA, 19 nt, Artificial Sequence
  Description of Artificial Sequence: Synthetic oligonucleotide
acuaaacaaaagacagcua

SEQ ID NO: 2254243 - RNA, 19 nt, Artificial Sequence
  Description of Artificial Sequence: Synthetic oligonucleotide
ucgcuuucggacgcccgag

SEQ ID NO: 2254244 - RNA, 19 nt, Artificial Sequence
  Description of Artificial Sequence: Synthetic oligonucleotide
uggugucggggccagcauu

SEQ ID NO: 2254245 - RNA, 19 nt, Artificial Sequence
  Description of Artificial Sequence: Synthetic oligonucleotide
gacagcuaguggguaguga

SEQ ID NO: 2254246 - RNA, 19 nt, Artificial Sequence
  Description of Artificial Sequence: Synthetic oligonucleotide
aaugggcggucaugaucau

SEQ ID NO: 2254247 - RNA, 19 nt, Artificial Sequence
  Description of Artificial Sequence: Synthetic oligonucleotide
cagcagacggggacccggg

SEQ ID NO: 2254248 - RNA, 19 nt, Artificial Sequence
  Description of Artificial Sequence: Synthetic oligonucleotide
ucuccccuguugccagagc

SEQ ID NO: 2254249 - RNA, 19 nt, Artificial Sequence
  Description of Artificial Sequence: Synthetic oligonucleotide
accuuggcggucaccgagg

SEQ ID NO: 2254250 - RNA, 19 nt, Artificial Sequence
  Description of Artificial Sequence: Synthetic oligonucleotide
ugucaccagucagggaccu

SEQ ID NO: 2254251 - RNA, 19 nt, Artificial Sequence
  Description of Artificial Sequence: Synthetic oligonucleotide
ggucaaggugaugaagaac

SEQ ID NO: 2254252 - RNA, 19 nt, Artificial Sequence
  Description of Artificial Sequence: Synthetic oligonucleotide
ggaacugagugaaacuaaa

SEQ ID NO: 2254253 - RNA, 19 nt, Artificial Sequence
  Description of Artificial Sequence: Synthetic oligonucleotide
gaagaccuuggcggucacc

SEQ ID NO: 2254254 - RNA, 19 nt, Artificial Sequence
  Description of Artificial Sequence: Synthetic oligonucleotide
augggcggucaugaucauc

SEQ ID NO: 2254255 - RNA, 19 nt, Artificial Sequence
  Description of Artificial Sequence: Synthetic oligonucleotide
auggcacgggcgcaacccu

SEQ ID NO: 2254256 - RNA, 19 nt, Artificial Sequence
  Description of Artificial Sequence: Synthetic oligonucleotide
ugacccacccaaugccaua

SEQ ID NO: 2254257 - RNA, 19 nt, Artificial Sequence
  Description of Artificial Sequence: Synthetic oligonucleotide
uuggugucggggccagcau

SEQ ID NO: 2254258 - RNA, 19 nt, Artificial Sequence
  Description of Artificial Sequence: Synthetic oligonucleotide
uccaaccaugagggcuugg

SEQ ID NO: 2254259 - RNA, 19 nt, Artificial Sequence
  Description of Artificial Sequence: Synthetic oligonucleotide
accccgaagaagacacgag

SEQ ID NO: 2254260 - RNA, 19 nt, Artificial Sequence
  Description of Artificial Sequence: Synthetic oligonucleotide
ggugucggggccagcauug

SEQ ID NO: 2254261 - RNA, 19 nt, Artificial Sequence
  Description of Artificial Sequence: Synthetic oligonucleotide
ccgaggaccccgaagaaga

SEQ ID NO: 2254262 - RNA, 19 nt, Artificial Sequence
  Description of Artificial Sequence: Synthetic oligonucleotide
aaggguguuuucacaucua

SEQ ID NO: 2254263 - RNA, 19 nt, Artificial Sequence
  Description of Artificial Sequence: Synthetic oligonucleotide
cacuguugacgauggugca

SEQ ID NO: 2254264 - RNA, 19 nt, Artificial Sequence
  Description of Artificial Sequence: Synthetic oligonucleotide
cuuuauacccguagccuuu

SEQ ID NO: 2254265 - RNA, 19 nt, Artificial Sequence
  Description of Artificial Sequence: Synthetic oligonucleotide
cucuagcagugaagucccc

SEQ ID NO: 2254266 - RNA, 19 nt, Artificial Sequence
  Description of Artificial Sequence: Synthetic oligonucleotide
ggcgcaacccuggauccgg

SEQ ID NO: 2254267 - RNA, 19 nt, Artificial Sequence
  Description of Artificial Sequence: Synthetic oligonucleotide
cuccggugccgucucuagc

SEQ ID NO: 2254268 - RNA, 19 nt, Artificial Sequence
  Description of Artificial Sequence: Synthetic oligonucleotide
uccguugcuugaaguucua

SEQ ID NO: 2254269 - RNA, 19 nt, Artificial Sequence
  Description of Artificial Sequence: Synthetic oligonucleotide
gucuuggguaccacuuuuc

SEQ ID NO: 2254270 - RNA, 19 nt, Artificial Sequence
  Description of Artificial Sequence: Synthetic oligonucleotide
cucgcuuucggacgcccga

SEQ ID NO: 2254271 - RNA, 19 nt, Artificial Sequence
  Description of Artificial Sequence: Synthetic oligonucleotide
ggaccucgcuuucggacgc

SEQ ID NO: 2254272 - RNA, 19 nt, Artificial Sequence
  Description of Artificial Sequence: Synthetic oligonucleotide
accgucuuggguaccacuu

SEQ ID NO: 2254273 - RNA, 19 nt, Artificial Sequence
  Description of Artificial Sequence: Synthetic oligonucleotide
agcacggcgggcagcagca

SEQ ID NO: 2254274 - RNA, 19 nt, Artificial Sequence
  Description of Artificial Sequence: Synthetic oligonucleotide
cacgagcgugccgagcccc

SEQ ID NO: 2254275 - RNA, 19 nt, Artificial Sequence
  Description of Artificial Sequence: Synthetic oligonucleotide
gcagcagacggggacccgg

SEQ ID NO: 2254276 - RNA, 19 nt, Artificial Sequence
  Description of Artificial Sequence: Synthetic oligonucleotide
ucuugccacuguugacgau

SEQ ID NO: 2254277 - RNA, 19 nt, Artificial Sequence
  Description of Artificial Sequence: Synthetic oligonucleotide
ugcgauggcacgggcgcaa

SEQ ID NO: 2254278 - RNA, 19 nt, Artificial Sequence
  Description of Artificial Sequence: Synthetic oligonucleotide
gagggaccucgcuuucgga

SEQ ID NO: 2254279 - RNA, 19 nt, Artificial Sequence
  Description of Artificial Sequence: Synthetic oligonucleotide
agacggggacccgggauca

SEQ ID NO: 2254280 - RNA, 19 nt, Artificial Sequence
  Description of Artificial Sequence: Synthetic oligonucleotide
gcuaagccucauuguaguc

SEQ ID NO: 2254281 - RNA, 19 nt, Artificial Sequence
  Description of Artificial Sequence: Synthetic oligonucleotide
ggacccgggaucauaguga

SEQ ID NO: 2254282 - RNA, 19 nt, Artificial Sequence
  Description of Artificial Sequence: Synthetic oligonucleotide
cauccaaccaugagggcuu

SEQ ID NO: 2254283 - RNA, 19 nt, Artificial Sequence
  Description of Artificial Sequence: Synthetic oligonucleotide
cccacccaaugccauagug

SEQ ID NO: 2254284 - RNA, 19 nt, Artificial Sequence
  Description of Artificial Sequence: Synthetic oligonucleotide
ggguguuuucacaucuauc

SEQ ID NO: 2254285 - RNA, 19 nt, Artificial Sequence
  Description of Artificial Sequence: Synthetic oligonucleotide
cgugccgagccccaggcag

SEQ ID NO: 2254286 - RNA, 19 nt, Artificial Sequence
  Description of Artificial Sequence: Synthetic oligonucleotide
ggguagugaugaacacacg

SEQ ID NO: 2254287 - RNA, 19 nt, Artificial Sequence
  Description of Artificial Sequence: Synthetic oligonucleotide
cuguugacgauggugcagu

SEQ ID NO: 2254288 - RNA, 19 nt, Artificial Sequence
  Description of Artificial Sequence: Synthetic oligonucleotide
ggcugcgauggcacgggcg

SEQ ID NO: 2254289 - RNA, 19 nt, Artificial Sequence
  Description of Artificial Sequence: Synthetic oligonucleotide
ucauuccuccggugccguc

SEQ ID NO: 2254290 - RNA, 19 nt, Artificial Sequence
  Description of Artificial Sequence: Synthetic oligonucleotide
gagcaucaagacacagaaa

SEQ ID NO: 2254291 - RNA, 19 nt, Artificial Sequence
  Description of Artificial Sequence: Synthetic oligonucleotide
agguuacaaggaacugagu

SEQ ID NO: 2254292 - RNA, 19 nt, Artificial Sequence
  Description of Artificial Sequence: Synthetic oligonucleotide
gccaugcugacccacccaa

SEQ ID NO: 2254293 - RNA, 19 nt, Artificial Sequence
  Description of Artificial Sequence: Synthetic oligonucleotide
gugucggggccagcauugg

SEQ ID NO: 2254294 - RNA, 19 nt, Artificial Sequence
  Description of Artificial Sequence: Synthetic oligonucleotide
guaaaugggcggucaugau

SEQ ID NO: 2254295 - RNA, 19 nt, Artificial Sequence
  Description of Artificial Sequence: Synthetic oligonucleotide
agcagcagacggggacccg

SEQ ID NO: 2254296 - RNA, 19 nt, Artificial Sequence
  Description of Artificial Sequence: Synthetic oligonucleotide
ccuuggcggucaccgaggg

SEQ ID NO: 2254297 - RNA, 19 nt, Artificial Sequence
  Description of Artificial Sequence: Synthetic oligonucleotide
cgagggaccucgcuuucgg

SEQ ID NO: 2254298 - RNA, 19 nt, Artificial Sequence
  Description of Artificial Sequence: Synthetic oligonucleotide
gccgucucuagcagugaag

SEQ ID NO: 2254299 - RNA, 19 nt, Artificial Sequence
  Description of Artificial Sequence: Synthetic oligonucleotide
ccagucagggaccucaacu

SEQ ID NO: 2254300 - RNA, 19 nt, Artificial Sequence
  Description of Artificial Sequence: Synthetic oligonucleotide
ccuuucucaaacaaaccuu

SEQ ID NO: 2254301 - RNA, 19 nt, Artificial Sequence
  Description of Artificial Sequence: Synthetic oligonucleotide
cuauggaguguaccacagu

SEQ ID NO: 2254302 - RNA, 19 nt, Artificial Sequence
  Description of Artificial Sequence: Synthetic oligonucleotide
ccgggaucauagugagcgg

SEQ ID NO: 2254303 - RNA, 19 nt, Artificial Sequence
  Description of Artificial Sequence: Synthetic oligonucleotide
ccuuuaccugucaagaauu

SEQ ID NO: 2254304 - RNA, 19 nt, Artificial Sequence
  Description of Artificial Sequence: Synthetic oligonucleotide
ccucgcuuucggacgcccg

SEQ ID NO: 2254305 - RNA, 19 nt, Artificial Sequence
  Description of Artificial Sequence: Synthetic oligonucleotide
ccagaguguuccuguuuuc

SEQ ID NO: 2254306 - RNA, 19 nt, Artificial Sequence
  Description of Artificial Sequence: Synthetic oligonucleotide
uccuccggugccgucucua

SEQ ID NO: 2254307 - RNA, 19 nt, Artificial Sequence
  Description of Artificial Sequence: Synthetic oligonucleotide
caucuaucuugccacuguu

SEQ ID NO: 2254308 - RNA, 19 nt, Artificial Sequence
  Description of Artificial Sequence: Synthetic oligonucleotide
cucaacuacaaaggguguu

SEQ ID NO: 2254309 - RNA, 19 nt, Artificial Sequence
  Description of Artificial Sequence: Synthetic oligonucleotide
gccauccaaccaugagggc

SEQ ID NO: 2254310 - RNA, 19 nt, Artificial Sequence
  Description of Artificial Sequence: Synthetic oligonucleotide
ccgagccccaggcagagca

SEQ ID NO: 2254311 - RNA, 19 nt, Artificial Sequence
  Description of Artificial Sequence: Synthetic oligonucleotide
gucaccgagggaccucgcu

SEQ ID NO: 2254312 - RNA, 19 nt, Artificial Sequence
  Description of Artificial Sequence: Synthetic oligonucleotide
uuccaccgucuuggguacc

SEQ ID NO: 2254313 - RNA, 19 nt, Artificial Sequence
  Description of Artificial Sequence: Synthetic oligonucleotide
ucggacgcccgaggacccc

SEQ ID NO: 2254314 - RNA, 19 nt, Artificial Sequence
  Description of Artificial Sequence: Synthetic oligonucleotide
gaccucgcuuucggacgcc

SEQ ID NO: 2254315 - RNA, 19 nt, Artificial Sequence
  Description of Artificial Sequence: Synthetic oligonucleotide
ggaguguaccacagucauc

SEQ ID NO: 2254316 - RNA, 19 nt, Artificial Sequence
  Description of Artificial Sequence: Synthetic oligonucleotide
cuuggcggucaccgaggga

SEQ ID NO: 2254317 - RNA, 19 nt, Artificial Sequence
  Description of Artificial Sequence: Synthetic oligonucleotide
cggucaugaucauccguug

SEQ ID NO: 2254318 - RNA, 19 nt, Artificial Sequence
  Description of Artificial Sequence: Synthetic oligonucleotide
acggaccagccagaguguu

SEQ ID NO: 2254319 - RNA, 19 nt, Artificial Sequence
  Description of Artificial Sequence: Synthetic oligonucleotide
ccuccggugccgucucuag

SEQ ID NO: 2254320 - RNA, 19 nt, Artificial Sequence
  Description of Artificial Sequence: Synthetic oligonucleotide
ccauccaaccaugagggcu

SEQ ID NO: 2254321 - RNA, 19 nt, Artificial Sequence
  Description of Artificial Sequence: Synthetic oligonucleotide
cugacccacccaaugccau

SEQ ID NO: 2254322 - RNA, 19 nt, Artificial Sequence
  Description of Artificial Sequence: Synthetic oligonucleotide
ccuuuauacccguagccuu

SEQ ID NO: 2254323 - RNA, 19 nt, Artificial Sequence
  Description of Artificial Sequence: Synthetic oligonucleotide
gcuaguggguagugaugaa

SEQ ID NO: 2254324 - RNA, 19 nt, Artificial Sequence
  Description of Artificial Sequence: Synthetic oligonucleotide
gggaucauagugagcggua

SEQ ID NO: 2254325 - RNA, 19 nt, Artificial Sequence
  Description of Artificial Sequence: Synthetic oligonucleotide
cgggcgcaacccuggaucc

SEQ ID NO: 2254326 - RNA, 19 nt, Artificial Sequence
  Description of Artificial Sequence: Synthetic oligonucleotide
cccuuuaccugucaagaau

SEQ ID NO: 2254327 - RNA, 19 nt, Artificial Sequence
  Description of Artificial Sequence: Synthetic oligonucleotide
gggcgcaacccuggauccg

SEQ ID NO: 2254328 - RNA, 19 nt, Artificial Sequence
  Description of Artificial Sequence: Synthetic oligonucleotide
cgucucuagcagugaaguc

SEQ ID NO: 2254329 - RNA, 19 nt, Artificial Sequence
  Description of Artificial Sequence: Synthetic oligonucleotide
caccgagggaccucgcuuu

SEQ ID NO: 2254330 - RNA, 19 nt, Artificial Sequence
  Description of Artificial Sequence: Synthetic oligonucleotide
caccgucuuggguaccacu

SEQ ID NO: 2254331 - RNA, 19 nt, Artificial Sequence
  Description of Artificial Sequence: Synthetic oligonucleotide
gugagcgguagaaguggcu

SEQ ID NO: 2254332 - RNA, 19 nt, Artificial Sequence
  Description of Artificial Sequence: Synthetic oligonucleotide
ggcggucaugaucauccgu

SEQ ID NO: 2254333 - RNA, 19 nt, Artificial Sequence
  Description of Artificial Sequence: Synthetic oligonucleotide
caacuacaaaggguguuuu

SEQ ID NO: 2254334 - RNA, 19 nt, Artificial Sequence
  Description of Artificial Sequence: Synthetic oligonucleotide
gcggucaugaucauccguu

SEQ ID NO: 2254335 - RNA, 19 nt, Artificial Sequence
  Description of Artificial Sequence: Synthetic oligonucleotide
ccagaucagccaacaugga

SEQ ID NO: 2254336 - RNA, 19 nt, Artificial Sequence
  Description of Artificial Sequence: Synthetic oligonucleotide
ccgaagaagacacgagcgu

SEQ ID NO: 2254337 - RNA, 19 nt, Artificial Sequence
  Description of Artificial Sequence: Synthetic oligonucleotide
acggggacccgggaucaua

SEQ ID NO: 2254338 - RNA, 19 nt, Artificial Sequence
  Description of Artificial Sequence: Synthetic oligonucleotide
agccaacauggagguuaca

SEQ ID NO: 2254339 - RNA, 19 nt, Artificial Sequence
  Description of Artificial Sequence: Synthetic oligonucleotide
ccggugccgucucuagcag

SEQ ID NO: 2254340 - RNA, 19 nt, Artificial Sequence
  Description of Artificial Sequence: Synthetic oligonucleotide
ucaucccauccaggacuuu

SEQ ID NO: 2254341 - RNA, 19 nt, Artificial Sequence
  Description of Artificial Sequence: Synthetic oligonucleotide
ccgagggaccucgcuuucg

SEQ ID NO: 2254342 - RNA, 19 nt, Artificial Sequence
  Description of Artificial Sequence: Synthetic oligonucleotide
acgagcgugccgagcccca

SEQ ID NO: 2254343 - RNA, 19 nt, Artificial Sequence
  Description of Artificial Sequence: Synthetic oligonucleotide
gacgcccgaggaccccgaa

SEQ ID NO: 2254344 - RNA, 19 nt, Artificial Sequence
  Description of Artificial Sequence: Synthetic oligonucleotide
cgcuuucggacgcccgagg

SEQ ID NO: 2254345 - RNA, 19 nt, Artificial Sequence
  Description of Artificial Sequence: Synthetic oligonucleotide
cggucaccgagggaccucg

SEQ ID NO: 2254346 - RNA, 19 nt, Artificial Sequence
  Description of Artificial Sequence: Synthetic oligonucleotide
gucaccagucagggaccuc

SEQ ID NO: 2254347 - RNA, 19 nt, Artificial Sequence
  Description of Artificial Sequence: Synthetic oligonucleotide
gaccagccagaguguuccu

SEQ ID NO: 2254348 - RNA, 19 nt, Artificial Sequence
  Description of Artificial Sequence: Synthetic oligonucleotide
aguccccuccuuggaucau

SEQ ID NO: 2254349 - RNA, 19 nt, Artificial Sequence
  Description of Artificial Sequence: Synthetic oligonucleotide
ccgucucuagcagugaagu

SEQ ID NO: 2254350 - RNA, 19 nt, Artificial Sequence
  Description of Artificial Sequence: Synthetic oligonucleotide
gcagagcacggcgggcagc

SEQ ID NO: 2254351 - RNA, 19 nt, Artificial Sequence
  Description of Artificial Sequence: Synthetic oligonucleotide
ccaugagggcuuggucaag

SEQ ID NO: 2254352 - RNA, 19 nt, Artificial Sequence
  Description of Artificial Sequence: Synthetic oligonucleotide
ccucaacuacaaagggugu

SEQ ID NO: 2254353 - RNA, 19 nt, Artificial Sequence
  Description of Artificial Sequence: Synthetic oligonucleotide
cucauuccuccggugccgu

SEQ ID NO: 2254354 - RNA, 19 nt, Artificial Sequence
  Description of Artificial Sequence: Synthetic oligonucleotide
gcagacggggacccgggau

SEQ ID NO: 2254355 - RNA, 19 nt, Artificial Sequence
  Description of Artificial Sequence: Synthetic oligonucleotide
cgauggcacgggcgcaacc

SEQ ID NO: 2254356 - RNA, 19 nt, Artificial Sequence
  Description of Artificial Sequence: Synthetic oligonucleotide
cugcgauggcacgggcgca

SEQ ID NO: 2254357 - RNA, 19 nt, Artificial Sequence
  Description of Artificial Sequence: Synthetic oligonucleotide
ccaaccaugagggcuuggu

SEQ ID NO: 2254358 - RNA, 19 nt, Artificial Sequence
  Description of Artificial Sequence: Synthetic oligonucleotide
gcgguagaaguggcugcga

SEQ ID NO: 2254359 - RNA, 19 nt, Artificial Sequence
  Description of Artificial Sequence: Synthetic oligonucleotide
ggucaccgagggaccucgc

SEQ ID NO: 2254360 - RNA, 19 nt, Artificial Sequence
  Description of Artificial Sequence: Synthetic oligonucleotide
ccguagccuuucuccccug

SEQ ID NO: 2254361 - RNA, 19 nt, Artificial Sequence
  Description of Artificial Sequence: Synthetic oligonucleotide
gcacgggcgcaacccugga

SEQ ID NO: 2254362 - RNA, 19 nt, Artificial Sequence
  Description of Artificial Sequence: Synthetic oligonucleotide
gcgauggcacgggcgcaac

SEQ ID NO: 2254363 - RNA, 19 nt, Artificial Sequence
  Description of Artificial Sequence: Synthetic oligonucleotide
ccaccgucuuggguaccac

SEQ ID NO: 2254364 - RNA, 19 nt, Artificial Sequence
  Description of Artificial Sequence: Synthetic oligonucleotide
cacgggcgcaacccuggau

SEQ ID NO: 2254365 - RNA, 19 nt, Artificial Sequence
  Description of Artificial Sequence: Synthetic oligonucleotide
ggggacccgggaucauagu

SEQ ID NO: 2254366 - RNA, 19 nt, Artificial Sequence
  Description of Artificial Sequence: Synthetic oligonucleotide
gcgugccgagccccaggca

SEQ ID NO: 2254367 - RNA, 19 nt, Artificial Sequence
  Description of Artificial Sequence: Synthetic oligonucleotide
gcggucaccgagggaccuc

SEQ ID NO: 2254368 - RNA, 19 nt, Artificial Sequence
  Description of Artificial Sequence: Synthetic oligonucleotide
gcacggcgggcagcagcag

SEQ ID NO: 2254369 - RNA, 19 nt, Artificial Sequence
  Description of Artificial Sequence: Synthetic oligonucleotide
cgggaucauagugagcggu

SEQ ID NO: 2254370 - RNA, 19 nt, Artificial Sequence
  Description of Artificial Sequence: Synthetic oligonucleotide
cgucuuggguaccacuuuu

SEQ ID NO: 2254371 - RNA, 19 nt, Artificial Sequence
  Description of Artificial Sequence: Synthetic oligonucleotide
ggacgcccgaggaccccga

SEQ ID NO: 2254372 - RNA, 19 nt, Artificial Sequence
  Description of Artificial Sequence: Synthetic oligonucleotide
gacggggacccgggaucau

SEQ ID NO: 2254373 - RNA, 19 nt, Artificial Sequence
  Description of Artificial Sequence: Synthetic oligonucleotide
ccaugcugacccacccaau

SEQ ID NO: 2254374 - RNA, 19 nt, Artificial Sequence
  Description of Artificial Sequence: Synthetic oligonucleotide
aauauuuacauaaagcugg

SEQ ID NO: 2254375 - RNA, 19 nt, Artificial Sequence
  Description of Artificial Sequence: Synthetic oligonucleotide
auuuguaucuaauagcugc

SEQ ID NO: 2254376 - RNA, 19 nt, Artificial Sequence
  Description of Artificial Sequence: Synthetic oligonucleotide
aaaccaacgaaccacagga

SEQ ID NO: 2254377 - RNA, 19 nt, Artificial Sequence
  Description of Artificial Sequence: Synthetic oligonucleotide
ucauuuguaucuaauagcu

SEQ ID NO: 2254378 - RNA, 19 nt, Artificial Sequence
  Description of Artificial Sequence: Synthetic oligonucleotide
uuuacauaaagcugggugu

SEQ ID NO: 2254379 - RNA, 19 nt, Artificial Sequence
  Description of Artificial Sequence: Synthetic oligonucleotide
uuaucugggagaaaagggc

SEQ ID NO: 2254380 - RNA, 19 nt, Artificial Sequence
  Description of Artificial Sequence: Synthetic oligonucleotide
uguaucuaauagcugcugg

SEQ ID NO: 2254381 - RNA, 19 nt, Artificial Sequence
  Description of Artificial Sequence: Synthetic oligonucleotide
cuuaucugggagaaaaggg

SEQ ID NO: 2254382 - RNA, 19 nt, Artificial Sequence
  Description of Artificial Sequence: Synthetic oligonucleotide
aagucuccaauacauucag

SEQ ID NO: 2254383 - RNA, 19 nt, Artificial Sequence
  Description of Artificial Sequence: Synthetic oligonucleotide
uagucuacagaaccugagg

SEQ ID NO: 2254384 - RNA, 19 nt, Artificial Sequence
  Description of Artificial Sequence: Synthetic oligonucleotide
ucauucuuguugaacacac

SEQ ID NO: 2254385 - RNA, 19 nt, Artificial Sequence
  Description of Artificial Sequence: Synthetic oligonucleotide
guaucuaauagcugcuggg

SEQ ID NO: 2254386 - RNA, 19 nt, Artificial Sequence
  Description of Artificial Sequence: Synthetic oligonucleotide
uuguugaacacacagugua

SEQ ID NO: 2254387 - RNA, 19 nt, Artificial Sequence
  Description of Artificial Sequence: Synthetic oligonucleotide
gucuccaauacauucagug

SEQ ID NO: 2254388 - RNA, 19 nt, Artificial Sequence
  Description of Artificial Sequence: Synthetic oligonucleotide
gaagaugcaggagaagacg

SEQ ID NO: 2254389 - RNA, 19 nt, Artificial Sequence
  Description of Artificial Sequence: Synthetic oligonucleotide
uaucuaauagcugcugggg

SEQ ID NO: 2254390 - RNA, 19 nt, Artificial Sequence
  Description of Artificial Sequence: Synthetic oligonucleotide
aggagaagacgaucaaggc

SEQ ID NO: 2254391 - RNA, 19 nt, Artificial Sequence
  Description of Artificial Sequence: Synthetic oligonucleotide
aguauugugaguguugcug

SEQ ID NO: 2254392 - RNA, 19 nt, Artificial Sequence
  Description of Artificial Sequence: Synthetic oligonucleotide
ucaccaaugaccagguacu

SEQ ID NO: 2254393 - RNA, 19 nt, Artificial Sequence
  Description of Artificial Sequence: Synthetic oligonucleotide
uaguuuuccaccgaggaac

SEQ ID NO: 2254394 - RNA, 19 nt, Artificial Sequence
  Description of Artificial Sequence: Synthetic oligonucleotide
gucaacguaguucucaaug

SEQ ID NO: 2254395 - RNA, 19 nt, Artificial Sequence
  Description of Artificial Sequence: Synthetic oligonucleotide
ucuccaauacauucagugc

SEQ ID NO: 2254396 - RNA, 19 nt, Artificial Sequence
  Description of Artificial Sequence: Synthetic oligonucleotide
uuuguaucuaauagcugcu

SEQ ID NO: 2254397 - RNA, 19 nt, Artificial Sequence
  Description of Artificial Sequence: Synthetic oligonucleotide
gaggcugcgacacgaagcg

SEQ ID NO: 2254398 - RNA, 19 nt, Artificial Sequence
  Description of Artificial Sequence: Synthetic oligonucleotide
auacauucagugcaggggu

SEQ ID NO: 2254399 - RNA, 19 nt, Artificial Sequence
  Description of Artificial Sequence: Synthetic oligonucleotide
uuuaguggcugcccacugg

SEQ ID NO: 2254400 - RNA, 19 nt, Artificial Sequence
  Description of Artificial Sequence: Synthetic oligonucleotide
ucuaauagcugcuggggaa

SEQ ID NO: 2254401 - RNA, 19 nt, Artificial Sequence
  Description of Artificial Sequence: Synthetic oligonucleotide
ucaguauugugaguguugc

SEQ ID NO: 2254402 - RNA, 19 nt, Artificial Sequence
  Description of Artificial Sequence: Synthetic oligonucleotide
cacauccucagcuuuagug

SEQ ID NO: 2254403 - RNA, 19 nt, Artificial Sequence
  Description of Artificial Sequence: Synthetic oligonucleotide
acgaucaaggccaagacca

SEQ ID NO: 2254404 - RNA, 19 nt, Artificial Sequence
  Description of Artificial Sequence: Synthetic oligonucleotide
aacuagucuacagaaccug

SEQ ID NO: 2254405 - RNA, 19 nt, Artificial Sequence
  Description of Artificial Sequence: Synthetic oligonucleotide
ggucgcauugcuuaucugg

SEQ ID NO: 2254406 - RNA, 19 nt, Artificial Sequence
  Description of Artificial Sequence: Synthetic oligonucleotide
agguacuugcgaucggucg

SEQ ID NO: 2254407 - RNA, 19 nt, Artificial Sequence
  Description of Artificial Sequence: Synthetic oligonucleotide
cuugcgaucggucgcauug

SEQ ID NO: 2254408 - RNA, 19 nt, Artificial Sequence
  Description of Artificial Sequence: Synthetic oligonucleotide
agagagauagccagucccc

SEQ ID NO: 2254409 - RNA, 19 nt, Artificial Sequence
  Description of Artificial Sequence: Synthetic oligonucleotide
aaugaccagguacuugcga

SEQ ID NO: 2254410 - RNA, 19 nt, Artificial Sequence
  Description of Artificial Sequence: Synthetic oligonucleotide
ugcugguaguuuuccaccg

SEQ ID NO: 2254411 - RNA, 19 nt, Artificial Sequence
  Description of Artificial Sequence: Synthetic oligonucleotide
accacaggaaaguccagag

SEQ ID NO: 2254412 - RNA, 19 nt, Artificial Sequence
  Description of Artificial Sequence: Synthetic oligonucleotide
ugaguguugcuguagcccu

SEQ ID NO: 2254413 - RNA, 19 nt, Artificial Sequence
  Description of Artificial Sequence: Synthetic oligonucleotide
aggcuaagcucccuccugc

SEQ ID NO: 2254414 - RNA, 19 nt, Artificial Sequence
  Description of Artificial Sequence: Synthetic oligonucleotide
gaaaagggcaucaaccaca

SEQ ID NO: 2254415 - RNA, 19 nt, Artificial Sequence
  Description of Artificial Sequence: Synthetic oligonucleotide
guaacugaucaguauugug

SEQ ID NO: 2254416 - RNA, 19 nt, Artificial Sequence
  Description of Artificial Sequence: Synthetic oligonucleotide
gacgaucaaggccaagacc

SEQ ID NO: 2254417 - RNA, 19 nt, Artificial Sequence
  Description of Artificial Sequence: Synthetic oligonucleotide
cuagucuacagaaccugag

SEQ ID NO: 2254418 - RNA, 19 nt, Artificial Sequence
  Description of Artificial Sequence: Synthetic oligonucleotide
ucgccgaagaugcaggaga

SEQ ID NO: 2254419 - RNA, 19 nt, Artificial Sequence
  Description of Artificial Sequence: Synthetic oligonucleotide
gauggcacugccguagcgg

SEQ ID NO: 2254420 - RNA, 19 nt, Artificial Sequence
  Description of Artificial Sequence: Synthetic oligonucleotide
uccgcucccaccaacacau

SEQ ID NO: 2254421 - RNA, 19 nt, Artificial Sequence
  Description of Artificial Sequence: Synthetic oligonucleotide
uuaguggcugcccacuggu

SEQ ID NO: 2254422 - RNA, 19 nt, Artificial Sequence
  Description of Artificial Sequence: Synthetic oligonucleotide
caggaaagccagcacaccc

SEQ ID NO: 2254423 - RNA, 19 nt, Artificial Sequence
  Description of Artificial Sequence: Synthetic oligonucleotide
uugcuuaucugggagaaaa

SEQ ID NO: 2254424 - RNA, 19 nt, Artificial Sequence
  Description of Artificial Sequence: Synthetic oligonucleotide
aacgaaccacaggaaaguc

SEQ ID NO: 2254425 - RNA, 19 nt, Artificial Sequence
  Description of Artificial Sequence: Synthetic oligonucleotide
agaccaugcucacgaagcg

SEQ ID NO: 2254426 - RNA, 19 nt, Artificial Sequence
  Description of Artificial Sequence: Synthetic oligonucleotide
uguugaacacacaguguaa

SEQ ID NO: 2254427 - RNA, 19 nt, Artificial Sequence
  Description of Artificial Sequence: Synthetic oligonucleotide
acaguuggcacagugguga

SEQ ID NO: 2254428 - RNA, 19 nt, Artificial Sequence
  Description of Artificial Sequence: Synthetic oligonucleotide
agaaccugagggcaggggu

SEQ ID NO: 2254429 - RNA, 19 nt, Artificial Sequence
  Description of Artificial Sequence: Synthetic oligonucleotide
ugcuuaucugggagaaaag

SEQ ID NO: 2254430 - RNA, 19 nt, Artificial Sequence
  Description of Artificial Sequence: Synthetic oligonucleotide
guuggcacaguggugaccc

SEQ ID NO: 2254431 - RNA, 19 nt, Artificial Sequence
  Description of Artificial Sequence: Synthetic oligonucleotide
aacacauccucagcuuuag

SEQ ID NO: 2254432 - RNA, 19 nt, Artificial Sequence
  Description of Artificial Sequence: Synthetic oligonucleotide
ugugaguguugcuguagcc

SEQ ID NO: 2254433 - RNA, 19 nt, Artificial Sequence
  Description of Artificial Sequence: Synthetic oligonucleotide
uccaccgaggaacuggggu

SEQ ID NO: 2254434 - RNA, 19 nt, Artificial Sequence
  Description of Artificial Sequence: Synthetic oligonucleotide
gucuacagaaccugagggc

SEQ ID NO: 2254435 - RNA, 19 nt, Artificial Sequence
  Description of Artificial Sequence: Synthetic oligonucleotide
gaccagguacuugcgaucg

SEQ ID NO: 2254436 - RNA, 19 nt, Artificial Sequence
  Description of Artificial Sequence: Synthetic oligonucleotide
aagaugcaggagaagacga

SEQ ID NO: 2254437 - RNA, 19 nt, Artificial Sequence
  Description of Artificial Sequence: Synthetic oligonucleotide
cuaagcucccuccugccag

SEQ ID NO: 2254438 - RNA, 19 nt, Artificial Sequence
  Description of Artificial Sequence: Synthetic oligonucleotide
cacgaagcgccgcaggucg

SEQ ID NO: 2254439 - RNA, 19 nt, Artificial Sequence
  Description of Artificial Sequence: Synthetic oligonucleotide
gagauagccaguccccuac

SEQ ID NO: 2254440 - RNA, 19 nt, Artificial Sequence
  Description of Artificial Sequence: Synthetic oligonucleotide
gaaggguggcugcugguag

SEQ ID NO: 2254441 - RNA, 19 nt, Artificial Sequence
  Description of Artificial Sequence: Synthetic oligonucleotide
ucaggcaagcagucugggg

SEQ ID NO: 2254442 - RNA, 19 nt, Artificial Sequence
  Description of Artificial Sequence: Synthetic oligonucleotide
acaggaaaguccagagagc

SEQ ID NO: 2254443 - RNA, 19 nt, Artificial Sequence
  Description of Artificial Sequence: Synthetic oligonucleotide
uccccuaccugcuccacag

SEQ ID NO: 2254444 - RNA, 19 nt, Artificial Sequence
  Description of Artificial Sequence: Synthetic oligonucleotide
uguaacugaucaguauugu

SEQ ID NO: 2254445 - RNA, 19 nt, Artificial Sequence
  Description of Artificial Sequence: Synthetic oligonucleotide
accaugcucacgaagcgcg

SEQ ID NO: 2254446 - RNA, 19 nt, Artificial Sequence
  Description of Artificial Sequence: Synthetic oligonucleotide
agauagccaguccccuacc

SEQ ID NO: 2254447 - RNA, 19 nt, Artificial Sequence
  Description of Artificial Sequence: Synthetic oligonucleotide
uccucauuuguaucuaaua

SEQ ID NO: 2254448 - RNA, 19 nt, Artificial Sequence
  Description of Artificial Sequence: Synthetic oligonucleotide
gaggcguaggcuguguuag

SEQ ID NO: 2254449 - RNA, 19 nt, Artificial Sequence
  Description of Artificial Sequence: Synthetic oligonucleotide
aggcaagcagucuggggac

SEQ ID NO: 2254450 - RNA, 19 nt, Artificial Sequence
  Description of Artificial Sequence: Synthetic oligonucleotide
gucgcauugcuuaucuggg

SEQ ID NO: 2254451 - RNA, 19 nt, Artificial Sequence
  Description of Artificial Sequence: Synthetic oligonucleotide
agcuuuaguggcugcccac

SEQ ID NO: 2254452 - RNA, 19 nt, Artificial Sequence
  Description of Artificial Sequence: Synthetic oligonucleotide
aagcgccgcaggucgaagg

SEQ ID NO: 2254453 - RNA, 19 nt, Artificial Sequence
  Description of Artificial Sequence: Synthetic oligonucleotide
uguugcuguagcccucgcc

SEQ ID NO: 2254454 - RNA, 19 nt, Artificial Sequence
  Description of Artificial Sequence: Synthetic oligonucleotide
aggcugguagcccucagug

SEQ ID NO: 2254455 - RNA, 19 nt, Artificial Sequence
  Description of Artificial Sequence: Synthetic oligonucleotide
ugccguagcggcaagcauc

SEQ ID NO: 2254456 - RNA, 19 nt, Artificial Sequence
  Description of Artificial Sequence: Synthetic oligonucleotide
uacagaaccugagggcagg

SEQ ID NO: 2254457 - RNA, 19 nt, Artificial Sequence
  Description of Artificial Sequence: Synthetic oligonucleotide
augaccagguacuugcgau

SEQ ID NO: 2254458 - RNA, 19 nt, Artificial Sequence
  Description of Artificial Sequence: Synthetic oligonucleotide
caagucuccaauacauuca

SEQ ID NO: 2254459 - RNA, 19 nt, Artificial Sequence
  Description of Artificial Sequence: Synthetic oligonucleotide
accaacgaaccacaggaaa

SEQ ID NO: 2254460 - RNA, 19 nt, Artificial Sequence
  Description of Artificial Sequence: Synthetic oligonucleotide
caagaccaugcucacgaag

SEQ ID NO: 2254461 - RNA, 19 nt, Artificial Sequence
  Description of Artificial Sequence: Synthetic oligonucleotide
cuggguguucucuccaggc

SEQ ID NO: 2254462 - RNA, 19 nt, Artificial Sequence
  Description of Artificial Sequence: Synthetic oligonucleotide
ggcaucaaccacaaggaag

SEQ ID NO: 2254463 - RNA, 19 nt, Artificial Sequence
  Description of Artificial Sequence: Synthetic oligonucleotide
cugguaguuuuccaccgag

SEQ ID NO: 2254464 - RNA, 19 nt, Artificial Sequence
  Description of Artificial Sequence: Synthetic oligonucleotide
ucggucgcauugcuuaucu

SEQ ID NO: 2254465 - RNA, 19 nt, Artificial Sequence
  Description of Artificial Sequence: Synthetic oligonucleotide
auugugaguguugcuguag

SEQ ID NO: 2254466 - RNA, 19 nt, Artificial Sequence
  Description of Artificial Sequence: Synthetic oligonucleotide
gguaguuuuccaccgagga

SEQ ID NO: 2254467 - RNA, 19 nt, Artificial Sequence
  Description of Artificial Sequence: Synthetic oligonucleotide
aucaaccacaaggaagaag

SEQ ID NO: 2254468 - RNA, 19 nt, Artificial Sequence
  Description of Artificial Sequence: Synthetic oligonucleotide
gcagucuggggacaguugg

SEQ ID NO: 2254469 - RNA, 19 nt, Artificial Sequence
  Description of Artificial Sequence: Synthetic oligonucleotide
caggcaagcagucugggga

SEQ ID NO: 2254470 - RNA, 19 nt, Artificial Sequence
  Description of Artificial Sequence: Synthetic oligonucleotide
acacaguguaacugaucag

SEQ ID NO: 2254471 - RNA, 19 nt, Artificial Sequence
  Description of Artificial Sequence: Synthetic oligonucleotide
gaaggagccgcccgcguug

SEQ ID NO: 2254472 - RNA, 19 nt, Artificial Sequence
  Description of Artificial Sequence: Synthetic oligonucleotide
uuacauaaagcuggguguu

SEQ ID NO: 2254473 - RNA, 19 nt, Artificial Sequence
  Description of Artificial Sequence: Synthetic oligonucleotide
ucugggugaaggguggcug

SEQ ID NO: 2254474 - RNA, 19 nt, Artificial Sequence
  Description of Artificial Sequence: Synthetic oligonucleotide
aaaagggcaucaaccacaa

SEQ ID NO: 2254475 - RNA, 19 nt, Artificial Sequence
  Description of Artificial Sequence: Synthetic oligonucleotide
gaugcaggagaagacgauc

SEQ ID NO: 2254476 - RNA, 19 nt, Artificial Sequence
  Description of Artificial Sequence: Synthetic oligonucleotide
aggucgaaggagccgcccg

SEQ ID NO: 2254477 - RNA, 19 nt, Artificial Sequence
  Description of Artificial Sequence: Synthetic oligonucleotide
ccaacgaaccacaggaaag

SEQ ID NO: 2254478 - RNA, 19 nt, Artificial Sequence
  Description of Artificial Sequence: Synthetic oligonucleotide
acauaaagcuggguguucu

SEQ ID NO: 2254479 - RNA, 19 nt, Artificial Sequence
  Description of Artificial Sequence: Synthetic oligonucleotide
acauucagugcagggguuc

SEQ ID NO: 2254480 - RNA, 19 nt, Artificial Sequence
  Description of Artificial Sequence: Synthetic oligonucleotide
caggagcaagaagagagag

SEQ ID NO: 2254481 - RNA, 19 nt, Artificial Sequence
  Description of Artificial Sequence: Synthetic oligonucleotide
gguacuugcgaucggucgc

SEQ ID NO: 2254482 - RNA, 19 nt, Artificial Sequence
  Description of Artificial Sequence: Synthetic oligonucleotide
aucaguauugugaguguug

SEQ ID NO: 2254483 - RNA, 19 nt, Artificial Sequence
  Description of Artificial Sequence: Synthetic oligonucleotide
agcgcgucagcaccugagg

SEQ ID NO: 2254484 - RNA, 19 nt, Artificial Sequence
  Description of Artificial Sequence: Synthetic oligonucleotide
guccagagagcugagaaga

SEQ ID NO: 2254485 - RNA, 19 nt, Artificial Sequence
  Description of Artificial Sequence: Synthetic oligonucleotide
aguccgcucccaccaacac

SEQ ID NO: 2254486 - RNA, 19 nt, Artificial Sequence
  Description of Artificial Sequence: Synthetic oligonucleotide
ccaagucuccaauacauuc

SEQ ID NO: 2254487 - RNA, 19 nt, Artificial Sequence
  Description of Artificial Sequence: Synthetic oligonucleotide
gaccccugaagaccccugg

SEQ ID NO: 2254488 - RNA, 19 nt, Artificial Sequence
  Description of Artificial Sequence: Synthetic oligonucleotide
aagaccccugggcugcuca

SEQ ID NO: 2254489 - RNA, 19 nt, Artificial Sequence
  Description of Artificial Sequence: Synthetic oligonucleotide
ugaaggcauccacuccagc

SEQ ID NO: 2254490 - RNA, 19 nt, Artificial Sequence
  Description of Artificial Sequence: Synthetic oligonucleotide
gcaucaaccacaaggaaga

SEQ ID NO: 2254491 - RNA, 19 nt, Artificial Sequence
  Description of Artificial Sequence: Synthetic oligonucleotide
accccgauggcacugccgu

SEQ ID NO: 2254492 - RNA, 19 nt, Artificial Sequence
  Description of Artificial Sequence: Synthetic oligonucleotide
ugcgacacgaagcgccgca

SEQ ID NO: 2254493 - RNA, 19 nt, Artificial Sequence
  Description of Artificial Sequence: Synthetic oligonucleotide
acugaucaguauugugagu

SEQ ID NO: 2254494 - RNA, 19 nt, Artificial Sequence
  Description of Artificial Sequence: Synthetic oligonucleotide
cagaaaccaacgaaccaca

SEQ ID NO: 2254495 - RNA, 19 nt, Artificial Sequence
  Description of Artificial Sequence: Synthetic oligonucleotide
gcggcaagcauccucauuc

SEQ ID NO: 2254496 - RNA, 19 nt, Artificial Sequence
  Description of Artificial Sequence: Synthetic oligonucleotide
gaucaaggccaagaccaug

SEQ ID NO: 2254497 - RNA, 19 nt, Artificial Sequence
  Description of Artificial Sequence: Synthetic oligonucleotide
uauugugaguguugcugua

SEQ ID NO: 2254498 - RNA, 19 nt, Artificial Sequence
  Description of Artificial Sequence: Synthetic oligonucleotide
ugaccagguacuugcgauc

SEQ ID NO: 2254499 - RNA, 19 nt, Artificial Sequence
  Description of Artificial Sequence: Synthetic oligonucleotide
gccaagaccaugcucacga

SEQ ID NO: 2254500 - RNA, 19 nt, Artificial Sequence
  Description of Artificial Sequence: Synthetic oligonucleotide
aaaguccagagagcugaga

SEQ ID NO: 2254501 - RNA, 19 nt, Artificial Sequence
  Description of Artificial Sequence: Synthetic oligonucleotide
cuuguagcgcugguaggcc

SEQ ID NO: 2254502 - RNA, 19 nt, Artificial Sequence
  Description of Artificial Sequence: Synthetic oligonucleotide
aacacacaguguaacugau

SEQ ID NO: 2254503 - RNA, 19 nt, Artificial Sequence
  Description of Artificial Sequence: Synthetic oligonucleotide
gcuguguuagggucugggg

SEQ ID NO: 2254504 - RNA, 19 nt, Artificial Sequence
  Description of Artificial Sequence: Synthetic oligonucleotide
uucagugcagggguuccug

SEQ ID NO: 2254505 - RNA, 19 nt, Artificial Sequence
  Description of Artificial Sequence: Synthetic oligonucleotide
cuuuaguggcugcccacug

SEQ ID NO: 2254506 - RNA, 19 nt, Artificial Sequence
  Description of Artificial Sequence: Synthetic oligonucleotide
ucgcauugcuuaucuggga

SEQ ID NO: 2254507 - RNA, 19 nt, Artificial Sequence
  Description of Artificial Sequence: Synthetic oligonucleotide
guggggucaacguaguucu

SEQ ID NO: 2254508 - RNA, 19 nt, Artificial Sequence
  Description of Artificial Sequence: Synthetic oligonucleotide
guaguuuuccaccgaggaa

SEQ ID NO: 2254509 - RNA, 19 nt, Artificial Sequence
  Description of Artificial Sequence: Synthetic oligonucleotide
guauugugaguguugcugu

SEQ ID NO: 2254510 - RNA, 19 nt, Artificial Sequence
  Description of Artificial Sequence: Synthetic oligonucleotide
cucagcuuuaguggcugcc

SEQ ID NO: 2254511 - RNA, 19 nt, Artificial Sequence
  Description of Artificial Sequence: Synthetic oligonucleotide
ugaguccgcucccaccaac

SEQ ID NO: 2254512 - RNA, 19 nt, Artificial Sequence
  Description of Artificial Sequence: Synthetic oligonucleotide
acuagucuacagaaccuga

SEQ ID NO: 2254513 - RNA, 19 nt, Artificial Sequence
  Description of Artificial Sequence: Synthetic oligonucleotide
gagccgcccgcguuggccg

SEQ ID NO: 2254514 - RNA, 19 nt, Artificial Sequence
  Description of Artificial Sequence: Synthetic oligonucleotide
gcaagcauccucauucuug

SEQ ID NO: 2254515 - RNA, 19 nt, Artificial Sequence
  Description of Artificial Sequence: Synthetic oligonucleotide
aagcgcgucagcaccugag

SEQ ID NO: 2254516 - RNA, 19 nt, Artificial Sequence
  Description of Artificial Sequence: Synthetic oligonucleotide
agaaaccaacgaaccacag

SEQ ID NO: 2254517 - RNA, 19 nt, Artificial Sequence
  Description of Artificial Sequence: Synthetic oligonucleotide
uagcugcuggggaauauuu

SEQ ID NO: 2254518 - RNA, 19 nt, Artificial Sequence
  Description of Artificial Sequence: Synthetic oligonucleotide
gggagaaaagggcaucaac

SEQ ID NO: 2254519 - RNA, 19 nt, Artificial Sequence
  Description of Artificial Sequence: Synthetic oligonucleotide
accaaugaccagguacuug

SEQ ID NO: 2254520 - RNA, 19 nt, Artificial Sequence
  Description of Artificial Sequence: Synthetic oligonucleotide
cagugcagggguuccugcc

SEQ ID NO: 2254521 - RNA, 19 nt, Artificial Sequence
  Description of Artificial Sequence: Synthetic oligonucleotide
augcucacgaagcgcguca

SEQ ID NO: 2254522 - RNA, 19 nt, Artificial Sequence
  Description of Artificial Sequence: Synthetic oligonucleotide
aaccugagggcaggggugu

SEQ ID NO: 2254523 - RNA, 19 nt, Artificial Sequence
  Description of Artificial Sequence: Synthetic oligonucleotide
uacauaaagcuggguguuc

SEQ ID NO: 2254524 - RNA, 19 nt, Artificial Sequence
  Description of Artificial Sequence: Synthetic oligonucleotide
ugcgaucggucgcauugcu

SEQ ID NO: 2254525 - RNA, 19 nt, Artificial Sequence
  Description of Artificial Sequence: Synthetic oligonucleotide
ggagcaagaagagagagau

SEQ ID NO: 2254526 - RNA, 19 nt, Artificial Sequence
  Description of Artificial Sequence: Synthetic oligonucleotide
caagcauccucauucuugu

SEQ ID NO: 2254527 - RNA, 19 nt, Artificial Sequence
  Description of Artificial Sequence: Synthetic oligonucleotide
agggguuccugcccuccuc

SEQ ID NO: 2254528 - RNA, 19 nt, Artificial Sequence
  Description of Artificial Sequence: Synthetic oligonucleotide
accagguacuugcgaucgg

SEQ ID NO: 2254529 - RNA, 19 nt, Artificial Sequence
  Description of Artificial Sequence: Synthetic oligonucleotide
cacaguguaacugaucagu

SEQ ID NO: 2254530 - RNA, 19 nt, Artificial Sequence
  Description of Artificial Sequence: Synthetic oligonucleotide
gggacaguuggcacagugg

SEQ ID NO: 2254531 - RNA, 19 nt, Artificial Sequence
  Description of Artificial Sequence: Synthetic oligonucleotide
ucccaccaacacauccuca

SEQ ID NO: 2254532 - RNA, 19 nt, Artificial Sequence
  Description of Artificial Sequence: Synthetic oligonucleotide
acugccguagcggcaagca

SEQ ID NO: 2254533 - RNA, 19 nt, Artificial Sequence
  Description of Artificial Sequence: Synthetic oligonucleotide
ucuccaugucgccgucgcc

SEQ ID NO: 2254534 - RNA, 19 nt, Artificial Sequence
  Description of Artificial Sequence: Synthetic oligonucleotide
agagauagccaguccccua

SEQ ID NO: 2254535 - RNA, 19 nt, Artificial Sequence
  Description of Artificial Sequence: Synthetic oligonucleotide
ggcguaggcuguguuaggg

SEQ ID NO: 2254536 - RNA, 19 nt, Artificial Sequence
  Description of Artificial Sequence: Synthetic oligonucleotide
cuuguugaacacacagugu

SEQ ID NO: 2254537 - RNA, 19 nt, Artificial Sequence
  Description of Artificial Sequence: Synthetic oligonucleotide
aguuuuccaccgaggaacu

SEQ ID NO: 2254538 - RNA, 19 nt, Artificial Sequence
  Description of Artificial Sequence: Synthetic oligonucleotide
aagcagucuggggacaguu

SEQ ID NO: 2254539 - RNA, 19 nt, Artificial Sequence
  Description of Artificial Sequence: Synthetic oligonucleotide
cauugcuuaucugggagaa

SEQ ID NO: 2254540 - RNA, 19 nt, Artificial Sequence
  Description of Artificial Sequence: Synthetic oligonucleotide
cauucuuguugaacacaca

SEQ ID NO: 2254541 - RNA, 19 nt, Artificial Sequence
  Description of Artificial Sequence: Synthetic oligonucleotide
caggcuaagcucccuccug

SEQ ID NO: 2254542 - RNA, 19 nt, Artificial Sequence
  Description of Artificial Sequence: Synthetic oligonucleotide
aggcguaggcuguguuagg

SEQ ID NO: 2254543 - RNA, 19 nt, Artificial Sequence
  Description of Artificial Sequence: Synthetic oligonucleotide
gguaggccaggaaagccag

SEQ ID NO: 2254544 - RNA, 19 nt, Artificial Sequence
  Description of Artificial Sequence: Synthetic oligonucleotide
gucaggcaagcagucuggg

SEQ ID NO: 2254545 - RNA, 19 nt, Artificial Sequence
  Description of Artificial Sequence: Synthetic oligonucleotide
uccccaccaagucuccaau

SEQ ID NO: 2254546 - RNA, 19 nt, Artificial Sequence
  Description of Artificial Sequence: Synthetic oligonucleotide
uguuagggucugggguggg

SEQ ID NO: 2254547 - RNA, 19 nt, Artificial Sequence
  Description of Artificial Sequence: Synthetic oligonucleotide
uugcgaucggucgcauugc

SEQ ID NO: 2254548 - RNA, 19 nt, Artificial Sequence
  Description of Artificial Sequence: Synthetic oligonucleotide
ugcucacgaagcgcgucag

SEQ ID NO: 2254549 - RNA, 19 nt, Artificial Sequence
  Description of Artificial Sequence: Synthetic oligonucleotide
aggagcaagaagagagaga

SEQ ID NO: 2254550 - RNA, 19 nt, Artificial Sequence
  Description of Artificial Sequence: Synthetic oligonucleotide
agcaccccgauggcacugc

SEQ ID NO: 2254551 - RNA, 19 nt, Artificial Sequence
  Description of Artificial Sequence: Synthetic oligonucleotide
gaagacgaucaaggccaag

SEQ ID NO: 2254552 - RNA, 19 nt, Artificial Sequence
  Description of Artificial Sequence: Synthetic oligonucleotide
ggcugcgacacgaagcgcc

SEQ ID NO: 2254553 - RNA, 19 nt, Artificial Sequence
  Description of Artificial Sequence: Synthetic oligonucleotide
aucggucgcauugcuuauc

SEQ ID NO: 2254554 - RNA, 19 nt, Artificial Sequence
  Description of Artificial Sequence: Synthetic oligonucleotide
caccgaggaacugggguag

SEQ ID NO: 2254555 - RNA, 19 nt, Artificial Sequence
  Description of Artificial Sequence: Synthetic oligonucleotide
gcugaguccgcucccacca

SEQ ID NO: 2254556 - RNA, 19 nt, Artificial Sequence
  Description of Artificial Sequence: Synthetic oligonucleotide
gauagccaguccccuaccu

SEQ ID NO: 2254557 - RNA, 19 nt, Artificial Sequence
  Description of Artificial Sequence: Synthetic oligonucleotide
aagcucccuccugccaggg

SEQ ID NO: 2254558 - RNA, 19 nt, Artificial Sequence
  Description of Artificial Sequence: Synthetic oligonucleotide
agcacaccccaggaaaaga

SEQ ID NO: 2254559 - RNA, 19 nt, Artificial Sequence
  Description of Artificial Sequence: Synthetic oligonucleotide
uucugggugaaggguggcu

SEQ ID NO: 2254560 - RNA, 19 nt, Artificial Sequence
  Description of Artificial Sequence: Synthetic oligonucleotide
ggacaguuggcacaguggu

SEQ ID NO: 2254561 - RNA, 19 nt, Artificial Sequence
  Description of Artificial Sequence: Synthetic oligonucleotide
aaccaacgaaccacaggaa

SEQ ID NO: 2254562 - RNA, 19 nt, Artificial Sequence
  Description of Artificial Sequence: Synthetic oligonucleotide
gucgaaggagccgcccgcg

SEQ ID NO: 2254563 - RNA, 19 nt, Artificial Sequence
  Description of Artificial Sequence: Synthetic oligonucleotide
gguguccccaccaagucuc

SEQ ID NO: 2254564 - RNA, 19 nt, Artificial Sequence
  Description of Artificial Sequence: Synthetic oligonucleotide
agggguguccccaccaagu

SEQ ID NO: 2254565 - RNA, 19 nt, Artificial Sequence
  Description of Artificial Sequence: Synthetic oligonucleotide
caccccgauggcacugccg

SEQ ID NO: 2254566 - RNA, 19 nt, Artificial Sequence
  Description of Artificial Sequence: Synthetic oligonucleotide
aggaaaguccagagagcug

SEQ ID NO: 2254567 - RNA, 19 nt, Artificial Sequence
  Description of Artificial Sequence: Synthetic oligonucleotide
ucgaaggagccgcccgcgu

SEQ ID NO: 2254568 - RNA, 19 nt, Artificial Sequence
  Description of Artificial Sequence: Synthetic oligonucleotide
cgaagaugcaggagaagac

SEQ ID NO: 2254569 - RNA, 19 nt, Artificial Sequence
  Description of Artificial Sequence: Synthetic oligonucleotide
cagggguguccccaccaag

SEQ ID NO: 2254570 - RNA, 19 nt, Artificial Sequence
  Description of Artificial Sequence: Synthetic oligonucleotide
uaauagcugcuggggaaua

SEQ ID NO: 2254571 - RNA, 19 nt, Artificial Sequence
  Description of Artificial Sequence: Synthetic oligonucleotide
cugguagcccucagugguc

SEQ ID NO: 2254572 - RNA, 19 nt, Artificial Sequence
  Description of Artificial Sequence: Synthetic oligonucleotide
cccaggaaaagauggagaa

SEQ ID NO: 2254573 - RNA, 19 nt, Artificial Sequence
  Description of Artificial Sequence: Synthetic oligonucleotide
agaccccugggcugcucag

SEQ ID NO: 2254574 - RNA, 19 nt, Artificial Sequence
  Description of Artificial Sequence: Synthetic oligonucleotide
cgcauugcuuaucugggag

SEQ ID NO: 2254575 - RNA, 19 nt, Artificial Sequence
  Description of Artificial Sequence: Synthetic oligonucleotide
cucgccgaagaugcaggag

SEQ ID NO: 2254576 - RNA, 19 nt, Artificial Sequence
  Description of Artificial Sequence: Synthetic oligonucleotide
guuccugcccuccucauuu

SEQ ID NO: 2254577 - RNA, 19 nt, Artificial Sequence
  Description of Artificial Sequence: Synthetic oligonucleotide
cagcacaccccaggaaaag

SEQ ID NO: 2254578 - RNA, 19 nt, Artificial Sequence
  Description of Artificial Sequence: Synthetic oligonucleotide
caccaacacauccucagcu

SEQ ID NO: 2254579 - RNA, 19 nt, Artificial Sequence
  Description of Artificial Sequence: Synthetic oligonucleotide
ccaauacauucagugcagg

SEQ ID NO: 2254580 - RNA, 19 nt, Artificial Sequence
  Description of Artificial Sequence: Synthetic oligonucleotide
gcugguagcccucaguggu

SEQ ID NO: 2254581 - RNA, 19 nt, Artificial Sequence
  Description of Artificial Sequence: Synthetic oligonucleotide
ugggugaaggguggcugcu

SEQ ID NO: 2254582 - RNA, 19 nt, Artificial Sequence
  Description of Artificial Sequence: Synthetic oligonucleotide
agaugcaggagaagacgau

SEQ ID NO: 2254583 - RNA, 19 nt, Artificial Sequence
  Description of Artificial Sequence: Synthetic oligonucleotide
guacuugcgaucggucgca

SEQ ID NO: 2254584 - RNA, 19 nt, Artificial Sequence
  Description of Artificial Sequence: Synthetic oligonucleotide
caguuggcacaguggugac

SEQ ID NO: 2254585 - RNA, 19 nt, Artificial Sequence
  Description of Artificial Sequence: Synthetic oligonucleotide
gaagcgccgcaggucgaag

SEQ ID NO: 2254586 - RNA, 19 nt, Artificial Sequence
  Description of Artificial Sequence: Synthetic oligonucleotide
aggcugcgacacgaagcgc

SEQ ID NO: 2254587 - RNA, 19 nt, Artificial Sequence
  Description of Artificial Sequence: Synthetic oligonucleotide
ggcuaagcucccuccugcc

SEQ ID NO: 2254588 - RNA, 19 nt, Artificial Sequence
  Description of Artificial Sequence: Synthetic oligonucleotide
caacgaaccacaggaaagu

SEQ ID NO: 2254589 - RNA, 19 nt, Artificial Sequence
  Description of Artificial Sequence: Synthetic oligonucleotide
gaguccgcucccaccaaca

SEQ ID NO: 2254590 - RNA, 19 nt, Artificial Sequence
  Description of Artificial Sequence: Synthetic oligonucleotide
cagcuuuaguggcugccca

SEQ ID NO: 2254591 - RNA, 19 nt, Artificial Sequence
  Description of Artificial Sequence: Synthetic oligonucleotide
ccgaagaugcaggagaaga

SEQ ID NO: 2254592 - RNA, 19 nt, Artificial Sequence
  Description of Artificial Sequence: Synthetic oligonucleotide
aguccccuaccugcuccac

SEQ ID NO: 2254593 - RNA, 19 nt, Artificial Sequence
  Description of Artificial Sequence: Synthetic oligonucleotide
gaagcgcgucagcaccuga

SEQ ID NO: 2254594 - RNA, 19 nt, Artificial Sequence
  Description of Artificial Sequence: Synthetic oligonucleotide
auucagugcagggguuccu

SEQ ID NO: 2254595 - RNA, 19 nt, Artificial Sequence
  Description of Artificial Sequence: Synthetic oligonucleotide
guccgcucccaccaacaca

SEQ ID NO: 2254596 - RNA, 19 nt, Artificial Sequence
  Description of Artificial Sequence: Synthetic oligonucleotide
auugcuuaucugggagaaa

SEQ ID NO: 2254597 - RNA, 19 nt, Artificial Sequence
  Description of Artificial Sequence: Synthetic oligonucleotide
gccguagcggcaagcaucc

SEQ ID NO: 2254598 - RNA, 19 nt, Artificial Sequence
  Description of Artificial Sequence: Synthetic oligonucleotide
gaucaguauugugaguguu

SEQ ID NO: 2254599 - RNA, 19 nt, Artificial Sequence
  Description of Artificial Sequence: Synthetic oligonucleotide
agucuccaauacauucagu

SEQ ID NO: 2254600 - RNA, 19 nt, Artificial Sequence
  Description of Artificial Sequence: Synthetic oligonucleotide
accgaggaacugggguagg

SEQ ID NO: 2254601 - RNA, 19 nt, Artificial Sequence
  Description of Artificial Sequence: Synthetic oligonucleotide
guaggaggcguaggcugug

SEQ ID NO: 2254602 - RNA, 19 nt, Artificial Sequence
  Description of Artificial Sequence: Synthetic oligonucleotide
aggccccgcgucuccaugu

SEQ ID NO: 2254603 - RNA, 19 nt, Artificial Sequence
  Description of Artificial Sequence: Synthetic oligonucleotide
agcggcaagcauccucauu

SEQ ID NO: 2254604 - RNA, 19 nt, Artificial Sequence
  Description of Artificial Sequence: Synthetic oligonucleotide
accaagucuccaauacauu

SEQ ID NO: 2254605 - RNA, 19 nt, Artificial Sequence
  Description of Artificial Sequence: Synthetic oligonucleotide
gcugcgacacgaagcgccg

SEQ ID NO: 2254606 - RNA, 19 nt, Artificial Sequence
  Description of Artificial Sequence: Synthetic oligonucleotide
caggucgaaggagccgccc

SEQ ID NO: 2254607 - RNA, 19 nt, Artificial Sequence
  Description of Artificial Sequence: Synthetic oligonucleotide
uggggucaacguaguucuc

SEQ ID NO: 2254608 - RNA, 19 nt, Artificial Sequence
  Description of Artificial Sequence: Synthetic oligonucleotide
gcgcgucagcaccugaggc

SEQ ID NO: 2254609 - RNA, 19 nt, Artificial Sequence
  Description of Artificial Sequence: Synthetic oligonucleotide
aggagccgcccgcguuggc

SEQ ID NO: 2254610 - RNA, 19 nt, Artificial Sequence
  Description of Artificial Sequence: Synthetic oligonucleotide
accccugggcugcucagua

SEQ ID NO: 2254611 - RNA, 19 nt, Artificial Sequence
  Description of Artificial Sequence: Synthetic oligonucleotide
uaggaggcguaggcugugu

SEQ ID NO: 2254612 - RNA, 19 nt, Artificial Sequence
  Description of Artificial Sequence: Synthetic oligonucleotide
uaguggcugcccacugguu

SEQ ID NO: 2254613 - RNA, 19 nt, Artificial Sequence
  Description of Artificial Sequence: Synthetic oligonucleotide
caccugaggcugcgacacg

SEQ ID NO: 2254614 - RNA, 19 nt, Artificial Sequence
  Description of Artificial Sequence: Synthetic oligonucleotide
gcaagcagucuggggacag

SEQ ID NO: 2254615 - RNA, 19 nt, Artificial Sequence
  Description of Artificial Sequence: Synthetic oligonucleotide
aggaggcguaggcuguguu

SEQ ID NO: 2254616 - RNA, 19 nt, Artificial Sequence
  Description of Artificial Sequence: Synthetic oligonucleotide
acuugcgaucggucgcauu

SEQ ID NO: 2254617 - RNA, 19 nt, Artificial Sequence
  Description of Artificial Sequence: Synthetic oligonucleotide
gcuaagcucccuccugcca

SEQ ID NO: 2254618 - RNA, 19 nt, Artificial Sequence
  Description of Artificial Sequence: Synthetic oligonucleotide
cccgugcugaguccgcucc

SEQ ID NO: 2254619 - RNA, 19 nt, Artificial Sequence
  Description of Artificial Sequence: Synthetic oligonucleotide
cccgauggcacugccguag

SEQ ID NO: 2254620 - RNA, 19 nt, Artificial Sequence
  Description of Artificial Sequence: Synthetic oligonucleotide
guaggccaggaaagccagc

SEQ ID NO: 2254621 - RNA, 19 nt, Artificial Sequence
  Description of Artificial Sequence: Synthetic oligonucleotide
ccccgcgucuccaugucgc

SEQ ID NO: 2254622 - RNA, 19 nt, Artificial Sequence
  Description of Artificial Sequence: Synthetic oligonucleotide
acgaagcgcgucagcaccu

SEQ ID NO: 2254623 - RNA, 19 nt, Artificial Sequence
  Description of Artificial Sequence: Synthetic oligonucleotide
gcugguaguuuuccaccga

SEQ ID NO: 2254624 - RNA, 19 nt, Artificial Sequence
  Description of Artificial Sequence: Synthetic oligonucleotide
cuccucauuuguaucuaau

SEQ ID NO: 2254625 - RNA, 19 nt, Artificial Sequence
  Description of Artificial Sequence: Synthetic oligonucleotide
cuaauagcugcuggggaau

SEQ ID NO: 2254626 - RNA, 19 nt, Artificial Sequence
  Description of Artificial Sequence: Synthetic oligonucleotide
gaucggucgcauugcuuau

SEQ ID NO: 2254627 - RNA, 19 nt, Artificial Sequence
  Description of Artificial Sequence: Synthetic oligonucleotide
gggguguccccaccaaguc

SEQ ID NO: 2254628 - RNA, 19 nt, Artificial Sequence
  Description of Artificial Sequence: Synthetic oligonucleotide
gcuggggaauauuuacaua

SEQ ID NO: 2254629 - RNA, 19 nt, Artificial Sequence
  Description of Artificial Sequence: Synthetic oligonucleotide
cgcucccaccaacacaucc

SEQ ID NO: 2254630 - RNA, 19 nt, Artificial Sequence
  Description of Artificial Sequence: Synthetic oligonucleotide
ggaggcguaggcuguguua

SEQ ID NO: 2254631 - RNA, 19 nt, Artificial Sequence
  Description of Artificial Sequence: Synthetic oligonucleotide
cacugccguagcggcaagc

SEQ ID NO: 2254632 - RNA, 19 nt, Artificial Sequence
  Description of Artificial Sequence: Synthetic oligonucleotide
gcgcugguaggccaggaaa

SEQ ID NO: 2254633 - RNA, 19 nt, Artificial Sequence
  Description of Artificial Sequence: Synthetic oligonucleotide
gaacugggguaggaggcgu

SEQ ID NO: 2254634 - RNA, 19 nt, Artificial Sequence
  Description of Artificial Sequence: Synthetic oligonucleotide
ggagccgcccgcguuggcc

SEQ ID NO: 2254635 - RNA, 19 nt, Artificial Sequence
  Description of Artificial Sequence: Synthetic oligonucleotide
cauccucauucuuguugaa

SEQ ID NO: 2254636 - RNA, 19 nt, Artificial Sequence
  Description of Artificial Sequence: Synthetic oligonucleotide
gggguuccugcccuccuca

SEQ ID NO: 2254637 - RNA, 19 nt, Artificial Sequence
  Description of Artificial Sequence: Synthetic oligonucleotide
cugggguggggucaacgua

SEQ ID NO: 2254638 - RNA, 19 nt, Artificial Sequence
  Description of Artificial Sequence: Synthetic oligonucleotide
uagcggcaagcauccucau

SEQ ID NO: 2254639 - RNA, 19 nt, Artificial Sequence
  Description of Artificial Sequence: Synthetic oligonucleotide
cgaucggucgcauugcuua

SEQ ID NO: 2254640 - RNA, 19 nt, Artificial Sequence
  Description of Artificial Sequence: Synthetic oligonucleotide
cugcccuccucauuuguau

SEQ ID NO: 2254641 - RNA, 19 nt, Artificial Sequence
  Description of Artificial Sequence: Synthetic oligonucleotide
caguauugugaguguugcu

SEQ ID NO: 2254642 - RNA, 19 nt, Artificial Sequence
  Description of Artificial Sequence: Synthetic oligonucleotide
cugcgacacgaagcgccgc

SEQ ID NO: 2254643 - RNA, 19 nt, Artificial Sequence
  Description of Artificial Sequence: Synthetic oligonucleotide
caguccccuaccugcucca

SEQ ID NO: 2254644 - RNA, 19 nt, Artificial Sequence
  Description of Artificial Sequence: Synthetic oligonucleotide
gcucacgaagcgcgucagc

SEQ ID NO: 2254645 - RNA, 19 nt, Artificial Sequence
  Description of Artificial Sequence: Synthetic oligonucleotide
gggcaucaaccacaaggaa

SEQ ID NO: 2254646 - RNA, 19 nt, Artificial Sequence
  Description of Artificial Sequence: Synthetic oligonucleotide
aggguggcugcugguaguu

SEQ ID NO: 2254647 - RNA, 19 nt, Artificial Sequence
  Description of Artificial Sequence: Synthetic oligonucleotide
guguccccaccaagucucc

SEQ ID NO: 2254648 - RNA, 19 nt, Artificial Sequence
  Description of Artificial Sequence: Synthetic oligonucleotide
uacuugcgaucggucgcau

SEQ ID NO: 2254649 - RNA, 19 nt, Artificial Sequence
  Description of Artificial Sequence: Synthetic oligonucleotide
caucaaccacaaggaagaa

SEQ ID NO: 2254650 - RNA, 19 nt, Artificial Sequence
  Description of Artificial Sequence: Synthetic oligonucleotide
ggcacugccguagcggcaa

SEQ ID NO: 2254651 - RNA, 19 nt, Artificial Sequence
  Description of Artificial Sequence: Synthetic oligonucleotide
gccgcaggucgaaggagcc

SEQ ID NO: 2254652 - RNA, 19 nt, Artificial Sequence
  Description of Artificial Sequence: Synthetic oligonucleotide
cagcaccccgauggcacug

SEQ ID NO: 2254653 - RNA, 19 nt, Artificial Sequence
  Description of Artificial Sequence: Synthetic oligonucleotide
gcggcccgugcugaguccg

SEQ ID NO: 2254654 - RNA, 19 nt, Artificial Sequence
  Description of Artificial Sequence: Synthetic oligonucleotide
gaagaccccugggcugcuc

SEQ ID NO: 2254655 - RNA, 19 nt, Artificial Sequence
  Description of Artificial Sequence: Synthetic oligonucleotide
ccgauggcacugccguagc

SEQ ID NO: 2254656 - RNA, 19 nt, Artificial Sequence
  Description of Artificial Sequence: Synthetic oligonucleotide
cgauggcacugccguagcg

SEQ ID NO: 2254657 - RNA, 19 nt, Artificial Sequence
  Description of Artificial Sequence: Synthetic oligonucleotide
gcuuuaguggcugcccacu

SEQ ID NO: 2254658 - RNA, 19 nt, Artificial Sequence
  Description of Artificial Sequence: Synthetic oligonucleotide
cccgcgucuccaugucgcc

SEQ ID NO: 2254659 - RNA, 19 nt, Artificial Sequence
  Description of Artificial Sequence: Synthetic oligonucleotide
cugaguccgcucccaccaa

SEQ ID NO: 2254660 - RNA, 19 nt, Artificial Sequence
  Description of Artificial Sequence: Synthetic oligonucleotide
gcccgcguuggccgcgccg

SEQ ID NO: 2254661 - RNA, 19 nt, Artificial Sequence
  Description of Artificial Sequence: Synthetic oligonucleotide
ggcaagcagucuggggaca

SEQ ID NO: 2254662 - RNA, 19 nt, Artificial Sequence
  Description of Artificial Sequence: Synthetic oligonucleotide
gcaccccgauggcacugcc

SEQ ID NO: 2254663 - RNA, 19 nt, Artificial Sequence
  Description of Artificial Sequence: Synthetic oligonucleotide
ccuccucauuuguaucuaa

SEQ ID NO: 2254664 - RNA, 19 nt, Artificial Sequence
  Description of Artificial Sequence: Synthetic oligonucleotide
ccgugcugaguccgcuccc

SEQ ID NO: 2254665 - RNA, 19 nt, Artificial Sequence
  Description of Artificial Sequence: Synthetic oligonucleotide
gcguaggcuguguuagggu

SEQ ID NO: 2254666 - RNA, 19 nt, Artificial Sequence
  Description of Artificial Sequence: Synthetic oligonucleotide
gugaccccugaagaccccu

SEQ ID NO: 2254667 - RNA, 19 nt, Artificial Sequence
  Description of Artificial Sequence: Synthetic oligonucleotide
ccgcaggucgaaggagccg

SEQ ID NO: 2254668 - RNA, 19 nt, Artificial Sequence
  Description of Artificial Sequence: Synthetic oligonucleotide
ggucaacguaguucucaau

SEQ ID NO: 2254669 - RNA, 19 nt, Artificial Sequence
  Description of Artificial Sequence: Synthetic oligonucleotide
cagccuuguagcgcuggua

SEQ ID NO: 2254670 - RNA, 19 nt, Artificial Sequence
  Description of Artificial Sequence: Synthetic oligonucleotide
gcagggguguccccaccaa

SEQ ID NO: 2254671 - RNA, 19 nt, Artificial Sequence
  Description of Artificial Sequence: Synthetic oligonucleotide
gcacaccccaggaaaagau

SEQ ID NO: 2254672 - RNA, 19 nt, Artificial Sequence
  Description of Artificial Sequence: Synthetic oligonucleotide
gcgccgcaggucgaaggag

SEQ ID NO: 2254673 - RNA, 19 nt, Artificial Sequence
  Description of Artificial Sequence: Synthetic oligonucleotide
gcgccguaggccccgcguc

SEQ ID NO: 2254674 - RNA, 19 nt, Artificial Sequence
  Description of Artificial Sequence: Synthetic oligonucleotide
gcacugccguagcggcaag

SEQ ID NO: 2254675 - RNA, 19 nt, Artificial Sequence
  Description of Artificial Sequence: Synthetic oligonucleotide
gaccccugggcugcucagu

SEQ ID NO: 2254676 - RNA, 19 nt, Artificial Sequence
  Description of Artificial Sequence: Synthetic oligonucleotide
ccugcccuccucauuugua

SEQ ID NO: 2254677 - RNA, 19 nt, Artificial Sequence
  Description of Artificial Sequence: Synthetic oligonucleotide
ccccugggcugcucaguac

SEQ ID NO: 2254678 - RNA, 19 nt, Artificial Sequence
  Description of Artificial Sequence: Synthetic oligonucleotide
ccguaggccccgcgucucc

SEQ ID NO: 2254679 - RNA, 19 nt, Artificial Sequence
  Description of Artificial Sequence: Synthetic oligonucleotide
ggcaagcauccucauucuu

SEQ ID NO: 2254680 - RNA, 19 nt, Artificial Sequence
  Description of Artificial Sequence: Synthetic oligonucleotide
ccuccugccaggggcagga

SEQ ID NO: 2254681 - RNA, 19 nt, Artificial Sequence
  Description of Artificial Sequence: Synthetic oligonucleotide
ccaagaccaugcucacgaa

SEQ ID NO: 2254682 - RNA, 19 nt, Artificial Sequence
  Description of Artificial Sequence: Synthetic oligonucleotide
caagcagucuggggacagu

SEQ ID NO: 2254683 - RNA, 19 nt, Artificial Sequence
  Description of Artificial Sequence: Synthetic oligonucleotide
ggccccgcgucuccauguc

SEQ ID NO: 2254684 - RNA, 19 nt, Artificial Sequence
  Description of Artificial Sequence: Synthetic oligonucleotide
cugccguagcggcaagcau

SEQ ID NO: 2254685 - RNA, 19 nt, Artificial Sequence
  Description of Artificial Sequence: Synthetic oligonucleotide
ccagguacuugcgaucggu

SEQ ID NO: 2254686 - RNA, 19 nt, Artificial Sequence
  Description of Artificial Sequence: Synthetic oligonucleotide
cguuggccgcgccguaggc

SEQ ID NO: 2254687 - RNA, 19 nt, Artificial Sequence
  Description of Artificial Sequence: Synthetic oligonucleotide
guaggccccgcgucuccau

SEQ ID NO: 2254688 - RNA, 19 nt, Artificial Sequence
  Description of Artificial Sequence: Synthetic oligonucleotide
gcccgugcugaguccgcuc

SEQ ID NO: 2254689 - RNA, 19 nt, Artificial Sequence
  Description of Artificial Sequence: Synthetic oligonucleotide
gguuccugcccuccucauu

SEQ ID NO: 2254690 - RNA, 19 nt, Artificial Sequence
  Description of Artificial Sequence: Synthetic oligonucleotide
ccaggcuaagcucccuccu

SEQ ID NO: 2254691 - RNA, 19 nt, Artificial Sequence
  Description of Artificial Sequence: Synthetic oligonucleotide
cggucgcauugcuuaucug

SEQ ID NO: 2254692 - RNA, 19 nt, Artificial Sequence
  Description of Artificial Sequence: Synthetic oligonucleotide
gcgucuccaugucgccguc

SEQ ID NO: 2254693 - RNA, 19 nt, Artificial Sequence
  Description of Artificial Sequence: Synthetic oligonucleotide
ccgaggaacugggguagga

SEQ ID NO: 2254694 - RNA, 19 nt, Artificial Sequence
  Description of Artificial Sequence: Synthetic oligonucleotide
ccccaccaagucuccaaua

SEQ ID NO: 2254695 - RNA, 19 nt, Artificial Sequence
  Description of Artificial Sequence: Synthetic oligonucleotide
cgaagcgcgucagcaccug

SEQ ID NO: 2254696 - RNA, 19 nt, Artificial Sequence
  Description of Artificial Sequence: Synthetic oligonucleotide
cgcguuggccgcgccguag

SEQ ID NO: 2254697 - RNA, 19 nt, Artificial Sequence
  Description of Artificial Sequence: Synthetic oligonucleotide
cgugcugaguccgcuccca

SEQ ID NO: 2254698 - RNA, 19 nt, Artificial Sequence
  Description of Artificial Sequence: Synthetic oligonucleotide
ccaugcucacgaagcgcgu

SEQ ID NO: 2254699 - RNA, 19 nt, Artificial Sequence
  Description of Artificial Sequence: Synthetic oligonucleotide
cgcgucuccaugucgccgu

SEQ ID NO: 2254700 - RNA, 19 nt, Artificial Sequence
  Description of Artificial Sequence: Synthetic oligonucleotide
ggguuccugcccuccucau

SEQ ID NO: 2254701 - RNA, 19 nt, Artificial Sequence
  Description of Artificial Sequence: Synthetic oligonucleotide
ccagccuuguagcgcuggu

SEQ ID NO: 2254702 - RNA, 19 nt, Artificial Sequence
  Description of Artificial Sequence: Synthetic oligonucleotide
ccgcucccaccaacacauc

SEQ ID NO: 2254703 - RNA, 19 nt, Artificial Sequence
  Description of Artificial Sequence: Synthetic oligonucleotide
cggcccgugcugaguccgc

SEQ ID NO: 2254704 - RNA, 19 nt, Artificial Sequence
  Description of Artificial Sequence: Synthetic oligonucleotide
cggcaagcauccucauucu

SEQ ID NO: 2254705 - RNA, 19 nt, Artificial Sequence
  Description of Artificial Sequence: Synthetic oligonucleotide
ggcccgugcugaguccgcu

SEQ ID NO: 2254706 - RNA, 19 nt, Artificial Sequence
  Description of Artificial Sequence: Synthetic oligonucleotide
gcgaucggucgcauugcuu

SEQ ID NO: 2254707 - RNA, 19 nt, Artificial Sequence
  Description of Artificial Sequence: Synthetic oligonucleotide
ccgcgccguaggccccgcg

SEQ ID NO: 2254708 - RNA, 19 nt, Artificial Sequence
  Description of Artificial Sequence: Synthetic oligonucleotide
cguaggccccgcgucucca

SEQ ID NO: 2254709 - RNA, 19 nt, Artificial Sequence
  Description of Artificial Sequence: Synthetic oligonucleotide
cgaagcgccgcaggucgaa

SEQ ID NO: 2254710 - RNA, 19 nt, Artificial Sequence
  Description of Artificial Sequence: Synthetic oligonucleotide
cccgcguuggccgcgccgu

SEQ ID NO: 2254711 - RNA, 19 nt, Artificial Sequence
  Description of Artificial Sequence: Synthetic oligonucleotide
ccccgauggcacugccgua

SEQ ID NO: 2254712 - RNA, 19 nt, Artificial Sequence
  Description of Artificial Sequence: Synthetic oligonucleotide
cgaaggagccgcccgcguu

SEQ ID NO: 2254713 - RNA, 19 nt, Artificial Sequence
  Description of Artificial Sequence: Synthetic oligonucleotide
cgcgccguaggccccgcgu

SEQ ID NO: 2254714 - RNA, 19 nt, Artificial Sequence
  Description of Artificial Sequence: Synthetic oligonucleotide
cgccguaggccccgcgucu

SEQ ID NO: 2254715 - RNA, 19 nt, Artificial Sequence
  Description of Artificial Sequence: Synthetic oligonucleotide
ccgcguuggccgcgccgua

SEQ ID NO: 2254716 - RNA, 19 nt, Artificial Sequence
  Description of Artificial Sequence: Synthetic oligonucleotide
ccguagcggcaagcauccu

SEQ ID NO: 2254717 - RNA, 19 nt, Artificial Sequence
  Description of Artificial Sequence: Synthetic oligonucleotide
aauguagaagccuagggga

SEQ ID NO: 2254718 - RNA, 19 nt, Artificial Sequence
  Description of Artificial Sequence: Synthetic oligonucleotide
aaaacgucggaacucggcg

SEQ ID NO: 2254719 - RNA, 19 nt, Artificial Sequence
  Description of Artificial Sequence: Synthetic oligonucleotide
auagccaagcagcacaucc

SEQ ID NO: 2254720 - RNA, 19 nt, Artificial Sequence
  Description of Artificial Sequence: Synthetic oligonucleotide
ugauuaacaaggguggucg

SEQ ID NO: 2254721 - RNA, 19 nt, Artificial Sequence
  Description of Artificial Sequence: Synthetic oligonucleotide
ugguguaccacacacagca

SEQ ID NO: 2254722 - RNA, 19 nt, Artificial Sequence
  Description of Artificial Sequence: Synthetic oligonucleotide
ucugguguaccacacacag

SEQ ID NO: 2254723 - RNA, 19 nt, Artificial Sequence
  Description of Artificial Sequence: Synthetic oligonucleotide
uaccacauuauuacgcugg

SEQ ID NO: 2254724 - RNA, 19 nt, Artificial Sequence
  Description of Artificial Sequence: Synthetic oligonucleotide
gaaguaggcagccagguug

SEQ ID NO: 2254725 - RNA, 19 nt, Artificial Sequence
  Description of Artificial Sequence: Synthetic oligonucleotide
ugacugaagacaccugucg

SEQ ID NO: 2254726 - RNA, 19 nt, Artificial Sequence
  Description of Artificial Sequence: Synthetic oligonucleotide
accggagucaccuucuacc

SEQ ID NO: 2254727 - RNA, 19 nt, Artificial Sequence
  Description of Artificial Sequence: Synthetic oligonucleotide
uguggagccucacacgucg

SEQ ID NO: 2254728 - RNA, 19 nt, Artificial Sequence
  Description of Artificial Sequence: Synthetic oligonucleotide
uuuggcaaccaucaugucu

SEQ ID NO: 2254729 - RNA, 19 nt, Artificial Sequence
  Description of Artificial Sequence: Synthetic oligonucleotide
gagaguuggaggcaaaagc

SEQ ID NO: 2254730 - RNA, 19 nt, Artificial Sequence
  Description of Artificial Sequence: Synthetic oligonucleotide
ucuuggcuauccaaggagg

SEQ ID NO: 2254731 - RNA, 19 nt, Artificial Sequence
  Description of Artificial Sequence: Synthetic oligonucleotide
aacaaggguggucgggugc

SEQ ID NO: 2254732 - RNA, 19 nt, Artificial Sequence
  Description of Artificial Sequence: Synthetic oligonucleotide
cugucagacgcccagaugc

SEQ ID NO: 2254733 - RNA, 19 nt, Artificial Sequence
  Description of Artificial Sequence: Synthetic oligonucleotide
auccguauagccaagcagc

SEQ ID NO: 2254734 - RNA, 19 nt, Artificial Sequence
  Description of Artificial Sequence: Synthetic oligonucleotide
aguagguccacaucuauga

SEQ ID NO: 2254735 - RNA, 19 nt, Artificial Sequence
  Description of Artificial Sequence: Synthetic oligonucleotide
uguuuguggagccucacac

SEQ ID NO: 2254736 - RNA, 19 nt, Artificial Sequence
  Description of Artificial Sequence: Synthetic oligonucleotide
acauuauuacgcugguugg

SEQ ID NO: 2254737 - RNA, 19 nt, Artificial Sequence
  Description of Artificial Sequence: Synthetic oligonucleotide
uguaccacacacagcaacc

SEQ ID NO: 2254738 - RNA, 19 nt, Artificial Sequence
  Description of Artificial Sequence: Synthetic oligonucleotide
auuagaacaaggagggugg

SEQ ID NO: 2254739 - RNA, 19 nt, Artificial Sequence
  Description of Artificial Sequence: Synthetic oligonucleotide
uuuguggagccucacacgu

SEQ ID NO: 2254740 - RNA, 19 nt, Artificial Sequence
  Description of Artificial Sequence: Synthetic oligonucleotide
aagccucucaccgaagcgc

SEQ ID NO: 2254741 - RNA, 19 nt, Artificial Sequence
  Description of Artificial Sequence: Synthetic oligonucleotide
agcaggagcccuuucuugc

SEQ ID NO: 2254742 - RNA, 19 nt, Artificial Sequence
  Description of Artificial Sequence: Synthetic oligonucleotide
ucuaugacugaagacaccu

SEQ ID NO: 2254743 - RNA, 19 nt, Artificial Sequence
  Description of Artificial Sequence: Synthetic oligonucleotide
caucaugucugucacuugg

SEQ ID NO: 2254744 - RNA, 19 nt, Artificial Sequence
  Description of Artificial Sequence: Synthetic oligonucleotide
ucguaccacauuauuacgc

SEQ ID NO: 2254745 - RNA, 19 nt, Artificial Sequence
  Description of Artificial Sequence: Synthetic oligonucleotide
uaucugguguaccacacac

SEQ ID NO: 2254746 - RNA, 19 nt, Artificial Sequence
  Description of Artificial Sequence: Synthetic oligonucleotide
cugucggaaaucuuggggc

SEQ ID NO: 2254747 - RNA, 19 nt, Artificial Sequence
  Description of Artificial Sequence: Synthetic oligonucleotide
ugacaaugagguuauggcu

SEQ ID NO: 2254748 - RNA, 19 nt, Artificial Sequence
  Description of Artificial Sequence: Synthetic oligonucleotide
cauuagaacaaggagggug

SEQ ID NO: 2254749 - RNA, 19 nt, Artificial Sequence
  Description of Artificial Sequence: Synthetic oligonucleotide
ugagcauccguauagccaa

SEQ ID NO: 2254750 - RNA, 19 nt, Artificial Sequence
  Description of Artificial Sequence: Synthetic oligonucleotide
ugcaaacugucaucguugg

SEQ ID NO: 2254751 - RNA, 19 nt, Artificial Sequence
  Description of Artificial Sequence: Synthetic oligonucleotide
cuaggggacggucugagcc

SEQ ID NO: 2254752 - RNA, 19 nt, Artificial Sequence
  Description of Artificial Sequence: Synthetic oligonucleotide
uauuacgcugguuggcagg

SEQ ID NO: 2254753 - RNA, 19 nt, Artificial Sequence
  Description of Artificial Sequence: Synthetic oligonucleotide
ugagguuauggcuguuugg

SEQ ID NO: 2254754 - RNA, 19 nt, Artificial Sequence
  Description of Artificial Sequence: Synthetic oligonucleotide
gagccucacacgucgaugg

SEQ ID NO: 2254755 - RNA, 19 nt, Artificial Sequence
  Description of Artificial Sequence: Synthetic oligonucleotide
aacgucggaacucggcguc

SEQ ID NO: 2254756 - RNA, 19 nt, Artificial Sequence
  Description of Artificial Sequence: Synthetic oligonucleotide
guuuucaaugaccacguca

SEQ ID NO: 2254757 - RNA, 19 nt, Artificial Sequence
  Description of Artificial Sequence: Synthetic oligonucleotide
ugagccauguuuguggagc

SEQ ID NO: 2254758 - RNA, 19 nt, Artificial Sequence
  Description of Artificial Sequence: Synthetic oligonucleotide
ucauuccccagucagaguu

SEQ ID NO: 2254759 - RNA, 19 nt, Artificial Sequence
  Description of Artificial Sequence: Synthetic oligonucleotide
ugucauuccccagucagag

SEQ ID NO: 2254760 - RNA, 19 nt, Artificial Sequence
  Description of Artificial Sequence: Synthetic oligonucleotide
caucuaugacugaagacac

SEQ ID NO: 2254761 - RNA, 19 nt, Artificial Sequence
  Description of Artificial Sequence: Synthetic oligonucleotide
gagguuauggcuguuuggc

SEQ ID NO: 2254762 - RNA, 19 nt, Artificial Sequence
  Description of Artificial Sequence: Synthetic oligonucleotide
gucgaugggucucagguag

SEQ ID NO: 2254763 - RNA, 19 nt, Artificial Sequence
  Description of Artificial Sequence: Synthetic oligonucleotide
cccauuagaacaaggaggg

SEQ ID NO: 2254764 - RNA, 19 nt, Artificial Sequence
  Description of Artificial Sequence: Synthetic oligonucleotide
uccacaucuaugacugaag

SEQ ID NO: 2254765 - RNA, 19 nt, Artificial Sequence
  Description of Artificial Sequence: Synthetic oligonucleotide
cuuggcuauccaaggaggg

SEQ ID NO: 2254766 - RNA, 19 nt, Artificial Sequence
  Description of Artificial Sequence: Synthetic oligonucleotide
ugaagauaccuggaacccg

SEQ ID NO: 2254767 - RNA, 19 nt, Artificial Sequence
  Description of Artificial Sequence: Synthetic oligonucleotide
gaagauaccuggaacccgc

SEQ ID NO: 2254768 - RNA, 19 nt, Artificial Sequence
  Description of Artificial Sequence: Synthetic oligonucleotide
aaagccagaccaccggagu

SEQ ID NO: 2254769 - RNA, 19 nt, Artificial Sequence
  Description of Artificial Sequence: Synthetic oligonucleotide
uguagaagccuaggggacg

SEQ ID NO: 2254770 - RNA, 19 nt, Artificial Sequence
  Description of Artificial Sequence: Synthetic oligonucleotide
aggaucucaucacucacug

SEQ ID NO: 2254771 - RNA, 19 nt, Artificial Sequence
  Description of Artificial Sequence: Synthetic oligonucleotide
gauuaacaaggguggucgg

SEQ ID NO: 2254772 - RNA, 19 nt, Artificial Sequence
  Description of Artificial Sequence: Synthetic oligonucleotide
ucguaugucauuccccagu

SEQ ID NO: 2254773 - RNA, 19 nt, Artificial Sequence
  Description of Artificial Sequence: Synthetic oligonucleotide
gaagccucucaccgaagcg

SEQ ID NO: 2254774 - RNA, 19 nt, Artificial Sequence
  Description of Artificial Sequence: Synthetic oligonucleotide
auuacgcugguuggcaggc

SEQ ID NO: 2254775 - RNA, 19 nt, Artificial Sequence
  Description of Artificial Sequence: Synthetic oligonucleotide
ucuuggggcaggcugauua

SEQ ID NO: 2254776 - RNA, 19 nt, Artificial Sequence
  Description of Artificial Sequence: Synthetic oligonucleotide
cacgucacugcugucaucg

SEQ ID NO: 2254777 - RNA, 19 nt, Artificial Sequence
  Description of Artificial Sequence: Synthetic oligonucleotide
auuaacaaggguggucggg

SEQ ID NO: 2254778 - RNA, 19 nt, Artificial Sequence
  Description of Artificial Sequence: Synthetic oligonucleotide
guuuguggagccucacacg

SEQ ID NO: 2254779 - RNA, 19 nt, Artificial Sequence
  Description of Artificial Sequence: Synthetic oligonucleotide
acgucgaugggucucaggu

SEQ ID NO: 2254780 - RNA, 19 nt, Artificial Sequence
  Description of Artificial Sequence: Synthetic oligonucleotide
ugcaccaauaggcgcagug

SEQ ID NO: 2254781 - RNA, 19 nt, Artificial Sequence
  Description of Artificial Sequence: Synthetic oligonucleotide
caaaacgucggaacucggc

SEQ ID NO: 2254782 - RNA, 19 nt, Artificial Sequence
  Description of Artificial Sequence: Synthetic oligonucleotide
guuggugaggggcagcaag

SEQ ID NO: 2254783 - RNA, 19 nt, Artificial Sequence
  Description of Artificial Sequence: Synthetic oligonucleotide
uuauuacgcugguuggcag

SEQ ID NO: 2254784 - RNA, 19 nt, Artificial Sequence
  Description of Artificial Sequence: Synthetic oligonucleotide
ucgaauguagaagccuagg

SEQ ID NO: 2254785 - RNA, 19 nt, Artificial Sequence
  Description of Artificial Sequence: Synthetic oligonucleotide
uaguagguccacaucuaug

SEQ ID NO: 2254786 - RNA, 19 nt, Artificial Sequence
  Description of Artificial Sequence: Synthetic oligonucleotide
gacagugacaaugagguua

SEQ ID NO: 2254787 - RNA, 19 nt, Artificial Sequence
  Description of Artificial Sequence: Synthetic oligonucleotide
cauccguauagccaagcag

SEQ ID NO: 2254788 - RNA, 19 nt, Artificial Sequence
  Description of Artificial Sequence: Synthetic oligonucleotide
accucgaggaucucaucac

SEQ ID NO: 2254789 - RNA, 19 nt, Artificial Sequence
  Description of Artificial Sequence: Synthetic oligonucleotide
aaacgucggaacucggcgu

SEQ ID NO: 2254790 - RNA, 19 nt, Artificial Sequence
  Description of Artificial Sequence: Synthetic oligonucleotide
aggguggcgguuuucaaug

SEQ ID NO: 2254791 - RNA, 19 nt, Artificial Sequence
  Description of Artificial Sequence: Synthetic oligonucleotide
aggcugauuaacaagggug

SEQ ID NO: 2254792 - RNA, 19 nt, Artificial Sequence
  Description of Artificial Sequence: Synthetic oligonucleotide
accuucuacccgcuucugc

SEQ ID NO: 2254793 - RNA, 19 nt, Artificial Sequence
  Description of Artificial Sequence: Synthetic oligonucleotide
ucaucguuggugaggggca

SEQ ID NO: 2254794 - RNA, 19 nt, Artificial Sequence
  Description of Artificial Sequence: Synthetic oligonucleotide
auuauuacgcugguuggca

SEQ ID NO: 2254795 - RNA, 19 nt, Artificial Sequence
  Description of Artificial Sequence: Synthetic oligonucleotide
cucguaccacauuauuacg

SEQ ID NO: 2254796 - RNA, 19 nt, Artificial Sequence
  Description of Artificial Sequence: Synthetic oligonucleotide
augagguuauggcuguuug

SEQ ID NO: 2254797 - RNA, 19 nt, Artificial Sequence
  Description of Artificial Sequence: Synthetic oligonucleotide
uuaacaaggguggucgggu

SEQ ID NO: 2254798 - RNA, 19 nt, Artificial Sequence
  Description of Artificial Sequence: Synthetic oligonucleotide
aaaagccagaccaccggag

SEQ ID NO: 2254799 - RNA, 19 nt, Artificial Sequence
  Description of Artificial Sequence: Synthetic oligonucleotide
acugucaucguuggugagg

SEQ ID NO: 2254800 - RNA, 19 nt, Artificial Sequence
  Description of Artificial Sequence: Synthetic oligonucleotide
gcccauuagaacaaggagg

SEQ ID NO: 2254801 - RNA, 19 nt, Artificial Sequence
  Description of Artificial Sequence: Synthetic oligonucleotide
caccucaaugccauugacc

SEQ ID NO: 2254802 - RNA, 19 nt, Artificial Sequence
  Description of Artificial Sequence: Synthetic oligonucleotide
ugucggaaaucuuggggca

SEQ ID NO: 2254803 - RNA, 19 nt, Artificial Sequence
  Description of Artificial Sequence: Synthetic oligonucleotide
aggcuugacagugacaaug

SEQ ID NO: 2254804 - RNA, 19 nt, Artificial Sequence
  Description of Artificial Sequence: Synthetic oligonucleotide
uccguauagccaagcagca

SEQ ID NO: 2254805 - RNA, 19 nt, Artificial Sequence
  Description of Artificial Sequence: Synthetic oligonucleotide
ucagguaguagguccacau

SEQ ID NO: 2254806 - RNA, 19 nt, Artificial Sequence
  Description of Artificial Sequence: Synthetic oligonucleotide
ucgaggaucucaucacuca

SEQ ID NO: 2254807 - RNA, 19 nt, Artificial Sequence
  Description of Artificial Sequence: Synthetic oligonucleotide
agcgcaaaacgucggaacu

SEQ ID NO: 2254808 - RNA, 19 nt, Artificial Sequence
  Description of Artificial Sequence: Synthetic oligonucleotide
ccaucucgaauguagaagc

SEQ ID NO: 2254809 - RNA, 19 nt, Artificial Sequence
  Description of Artificial Sequence: Synthetic oligonucleotide
caccaauaggcgcaguggc

SEQ ID NO: 2254810 - RNA, 19 nt, Artificial Sequence
  Description of Artificial Sequence: Synthetic oligonucleotide
cuucugcaccaauaggcgc

SEQ ID NO: 2254811 - RNA, 19 nt, Artificial Sequence
  Description of Artificial Sequence: Synthetic oligonucleotide
ggcugauuaacaagggugg

SEQ ID NO: 2254812 - RNA, 19 nt, Artificial Sequence
  Description of Artificial Sequence: Synthetic oligonucleotide
uagaacaaggaggguggcg

SEQ ID NO: 2254813 - RNA, 19 nt, Artificial Sequence
  Description of Artificial Sequence: Synthetic oligonucleotide
gaccucgaggaucucauca

SEQ ID NO: 2254814 - RNA, 19 nt, Artificial Sequence
  Description of Artificial Sequence: Synthetic oligonucleotide
caucucgaauguagaagcc

SEQ ID NO: 2254815 - RNA, 19 nt, Artificial Sequence
  Description of Artificial Sequence: Synthetic oligonucleotide
caagucgccgugagcaucc

SEQ ID NO: 2254816 - RNA, 19 nt, Artificial Sequence
  Description of Artificial Sequence: Synthetic oligonucleotide
uggaacccgcuccaggccc

SEQ ID NO: 2254817 - RNA, 19 nt, Artificial Sequence
  Description of Artificial Sequence: Synthetic oligonucleotide
caccugucggaaaucuugg

SEQ ID NO: 2254818 - RNA, 19 nt, Artificial Sequence
  Description of Artificial Sequence: Synthetic oligonucleotide
auguagaagccuaggggac

SEQ ID NO: 2254819 - RNA, 19 nt, Artificial Sequence
  Description of Artificial Sequence: Synthetic oligonucleotide
uggcuauccaaggagggca

SEQ ID NO: 2254820 - RNA, 19 nt, Artificial Sequence
  Description of Artificial Sequence: Synthetic oligonucleotide
agagaguuggaggcaaaag

SEQ ID NO: 2254821 - RNA, 19 nt, Artificial Sequence
  Description of Artificial Sequence: Synthetic oligonucleotide
aggcacuacagaggaaggc

SEQ ID NO: 2254822 - RNA, 19 nt, Artificial Sequence
  Description of Artificial Sequence: Synthetic oligonucleotide
aacugucaucguuggugag

SEQ ID NO: 2254823 - RNA, 19 nt, Artificial Sequence
  Description of Artificial Sequence: Synthetic oligonucleotide
aguuggaggcaaaagccag

SEQ ID NO: 2254824 - RNA, 19 nt, Artificial Sequence
  Description of Artificial Sequence: Synthetic oligonucleotide
aagccuaggggacggucug

SEQ ID NO: 2254825 - RNA, 19 nt, Artificial Sequence
  Description of Artificial Sequence: Synthetic oligonucleotide
uugaccucgaggaucucau

SEQ ID NO: 2254826 - RNA, 19 nt, Artificial Sequence
  Description of Artificial Sequence: Synthetic oligonucleotide
aauaggcgcaguggcgggg

SEQ ID NO: 2254827 - RNA, 19 nt, Artificial Sequence
  Description of Artificial Sequence: Synthetic oligonucleotide
guuauggcuguuuggcaac

SEQ ID NO: 2254828 - RNA, 19 nt, Artificial Sequence
  Description of Artificial Sequence: Synthetic oligonucleotide
ccucguaccacauuauuac

SEQ ID NO: 2254829 - RNA, 19 nt, Artificial Sequence
  Description of Artificial Sequence: Synthetic oligonucleotide
ugucagacgcccagaugcc

SEQ ID NO: 2254830 - RNA, 19 nt, Artificial Sequence
  Description of Artificial Sequence: Synthetic oligonucleotide
cucgaauguagaagccuag

SEQ ID NO: 2254831 - RNA, 19 nt, Artificial Sequence
  Description of Artificial Sequence: Synthetic oligonucleotide
caaccaucaugucugucac

SEQ ID NO: 2254832 - RNA, 19 nt, Artificial Sequence
  Description of Artificial Sequence: Synthetic oligonucleotide
aagacaccugucggaaauc

SEQ ID NO: 2254833 - RNA, 19 nt, Artificial Sequence
  Description of Artificial Sequence: Synthetic oligonucleotide
uggucgggugcgcagaggu

SEQ ID NO: 2254834 - RNA, 19 nt, Artificial Sequence
  Description of Artificial Sequence: Synthetic oligonucleotide
agauaccuggaacccgcuc

SEQ ID NO: 2254835 - RNA, 19 nt, Artificial Sequence
  Description of Artificial Sequence: Synthetic oligonucleotide
acaccugucggaaaucuug

SEQ ID NO: 2254836 - RNA, 19 nt, Artificial Sequence
  Description of Artificial Sequence: Synthetic oligonucleotide
accucguaugucauucccc

SEQ ID NO: 2254837 - RNA, 19 nt, Artificial Sequence
  Description of Artificial Sequence: Synthetic oligonucleotide
ucggaaaucuuggggcagg

SEQ ID NO: 2254838 - RNA, 19 nt, Artificial Sequence
  Description of Artificial Sequence: Synthetic oligonucleotide
aucuaugacugaagacacc

SEQ ID NO: 2254839 - RNA, 19 nt, Artificial Sequence
  Description of Artificial Sequence: Synthetic oligonucleotide
caggaaguaggcagccagg

SEQ ID NO: 2254840 - RNA, 19 nt, Artificial Sequence
  Description of Artificial Sequence: Synthetic oligonucleotide
agucagaguuggcuugcuc

SEQ ID NO: 2254841 - RNA, 19 nt, Artificial Sequence
  Description of Artificial Sequence: Synthetic oligonucleotide
guagaagccuaggggacgg

SEQ ID NO: 2254842 - RNA, 19 nt, Artificial Sequence
  Description of Artificial Sequence: Synthetic oligonucleotide
augacugaagacaccuguc

SEQ ID NO: 2254843 - RNA, 19 nt, Artificial Sequence
  Description of Artificial Sequence: Synthetic oligonucleotide
aaccgcgagaacuccugga

SEQ ID NO: 2254844 - RNA, 19 nt, Artificial Sequence
  Description of Artificial Sequence: Synthetic oligonucleotide
gcaaccaucaugucuguca

SEQ ID NO: 2254845 - RNA, 19 nt, Artificial Sequence
  Description of Artificial Sequence: Synthetic oligonucleotide
cuugguccaaggucuuccc

SEQ ID NO: 2254846 - RNA, 19 nt, Artificial Sequence
  Description of Artificial Sequence: Synthetic oligonucleotide
uuggcuauccaaggagggc

SEQ ID NO: 2254847 - RNA, 19 nt, Artificial Sequence
  Description of Artificial Sequence: Synthetic oligonucleotide
accugucggaaaucuuggg

SEQ ID NO: 2254848 - RNA, 19 nt, Artificial Sequence
  Description of Artificial Sequence: Synthetic oligonucleotide
ugccccucguaccacauua

SEQ ID NO: 2254849 - RNA, 19 nt, Artificial Sequence
  Description of Artificial Sequence: Synthetic oligonucleotide
guaccacauuauuacgcug

SEQ ID NO: 2254850 - RNA, 19 nt, Artificial Sequence
  Description of Artificial Sequence: Synthetic oligonucleotide
agcauccguauagccaagc

SEQ ID NO: 2254851 - RNA, 19 nt, Artificial Sequence
  Description of Artificial Sequence: Synthetic oligonucleotide
aguaggcccaggcacuaca

SEQ ID NO: 2254852 - RNA, 19 nt, Artificial Sequence
  Description of Artificial Sequence: Synthetic oligonucleotide
cacccgaacacucaugcca

SEQ ID NO: 2254853 - RNA, 19 nt, Artificial Sequence
  Description of Artificial Sequence: Synthetic oligonucleotide
cucgaggaucucaucacuc

SEQ ID NO: 2254854 - RNA, 19 nt, Artificial Sequence
  Description of Artificial Sequence: Synthetic oligonucleotide
uaacaaggguggucgggug

SEQ ID NO: 2254855 - RNA, 19 nt, Artificial Sequence
  Description of Artificial Sequence: Synthetic oligonucleotide
ggucaguaggcccaggcac

SEQ ID NO: 2254856 - RNA, 19 nt, Artificial Sequence
  Description of Artificial Sequence: Synthetic oligonucleotide
auaucugguguaccacaca

SEQ ID NO: 2254857 - RNA, 19 nt, Artificial Sequence
  Description of Artificial Sequence: Synthetic oligonucleotide
acacacagcaaccgcgaga

SEQ ID NO: 2254858 - RNA, 19 nt, Artificial Sequence
  Description of Artificial Sequence: Synthetic oligonucleotide
gagccauguuuguggagcc

SEQ ID NO: 2254859 - RNA, 19 nt, Artificial Sequence
  Description of Artificial Sequence: Synthetic oligonucleotide
caggcacuacagaggaagg

SEQ ID NO: 2254860 - RNA, 19 nt, Artificial Sequence
  Description of Artificial Sequence: Synthetic oligonucleotide
uuggcuugcucuuggcuau

SEQ ID NO: 2254861 - RNA, 19 nt, Artificial Sequence
  Description of Artificial Sequence: Synthetic oligonucleotide
cuauccaaggagggcagag

SEQ ID NO: 2254862 - RNA, 19 nt, Artificial Sequence
  Description of Artificial Sequence: Synthetic oligonucleotide
accaauaggcgcaguggcg

SEQ ID NO: 2254863 - RNA, 19 nt, Artificial Sequence
  Description of Artificial Sequence: Synthetic oligonucleotide
auaccuggaacccgcucca

SEQ ID NO: 2254864 - RNA, 19 nt, Artificial Sequence
  Description of Artificial Sequence: Synthetic oligonucleotide
cugauuaacaagggugguc

SEQ ID NO: 2254865 - RNA, 19 nt, Artificial Sequence
  Description of Artificial Sequence: Synthetic oligonucleotide
uuagaacaaggaggguggc

SEQ ID NO: 2254866 - RNA, 19 nt, Artificial Sequence
  Description of Artificial Sequence: Synthetic oligonucleotide
cagcgcaaaacgucggaac

SEQ ID NO: 2254867 - RNA, 19 nt, Artificial Sequence
  Description of Artificial Sequence: Synthetic oligonucleotide
caccucguaugucauuccc

SEQ ID NO: 2254868 - RNA, 19 nt, Artificial Sequence
  Description of Artificial Sequence: Synthetic oligonucleotide
ugcgucucugcagagaguu

SEQ ID NO: 2254869 - RNA, 19 nt, Artificial Sequence
  Description of Artificial Sequence: Synthetic oligonucleotide
agguuauggcuguuuggca

SEQ ID NO: 2254870 - RNA, 19 nt, Artificial Sequence
  Description of Artificial Sequence: Synthetic oligonucleotide
accacauuauuacgcuggu

SEQ ID NO: 2254871 - RNA, 19 nt, Artificial Sequence
  Description of Artificial Sequence: Synthetic oligonucleotide
cagcccugugcucucagcc

SEQ ID NO: 2254872 - RNA, 19 nt, Artificial Sequence
  Description of Artificial Sequence: Synthetic oligonucleotide
ugccaucucgaauguagaa

SEQ ID NO: 2254873 - RNA, 19 nt, Artificial Sequence
  Description of Artificial Sequence: Synthetic oligonucleotide
caauaggcgcaguggcggg

SEQ ID NO: 2254874 - RNA, 19 nt, Artificial Sequence
  Description of Artificial Sequence: Synthetic oligonucleotide
gaagacaccugucggaaau

SEQ ID NO: 2254875 - RNA, 19 nt, Artificial Sequence
  Description of Artificial Sequence: Synthetic oligonucleotide
gaugggucucagguaguag

SEQ ID NO: 2254876 - RNA, 19 nt, Artificial Sequence
  Description of Artificial Sequence: Synthetic oligonucleotide
uccccagucagaguuggcu

SEQ ID NO: 2254877 - RNA, 19 nt, Artificial Sequence
  Description of Artificial Sequence: Synthetic oligonucleotide
auguuuguggagccucaca

SEQ ID NO: 2254878 - RNA, 19 nt, Artificial Sequence
  Description of Artificial Sequence: Synthetic oligonucleotide
ggcacuacagaggaaggcc

SEQ ID NO: 2254879 - RNA, 19 nt, Artificial Sequence
  Description of Artificial Sequence: Synthetic oligonucleotide
aggagcccuuucuugcguc

SEQ ID NO: 2254880 - RNA, 19 nt, Artificial Sequence
  Description of Artificial Sequence: Synthetic oligonucleotide
uaggggacggucugagcca

SEQ ID NO: 2254881 - RNA, 19 nt, Artificial Sequence
  Description of Artificial Sequence: Synthetic oligonucleotide
uuauggcuguuuggcaacc

SEQ ID NO: 2254882 - RNA, 19 nt, Artificial Sequence
  Description of Artificial Sequence: Synthetic oligonucleotide
uauccaaggagggcagaga

SEQ ID NO: 2254883 - RNA, 19 nt, Artificial Sequence
  Description of Artificial Sequence: Synthetic oligonucleotide
ucaccucguaugucauucc

SEQ ID NO: 2254884 - RNA, 19 nt, Artificial Sequence
  Description of Artificial Sequence: Synthetic oligonucleotide
cagcccauuagaacaagga

SEQ ID NO: 2254885 - RNA, 19 nt, Artificial Sequence
  Description of Artificial Sequence: Synthetic oligonucleotide
agaagccuaggggacgguc

SEQ ID NO: 2254886 - RNA, 19 nt, Artificial Sequence
  Description of Artificial Sequence: Synthetic oligonucleotide
gccgugagcauccguauag

SEQ ID NO: 2254887 - RNA, 19 nt, Artificial Sequence
  Description of Artificial Sequence: Synthetic oligonucleotide
ggcaaaagccagaccaccg

SEQ ID NO: 2254888 - RNA, 19 nt, Artificial Sequence
  Description of Artificial Sequence: Synthetic oligonucleotide
cagcaagucgccgugagca

SEQ ID NO: 2254889 - RNA, 19 nt, Artificial Sequence
  Description of Artificial Sequence: Synthetic oligonucleotide
cuugcucuuggcuauccaa

SEQ ID NO: 2254890 - RNA, 19 nt, Artificial Sequence
  Description of Artificial Sequence: Synthetic oligonucleotide
gucgggugcgcagaggugc

SEQ ID NO: 2254891 - RNA, 19 nt, Artificial Sequence
  Description of Artificial Sequence: Synthetic oligonucleotide
ucaucgucacugucagggu

SEQ ID NO: 2254892 - RNA, 19 nt, Artificial Sequence
  Description of Artificial Sequence: Synthetic oligonucleotide
ugaagacaccugucggaaa

SEQ ID NO: 2254893 - RNA, 19 nt, Artificial Sequence
  Description of Artificial Sequence: Synthetic oligonucleotide
acggucugagccauguuug

SEQ ID NO: 2254894 - RNA, 19 nt, Artificial Sequence
  Description of Artificial Sequence: Synthetic oligonucleotide
gugagcauccguauagcca

SEQ ID NO: 2254895 - RNA, 19 nt, Artificial Sequence
  Description of Artificial Sequence: Synthetic oligonucleotide
accgcgagaacuccuggaa

SEQ ID NO: 2254896 - RNA, 19 nt, Artificial Sequence
  Description of Artificial Sequence: Synthetic oligonucleotide
cucguaugucauuccccag

SEQ ID NO: 2254897 - RNA, 19 nt, Artificial Sequence
  Description of Artificial Sequence: Synthetic oligonucleotide
gccaucucgaauguagaag

SEQ ID NO: 2254898 - RNA, 19 nt, Artificial Sequence
  Description of Artificial Sequence: Synthetic oligonucleotide
ucuugcgucucugcagaga

SEQ ID NO: 2254899 - RNA, 19 nt, Artificial Sequence
  Description of Artificial Sequence: Synthetic oligonucleotide
uucuugcgucucugcagag

SEQ ID NO: 2254900 - RNA, 19 nt, Artificial Sequence
  Description of Artificial Sequence: Synthetic oligonucleotide
ccaauaggcgcaguggcgg

SEQ ID NO: 2254901 - RNA, 19 nt, Artificial Sequence
  Description of Artificial Sequence: Synthetic oligonucleotide
gccacccgaacacucaugc

SEQ ID NO: 2254902 - RNA, 19 nt, Artificial Sequence
  Description of Artificial Sequence: Synthetic oligonucleotide
gaccacgucacugcuguca

SEQ ID NO: 2254903 - RNA, 19 nt, Artificial Sequence
  Description of Artificial Sequence: Synthetic oligonucleotide
cauuccccagucagaguug

SEQ ID NO: 2254904 - RNA, 19 nt, Artificial Sequence
  Description of Artificial Sequence: Synthetic oligonucleotide
uggaagccucucaccgaag

SEQ ID NO: 2254905 - RNA, 19 nt, Artificial Sequence
  Description of Artificial Sequence: Synthetic oligonucleotide
agccucucaccgaagcgcg

SEQ ID NO: 2254906 - RNA, 19 nt, Artificial Sequence
  Description of Artificial Sequence: Synthetic oligonucleotide
aucguuggugaggggcagc

SEQ ID NO: 2254907 - RNA, 19 nt, Artificial Sequence
  Description of Artificial Sequence: Synthetic oligonucleotide
ugucaucguuggugagggg

SEQ ID NO: 2254908 - RNA, 19 nt, Artificial Sequence
  Description of Artificial Sequence: Synthetic oligonucleotide
caaccgcgagaacuccugg

SEQ ID NO: 2254909 - RNA, 19 nt, Artificial Sequence
  Description of Artificial Sequence: Synthetic oligonucleotide
uggucgaagcaggagcccu

SEQ ID NO: 2254910 - RNA, 19 nt, Artificial Sequence
  Description of Artificial Sequence: Synthetic oligonucleotide
auggcuguuuggcaaccau

SEQ ID NO: 2254911 - RNA, 19 nt, Artificial Sequence
  Description of Artificial Sequence: Synthetic oligonucleotide
guccaaggucuucccagcc

SEQ ID NO: 2254912 - RNA, 19 nt, Artificial Sequence
  Description of Artificial Sequence: Synthetic oligonucleotide
gcaccaauaggcgcagugg

SEQ ID NO: 2254913 - RNA, 19 nt, Artificial Sequence
  Description of Artificial Sequence: Synthetic oligonucleotide
ggggcagcgcaaaacgucg

SEQ ID NO: 2254914 - RNA, 19 nt, Artificial Sequence
  Description of Artificial Sequence: Synthetic oligonucleotide
cugagacagcccauuagaa

SEQ ID NO: 2254915 - RNA, 19 nt, Artificial Sequence
  Description of Artificial Sequence: Synthetic oligonucleotide
gcaggcuugacagugacaa

SEQ ID NO: 2254916 - RNA, 19 nt, Artificial Sequence
  Description of Artificial Sequence: Synthetic oligonucleotide
aaggaggguggcgguuuuc

SEQ ID NO: 2254917 - RNA, 19 nt, Artificial Sequence
  Description of Artificial Sequence: Synthetic oligonucleotide
cagguugcaggucccagca

SEQ ID NO: 2254918 - RNA, 19 nt, Artificial Sequence
  Description of Artificial Sequence: Synthetic oligonucleotide
agaugccccucguaccaca

SEQ ID NO: 2254919 - RNA, 19 nt, Artificial Sequence
  Description of Artificial Sequence: Synthetic oligonucleotide
gucggaaaucuuggggcag

SEQ ID NO: 2254920 - RNA, 19 nt, Artificial Sequence
  Description of Artificial Sequence: Synthetic oligonucleotide
gacggucugagccauguuu

SEQ ID NO: 2254921 - RNA, 19 nt, Artificial Sequence
  Description of Artificial Sequence: Synthetic oligonucleotide
uauggcuguuuggcaacca

SEQ ID NO: 2254922 - RNA, 19 nt, Artificial Sequence
  Description of Artificial Sequence: Synthetic oligonucleotide
ucaccgaagcgcggggcag

SEQ ID NO: 2254923 - RNA, 19 nt, Artificial Sequence
  Description of Artificial Sequence: Synthetic oligonucleotide
ucgaugggucucagguagu

SEQ ID NO: 2254924 - RNA, 19 nt, Artificial Sequence
  Description of Artificial Sequence: Synthetic oligonucleotide
cucucaccgaagcgcgggg

SEQ ID NO: 2254925 - RNA, 19 nt, Artificial Sequence
  Description of Artificial Sequence: Synthetic oligonucleotide
gucagggucaguaggccca

SEQ ID NO: 2254926 - RNA, 19 nt, Artificial Sequence
  Description of Artificial Sequence: Synthetic oligonucleotide
caucacucacugccagcag

SEQ ID NO: 2254927 - RNA, 19 nt, Artificial Sequence
  Description of Artificial Sequence: Synthetic oligonucleotide
aggguggucgggugcgcag

SEQ ID NO: 2254928 - RNA, 19 nt, Artificial Sequence
  Description of Artificial Sequence: Synthetic oligonucleotide
caugggucccugagacagc

SEQ ID NO: 2254929 - RNA, 19 nt, Artificial Sequence
  Description of Artificial Sequence: Synthetic oligonucleotide
agccagaccaccggaguca

SEQ ID NO: 2254930 - RNA, 19 nt, Artificial Sequence
  Description of Artificial Sequence: Synthetic oligonucleotide
ucacacgucgaugggucuc

SEQ ID NO: 2254931 - RNA, 19 nt, Artificial Sequence
  Description of Artificial Sequence: Synthetic oligonucleotide
guaugucauuccccaguca

SEQ ID NO: 2254932 - RNA, 19 nt, Artificial Sequence
  Description of Artificial Sequence: Synthetic oligonucleotide
aagauaccuggaacccgcu

SEQ ID NO: 2254933 - RNA, 19 nt, Artificial Sequence
  Description of Artificial Sequence: Synthetic oligonucleotide
ccggugcaaacugucaucg

SEQ ID NO: 2254934 - RNA, 19 nt, Artificial Sequence
  Description of Artificial Sequence: Synthetic oligonucleotide
ucgggugcgcagaggugca

SEQ ID NO: 2254935 - RNA, 19 nt, Artificial Sequence
  Description of Artificial Sequence: Synthetic oligonucleotide
cguauagccaagcagcaca

SEQ ID NO: 2254936 - RNA, 19 nt, Artificial Sequence
  Description of Artificial Sequence: Synthetic oligonucleotide
aacaaggaggguggcgguu

SEQ ID NO: 2254937 - RNA, 19 nt, Artificial Sequence
  Description of Artificial Sequence: Synthetic oligonucleotide
cgcgagaacuccuggaagc

SEQ ID NO: 2254938 - RNA, 19 nt, Artificial Sequence
  Description of Artificial Sequence: Synthetic oligonucleotide
ccugagacagcccauuaga

SEQ ID NO: 2254939 - RNA, 19 nt, Artificial Sequence
  Description of Artificial Sequence: Synthetic oligonucleotide
cauguuuguggagccucac

SEQ ID NO: 2254940 - RNA, 19 nt, Artificial Sequence
  Description of Artificial Sequence: Synthetic oligonucleotide
gcaggcugauuaacaaggg

SEQ ID NO: 2254941 - RNA, 19 nt, Artificial Sequence
  Description of Artificial Sequence: Synthetic oligonucleotide
ucccugagacagcccauua

SEQ ID NO: 2254942 - RNA, 19 nt, Artificial Sequence
  Description of Artificial Sequence: Synthetic oligonucleotide
gcuggucgaagcaggagcc

SEQ ID NO: 2254943 - RNA, 19 nt, Artificial Sequence
  Description of Artificial Sequence: Synthetic oligonucleotide
gcacuacagaggaaggccc

SEQ ID NO: 2254944 - RNA, 19 nt, Artificial Sequence
  Description of Artificial Sequence: Synthetic oligonucleotide
gaagcaggagcccuuucuu

SEQ ID NO: 2254945 - RNA, 19 nt, Artificial Sequence
  Description of Artificial Sequence: Synthetic oligonucleotide
ggcagcaagucgccgugag

SEQ ID NO: 2254946 - RNA, 19 nt, Artificial Sequence
  Description of Artificial Sequence: Synthetic oligonucleotide
uugcgucucugcagagagu

SEQ ID NO: 2254947 - RNA, 19 nt, Artificial Sequence
  Description of Artificial Sequence: Synthetic oligonucleotide
aaggguggucgggugcgca

SEQ ID NO: 2254948 - RNA, 19 nt, Artificial Sequence
  Description of Artificial Sequence: Synthetic oligonucleotide
gucagacgcccagaugccc

SEQ ID NO: 2254949 - RNA, 19 nt, Artificial Sequence
  Description of Artificial Sequence: Synthetic oligonucleotide
agcaagucgccgugagcau

SEQ ID NO: 2254950 - RNA, 19 nt, Artificial Sequence
  Description of Artificial Sequence: Synthetic oligonucleotide
ccucguaugucauucccca

SEQ ID NO: 2254951 - RNA, 19 nt, Artificial Sequence
  Description of Artificial Sequence: Synthetic oligonucleotide
gaagccuaggggacggucu

SEQ ID NO: 2254952 - RNA, 19 nt, Artificial Sequence
  Description of Artificial Sequence: Synthetic oligonucleotide
cgggagaugaagauaccug

SEQ ID NO: 2254953 - RNA, 19 nt, Artificial Sequence
  Description of Artificial Sequence: Synthetic oligonucleotide
ccucacacgucgauggguc

SEQ ID NO: 2254954 - RNA, 19 nt, Artificial Sequence
  Description of Artificial Sequence: Synthetic oligonucleotide
ucgccgugagcauccguau

SEQ ID NO: 2254955 - RNA, 19 nt, Artificial Sequence
  Description of Artificial Sequence: Synthetic oligonucleotide
ugaccucgaggaucucauc

SEQ ID NO: 2254956 - RNA, 19 nt, Artificial Sequence
  Description of Artificial Sequence: Synthetic oligonucleotide
guaguagguccacaucuau

SEQ ID NO: 2254957 - RNA, 19 nt, Artificial Sequence
  Description of Artificial Sequence: Synthetic oligonucleotide
caucguuggugaggggcag

SEQ ID NO: 2254958 - RNA, 19 nt, Artificial Sequence
  Description of Artificial Sequence: Synthetic oligonucleotide
caccggagucaccuucuac

SEQ ID NO: 2254959 - RNA, 19 nt, Artificial Sequence
  Description of Artificial Sequence: Synthetic oligonucleotide
gcccagaugccccucguac

SEQ ID NO: 2254960 - RNA, 19 nt, Artificial Sequence
  Description of Artificial Sequence: Synthetic oligonucleotide
agacagcccauuagaacaa

SEQ ID NO: 2254961 - RNA, 19 nt, Artificial Sequence
  Description of Artificial Sequence: Synthetic oligonucleotide
cacauccaggccagauauc

SEQ ID NO: 2254962 - RNA, 19 nt, Artificial Sequence
  Description of Artificial Sequence: Synthetic oligonucleotide
ccagguugcaggucccagc

SEQ ID NO: 2254963 - RNA, 19 nt, Artificial Sequence
  Description of Artificial Sequence: Synthetic oligonucleotide
cuggucgaagcaggagccc

SEQ ID NO: 2254964 - RNA, 19 nt, Artificial Sequence
  Description of Artificial Sequence: Synthetic oligonucleotide
cgugagcauccguauagcc

SEQ ID NO: 2254965 - RNA, 19 nt, Artificial Sequence
  Description of Artificial Sequence: Synthetic oligonucleotide
cccagaugccccucguacc

SEQ ID NO: 2254966 - RNA, 19 nt, Artificial Sequence
  Description of Artificial Sequence: Synthetic oligonucleotide
accgaagcgcggggcagcg

SEQ ID NO: 2254967 - RNA, 19 nt, Artificial Sequence
  Description of Artificial Sequence: Synthetic oligonucleotide
gggucccugagacagccca

SEQ ID NO: 2254968 - RNA, 19 nt, Artificial Sequence
  Description of Artificial Sequence: Synthetic oligonucleotide
ugggucccugagacagccc

SEQ ID NO: 2254969 - RNA, 19 nt, Artificial Sequence
  Description of Artificial Sequence: Synthetic oligonucleotide
uggcaaccaucaugucugu

SEQ ID NO: 2254970 - RNA, 19 nt, Artificial Sequence
  Description of Artificial Sequence: Synthetic oligonucleotide
uugcaggucccagcacaug

SEQ ID NO: 2254971 - RNA, 19 nt, Artificial Sequence
  Description of Artificial Sequence: Synthetic oligonucleotide
cuuggggcaggcugauuaa

SEQ ID NO: 2254972 - RNA, 19 nt, Artificial Sequence
  Description of Artificial Sequence: Synthetic oligonucleotide
cucaccgaagcgcggggca

SEQ ID NO: 2254973 - RNA, 19 nt, Artificial Sequence
  Description of Artificial Sequence: Synthetic oligonucleotide
gaacaaggaggguggcggu

SEQ ID NO: 2254974 - RNA, 19 nt, Artificial Sequence
  Description of Artificial Sequence: Synthetic oligonucleotide
gagcauccguauagccaag

SEQ ID NO: 2254975 - RNA, 19 nt, Artificial Sequence
  Description of Artificial Sequence: Synthetic oligonucleotide
acccgaacacucaugccau

SEQ ID NO: 2254976 - RNA, 19 nt, Artificial Sequence
  Description of Artificial Sequence: Synthetic oligonucleotide
ggugcaaacugucaucguu

SEQ ID NO: 2254977 - RNA, 19 nt, Artificial Sequence
  Description of Artificial Sequence: Synthetic oligonucleotide
ggagccucacacgucgaug

SEQ ID NO: 2254978 - RNA, 19 nt, Artificial Sequence
  Description of Artificial Sequence: Synthetic oligonucleotide
gcauccguauagccaagca

SEQ ID NO: 2254979 - RNA, 19 nt, Artificial Sequence
  Description of Artificial Sequence: Synthetic oligonucleotide
uaccuggaacccgcuccag

SEQ ID NO: 2254980 - RNA, 19 nt, Artificial Sequence
  Description of Artificial Sequence: Synthetic oligonucleotide
gcaaaacgucggaacucgg

SEQ ID NO: 2254981 - RNA, 19 nt, Artificial Sequence
  Description of Artificial Sequence: Synthetic oligonucleotide
cagcuggucgaagcaggag

SEQ ID NO: 2254982 - RNA, 19 nt, Artificial Sequence
  Description of Artificial Sequence: Synthetic oligonucleotide
cagcaaccgcgagaacucc

SEQ ID NO: 2254983 - RNA, 19 nt, Artificial Sequence
  Description of Artificial Sequence: Synthetic oligonucleotide
ggcuauccaaggagggcag

SEQ ID NO: 2254984 - RNA, 19 nt, Artificial Sequence
  Description of Artificial Sequence: Synthetic oligonucleotide
gucgccgugagcauccgua

SEQ ID NO: 2254985 - RNA, 19 nt, Artificial Sequence
  Description of Artificial Sequence: Synthetic oligonucleotide
gguggucgggugcgcagag

SEQ ID NO: 2254986 - RNA, 19 nt, Artificial Sequence
  Description of Artificial Sequence: Synthetic oligonucleotide
agcaaccgcgagaacuccu

SEQ ID NO: 2254987 - RNA, 19 nt, Artificial Sequence
  Description of Artificial Sequence: Synthetic oligonucleotide
caggcugauuaacaagggu

SEQ ID NO: 2254988 - RNA, 19 nt, Artificial Sequence
  Description of Artificial Sequence: Synthetic oligonucleotide
accaccggagucaccuucu

SEQ ID NO: 2254989 - RNA, 19 nt, Artificial Sequence
  Description of Artificial Sequence: Synthetic oligonucleotide
ggcgguuuucaaugaccac

SEQ ID NO: 2254990 - RNA, 19 nt, Artificial Sequence
  Description of Artificial Sequence: Synthetic oligonucleotide
gcaaccgcgagaacuccug

SEQ ID NO: 2254991 - RNA, 19 nt, Artificial Sequence
  Description of Artificial Sequence: Synthetic oligonucleotide
gggcccgcuggccagggcc

SEQ ID NO: 2254992 - RNA, 19 nt, Artificial Sequence
  Description of Artificial Sequence: Synthetic oligonucleotide
ucaugccaucucgaaugua

SEQ ID NO: 2254993 - RNA, 19 nt, Artificial Sequence
  Description of Artificial Sequence: Synthetic oligonucleotide
ccgcuucugcaccaauagg

SEQ ID NO: 2254994 - RNA, 19 nt, Artificial Sequence
  Description of Artificial Sequence: Synthetic oligonucleotide
agucgccgugagcauccgu

SEQ ID NO: 2254995 - RNA, 19 nt, Artificial Sequence
  Description of Artificial Sequence: Synthetic oligonucleotide
ccucucaccgaagcgcggg

SEQ ID NO: 2254996 - RNA, 19 nt, Artificial Sequence
  Description of Artificial Sequence: Synthetic oligonucleotide
cacuacagaggaaggcccu

SEQ ID NO: 2254997 - RNA, 19 nt, Artificial Sequence
  Description of Artificial Sequence: Synthetic oligonucleotide
uuacgcugguuggcaggcu

SEQ ID NO: 2254998 - RNA, 19 nt, Artificial Sequence
  Description of Artificial Sequence: Synthetic oligonucleotide
cagagaguuggaggcaaaa

SEQ ID NO: 2254999 - RNA, 19 nt, Artificial Sequence
  Description of Artificial Sequence: Synthetic oligonucleotide
ccagaugccccucguacca

SEQ ID NO: 2255000 - RNA, 19 nt, Artificial Sequence
  Description of Artificial Sequence: Synthetic oligonucleotide
ggccagauaucugguguac

SEQ ID NO: 2255001 - RNA, 19 nt, Artificial Sequence
  Description of Artificial Sequence: Synthetic oligonucleotide
cucagguaguagguccaca

SEQ ID NO: 2255002 - RNA, 19 nt, Artificial Sequence
  Description of Artificial Sequence: Synthetic oligonucleotide
guggucgggugcgcagagg

SEQ ID NO: 2255003 - RNA, 19 nt, Artificial Sequence
  Description of Artificial Sequence: Synthetic oligonucleotide
cacacgucgaugggucuca

SEQ ID NO: 2255004 - RNA, 19 nt, Artificial Sequence
  Description of Artificial Sequence: Synthetic oligonucleotide
ccgcgagaacuccuggaag

SEQ ID NO: 2255005 - RNA, 19 nt, Artificial Sequence
  Description of Artificial Sequence: Synthetic oligonucleotide
gguaguagguccacaucua

SEQ ID NO: 2255006 - RNA, 19 nt, Artificial Sequence
  Description of Artificial Sequence: Synthetic oligonucleotide
ggcagcgcaaaacgucgga

SEQ ID NO: 2255007 - RNA, 19 nt, Artificial Sequence
  Description of Artificial Sequence: Synthetic oligonucleotide
cccggugcaaacugucauc

SEQ ID NO: 2255008 - RNA, 19 nt, Artificial Sequence
  Description of Artificial Sequence: Synthetic oligonucleotide
uagaagccuaggggacggu

SEQ ID NO: 2255009 - RNA, 19 nt, Artificial Sequence
  Description of Artificial Sequence: Synthetic oligonucleotide
cccucguaccacauuauua

SEQ ID NO: 2255010 - RNA, 19 nt, Artificial Sequence
  Description of Artificial Sequence: Synthetic oligonucleotide
cucaugccaucucgaaugu

SEQ ID NO: 2255011 - RNA, 19 nt, Artificial Sequence
  Description of Artificial Sequence: Synthetic oligonucleotide
cagaugccccucguaccac

SEQ ID NO: 2255012 - RNA, 19 nt, Artificial Sequence
  Description of Artificial Sequence: Synthetic oligonucleotide
ccacccgaacacucaugcc

SEQ ID NO: 2255013 - RNA, 19 nt, Artificial Sequence
  Description of Artificial Sequence: Synthetic oligonucleotide
ccugucagacgcccagaug

SEQ ID NO: 2255014 - RNA, 19 nt, Artificial Sequence
  Description of Artificial Sequence: Synthetic oligonucleotide
ugaccacgucacugcuguc

SEQ ID NO: 2255015 - RNA, 19 nt, Artificial Sequence
  Description of Artificial Sequence: Synthetic oligonucleotide
agucaccuucuacccgcuu

SEQ ID NO: 2255016 - RNA, 19 nt, Artificial Sequence
  Description of Artificial Sequence: Synthetic oligonucleotide
caaggguggucgggugcgc

SEQ ID NO: 2255017 - RNA, 19 nt, Artificial Sequence
  Description of Artificial Sequence: Synthetic oligonucleotide
acgcccagaugccccucgu

SEQ ID NO: 2255018 - RNA, 19 nt, Artificial Sequence
  Description of Artificial Sequence: Synthetic oligonucleotide
cacucaugccaucucgaau

SEQ ID NO: 2255019 - RNA, 19 nt, Artificial Sequence
  Description of Artificial Sequence: Synthetic oligonucleotide
gccuaggggacggucugag

SEQ ID NO: 2255020 - RNA, 19 nt, Artificial Sequence
  Description of Artificial Sequence: Synthetic oligonucleotide
agacgcccagaugccccuc

SEQ ID NO: 2255021 - RNA, 19 nt, Artificial Sequence
  Description of Artificial Sequence: Synthetic oligonucleotide
ccuaggggacggucugagc

SEQ ID NO: 2255022 - RNA, 19 nt, Artificial Sequence
  Description of Artificial Sequence: Synthetic oligonucleotide
cggagucaccuucuacccg

SEQ ID NO: 2255023 - RNA, 19 nt, Artificial Sequence
  Description of Artificial Sequence: Synthetic oligonucleotide
gcgcaaaacgucggaacuc

SEQ ID NO: 2255024 - RNA, 19 nt, Artificial Sequence
  Description of Artificial Sequence: Synthetic oligonucleotide
ggcuugcucuuggcuaucc

SEQ ID NO: 2255025 - RNA, 19 nt, Artificial Sequence
  Description of Artificial Sequence: Synthetic oligonucleotide
gucauuccccagucagagu

SEQ ID NO: 2255026 - RNA, 19 nt, Artificial Sequence
  Description of Artificial Sequence: Synthetic oligonucleotide
aggggacggucugagccau

SEQ ID NO: 2255027 - RNA, 19 nt, Artificial Sequence
  Description of Artificial Sequence: Synthetic oligonucleotide
agaccaccggagucaccuu

SEQ ID NO: 2255028 - RNA, 19 nt, Artificial Sequence
  Description of Artificial Sequence: Synthetic oligonucleotide
acgucggaacucggcguca

SEQ ID NO: 2255029 - RNA, 19 nt, Artificial Sequence
  Description of Artificial Sequence: Synthetic oligonucleotide
gcaagucgccgugagcauc

SEQ ID NO: 2255030 - RNA, 19 nt, Artificial Sequence
  Description of Artificial Sequence: Synthetic oligonucleotide
cguaccacauuauuacgcu

SEQ ID NO: 2255031 - RNA, 19 nt, Artificial Sequence
  Description of Artificial Sequence: Synthetic oligonucleotide
agcgcggggcagcgcaaaa

SEQ ID NO: 2255032 - RNA, 19 nt, Artificial Sequence
  Description of Artificial Sequence: Synthetic oligonucleotide
gcuugcucuuggcuaucca

SEQ ID NO: 2255033 - RNA, 19 nt, Artificial Sequence
  Description of Artificial Sequence: Synthetic oligonucleotide
ccacguaccaggcgggaga

SEQ ID NO: 2255034 - RNA, 19 nt, Artificial Sequence
  Description of Artificial Sequence: Synthetic oligonucleotide
ccauguuuguggagccuca

SEQ ID NO: 2255035 - RNA, 19 nt, Artificial Sequence
  Description of Artificial Sequence: Synthetic oligonucleotide
gggugcgcagaggugcagc

SEQ ID NO: 2255036 - RNA, 19 nt, Artificial Sequence
  Description of Artificial Sequence: Synthetic oligonucleotide
caccuucuacccgcuucug

SEQ ID NO: 2255037 - RNA, 19 nt, Artificial Sequence
  Description of Artificial Sequence: Synthetic oligonucleotide
gccagguugcaggucccag

SEQ ID NO: 2255038 - RNA, 19 nt, Artificial Sequence
  Description of Artificial Sequence: Synthetic oligonucleotide
gaacccgcuccaggcccug

SEQ ID NO: 2255039 - RNA, 19 nt, Artificial Sequence
  Description of Artificial Sequence: Synthetic oligonucleotide
agccuaggggacggucuga

SEQ ID NO: 2255040 - RNA, 19 nt, Artificial Sequence
  Description of Artificial Sequence: Synthetic oligonucleotide
acccgcuucugcaccaaua

SEQ ID NO: 2255041 - RNA, 19 nt, Artificial Sequence
  Description of Artificial Sequence: Synthetic oligonucleotide
caguaggcccaggcacuac

SEQ ID NO: 2255042 - RNA, 19 nt, Artificial Sequence
  Description of Artificial Sequence: Synthetic oligonucleotide
ccgugagcauccguauagc

SEQ ID NO: 2255043 - RNA, 19 nt, Artificial Sequence
  Description of Artificial Sequence: Synthetic oligonucleotide
augccccucguaccacauu

SEQ ID NO: 2255044 - RNA, 19 nt, Artificial Sequence
  Description of Artificial Sequence: Synthetic oligonucleotide
cggggcagcgcaaaacguc

SEQ ID NO: 2255045 - RNA, 19 nt, Artificial Sequence
  Description of Artificial Sequence: Synthetic oligonucleotide
ggguggcgguuuucaauga

SEQ ID NO: 2255046 - RNA, 19 nt, Artificial Sequence
  Description of Artificial Sequence: Synthetic oligonucleotide
agggcccggugcaaacugu

SEQ ID NO: 2255047 - RNA, 19 nt, Artificial Sequence
  Description of Artificial Sequence: Synthetic oligonucleotide
uggcuugcucuuggcuauc

SEQ ID NO: 2255048 - RNA, 19 nt, Artificial Sequence
  Description of Artificial Sequence: Synthetic oligonucleotide
gggagccacccgaacacuc

SEQ ID NO: 2255049 - RNA, 19 nt, Artificial Sequence
  Description of Artificial Sequence: Synthetic oligonucleotide
cucacacgucgaugggucu

SEQ ID NO: 2255050 - RNA, 19 nt, Artificial Sequence
  Description of Artificial Sequence: Synthetic oligonucleotide
ccguauagccaagcagcac

SEQ ID NO: 2255051 - RNA, 19 nt, Artificial Sequence
  Description of Artificial Sequence: Synthetic oligonucleotide
gcugauuaacaaggguggu

SEQ ID NO: 2255052 - RNA, 19 nt, Artificial Sequence
  Description of Artificial Sequence: Synthetic oligonucleotide
gcagcgcaaaacgucggaa

SEQ ID NO: 2255053 - RNA, 19 nt, Artificial Sequence
  Description of Artificial Sequence: Synthetic oligonucleotide
gcgggagaugaagauaccu

SEQ ID NO: 2255054 - RNA, 19 nt, Artificial Sequence
  Description of Artificial Sequence: Synthetic oligonucleotide
acguaccaggcgggagaug

SEQ ID NO: 2255055 - RNA, 19 nt, Artificial Sequence
  Description of Artificial Sequence: Synthetic oligonucleotide
cagugacaaugagguuaug

SEQ ID NO: 2255056 - RNA, 19 nt, Artificial Sequence
  Description of Artificial Sequence: Synthetic oligonucleotide
gaugccccucguaccacau

SEQ ID NO: 2255057 - RNA, 19 nt, Artificial Sequence
  Description of Artificial Sequence: Synthetic oligonucleotide
gacaccugucggaaaucuu

SEQ ID NO: 2255058 - RNA, 19 nt, Artificial Sequence
  Description of Artificial Sequence: Synthetic oligonucleotide
ggucgggugcgcagaggug

SEQ ID NO: 2255059 - RNA, 19 nt, Artificial Sequence
  Description of Artificial Sequence: Synthetic oligonucleotide
ccuggggagccacccgaac

SEQ ID NO: 2255060 - RNA, 19 nt, Artificial Sequence
  Description of Artificial Sequence: Synthetic oligonucleotide
ggagcccuuucuugcgucu

SEQ ID NO: 2255061 - RNA, 19 nt, Artificial Sequence
  Description of Artificial Sequence: Synthetic oligonucleotide
gaagcgcggggcagcgcaa

SEQ ID NO: 2255062 - RNA, 19 nt, Artificial Sequence
  Description of Artificial Sequence: Synthetic oligonucleotide
ggcaaccaucaugucuguc

SEQ ID NO: 2255063 - RNA, 19 nt, Artificial Sequence
  Description of Artificial Sequence: Synthetic oligonucleotide
caggagcccuuucuugcgu

SEQ ID NO: 2255064 - RNA, 19 nt, Artificial Sequence
  Description of Artificial Sequence: Synthetic oligonucleotide
ggaaguaggcagccagguu

SEQ ID NO: 2255065 - RNA, 19 nt, Artificial Sequence
  Description of Artificial Sequence: Synthetic oligonucleotide
cgguuuucaaugaccacgu

SEQ ID NO: 2255066 - RNA, 19 nt, Artificial Sequence
  Description of Artificial Sequence: Synthetic oligonucleotide
cauugaccucgaggaucuc

SEQ ID NO: 2255067 - RNA, 19 nt, Artificial Sequence
  Description of Artificial Sequence: Synthetic oligonucleotide
gcaaacugucaucguuggu

SEQ ID NO: 2255068 - RNA, 19 nt, Artificial Sequence
  Description of Artificial Sequence: Synthetic oligonucleotide
gccucucaccgaagcgcgg

SEQ ID NO: 2255069 - RNA, 19 nt, Artificial Sequence
  Description of Artificial Sequence: Synthetic oligonucleotide
gagucaccuucuacccgcu

SEQ ID NO: 2255070 - RNA, 19 nt, Artificial Sequence
  Description of Artificial Sequence: Synthetic oligonucleotide
cgaagcgcggggcagcgca

SEQ ID NO: 2255071 - RNA, 19 nt, Artificial Sequence
  Description of Artificial Sequence: Synthetic oligonucleotide
cggaaaucuuggggcaggc

SEQ ID NO: 2255072 - RNA, 19 nt, Artificial Sequence
  Description of Artificial Sequence: Synthetic oligonucleotide
gggacggucugagccaugu

SEQ ID NO: 2255073 - RNA, 19 nt, Artificial Sequence
  Description of Artificial Sequence: Synthetic oligonucleotide
gcuguuuggcaaccaucau

SEQ ID NO: 2255074 - RNA, 19 nt, Artificial Sequence
  Description of Artificial Sequence: Synthetic oligonucleotide
ggcccggugcaaacuguca

SEQ ID NO: 2255075 - RNA, 19 nt, Artificial Sequence
  Description of Artificial Sequence: Synthetic oligonucleotide
gcgucucugcagagaguug

SEQ ID NO: 2255076 - RNA, 19 nt, Artificial Sequence
  Description of Artificial Sequence: Synthetic oligonucleotide
cccgaacacucaugccauc

SEQ ID NO: 2255077 - RNA, 19 nt, Artificial Sequence
  Description of Artificial Sequence: Synthetic oligonucleotide
gggcccggugcaaacuguc

SEQ ID NO: 2255078 - RNA, 19 nt, Artificial Sequence
  Description of Artificial Sequence: Synthetic oligonucleotide
gcccggugcaaacugucau

SEQ ID NO: 2255079 - RNA, 19 nt, Artificial Sequence
  Description of Artificial Sequence: Synthetic oligonucleotide
ggguggucgggugcgcaga

SEQ ID NO: 2255080 - RNA, 19 nt, Artificial Sequence
  Description of Artificial Sequence: Synthetic oligonucleotide
ccucgaggaucucaucacu

SEQ ID NO: 2255081 - RNA, 19 nt, Artificial Sequence
  Description of Artificial Sequence: Synthetic oligonucleotide
cuacccgcuucugcaccaa

SEQ ID NO: 2255082 - RNA, 19 nt, Artificial Sequence
  Description of Artificial Sequence: Synthetic oligonucleotide
cacguaccaggcgggagau

SEQ ID NO: 2255083 - RNA, 19 nt, Artificial Sequence
  Description of Artificial Sequence: Synthetic oligonucleotide
ccgaacacucaugccaucu

SEQ ID NO: 2255084 - RNA, 19 nt, Artificial Sequence
  Description of Artificial Sequence: Synthetic oligonucleotide
ccacgucacugcugucauc

SEQ ID NO: 2255085 - RNA, 19 nt, Artificial Sequence
  Description of Artificial Sequence: Synthetic oligonucleotide
gcgcggggcagcgcaaaac

SEQ ID NO: 2255086 - RNA, 19 nt, Artificial Sequence
  Description of Artificial Sequence: Synthetic oligonucleotide
gcagagaguuggaggcaaa

SEQ ID NO: 2255087 - RNA, 19 nt, Artificial Sequence
  Description of Artificial Sequence: Synthetic oligonucleotide
ccaggcgggagaugaagau

SEQ ID NO: 2255088 - RNA, 19 nt, Artificial Sequence
  Description of Artificial Sequence: Synthetic oligonucleotide
gccucacacgucgaugggu

SEQ ID NO: 2255089 - RNA, 19 nt, Artificial Sequence
  Description of Artificial Sequence: Synthetic oligonucleotide
caaggaggguggcgguuuu

SEQ ID NO: 2255090 - RNA, 19 nt, Artificial Sequence
  Description of Artificial Sequence: Synthetic oligonucleotide
cgucgaugggucucaggua

SEQ ID NO: 2255091 - RNA, 19 nt, Artificial Sequence
  Description of Artificial Sequence: Synthetic oligonucleotide
ggaacccgcuccaggcccu

SEQ ID NO: 2255092 - RNA, 19 nt, Artificial Sequence
  Description of Artificial Sequence: Synthetic oligonucleotide
gcccugucagacgcccaga

SEQ ID NO: 2255093 - RNA, 19 nt, Artificial Sequence
  Description of Artificial Sequence: Synthetic oligonucleotide
ggggacggucugagccaug

SEQ ID NO: 2255094 - RNA, 19 nt, Artificial Sequence
  Description of Artificial Sequence: Synthetic oligonucleotide
ccauuagaacaaggagggu

SEQ ID NO: 2255095 - RNA, 19 nt, Artificial Sequence
  Description of Artificial Sequence: Synthetic oligonucleotide
ggucgaagcaggagcccuu

SEQ ID NO: 2255096 - RNA, 19 nt, Artificial Sequence
  Description of Artificial Sequence: Synthetic oligonucleotide
gcggggcagcgcaaaacgu

SEQ ID NO: 2255097 - RNA, 19 nt, Artificial Sequence
  Description of Artificial Sequence: Synthetic oligonucleotide
cgaugggucucagguagua

SEQ ID NO: 2255098 - RNA, 19 nt, Artificial Sequence
  Description of Artificial Sequence: Synthetic oligonucleotide
ccgaagcgcggggcagcgc

SEQ ID NO: 2255099 - RNA, 19 nt, Artificial Sequence
  Description of Artificial Sequence: Synthetic oligonucleotide
ggacggucugagccauguu

SEQ ID NO: 2255100 - RNA, 19 nt, Artificial Sequence
  Description of Artificial Sequence: Synthetic oligonucleotide
ccccucguaccacauuauu

SEQ ID NO: 2255101 - RNA, 19 nt, Artificial Sequence
  Description of Artificial Sequence: Synthetic oligonucleotide
ccaccggagucaccuucua

SEQ ID NO: 2255102 - RNA, 19 nt, Artificial Sequence
  Description of Artificial Sequence: Synthetic oligonucleotide
cugcaccaauaggcgcagu

SEQ ID NO: 2255103 - RNA, 19 nt, Artificial Sequence
  Description of Artificial Sequence: Synthetic oligonucleotide
gccccucguaccacauuau

SEQ ID NO: 2255104 - RNA, 19 nt, Artificial Sequence
  Description of Artificial Sequence: Synthetic oligonucleotide
cggugcaaacugucaucgu

SEQ ID NO: 2255105 - RNA, 19 nt, Artificial Sequence
  Description of Artificial Sequence: Synthetic oligonucleotide
cgucggaacucggcgucaa

SEQ ID NO: 2255106 - RNA, 19 nt, Artificial Sequence
  Description of Artificial Sequence: Synthetic oligonucleotide
cgucacugucagggucagu

SEQ ID NO: 2255107 - RNA, 19 nt, Artificial Sequence
  Description of Artificial Sequence: Synthetic oligonucleotide
auucauuuaauaaacaugg

SEQ ID NO: 2255108 - RNA, 19 nt, Artificial Sequence
  Description of Artificial Sequence: Synthetic oligonucleotide
ucugguuugcucuugaagg

SEQ ID NO: 2255109 - RNA, 19 nt, Artificial Sequence
  Description of Artificial Sequence: Synthetic oligonucleotide
acaucuauuguucuuagag

SEQ ID NO: 2255110 - RNA, 19 nt, Artificial Sequence
  Description of Artificial Sequence: Synthetic oligonucleotide
aucuauuguucuuagaguc

SEQ ID NO: 2255111 - RNA, 19 nt, Artificial Sequence
  Description of Artificial Sequence: Synthetic oligonucleotide
aaagcaaacauccuccaca

SEQ ID NO: 2255112 - RNA, 19 nt, Artificial Sequence
  Description of Artificial Sequence: Synthetic oligonucleotide
aagggcagcaaguucacac

SEQ ID NO: 2255113 - RNA, 19 nt, Artificial Sequence
  Description of Artificial Sequence: Synthetic oligonucleotide
ucugucucgaucaaaaccu

SEQ ID NO: 2255114 - RNA, 19 nt, Artificial Sequence
  Description of Artificial Sequence: Synthetic oligonucleotide
cauuuaauaaacaugggga

SEQ ID NO: 2255115 - RNA, 19 nt, Artificial Sequence
  Description of Artificial Sequence: Synthetic oligonucleotide
ucuauuguucuuagagucg

SEQ ID NO: 2255116 - RNA, 19 nt, Artificial Sequence
  Description of Artificial Sequence: Synthetic oligonucleotide
uucuucuuauccuuccucg

SEQ ID NO: 2255117 - RNA, 19 nt, Artificial Sequence
  Description of Artificial Sequence: Synthetic oligonucleotide
uucauuuaauaaacauggg

SEQ ID NO: 2255118 - RNA, 19 nt, Artificial Sequence
  Description of Artificial Sequence: Synthetic oligonucleotide
uguucuuagagucggacuc

SEQ ID NO: 2255119 - RNA, 19 nt, Artificial Sequence
  Description of Artificial Sequence: Synthetic oligonucleotide
uuaaucuccagcugggaug

SEQ ID NO: 2255120 - RNA, 19 nt, Artificial Sequence
  Description of Artificial Sequence: Synthetic oligonucleotide
uuuaucauugcuacuguau

SEQ ID NO: 2255121 - RNA, 19 nt, Artificial Sequence
  Description of Artificial Sequence: Synthetic oligonucleotide
acucauucauuuaauaaac

SEQ ID NO: 2255122 - RNA, 19 nt, Artificial Sequence
  Description of Artificial Sequence: Synthetic oligonucleotide
aagaaagggcagcaaguuc

SEQ ID NO: 2255123 - RNA, 19 nt, Artificial Sequence
  Description of Artificial Sequence: Synthetic oligonucleotide
aggggaauggcuguuaggc

SEQ ID NO: 2255124 - RNA, 19 nt, Artificial Sequence
  Description of Artificial Sequence: Synthetic oligonucleotide
ugaaucaccacugccuugg

SEQ ID NO: 2255125 - RNA, 19 nt, Artificial Sequence
  Description of Artificial Sequence: Synthetic oligonucleotide
uagagucggacucuucucg

SEQ ID NO: 2255126 - RNA, 19 nt, Artificial Sequence
  Description of Artificial Sequence: Synthetic oligonucleotide
ucuuggaucacaacuucug

SEQ ID NO: 2255127 - RNA, 19 nt, Artificial Sequence
  Description of Artificial Sequence: Synthetic oligonucleotide
ugucaacugguuuucaucu

SEQ ID NO: 2255128 - RNA, 19 nt, Artificial Sequence
  Description of Artificial Sequence: Synthetic oligonucleotide
aucuaaggucaucucaugg

SEQ ID NO: 2255129 - RNA, 19 nt, Artificial Sequence
  Description of Artificial Sequence: Synthetic oligonucleotide
cugguuuucaucugaaaac

SEQ ID NO: 2255130 - RNA, 19 nt, Artificial Sequence
  Description of Artificial Sequence: Synthetic oligonucleotide
uggcuguuaggccagggcg

SEQ ID NO: 2255131 - RNA, 19 nt, Artificial Sequence
  Description of Artificial Sequence: Synthetic oligonucleotide
uuaucauugcuacuguauc

SEQ ID NO: 2255132 - RNA, 19 nt, Artificial Sequence
  Description of Artificial Sequence: Synthetic oligonucleotide
auggacuugauuuuccucu

SEQ ID NO: 2255133 - RNA, 19 nt, Artificial Sequence
  Description of Artificial Sequence: Synthetic oligonucleotide
agggaaagucucuucauag

SEQ ID NO: 2255134 - RNA, 19 nt, Artificial Sequence
  Description of Artificial Sequence: Synthetic oligonucleotide
ugugacuuuaucauugcua

SEQ ID NO: 2255135 - RNA, 19 nt, Artificial Sequence
  Description of Artificial Sequence: Synthetic oligonucleotide
ugggaugugaugucauugg

SEQ ID NO: 2255136 - RNA, 19 nt, Artificial Sequence
  Description of Artificial Sequence: Synthetic oligonucleotide
agucaaaagcucuguuccc

SEQ ID NO: 2255137 - RNA, 19 nt, Artificial Sequence
  Description of Artificial Sequence: Synthetic oligonucleotide
auagucaucuuucaccaga

SEQ ID NO: 2255138 - RNA, 19 nt, Artificial Sequence
  Description of Artificial Sequence: Synthetic oligonucleotide
agcaaguucacacgacacg

SEQ ID NO: 2255139 - RNA, 19 nt, Artificial Sequence
  Description of Artificial Sequence: Synthetic oligonucleotide
uaccagauccccagggucg

SEQ ID NO: 2255140 - RNA, 19 nt, Artificial Sequence
  Description of Artificial Sequence: Synthetic oligonucleotide
agcaagaaagggcagcaag

SEQ ID NO: 2255141 - RNA, 19 nt, Artificial Sequence
  Description of Artificial Sequence: Synthetic oligonucleotide
gcaaacauccuccacagag

SEQ ID NO: 2255142 - RNA, 19 nt, Artificial Sequence
  Description of Artificial Sequence: Synthetic oligonucleotide
ucaacugguuuucaucuga

SEQ ID NO: 2255143 - RNA, 19 nt, Artificial Sequence
  Description of Artificial Sequence: Synthetic oligonucleotide
aggagcuuuggcuggagac

SEQ ID NO: 2255144 - RNA, 19 nt, Artificial Sequence
  Description of Artificial Sequence: Synthetic oligonucleotide
gucacuagcgucuuuacca

SEQ ID NO: 2255145 - RNA, 19 nt, Artificial Sequence
  Description of Artificial Sequence: Synthetic oligonucleotide
uucuuauccuuccucggcc

SEQ ID NO: 2255146 - RNA, 19 nt, Artificial Sequence
  Description of Artificial Sequence: Synthetic oligonucleotide
uagcgucuuuaccagaucc

SEQ ID NO: 2255147 - RNA, 19 nt, Artificial Sequence
  Description of Artificial Sequence: Synthetic oligonucleotide
acuugugaaucaccacugc

SEQ ID NO: 2255148 - RNA, 19 nt, Artificial Sequence
  Description of Artificial Sequence: Synthetic oligonucleotide
gaucaaaaccugucaacug

SEQ ID NO: 2255149 - RNA, 19 nt, Artificial Sequence
  Description of Artificial Sequence: Synthetic oligonucleotide
uggucaaaggagucaaaag

SEQ ID NO: 2255150 - RNA, 19 nt, Artificial Sequence
  Description of Artificial Sequence: Synthetic oligonucleotide
caucauugagcucucuucc

SEQ ID NO: 2255151 - RNA, 19 nt, Artificial Sequence
  Description of Artificial Sequence: Synthetic oligonucleotide
uaucauugcuacuguaucu

SEQ ID NO: 2255152 - RNA, 19 nt, Artificial Sequence
  Description of Artificial Sequence: Synthetic oligonucleotide
cuauuguucuuagagucgg

SEQ ID NO: 2255153 - RNA, 19 nt, Artificial Sequence
  Description of Artificial Sequence: Synthetic oligonucleotide
auugcuacuguaucuuuca

SEQ ID NO: 2255154 - RNA, 19 nt, Artificial Sequence
  Description of Artificial Sequence: Synthetic oligonucleotide
aaguccucggggucguucg

SEQ ID NO: 2255155 - RNA, 19 nt, Artificial Sequence
  Description of Artificial Sequence: Synthetic oligonucleotide
auuguucuuagagucggac

SEQ ID NO: 2255156 - RNA, 19 nt, Artificial Sequence
  Description of Artificial Sequence: Synthetic oligonucleotide
accagaucgucucuguauc

SEQ ID NO: 2255157 - RNA, 19 nt, Artificial Sequence
  Description of Artificial Sequence: Synthetic oligonucleotide
aaggucaucucauggacuu

SEQ ID NO: 2255158 - RNA, 19 nt, Artificial Sequence
  Description of Artificial Sequence: Synthetic oligonucleotide
ucucgaucaaaaccuguca

SEQ ID NO: 2255159 - RNA, 19 nt, Artificial Sequence
  Description of Artificial Sequence: Synthetic oligonucleotide
aaguuaaucuccagcuggg

SEQ ID NO: 2255160 - RNA, 19 nt, Artificial Sequence
  Description of Artificial Sequence: Synthetic oligonucleotide
gaggcuaccaaaguuaauc

SEQ ID NO: 2255161 - RNA, 19 nt, Artificial Sequence
  Description of Artificial Sequence: Synthetic oligonucleotide
aaguucacacgacacggga

SEQ ID NO: 2255162 - RNA, 19 nt, Artificial Sequence
  Description of Artificial Sequence: Synthetic oligonucleotide
uuaccuuuguacucauuca

SEQ ID NO: 2255163 - RNA, 19 nt, Artificial Sequence
  Description of Artificial Sequence: Synthetic oligonucleotide
cuugugaaucaccacugcc

SEQ ID NO: 2255164 - RNA, 19 nt, Artificial Sequence
  Description of Artificial Sequence: Synthetic oligonucleotide
cuuuaccagauccccaggg

SEQ ID NO: 2255165 - RNA, 19 nt, Artificial Sequence
  Description of Artificial Sequence: Synthetic oligonucleotide
auggcucugugucacuagc

SEQ ID NO: 2255166 - RNA, 19 nt, Artificial Sequence
  Description of Artificial Sequence: Synthetic oligonucleotide
ucaaaaccugucaacuggu

SEQ ID NO: 2255167 - RNA, 19 nt, Artificial Sequence
  Description of Artificial Sequence: Synthetic oligonucleotide
cuaaggucaucucauggac

SEQ ID NO: 2255168 - RNA, 19 nt, Artificial Sequence
  Description of Artificial Sequence: Synthetic oligonucleotide
ugguuuucaucugaaaacu

SEQ ID NO: 2255169 - RNA, 19 nt, Artificial Sequence
  Description of Artificial Sequence: Synthetic oligonucleotide
ucaaaaucucuuuucccuc

SEQ ID NO: 2255170 - RNA, 19 nt, Artificial Sequence
  Description of Artificial Sequence: Synthetic oligonucleotide
caaacauccuccacagagc

SEQ ID NO: 2255171 - RNA, 19 nt, Artificial Sequence
  Description of Artificial Sequence: Synthetic oligonucleotide
agagucggacucuucucgc

SEQ ID NO: 2255172 - RNA, 19 nt, Artificial Sequence
  Description of Artificial Sequence: Synthetic oligonucleotide
auggcuguuaggccagggc

SEQ ID NO: 2255173 - RNA, 19 nt, Artificial Sequence
  Description of Artificial Sequence: Synthetic oligonucleotide
acagcuacccaugcugucc

SEQ ID NO: 2255174 - RNA, 19 nt, Artificial Sequence
  Description of Artificial Sequence: Synthetic oligonucleotide
agaaagggcagcaaguuca

SEQ ID NO: 2255175 - RNA, 19 nt, Artificial Sequence
  Description of Artificial Sequence: Synthetic oligonucleotide
uuuccggaagacauggguc

SEQ ID NO: 2255176 - RNA, 19 nt, Artificial Sequence
  Description of Artificial Sequence: Synthetic oligonucleotide
gucauuggcggcuuuccgg

SEQ ID NO: 2255177 - RNA, 19 nt, Artificial Sequence
  Description of Artificial Sequence: Synthetic oligonucleotide
uuuaccagauccccagggu

SEQ ID NO: 2255178 - RNA, 19 nt, Artificial Sequence
  Description of Artificial Sequence: Synthetic oligonucleotide
uggaucacaacuucugcuc

SEQ ID NO: 2255179 - RNA, 19 nt, Artificial Sequence
  Description of Artificial Sequence: Synthetic oligonucleotide
gaaggaacuguggacuccg

SEQ ID NO: 2255180 - RNA, 19 nt, Artificial Sequence
  Description of Artificial Sequence: Synthetic oligonucleotide
uuggaaggaacuguggacu

SEQ ID NO: 2255181 - RNA, 19 nt, Artificial Sequence
  Description of Artificial Sequence: Synthetic oligonucleotide
aggaacuguggacuccggc

SEQ ID NO: 2255182 - RNA, 19 nt, Artificial Sequence
  Description of Artificial Sequence: Synthetic oligonucleotide
ucacuagcgucuuuaccag

SEQ ID NO: 2255183 - RNA, 19 nt, Artificial Sequence
  Description of Artificial Sequence: Synthetic oligonucleotide
ugucacuagcgucuuuacc

SEQ ID NO: 2255184 - RNA, 19 nt, Artificial Sequence
  Description of Artificial Sequence: Synthetic oligonucleotide
guacucauucauuuaauaa

SEQ ID NO: 2255185 - RNA, 19 nt, Artificial Sequence
  Description of Artificial Sequence: Synthetic oligonucleotide
uggucugucucgaucaaaa

SEQ ID NO: 2255186 - RNA, 19 nt, Artificial Sequence
  Description of Artificial Sequence: Synthetic oligonucleotide
agggcagcaaguucacacg

SEQ ID NO: 2255187 - RNA, 19 nt, Artificial Sequence
  Description of Artificial Sequence: Synthetic oligonucleotide
guugggagcgacaucuugg

SEQ ID NO: 2255188 - RNA, 19 nt, Artificial Sequence
  Description of Artificial Sequence: Synthetic oligonucleotide
uucuaccuccaacucagga

SEQ ID NO: 2255189 - RNA, 19 nt, Artificial Sequence
  Description of Artificial Sequence: Synthetic oligonucleotide
aacaucuauuguucuuaga

SEQ ID NO: 2255190 - RNA, 19 nt, Artificial Sequence
  Description of Artificial Sequence: Synthetic oligonucleotide
uuccggaagacaugggucu

SEQ ID NO: 2255191 - RNA, 19 nt, Artificial Sequence
  Description of Artificial Sequence: Synthetic oligonucleotide
ucaggcuuuggucugguuu

SEQ ID NO: 2255192 - RNA, 19 nt, Artificial Sequence
  Description of Artificial Sequence: Synthetic oligonucleotide
uuccggauguugaacucag

SEQ ID NO: 2255193 - RNA, 19 nt, Artificial Sequence
  Description of Artificial Sequence: Synthetic oligonucleotide
uuguucuuagagucggacu

SEQ ID NO: 2255194 - RNA, 19 nt, Artificial Sequence
  Description of Artificial Sequence: Synthetic oligonucleotide
uucuguuugugacuuuauc

SEQ ID NO: 2255195 - RNA, 19 nt, Artificial Sequence
  Description of Artificial Sequence: Synthetic oligonucleotide
caaaguuaaucuccagcug

SEQ ID NO: 2255196 - RNA, 19 nt, Artificial Sequence
  Description of Artificial Sequence: Synthetic oligonucleotide
ucuuccauggaugcagaug

SEQ ID NO: 2255197 - RNA, 19 nt, Artificial Sequence
  Description of Artificial Sequence: Synthetic oligonucleotide
cucauggacuugauuuucc

SEQ ID NO: 2255198 - RNA, 19 nt, Artificial Sequence
  Description of Artificial Sequence: Synthetic oligonucleotide
ucgucucuguaucuggacu

SEQ ID NO: 2255199 - RNA, 19 nt, Artificial Sequence
  Description of Artificial Sequence: Synthetic oligonucleotide
ucuuuggucaaaggaguca

SEQ ID NO: 2255200 - RNA, 19 nt, Artificial Sequence
  Description of Artificial Sequence: Synthetic oligonucleotide
uggcucugugucacuagcg

SEQ ID NO: 2255201 - RNA, 19 nt, Artificial Sequence
  Description of Artificial Sequence: Synthetic oligonucleotide
gacuugugaaucaccacug

SEQ ID NO: 2255202 - RNA, 19 nt, Artificial Sequence
  Description of Artificial Sequence: Synthetic oligonucleotide
agucggacucuucucgcgg

SEQ ID NO: 2255203 - RNA, 19 nt, Artificial Sequence
  Description of Artificial Sequence: Synthetic oligonucleotide
aauaaacauggggaucaga

SEQ ID NO: 2255204 - RNA, 19 nt, Artificial Sequence
  Description of Artificial Sequence: Synthetic oligonucleotide
ugccuuggaaggaacugug

SEQ ID NO: 2255205 - RNA, 19 nt, Artificial Sequence
  Description of Artificial Sequence: Synthetic oligonucleotide
cauggggaucagaagcagg

SEQ ID NO: 2255206 - RNA, 19 nt, Artificial Sequence
  Description of Artificial Sequence: Synthetic oligonucleotide
caggcuuuggucugguuug

SEQ ID NO: 2255207 - RNA, 19 nt, Artificial Sequence
  Description of Artificial Sequence: Synthetic oligonucleotide
ucauugagcucucuuccau

SEQ ID NO: 2255208 - RNA, 19 nt, Artificial Sequence
  Description of Artificial Sequence: Synthetic oligonucleotide
ucaguggucugucucgauc

SEQ ID NO: 2255209 - RNA, 19 nt, Artificial Sequence
  Description of Artificial Sequence: Synthetic oligonucleotide
ucacaacuucugcucgggg

SEQ ID NO: 2255210 - RNA, 19 nt, Artificial Sequence
  Description of Artificial Sequence: Synthetic oligonucleotide
uuggucaaaggagucaaaa

SEQ ID NO: 2255211 - RNA, 19 nt, Artificial Sequence
  Description of Artificial Sequence: Synthetic oligonucleotide
ucauggacuugauuuuccu

SEQ ID NO: 2255212 - RNA, 19 nt, Artificial Sequence
  Description of Artificial Sequence: Synthetic oligonucleotide
aggcuaccaaaguuaaucu

SEQ ID NO: 2255213 - RNA, 19 nt, Artificial Sequence
  Description of Artificial Sequence: Synthetic oligonucleotide
caacaucuauuguucuuag

SEQ ID NO: 2255214 - RNA, 19 nt, Artificial Sequence
  Description of Artificial Sequence: Synthetic oligonucleotide
agcgucuuuaccagauccc

SEQ ID NO: 2255215 - RNA, 19 nt, Artificial Sequence
  Description of Artificial Sequence: Synthetic oligonucleotide
gggaucagaagcaggaggg

SEQ ID NO: 2255216 - RNA, 19 nt, Artificial Sequence
  Description of Artificial Sequence: Synthetic oligonucleotide
uuguacucauucauuuaau

SEQ ID NO: 2255217 - RNA, 19 nt, Artificial Sequence
  Description of Artificial Sequence: Synthetic oligonucleotide
uaucuggacuugugaauca

SEQ ID NO: 2255218 - RNA, 19 nt, Artificial Sequence
  Description of Artificial Sequence: Synthetic oligonucleotide
uuagagucggacucuucuc

SEQ ID NO: 2255219 - RNA, 19 nt, Artificial Sequence
  Description of Artificial Sequence: Synthetic oligonucleotide
cacgggaaaagcaacaucu

SEQ ID NO: 2255220 - RNA, 19 nt, Artificial Sequence
  Description of Artificial Sequence: Synthetic oligonucleotide
ggaucacaacuucugcucg

SEQ ID NO: 2255221 - RNA, 19 nt, Artificial Sequence
  Description of Artificial Sequence: Synthetic oligonucleotide
ugucucgaucaaaaccugu

SEQ ID NO: 2255222 - RNA, 19 nt, Artificial Sequence
  Description of Artificial Sequence: Synthetic oligonucleotide
agggucgaacaccacagcu

SEQ ID NO: 2255223 - RNA, 19 nt, Artificial Sequence
  Description of Artificial Sequence: Synthetic oligonucleotide
uugggagcgacaucuugga

SEQ ID NO: 2255224 - RNA, 19 nt, Artificial Sequence
  Description of Artificial Sequence: Synthetic oligonucleotide
agacuccucguccagggca

SEQ ID NO: 2255225 - RNA, 19 nt, Artificial Sequence
  Description of Artificial Sequence: Synthetic oligonucleotide
uccaacucaggagcuuugg

SEQ ID NO: 2255226 - RNA, 19 nt, Artificial Sequence
  Description of Artificial Sequence: Synthetic oligonucleotide
ucuuauccuuccucggccu

SEQ ID NO: 2255227 - RNA, 19 nt, Artificial Sequence
  Description of Artificial Sequence: Synthetic oligonucleotide
aaggagucaaaagcucugu

SEQ ID NO: 2255228 - RNA, 19 nt, Artificial Sequence
  Description of Artificial Sequence: Synthetic oligonucleotide
caucucauggacuugauuu

SEQ ID NO: 2255229 - RNA, 19 nt, Artificial Sequence
  Description of Artificial Sequence: Synthetic oligonucleotide
ggaugugaugucauuggcg

SEQ ID NO: 2255230 - RNA, 19 nt, Artificial Sequence
  Description of Artificial Sequence: Synthetic oligonucleotide
cuggacuugugaaucacca

SEQ ID NO: 2255231 - RNA, 19 nt, Artificial Sequence
  Description of Artificial Sequence: Synthetic oligonucleotide
gaacucaggcuuuggucug

SEQ ID NO: 2255232 - RNA, 19 nt, Artificial Sequence
  Description of Artificial Sequence: Synthetic oligonucleotide
uauuguucuuagagucgga

SEQ ID NO: 2255233 - RNA, 19 nt, Artificial Sequence
  Description of Artificial Sequence: Synthetic oligonucleotide
ucguccagggcacccuggg

SEQ ID NO: 2255234 - RNA, 19 nt, Artificial Sequence
  Description of Artificial Sequence: Synthetic oligonucleotide
ugugucacuagcgucuuua

SEQ ID NO: 2255235 - RNA, 19 nt, Artificial Sequence
  Description of Artificial Sequence: Synthetic oligonucleotide
uguugaacucaggcuuugg

SEQ ID NO: 2255236 - RNA, 19 nt, Artificial Sequence
  Description of Artificial Sequence: Synthetic oligonucleotide
aucacaacuucugcucggg

SEQ ID NO: 2255237 - RNA, 19 nt, Artificial Sequence
  Description of Artificial Sequence: Synthetic oligonucleotide
uaauaaacauggggaucag

SEQ ID NO: 2255238 - RNA, 19 nt, Artificial Sequence
  Description of Artificial Sequence: Synthetic oligonucleotide
cacacgacacgggaaaagc

SEQ ID NO: 2255239 - RNA, 19 nt, Artificial Sequence
  Description of Artificial Sequence: Synthetic oligonucleotide
ggagucaaaagcucuguuc

SEQ ID NO: 2255240 - RNA, 19 nt, Artificial Sequence
  Description of Artificial Sequence: Synthetic oligonucleotide
cuaccaaaguuaaucucca

SEQ ID NO: 2255241 - RNA, 19 nt, Artificial Sequence
  Description of Artificial Sequence: Synthetic oligonucleotide
cauugagcucucuuccaug

SEQ ID NO: 2255242 - RNA, 19 nt, Artificial Sequence
  Description of Artificial Sequence: Synthetic oligonucleotide
ggagcgacaucuuggauca

SEQ ID NO: 2255243 - RNA, 19 nt, Artificial Sequence
  Description of Artificial Sequence: Synthetic oligonucleotide
caaagcaaacauccuccac

SEQ ID NO: 2255244 - RNA, 19 nt, Artificial Sequence
  Description of Artificial Sequence: Synthetic oligonucleotide
caucuaaggucaucucaug

SEQ ID NO: 2255245 - RNA, 19 nt, Artificial Sequence
  Description of Artificial Sequence: Synthetic oligonucleotide
uggacuugugaaucaccac

SEQ ID NO: 2255246 - RNA, 19 nt, Artificial Sequence
  Description of Artificial Sequence: Synthetic oligonucleotide
acgacacgggaaaagcaac

SEQ ID NO: 2255247 - RNA, 19 nt, Artificial Sequence
  Description of Artificial Sequence: Synthetic oligonucleotide
uuauccuuccucggccucc

SEQ ID NO: 2255248 - RNA, 19 nt, Artificial Sequence
  Description of Artificial Sequence: Synthetic oligonucleotide
cauagucaucuuucaccag

SEQ ID NO: 2255249 - RNA, 19 nt, Artificial Sequence
  Description of Artificial Sequence: Synthetic oligonucleotide
guucacacgacacgggaaa

SEQ ID NO: 2255250 - RNA, 19 nt, Artificial Sequence
  Description of Artificial Sequence: Synthetic oligonucleotide
agcaacaucuauuguucuu

SEQ ID NO: 2255251 - RNA, 19 nt, Artificial Sequence
  Description of Artificial Sequence: Synthetic oligonucleotide
uccggauguugaacucagg

SEQ ID NO: 2255252 - RNA, 19 nt, Artificial Sequence
  Description of Artificial Sequence: Synthetic oligonucleotide
uuggcggcuuuccggaaga

SEQ ID NO: 2255253 - RNA, 19 nt, Artificial Sequence
  Description of Artificial Sequence: Synthetic oligonucleotide
cucuuuggucaaaggaguc

SEQ ID NO: 2255254 - RNA, 19 nt, Artificial Sequence
  Description of Artificial Sequence: Synthetic oligonucleotide
gacuugauuuuccucuucu

SEQ ID NO: 2255255 - RNA, 19 nt, Artificial Sequence
  Description of Artificial Sequence: Synthetic oligonucleotide
gggagcgacaucuuggauc

SEQ ID NO: 2255256 - RNA, 19 nt, Artificial Sequence
  Description of Artificial Sequence: Synthetic oligonucleotide
ucaucucauggacuugauu

SEQ ID NO: 2255257 - RNA, 19 nt, Artificial Sequence
  Description of Artificial Sequence: Synthetic oligonucleotide
cuuagagucggacucuucu

SEQ ID NO: 2255258 - RNA, 19 nt, Artificial Sequence
  Description of Artificial Sequence: Synthetic oligonucleotide
ccggauguugaacucaggc

SEQ ID NO: 2255259 - RNA, 19 nt, Artificial Sequence
  Description of Artificial Sequence: Synthetic oligonucleotide
agauccccagggucgaaca

SEQ ID NO: 2255260 - RNA, 19 nt, Artificial Sequence
  Description of Artificial Sequence: Synthetic oligonucleotide
uggagacuccucguccagg

SEQ ID NO: 2255261 - RNA, 19 nt, Artificial Sequence
  Description of Artificial Sequence: Synthetic oligonucleotide
caguggucugucucgauca

SEQ ID NO: 2255262 - RNA, 19 nt, Artificial Sequence
  Description of Artificial Sequence: Synthetic oligonucleotide
ucuucucgcggcagggaaa

SEQ ID NO: 2255263 - RNA, 19 nt, Artificial Sequence
  Description of Artificial Sequence: Synthetic oligonucleotide
cucgaucaaaaccugucaa

SEQ ID NO: 2255264 - RNA, 19 nt, Artificial Sequence
  Description of Artificial Sequence: Synthetic oligonucleotide
gagcucucuuccauggaug

SEQ ID NO: 2255265 - RNA, 19 nt, Artificial Sequence
  Description of Artificial Sequence: Synthetic oligonucleotide
uuggcuggagacuccucgu

SEQ ID NO: 2255266 - RNA, 19 nt, Artificial Sequence
  Description of Artificial Sequence: Synthetic oligonucleotide
caucuauuguucuuagagu

SEQ ID NO: 2255267 - RNA, 19 nt, Artificial Sequence
  Description of Artificial Sequence: Synthetic oligonucleotide
uugcuacuguaucuuucaa

SEQ ID NO: 2255268 - RNA, 19 nt, Artificial Sequence
  Description of Artificial Sequence: Synthetic oligonucleotide
gucucgaucaaaaccuguc

SEQ ID NO: 2255269 - RNA, 19 nt, Artificial Sequence
  Description of Artificial Sequence: Synthetic oligonucleotide
cacgacacgggaaaagcaa

SEQ ID NO: 2255270 - RNA, 19 nt, Artificial Sequence
  Description of Artificial Sequence: Synthetic oligonucleotide
cuucucgcggcagggaaag

SEQ ID NO: 2255271 - RNA, 19 nt, Artificial Sequence
  Description of Artificial Sequence: Synthetic oligonucleotide
ccaucauugagcucucuuc

SEQ ID NO: 2255272 - RNA, 19 nt, Artificial Sequence
  Description of Artificial Sequence: Synthetic oligonucleotide
cugucucgaucaaaaccug

SEQ ID NO: 2255273 - RNA, 19 nt, Artificial Sequence
  Description of Artificial Sequence: Synthetic oligonucleotide
ucuuagagucggacucuuc

SEQ ID NO: 2255274 - RNA, 19 nt, Artificial Sequence
  Description of Artificial Sequence: Synthetic oligonucleotide
acuagcgucuuuaccagau

SEQ ID NO: 2255275 - RNA, 19 nt, Artificial Sequence
  Description of Artificial Sequence: Synthetic oligonucleotide
uggggaucagaagcaggag

SEQ ID NO: 2255276 - RNA, 19 nt, Artificial Sequence
  Description of Artificial Sequence: Synthetic oligonucleotide
gucguucggguugggagcg

SEQ ID NO: 2255277 - RNA, 19 nt, Artificial Sequence
  Description of Artificial Sequence: Synthetic oligonucleotide
acauggggaucagaagcag

SEQ ID NO: 2255278 - RNA, 19 nt, Artificial Sequence
  Description of Artificial Sequence: Synthetic oligonucleotide
ggucguucggguugggagc

SEQ ID NO: 2255279 - RNA, 19 nt, Artificial Sequence
  Description of Artificial Sequence: Synthetic oligonucleotide
ggacuugugaaucaccacu

SEQ ID NO: 2255280 - RNA, 19 nt, Artificial Sequence
  Description of Artificial Sequence: Synthetic oligonucleotide
ccagggucgaacaccacag

SEQ ID NO: 2255281 - RNA, 19 nt, Artificial Sequence
  Description of Artificial Sequence: Synthetic oligonucleotide
gugaaucaccacugccuug

SEQ ID NO: 2255282 - RNA, 19 nt, Artificial Sequence
  Description of Artificial Sequence: Synthetic oligonucleotide
auaguucucuguucuucuu

SEQ ID NO: 2255283 - RNA, 19 nt, Artificial Sequence
  Description of Artificial Sequence: Synthetic oligonucleotide
uucggguugggagcgacau

SEQ ID NO: 2255284 - RNA, 19 nt, Artificial Sequence
  Description of Artificial Sequence: Synthetic oligonucleotide
cuuuggucaaaggagucaa

SEQ ID NO: 2255285 - RNA, 19 nt, Artificial Sequence
  Description of Artificial Sequence: Synthetic oligonucleotide
cagaucgucucuguaucug

SEQ ID NO: 2255286 - RNA, 19 nt, Artificial Sequence
  Description of Artificial Sequence: Synthetic oligonucleotide
ucucgcggcagggaaaguc

SEQ ID NO: 2255287 - RNA, 19 nt, Artificial Sequence
  Description of Artificial Sequence: Synthetic oligonucleotide
ugggucucauccucauagu

SEQ ID NO: 2255288 - RNA, 19 nt, Artificial Sequence
  Description of Artificial Sequence: Synthetic oligonucleotide
ccaaaguuaaucuccagcu

SEQ ID NO: 2255289 - RNA, 19 nt, Artificial Sequence
  Description of Artificial Sequence: Synthetic oligonucleotide
cuucuaccuccaacucagg

SEQ ID NO: 2255290 - RNA, 19 nt, Artificial Sequence
  Description of Artificial Sequence: Synthetic oligonucleotide
cucuucauagugcugcucu

SEQ ID NO: 2255291 - RNA, 19 nt, Artificial Sequence
  Description of Artificial Sequence: Synthetic oligonucleotide
guuaaucuccagcugggau

SEQ ID NO: 2255292 - RNA, 19 nt, Artificial Sequence
  Description of Artificial Sequence: Synthetic oligonucleotide
ucggacucuucucgcggca

SEQ ID NO: 2255293 - RNA, 19 nt, Artificial Sequence
  Description of Artificial Sequence: Synthetic oligonucleotide
aaggaacuguggacuccgg

SEQ ID NO: 2255294 - RNA, 19 nt, Artificial Sequence
  Description of Artificial Sequence: Synthetic oligonucleotide
ucaccagaucgucucugua

SEQ ID NO: 2255295 - RNA, 19 nt, Artificial Sequence
  Description of Artificial Sequence: Synthetic oligonucleotide
agggcggggaaguccucgg

SEQ ID NO: 2255296 - RNA, 19 nt, Artificial Sequence
  Description of Artificial Sequence: Synthetic oligonucleotide
guugaacucaggcuuuggu

SEQ ID NO: 2255297 - RNA, 19 nt, Artificial Sequence
  Description of Artificial Sequence: Synthetic oligonucleotide
aguuaaucuccagcuggga

SEQ ID NO: 2255298 - RNA, 19 nt, Artificial Sequence
  Description of Artificial Sequence: Synthetic oligonucleotide
aucuuggaucacaacuucu

SEQ ID NO: 2255299 - RNA, 19 nt, Artificial Sequence
  Description of Artificial Sequence: Synthetic oligonucleotide
aggagucaaaagcucuguu

SEQ ID NO: 2255300 - RNA, 19 nt, Artificial Sequence
  Description of Artificial Sequence: Synthetic oligonucleotide
cauggaugcagauggcucu

SEQ ID NO: 2255301 - RNA, 19 nt, Artificial Sequence
  Description of Artificial Sequence: Synthetic oligonucleotide
uggacuccggcuuccggau

SEQ ID NO: 2255302 - RNA, 19 nt, Artificial Sequence
  Description of Artificial Sequence: Synthetic oligonucleotide
gucggacucuucucgcggc

SEQ ID NO: 2255303 - RNA, 19 nt, Artificial Sequence
  Description of Artificial Sequence: Synthetic oligonucleotide
agggaggcuaccaaaguua

SEQ ID NO: 2255304 - RNA, 19 nt, Artificial Sequence
  Description of Artificial Sequence: Synthetic oligonucleotide
ggcuaccaaaguuaaucuc

SEQ ID NO: 2255305 - RNA, 19 nt, Artificial Sequence
  Description of Artificial Sequence: Synthetic oligonucleotide
uggcuggagacuccucguc

SEQ ID NO: 2255306 - RNA, 19 nt, Artificial Sequence
  Description of Artificial Sequence: Synthetic oligonucleotide
cuuauccuuccucggccuc

SEQ ID NO: 2255307 - RNA, 19 nt, Artificial Sequence
  Description of Artificial Sequence: Synthetic oligonucleotide
gcagcaaguucacacgaca

SEQ ID NO: 2255308 - RNA, 19 nt, Artificial Sequence
  Description of Artificial Sequence: Synthetic oligonucleotide
uucccaggaccaccucggc

SEQ ID NO: 2255309 - RNA, 19 nt, Artificial Sequence
  Description of Artificial Sequence: Synthetic oligonucleotide
ggcggggaaguccucgggg

SEQ ID NO: 2255310 - RNA, 19 nt, Artificial Sequence
  Description of Artificial Sequence: Synthetic oligonucleotide
gugucacuagcgucuuuac

SEQ ID NO: 2255311 - RNA, 19 nt, Artificial Sequence
  Description of Artificial Sequence: Synthetic oligonucleotide
acccugggauuccuccauc

SEQ ID NO: 2255312 - RNA, 19 nt, Artificial Sequence
  Description of Artificial Sequence: Synthetic oligonucleotide
auguugaacucaggcuuug

SEQ ID NO: 2255313 - RNA, 19 nt, Artificial Sequence
  Description of Artificial Sequence: Synthetic oligonucleotide
cuccaacucaggagcuuug

SEQ ID NO: 2255314 - RNA, 19 nt, Artificial Sequence
  Description of Artificial Sequence: Synthetic oligonucleotide
gaacaccacagcuacccau

SEQ ID NO: 2255315 - RNA, 19 nt, Artificial Sequence
  Description of Artificial Sequence: Synthetic oligonucleotide
uccagggcgagggaggcua

SEQ ID NO: 2255316 - RNA, 19 nt, Artificial Sequence
  Description of Artificial Sequence: Synthetic oligonucleotide
acacgacacgggaaaagca

SEQ ID NO: 2255317 - RNA, 19 nt, Artificial Sequence
  Description of Artificial Sequence: Synthetic oligonucleotide
cuggagacuccucguccag

SEQ ID NO: 2255318 - RNA, 19 nt, Artificial Sequence
  Description of Artificial Sequence: Synthetic oligonucleotide
agcaaacauccuccacaga

SEQ ID NO: 2255319 - RNA, 19 nt, Artificial Sequence
  Description of Artificial Sequence: Synthetic oligonucleotide
uucacacgacacgggaaaa

SEQ ID NO: 2255320 - RNA, 19 nt, Artificial Sequence
  Description of Artificial Sequence: Synthetic oligonucleotide
cagggucgaacaccacagc

SEQ ID NO: 2255321 - RNA, 19 nt, Artificial Sequence
  Description of Artificial Sequence: Synthetic oligonucleotide
gaaguccucggggucguuc

SEQ ID NO: 2255322 - RNA, 19 nt, Artificial Sequence
  Description of Artificial Sequence: Synthetic oligonucleotide
uccucggggucguucgggu

SEQ ID NO: 2255323 - RNA, 19 nt, Artificial Sequence
  Description of Artificial Sequence: Synthetic oligonucleotide
agaagcaggagggcaccca

SEQ ID NO: 2255324 - RNA, 19 nt, Artificial Sequence
  Description of Artificial Sequence: Synthetic oligonucleotide
aucuuucaccagaucgucu

SEQ ID NO: 2255325 - RNA, 19 nt, Artificial Sequence
  Description of Artificial Sequence: Synthetic oligonucleotide
aguucacacgacacgggaa

SEQ ID NO: 2255326 - RNA, 19 nt, Artificial Sequence
  Description of Artificial Sequence: Synthetic oligonucleotide
aguggucugucucgaucaa

SEQ ID NO: 2255327 - RNA, 19 nt, Artificial Sequence
  Description of Artificial Sequence: Synthetic oligonucleotide
uccucucaguggucugucu

SEQ ID NO: 2255328 - RNA, 19 nt, Artificial Sequence
  Description of Artificial Sequence: Synthetic oligonucleotide
cacagcuacccaugcuguc

SEQ ID NO: 2255329 - RNA, 19 nt, Artificial Sequence
  Description of Artificial Sequence: Synthetic oligonucleotide
cuuccggauguugaacuca

SEQ ID NO: 2255330 - RNA, 19 nt, Artificial Sequence
  Description of Artificial Sequence: Synthetic oligonucleotide
gcgucuuuaccagaucccc

SEQ ID NO: 2255331 - RNA, 19 nt, Artificial Sequence
  Description of Artificial Sequence: Synthetic oligonucleotide
gcaggggaauggcuguuag

SEQ ID NO: 2255332 - RNA, 19 nt, Artificial Sequence
  Description of Artificial Sequence: Synthetic oligonucleotide
cacucaucuaaggucaucu

SEQ ID NO: 2255333 - RNA, 19 nt, Artificial Sequence
  Description of Artificial Sequence: Synthetic oligonucleotide
uauccuuccucggccuccu

SEQ ID NO: 2255334 - RNA, 19 nt, Artificial Sequence
  Description of Artificial Sequence: Synthetic oligonucleotide
cugguuugcucuugaaggu

SEQ ID NO: 2255335 - RNA, 19 nt, Artificial Sequence
  Description of Artificial Sequence: Synthetic oligonucleotide
ugggagcgacaucuuggau

SEQ ID NO: 2255336 - RNA, 19 nt, Artificial Sequence
  Description of Artificial Sequence: Synthetic oligonucleotide
agcuacccaugcuguccuc

SEQ ID NO: 2255337 - RNA, 19 nt, Artificial Sequence
  Description of Artificial Sequence: Synthetic oligonucleotide
ucgcggcagggaaagucuc

SEQ ID NO: 2255338 - RNA, 19 nt, Artificial Sequence
  Description of Artificial Sequence: Synthetic oligonucleotide
cuacccaugcuguccucca

SEQ ID NO: 2255339 - RNA, 19 nt, Artificial Sequence
  Description of Artificial Sequence: Synthetic oligonucleotide
cagggcggggaaguccucg

SEQ ID NO: 2255340 - RNA, 19 nt, Artificial Sequence
  Description of Artificial Sequence: Synthetic oligonucleotide
acccaugcuguccuccauu

SEQ ID NO: 2255341 - RNA, 19 nt, Artificial Sequence
  Description of Artificial Sequence: Synthetic oligonucleotide
gacuccggcuuccggaugu

SEQ ID NO: 2255342 - RNA, 19 nt, Artificial Sequence
  Description of Artificial Sequence: Synthetic oligonucleotide
gaaucaccacugccuugga

SEQ ID NO: 2255343 - RNA, 19 nt, Artificial Sequence
  Description of Artificial Sequence: Synthetic oligonucleotide
uuuucccucuuuggucaaa

SEQ ID NO: 2255344 - RNA, 19 nt, Artificial Sequence
  Description of Artificial Sequence: Synthetic oligonucleotide
gauguugaacucaggcuuu

SEQ ID NO: 2255345 - RNA, 19 nt, Artificial Sequence
  Description of Artificial Sequence: Synthetic oligonucleotide
gcgagggaggcuaccaaag

SEQ ID NO: 2255346 - RNA, 19 nt, Artificial Sequence
  Description of Artificial Sequence: Synthetic oligonucleotide
uccggaagacaugggucuc

SEQ ID NO: 2255347 - RNA, 19 nt, Artificial Sequence
  Description of Artificial Sequence: Synthetic oligonucleotide
cacugccucuggcuccccg

SEQ ID NO: 2255348 - RNA, 19 nt, Artificial Sequence
  Description of Artificial Sequence: Synthetic oligonucleotide
ggccucuggggccuccacg

SEQ ID NO: 2255349 - RNA, 19 nt, Artificial Sequence
  Description of Artificial Sequence: Synthetic oligonucleotide
ucggguugggagcgacauc

SEQ ID NO: 2255350 - RNA, 19 nt, Artificial Sequence
  Description of Artificial Sequence: Synthetic oligonucleotide
cagauccccagggucgaac

SEQ ID NO: 2255351 - RNA, 19 nt, Artificial Sequence
  Description of Artificial Sequence: Synthetic oligonucleotide
ggccauaguucucuguucu

SEQ ID NO: 2255352 - RNA, 19 nt, Artificial Sequence
  Description of Artificial Sequence: Synthetic oligonucleotide
uggaugcagauggcucugu

SEQ ID NO: 2255353 - RNA, 19 nt, Artificial Sequence
  Description of Artificial Sequence: Synthetic oligonucleotide
cucgggcacugccucuggc

SEQ ID NO: 2255354 - RNA, 19 nt, Artificial Sequence
  Description of Artificial Sequence: Synthetic oligonucleotide
caccagaucgucucuguau

SEQ ID NO: 2255355 - RNA, 19 nt, Artificial Sequence
  Description of Artificial Sequence: Synthetic oligonucleotide
uccucguccagggcacccu

SEQ ID NO: 2255356 - RNA, 19 nt, Artificial Sequence
  Description of Artificial Sequence: Synthetic oligonucleotide
agggcgagggaggcuacca

SEQ ID NO: 2255357 - RNA, 19 nt, Artificial Sequence
  Description of Artificial Sequence: Synthetic oligonucleotide
gggaaaagcaacaucuauu

SEQ ID NO: 2255358 - RNA, 19 nt, Artificial Sequence
  Description of Artificial Sequence: Synthetic oligonucleotide
cucgcggcagggaaagucu

SEQ ID NO: 2255359 - RNA, 19 nt, Artificial Sequence
  Description of Artificial Sequence: Synthetic oligonucleotide
cacuagcgucuuuaccaga

SEQ ID NO: 2255360 - RNA, 19 nt, Artificial Sequence
  Description of Artificial Sequence: Synthetic oligonucleotide
gucgaacaccacagcuacc

SEQ ID NO: 2255361 - RNA, 19 nt, Artificial Sequence
  Description of Artificial Sequence: Synthetic oligonucleotide
ccaaagcaaacauccucca

SEQ ID NO: 2255362 - RNA, 19 nt, Artificial Sequence
  Description of Artificial Sequence: Synthetic oligonucleotide
acgggaaaagcaacaucua

SEQ ID NO: 2255363 - RNA, 19 nt, Artificial Sequence
  Description of Artificial Sequence: Synthetic oligonucleotide
cauccuccacagagcaaga

SEQ ID NO: 2255364 - RNA, 19 nt, Artificial Sequence
  Description of Artificial Sequence: Synthetic oligonucleotide
acucuucucgcggcaggga

SEQ ID NO: 2255365 - RNA, 19 nt, Artificial Sequence
  Description of Artificial Sequence: Synthetic oligonucleotide
cuuuucccucuuuggucaa

SEQ ID NO: 2255366 - RNA, 19 nt, Artificial Sequence
  Description of Artificial Sequence: Synthetic oligonucleotide
ggcucugugucacuagcgu

SEQ ID NO: 2255367 - RNA, 19 nt, Artificial Sequence
  Description of Artificial Sequence: Synthetic oligonucleotide
ccguccagggcgagggagg

SEQ ID NO: 2255368 - RNA, 19 nt, Artificial Sequence
  Description of Artificial Sequence: Synthetic oligonucleotide
accugucaacugguuuuca

SEQ ID NO: 2255369 - RNA, 19 nt, Artificial Sequence
  Description of Artificial Sequence: Synthetic oligonucleotide
cuguuaggccagggcgggg

SEQ ID NO: 2255370 - RNA, 19 nt, Artificial Sequence
  Description of Artificial Sequence: Synthetic oligonucleotide
gcuuuccggaagacauggg

SEQ ID NO: 2255371 - RNA, 19 nt, Artificial Sequence
  Description of Artificial Sequence: Synthetic oligonucleotide
ggcagcaaguucacacgac

SEQ ID NO: 2255372 - RNA, 19 nt, Artificial Sequence
  Description of Artificial Sequence: Synthetic oligonucleotide
ggcgagggaggcuaccaaa

SEQ ID NO: 2255373 - RNA, 19 nt, Artificial Sequence
  Description of Artificial Sequence: Synthetic oligonucleotide
cugggauuccuccaucauu

SEQ ID NO: 2255374 - RNA, 19 nt, Artificial Sequence
  Description of Artificial Sequence: Synthetic oligonucleotide
gggaggcuaccaaaguuaa

SEQ ID NO: 2255375 - RNA, 19 nt, Artificial Sequence
  Description of Artificial Sequence: Synthetic oligonucleotide
cagggcacccugggauucc

SEQ ID NO: 2255376 - RNA, 19 nt, Artificial Sequence
  Description of Artificial Sequence: Synthetic oligonucleotide
ggccuccacguccucucag

SEQ ID NO: 2255377 - RNA, 19 nt, Artificial Sequence
  Description of Artificial Sequence: Synthetic oligonucleotide
ggagcuuuggcuggagacu

SEQ ID NO: 2255378 - RNA, 19 nt, Artificial Sequence
  Description of Artificial Sequence: Synthetic oligonucleotide
cccagggucgaacaccaca

SEQ ID NO: 2255379 - RNA, 19 nt, Artificial Sequence
  Description of Artificial Sequence: Synthetic oligonucleotide
caaaaccugucaacugguu

SEQ ID NO: 2255380 - RNA, 19 nt, Artificial Sequence
  Description of Artificial Sequence: Synthetic oligonucleotide
guccucucaguggucuguc

SEQ ID NO: 2255381 - RNA, 19 nt, Artificial Sequence
  Description of Artificial Sequence: Synthetic oligonucleotide
cacccaaagcaaacauccu

SEQ ID NO: 2255382 - RNA, 19 nt, Artificial Sequence
  Description of Artificial Sequence: Synthetic oligonucleotide
cacugccuuggaaggaacu

SEQ ID NO: 2255383 - RNA, 19 nt, Artificial Sequence
  Description of Artificial Sequence: Synthetic oligonucleotide
gggucgaacaccacagcua

SEQ ID NO: 2255384 - RNA, 19 nt, Artificial Sequence
  Description of Artificial Sequence: Synthetic oligonucleotide
ccuccacguccucucagug

SEQ ID NO: 2255385 - RNA, 19 nt, Artificial Sequence
  Description of Artificial Sequence: Synthetic oligonucleotide
cuguucccaggaccaccuc

SEQ ID NO: 2255386 - RNA, 19 nt, Artificial Sequence
  Description of Artificial Sequence: Synthetic oligonucleotide
accuccaacucaggagcuu

SEQ ID NO: 2255387 - RNA, 19 nt, Artificial Sequence
  Description of Artificial Sequence: Synthetic oligonucleotide
caugggucucauccucaua

SEQ ID NO: 2255388 - RNA, 19 nt, Artificial Sequence
  Description of Artificial Sequence: Synthetic oligonucleotide
agggcacccugggauuccu

SEQ ID NO: 2255389 - RNA, 19 nt, Artificial Sequence
  Description of Artificial Sequence: Synthetic oligonucleotide
cagcuacccaugcuguccu

SEQ ID NO: 2255390 - RNA, 19 nt, Artificial Sequence
  Description of Artificial Sequence: Synthetic oligonucleotide
ggacuccggcuuccggaug

SEQ ID NO: 2255391 - RNA, 19 nt, Artificial Sequence
  Description of Artificial Sequence: Synthetic oligonucleotide
uucucgcggcagggaaagu

SEQ ID NO: 2255392 - RNA, 19 nt, Artificial Sequence
  Description of Artificial Sequence: Synthetic oligonucleotide
cgacacgggaaaagcaaca

SEQ ID NO: 2255393 - RNA, 19 nt, Artificial Sequence
  Description of Artificial Sequence: Synthetic oligonucleotide
uggcggcuuuccggaagac

SEQ ID NO: 2255394 - RNA, 19 nt, Artificial Sequence
  Description of Artificial Sequence: Synthetic oligonucleotide
cacguccucucaguggucu

SEQ ID NO: 2255395 - RNA, 19 nt, Artificial Sequence
  Description of Artificial Sequence: Synthetic oligonucleotide
ucguucggguugggagcga

SEQ ID NO: 2255396 - RNA, 19 nt, Artificial Sequence
  Description of Artificial Sequence: Synthetic oligonucleotide
cgucuuuaccagaucccca

SEQ ID NO: 2255397 - RNA, 19 nt, Artificial Sequence
  Description of Artificial Sequence: Synthetic oligonucleotide
gccucuggggccuccacgu

SEQ ID NO: 2255398 - RNA, 19 nt, Artificial Sequence
  Description of Artificial Sequence: Synthetic oligonucleotide
ggcggcuuuccggaagaca

SEQ ID NO: 2255399 - RNA, 19 nt, Artificial Sequence
  Description of Artificial Sequence: Synthetic oligonucleotide
cccguccagggcgagggag

SEQ ID NO: 2255400 - RNA, 19 nt, Artificial Sequence
  Description of Artificial Sequence: Synthetic oligonucleotide
ccuccaucauugagcucuc

SEQ ID NO: 2255401 - RNA, 19 nt, Artificial Sequence
  Description of Artificial Sequence: Synthetic oligonucleotide
ccucguccagggcacccug

SEQ ID NO: 2255402 - RNA, 19 nt, Artificial Sequence
  Description of Artificial Sequence: Synthetic oligonucleotide
caccacagcuacccaugcu

SEQ ID NO: 2255403 - RNA, 19 nt, Artificial Sequence
  Description of Artificial Sequence: Synthetic oligonucleotide
gagcgacaucuuggaucac

SEQ ID NO: 2255404 - RNA, 19 nt, Artificial Sequence
  Description of Artificial Sequence: Synthetic oligonucleotide
cacccugggauuccuccau

SEQ ID NO: 2255405 - RNA, 19 nt, Artificial Sequence
  Description of Artificial Sequence: Synthetic oligonucleotide
ccugucaacugguuuucau

SEQ ID NO: 2255406 - RNA, 19 nt, Artificial Sequence
  Description of Artificial Sequence: Synthetic oligonucleotide
gucaucucauggacuugau

SEQ ID NO: 2255407 - RNA, 19 nt, Artificial Sequence
  Description of Artificial Sequence: Synthetic oligonucleotide
cggcuuuccggaagacaug

SEQ ID NO: 2255408 - RNA, 19 nt, Artificial Sequence
  Description of Artificial Sequence: Synthetic oligonucleotide
gggcgagggaggcuaccaa

SEQ ID NO: 2255409 - RNA, 19 nt, Artificial Sequence
  Description of Artificial Sequence: Synthetic oligonucleotide
cucaguggucugucucgau

SEQ ID NO: 2255410 - RNA, 19 nt, Artificial Sequence
  Description of Artificial Sequence: Synthetic oligonucleotide
ccagaucgucucuguaucu

SEQ ID NO: 2255411 - RNA, 19 nt, Artificial Sequence
  Description of Artificial Sequence: Synthetic oligonucleotide
cggguugggagcgacaucu

SEQ ID NO: 2255412 - RNA, 19 nt, Artificial Sequence
  Description of Artificial Sequence: Synthetic oligonucleotide
ccggcuuccggauguugaa

SEQ ID NO: 2255413 - RNA, 19 nt, Artificial Sequence
  Description of Artificial Sequence: Synthetic oligonucleotide
gcuguccuccauucuguuu

SEQ ID NO: 2255414 - RNA, 19 nt, Artificial Sequence
  Description of Artificial Sequence: Synthetic oligonucleotide
cgggaaaagcaacaucuau

SEQ ID NO: 2255415 - RNA, 19 nt, Artificial Sequence
  Description of Artificial Sequence: Synthetic oligonucleotide
acuccggcuuccggauguu

SEQ ID NO: 2255416 - RNA, 19 nt, Artificial Sequence
  Description of Artificial Sequence: Synthetic oligonucleotide
ggggucguucggguuggga

SEQ ID NO: 2255417 - RNA, 19 nt, Artificial Sequence
  Description of Artificial Sequence: Synthetic oligonucleotide
ccggaagacaugggucuca

SEQ ID NO: 2255418 - RNA, 19 nt, Artificial Sequence
  Description of Artificial Sequence: Synthetic oligonucleotide
cggacucuucucgcggcag

SEQ ID NO: 2255419 - RNA, 19 nt, Artificial Sequence
  Description of Artificial Sequence: Synthetic oligonucleotide
cguucggguugggagcgac

SEQ ID NO: 2255420 - RNA, 19 nt, Artificial Sequence
  Description of Artificial Sequence: Synthetic oligonucleotide
cggcuuccggauguugaac

SEQ ID NO: 2255421 - RNA, 19 nt, Artificial Sequence
  Description of Artificial Sequence: Synthetic oligonucleotide
ggaggcuaccaaaguuaau

SEQ ID NO: 2255422 - RNA, 19 nt, Artificial Sequence
  Description of Artificial Sequence: Synthetic oligonucleotide
ccugggauuccuccaucau

SEQ ID NO: 2255423 - RNA, 19 nt, Artificial Sequence
  Description of Artificial Sequence: Synthetic oligonucleotide
cucaggcuuuggucugguu

SEQ ID NO: 2255424 - RNA, 19 nt, Artificial Sequence
  Description of Artificial Sequence: Synthetic oligonucleotide
ccccagggucgaacaccac

SEQ ID NO: 2255425 - RNA, 19 nt, Artificial Sequence
  Description of Artificial Sequence: Synthetic oligonucleotide
gcggcagggaaagucucuu

SEQ ID NO: 2255426 - RNA, 19 nt, Artificial Sequence
  Description of Artificial Sequence: Synthetic oligonucleotide
cugugucacuagcgucuuu

SEQ ID NO: 2255427 - RNA, 19 nt, Artificial Sequence
  Description of Artificial Sequence: Synthetic oligonucleotide
cguccucucaguggucugu

SEQ ID NO: 2255428 - RNA, 19 nt, Artificial Sequence
  Description of Artificial Sequence: Synthetic oligonucleotide
ccagauccccagggucgaa

SEQ ID NO: 2255429 - RNA, 19 nt, Artificial Sequence
  Description of Artificial Sequence: Synthetic oligonucleotide
cggggucguucggguuggg

SEQ ID NO: 2255430 - RNA, 19 nt, Artificial Sequence
  Description of Artificial Sequence: Synthetic oligonucleotide
acuauaguaauuuacuucc

SEQ ID NO: 2255431 - RNA, 19 nt, Artificial Sequence
  Description of Artificial Sequence: Synthetic oligonucleotide
aaaauguccauccaccucc

SEQ ID NO: 2255432 - RNA, 19 nt, Artificial Sequence
  Description of Artificial Sequence: Synthetic oligonucleotide
uuuaauaguaucacuauag

SEQ ID NO: 2255433 - RNA, 19 nt, Artificial Sequence
  Description of Artificial Sequence: Synthetic oligonucleotide
uuuaugucaaccuuguugc

SEQ ID NO: 2255434 - RNA, 19 nt, Artificial Sequence
  Description of Artificial Sequence: Synthetic oligonucleotide
uucaaaguaaggauggccg

SEQ ID NO: 2255435 - RNA, 19 nt, Artificial Sequence
  Description of Artificial Sequence: Synthetic oligonucleotide
ugaguaucaaauuuauugg

SEQ ID NO: 2255436 - RNA, 19 nt, Artificial Sequence
  Description of Artificial Sequence: Synthetic oligonucleotide
uuucacaucagcauaauac

SEQ ID NO: 2255437 - RNA, 19 nt, Artificial Sequence
  Description of Artificial Sequence: Synthetic oligonucleotide
aacaaaauguccauccacc

SEQ ID NO: 2255438 - RNA, 19 nt, Artificial Sequence
  Description of Artificial Sequence: Synthetic oligonucleotide
aucaacacuaaauguaagc

SEQ ID NO: 2255439 - RNA, 19 nt, Artificial Sequence
  Description of Artificial Sequence: Synthetic oligonucleotide
aaacggaaagcucucgggc

SEQ ID NO: 2255440 - RNA, 19 nt, Artificial Sequence
  Description of Artificial Sequence: Synthetic oligonucleotide
gaaucaucaacacuaaaug

SEQ ID NO: 2255441 - RNA, 19 nt, Artificial Sequence
  Description of Artificial Sequence: Synthetic oligonucleotide
uugagaaucaucaacacua

SEQ ID NO: 2255442 - RNA, 19 nt, Artificial Sequence
  Description of Artificial Sequence: Synthetic oligonucleotide
aaucagaugaucugacuuc

SEQ ID NO: 2255443 - RNA, 19 nt, Artificial Sequence
  Description of Artificial Sequence: Synthetic oligonucleotide
ucaagcaucauuauuuucu

SEQ ID NO: 2255444 - RNA, 19 nt, Artificial Sequence
  Description of Artificial Sequence: Synthetic oligonucleotide
aauuacuuuaaagagagau

SEQ ID NO: 2255445 - RNA, 19 nt, Artificial Sequence
  Description of Artificial Sequence: Synthetic oligonucleotide
uuucggugcagauugaccg

SEQ ID NO: 2255446 - RNA, 19 nt, Artificial Sequence
  Description of Artificial Sequence: Synthetic oligonucleotide
uuacuuuaaagagagauga

SEQ ID NO: 2255447 - RNA, 19 nt, Artificial Sequence
  Description of Artificial Sequence: Synthetic oligonucleotide
uaauuuacuucccuggacc

SEQ ID NO: 2255448 - RNA, 19 nt, Artificial Sequence
  Description of Artificial Sequence: Synthetic oligonucleotide
uuuauuucagauuccuuag

SEQ ID NO: 2255449 - RNA, 19 nt, Artificial Sequence
  Description of Artificial Sequence: Synthetic oligonucleotide
uaaaaugguguccucaggc

SEQ ID NO: 2255450 - RNA, 19 nt, Artificial Sequence
  Description of Artificial Sequence: Synthetic oligonucleotide
agaauuacuuuaaagagag

SEQ ID NO: 2255451 - RNA, 19 nt, Artificial Sequence
  Description of Artificial Sequence: Synthetic oligonucleotide
uacauaucuguucauaaga

SEQ ID NO: 2255452 - RNA, 19 nt, Artificial Sequence
  Description of Artificial Sequence: Synthetic oligonucleotide
uaaagagagaugauuuucc

SEQ ID NO: 2255453 - RNA, 19 nt, Artificial Sequence
  Description of Artificial Sequence: Synthetic oligonucleotide
ucauaagagaacuuuugcc

SEQ ID NO: 2255454 - RNA, 19 nt, Artificial Sequence
  Description of Artificial Sequence: Synthetic oligonucleotide
uaguaauuuacuucccugg

SEQ ID NO: 2255455 - RNA, 19 nt, Artificial Sequence
  Description of Artificial Sequence: Synthetic oligonucleotide
aaucaucaacacuaaaugu

SEQ ID NO: 2255456 - RNA, 19 nt, Artificial Sequence
  Description of Artificial Sequence: Synthetic oligonucleotide
uuucagauuccuuaguagc

SEQ ID NO: 2255457 - RNA, 19 nt, Artificial Sequence
  Description of Artificial Sequence: Synthetic oligonucleotide
aacuuuugccaacuccacc

SEQ ID NO: 2255458 - RNA, 19 nt, Artificial Sequence
  Description of Artificial Sequence: Synthetic oligonucleotide
uauaaaaugguguccucag

SEQ ID NO: 2255459 - RNA, 19 nt, Artificial Sequence
  Description of Artificial Sequence: Synthetic oligonucleotide
guuauucagauucuggaag

SEQ ID NO: 2255460 - RNA, 19 nt, Artificial Sequence
  Description of Artificial Sequence: Synthetic oligonucleotide
uggaccaagaauagaaugc

SEQ ID NO: 2255461 - RNA, 19 nt, Artificial Sequence
  Description of Artificial Sequence: Synthetic oligonucleotide
uugcccaaaaccacaaacg

SEQ ID NO: 2255462 - RNA, 19 nt, Artificial Sequence
  Description of Artificial Sequence: Synthetic oligonucleotide
aauucaagcaucauuauuu

SEQ ID NO: 2255463 - RNA, 19 nt, Artificial Sequence
  Description of Artificial Sequence: Synthetic oligonucleotide
uucggaaucgcucuugacc

SEQ ID NO: 2255464 - RNA, 19 nt, Artificial Sequence
  Description of Artificial Sequence: Synthetic oligonucleotide
ucuucuauagacaccugcc

SEQ ID NO: 2255465 - RNA, 19 nt, Artificial Sequence
  Description of Artificial Sequence: Synthetic oligonucleotide
ugcccaaaaccacaaacgg

SEQ ID NO: 2255466 - RNA, 19 nt, Artificial Sequence
  Description of Artificial Sequence: Synthetic oligonucleotide
accucuauaaaaugguguc

SEQ ID NO: 2255467 - RNA, 19 nt, Artificial Sequence
  Description of Artificial Sequence: Synthetic oligonucleotide
uugguuacauaucuguuca

SEQ ID NO: 2255468 - RNA, 19 nt, Artificial Sequence
  Description of Artificial Sequence: Synthetic oligonucleotide
uaauucuccauuuucuugu

SEQ ID NO: 2255469 - RNA, 19 nt, Artificial Sequence
  Description of Artificial Sequence: Synthetic oligonucleotide
uaucacuauaguaauuuac

SEQ ID NO: 2255470 - RNA, 19 nt, Artificial Sequence
  Description of Artificial Sequence: Synthetic oligonucleotide
aucagcauaauacaggaau

SEQ ID NO: 2255471 - RNA, 19 nt, Artificial Sequence
  Description of Artificial Sequence: Synthetic oligonucleotide
uuaauaguaucacuauagu

SEQ ID NO: 2255472 - RNA, 19 nt, Artificial Sequence
  Description of Artificial Sequence: Synthetic oligonucleotide
aauuuauugguuacauauc

SEQ ID NO: 2255473 - RNA, 19 nt, Artificial Sequence
  Description of Artificial Sequence: Synthetic oligonucleotide
cuaaauguaagcaggcaac

SEQ ID NO: 2255474 - RNA, 19 nt, Artificial Sequence
  Description of Artificial Sequence: Synthetic oligonucleotide
uuuccugccauuauuaaua

SEQ ID NO: 2255475 - RNA, 19 nt, Artificial Sequence
  Description of Artificial Sequence: Synthetic oligonucleotide
aaucuuuaauaguaucacu

SEQ ID NO: 2255476 - RNA, 19 nt, Artificial Sequence
  Description of Artificial Sequence: Synthetic oligonucleotide
cagaaccucuauaaaaugg

SEQ ID NO: 2255477 - RNA, 19 nt, Artificial Sequence
  Description of Artificial Sequence: Synthetic oligonucleotide
uuaguagcucaauucaagc

SEQ ID NO: 2255478 - RNA, 19 nt, Artificial Sequence
  Description of Artificial Sequence: Synthetic oligonucleotide
uucguuuaugucaaccuug

SEQ ID NO: 2255479 - RNA, 19 nt, Artificial Sequence
  Description of Artificial Sequence: Synthetic oligonucleotide
aauaguguguguguguaug

SEQ ID NO: 2255480 - RNA, 19 nt, Artificial Sequence
  Description of Artificial Sequence: Synthetic oligonucleotide
aacuuuucgaacggccucc

SEQ ID NO: 2255481 - RNA, 19 nt, Artificial Sequence
  Description of Artificial Sequence: Synthetic oligonucleotide
uccuuaguagcucaauuca

SEQ ID NO: 2255482 - RNA, 19 nt, Artificial Sequence
  Description of Artificial Sequence: Synthetic oligonucleotide
auaaaaguaauucuccauu

SEQ ID NO: 2255483 - RNA, 19 nt, Artificial Sequence
  Description of Artificial Sequence: Synthetic oligonucleotide
ucaucaacacuaaauguaa

SEQ ID NO: 2255484 - RNA, 19 nt, Artificial Sequence
  Description of Artificial Sequence: Synthetic oligonucleotide
uaacuucuagaauagugug

SEQ ID NO: 2255485 - RNA, 19 nt, Artificial Sequence
  Description of Artificial Sequence: Synthetic oligonucleotide
cauaagagaacuuuugcca

SEQ ID NO: 2255486 - RNA, 19 nt, Artificial Sequence
  Description of Artificial Sequence: Synthetic oligonucleotide
cuuaguagcucaauucaag

SEQ ID NO: 2255487 - RNA, 19 nt, Artificial Sequence
  Description of Artificial Sequence: Synthetic oligonucleotide
aagaauuacuuuaaagaga

SEQ ID NO: 2255488 - RNA, 19 nt, Artificial Sequence
  Description of Artificial Sequence: Synthetic oligonucleotide
cacaucagcauaauacagg

SEQ ID NO: 2255489 - RNA, 19 nt, Artificial Sequence
  Description of Artificial Sequence: Synthetic oligonucleotide
aacaggacgccccgggagc

SEQ ID NO: 2255490 - RNA, 19 nt, Artificial Sequence
  Description of Artificial Sequence: Synthetic oligonucleotide
uucuucuauagacaccugc

SEQ ID NO: 2255491 - RNA, 19 nt, Artificial Sequence
  Description of Artificial Sequence: Synthetic oligonucleotide
uuuucgaacggccuccuca

SEQ ID NO: 2255492 - RNA, 19 nt, Artificial Sequence
  Description of Artificial Sequence: Synthetic oligonucleotide
aagccagaacuuuucgaac

SEQ ID NO: 2255493 - RNA, 19 nt, Artificial Sequence
  Description of Artificial Sequence: Synthetic oligonucleotide
uguguguaugcaugcaccg

SEQ ID NO: 2255494 - RNA, 19 nt, Artificial Sequence
  Description of Artificial Sequence: Synthetic oligonucleotide
aauuccacaccuauggugu

SEQ ID NO: 2255495 - RNA, 19 nt, Artificial Sequence
  Description of Artificial Sequence: Synthetic oligonucleotide
uauaaaaguaauucuccau

SEQ ID NO: 2255496 - RNA, 19 nt, Artificial Sequence
  Description of Artificial Sequence: Synthetic oligonucleotide
aauuuacuucccuggacca

SEQ ID NO: 2255497 - RNA, 19 nt, Artificial Sequence
  Description of Artificial Sequence: Synthetic oligonucleotide
aaaaugguguccucaggcu

SEQ ID NO: 2255498 - RNA, 19 nt, Artificial Sequence
  Description of Artificial Sequence: Synthetic oligonucleotide
acuuguuucaaaguaagga

SEQ ID NO: 2255499 - RNA, 19 nt, Artificial Sequence
  Description of Artificial Sequence: Synthetic oligonucleotide
acuuuugccaacuccacca

SEQ ID NO: 2255500 - RNA, 19 nt, Artificial Sequence
  Description of Artificial Sequence: Synthetic oligonucleotide
ugcaugguaacaaaauguc

SEQ ID NO: 2255501 - RNA, 19 nt, Artificial Sequence
  Description of Artificial Sequence: Synthetic oligonucleotide
aaacaaccuaaaguguaac

SEQ ID NO: 2255502 - RNA, 19 nt, Artificial Sequence
  Description of Artificial Sequence: Synthetic oligonucleotide
uaucaaauuuauugguuac

SEQ ID NO: 2255503 - RNA, 19 nt, Artificial Sequence
  Description of Artificial Sequence: Synthetic oligonucleotide
agccagaacuuuucgaacg

SEQ ID NO: 2255504 - RNA, 19 nt, Artificial Sequence
  Description of Artificial Sequence: Synthetic oligonucleotide
acuaaauguaagcaggcaa

SEQ ID NO: 2255505 - RNA, 19 nt, Artificial Sequence
  Description of Artificial Sequence: Synthetic oligonucleotide
aacaaccuaaaguguaacu

SEQ ID NO: 2255506 - RNA, 19 nt, Artificial Sequence
  Description of Artificial Sequence: Synthetic oligonucleotide
ugucugaaucagaugaucu

SEQ ID NO: 2255507 - RNA, 19 nt, Artificial Sequence
  Description of Artificial Sequence: Synthetic oligonucleotide
aaaguaaggauggccgccg

SEQ ID NO: 2255508 - RNA, 19 nt, Artificial Sequence
  Description of Artificial Sequence: Synthetic oligonucleotide
uuucaaaguaaggauggcc

SEQ ID NO: 2255509 - RNA, 19 nt, Artificial Sequence
  Description of Artificial Sequence: Synthetic oligonucleotide
caacacuaaauguaagcag

SEQ ID NO: 2255510 - RNA, 19 nt, Artificial Sequence
  Description of Artificial Sequence: Synthetic oligonucleotide
ucuagaauagugugugugu

SEQ ID NO: 2255511 - RNA, 19 nt, Artificial Sequence
  Description of Artificial Sequence: Synthetic oligonucleotide
aguagcucaauucaagcau

SEQ ID NO: 2255512 - RNA, 19 nt, Artificial Sequence
  Description of Artificial Sequence: Synthetic oligonucleotide
uuaaagagagaugauuuuc

SEQ ID NO: 2255513 - RNA, 19 nt, Artificial Sequence
  Description of Artificial Sequence: Synthetic oligonucleotide
uaugguguggaagagcuga

SEQ ID NO: 2255514 - RNA, 19 nt, Artificial Sequence
  Description of Artificial Sequence: Synthetic oligonucleotide
uuauuaauaguaugaguuu

SEQ ID NO: 2255515 - RNA, 19 nt, Artificial Sequence
  Description of Artificial Sequence: Synthetic oligonucleotide
gagaacuuuugccaacucc

SEQ ID NO: 2255516 - RNA, 19 nt, Artificial Sequence
  Description of Artificial Sequence: Synthetic oligonucleotide
uguguaugcaugcaccgac

SEQ ID NO: 2255517 - RNA, 19 nt, Artificial Sequence
  Description of Artificial Sequence: Synthetic oligonucleotide
gcagcugcgacauuggugg

SEQ ID NO: 2255518 - RNA, 19 nt, Artificial Sequence
  Description of Artificial Sequence: Synthetic oligonucleotide
acuucuagaauagugugug

SEQ ID NO: 2255519 - RNA, 19 nt, Artificial Sequence
  Description of Artificial Sequence: Synthetic oligonucleotide
auaaaaugguguccucagg

SEQ ID NO: 2255520 - RNA, 19 nt, Artificial Sequence
  Description of Artificial Sequence: Synthetic oligonucleotide
auaguaucacuauaguaau

SEQ ID NO: 2255521 - RNA, 19 nt, Artificial Sequence
  Description of Artificial Sequence: Synthetic oligonucleotide
uucuauagacaccugccgu

SEQ ID NO: 2255522 - RNA, 19 nt, Artificial Sequence
  Description of Artificial Sequence: Synthetic oligonucleotide
cuucuauagacaccugccg

SEQ ID NO: 2255523 - RNA, 19 nt, Artificial Sequence
  Description of Artificial Sequence: Synthetic oligonucleotide
uucuagaauagugugugug

SEQ ID NO: 2255524 - RNA, 19 nt, Artificial Sequence
  Description of Artificial Sequence: Synthetic oligonucleotide
aaguaauucuccauuuucu

SEQ ID NO: 2255525 - RNA, 19 nt, Artificial Sequence
  Description of Artificial Sequence: Synthetic oligonucleotide
aaauguaagcaggcaacag

SEQ ID NO: 2255526 - RNA, 19 nt, Artificial Sequence
  Description of Artificial Sequence: Synthetic oligonucleotide
aguaauuuacuucccugga

SEQ ID NO: 2255527 - RNA, 19 nt, Artificial Sequence
  Description of Artificial Sequence: Synthetic oligonucleotide
ucaaaguaaggauggccgc

SEQ ID NO: 2255528 - RNA, 19 nt, Artificial Sequence
  Description of Artificial Sequence: Synthetic oligonucleotide
ugcaaccgagggaagaaag

SEQ ID NO: 2255529 - RNA, 19 nt, Artificial Sequence
  Description of Artificial Sequence: Synthetic oligonucleotide
ucuggaagcuuugagaauc

SEQ ID NO: 2255530 - RNA, 19 nt, Artificial Sequence
  Description of Artificial Sequence: Synthetic oligonucleotide
ugccauuauuaauaguaug

SEQ ID NO: 2255531 - RNA, 19 nt, Artificial Sequence
  Description of Artificial Sequence: Synthetic oligonucleotide
gaauagaaugcuaauuaca

SEQ ID NO: 2255532 - RNA, 19 nt, Artificial Sequence
  Description of Artificial Sequence: Synthetic oligonucleotide
ucaaauuuauugguuacau

SEQ ID NO: 2255533 - RNA, 19 nt, Artificial Sequence
  Description of Artificial Sequence: Synthetic oligonucleotide
aacggaaagcucucgggcu

SEQ ID NO: 2255534 - RNA, 19 nt, Artificial Sequence
  Description of Artificial Sequence: Synthetic oligonucleotide
uuuaaagagagaugauuuu

SEQ ID NO: 2255535 - RNA, 19 nt, Artificial Sequence
  Description of Artificial Sequence: Synthetic oligonucleotide
auaucuguucauaagagaa

SEQ ID NO: 2255536 - RNA, 19 nt, Artificial Sequence
  Description of Artificial Sequence: Synthetic oligonucleotide
caaacggaaagcucucggg

SEQ ID NO: 2255537 - RNA, 19 nt, Artificial Sequence
  Description of Artificial Sequence: Synthetic oligonucleotide
aaaucugcaugguaacaaa

SEQ ID NO: 2255538 - RNA, 19 nt, Artificial Sequence
  Description of Artificial Sequence: Synthetic oligonucleotide
gauuuuaaucuuuaauagu

SEQ ID NO: 2255539 - RNA, 19 nt, Artificial Sequence
  Description of Artificial Sequence: Synthetic oligonucleotide
gaagccagaacuuuucgaa

SEQ ID NO: 2255540 - RNA, 19 nt, Artificial Sequence
  Description of Artificial Sequence: Synthetic oligonucleotide
uuuacuucccuggaccaag

SEQ ID NO: 2255541 - RNA, 19 nt, Artificial Sequence
  Description of Artificial Sequence: Synthetic oligonucleotide
auaagagaacuuuugccaa

SEQ ID NO: 2255542 - RNA, 19 nt, Artificial Sequence
  Description of Artificial Sequence: Synthetic oligonucleotide
uauuaauaguaugaguuuu

SEQ ID NO: 2255543 - RNA, 19 nt, Artificial Sequence
  Description of Artificial Sequence: Synthetic oligonucleotide
aguaucacuauaguaauuu

SEQ ID NO: 2255544 - RNA, 19 nt, Artificial Sequence
  Description of Artificial Sequence: Synthetic oligonucleotide
uauagacaccugccguucg

SEQ ID NO: 2255545 - RNA, 19 nt, Artificial Sequence
  Description of Artificial Sequence: Synthetic oligonucleotide
acaccuaugguguggaaga

SEQ ID NO: 2255546 - RNA, 19 nt, Artificial Sequence
  Description of Artificial Sequence: Synthetic oligonucleotide
uaugucaaccuuguugccc

SEQ ID NO: 2255547 - RNA, 19 nt, Artificial Sequence
  Description of Artificial Sequence: Synthetic oligonucleotide
agaugaguuuggcuucggc

SEQ ID NO: 2255548 - RNA, 19 nt, Artificial Sequence
  Description of Artificial Sequence: Synthetic oligonucleotide
caaccuaaaguguaacuuc

SEQ ID NO: 2255549 - RNA, 19 nt, Artificial Sequence
  Description of Artificial Sequence: Synthetic oligonucleotide
uuauuucagauuccuuagu

SEQ ID NO: 2255550 - RNA, 19 nt, Artificial Sequence
  Description of Artificial Sequence: Synthetic oligonucleotide
cuggaccaagaauagaaug

SEQ ID NO: 2255551 - RNA, 19 nt, Artificial Sequence
  Description of Artificial Sequence: Synthetic oligonucleotide
ucgaacggccuccucaaag

SEQ ID NO: 2255552 - RNA, 19 nt, Artificial Sequence
  Description of Artificial Sequence: Synthetic oligonucleotide
cuuugagaaucaucaacac

SEQ ID NO: 2255553 - RNA, 19 nt, Artificial Sequence
  Description of Artificial Sequence: Synthetic oligonucleotide
uguaugcaugcaccgacca

SEQ ID NO: 2255554 - RNA, 19 nt, Artificial Sequence
  Description of Artificial Sequence: Synthetic oligonucleotide
aaccucuauaaaauggugu

SEQ ID NO: 2255555 - RNA, 19 nt, Artificial Sequence
  Description of Artificial Sequence: Synthetic oligonucleotide
cagaacuuuucgaacggcc

SEQ ID NO: 2255556 - RNA, 19 nt, Artificial Sequence
  Description of Artificial Sequence: Synthetic oligonucleotide
uucagauucuggaagcuuu

SEQ ID NO: 2255557 - RNA, 19 nt, Artificial Sequence
  Description of Artificial Sequence: Synthetic oligonucleotide
cuauaguaauuuacuuccc

SEQ ID NO: 2255558 - RNA, 19 nt, Artificial Sequence
  Description of Artificial Sequence: Synthetic oligonucleotide
aguguaacuucuagaauag

SEQ ID NO: 2255559 - RNA, 19 nt, Artificial Sequence
  Description of Artificial Sequence: Synthetic oligonucleotide
acauaucuguucauaagag

SEQ ID NO: 2255560 - RNA, 19 nt, Artificial Sequence
  Description of Artificial Sequence: Synthetic oligonucleotide
ucguuuaugucaaccuugu

SEQ ID NO: 2255561 - RNA, 19 nt, Artificial Sequence
  Description of Artificial Sequence: Synthetic oligonucleotide
cuaaaguguaacuucuaga

SEQ ID NO: 2255562 - RNA, 19 nt, Artificial Sequence
  Description of Artificial Sequence: Synthetic oligonucleotide
guucauaagagaacuuuug

SEQ ID NO: 2255563 - RNA, 19 nt, Artificial Sequence
  Description of Artificial Sequence: Synthetic oligonucleotide
ucagcauaauacaggaauu

SEQ ID NO: 2255564 - RNA, 19 nt, Artificial Sequence
  Description of Artificial Sequence: Synthetic oligonucleotide
aaccuaaaguguaacuucu

SEQ ID NO: 2255565 - RNA, 19 nt, Artificial Sequence
  Description of Artificial Sequence: Synthetic oligonucleotide
accacaaacggaaagcucu

SEQ ID NO: 2255566 - RNA, 19 nt, Artificial Sequence
  Description of Artificial Sequence: Synthetic oligonucleotide
aaaacaaccuaaaguguaa

SEQ ID NO: 2255567 - RNA, 19 nt, Artificial Sequence
  Description of Artificial Sequence: Synthetic oligonucleotide
guaucaaauuuauugguua

SEQ ID NO: 2255568 - RNA, 19 nt, Artificial Sequence
  Description of Artificial Sequence: Synthetic oligonucleotide
guaauuuacuucccuggac

SEQ ID NO: 2255569 - RNA, 19 nt, Artificial Sequence
  Description of Artificial Sequence: Synthetic oligonucleotide
ucacuauaguaauuuacuu

SEQ ID NO: 2255570 - RNA, 19 nt, Artificial Sequence
  Description of Artificial Sequence: Synthetic oligonucleotide
uguuugucugaaucagaug

SEQ ID NO: 2255571 - RNA, 19 nt, Artificial Sequence
  Description of Artificial Sequence: Synthetic oligonucleotide
uaagcaggcaacagucaga

SEQ ID NO: 2255572 - RNA, 19 nt, Artificial Sequence
  Description of Artificial Sequence: Synthetic oligonucleotide
uaugcaugcaccgaccauc

SEQ ID NO: 2255573 - RNA, 19 nt, Artificial Sequence
  Description of Artificial Sequence: Synthetic oligonucleotide
uaagagaacuuuugccaac

SEQ ID NO: 2255574 - RNA, 19 nt, Artificial Sequence
  Description of Artificial Sequence: Synthetic oligonucleotide
ugaaucagaugaucugacu

SEQ ID NO: 2255575 - RNA, 19 nt, Artificial Sequence
  Description of Artificial Sequence: Synthetic oligonucleotide
ucuucugaagccagaacuu

SEQ ID NO: 2255576 - RNA, 19 nt, Artificial Sequence
  Description of Artificial Sequence: Synthetic oligonucleotide
uauugguuacauaucuguu

SEQ ID NO: 2255577 - RNA, 19 nt, Artificial Sequence
  Description of Artificial Sequence: Synthetic oligonucleotide
uguguguguguguguaugc

SEQ ID NO: 2255578 - RNA, 19 nt, Artificial Sequence
  Description of Artificial Sequence: Synthetic oligonucleotide
acuuuaaagagagaugauu

SEQ ID NO: 2255579 - RNA, 19 nt, Artificial Sequence
  Description of Artificial Sequence: Synthetic oligonucleotide
aacuucuagaauagugugu

SEQ ID NO: 2255580 - RNA, 19 nt, Artificial Sequence
  Description of Artificial Sequence: Synthetic oligonucleotide
aguguguguguguaugugu

SEQ ID NO: 2255581 - RNA, 19 nt, Artificial Sequence
  Description of Artificial Sequence: Synthetic oligonucleotide
aucaacagcaagaugaguu

SEQ ID NO: 2255582 - RNA, 19 nt, Artificial Sequence
  Description of Artificial Sequence: Synthetic oligonucleotide
uagaauagugugugugugu

SEQ ID NO: 2255583 - RNA, 19 nt, Artificial Sequence
  Description of Artificial Sequence: Synthetic oligonucleotide
aggaauucuuucuuccagu

SEQ ID NO: 2255584 - RNA, 19 nt, Artificial Sequence
  Description of Artificial Sequence: Synthetic oligonucleotide
aucaucaacacuaaaugua

SEQ ID NO: 2255585 - RNA, 19 nt, Artificial Sequence
  Description of Artificial Sequence: Synthetic oligonucleotide
uuccugccauuauuaauag

SEQ ID NO: 2255586 - RNA, 19 nt, Artificial Sequence
  Description of Artificial Sequence: Synthetic oligonucleotide
agaaccucuauaaaauggu

SEQ ID NO: 2255587 - RNA, 19 nt, Artificial Sequence
  Description of Artificial Sequence: Synthetic oligonucleotide
caguuauucagauucugga

SEQ ID NO: 2255588 - RNA, 19 nt, Artificial Sequence
  Description of Artificial Sequence: Synthetic oligonucleotide
ucuauagacaccugccguu

SEQ ID NO: 2255589 - RNA, 19 nt, Artificial Sequence
  Description of Artificial Sequence: Synthetic oligonucleotide
augucaaccuuguugccca

SEQ ID NO: 2255590 - RNA, 19 nt, Artificial Sequence
  Description of Artificial Sequence: Synthetic oligonucleotide
uugggugcaaccgagggaa

SEQ ID NO: 2255591 - RNA, 19 nt, Artificial Sequence
  Description of Artificial Sequence: Synthetic oligonucleotide
cuucccuggaccaagaaua

SEQ ID NO: 2255592 - RNA, 19 nt, Artificial Sequence
  Description of Artificial Sequence: Synthetic oligonucleotide
caucaacacuaaauguaag

SEQ ID NO: 2255593 - RNA, 19 nt, Artificial Sequence
  Description of Artificial Sequence: Synthetic oligonucleotide
gccaucaacagcaagauga

SEQ ID NO: 2255594 - RNA, 19 nt, Artificial Sequence
  Description of Artificial Sequence: Synthetic oligonucleotide
cugaaucagaugaucugac

SEQ ID NO: 2255595 - RNA, 19 nt, Artificial Sequence
  Description of Artificial Sequence: Synthetic oligonucleotide
uucccuggaccaagaauag

SEQ ID NO: 2255596 - RNA, 19 nt, Artificial Sequence
  Description of Artificial Sequence: Synthetic oligonucleotide
ugcgacauugguggaaucc

SEQ ID NO: 2255597 - RNA, 19 nt, Artificial Sequence
  Description of Artificial Sequence: Synthetic oligonucleotide
aaccacaaacggaaagcuc

SEQ ID NO: 2255598 - RNA, 19 nt, Artificial Sequence
  Description of Artificial Sequence: Synthetic oligonucleotide
acaaccuaaaguguaacuu

SEQ ID NO: 2255599 - RNA, 19 nt, Artificial Sequence
  Description of Artificial Sequence: Synthetic oligonucleotide
aucgcucuugaccagcugu

SEQ ID NO: 2255600 - RNA, 19 nt, Artificial Sequence
  Description of Artificial Sequence: Synthetic oligonucleotide
gaccguguuugucugaauc

SEQ ID NO: 2255601 - RNA, 19 nt, Artificial Sequence
  Description of Artificial Sequence: Synthetic oligonucleotide
ugcaccgaccaucucuuca

SEQ ID NO: 2255602 - RNA, 19 nt, Artificial Sequence
  Description of Artificial Sequence: Synthetic oligonucleotide
gaacuuuucgaacggccuc

SEQ ID NO: 2255603 - RNA, 19 nt, Artificial Sequence
  Description of Artificial Sequence: Synthetic oligonucleotide
gaaccucuauaaaauggug

SEQ ID NO: 2255604 - RNA, 19 nt, Artificial Sequence
  Description of Artificial Sequence: Synthetic oligonucleotide
ugguggaauccuuugcacu

SEQ ID NO: 2255605 - RNA, 19 nt, Artificial Sequence
  Description of Artificial Sequence: Synthetic oligonucleotide
accguguuugucugaauca

SEQ ID NO: 2255606 - RNA, 19 nt, Artificial Sequence
  Description of Artificial Sequence: Synthetic oligonucleotide
ucuauaaaaugguguccuc

SEQ ID NO: 2255607 - RNA, 19 nt, Artificial Sequence
  Description of Artificial Sequence: Synthetic oligonucleotide
acggaaagcucucgggcuc

SEQ ID NO: 2255608 - RNA, 19 nt, Artificial Sequence
  Description of Artificial Sequence: Synthetic oligonucleotide
caaaguaaggauggccgcc

SEQ ID NO: 2255609 - RNA, 19 nt, Artificial Sequence
  Description of Artificial Sequence: Synthetic oligonucleotide
uuaugucaaccuuguugcc

SEQ ID NO: 2255610 - RNA, 19 nt, Artificial Sequence
  Description of Artificial Sequence: Synthetic oligonucleotide
ugccaacuccaccaucucc

SEQ ID NO: 2255611 - RNA, 19 nt, Artificial Sequence
  Description of Artificial Sequence: Synthetic oligonucleotide
augaucugacuucucuucu

SEQ ID NO: 2255612 - RNA, 19 nt, Artificial Sequence
  Description of Artificial Sequence: Synthetic oligonucleotide
accaagaauagaaugcuaa

SEQ ID NO: 2255613 - RNA, 19 nt, Artificial Sequence
  Description of Artificial Sequence: Synthetic oligonucleotide
auucaagcaucauuauuuu

SEQ ID NO: 2255614 - RNA, 19 nt, Artificial Sequence
  Description of Artificial Sequence: Synthetic oligonucleotide
uucaagcaucauuauuuuc

SEQ ID NO: 2255615 - RNA, 19 nt, Artificial Sequence
  Description of Artificial Sequence: Synthetic oligonucleotide
auuccuuaguagcucaauu

SEQ ID NO: 2255616 - RNA, 19 nt, Artificial Sequence
  Description of Artificial Sequence: Synthetic oligonucleotide
auaguguguguguguaugu

SEQ ID NO: 2255617 - RNA, 19 nt, Artificial Sequence
  Description of Artificial Sequence: Synthetic oligonucleotide
accaucuccaagaagaauu

SEQ ID NO: 2255618 - RNA, 19 nt, Artificial Sequence
  Description of Artificial Sequence: Synthetic oligonucleotide
cuuguuucaaaguaaggau

SEQ ID NO: 2255619 - RNA, 19 nt, Artificial Sequence
  Description of Artificial Sequence: Synthetic oligonucleotide
ggagcuguuggccagcccc

SEQ ID NO: 2255620 - RNA, 19 nt, Artificial Sequence
  Description of Artificial Sequence: Synthetic oligonucleotide
aaggauggccgccguuguc

SEQ ID NO: 2255621 - RNA, 19 nt, Artificial Sequence
  Description of Artificial Sequence: Synthetic oligonucleotide
guaacuucuagaauagugu

SEQ ID NO: 2255622 - RNA, 19 nt, Artificial Sequence
  Description of Artificial Sequence: Synthetic oligonucleotide
uuucgaacggccuccucaa

SEQ ID NO: 2255623 - RNA, 19 nt, Artificial Sequence
  Description of Artificial Sequence: Synthetic oligonucleotide
aguaucaaauuuauugguu

SEQ ID NO: 2255624 - RNA, 19 nt, Artificial Sequence
  Description of Artificial Sequence: Synthetic oligonucleotide
uguguguguaugugugugu

SEQ ID NO: 2255625 - RNA, 19 nt, Artificial Sequence
  Description of Artificial Sequence: Synthetic oligonucleotide
ucagauuccuuaguagcuc

SEQ ID NO: 2255626 - RNA, 19 nt, Artificial Sequence
  Description of Artificial Sequence: Synthetic oligonucleotide
cuauaaaaugguguccuca

SEQ ID NO: 2255627 - RNA, 19 nt, Artificial Sequence
  Description of Artificial Sequence: Synthetic oligonucleotide
guguguaugugugugugug

SEQ ID NO: 2255628 - RNA, 19 nt, Artificial Sequence
  Description of Artificial Sequence: Synthetic oligonucleotide
ccuaaaguguaacuucuag

SEQ ID NO: 2255629 - RNA, 19 nt, Artificial Sequence
  Description of Artificial Sequence: Synthetic oligonucleotide
uguguguguguguaugcau

SEQ ID NO: 2255630 - RNA, 19 nt, Artificial Sequence
  Description of Artificial Sequence: Synthetic oligonucleotide
uguaugugugugugugugu

SEQ ID NO: 2255631 - RNA, 19 nt, Artificial Sequence
  Description of Artificial Sequence: Synthetic oligonucleotide
guaaggauggccgccguug

SEQ ID NO: 2255632 - RNA, 19 nt, Artificial Sequence
  Description of Artificial Sequence: Synthetic oligonucleotide
cauuauuaauaguaugagu

SEQ ID NO: 2255633 - RNA, 19 nt, Artificial Sequence
  Description of Artificial Sequence: Synthetic oligonucleotide
uguguaugugugugugugu

SEQ ID NO: 2255634 - RNA, 19 nt, Artificial Sequence
  Description of Artificial Sequence: Synthetic oligonucleotide
accuuguugcccaaaacca

SEQ ID NO: 2255635 - RNA, 19 nt, Artificial Sequence
  Description of Artificial Sequence: Synthetic oligonucleotide
aagcuuugagaaucaucaa

SEQ ID NO: 2255636 - RNA, 19 nt, Artificial Sequence
  Description of Artificial Sequence: Synthetic oligonucleotide
cauaauacaggaauucuuu

SEQ ID NO: 2255637 - RNA, 19 nt, Artificial Sequence
  Description of Artificial Sequence: Synthetic oligonucleotide
ccgaccaucucuucaaugc

SEQ ID NO: 2255638 - RNA, 19 nt, Artificial Sequence
  Description of Artificial Sequence: Synthetic oligonucleotide
uuccaguuauucagauucu

SEQ ID NO: 2255639 - RNA, 19 nt, Artificial Sequence
  Description of Artificial Sequence: Synthetic oligonucleotide
uguguguguguaugugugu

SEQ ID NO: 2255640 - RNA, 19 nt, Artificial Sequence
  Description of Artificial Sequence: Synthetic oligonucleotide
aucagaugaucugacuucu

SEQ ID NO: 2255641 - RNA, 19 nt, Artificial Sequence
  Description of Artificial Sequence: Synthetic oligonucleotide
ugccguucguuuaugucaa

SEQ ID NO: 2255642 - RNA, 19 nt, Artificial Sequence
  Description of Artificial Sequence: Synthetic oligonucleotide
gaacggccuccucaaaggc

SEQ ID NO: 2255643 - RNA, 19 nt, Artificial Sequence
  Description of Artificial Sequence: Synthetic oligonucleotide
uucugaagccagaacuuuu

SEQ ID NO: 2255644 - RNA, 19 nt, Artificial Sequence
  Description of Artificial Sequence: Synthetic oligonucleotide
uguguguaugugugugugu

SEQ ID NO: 2255645 - RNA, 19 nt, Artificial Sequence
  Description of Artificial Sequence: Synthetic oligonucleotide
cacaccuaugguguggaag

SEQ ID NO: 2255646 - RNA, 19 nt, Artificial Sequence
  Description of Artificial Sequence: Synthetic oligonucleotide
uugucugaaucagaugauc

SEQ ID NO: 2255647 - RNA, 19 nt, Artificial Sequence
  Description of Artificial Sequence: Synthetic oligonucleotide
ucuguucauaagagaacuu

SEQ ID NO: 2255648 - RNA, 19 nt, Artificial Sequence
  Description of Artificial Sequence: Synthetic oligonucleotide
guguaugugugugugugug

SEQ ID NO: 2255649 - RNA, 19 nt, Artificial Sequence
  Description of Artificial Sequence: Synthetic oligonucleotide
uccucaggcuucggaaucg

SEQ ID NO: 2255650 - RNA, 19 nt, Artificial Sequence
  Description of Artificial Sequence: Synthetic oligonucleotide
aaucgcucuugaccagcug

SEQ ID NO: 2255651 - RNA, 19 nt, Artificial Sequence
  Description of Artificial Sequence: Synthetic oligonucleotide
ccugccauuauuaauagua

SEQ ID NO: 2255652 - RNA, 19 nt, Artificial Sequence
  Description of Artificial Sequence: Synthetic oligonucleotide
uaaggauggccgccguugu

SEQ ID NO: 2255653 - RNA, 19 nt, Artificial Sequence
  Description of Artificial Sequence: Synthetic oligonucleotide
uaguguguguguguaugug

SEQ ID NO: 2255654 - RNA, 19 nt, Artificial Sequence
  Description of Artificial Sequence: Synthetic oligonucleotide
uggaauccuuugcacuugu

SEQ ID NO: 2255655 - RNA, 19 nt, Artificial Sequence
  Description of Artificial Sequence: Synthetic oligonucleotide
agaauagugugugugugua

SEQ ID NO: 2255656 - RNA, 19 nt, Artificial Sequence
  Description of Artificial Sequence: Synthetic oligonucleotide
guguguguguguaugugug

SEQ ID NO: 2255657 - RNA, 19 nt, Artificial Sequence
  Description of Artificial Sequence: Synthetic oligonucleotide
augauuuuccugccauuau

SEQ ID NO: 2255658 - RNA, 19 nt, Artificial Sequence
  Description of Artificial Sequence: Synthetic oligonucleotide
auguguguguguguguaug

SEQ ID NO: 2255659 - RNA, 19 nt, Artificial Sequence
  Description of Artificial Sequence: Synthetic oligonucleotide
guguguguguguaugcaug

SEQ ID NO: 2255660 - RNA, 19 nt, Artificial Sequence
  Description of Artificial Sequence: Synthetic oligonucleotide
ugaguuuggcuucggcuuu

SEQ ID NO: 2255661 - RNA, 19 nt, Artificial Sequence
  Description of Artificial Sequence: Synthetic oligonucleotide
uuacuucccuggaccaaga

SEQ ID NO: 2255662 - RNA, 19 nt, Artificial Sequence
  Description of Artificial Sequence: Synthetic oligonucleotide
gaacuuuugccaacuccac

SEQ ID NO: 2255663 - RNA, 19 nt, Artificial Sequence
  Description of Artificial Sequence: Synthetic oligonucleotide
uaguaucacuauaguaauu

SEQ ID NO: 2255664 - RNA, 19 nt, Artificial Sequence
  Description of Artificial Sequence: Synthetic oligonucleotide
auagacaccugccguucgu

SEQ ID NO: 2255665 - RNA, 19 nt, Artificial Sequence
  Description of Artificial Sequence: Synthetic oligonucleotide
guguguguguaugugugug

SEQ ID NO: 2255666 - RNA, 19 nt, Artificial Sequence
  Description of Artificial Sequence: Synthetic oligonucleotide
uucggugcagauugaccgu

SEQ ID NO: 2255667 - RNA, 19 nt, Artificial Sequence
  Description of Artificial Sequence: Synthetic oligonucleotide
accgaccaucucuucaaug

SEQ ID NO: 2255668 - RNA, 19 nt, Artificial Sequence
  Description of Artificial Sequence: Synthetic oligonucleotide
guguguguaugugugugug

SEQ ID NO: 2255669 - RNA, 19 nt, Artificial Sequence
  Description of Artificial Sequence: Synthetic oligonucleotide
guagcucaauucaagcauc

SEQ ID NO: 2255670 - RNA, 19 nt, Artificial Sequence
  Description of Artificial Sequence: Synthetic oligonucleotide
gagaugauuuuccugccau

SEQ ID NO: 2255671 - RNA, 19 nt, Artificial Sequence
  Description of Artificial Sequence: Synthetic oligonucleotide
cacaaacggaaagcucucg

SEQ ID NO: 2255672 - RNA, 19 nt, Artificial Sequence
  Description of Artificial Sequence: Synthetic oligonucleotide
ucuuccaguuauucagauu

SEQ ID NO: 2255673 - RNA, 19 nt, Artificial Sequence
  Description of Artificial Sequence: Synthetic oligonucleotide
ucagaugaucugacuucuc

SEQ ID NO: 2255674 - RNA, 19 nt, Artificial Sequence
  Description of Artificial Sequence: Synthetic oligonucleotide
uauguguguguguguguau

SEQ ID NO: 2255675 - RNA, 19 nt, Artificial Sequence
  Description of Artificial Sequence: Synthetic oligonucleotide
gagaaucaucaacacuaaa

SEQ ID NO: 2255676 - RNA, 19 nt, Artificial Sequence
  Description of Artificial Sequence: Synthetic oligonucleotide
cuauagacaccugccguuc

SEQ ID NO: 2255677 - RNA, 19 nt, Artificial Sequence
  Description of Artificial Sequence: Synthetic oligonucleotide
auuccacaccuauggugug

SEQ ID NO: 2255678 - RNA, 19 nt, Artificial Sequence
  Description of Artificial Sequence: Synthetic oligonucleotide
gcuugggcuucuucuauag

SEQ ID NO: 2255679 - RNA, 19 nt, Artificial Sequence
  Description of Artificial Sequence: Synthetic oligonucleotide
gcaugguaacaaaaugucc

SEQ ID NO: 2255680 - RNA, 19 nt, Artificial Sequence
  Description of Artificial Sequence: Synthetic oligonucleotide
guaucacuauaguaauuua

SEQ ID NO: 2255681 - RNA, 19 nt, Artificial Sequence
  Description of Artificial Sequence: Synthetic oligonucleotide
cucuauaaaaugguguccu

SEQ ID NO: 2255682 - RNA, 19 nt, Artificial Sequence
  Description of Artificial Sequence: Synthetic oligonucleotide
cagauuccuuaguagcuca

SEQ ID NO: 2255683 - RNA, 19 nt, Artificial Sequence
  Description of Artificial Sequence: Synthetic oligonucleotide
aacggccuccucaaaggca

SEQ ID NO: 2255684 - RNA, 19 nt, Artificial Sequence
  Description of Artificial Sequence: Synthetic oligonucleotide
agcugaguaucaaauuuau

SEQ ID NO: 2255685 - RNA, 19 nt, Artificial Sequence
  Description of Artificial Sequence: Synthetic oligonucleotide
agaaugcuaauuacauaaa

SEQ ID NO: 2255686 - RNA, 19 nt, Artificial Sequence
  Description of Artificial Sequence: Synthetic oligonucleotide
agaugauuuuccugccauu

SEQ ID NO: 2255687 - RNA, 19 nt, Artificial Sequence
  Description of Artificial Sequence: Synthetic oligonucleotide
gagcuguuggccagccccg

SEQ ID NO: 2255688 - RNA, 19 nt, Artificial Sequence
  Description of Artificial Sequence: Synthetic oligonucleotide
aaauguccauccaccucca

SEQ ID NO: 2255689 - RNA, 19 nt, Artificial Sequence
  Description of Artificial Sequence: Synthetic oligonucleotide
ucgggcucuuucacaucag

SEQ ID NO: 2255690 - RNA, 19 nt, Artificial Sequence
  Description of Artificial Sequence: Synthetic oligonucleotide
ccuugcaccaggcuugggc

SEQ ID NO: 2255691 - RNA, 19 nt, Artificial Sequence
  Description of Artificial Sequence: Synthetic oligonucleotide
gagcugaguaucaaauuua

SEQ ID NO: 2255692 - RNA, 19 nt, Artificial Sequence
  Description of Artificial Sequence: Synthetic oligonucleotide
agcaggcaacagucagaac

SEQ ID NO: 2255693 - RNA, 19 nt, Artificial Sequence
  Description of Artificial Sequence: Synthetic oligonucleotide
cuaugguguggaagagcug

SEQ ID NO: 2255694 - RNA, 19 nt, Artificial Sequence
  Description of Artificial Sequence: Synthetic oligonucleotide
uggcuucggcuuucggugc

SEQ ID NO: 2255695 - RNA, 19 nt, Artificial Sequence
  Description of Artificial Sequence: Synthetic oligonucleotide
guguaugcaugcaccgacc

SEQ ID NO: 2255696 - RNA, 19 nt, Artificial Sequence
  Description of Artificial Sequence: Synthetic oligonucleotide
uacuucccuggaccaagaa

SEQ ID NO: 2255697 - RNA, 19 nt, Artificial Sequence
  Description of Artificial Sequence: Synthetic oligonucleotide
ccucuauaaaauggugucc

SEQ ID NO: 2255698 - RNA, 19 nt, Artificial Sequence
  Description of Artificial Sequence: Synthetic oligonucleotide
ccuccucaaaggcagcugc

SEQ ID NO: 2255699 - RNA, 19 nt, Artificial Sequence
  Description of Artificial Sequence: Synthetic oligonucleotide
cuugcaccaggcuugggcu

SEQ ID NO: 2255700 - RNA, 19 nt, Artificial Sequence
  Description of Artificial Sequence: Synthetic oligonucleotide
gacaccugccguucguuua

SEQ ID NO: 2255701 - RNA, 19 nt, Artificial Sequence
  Description of Artificial Sequence: Synthetic oligonucleotide
guaugugugugugugugua

SEQ ID NO: 2255702 - RNA, 19 nt, Artificial Sequence
  Description of Artificial Sequence: Synthetic oligonucleotide
ugguuacauaucuguucau

SEQ ID NO: 2255703 - RNA, 19 nt, Artificial Sequence
  Description of Artificial Sequence: Synthetic oligonucleotide
cacuaaauguaagcaggca

SEQ ID NO: 2255704 - RNA, 19 nt, Artificial Sequence
  Description of Artificial Sequence: Synthetic oligonucleotide
cuugggugcaaccgaggga

SEQ ID NO: 2255705 - RNA, 19 nt, Artificial Sequence
  Description of Artificial Sequence: Synthetic oligonucleotide
auuuacuucccuggaccaa

SEQ ID NO: 2255706 - RNA, 19 nt, Artificial Sequence
  Description of Artificial Sequence: Synthetic oligonucleotide
cgaacggccuccucaaagg

SEQ ID NO: 2255707 - RNA, 19 nt, Artificial Sequence
  Description of Artificial Sequence: Synthetic oligonucleotide
cuggaagcuuugagaauca

SEQ ID NO: 2255708 - RNA, 19 nt, Artificial Sequence
  Description of Artificial Sequence: Synthetic oligonucleotide
uucggcuuucggugcagau

SEQ ID NO: 2255709 - RNA, 19 nt, Artificial Sequence
  Description of Artificial Sequence: Synthetic oligonucleotide
aguaaggauggccgccguu

SEQ ID NO: 2255710 - RNA, 19 nt, Artificial Sequence
  Description of Artificial Sequence: Synthetic oligonucleotide
cuuucacaucagcauaaua

SEQ ID NO: 2255711 - RNA, 19 nt, Artificial Sequence
  Description of Artificial Sequence: Synthetic oligonucleotide
guucguuuaugucaaccuu

SEQ ID NO: 2255712 - RNA, 19 nt, Artificial Sequence
  Description of Artificial Sequence: Synthetic oligonucleotide
aggcuugggcuucuucuau

SEQ ID NO: 2255713 - RNA, 19 nt, Artificial Sequence
  Description of Artificial Sequence: Synthetic oligonucleotide
ggaaucgcucuugaccagc

SEQ ID NO: 2255714 - RNA, 19 nt, Artificial Sequence
  Description of Artificial Sequence: Synthetic oligonucleotide
uggccagccccgcuugggu

SEQ ID NO: 2255715 - RNA, 19 nt, Artificial Sequence
  Description of Artificial Sequence: Synthetic oligonucleotide
accugccguucguuuaugu

SEQ ID NO: 2255716 - RNA, 19 nt, Artificial Sequence
  Description of Artificial Sequence: Synthetic oligonucleotide
augcaugcaccgaccaucu

SEQ ID NO: 2255717 - RNA, 19 nt, Artificial Sequence
  Description of Artificial Sequence: Synthetic oligonucleotide
ucggcuuucggugcagauu

SEQ ID NO: 2255718 - RNA, 19 nt, Artificial Sequence
  Description of Artificial Sequence: Synthetic oligonucleotide
guguguguguguguaugca

SEQ ID NO: 2255719 - RNA, 19 nt, Artificial Sequence
  Description of Artificial Sequence: Synthetic oligonucleotide
gguuacauaucuguucaua

SEQ ID NO: 2255720 - RNA, 19 nt, Artificial Sequence
  Description of Artificial Sequence: Synthetic oligonucleotide
ucccuggaccaagaauaga

SEQ ID NO: 2255721 - RNA, 19 nt, Artificial Sequence
  Description of Artificial Sequence: Synthetic oligonucleotide
augcaccgaccaucucuuc

SEQ ID NO: 2255722 - RNA, 19 nt, Artificial Sequence
  Description of Artificial Sequence: Synthetic oligonucleotide
cccuggaccaagaauagaa

SEQ ID NO: 2255723 - RNA, 19 nt, Artificial Sequence
  Description of Artificial Sequence: Synthetic oligonucleotide
agacaccugccguucguuu

SEQ ID NO: 2255724 - RNA, 19 nt, Artificial Sequence
  Description of Artificial Sequence: Synthetic oligonucleotide
uucgaacggccuccucaaa

SEQ ID NO: 2255725 - RNA, 19 nt, Artificial Sequence
  Description of Artificial Sequence: Synthetic oligonucleotide
ugcaccaggcuugggcuuc

SEQ ID NO: 2255726 - RNA, 19 nt, Artificial Sequence
  Description of Artificial Sequence: Synthetic oligonucleotide
acgccccgggagcuguugg

SEQ ID NO: 2255727 - RNA, 19 nt, Artificial Sequence
  Description of Artificial Sequence: Synthetic oligonucleotide
guccauccaccuccaaauc

SEQ ID NO: 2255728 - RNA, 19 nt, Artificial Sequence
  Description of Artificial Sequence: Synthetic oligonucleotide
gaauaguguguguguguau

SEQ ID NO: 2255729 - RNA, 19 nt, Artificial Sequence
  Description of Artificial Sequence: Synthetic oligonucleotide
gaccaagaauagaaugcua

SEQ ID NO: 2255730 - RNA, 19 nt, Artificial Sequence
  Description of Artificial Sequence: Synthetic oligonucleotide
caccuaugguguggaagag

SEQ ID NO: 2255731 - RNA, 19 nt, Artificial Sequence
  Description of Artificial Sequence: Synthetic oligonucleotide
cuguucauaagagaacuuu

SEQ ID NO: 2255732 - RNA, 19 nt, Artificial Sequence
  Description of Artificial Sequence: Synthetic oligonucleotide
ccgccguuguccuugcacc

SEQ ID NO: 2255733 - RNA, 19 nt, Artificial Sequence
  Description of Artificial Sequence: Synthetic oligonucleotide
cuugggcuucuucuauaga

SEQ ID NO: 2255734 - RNA, 19 nt, Artificial Sequence
  Description of Artificial Sequence: Synthetic oligonucleotide
uggaagcuuugagaaucau

SEQ ID NO: 2255735 - RNA, 19 nt, Artificial Sequence
  Description of Artificial Sequence: Synthetic oligonucleotide
ccguguuugucugaaucag

SEQ ID NO: 2255736 - RNA, 19 nt, Artificial Sequence
  Description of Artificial Sequence: Synthetic oligonucleotide
guguguaugcaugcaccga

SEQ ID NO: 2255737 - RNA, 19 nt, Artificial Sequence
  Description of Artificial Sequence: Synthetic oligonucleotide
gcaugcaccgaccaucucu

SEQ ID NO: 2255738 - RNA, 19 nt, Artificial Sequence
  Description of Artificial Sequence: Synthetic oligonucleotide
ccguucguuuaugucaacc

SEQ ID NO: 2255739 - RNA, 19 nt, Artificial Sequence
  Description of Artificial Sequence: Synthetic oligonucleotide
gauuccuuaguagcucaau

SEQ ID NO: 2255740 - RNA, 19 nt, Artificial Sequence
  Description of Artificial Sequence: Synthetic oligonucleotide
ccucaaaggcagcugcgac

SEQ ID NO: 2255741 - RNA, 19 nt, Artificial Sequence
  Description of Artificial Sequence: Synthetic oligonucleotide
gguggaauccuuugcacuu

SEQ ID NO: 2255742 - RNA, 19 nt, Artificial Sequence
  Description of Artificial Sequence: Synthetic oligonucleotide
ugucaaccuuguugcccaa

SEQ ID NO: 2255743 - RNA, 19 nt, Artificial Sequence
  Description of Artificial Sequence: Synthetic oligonucleotide
ugaccguguuugucugaau

SEQ ID NO: 2255744 - RNA, 19 nt, Artificial Sequence
  Description of Artificial Sequence: Synthetic oligonucleotide
uagacaccugccguucguu

SEQ ID NO: 2255745 - RNA, 19 nt, Artificial Sequence
  Description of Artificial Sequence: Synthetic oligonucleotide
ccuuaguagcucaauucaa

SEQ ID NO: 2255746 - RNA, 19 nt, Artificial Sequence
  Description of Artificial Sequence: Synthetic oligonucleotide
ugcaugcaccgaccaucuc

SEQ ID NO: 2255747 - RNA, 19 nt, Artificial Sequence
  Description of Artificial Sequence: Synthetic oligonucleotide
agauuccuuaguagcucaa

SEQ ID NO: 2255748 - RNA, 19 nt, Artificial Sequence
  Description of Artificial Sequence: Synthetic oligonucleotide
ccagaacuuuucgaacggc

SEQ ID NO: 2255749 - RNA, 19 nt, Artificial Sequence
  Description of Artificial Sequence: Synthetic oligonucleotide
ccacaaacggaaagcucuc

SEQ ID NO: 2255750 - RNA, 19 nt, Artificial Sequence
  Description of Artificial Sequence: Synthetic oligonucleotide
cuucuagaauagugugugu

SEQ ID NO: 2255751 - RNA, 19 nt, Artificial Sequence
  Description of Artificial Sequence: Synthetic oligonucleotide
gggcucuuucacaucagca

SEQ ID NO: 2255752 - RNA, 19 nt, Artificial Sequence
  Description of Artificial Sequence: Synthetic oligonucleotide
agcugcgacauugguggaa

SEQ ID NO: 2255753 - RNA, 19 nt, Artificial Sequence
  Description of Artificial Sequence: Synthetic oligonucleotide
caugcaccgaccaucucuu

SEQ ID NO: 2255754 - RNA, 19 nt, Artificial Sequence
  Description of Artificial Sequence: Synthetic oligonucleotide
gaaucgcucuugaccagcu

SEQ ID NO: 2255755 - RNA, 19 nt, Artificial Sequence
  Description of Artificial Sequence: Synthetic oligonucleotide
ccguuguccuugcaccagg

SEQ ID NO: 2255756 - RNA, 19 nt, Artificial Sequence
  Description of Artificial Sequence: Synthetic oligonucleotide
gcuucggaaucgcucuuga

SEQ ID NO: 2255757 - RNA, 19 nt, Artificial Sequence
  Description of Artificial Sequence: Synthetic oligonucleotide
gcaccgaccaucucuucaa

SEQ ID NO: 2255758 - RNA, 19 nt, Artificial Sequence
  Description of Artificial Sequence: Synthetic oligonucleotide
cagcaagaugaguuuggcu

SEQ ID NO: 2255759 - RNA, 19 nt, Artificial Sequence
  Description of Artificial Sequence: Synthetic oligonucleotide
gccgccguuguccuugcac

SEQ ID NO: 2255760 - RNA, 19 nt, Artificial Sequence
  Description of Artificial Sequence: Synthetic oligonucleotide
ggugcaaccgagggaagaa

SEQ ID NO: 2255761 - RNA, 19 nt, Artificial Sequence
  Description of Artificial Sequence: Synthetic oligonucleotide
agccccgcuugggugcaac

SEQ ID NO: 2255762 - RNA, 19 nt, Artificial Sequence
  Description of Artificial Sequence: Synthetic oligonucleotide
uccuugcaccaggcuuggg

SEQ ID NO: 2255763 - RNA, 19 nt, Artificial Sequence
  Description of Artificial Sequence: Synthetic oligonucleotide
cugcgacauugguggaauc

SEQ ID NO: 2255764 - RNA, 19 nt, Artificial Sequence
  Description of Artificial Sequence: Synthetic oligonucleotide
guaugcaugcaccgaccau

SEQ ID NO: 2255765 - RNA, 19 nt, Artificial Sequence
  Description of Artificial Sequence: Synthetic oligonucleotide
gcauaauacaggaauucuu

SEQ ID NO: 2255766 - RNA, 19 nt, Artificial Sequence
  Description of Artificial Sequence: Synthetic oligonucleotide
ggcuucggaaucgcucuug

SEQ ID NO: 2255767 - RNA, 19 nt, Artificial Sequence
  Description of Artificial Sequence: Synthetic oligonucleotide
gacgccccgggagcuguug

SEQ ID NO: 2255768 - RNA, 19 nt, Artificial Sequence
  Description of Artificial Sequence: Synthetic oligonucleotide
ccgcuugggugcaaccgag

SEQ ID NO: 2255769 - RNA, 19 nt, Artificial Sequence
  Description of Artificial Sequence: Synthetic oligonucleotide
ccaagaauagaaugcuaau

SEQ ID NO: 2255770 - RNA, 19 nt, Artificial Sequence
  Description of Artificial Sequence: Synthetic oligonucleotide
aggacgccccgggagcugu

SEQ ID NO: 2255771 - RNA, 19 nt, Artificial Sequence
  Description of Artificial Sequence: Synthetic oligonucleotide
aggcuucggaaucgcucuu

SEQ ID NO: 2255772 - RNA, 19 nt, Artificial Sequence
  Description of Artificial Sequence: Synthetic oligonucleotide
gccguuguccuugcaccag

SEQ ID NO: 2255773 - RNA, 19 nt, Artificial Sequence
  Description of Artificial Sequence: Synthetic oligonucleotide
guguaacuucuagaauagu

SEQ ID NO: 2255774 - RNA, 19 nt, Artificial Sequence
  Description of Artificial Sequence: Synthetic oligonucleotide
gugcagauugaccguguuu

SEQ ID NO: 2255775 - RNA, 19 nt, Artificial Sequence
  Description of Artificial Sequence: Synthetic oligonucleotide
ccaggcuugggcuucuucu

SEQ ID NO: 2255776 - RNA, 19 nt, Artificial Sequence
  Description of Artificial Sequence: Synthetic oligonucleotide
cguguuugucugaaucaga

SEQ ID NO: 2255777 - RNA, 19 nt, Artificial Sequence
  Description of Artificial Sequence: Synthetic oligonucleotide
gggugcaaccgagggaaga

SEQ ID NO: 2255778 - RNA, 19 nt, Artificial Sequence
  Description of Artificial Sequence: Synthetic oligonucleotide
ggcaacagucagaaccucu

SEQ ID NO: 2255779 - RNA, 19 nt, Artificial Sequence
  Description of Artificial Sequence: Synthetic oligonucleotide
ggcuucggcuuucggugca

SEQ ID NO: 2255780 - RNA, 19 nt, Artificial Sequence
  Description of Artificial Sequence: Synthetic oligonucleotide
gcgacauugguggaauccu

SEQ ID NO: 2255781 - RNA, 19 nt, Artificial Sequence
  Description of Artificial Sequence: Synthetic oligonucleotide
gcagauugaccguguuugu

SEQ ID NO: 2255782 - RNA, 19 nt, Artificial Sequence
  Description of Artificial Sequence: Synthetic oligonucleotide
cucaggcuucggaaucgcu

SEQ ID NO: 2255783 - RNA, 19 nt, Artificial Sequence
  Description of Artificial Sequence: Synthetic oligonucleotide
caccugccguucguuuaug

SEQ ID NO: 2255784 - RNA, 19 nt, Artificial Sequence
  Description of Artificial Sequence: Synthetic oligonucleotide
cuucggcuuucggugcaga

SEQ ID NO: 2255785 - RNA, 19 nt, Artificial Sequence
  Description of Artificial Sequence: Synthetic oligonucleotide
gcuucggcuuucggugcag

SEQ ID NO: 2255786 - RNA, 19 nt, Artificial Sequence
  Description of Artificial Sequence: Synthetic oligonucleotide
cggaaucgcucuugaccag

SEQ ID NO: 2255787 - RNA, 19 nt, Artificial Sequence
  Description of Artificial Sequence: Synthetic oligonucleotide
cccgcuugggugcaaccga

SEQ ID NO: 2255788 - RNA, 19 nt, Artificial Sequence
  Description of Artificial Sequence: Synthetic oligonucleotide
ccuggaccaagaauagaau

SEQ ID NO: 2255789 - RNA, 19 nt, Artificial Sequence
  Description of Artificial Sequence: Synthetic oligonucleotide
cagcugcgacauuggugga

SEQ ID NO: 2255790 - RNA, 19 nt, Artificial Sequence
  Description of Artificial Sequence: Synthetic oligonucleotide
caccaucuccaagaagaau

SEQ ID NO: 2255791 - RNA, 19 nt, Artificial Sequence
  Description of Artificial Sequence: Synthetic oligonucleotide
caggacgccccgggagcug

SEQ ID NO: 2255792 - RNA, 19 nt, Artificial Sequence
  Description of Artificial Sequence: Synthetic oligonucleotide
gccccgcuugggugcaacc

SEQ ID NO: 2255793 - RNA, 19 nt, Artificial Sequence
  Description of Artificial Sequence: Synthetic oligonucleotide
gcugcgacauugguggaau

SEQ ID NO: 2255794 - RNA, 19 nt, Artificial Sequence
  Description of Artificial Sequence: Synthetic oligonucleotide
ggugcagauugaccguguu

SEQ ID NO: 2255795 - RNA, 19 nt, Artificial Sequence
  Description of Artificial Sequence: Synthetic oligonucleotide
ggauggccgccguuguccu

SEQ ID NO: 2255796 - RNA, 19 nt, Artificial Sequence
  Description of Artificial Sequence: Synthetic oligonucleotide
gccguucguuuaugucaac

SEQ ID NO: 2255797 - RNA, 19 nt, Artificial Sequence
  Description of Artificial Sequence: Synthetic oligonucleotide
gcugaguaucaaauuuauu

SEQ ID NO: 2255798 - RNA, 19 nt, Artificial Sequence
  Description of Artificial Sequence: Synthetic oligonucleotide
ggcuuucggugcagauuga

SEQ ID NO: 2255799 - RNA, 19 nt, Artificial Sequence
  Description of Artificial Sequence: Synthetic oligonucleotide
caccgaccaucucuucaau

SEQ ID NO: 2255800 - RNA, 19 nt, Artificial Sequence
  Description of Artificial Sequence: Synthetic oligonucleotide
ggaauccuuugcacuuguu

SEQ ID NO: 2255801 - RNA, 19 nt, Artificial Sequence
  Description of Artificial Sequence: Synthetic oligonucleotide
ccacaccuaugguguggaa

SEQ ID NO: 2255802 - RNA, 19 nt, Artificial Sequence
  Description of Artificial Sequence: Synthetic oligonucleotide
caaaggcagcugcgacauu

SEQ ID NO: 2255803 - RNA, 19 nt, Artificial Sequence
  Description of Artificial Sequence: Synthetic oligonucleotide
ggccgccguuguccuugca

SEQ ID NO: 2255804 - RNA, 19 nt, Artificial Sequence
  Description of Artificial Sequence: Synthetic oligonucleotide
cguuuaugucaaccuuguu

SEQ ID NO: 2255805 - RNA, 19 nt, Artificial Sequence
  Description of Artificial Sequence: Synthetic oligonucleotide
cggugcagauugaccgugu

SEQ ID NO: 2255806 - RNA, 19 nt, Artificial Sequence
  Description of Artificial Sequence: Synthetic oligonucleotide
cagccccgcuugggugcaa

SEQ ID NO: 2255807 - RNA, 19 nt, Artificial Sequence
  Description of Artificial Sequence: Synthetic oligonucleotide
aaaagcaugacuucucugg

SEQ ID NO: 2255808 - RNA, 19 nt, Artificial Sequence
  Description of Artificial Sequence: Synthetic oligonucleotide
aacauaguaguuaacaggg

SEQ ID NO: 2255809 - RNA, 19 nt, Artificial Sequence
  Description of Artificial Sequence: Synthetic oligonucleotide
gauuuuaccacuugggucc

SEQ ID NO: 2255810 - RNA, 19 nt, Artificial Sequence
  Description of Artificial Sequence: Synthetic oligonucleotide
uaaucuaacaggauaagca

SEQ ID NO: 2255811 - RNA, 19 nt, Artificial Sequence
  Description of Artificial Sequence: Synthetic oligonucleotide
aacaggauaagcaacacuc

SEQ ID NO: 2255812 - RNA, 19 nt, Artificial Sequence
  Description of Artificial Sequence: Synthetic oligonucleotide
gaguuuguaacguagagac

SEQ ID NO: 2255813 - RNA, 19 nt, Artificial Sequence
  Description of Artificial Sequence: Synthetic oligonucleotide
uuagguuccacaaugcuca

SEQ ID NO: 2255814 - RNA, 19 nt, Artificial Sequence
  Description of Artificial Sequence: Synthetic oligonucleotide
ugagcaauggcacacagac

SEQ ID NO: 2255815 - RNA, 19 nt, Artificial Sequence
  Description of Artificial Sequence: Synthetic oligonucleotide
uaagcaacacuccucaggc

SEQ ID NO: 2255816 - RNA, 19 nt, Artificial Sequence
  Description of Artificial Sequence: Synthetic oligonucleotide
ucaacauaguaguuaacag

SEQ ID NO: 2255817 - RNA, 19 nt, Artificial Sequence
  Description of Artificial Sequence: Synthetic oligonucleotide
ucuguacaggacaacaucc

SEQ ID NO: 2255818 - RNA, 19 nt, Artificial Sequence
  Description of Artificial Sequence: Synthetic oligonucleotide
aaugaaccgaagcacacca

SEQ ID NO: 2255819 - RNA, 19 nt, Artificial Sequence
  Description of Artificial Sequence: Synthetic oligonucleotide
ucuaacaggauaagcaaca

SEQ ID NO: 2255820 - RNA, 19 nt, Artificial Sequence
  Description of Artificial Sequence: Synthetic oligonucleotide
aacguagagacucugccug

SEQ ID NO: 2255821 - RNA, 19 nt, Artificial Sequence
  Description of Artificial Sequence: Synthetic oligonucleotide
auaagcaacacuccucagg

SEQ ID NO: 2255822 - RNA, 19 nt, Artificial Sequence
  Description of Artificial Sequence: Synthetic oligonucleotide
ucugcauaaagcucuacgc

SEQ ID NO: 2255823 - RNA, 19 nt, Artificial Sequence
  Description of Artificial Sequence: Synthetic oligonucleotide
cauaacucagucacaaucc

SEQ ID NO: 2255824 - RNA, 19 nt, Artificial Sequence
  Description of Artificial Sequence: Synthetic oligonucleotide
aaucuaacaggauaagcaa

SEQ ID NO: 2255825 - RNA, 19 nt, Artificial Sequence
  Description of Artificial Sequence: Synthetic oligonucleotide
ucacaauccagucaggccu

SEQ ID NO: 2255826 - RNA, 19 nt, Artificial Sequence
  Description of Artificial Sequence: Synthetic oligonucleotide
uacaggacaacauccagcc

SEQ ID NO: 2255827 - RNA, 19 nt, Artificial Sequence
  Description of Artificial Sequence: Synthetic oligonucleotide
uaccgcaguaucaacauag

SEQ ID NO: 2255828 - RNA, 19 nt, Artificial Sequence
  Description of Artificial Sequence: Synthetic oligonucleotide
uaaaauaaugauuucuguu

SEQ ID NO: 2255829 - RNA, 19 nt, Artificial Sequence
  Description of Artificial Sequence: Synthetic oligonucleotide
uugucuuugugcaagauuu

SEQ ID NO: 2255830 - RNA, 19 nt, Artificial Sequence
  Description of Artificial Sequence: Synthetic oligonucleotide
aaccgaagcacaccauagc

SEQ ID NO: 2255831 - RNA, 19 nt, Artificial Sequence
  Description of Artificial Sequence: Synthetic oligonucleotide
ucaacucucugauucgacg

SEQ ID NO: 2255832 - RNA, 19 nt, Artificial Sequence
  Description of Artificial Sequence: Synthetic oligonucleotide
auuaaaugucuguacagga

SEQ ID NO: 2255833 - RNA, 19 nt, Artificial Sequence
  Description of Artificial Sequence: Synthetic oligonucleotide
ugaacuaccgcagucaacu

SEQ ID NO: 2255834 - RNA, 19 nt, Artificial Sequence
  Description of Artificial Sequence: Synthetic oligonucleotide
uucugguugguguaacucg

SEQ ID NO: 2255835 - RNA, 19 nt, Artificial Sequence
  Description of Artificial Sequence: Synthetic oligonucleotide
ugcauaaagcucuacgcug

SEQ ID NO: 2255836 - RNA, 19 nt, Artificial Sequence
  Description of Artificial Sequence: Synthetic oligonucleotide
ucugcuuugaagaugccau

SEQ ID NO: 2255837 - RNA, 19 nt, Artificial Sequence
  Description of Artificial Sequence: Synthetic oligonucleotide
agaugcagcugccaagacc

SEQ ID NO: 2255838 - RNA, 19 nt, Artificial Sequence
  Description of Artificial Sequence: Synthetic oligonucleotide
uuaaucuaacaggauaagc

SEQ ID NO: 2255839 - RNA, 19 nt, Artificial Sequence
  Description of Artificial Sequence: Synthetic oligonucleotide
aacucucugauucgacgac

SEQ ID NO: 2255840 - RNA, 19 nt, Artificial Sequence
  Description of Artificial Sequence: Synthetic oligonucleotide
acuucaacucccgaguagc

SEQ ID NO: 2255841 - RNA, 19 nt, Artificial Sequence
  Description of Artificial Sequence: Synthetic oligonucleotide
gauucgacgacccuucuca

SEQ ID NO: 2255842 - RNA, 19 nt, Artificial Sequence
  Description of Artificial Sequence: Synthetic oligonucleotide
guuuguaacguagagacuc

SEQ ID NO: 2255843 - RNA, 19 nt, Artificial Sequence
  Description of Artificial Sequence: Synthetic oligonucleotide
guuaacagggucuccacug

SEQ ID NO: 2255844 - RNA, 19 nt, Artificial Sequence
  Description of Artificial Sequence: Synthetic oligonucleotide
cuguuuaugcuguaggcac

SEQ ID NO: 2255845 - RNA, 19 nt, Artificial Sequence
  Description of Artificial Sequence: Synthetic oligonucleotide
accaagaacauuuuguguu

SEQ ID NO: 2255846 - RNA, 19 nt, Artificial Sequence
  Description of Artificial Sequence: Synthetic oligonucleotide
cuaggaguuuguaacguag

SEQ ID NO: 2255847 - RNA, 19 nt, Artificial Sequence
  Description of Artificial Sequence: Synthetic oligonucleotide
guaacguagagacucugcc

SEQ ID NO: 2255848 - RNA, 19 nt, Artificial Sequence
  Description of Artificial Sequence: Synthetic oligonucleotide
uguaacguagagacucugc

SEQ ID NO: 2255849 - RNA, 19 nt, Artificial Sequence
  Description of Artificial Sequence: Synthetic oligonucleotide
aaagcaugacuucucuggu

SEQ ID NO: 2255850 - RNA, 19 nt, Artificial Sequence
  Description of Artificial Sequence: Synthetic oligonucleotide
agcucugcuuugaagaugc

SEQ ID NO: 2255851 - RNA, 19 nt, Artificial Sequence
  Description of Artificial Sequence: Synthetic oligonucleotide
agaacauuuuguguucugg

SEQ ID NO: 2255852 - RNA, 19 nt, Artificial Sequence
  Description of Artificial Sequence: Synthetic oligonucleotide
agucacaauccagucaggc

SEQ ID NO: 2255853 - RNA, 19 nt, Artificial Sequence
  Description of Artificial Sequence: Synthetic oligonucleotide
auggacuuggcucucuguc

SEQ ID NO: 2255854 - RNA, 19 nt, Artificial Sequence
  Description of Artificial Sequence: Synthetic oligonucleotide
auccuuagguuccacaaug

SEQ ID NO: 2255855 - RNA, 19 nt, Artificial Sequence
  Description of Artificial Sequence: Synthetic oligonucleotide
acaacauccagccuccaga

SEQ ID NO: 2255856 - RNA, 19 nt, Artificial Sequence
  Description of Artificial Sequence: Synthetic oligonucleotide
ucgacgacccuucucacca

SEQ ID NO: 2255857 - RNA, 19 nt, Artificial Sequence
  Description of Artificial Sequence: Synthetic oligonucleotide
cuuagguuccacaaugcuc

SEQ ID NO: 2255858 - RNA, 19 nt, Artificial Sequence
  Description of Artificial Sequence: Synthetic oligonucleotide
cuccauaaugaaccgaagc

SEQ ID NO: 2255859 - RNA, 19 nt, Artificial Sequence
  Description of Artificial Sequence: Synthetic oligonucleotide
aagcaugacuucucugguc

SEQ ID NO: 2255860 - RNA, 19 nt, Artificial Sequence
  Description of Artificial Sequence: Synthetic oligonucleotide
cauuuuguguucugguggc

SEQ ID NO: 2255861 - RNA, 19 nt, Artificial Sequence
  Description of Artificial Sequence: Synthetic oligonucleotide
uguucugguggcuaaaaua

SEQ ID NO: 2255862 - RNA, 19 nt, Artificial Sequence
  Description of Artificial Sequence: Synthetic oligonucleotide
uggaucaucagcccaucca

SEQ ID NO: 2255863 - RNA, 19 nt, Artificial Sequence
  Description of Artificial Sequence: Synthetic oligonucleotide
uuaugcuguaggcacuggc

SEQ ID NO: 2255864 - RNA, 19 nt, Artificial Sequence
  Description of Artificial Sequence: Synthetic oligonucleotide
agcaugacuucucugguca

SEQ ID NO: 2255865 - RNA, 19 nt, Artificial Sequence
  Description of Artificial Sequence: Synthetic oligonucleotide
aggaguuuguaacguagag

SEQ ID NO: 2255866 - RNA, 19 nt, Artificial Sequence
  Description of Artificial Sequence: Synthetic oligonucleotide
gccaacauaacucagucac

SEQ ID NO: 2255867 - RNA, 19 nt, Artificial Sequence
  Description of Artificial Sequence: Synthetic oligonucleotide
aacucagucacaauccagu

SEQ ID NO: 2255868 - RNA, 19 nt, Artificial Sequence
  Description of Artificial Sequence: Synthetic oligonucleotide
auaaugaaccgaagcacac

SEQ ID NO: 2255869 - RNA, 19 nt, Artificial Sequence
  Description of Artificial Sequence: Synthetic oligonucleotide
ugcucacaugaucaggcag

SEQ ID NO: 2255870 - RNA, 19 nt, Artificial Sequence
  Description of Artificial Sequence: Synthetic oligonucleotide
aacuaccgcagucaacucu

SEQ ID NO: 2255871 - RNA, 19 nt, Artificial Sequence
  Description of Artificial Sequence: Synthetic oligonucleotide
agcaacacuccucaggcca

SEQ ID NO: 2255872 - RNA, 19 nt, Artificial Sequence
  Description of Artificial Sequence: Synthetic oligonucleotide
agcuuaaucuaacaggaua

SEQ ID NO: 2255873 - RNA, 19 nt, Artificial Sequence
  Description of Artificial Sequence: Synthetic oligonucleotide
cauaaugaaccgaagcaca

SEQ ID NO: 2255874 - RNA, 19 nt, Artificial Sequence
  Description of Artificial Sequence: Synthetic oligonucleotide
accacaaccucacagcccu

SEQ ID NO: 2255875 - RNA, 19 nt, Artificial Sequence
  Description of Artificial Sequence: Synthetic oligonucleotide
ucggacuucaacucccgag

SEQ ID NO: 2255876 - RNA, 19 nt, Artificial Sequence
  Description of Artificial Sequence: Synthetic oligonucleotide
ucugauucgacgacccuuc

SEQ ID NO: 2255877 - RNA, 19 nt, Artificial Sequence
  Description of Artificial Sequence: Synthetic oligonucleotide
guaucaacauaguaguuaa

SEQ ID NO: 2255878 - RNA, 19 nt, Artificial Sequence
  Description of Artificial Sequence: Synthetic oligonucleotide
aucuaacaggauaagcaac

SEQ ID NO: 2255879 - RNA, 19 nt, Artificial Sequence
  Description of Artificial Sequence: Synthetic oligonucleotide
uaacaggauaagcaacacu

SEQ ID NO: 2255880 - RNA, 19 nt, Artificial Sequence
  Description of Artificial Sequence: Synthetic oligonucleotide
caggacaacauccagccuc

SEQ ID NO: 2255881 - RNA, 19 nt, Artificial Sequence
  Description of Artificial Sequence: Synthetic oligonucleotide
acaggauaagcaacacucc

SEQ ID NO: 2255882 - RNA, 19 nt, Artificial Sequence
  Description of Artificial Sequence: Synthetic oligonucleotide
ucagcucugcucaagcccu

SEQ ID NO: 2255883 - RNA, 19 nt, Artificial Sequence
  Description of Artificial Sequence: Synthetic oligonucleotide
uaacucggacuucaacucc

SEQ ID NO: 2255884 - RNA, 19 nt, Artificial Sequence
  Description of Artificial Sequence: Synthetic oligonucleotide
gaguacauggcguaccgca

SEQ ID NO: 2255885 - RNA, 19 nt, Artificial Sequence
  Description of Artificial Sequence: Synthetic oligonucleotide
auaacucagucacaaucca

SEQ ID NO: 2255886 - RNA, 19 nt, Artificial Sequence
  Description of Artificial Sequence: Synthetic oligonucleotide
uuuguaacguagagacucu

SEQ ID NO: 2255887 - RNA, 19 nt, Artificial Sequence
  Description of Artificial Sequence: Synthetic oligonucleotide
aaacuucauggacuuggcu

SEQ ID NO: 2255888 - RNA, 19 nt, Artificial Sequence
  Description of Artificial Sequence: Synthetic oligonucleotide
acuuugaugcccagcacac

SEQ ID NO: 2255889 - RNA, 19 nt, Artificial Sequence
  Description of Artificial Sequence: Synthetic oligonucleotide
ugcuguaggcacuggcugg

SEQ ID NO: 2255890 - RNA, 19 nt, Artificial Sequence
  Description of Artificial Sequence: Synthetic oligonucleotide
aggaguacauggcguaccg

SEQ ID NO: 2255891 - RNA, 19 nt, Artificial Sequence
  Description of Artificial Sequence: Synthetic oligonucleotide
ucaacucccgaguagccgu

SEQ ID NO: 2255892 - RNA, 19 nt, Artificial Sequence
  Description of Artificial Sequence: Synthetic oligonucleotide
cucuacgcugcccucaggg

SEQ ID NO: 2255893 - RNA, 19 nt, Artificial Sequence
  Description of Artificial Sequence: Synthetic oligonucleotide
ccacucuccauaaugaacc

SEQ ID NO: 2255894 - RNA, 19 nt, Artificial Sequence
  Description of Artificial Sequence: Synthetic oligonucleotide
aaccucuucugaacuaccg

SEQ ID NO: 2255895 - RNA, 19 nt, Artificial Sequence
  Description of Artificial Sequence: Synthetic oligonucleotide
ucucaccaagaacauuuug

SEQ ID NO: 2255896 - RNA, 19 nt, Artificial Sequence
  Description of Artificial Sequence: Synthetic oligonucleotide
uucaacucccgaguagccg

SEQ ID NO: 2255897 - RNA, 19 nt, Artificial Sequence
  Description of Artificial Sequence: Synthetic oligonucleotide
ugaaccgaagcacaccaua

SEQ ID NO: 2255898 - RNA, 19 nt, Artificial Sequence
  Description of Artificial Sequence: Synthetic oligonucleotide
cuuggaaaucugcaccgcc

SEQ ID NO: 2255899 - RNA, 19 nt, Artificial Sequence
  Description of Artificial Sequence: Synthetic oligonucleotide
uaggaguuuguaacguaga

SEQ ID NO: 2255900 - RNA, 19 nt, Artificial Sequence
  Description of Artificial Sequence: Synthetic oligonucleotide
uccuuagguuccacaaugc

SEQ ID NO: 2255901 - RNA, 19 nt, Artificial Sequence
  Description of Artificial Sequence: Synthetic oligonucleotide
cgcaguaucaacauaguag

SEQ ID NO: 2255902 - RNA, 19 nt, Artificial Sequence
  Description of Artificial Sequence: Synthetic oligonucleotide
uaacguagagacucugccu

SEQ ID NO: 2255903 - RNA, 19 nt, Artificial Sequence
  Description of Artificial Sequence: Synthetic oligonucleotide
uguuuaugcuguaggcacu

SEQ ID NO: 2255904 - RNA, 19 nt, Artificial Sequence
  Description of Artificial Sequence: Synthetic oligonucleotide
gacuucaacucccgaguag

SEQ ID NO: 2255905 - RNA, 19 nt, Artificial Sequence
  Description of Artificial Sequence: Synthetic oligonucleotide
gucacaauccagucaggcc

SEQ ID NO: 2255906 - RNA, 19 nt, Artificial Sequence
  Description of Artificial Sequence: Synthetic oligonucleotide
gaaccgaagcacaccauag

SEQ ID NO: 2255907 - RNA, 19 nt, Artificial Sequence
  Description of Artificial Sequence: Synthetic oligonucleotide
cuccuaggaguuuguaacg

SEQ ID NO: 2255908 - RNA, 19 nt, Artificial Sequence
  Description of Artificial Sequence: Synthetic oligonucleotide
aggcccuucgcacagcaag

SEQ ID NO: 2255909 - RNA, 19 nt, Artificial Sequence
  Description of Artificial Sequence: Synthetic oligonucleotide
ugagaaacucauucagcuc

SEQ ID NO: 2255910 - RNA, 19 nt, Artificial Sequence
  Description of Artificial Sequence: Synthetic oligonucleotide
ucugaacuaccgcagucaa

SEQ ID NO: 2255911 - RNA, 19 nt, Artificial Sequence
  Description of Artificial Sequence: Synthetic oligonucleotide
uggacuuggcucucugucc

SEQ ID NO: 2255912 - RNA, 19 nt, Artificial Sequence
  Description of Artificial Sequence: Synthetic oligonucleotide
uaaugaaccgaagcacacc

SEQ ID NO: 2255913 - RNA, 19 nt, Artificial Sequence
  Description of Artificial Sequence: Synthetic oligonucleotide
cuuggggccgauuuuacca

SEQ ID NO: 2255914 - RNA, 19 nt, Artificial Sequence
  Description of Artificial Sequence: Synthetic oligonucleotide
cuccagcuuaaucuaacag

SEQ ID NO: 2255915 - RNA, 19 nt, Artificial Sequence
  Description of Artificial Sequence: Synthetic oligonucleotide
acuaccgcagucaacucuc

SEQ ID NO: 2255916 - RNA, 19 nt, Artificial Sequence
  Description of Artificial Sequence: Synthetic oligonucleotide
cucucugauucgacgaccc

SEQ ID NO: 2255917 - RNA, 19 nt, Artificial Sequence
  Description of Artificial Sequence: Synthetic oligonucleotide
auaaagcucuacgcugccc

SEQ ID NO: 2255918 - RNA, 19 nt, Artificial Sequence
  Description of Artificial Sequence: Synthetic oligonucleotide
gauaagcaacacuccucag

SEQ ID NO: 2255919 - RNA, 19 nt, Artificial Sequence
  Description of Artificial Sequence: Synthetic oligonucleotide
agccgaaccucuucugaac

SEQ ID NO: 2255920 - RNA, 19 nt, Artificial Sequence
  Description of Artificial Sequence: Synthetic oligonucleotide
aggacaacauccagccucc

SEQ ID NO: 2255921 - RNA, 19 nt, Artificial Sequence
  Description of Artificial Sequence: Synthetic oligonucleotide
acucucugauucgacgacc

SEQ ID NO: 2255922 - RNA, 19 nt, Artificial Sequence
  Description of Artificial Sequence: Synthetic oligonucleotide
gacaacauccagccuccag

SEQ ID NO: 2255923 - RNA, 19 nt, Artificial Sequence
  Description of Artificial Sequence: Synthetic oligonucleotide
gugagaaacucauucagcu

SEQ ID NO: 2255924 - RNA, 19 nt, Artificial Sequence
  Description of Artificial Sequence: Synthetic oligonucleotide
cucggagcuucccagacac

SEQ ID NO: 2255925 - RNA, 19 nt, Artificial Sequence
  Description of Artificial Sequence: Synthetic oligonucleotide
gccgucuucagccaguucc

SEQ ID NO: 2255926 - RNA, 19 nt, Artificial Sequence
  Description of Artificial Sequence: Synthetic oligonucleotide
aaguccuccuaggaguuug

SEQ ID NO: 2255927 - RNA, 19 nt, Artificial Sequence
  Description of Artificial Sequence: Synthetic oligonucleotide
accgcagucaacucucuga

SEQ ID NO: 2255928 - RNA, 19 nt, Artificial Sequence
  Description of Artificial Sequence: Synthetic oligonucleotide
uggcuucccacccuucugc

SEQ ID NO: 2255929 - RNA, 19 nt, Artificial Sequence
  Description of Artificial Sequence: Synthetic oligonucleotide
uggcacacagaccucuugu

SEQ ID NO: 2255930 - RNA, 19 nt, Artificial Sequence
  Description of Artificial Sequence: Synthetic oligonucleotide
aguuaacagggucuccacu

SEQ ID NO: 2255931 - RNA, 19 nt, Artificial Sequence
  Description of Artificial Sequence: Synthetic oligonucleotide
uuuguguucugguggcuaa

SEQ ID NO: 2255932 - RNA, 19 nt, Artificial Sequence
  Description of Artificial Sequence: Synthetic oligonucleotide
cagucaacucucugauucg

SEQ ID NO: 2255933 - RNA, 19 nt, Artificial Sequence
  Description of Artificial Sequence: Synthetic oligonucleotide
ggauaagcaacacuccuca

SEQ ID NO: 2255934 - RNA, 19 nt, Artificial Sequence
  Description of Artificial Sequence: Synthetic oligonucleotide
uuuaccacuugggucccag

SEQ ID NO: 2255935 - RNA, 19 nt, Artificial Sequence
  Description of Artificial Sequence: Synthetic oligonucleotide
uggucagcucugcucaagc

SEQ ID NO: 2255936 - RNA, 19 nt, Artificial Sequence
  Description of Artificial Sequence: Synthetic oligonucleotide
uguaggcacuggcuggggc

SEQ ID NO: 2255937 - RNA, 19 nt, Artificial Sequence
  Description of Artificial Sequence: Synthetic oligonucleotide
ggcaagaucucauccuuag

SEQ ID NO: 2255938 - RNA, 19 nt, Artificial Sequence
  Description of Artificial Sequence: Synthetic oligonucleotide
caagaucucauccuuaggu

SEQ ID NO: 2255939 - RNA, 19 nt, Artificial Sequence
  Description of Artificial Sequence: Synthetic oligonucleotide
auuuuaccacuuggguccc

SEQ ID NO: 2255940 - RNA, 19 nt, Artificial Sequence
  Description of Artificial Sequence: Synthetic oligonucleotide
aagccgaaccucuucugaa

SEQ ID NO: 2255941 - RNA, 19 nt, Artificial Sequence
  Description of Artificial Sequence: Synthetic oligonucleotide
ugguugguguaacucggac

SEQ ID NO: 2255942 - RNA, 19 nt, Artificial Sequence
  Description of Artificial Sequence: Synthetic oligonucleotide
aagacccuguuuaugcugu

SEQ ID NO: 2255943 - RNA, 19 nt, Artificial Sequence
  Description of Artificial Sequence: Synthetic oligonucleotide
ucccgagugagaaacucau

SEQ ID NO: 2255944 - RNA, 19 nt, Artificial Sequence
  Description of Artificial Sequence: Synthetic oligonucleotide
auucgacgacccuucucac

SEQ ID NO: 2255945 - RNA, 19 nt, Artificial Sequence
  Description of Artificial Sequence: Synthetic oligonucleotide
gccaagacccuguuuaugc

SEQ ID NO: 2255946 - RNA, 19 nt, Artificial Sequence
  Description of Artificial Sequence: Synthetic oligonucleotide
gaagccgaaccucuucuga

SEQ ID NO: 2255947 - RNA, 19 nt, Artificial Sequence
  Description of Artificial Sequence: Synthetic oligonucleotide
ucuuggggccgauuuuacc

SEQ ID NO: 2255948 - RNA, 19 nt, Artificial Sequence
  Description of Artificial Sequence: Synthetic oligonucleotide
caaacuuccucuucuugga

SEQ ID NO: 2255949 - RNA, 19 nt, Artificial Sequence
  Description of Artificial Sequence: Synthetic oligonucleotide
agggaagccgaaccucuuc

SEQ ID NO: 2255950 - RNA, 19 nt, Artificial Sequence
  Description of Artificial Sequence: Synthetic oligonucleotide
ccuccuaggaguuuguaac

SEQ ID NO: 2255951 - RNA, 19 nt, Artificial Sequence
  Description of Artificial Sequence: Synthetic oligonucleotide
cacucuccauaaugaaccg

SEQ ID NO: 2255952 - RNA, 19 nt, Artificial Sequence
  Description of Artificial Sequence: Synthetic oligonucleotide
cucaccaagaacauuuugu

SEQ ID NO: 2255953 - RNA, 19 nt, Artificial Sequence
  Description of Artificial Sequence: Synthetic oligonucleotide
auagcaggcccuucgcaca

SEQ ID NO: 2255954 - RNA, 19 nt, Artificial Sequence
  Description of Artificial Sequence: Synthetic oligonucleotide
augucuguacaggacaaca

SEQ ID NO: 2255955 - RNA, 19 nt, Artificial Sequence
  Description of Artificial Sequence: Synthetic oligonucleotide
caccauagcaggcccuucg

SEQ ID NO: 2255956 - RNA, 19 nt, Artificial Sequence
  Description of Artificial Sequence: Synthetic oligonucleotide
cuucaacucccgaguagcc

SEQ ID NO: 2255957 - RNA, 19 nt, Artificial Sequence
  Description of Artificial Sequence: Synthetic oligonucleotide
gaagaugccaucagccaca

SEQ ID NO: 2255958 - RNA, 19 nt, Artificial Sequence
  Description of Artificial Sequence: Synthetic oligonucleotide
ugguguaacucggacuuca

SEQ ID NO: 2255959 - RNA, 19 nt, Artificial Sequence
  Description of Artificial Sequence: Synthetic oligonucleotide
uccuccuaggaguuuguaa

SEQ ID NO: 2255960 - RNA, 19 nt, Artificial Sequence
  Description of Artificial Sequence: Synthetic oligonucleotide
aguagccgucuucagccag

SEQ ID NO: 2255961 - RNA, 19 nt, Artificial Sequence
  Description of Artificial Sequence: Synthetic oligonucleotide
ugguggcuaaaauaaugau

SEQ ID NO: 2255962 - RNA, 19 nt, Artificial Sequence
  Description of Artificial Sequence: Synthetic oligonucleotide
gacccuucucaccaagaac

SEQ ID NO: 2255963 - RNA, 19 nt, Artificial Sequence
  Description of Artificial Sequence: Synthetic oligonucleotide
cauaaagcucuacgcugcc

SEQ ID NO: 2255964 - RNA, 19 nt, Artificial Sequence
  Description of Artificial Sequence: Synthetic oligonucleotide
uucgacgacccuucucacc

SEQ ID NO: 2255965 - RNA, 19 nt, Artificial Sequence
  Description of Artificial Sequence: Synthetic oligonucleotide
uuucacuuugaugcccagc

SEQ ID NO: 2255966 - RNA, 19 nt, Artificial Sequence
  Description of Artificial Sequence: Synthetic oligonucleotide
uuuaugcuguaggcacugg

SEQ ID NO: 2255967 - RNA, 19 nt, Artificial Sequence
  Description of Artificial Sequence: Synthetic oligonucleotide
uuuucugcauaaagcucua

SEQ ID NO: 2255968 - RNA, 19 nt, Artificial Sequence
  Description of Artificial Sequence: Synthetic oligonucleotide
uaguaguuaacagggucuc

SEQ ID NO: 2255969 - RNA, 19 nt, Artificial Sequence
  Description of Artificial Sequence: Synthetic oligonucleotide
cgaagcacaccauagcagg

SEQ ID NO: 2255970 - RNA, 19 nt, Artificial Sequence
  Description of Artificial Sequence: Synthetic oligonucleotide
uguucugguugguguaacu

SEQ ID NO: 2255971 - RNA, 19 nt, Artificial Sequence
  Description of Artificial Sequence: Synthetic oligonucleotide
cacuuugaugcccagcaca

SEQ ID NO: 2255972 - RNA, 19 nt, Artificial Sequence
  Description of Artificial Sequence: Synthetic oligonucleotide
guugguguaacucggacuu

SEQ ID NO: 2255973 - RNA, 19 nt, Artificial Sequence
  Description of Artificial Sequence: Synthetic oligonucleotide
caguucccgagugagaaac

SEQ ID NO: 2255974 - RNA, 19 nt, Artificial Sequence
  Description of Artificial Sequence: Synthetic oligonucleotide
cucaggccaacauaacuca

SEQ ID NO: 2255975 - RNA, 19 nt, Artificial Sequence
  Description of Artificial Sequence: Synthetic oligonucleotide
cuaacaggauaagcaacac

SEQ ID NO: 2255976 - RNA, 19 nt, Artificial Sequence
  Description of Artificial Sequence: Synthetic oligonucleotide
caacucucugauucgacga

SEQ ID NO: 2255977 - RNA, 19 nt, Artificial Sequence
  Description of Artificial Sequence: Synthetic oligonucleotide
cagcccauccacaaacuuc

SEQ ID NO: 2255978 - RNA, 19 nt, Artificial Sequence
  Description of Artificial Sequence: Synthetic oligonucleotide
uccuaggaguuuguaacgu

SEQ ID NO: 2255979 - RNA, 19 nt, Artificial Sequence
  Description of Artificial Sequence: Synthetic oligonucleotide
gaagcacaccauagcaggc

SEQ ID NO: 2255980 - RNA, 19 nt, Artificial Sequence
  Description of Artificial Sequence: Synthetic oligonucleotide
gaggaguacauggcguacc

SEQ ID NO: 2255981 - RNA, 19 nt, Artificial Sequence
  Description of Artificial Sequence: Synthetic oligonucleotide
ucuuggaaaucugcaccgc

SEQ ID NO: 2255982 - RNA, 19 nt, Artificial Sequence
  Description of Artificial Sequence: Synthetic oligonucleotide
ucuacgcugcccucaggga

SEQ ID NO: 2255983 - RNA, 19 nt, Artificial Sequence
  Description of Artificial Sequence: Synthetic oligonucleotide
agcccuuggccccacucuc

SEQ ID NO: 2255984 - RNA, 19 nt, Artificial Sequence
  Description of Artificial Sequence: Synthetic oligonucleotide
ugauucgacgacccuucuc

SEQ ID NO: 2255985 - RNA, 19 nt, Artificial Sequence
  Description of Artificial Sequence: Synthetic oligonucleotide
uuaccacuugggucccagg

SEQ ID NO: 2255986 - RNA, 19 nt, Artificial Sequence
  Description of Artificial Sequence: Synthetic oligonucleotide
ucacuuugaugcccagcac

SEQ ID NO: 2255987 - RNA, 19 nt, Artificial Sequence
  Description of Artificial Sequence: Synthetic oligonucleotide
cauggcguaccgcaguauc

SEQ ID NO: 2255988 - RNA, 19 nt, Artificial Sequence
  Description of Artificial Sequence: Synthetic oligonucleotide
ggccgauuuuaccacuugg

SEQ ID NO: 2255989 - RNA, 19 nt, Artificial Sequence
  Description of Artificial Sequence: Synthetic oligonucleotide
acagcccuuggccccacuc

SEQ ID NO: 2255990 - RNA, 19 nt, Artificial Sequence
  Description of Artificial Sequence: Synthetic oligonucleotide
uuggggccgauuuuaccac

SEQ ID NO: 2255991 - RNA, 19 nt, Artificial Sequence
  Description of Artificial Sequence: Synthetic oligonucleotide
ucccagacaccacaaccuc

SEQ ID NO: 2255992 - RNA, 19 nt, Artificial Sequence
  Description of Artificial Sequence: Synthetic oligonucleotide
ccgagugagaaacucauuc

SEQ ID NO: 2255993 - RNA, 19 nt, Artificial Sequence
  Description of Artificial Sequence: Synthetic oligonucleotide
gacgacccuucucaccaag

SEQ ID NO: 2255994 - RNA, 19 nt, Artificial Sequence
  Description of Artificial Sequence: Synthetic oligonucleotide
uuguaacguagagacucug

SEQ ID NO: 2255995 - RNA, 19 nt, Artificial Sequence
  Description of Artificial Sequence: Synthetic oligonucleotide
gccgauuuuaccacuuggg

SEQ ID NO: 2255996 - RNA, 19 nt, Artificial Sequence
  Description of Artificial Sequence: Synthetic oligonucleotide
uggcuaaaauaaugauuuc

SEQ ID NO: 2255997 - RNA, 19 nt, Artificial Sequence
  Description of Artificial Sequence: Synthetic oligonucleotide
cacuguggaucaucagccc

SEQ ID NO: 2255998 - RNA, 19 nt, Artificial Sequence
  Description of Artificial Sequence: Synthetic oligonucleotide
cucuggucagcucugcuca

SEQ ID NO: 2255999 - RNA, 19 nt, Artificial Sequence
  Description of Artificial Sequence: Synthetic oligonucleotide
caugacuucucuggucagc

SEQ ID NO: 2256000 - RNA, 19 nt, Artificial Sequence
  Description of Artificial Sequence: Synthetic oligonucleotide
cucacaugaucaggcagag

SEQ ID NO: 2256001 - RNA, 19 nt, Artificial Sequence
  Description of Artificial Sequence: Synthetic oligonucleotide
cuguacaggacaacaucca

SEQ ID NO: 2256002 - RNA, 19 nt, Artificial Sequence
  Description of Artificial Sequence: Synthetic oligonucleotide
acuccucaggccaacauaa

SEQ ID NO: 2256003 - RNA, 19 nt, Artificial Sequence
  Description of Artificial Sequence: Synthetic oligonucleotide
gcuuaaucuaacaggauaa

SEQ ID NO: 2256004 - RNA, 19 nt, Artificial Sequence
  Description of Artificial Sequence: Synthetic oligonucleotide
ugguaggcaagaucucauc

SEQ ID NO: 2256005 - RNA, 19 nt, Artificial Sequence
  Description of Artificial Sequence: Synthetic oligonucleotide
uacauggcguaccgcagua

SEQ ID NO: 2256006 - RNA, 19 nt, Artificial Sequence
  Description of Artificial Sequence: Synthetic oligonucleotide
gaaccucuucugaacuacc

SEQ ID NO: 2256007 - RNA, 19 nt, Artificial Sequence
  Description of Artificial Sequence: Synthetic oligonucleotide
guguaacucggacuucaac

SEQ ID NO: 2256008 - RNA, 19 nt, Artificial Sequence
  Description of Artificial Sequence: Synthetic oligonucleotide
cucagucacaauccaguca

SEQ ID NO: 2256009 - RNA, 19 nt, Artificial Sequence
  Description of Artificial Sequence: Synthetic oligonucleotide
gcauaaagcucuacgcugc

SEQ ID NO: 2256010 - RNA, 19 nt, Artificial Sequence
  Description of Artificial Sequence: Synthetic oligonucleotide
ucucugauucgacgacccu

SEQ ID NO: 2256011 - RNA, 19 nt, Artificial Sequence
  Description of Artificial Sequence: Synthetic oligonucleotide
guaggcaagaucucauccu

SEQ ID NO: 2256012 - RNA, 19 nt, Artificial Sequence
  Description of Artificial Sequence: Synthetic oligonucleotide
ggcagcaugauuuucacuu

SEQ ID NO: 2256013 - RNA, 19 nt, Artificial Sequence
  Description of Artificial Sequence: Synthetic oligonucleotide
guucugguugguguaacuc

SEQ ID NO: 2256014 - RNA, 19 nt, Artificial Sequence
  Description of Artificial Sequence: Synthetic oligonucleotide
uguguucugguggcuaaaa

SEQ ID NO: 2256015 - RNA, 19 nt, Artificial Sequence
  Description of Artificial Sequence: Synthetic oligonucleotide
gacccuguuuaugcuguag

SEQ ID NO: 2256016 - RNA, 19 nt, Artificial Sequence
  Description of Artificial Sequence: Synthetic oligonucleotide
ucacaugaucaggcagagg

SEQ ID NO: 2256017 - RNA, 19 nt, Artificial Sequence
  Description of Artificial Sequence: Synthetic oligonucleotide
ucccgaguagccgucuuca

SEQ ID NO: 2256018 - RNA, 19 nt, Artificial Sequence
  Description of Artificial Sequence: Synthetic oligonucleotide
cauggcagguggcucuggc

SEQ ID NO: 2256019 - RNA, 19 nt, Artificial Sequence
  Description of Artificial Sequence: Synthetic oligonucleotide
ucuguucugguugguguaa

SEQ ID NO: 2256020 - RNA, 19 nt, Artificial Sequence
  Description of Artificial Sequence: Synthetic oligonucleotide
agucaacucucugauucga

SEQ ID NO: 2256021 - RNA, 19 nt, Artificial Sequence
  Description of Artificial Sequence: Synthetic oligonucleotide
augcucacaugaucaggca

SEQ ID NO: 2256022 - RNA, 19 nt, Artificial Sequence
  Description of Artificial Sequence: Synthetic oligonucleotide
uaccgcagucaacucucug

SEQ ID NO: 2256023 - RNA, 19 nt, Artificial Sequence
  Description of Artificial Sequence: Synthetic oligonucleotide
cgauuuuaccacuuggguc

SEQ ID NO: 2256024 - RNA, 19 nt, Artificial Sequence
  Description of Artificial Sequence: Synthetic oligonucleotide
ccaagaacauuuuguguuc

SEQ ID NO: 2256025 - RNA, 19 nt, Artificial Sequence
  Description of Artificial Sequence: Synthetic oligonucleotide
caagcccuccagcuuaauc

SEQ ID NO: 2256026 - RNA, 19 nt, Artificial Sequence
  Description of Artificial Sequence: Synthetic oligonucleotide
accucuuguggccaccuuu

SEQ ID NO: 2256027 - RNA, 19 nt, Artificial Sequence
  Description of Artificial Sequence: Synthetic oligonucleotide
cauccacaaacuucaugga

SEQ ID NO: 2256028 - RNA, 19 nt, Artificial Sequence
  Description of Artificial Sequence: Synthetic oligonucleotide
augaucaggcagaggcuuc

SEQ ID NO: 2256029 - RNA, 19 nt, Artificial Sequence
  Description of Artificial Sequence: Synthetic oligonucleotide
aagcucuacgcugcccuca

SEQ ID NO: 2256030 - RNA, 19 nt, Artificial Sequence
  Description of Artificial Sequence: Synthetic oligonucleotide
cccuguuuaugcuguaggc

SEQ ID NO: 2256031 - RNA, 19 nt, Artificial Sequence
  Description of Artificial Sequence: Synthetic oligonucleotide
cuucgcacagcaaguccuc

SEQ ID NO: 2256032 - RNA, 19 nt, Artificial Sequence
  Description of Artificial Sequence: Synthetic oligonucleotide
ggaguuuguaacguagaga

SEQ ID NO: 2256033 - RNA, 19 nt, Artificial Sequence
  Description of Artificial Sequence: Synthetic oligonucleotide
ggcuaaaauaaugauuucu

SEQ ID NO: 2256034 - RNA, 19 nt, Artificial Sequence
  Description of Artificial Sequence: Synthetic oligonucleotide
gaucaucagcccauccaca

SEQ ID NO: 2256035 - RNA, 19 nt, Artificial Sequence
  Description of Artificial Sequence: Synthetic oligonucleotide
uucgcacagcaaguccucc

SEQ ID NO: 2256036 - RNA, 19 nt, Artificial Sequence
  Description of Artificial Sequence: Synthetic oligonucleotide
cagucacaauccagucagg

SEQ ID NO: 2256037 - RNA, 19 nt, Artificial Sequence
  Description of Artificial Sequence: Synthetic oligonucleotide
acguagagacucugccuga

SEQ ID NO: 2256038 - RNA, 19 nt, Artificial Sequence
  Description of Artificial Sequence: Synthetic oligonucleotide
aguuuguaacguagagacu

SEQ ID NO: 2256039 - RNA, 19 nt, Artificial Sequence
  Description of Artificial Sequence: Synthetic oligonucleotide
cagccaguucccgagugag

SEQ ID NO: 2256040 - RNA, 19 nt, Artificial Sequence
  Description of Artificial Sequence: Synthetic oligonucleotide
gguuccacaaugcucacau

SEQ ID NO: 2256041 - RNA, 19 nt, Artificial Sequence
  Description of Artificial Sequence: Synthetic oligonucleotide
gaacuaccgcagucaacuc

SEQ ID NO: 2256042 - RNA, 19 nt, Artificial Sequence
  Description of Artificial Sequence: Synthetic oligonucleotide
cccacucuccauaaugaac

SEQ ID NO: 2256043 - RNA, 19 nt, Artificial Sequence
  Description of Artificial Sequence: Synthetic oligonucleotide
acaugaucaggcagaggcu

SEQ ID NO: 2256044 - RNA, 19 nt, Artificial Sequence
  Description of Artificial Sequence: Synthetic oligonucleotide
uggcguaccgcaguaucaa

SEQ ID NO: 2256045 - RNA, 19 nt, Artificial Sequence
  Description of Artificial Sequence: Synthetic oligonucleotide
uuucugcauaaagcucuac

SEQ ID NO: 2256046 - RNA, 19 nt, Artificial Sequence
  Description of Artificial Sequence: Synthetic oligonucleotide
cacaaccucacagcccuug

SEQ ID NO: 2256047 - RNA, 19 nt, Artificial Sequence
  Description of Artificial Sequence: Synthetic oligonucleotide
caggauaagcaacacuccu

SEQ ID NO: 2256048 - RNA, 19 nt, Artificial Sequence
  Description of Artificial Sequence: Synthetic oligonucleotide
acucuccauaaugaaccga

SEQ ID NO: 2256049 - RNA, 19 nt, Artificial Sequence
  Description of Artificial Sequence: Synthetic oligonucleotide
ucuguccucggagcuuccc

SEQ ID NO: 2256050 - RNA, 19 nt, Artificial Sequence
  Description of Artificial Sequence: Synthetic oligonucleotide
acucggacuucaacucccg

SEQ ID NO: 2256051 - RNA, 19 nt, Artificial Sequence
  Description of Artificial Sequence: Synthetic oligonucleotide
agcccuccagcuuaaucua

SEQ ID NO: 2256052 - RNA, 19 nt, Artificial Sequence
  Description of Artificial Sequence: Synthetic oligonucleotide
cuucccacccuucugcucu

SEQ ID NO: 2256053 - RNA, 19 nt, Artificial Sequence
  Description of Artificial Sequence: Synthetic oligonucleotide
cugagcaauggcacacaga

SEQ ID NO: 2256054 - RNA, 19 nt, Artificial Sequence
  Description of Artificial Sequence: Synthetic oligonucleotide
uggggccgauuuuaccacu

SEQ ID NO: 2256055 - RNA, 19 nt, Artificial Sequence
  Description of Artificial Sequence: Synthetic oligonucleotide
ggugguaggcaagaucuca

SEQ ID NO: 2256056 - RNA, 19 nt, Artificial Sequence
  Description of Artificial Sequence: Synthetic oligonucleotide
gucaacucucugauucgac

SEQ ID NO: 2256057 - RNA, 19 nt, Artificial Sequence
  Description of Artificial Sequence: Synthetic oligonucleotide
auggcguaccgcaguauca

SEQ ID NO: 2256058 - RNA, 19 nt, Artificial Sequence
  Description of Artificial Sequence: Synthetic oligonucleotide
uucauggacuuggcucucu

SEQ ID NO: 2256059 - RNA, 19 nt, Artificial Sequence
  Description of Artificial Sequence: Synthetic oligonucleotide
ggggugguaggcaagaucu

SEQ ID NO: 2256060 - RNA, 19 nt, Artificial Sequence
  Description of Artificial Sequence: Synthetic oligonucleotide
gccaucuugccgccgcgcg

SEQ ID NO: 2256061 - RNA, 19 nt, Artificial Sequence
  Description of Artificial Sequence: Synthetic oligonucleotide
cugcaccgccaucuugccg

SEQ ID NO: 2256062 - RNA, 19 nt, Artificial Sequence
  Description of Artificial Sequence: Synthetic oligonucleotide
gcucacaugaucaggcaga

SEQ ID NO: 2256063 - RNA, 19 nt, Artificial Sequence
  Description of Artificial Sequence: Synthetic oligonucleotide
gguugguguaacucggacu

SEQ ID NO: 2256064 - RNA, 19 nt, Artificial Sequence
  Description of Artificial Sequence: Synthetic oligonucleotide
cucuuguggccaccuuuuc

SEQ ID NO: 2256065 - RNA, 19 nt, Artificial Sequence
  Description of Artificial Sequence: Synthetic oligonucleotide
gcacagcaaguccuccuag

SEQ ID NO: 2256066 - RNA, 19 nt, Artificial Sequence
  Description of Artificial Sequence: Synthetic oligonucleotide
uuguguucugguggcuaaa

SEQ ID NO: 2256067 - RNA, 19 nt, Artificial Sequence
  Description of Artificial Sequence: Synthetic oligonucleotide
ccugagcaauggcacacag

SEQ ID NO: 2256068 - RNA, 19 nt, Artificial Sequence
  Description of Artificial Sequence: Synthetic oligonucleotide
ccgucuucagccaguuccc

SEQ ID NO: 2256069 - RNA, 19 nt, Artificial Sequence
  Description of Artificial Sequence: Synthetic oligonucleotide
guacauggcguaccgcagu

SEQ ID NO: 2256070 - RNA, 19 nt, Artificial Sequence
  Description of Artificial Sequence: Synthetic oligonucleotide
acccugucugaggaguaca

SEQ ID NO: 2256071 - RNA, 19 nt, Artificial Sequence
  Description of Artificial Sequence: Synthetic oligonucleotide
gguggcuaaaauaaugauu

SEQ ID NO: 2256072 - RNA, 19 nt, Artificial Sequence
  Description of Artificial Sequence: Synthetic oligonucleotide
gcaugacuucucuggucag

SEQ ID NO: 2256073 - RNA, 19 nt, Artificial Sequence
  Description of Artificial Sequence: Synthetic oligonucleotide
cauucagcucugcuuugaa

SEQ ID NO: 2256074 - RNA, 19 nt, Artificial Sequence
  Description of Artificial Sequence: Synthetic oligonucleotide
cuuggccccacucuccaua

SEQ ID NO: 2256075 - RNA, 19 nt, Artificial Sequence
  Description of Artificial Sequence: Synthetic oligonucleotide
agaccucuuguggccaccu

SEQ ID NO: 2256076 - RNA, 19 nt, Artificial Sequence
  Description of Artificial Sequence: Synthetic oligonucleotide
ggaaaucugcaccgccauc

SEQ ID NO: 2256077 - RNA, 19 nt, Artificial Sequence
  Description of Artificial Sequence: Synthetic oligonucleotide
agacucugccugagcaaug

SEQ ID NO: 2256078 - RNA, 19 nt, Artificial Sequence
  Description of Artificial Sequence: Synthetic oligonucleotide
acaauccagucaggccuug

SEQ ID NO: 2256079 - RNA, 19 nt, Artificial Sequence
  Description of Artificial Sequence: Synthetic oligonucleotide
cccuccagcuuaaucuaac

SEQ ID NO: 2256080 - RNA, 19 nt, Artificial Sequence
  Description of Artificial Sequence: Synthetic oligonucleotide
cccuucgcacagcaagucc

SEQ ID NO: 2256081 - RNA, 19 nt, Artificial Sequence
  Description of Artificial Sequence: Synthetic oligonucleotide
aguucccgagugagaaacu

SEQ ID NO: 2256082 - RNA, 19 nt, Artificial Sequence
  Description of Artificial Sequence: Synthetic oligonucleotide
ggcacuggcuggggcaugg

SEQ ID NO: 2256083 - RNA, 19 nt, Artificial Sequence
  Description of Artificial Sequence: Synthetic oligonucleotide
caacauccagccuccagau

SEQ ID NO: 2256084 - RNA, 19 nt, Artificial Sequence
  Description of Artificial Sequence: Synthetic oligonucleotide
gccaguucccgagugagaa

SEQ ID NO: 2256085 - RNA, 19 nt, Artificial Sequence
  Description of Artificial Sequence: Synthetic oligonucleotide
cuguggaucaucagcccau

SEQ ID NO: 2256086 - RNA, 19 nt, Artificial Sequence
  Description of Artificial Sequence: Synthetic oligonucleotide
cagaccucuuguggccacc

SEQ ID NO: 2256087 - RNA, 19 nt, Artificial Sequence
  Description of Artificial Sequence: Synthetic oligonucleotide
ggacuuggcucucuguccu

SEQ ID NO: 2256088 - RNA, 19 nt, Artificial Sequence
  Description of Artificial Sequence: Synthetic oligonucleotide
gggccgauuuuaccacuug

SEQ ID NO: 2256089 - RNA, 19 nt, Artificial Sequence
  Description of Artificial Sequence: Synthetic oligonucleotide
ggaguacauggcguaccgc

SEQ ID NO: 2256090 - RNA, 19 nt, Artificial Sequence
  Description of Artificial Sequence: Synthetic oligonucleotide
gggucuccacuguggauca

SEQ ID NO: 2256091 - RNA, 19 nt, Artificial Sequence
  Description of Artificial Sequence: Synthetic oligonucleotide
acgacccuucucaccaaga

SEQ ID NO: 2256092 - RNA, 19 nt, Artificial Sequence
  Description of Artificial Sequence: Synthetic oligonucleotide
caugaucaggcagaggcuu

SEQ ID NO: 2256093 - RNA, 19 nt, Artificial Sequence
  Description of Artificial Sequence: Synthetic oligonucleotide
guaccgcaguaucaacaua

SEQ ID NO: 2256094 - RNA, 19 nt, Artificial Sequence
  Description of Artificial Sequence: Synthetic oligonucleotide
cgaaccucuucugaacuac

SEQ ID NO: 2256095 - RNA, 19 nt, Artificial Sequence
  Description of Artificial Sequence: Synthetic oligonucleotide
gcguaccgcaguaucaaca

SEQ ID NO: 2256096 - RNA, 19 nt, Artificial Sequence
  Description of Artificial Sequence: Synthetic oligonucleotide
augaaccgaagcacaccau

SEQ ID NO: 2256097 - RNA, 19 nt, Artificial Sequence
  Description of Artificial Sequence: Synthetic oligonucleotide
ggcguaccgcaguaucaac

SEQ ID NO: 2256098 - RNA, 19 nt, Artificial Sequence
  Description of Artificial Sequence: Synthetic oligonucleotide
cauccuuagguuccacaau

SEQ ID NO: 2256099 - RNA, 19 nt, Artificial Sequence
  Description of Artificial Sequence: Synthetic oligonucleotide
gggaagccgaaccucuucu

SEQ ID NO: 2256100 - RNA, 19 nt, Artificial Sequence
  Description of Artificial Sequence: Synthetic oligonucleotide
guguucugguggcuaaaau

SEQ ID NO: 2256101 - RNA, 19 nt, Artificial Sequence
  Description of Artificial Sequence: Synthetic oligonucleotide
agacccuguuuaugcugua

SEQ ID NO: 2256102 - RNA, 19 nt, Artificial Sequence
  Description of Artificial Sequence: Synthetic oligonucleotide
aguccuccuaggaguuugu

SEQ ID NO: 2256103 - RNA, 19 nt, Artificial Sequence
  Description of Artificial Sequence: Synthetic oligonucleotide
ggacuucaacucccgagua

SEQ ID NO: 2256104 - RNA, 19 nt, Artificial Sequence
  Description of Artificial Sequence: Synthetic oligonucleotide
cucggacuucaacucccga

SEQ ID NO: 2256105 - RNA, 19 nt, Artificial Sequence
  Description of Artificial Sequence: Synthetic oligonucleotide
cucaagcccuccagcuuaa

SEQ ID NO: 2256106 - RNA, 19 nt, Artificial Sequence
  Description of Artificial Sequence: Synthetic oligonucleotide
ccgauuuuaccacuugggu

SEQ ID NO: 2256107 - RNA, 19 nt, Artificial Sequence
  Description of Artificial Sequence: Synthetic oligonucleotide
acauggcguaccgcaguau

SEQ ID NO: 2256108 - RNA, 19 nt, Artificial Sequence
  Description of Artificial Sequence: Synthetic oligonucleotide
uagccgucuucagccaguu

SEQ ID NO: 2256109 - RNA, 19 nt, Artificial Sequence
  Description of Artificial Sequence: Synthetic oligonucleotide
gccccacucuccauaauga

SEQ ID NO: 2256110 - RNA, 19 nt, Artificial Sequence
  Description of Artificial Sequence: Synthetic oligonucleotide
ccuucgcacagcaaguccu

SEQ ID NO: 2256111 - RNA, 19 nt, Artificial Sequence
  Description of Artificial Sequence: Synthetic oligonucleotide
cucugauucgacgacccuu

SEQ ID NO: 2256112 - RNA, 19 nt, Artificial Sequence
  Description of Artificial Sequence: Synthetic oligonucleotide
gccgaaccucuucugaacu

SEQ ID NO: 2256113 - RNA, 19 nt, Artificial Sequence
  Description of Artificial Sequence: Synthetic oligonucleotide
gugguaggcaagaucucau

SEQ ID NO: 2256114 - RNA, 19 nt, Artificial Sequence
  Description of Artificial Sequence: Synthetic oligonucleotide
uggccccacucuccauaau

SEQ ID NO: 2256115 - RNA, 19 nt, Artificial Sequence
  Description of Artificial Sequence: Synthetic oligonucleotide
caguaucaacauaguaguu

SEQ ID NO: 2256116 - RNA, 19 nt, Artificial Sequence
  Description of Artificial Sequence: Synthetic oligonucleotide
cagcuuaaucuaacaggau

SEQ ID NO: 2256117 - RNA, 19 nt, Artificial Sequence
  Description of Artificial Sequence: Synthetic oligonucleotide
gcucuacgcugcccucagg

SEQ ID NO: 2256118 - RNA, 19 nt, Artificial Sequence
  Description of Artificial Sequence: Synthetic oligonucleotide
gcaggcccuucgcacagca

SEQ ID NO: 2256119 - RNA, 19 nt, Artificial Sequence
  Description of Artificial Sequence: Synthetic oligonucleotide
ccuaggaguuuguaacgua

SEQ ID NO: 2256120 - RNA, 19 nt, Artificial Sequence
  Description of Artificial Sequence: Synthetic oligonucleotide
ucaagcccuccagcuuaau

SEQ ID NO: 2256121 - RNA, 19 nt, Artificial Sequence
  Description of Artificial Sequence: Synthetic oligonucleotide
cguagagacucugccugag

SEQ ID NO: 2256122 - RNA, 19 nt, Artificial Sequence
  Description of Artificial Sequence: Synthetic oligonucleotide
cccgaguagccgucuucag

SEQ ID NO: 2256123 - RNA, 19 nt, Artificial Sequence
  Description of Artificial Sequence: Synthetic oligonucleotide
cacaauccagucaggccuu

SEQ ID NO: 2256124 - RNA, 19 nt, Artificial Sequence
  Description of Artificial Sequence: Synthetic oligonucleotide
ccuuagguuccacaaugcu

SEQ ID NO: 2256125 - RNA, 19 nt, Artificial Sequence
  Description of Artificial Sequence: Synthetic oligonucleotide
acacccugucugaggagua

SEQ ID NO: 2256126 - RNA, 19 nt, Artificial Sequence
  Description of Artificial Sequence: Synthetic oligonucleotide
ucccacccuucugcucuga

SEQ ID NO: 2256127 - RNA, 19 nt, Artificial Sequence
  Description of Artificial Sequence: Synthetic oligonucleotide
gguguaacucggacuucaa

SEQ ID NO: 2256128 - RNA, 19 nt, Artificial Sequence
  Description of Artificial Sequence: Synthetic oligonucleotide
cagcccuuggccccacucu

SEQ ID NO: 2256129 - RNA, 19 nt, Artificial Sequence
  Description of Artificial Sequence: Synthetic oligonucleotide
cggagcuucccagacacca

SEQ ID NO: 2256130 - RNA, 19 nt, Artificial Sequence
  Description of Artificial Sequence: Synthetic oligonucleotide
cuaccgcagucaacucucu

SEQ ID NO: 2256131 - RNA, 19 nt, Artificial Sequence
  Description of Artificial Sequence: Synthetic oligonucleotide
cugauucgacgacccuucu

SEQ ID NO: 2256132 - RNA, 19 nt, Artificial Sequence
  Description of Artificial Sequence: Synthetic oligonucleotide
gcaccgccaucuugccgcc

SEQ ID NO: 2256133 - RNA, 19 nt, Artificial Sequence
  Description of Artificial Sequence: Synthetic oligonucleotide
cccacccuucugcucugag

SEQ ID NO: 2256134 - RNA, 19 nt, Artificial Sequence
  Description of Artificial Sequence: Synthetic oligonucleotide
ccgcaguaucaacauagua

SEQ ID NO: 2256135 - RNA, 19 nt, Artificial Sequence
  Description of Artificial Sequence: Synthetic oligonucleotide
gggugguaggcaagaucuc

SEQ ID NO: 2256136 - RNA, 19 nt, Artificial Sequence
  Description of Artificial Sequence: Synthetic oligonucleotide
caccgccaucuugccgccg

SEQ ID NO: 2256137 - RNA, 19 nt, Artificial Sequence
  Description of Artificial Sequence: Synthetic oligonucleotide
gcccuucgcacagcaaguc

SEQ ID NO: 2256138 - RNA, 19 nt, Artificial Sequence
  Description of Artificial Sequence: Synthetic oligonucleotide
guccuccuaggaguuugua

SEQ ID NO: 2256139 - RNA, 19 nt, Artificial Sequence
  Description of Artificial Sequence: Synthetic oligonucleotide
gggcagcaugauuuucacu

SEQ ID NO: 2256140 - RNA, 19 nt, Artificial Sequence
  Description of Artificial Sequence: Synthetic oligonucleotide
cguaccgcaguaucaacau

SEQ ID NO: 2256141 - RNA, 19 nt, Artificial Sequence
  Description of Artificial Sequence: Synthetic oligonucleotide
gggucccagggcagcauga

SEQ ID NO: 2256142 - RNA, 19 nt, Artificial Sequence
  Description of Artificial Sequence: Synthetic oligonucleotide
gccaccuuuucugcauaaa

SEQ ID NO: 2256143 - RNA, 19 nt, Artificial Sequence
  Description of Artificial Sequence: Synthetic oligonucleotide
cgacccuucucaccaagaa

SEQ ID NO: 2256144 - RNA, 19 nt, Artificial Sequence
  Description of Artificial Sequence: Synthetic oligonucleotide
ccgaaccucuucugaacua

SEQ ID NO: 2256145 - RNA, 19 nt, Artificial Sequence
  Description of Artificial Sequence: Synthetic oligonucleotide
caggcccuucgcacagcaa

SEQ ID NO: 2256146 - RNA, 19 nt, Artificial Sequence
  Description of Artificial Sequence: Synthetic oligonucleotide
gccugagcaauggcacaca

SEQ ID NO: 2256147 - RNA, 19 nt, Artificial Sequence
  Description of Artificial Sequence: Synthetic oligonucleotide
ccgccaucuugccgccgcg

SEQ ID NO: 2256148 - RNA, 19 nt, Artificial Sequence
  Description of Artificial Sequence: Synthetic oligonucleotide
ccucggagcuucccagaca

SEQ ID NO: 2256149 - RNA, 19 nt, Artificial Sequence
  Description of Artificial Sequence: Synthetic oligonucleotide
gaccucuuguggccaccuu

SEQ ID NO: 2256150 - RNA, 19 nt, Artificial Sequence
  Description of Artificial Sequence: Synthetic oligonucleotide
ccucagggaagccgaaccu

SEQ ID NO: 2256151 - RNA, 19 nt, Artificial Sequence
  Description of Artificial Sequence: Synthetic oligonucleotide
ccaguucccgagugagaaa

SEQ ID NO: 2256152 - RNA, 19 nt, Artificial Sequence
  Description of Artificial Sequence: Synthetic oligonucleotide
caauccagucaggccuugu

SEQ ID NO: 2256153 - RNA, 19 nt, Artificial Sequence
  Description of Artificial Sequence: Synthetic oligonucleotide
gcccucagggaagccgaac

SEQ ID NO: 2256154 - RNA, 19 nt, Artificial Sequence
  Description of Artificial Sequence: Synthetic oligonucleotide
ggcccuucgcacagcaagu

SEQ ID NO: 2256155 - RNA, 19 nt, Artificial Sequence
  Description of Artificial Sequence: Synthetic oligonucleotide
ccgcagucaacucucugau

SEQ ID NO: 2256156 - RNA, 19 nt, Artificial Sequence
  Description of Artificial Sequence: Synthetic oligonucleotide
ggacaacauccagccucca

SEQ ID NO: 2256157 - RNA, 19 nt, Artificial Sequence
  Description of Artificial Sequence: Synthetic oligonucleotide
cucucuguccucggagcuu

SEQ ID NO: 2256158 - RNA, 19 nt, Artificial Sequence
  Description of Artificial Sequence: Synthetic oligonucleotide
gcucuggcuucccacccuu

SEQ ID NO: 2256159 - RNA, 19 nt, Artificial Sequence
  Description of Artificial Sequence: Synthetic oligonucleotide
cccugucugaggaguacau

SEQ ID NO: 2256160 - RNA, 19 nt, Artificial Sequence
  Description of Artificial Sequence: Synthetic oligonucleotide
caaguccuccuaggaguuu

SEQ ID NO: 2256161 - RNA, 19 nt, Artificial Sequence
  Description of Artificial Sequence: Synthetic oligonucleotide
gcacaccauagcaggcccu

SEQ ID NO: 2256162 - RNA, 19 nt, Artificial Sequence
  Description of Artificial Sequence: Synthetic oligonucleotide
ggggccgauuuuaccacuu

SEQ ID NO: 2256163 - RNA, 19 nt, Artificial Sequence
  Description of Artificial Sequence: Synthetic oligonucleotide
cccagggcagcaugauuuu

SEQ ID NO: 2256164 - RNA, 19 nt, Artificial Sequence
  Description of Artificial Sequence: Synthetic oligonucleotide
cgacgacccuucucaccaa

SEQ ID NO: 2256165 - RNA, 19 nt, Artificial Sequence
  Description of Artificial Sequence: Synthetic oligonucleotide
ccacaaccucacagcccuu

SEQ ID NO: 2256166 - RNA, 19 nt, Artificial Sequence
  Description of Artificial Sequence: Synthetic oligonucleotide
uccaaaugagccuucaagg

SEQ ID NO: 2256167 - RNA, 19 nt, Artificial Sequence
  Description of Artificial Sequence: Synthetic oligonucleotide
ugugccaucccuuugcugg

SEQ ID NO: 2256168 - RNA, 19 nt, Artificial Sequence
  Description of Artificial Sequence: Synthetic oligonucleotide
cuaauuucaggccaagugg

SEQ ID NO: 2256169 - RNA, 19 nt, Artificial Sequence
  Description of Artificial Sequence: Synthetic oligonucleotide
  modified_base (6)..(6): a, c, u, g, unknown or other
ugguuncagagucugaagg

SEQ ID NO: 2256170 - RNA, 19 nt, Artificial Sequence
  Description of Artificial Sequence: Synthetic oligonucleotide
  modified_base (14)..(14): a, c, u, g, unknown or other
cuuuacagugguuncagag

SEQ ID NO: 2256171 - RNA, 19 nt, Artificial Sequence
  Description of Artificial Sequence: Synthetic oligonucleotide
ugucccaugguacugcugg

SEQ ID NO: 2256172 - RNA, 19 nt, Artificial Sequence
  Description of Artificial Sequence: Synthetic oligonucleotide
acuaauuucaggccaagug

SEQ ID NO: 2256173 - RNA, 19 nt, Artificial Sequence
  Description of Artificial Sequence: Synthetic oligonucleotide
ucaaaugacuugaucagug

SEQ ID NO: 2256174 - RNA, 19 nt, Artificial Sequence
  Description of Artificial Sequence: Synthetic oligonucleotide
uccaggacuaauuucaggc

SEQ ID NO: 2256175 - RNA, 19 nt, Artificial Sequence
  Description of Artificial Sequence: Synthetic oligonucleotide
ugagcucugugaaagacag

SEQ ID NO: 2256176 - RNA, 19 nt, Artificial Sequence
  Description of Artificial Sequence: Synthetic oligonucleotide
ucuagaaacuucccauugg

SEQ ID NO: 2256177 - RNA, 19 nt, Artificial Sequence
  Description of Artificial Sequence: Synthetic oligonucleotide
uaauuucaggccaaguggc

SEQ ID NO: 2256178 - RNA, 19 nt, Artificial Sequence
  Description of Artificial Sequence: Synthetic oligonucleotide
uuaucagccuccaaaugag

SEQ ID NO: 2256179 - RNA, 19 nt, Artificial Sequence
  Description of Artificial Sequence: Synthetic oligonucleotide
acgucaaaugacuugauca

SEQ ID NO: 2256180 - RNA, 19 nt, Artificial Sequence
  Description of Artificial Sequence: Synthetic oligonucleotide
agugcuguaaguugaaugu

SEQ ID NO: 2256181 - RNA, 19 nt, Artificial Sequence
  Description of Artificial Sequence: Synthetic oligonucleotide
ugaucagugacuuuacagu

SEQ ID NO: 2256182 - RNA, 19 nt, Artificial Sequence
  Description of Artificial Sequence: Synthetic oligonucleotide
acugggaucccacucaggg

SEQ ID NO: 2256183 - RNA, 19 nt, Artificial Sequence
  Description of Artificial Sequence: Synthetic oligonucleotide
guugacauagacuccacgc

SEQ ID NO: 2256184 - RNA, 19 nt, Artificial Sequence
  Description of Artificial Sequence: Synthetic oligonucleotide
caaaguuuagccaucgcac

SEQ ID NO: 2256185 - RNA, 19 nt, Artificial Sequence
  Description of Artificial Sequence: Synthetic oligonucleotide
uuugcuagcaggcuggaaa

SEQ ID NO: 2256186 - RNA, 19 nt, Artificial Sequence
  Description of Artificial Sequence: Synthetic oligonucleotide
uguaaguugaaugucucug

SEQ ID NO: 2256187 - RNA, 19 nt, Artificial Sequence
  Description of Artificial Sequence: Synthetic oligonucleotide
cuagaaacuucccauuggg

SEQ ID NO: 2256188 - RNA, 19 nt, Artificial Sequence
  Description of Artificial Sequence: Synthetic oligonucleotide
uguucuguugacauagacu

SEQ ID NO: 2256189 - RNA, 19 nt, Artificial Sequence
  Description of Artificial Sequence: Synthetic oligonucleotide
cuuguggacagaaauacuc

SEQ ID NO: 2256190 - RNA, 19 nt, Artificial Sequence
  Description of Artificial Sequence: Synthetic oligonucleotide
uucuuugcuagcaggcugg

SEQ ID NO: 2256191 - RNA, 19 nt, Artificial Sequence
  Description of Artificial Sequence: Synthetic oligonucleotide
gaucagugacuuuacagug

SEQ ID NO: 2256192 - RNA, 19 nt, Artificial Sequence
  Description of Artificial Sequence: Synthetic oligonucleotide
uugacauagacuccacgcc

SEQ ID NO: 2256193 - RNA, 19 nt, Artificial Sequence
  Description of Artificial Sequence: Synthetic oligonucleotide
aaugugugagaagcggggc

SEQ ID NO: 2256194 - RNA, 19 nt, Artificial Sequence
  Description of Artificial Sequence: Synthetic oligonucleotide
agcaauucuugucugagcu

SEQ ID NO: 2256195 - RNA, 19 nt, Artificial Sequence
  Description of Artificial Sequence: Synthetic oligonucleotide
ugcaauugaucuuucucag

SEQ ID NO: 2256196 - RNA, 19 nt, Artificial Sequence
  Description of Artificial Sequence: Synthetic oligonucleotide
ugaaagacagcugcaauug

SEQ ID NO: 2256197 - RNA, 19 nt, Artificial Sequence
  Description of Artificial Sequence: Synthetic oligonucleotide
uguuuaauuucaccauuug

SEQ ID NO: 2256198 - RNA, 19 nt, Artificial Sequence
  Description of Artificial Sequence: Synthetic oligonucleotide
aauuucaccauuugccuuu

SEQ ID NO: 2256199 - RNA, 19 nt, Artificial Sequence
  Description of Artificial Sequence: Synthetic oligonucleotide
  modified_base (3)..(3): a, c, u, g, unknown or other
uuncagagucugaaggugc

SEQ ID NO: 2256200 - RNA, 19 nt, Artificial Sequence
  Description of Artificial Sequence: Synthetic oligonucleotide
cucugugaaagacagcugc

SEQ ID NO: 2256201 - RNA, 19 nt, Artificial Sequence
  Description of Artificial Sequence: Synthetic oligonucleotide
ugaaccucaaaguucucug

SEQ ID NO: 2256202 - RNA, 19 nt, Artificial Sequence
  Description of Artificial Sequence: Synthetic oligonucleotide
uugccuuuagcaauucuug

SEQ ID NO: 2256203 - RNA, 19 nt, Artificial Sequence
  Description of Artificial Sequence: Synthetic oligonucleotide
  modified_base (12)..(12): a, c, u, g, unknown or other
uuacagugguuncagaguc

SEQ ID NO: 2256204 - RNA, 19 nt, Artificial Sequence
  Description of Artificial Sequence: Synthetic oligonucleotide
agaaacuucccauugggaa

SEQ ID NO: 2256205 - RNA, 19 nt, Artificial Sequence
  Description of Artificial Sequence: Synthetic oligonucleotide
uuggcuuaagccuuccuug

SEQ ID NO: 2256206 - RNA, 19 nt, Artificial Sequence
  Description of Artificial Sequence: Synthetic oligonucleotide
gaaacuucccauugggaac

SEQ ID NO: 2256207 - RNA, 19 nt, Artificial Sequence
  Description of Artificial Sequence: Synthetic oligonucleotide
  modified_base (16)..(16): a, c, u, g, unknown or other
gacuuuacagugguuncag

SEQ ID NO: 2256208 - RNA, 19 nt, Artificial Sequence
  Description of Artificial Sequence: Synthetic oligonucleotide
agcucgaaccacuuucagc

SEQ ID NO: 2256209 - RNA, 19 nt, Artificial Sequence
  Description of Artificial Sequence: Synthetic oligonucleotide
uagugcuguaaguugaaug

SEQ ID NO: 2256210 - RNA, 19 nt, Artificial Sequence
  Description of Artificial Sequence: Synthetic oligonucleotide
gacccaaugugugagaagc

SEQ ID NO: 2256211 - RNA, 19 nt, Artificial Sequence
  Description of Artificial Sequence: Synthetic oligonucleotide
ugacauagacuccacgcca

SEQ ID NO: 2256212 - RNA, 19 nt, Artificial Sequence
  Description of Artificial Sequence: Synthetic oligonucleotide
gguaacucuacauuccucc

SEQ ID NO: 2256213 - RNA, 19 nt, Artificial Sequence
  Description of Artificial Sequence: Synthetic oligonucleotide
augugugagaagcggggcc

SEQ ID NO: 2256214 - RNA, 19 nt, Artificial Sequence
  Description of Artificial Sequence: Synthetic oligonucleotide
caaugugugagaagcgggg

SEQ ID NO: 2256215 - RNA, 19 nt, Artificial Sequence
  Description of Artificial Sequence: Synthetic oligonucleotide
aaauccagauggcuaggug

SEQ ID NO: 2256216 - RNA, 19 nt, Artificial Sequence
  Description of Artificial Sequence: Synthetic oligonucleotide
ugugcccuacgucaaauga

SEQ ID NO: 2256217 - RNA, 19 nt, Artificial Sequence
  Description of Artificial Sequence: Synthetic oligonucleotide
cuuaucagccuccaaauga

SEQ ID NO: 2256218 - RNA, 19 nt, Artificial Sequence
  Description of Artificial Sequence: Synthetic oligonucleotide
ugcuguaaguugaaugucu

SEQ ID NO: 2256219 - RNA, 19 nt, Artificial Sequence
  Description of Artificial Sequence: Synthetic oligonucleotide
ucagugacuuuacaguggu

SEQ ID NO: 2256220 - RNA, 19 nt, Artificial Sequence
  Description of Artificial Sequence: Synthetic oligonucleotide
aaugagccuucaaggaccc

SEQ ID NO: 2256221 - RNA, 19 nt, Artificial Sequence
  Description of Artificial Sequence: Synthetic oligonucleotide
guaaguugaaugucucugc

SEQ ID NO: 2256222 - RNA, 19 nt, Artificial Sequence
  Description of Artificial Sequence: Synthetic oligonucleotide
ugagggacucuuucggagg

SEQ ID NO: 2256223 - RNA, 19 nt, Artificial Sequence
  Description of Artificial Sequence: Synthetic oligonucleotide
aacucuacauuccuccaaa

SEQ ID NO: 2256224 - RNA, 19 nt, Artificial Sequence
  Description of Artificial Sequence: Synthetic oligonucleotide
gaacaaggauuccugagca

SEQ ID NO: 2256225 - RNA, 19 nt, Artificial Sequence
  Description of Artificial Sequence: Synthetic oligonucleotide
uuggagagacagcagcugc

SEQ ID NO: 2256226 - RNA, 19 nt, Artificial Sequence
  Description of Artificial Sequence: Synthetic oligonucleotide
caaggauuccugagcaugg

SEQ ID NO: 2256227 - RNA, 19 nt, Artificial Sequence
  Description of Artificial Sequence: Synthetic oligonucleotide
agguccggcagauccaagc

SEQ ID NO: 2256228 - RNA, 19 nt, Artificial Sequence
  Description of Artificial Sequence: Synthetic oligonucleotide
ugacuuccgguccucagcc

SEQ ID NO: 2256229 - RNA, 19 nt, Artificial Sequence
  Description of Artificial Sequence: Synthetic oligonucleotide
auucuuugcuagcaggcug

SEQ ID NO: 2256230 - RNA, 19 nt, Artificial Sequence
  Description of Artificial Sequence: Synthetic oligonucleotide
acauguuuaauuucaccau

SEQ ID NO: 2256231 - RNA, 19 nt, Artificial Sequence
  Description of Artificial Sequence: Synthetic oligonucleotide
ucaaggaccccauucucca

SEQ ID NO: 2256232 - RNA, 19 nt, Artificial Sequence
  Description of Artificial Sequence: Synthetic oligonucleotide
ggaaucucacagaagaggg

SEQ ID NO: 2256233 - RNA, 19 nt, Artificial Sequence
  Description of Artificial Sequence: Synthetic oligonucleotide
gacucuuucggagguaagg

SEQ ID NO: 2256234 - RNA, 19 nt, Artificial Sequence
  Description of Artificial Sequence: Synthetic oligonucleotide
ugcccuacgucaaaugacu

SEQ ID NO: 2256235 - RNA, 19 nt, Artificial Sequence
  Description of Artificial Sequence: Synthetic oligonucleotide
aaacuucccauugggaaca

SEQ ID NO: 2256236 - RNA, 19 nt, Artificial Sequence
  Description of Artificial Sequence: Synthetic oligonucleotide
acucuuucggagguaaggg

SEQ ID NO: 2256237 - RNA, 19 nt, Artificial Sequence
  Description of Artificial Sequence: Synthetic oligonucleotide
uucacuuggcuuaagccuu

SEQ ID NO: 2256238 - RNA, 19 nt, Artificial Sequence
  Description of Artificial Sequence: Synthetic oligonucleotide
  modified_base (4)..(4): a, c, u, g, unknown or other
guuncagagucugaaggug

SEQ ID NO: 2256239 - RNA, 19 nt, Artificial Sequence
  Description of Artificial Sequence: Synthetic oligonucleotide
ugagcaggcgcuuccagga

SEQ ID NO: 2256240 - RNA, 19 nt, Artificial Sequence
  Description of Artificial Sequence: Synthetic oligonucleotide
augucucugcauuggagag

SEQ ID NO: 2256241 - RNA, 19 nt, Artificial Sequence
  Description of Artificial Sequence: Synthetic oligonucleotide
guaagggucugacuuccgg

SEQ ID NO: 2256242 - RNA, 19 nt, Artificial Sequence
  Description of Artificial Sequence: Synthetic oligonucleotide
  modified_base (10)..(10): a, c, u, g, unknown or other
acagugguuncagagucug

SEQ ID NO: 2256243 - RNA, 19 nt, Artificial Sequence
  Description of Artificial Sequence: Synthetic oligonucleotide
cugcaauugaucuuucuca

SEQ ID NO: 2256244 - RNA, 19 nt, Artificial Sequence
  Description of Artificial Sequence: Synthetic oligonucleotide
uuucaagccuuccaaggua

SEQ ID NO: 2256245 - RNA, 19 nt, Artificial Sequence
  Description of Artificial Sequence: Synthetic oligonucleotide
agggucugacuuccggucc

SEQ ID NO: 2256246 - RNA, 19 nt, Artificial Sequence
  Description of Artificial Sequence: Synthetic oligonucleotide
  modified_base (19)..(19): a, c, u, g, unknown or other
agugacuuuacagugguun

SEQ ID NO: 2256247 - RNA, 19 nt, Artificial Sequence
  Description of Artificial Sequence: Synthetic oligonucleotide
ggaacaaggauuccugagc

SEQ ID NO: 2256248 - RNA, 19 nt, Artificial Sequence
  Description of Artificial Sequence: Synthetic oligonucleotide
ugguucacuuggcuuaagc

SEQ ID NO: 2256249 - RNA, 19 nt, Artificial Sequence
  Description of Artificial Sequence: Synthetic oligonucleotide
uggaaacauguuuaauuuc

SEQ ID NO: 2256250 - RNA, 19 nt, Artificial Sequence
  Description of Artificial Sequence: Synthetic oligonucleotide
uucaagccuuccaagguaa

SEQ ID NO: 2256251 - RNA, 19 nt, Artificial Sequence
  Description of Artificial Sequence: Synthetic oligonucleotide
cauuccuccaaaguuuagc

SEQ ID NO: 2256252 - RNA, 19 nt, Artificial Sequence
  Description of Artificial Sequence: Synthetic oligonucleotide
gagcaugggcuccagacac

SEQ ID NO: 2256253 - RNA, 19 nt, Artificial Sequence
  Description of Artificial Sequence: Synthetic oligonucleotide
cucuagaaacuucccauug

SEQ ID NO: 2256254 - RNA, 19 nt, Artificial Sequence
  Description of Artificial Sequence: Synthetic oligonucleotide
ucagcucgaaccacuuuca

SEQ ID NO: 2256255 - RNA, 19 nt, Artificial Sequence
  Description of Artificial Sequence: Synthetic oligonucleotide
gucuuguggacagaaauac

SEQ ID NO: 2256256 - RNA, 19 nt, Artificial Sequence
  Description of Artificial Sequence: Synthetic oligonucleotide
gagggaggucuacucaggg

SEQ ID NO: 2256257 - RNA, 19 nt, Artificial Sequence
  Description of Artificial Sequence: Synthetic oligonucleotide
  modified_base (7)..(7): a, c, u, g, unknown or other
gugguuncagagucugaag

SEQ ID NO: 2256258 - RNA, 19 nt, Artificial Sequence
  Description of Artificial Sequence: Synthetic oligonucleotide
ucuuguggacagaaauacu

SEQ ID NO: 2256259 - RNA, 19 nt, Artificial Sequence
  Description of Artificial Sequence: Synthetic oligonucleotide
cucagcucgaaccacuuuc

SEQ ID NO: 2256260 - RNA, 19 nt, Artificial Sequence
  Description of Artificial Sequence: Synthetic oligonucleotide
uuugggacccaauguguga

SEQ ID NO: 2256261 - RNA, 19 nt, Artificial Sequence
  Description of Artificial Sequence: Synthetic oligonucleotide
ugcuuaucagccuccaaau

SEQ ID NO: 2256262 - RNA, 19 nt, Artificial Sequence
  Description of Artificial Sequence: Synthetic oligonucleotide
ucuacucagggacuccagu

SEQ ID NO: 2256263 - RNA, 19 nt, Artificial Sequence
  Description of Artificial Sequence: Synthetic oligonucleotide
ucccuuugcuggcuggccg

SEQ ID NO: 2256264 - RNA, 19 nt, Artificial Sequence
  Description of Artificial Sequence: Synthetic oligonucleotide
cuuuugcuuaucagccucc

SEQ ID NO: 2256265 - RNA, 19 nt, Artificial Sequence
  Description of Artificial Sequence: Synthetic oligonucleotide
aaagacagcugcaauugau

SEQ ID NO: 2256266 - RNA, 19 nt, Artificial Sequence
  Description of Artificial Sequence: Synthetic oligonucleotide
  modified_base (2)..(2): a, c, u, g, unknown or other
uncagagucugaaggugcu

SEQ ID NO: 2256267 - RNA, 19 nt, Artificial Sequence
  Description of Artificial Sequence: Synthetic oligonucleotide
uacgucaaaugacuugauc

SEQ ID NO: 2256268 - RNA, 19 nt, Artificial Sequence
  Description of Artificial Sequence: Synthetic oligonucleotide
cagugagggacucuuucgg

SEQ ID NO: 2256269 - RNA, 19 nt, Artificial Sequence
  Description of Artificial Sequence: Synthetic oligonucleotide
uccggcagauccaagcgcu

SEQ ID NO: 2256270 - RNA, 19 nt, Artificial Sequence
  Description of Artificial Sequence: Synthetic oligonucleotide
gugguggacagugagcagg

SEQ ID NO: 2256271 - RNA, 19 nt, Artificial Sequence
  Description of Artificial Sequence: Synthetic oligonucleotide
uaacucuacauuccuccaa

SEQ ID NO: 2256272 - RNA, 19 nt, Artificial Sequence
  Description of Artificial Sequence: Synthetic oligonucleotide
aaggauuccugagcauggg

SEQ ID NO: 2256273 - RNA, 19 nt, Artificial Sequence
  Description of Artificial Sequence: Synthetic oligonucleotide
uaagggucugacuuccggu

SEQ ID NO: 2256274 - RNA, 19 nt, Artificial Sequence
  Description of Artificial Sequence: Synthetic oligonucleotide
auuccugagcaugggcucc

SEQ ID NO: 2256275 - RNA, 19 nt, Artificial Sequence
  Description of Artificial Sequence: Synthetic oligonucleotide
aucagugacuuuacagugg

SEQ ID NO: 2256276 - RNA, 19 nt, Artificial Sequence
  Description of Artificial Sequence: Synthetic oligonucleotide
acgucugcaucugcgaugg

SEQ ID NO: 2256277 - RNA, 19 nt, Artificial Sequence
  Description of Artificial Sequence: Synthetic oligonucleotide
gaaauacucuguccagcac

SEQ ID NO: 2256278 - RNA, 19 nt, Artificial Sequence
  Description of Artificial Sequence: Synthetic oligonucleotide
gugagggacucuuucggag

SEQ ID NO: 2256279 - RNA, 19 nt, Artificial Sequence
  Description of Artificial Sequence: Synthetic oligonucleotide
auuucaggccaaguggcag

SEQ ID NO: 2256280 - RNA, 19 nt, Artificial Sequence
  Description of Artificial Sequence: Synthetic oligonucleotide
  modified_base (18)..(18): a, c, u, g, unknown or other
gugacuuuacagugguunc

SEQ ID NO: 2256281 - RNA, 19 nt, Artificial Sequence
  Description of Artificial Sequence: Synthetic oligonucleotide
uuaagccuuccuuggaaau

SEQ ID NO: 2256282 - RNA, 19 nt, Artificial Sequence
  Description of Artificial Sequence: Synthetic oligonucleotide
auggcuagguggugggcac

SEQ ID NO: 2256283 - RNA, 19 nt, Artificial Sequence
  Description of Artificial Sequence: Synthetic oligonucleotide
uugggacccaaugugugag

SEQ ID NO: 2256284 - RNA, 19 nt, Artificial Sequence
  Description of Artificial Sequence: Synthetic oligonucleotide
cagaaauacucuguccagc

SEQ ID NO: 2256285 - RNA, 19 nt, Artificial Sequence
  Description of Artificial Sequence: Synthetic oligonucleotide
ugccuuuagcaauucuugu

SEQ ID NO: 2256286 - RNA, 19 nt, Artificial Sequence
  Description of Artificial Sequence: Synthetic oligonucleotide
uucuugucugagcucugug

SEQ ID NO: 2256287 - RNA, 19 nt, Artificial Sequence
  Description of Artificial Sequence: Synthetic oligonucleotide
uucccuucagaagaucuga

SEQ ID NO: 2256288 - RNA, 19 nt, Artificial Sequence
  Description of Artificial Sequence: Synthetic oligonucleotide
uuccaagguaacucuacau

SEQ ID NO: 2256289 - RNA, 19 nt, Artificial Sequence
  Description of Artificial Sequence: Synthetic oligonucleotide
  modified_base (17)..(17): a, c, u, g, unknown or other
ugacuuuacagugguunca

SEQ ID NO: 2256290 - RNA, 19 nt, Artificial Sequence
  Description of Artificial Sequence: Synthetic oligonucleotide
ucuacagccuuuugcuuau

SEQ ID NO: 2256291 - RNA, 19 nt, Artificial Sequence
  Description of Artificial Sequence: Synthetic oligonucleotide
uccaaaguuuagccaucgc

SEQ ID NO: 2256292 - RNA, 19 nt, Artificial Sequence
  Description of Artificial Sequence: Synthetic oligonucleotide
ugcuaucugucccauggua

SEQ ID NO: 2256293 - RNA, 19 nt, Artificial Sequence
  Description of Artificial Sequence: Synthetic oligonucleotide
gcauuggagagacagcagc

SEQ ID NO: 2256294 - RNA, 19 nt, Artificial Sequence
  Description of Artificial Sequence: Synthetic oligonucleotide
cugggagucuuguggacag

SEQ ID NO: 2256295 - RNA, 19 nt, Artificial Sequence
  Description of Artificial Sequence: Synthetic oligonucleotide
aacaaggauuccugagcau

SEQ ID NO: 2256296 - RNA, 19 nt, Artificial Sequence
  Description of Artificial Sequence: Synthetic oligonucleotide
ucucuagaaacuucccauu

SEQ ID NO: 2256297 - RNA, 19 nt, Artificial Sequence
  Description of Artificial Sequence: Synthetic oligonucleotide
gacuccacgccaccggcag

SEQ ID NO: 2256298 - RNA, 19 nt, Artificial Sequence
  Description of Artificial Sequence: Synthetic oligonucleotide
cugacuuccgguccucagc

SEQ ID NO: 2256299 - RNA, 19 nt, Artificial Sequence
  Description of Artificial Sequence: Synthetic oligonucleotide
aauuucaggccaaguggca

SEQ ID NO: 2256300 - RNA, 19 nt, Artificial Sequence
  Description of Artificial Sequence: Synthetic oligonucleotide
guacugcuggccucuacag

SEQ ID NO: 2256301 - RNA, 19 nt, Artificial Sequence
  Description of Artificial Sequence: Synthetic oligonucleotide
  modified_base (8)..(8): a, c, u, g, unknown or other
agugguuncagagucugaa

SEQ ID NO: 2256302 - RNA, 19 nt, Artificial Sequence
  Description of Artificial Sequence: Synthetic oligonucleotide
  modified_base (11)..(11): a, c, u, g, unknown or other
uacagugguuncagagucu

SEQ ID NO: 2256303 - RNA, 19 nt, Artificial Sequence
  Description of Artificial Sequence: Synthetic oligonucleotide
gggaggucuacucagggac

SEQ ID NO: 2256304 - RNA, 19 nt, Artificial Sequence
  Description of Artificial Sequence: Synthetic oligonucleotide
ugugugagaagcggggccu

SEQ ID NO: 2256305 - RNA, 19 nt, Artificial Sequence
  Description of Artificial Sequence: Synthetic oligonucleotide
auuggagagacagcagcug

SEQ ID NO: 2256306 - RNA, 19 nt, Artificial Sequence
  Description of Artificial Sequence: Synthetic oligonucleotide
cuggcuggccgcauagugc

SEQ ID NO: 2256307 - RNA, 19 nt, Artificial Sequence
  Description of Artificial Sequence: Synthetic oligonucleotide
agugagggacucuuucgga

SEQ ID NO: 2256308 - RNA, 19 nt, Artificial Sequence
  Description of Artificial Sequence: Synthetic oligonucleotide
gaaagacagcugcaauuga

SEQ ID NO: 2256309 - RNA, 19 nt, Artificial Sequence
  Description of Artificial Sequence: Synthetic oligonucleotide
gaaggugcuggagauguuc

SEQ ID NO: 2256310 - RNA, 19 nt, Artificial Sequence
  Description of Artificial Sequence: Synthetic oligonucleotide
ugcuggagauguucuguug

SEQ ID NO: 2256311 - RNA, 19 nt, Artificial Sequence
  Description of Artificial Sequence: Synthetic oligonucleotide
agacacgucugcaucugcg

SEQ ID NO: 2256312 - RNA, 19 nt, Artificial Sequence
  Description of Artificial Sequence: Synthetic oligonucleotide
aaggaccccauucuccauu

SEQ ID NO: 2256313 - RNA, 19 nt, Artificial Sequence
  Description of Artificial Sequence: Synthetic oligonucleotide
cuccaaaguuuagccaucg

SEQ ID NO: 2256314 - RNA, 19 nt, Artificial Sequence
  Description of Artificial Sequence: Synthetic oligonucleotide
ccaaugugugagaagcggg

SEQ ID NO: 2256315 - RNA, 19 nt, Artificial Sequence
  Description of Artificial Sequence: Synthetic oligonucleotide
ggcacagcagguguggugg

SEQ ID NO: 2256316 - RNA, 19 nt, Artificial Sequence
  Description of Artificial Sequence: Synthetic oligonucleotide
ugcuggagcaguccucacu

SEQ ID NO: 2256317 - RNA, 19 nt, Artificial Sequence
  Description of Artificial Sequence: Synthetic oligonucleotide
caaaugacuugaucaguga

SEQ ID NO: 2256318 - RNA, 19 nt, Artificial Sequence
  Description of Artificial Sequence: Synthetic oligonucleotide
acuuccgguccucagcccu

SEQ ID NO: 2256319 - RNA, 19 nt, Artificial Sequence
  Description of Artificial Sequence: Synthetic oligonucleotide
gacauagacuccacgccac

SEQ ID NO: 2256320 - RNA, 19 nt, Artificial Sequence
  Description of Artificial Sequence: Synthetic oligonucleotide
agauccaagcgcugugcca

SEQ ID NO: 2256321 - RNA, 19 nt, Artificial Sequence
  Description of Artificial Sequence: Synthetic oligonucleotide
guaacucuacauuccucca

SEQ ID NO: 2256322 - RNA, 19 nt, Artificial Sequence
  Description of Artificial Sequence: Synthetic oligonucleotide
auucuccauuuucaagccu

SEQ ID NO: 2256323 - RNA, 19 nt, Artificial Sequence
  Description of Artificial Sequence: Synthetic oligonucleotide
gugugguggacagugagca

SEQ ID NO: 2256324 - RNA, 19 nt, Artificial Sequence
  Description of Artificial Sequence: Synthetic oligonucleotide
cugcauuggagagacagca

SEQ ID NO: 2256325 - RNA, 19 nt, Artificial Sequence
  Description of Artificial Sequence: Synthetic oligonucleotide
gguccggcagauccaagcg

SEQ ID NO: 2256326 - RNA, 19 nt, Artificial Sequence
  Description of Artificial Sequence: Synthetic oligonucleotide
ucgaaccacuuucagcauu

SEQ ID NO: 2256327 - RNA, 19 nt, Artificial Sequence
  Description of Artificial Sequence: Synthetic oligonucleotide
ugaucuuucucagcucgaa

SEQ ID NO: 2256328 - RNA, 19 nt, Artificial Sequence
  Description of Artificial Sequence: Synthetic oligonucleotide
cagauccaagcgcugugcc

SEQ ID NO: 2256329 - RNA, 19 nt, Artificial Sequence
  Description of Artificial Sequence: Synthetic oligonucleotide
gauggcuagguggugggca

SEQ ID NO: 2256330 - RNA, 19 nt, Artificial Sequence
  Description of Artificial Sequence: Synthetic oligonucleotide
gacacgucugcaucugcga

SEQ ID NO: 2256331 - RNA, 19 nt, Artificial Sequence
  Description of Artificial Sequence: Synthetic oligonucleotide
cuucugggagucuugugga

SEQ ID NO: 2256332 - RNA, 19 nt, Artificial Sequence
  Description of Artificial Sequence: Synthetic oligonucleotide
  modified_base (15)..(15): a, c, u, g, unknown or other
acuuuacagugguuncaga

SEQ ID NO: 2256333 - RNA, 19 nt, Artificial Sequence
  Description of Artificial Sequence: Synthetic oligonucleotide
agcaguccucacugggauc

SEQ ID NO: 2256334 - RNA, 19 nt, Artificial Sequence
  Description of Artificial Sequence: Synthetic oligonucleotide
cacgucugcaucugcgaug

SEQ ID NO: 2256335 - RNA, 19 nt, Artificial Sequence
  Description of Artificial Sequence: Synthetic oligonucleotide
cuggaaacauguuuaauuu

SEQ ID NO: 2256336 - RNA, 19 nt, Artificial Sequence
  Description of Artificial Sequence: Synthetic oligonucleotide
caccauuugccuuuagcaa

SEQ ID NO: 2256337 - RNA, 19 nt, Artificial Sequence
  Description of Artificial Sequence: Synthetic oligonucleotide
ugcgauggagaugguggag

SEQ ID NO: 2256338 - RNA, 19 nt, Artificial Sequence
  Description of Artificial Sequence: Synthetic oligonucleotide
aucccuuugcuggcuggcc

SEQ ID NO: 2256339 - RNA, 19 nt, Artificial Sequence
  Description of Artificial Sequence: Synthetic oligonucleotide
auguuuaauuucaccauuu

SEQ ID NO: 2256340 - RNA, 19 nt, Artificial Sequence
  Description of Artificial Sequence: Synthetic oligonucleotide
aguuuagccaucgcacuau

SEQ ID NO: 2256341 - RNA, 19 nt, Artificial Sequence
  Description of Artificial Sequence: Synthetic oligonucleotide
agguaacucuacauuccuc

SEQ ID NO: 2256342 - RNA, 19 nt, Artificial Sequence
  Description of Artificial Sequence: Synthetic oligonucleotide
ccauugggaacaaggauuc

SEQ ID NO: 2256343 - RNA, 19 nt, Artificial Sequence
  Description of Artificial Sequence: Synthetic oligonucleotide
gggagggaggucuacucag

SEQ ID NO: 2256344 - RNA, 19 nt, Artificial Sequence
  Description of Artificial Sequence: Synthetic oligonucleotide
ccaaaguuuagccaucgca

SEQ ID NO: 2256345 - RNA, 19 nt, Artificial Sequence
  Description of Artificial Sequence: Synthetic oligonucleotide
cuuccaagguaacucuaca

SEQ ID NO: 2256346 - RNA, 19 nt, Artificial Sequence
  Description of Artificial Sequence: Synthetic oligonucleotide
gcaauugaucuuucucagc

SEQ ID NO: 2256347 - RNA, 19 nt, Artificial Sequence
  Description of Artificial Sequence: Synthetic oligonucleotide
ccaggacuaauuucaggcc

SEQ ID NO: 2256348 - RNA, 19 nt, Artificial Sequence
  Description of Artificial Sequence: Synthetic oligonucleotide
agaagcggggccugccucu

SEQ ID NO: 2256349 - RNA, 19 nt, Artificial Sequence
  Description of Artificial Sequence: Synthetic oligonucleotide
agcgcugguucacuuggcu

SEQ ID NO: 2256350 - RNA, 19 nt, Artificial Sequence
  Description of Artificial Sequence: Synthetic oligonucleotide
agggaggucuacucaggga

SEQ ID NO: 2256351 - RNA, 19 nt, Artificial Sequence
  Description of Artificial Sequence: Synthetic oligonucleotide
ucccaugguacugcuggcc

SEQ ID NO: 2256352 - RNA, 19 nt, Artificial Sequence
  Description of Artificial Sequence: Synthetic oligonucleotide
cucacugggaucccacuca

SEQ ID NO: 2256353 - RNA, 19 nt, Artificial Sequence
  Description of Artificial Sequence: Synthetic oligonucleotide
aggucuacucagggacucc

SEQ ID NO: 2256354 - RNA, 19 nt, Artificial Sequence
  Description of Artificial Sequence: Synthetic oligonucleotide
cagcauucuuugcuagcag

SEQ ID NO: 2256355 - RNA, 19 nt, Artificial Sequence
  Description of Artificial Sequence: Synthetic oligonucleotide
cuugaucagugacuuuaca

SEQ ID NO: 2256356 - RNA, 19 nt, Artificial Sequence
  Description of Artificial Sequence: Synthetic oligonucleotide
cagcccuucccuucagaag

SEQ ID NO: 2256357 - RNA, 19 nt, Artificial Sequence
  Description of Artificial Sequence: Synthetic oligonucleotide
ucggagguaagggucugac

SEQ ID NO: 2256358 - RNA, 19 nt, Artificial Sequence
  Description of Artificial Sequence: Synthetic oligonucleotide
gcauucuuugcuagcaggc

SEQ ID NO: 2256359 - RNA, 19 nt, Artificial Sequence
  Description of Artificial Sequence: Synthetic oligonucleotide
cuuccuuggaaauccagau

SEQ ID NO: 2256360 - RNA, 19 nt, Artificial Sequence
  Description of Artificial Sequence: Synthetic oligonucleotide
agcaggcgcuuccaggacu

SEQ ID NO: 2256361 - RNA, 19 nt, Artificial Sequence
  Description of Artificial Sequence: Synthetic oligonucleotide
caauucuugucugagcucu

SEQ ID NO: 2256362 - RNA, 19 nt, Artificial Sequence
  Description of Artificial Sequence: Synthetic oligonucleotide
gagaugguggagccagcuc

SEQ ID NO: 2256363 - RNA, 19 nt, Artificial Sequence
  Description of Artificial Sequence: Synthetic oligonucleotide
acuccacgccaccggcagc

SEQ ID NO: 2256364 - RNA, 19 nt, Artificial Sequence
  Description of Artificial Sequence: Synthetic oligonucleotide
ucacuuggcuuaagccuuc

SEQ ID NO: 2256365 - RNA, 19 nt, Artificial Sequence
  Description of Artificial Sequence: Synthetic oligonucleotide
uuugcuggcuggccgcaua

SEQ ID NO: 2256366 - RNA, 19 nt, Artificial Sequence
  Description of Artificial Sequence: Synthetic oligonucleotide
ggagguaagggucugacuu

SEQ ID NO: 2256367 - RNA, 19 nt, Artificial Sequence
  Description of Artificial Sequence: Synthetic oligonucleotide
uucucagcucgaaccacuu

SEQ ID NO: 2256368 - RNA, 19 nt, Artificial Sequence
  Description of Artificial Sequence: Synthetic oligonucleotide
gcuggagauguucuguuga

SEQ ID NO: 2256369 - RNA, 19 nt, Artificial Sequence
  Description of Artificial Sequence: Synthetic oligonucleotide
ggccgcauagugcuguaag

SEQ ID NO: 2256370 - RNA, 19 nt, Artificial Sequence
  Description of Artificial Sequence: Synthetic oligonucleotide
gcuuaucagccuccaaaug

SEQ ID NO: 2256371 - RNA, 19 nt, Artificial Sequence
  Description of Artificial Sequence: Synthetic oligonucleotide
gugaaagacagcugcaauu

SEQ ID NO: 2256372 - RNA, 19 nt, Artificial Sequence
  Description of Artificial Sequence: Synthetic oligonucleotide
acacgucugcaucugcgau

SEQ ID NO: 2256373 - RNA, 19 nt, Artificial Sequence
  Description of Artificial Sequence: Synthetic oligonucleotide
guccggcagauccaagcgc

SEQ ID NO: 2256374 - RNA, 19 nt, Artificial Sequence
  Description of Artificial Sequence: Synthetic oligonucleotide
gagauguucuguugacaua

SEQ ID NO: 2256375 - RNA, 19 nt, Artificial Sequence
  Description of Artificial Sequence: Synthetic oligonucleotide
cccaaugugugagaagcgg

SEQ ID NO: 2256376 - RNA, 19 nt, Artificial Sequence
  Description of Artificial Sequence: Synthetic oligonucleotide
ugguggagccagcucugcu

SEQ ID NO: 2256377 - RNA, 19 nt, Artificial Sequence
  Description of Artificial Sequence: Synthetic oligonucleotide
  modified_base (5)..(5): a, c, u, g, unknown or other
gguuncagagucugaaggu

SEQ ID NO: 2256378 - RNA, 19 nt, Artificial Sequence
  Description of Artificial Sequence: Synthetic oligonucleotide
cagggagggaggucuacuc

SEQ ID NO: 2256379 - RNA, 19 nt, Artificial Sequence
  Description of Artificial Sequence: Synthetic oligonucleotide
acccaaugugugagaagcg

SEQ ID NO: 2256380 - RNA, 19 nt, Artificial Sequence
  Description of Artificial Sequence: Synthetic oligonucleotide
cuaucugucccaugguacu

SEQ ID NO: 2256381 - RNA, 19 nt, Artificial Sequence
  Description of Artificial Sequence: Synthetic oligonucleotide
gcuaucugucccaugguac

SEQ ID NO: 2256382 - RNA, 19 nt, Artificial Sequence
  Description of Artificial Sequence: Synthetic oligonucleotide
gaggucuacucagggacuc

SEQ ID NO: 2256383 - RNA, 19 nt, Artificial Sequence
  Description of Artificial Sequence: Synthetic oligonucleotide
ugugugcccuacgucaaau

SEQ ID NO: 2256384 - RNA, 19 nt, Artificial Sequence
  Description of Artificial Sequence: Synthetic oligonucleotide
ccuuuugcuuaucagccuc

SEQ ID NO: 2256385 - RNA, 19 nt, Artificial Sequence
  Description of Artificial Sequence: Synthetic oligonucleotide
ccuuccaagguaacucuac

SEQ ID NO: 2256386 - RNA, 19 nt, Artificial Sequence
  Description of Artificial Sequence: Synthetic oligonucleotide
uuucggagguaagggucug

SEQ ID NO: 2256387 - RNA, 19 nt, Artificial Sequence
  Description of Artificial Sequence: Synthetic oligonucleotide
ggaaauccagauggcuagg

SEQ ID NO: 2256388 - RNA, 19 nt, Artificial Sequence
  Description of Artificial Sequence: Synthetic oligonucleotide
ugugagaagcggggccugc

SEQ ID NO: 2256389 - RNA, 19 nt, Artificial Sequence
  Description of Artificial Sequence: Synthetic oligonucleotide
gugugcccuacgucaaaug

SEQ ID NO: 2256390 - RNA, 19 nt, Artificial Sequence
  Description of Artificial Sequence: Synthetic oligonucleotide
uccaagcgcugugccaucc

SEQ ID NO: 2256391 - RNA, 19 nt, Artificial Sequence
  Description of Artificial Sequence: Synthetic oligonucleotide
gugcccuacgucaaaugac

SEQ ID NO: 2256392 - RNA, 19 nt, Artificial Sequence
  Description of Artificial Sequence: Synthetic oligonucleotide
cauguuuaauuucaccauu

SEQ ID NO: 2256393 - RNA, 19 nt, Artificial Sequence
  Description of Artificial Sequence: Synthetic oligonucleotide
ugggacccaaugugugaga

SEQ ID NO: 2256394 - RNA, 19 nt, Artificial Sequence
  Description of Artificial Sequence: Synthetic oligonucleotide
ugcuagcaggcuggaaaca

SEQ ID NO: 2256395 - RNA, 19 nt, Artificial Sequence
  Description of Artificial Sequence: Synthetic oligonucleotide
cacgccaccggcagcagca

SEQ ID NO: 2256396 - RNA, 19 nt, Artificial Sequence
  Description of Artificial Sequence: Synthetic oligonucleotide
cacugggaucccacucagg

SEQ ID NO: 2256397 - RNA, 19 nt, Artificial Sequence
  Description of Artificial Sequence: Synthetic oligonucleotide
auccaagcgcugugccauc

SEQ ID NO: 2256398 - RNA, 19 nt, Artificial Sequence
  Description of Artificial Sequence: Synthetic oligonucleotide
cuuucggagguaagggucu

SEQ ID NO: 2256399 - RNA, 19 nt, Artificial Sequence
  Description of Artificial Sequence: Synthetic oligonucleotide
cagacacgucugcaucugc

SEQ ID NO: 2256400 - RNA, 19 nt, Artificial Sequence
  Description of Artificial Sequence: Synthetic oligonucleotide
cauugggaacaaggauucc

SEQ ID NO: 2256401 - RNA, 19 nt, Artificial Sequence
  Description of Artificial Sequence: Synthetic oligonucleotide
cucuacauuccuccaaagu

SEQ ID NO: 2256402 - RNA, 19 nt, Artificial Sequence
  Description of Artificial Sequence: Synthetic oligonucleotide
cagcucgaaccacuuucag

SEQ ID NO: 2256403 - RNA, 19 nt, Artificial Sequence
  Description of Artificial Sequence: Synthetic oligonucleotide
ccuacgucaaaugacuuga

SEQ ID NO: 2256404 - RNA, 19 nt, Artificial Sequence
  Description of Artificial Sequence: Synthetic oligonucleotide
gauccaagcgcugugccau

SEQ ID NO: 2256405 - RNA, 19 nt, Artificial Sequence
  Description of Artificial Sequence: Synthetic oligonucleotide
ucucagcucgaaccacuuu

SEQ ID NO: 2256406 - RNA, 19 nt, Artificial Sequence
  Description of Artificial Sequence: Synthetic oligonucleotide
gcuggcuggccgcauagug

SEQ ID NO: 2256407 - RNA, 19 nt, Artificial Sequence
  Description of Artificial Sequence: Synthetic oligonucleotide
gauguucuguugacauaga

SEQ ID NO: 2256408 - RNA, 19 nt, Artificial Sequence
  Description of Artificial Sequence: Synthetic oligonucleotide
cagaagagggccuggauuu

SEQ ID NO: 2256409 - RNA, 19 nt, Artificial Sequence
  Description of Artificial Sequence: Synthetic oligonucleotide
caucccuuugcuggcuggc

SEQ ID NO: 2256410 - RNA, 19 nt, Artificial Sequence
  Description of Artificial Sequence: Synthetic oligonucleotide
ucuuugcuagcaggcugga

SEQ ID NO: 2256411 - RNA, 19 nt, Artificial Sequence
  Description of Artificial Sequence: Synthetic oligonucleotide
cuuggaaauccagauggcu

SEQ ID NO: 2256412 - RNA, 19 nt, Artificial Sequence
  Description of Artificial Sequence: Synthetic oligonucleotide
auagugcuguaaguugaau

SEQ ID NO: 2256413 - RNA, 19 nt, Artificial Sequence
  Description of Artificial Sequence: Synthetic oligonucleotide
cgcauagugcuguaaguug

SEQ ID NO: 2256414 - RNA, 19 nt, Artificial Sequence
  Description of Artificial Sequence: Synthetic oligonucleotide
gaaauccagauggcuaggu

SEQ ID NO: 2256415 - RNA, 19 nt, Artificial Sequence
  Description of Artificial Sequence: Synthetic oligonucleotide
gugcuguaaguugaauguc

SEQ ID NO: 2256416 - RNA, 19 nt, Artificial Sequence
  Description of Artificial Sequence: Synthetic oligonucleotide
cccuacgucaaaugacuug

SEQ ID NO: 2256417 - RNA, 19 nt, Artificial Sequence
  Description of Artificial Sequence: Synthetic oligonucleotide
auacucuguccagcaccac

SEQ ID NO: 2256418 - RNA, 19 nt, Artificial Sequence
  Description of Artificial Sequence: Synthetic oligonucleotide
acauuccuccaaaguuuag

SEQ ID NO: 2256419 - RNA, 19 nt, Artificial Sequence
  Description of Artificial Sequence: Synthetic oligonucleotide
agcaugggcuccagacacg

SEQ ID NO: 2256420 - RNA, 19 nt, Artificial Sequence
  Description of Artificial Sequence: Synthetic oligonucleotide
gcuuaagccuuccuuggaa

SEQ ID NO: 2256421 - RNA, 19 nt, Artificial Sequence
  Description of Artificial Sequence: Synthetic oligonucleotide
ggcagauccaagcgcugug

SEQ ID NO: 2256422 - RNA, 19 nt, Artificial Sequence
  Description of Artificial Sequence: Synthetic oligonucleotide
cugugccaucccuuugcug

SEQ ID NO: 2256423 - RNA, 19 nt, Artificial Sequence
  Description of Artificial Sequence: Synthetic oligonucleotide
gucaaaugacuugaucagu

SEQ ID NO: 2256424 - RNA, 19 nt, Artificial Sequence
  Description of Artificial Sequence: Synthetic oligonucleotide
cuuggcuuaagccuuccuu

SEQ ID NO: 2256425 - RNA, 19 nt, Artificial Sequence
  Description of Artificial Sequence: Synthetic oligonucleotide
ggagggaggucuacucagg

SEQ ID NO: 2256426 - RNA, 19 nt, Artificial Sequence
  Description of Artificial Sequence: Synthetic oligonucleotide
gagggacucuuucggaggu

SEQ ID NO: 2256427 - RNA, 19 nt, Artificial Sequence
  Description of Artificial Sequence: Synthetic oligonucleotide
ccuuccuuggaaauccaga

SEQ ID NO: 2256428 - RNA, 19 nt, Artificial Sequence
  Description of Artificial Sequence: Synthetic oligonucleotide
gucccaugguacugcuggc

SEQ ID NO: 2256429 - RNA, 19 nt, Artificial Sequence
  Description of Artificial Sequence: Synthetic oligonucleotide
gucuacucagggacuccag

SEQ ID NO: 2256430 - RNA, 19 nt, Artificial Sequence
  Description of Artificial Sequence: Synthetic oligonucleotide
cugcgauggagauggugga

SEQ ID NO: 2256431 - RNA, 19 nt, Artificial Sequence
  Description of Artificial Sequence: Synthetic oligonucleotide
gcaauucuugucugagcuc

SEQ ID NO: 2256432 - RNA, 19 nt, Artificial Sequence
  Description of Artificial Sequence: Synthetic oligonucleotide
gcuguaaguugaaugucuc

SEQ ID NO: 2256433 - RNA, 19 nt, Artificial Sequence
  Description of Artificial Sequence: Synthetic oligonucleotide
augagccuucaaggacccc

SEQ ID NO: 2256434 - RNA, 19 nt, Artificial Sequence
  Description of Artificial Sequence: Synthetic oligonucleotide
ccggcagcagcauucuuug

SEQ ID NO: 2256435 - RNA, 19 nt, Artificial Sequence
  Description of Artificial Sequence: Synthetic oligonucleotide
uucggagguaagggucuga

SEQ ID NO: 2256436 - RNA, 19 nt, Artificial Sequence
  Description of Artificial Sequence: Synthetic oligonucleotide
gagcaguccucacugggau

SEQ ID NO: 2256437 - RNA, 19 nt, Artificial Sequence
  Description of Artificial Sequence: Synthetic oligonucleotide
gacuaauuucaggccaagu

SEQ ID NO: 2256438 - RNA, 19 nt, Artificial Sequence
  Description of Artificial Sequence: Synthetic oligonucleotide
gucugagcucugugaaaga

SEQ ID NO: 2256439 - RNA, 19 nt, Artificial Sequence
  Description of Artificial Sequence: Synthetic oligonucleotide
ggacuaauuucaggccaag

SEQ ID NO: 2256440 - RNA, 19 nt, Artificial Sequence
  Description of Artificial Sequence: Synthetic oligonucleotide
cucuuucggagguaagggu

SEQ ID NO: 2256441 - RNA, 19 nt, Artificial Sequence
  Description of Artificial Sequence: Synthetic oligonucleotide
gacagcugcaauugaucuu

SEQ ID NO: 2256442 - RNA, 19 nt, Artificial Sequence
  Description of Artificial Sequence: Synthetic oligonucleotide
ggccugccucucuagaaac

SEQ ID NO: 2256443 - RNA, 19 nt, Artificial Sequence
  Description of Artificial Sequence: Synthetic oligonucleotide
gcagauccaagcgcugugc

SEQ ID NO: 2256444 - RNA, 19 nt, Artificial Sequence
  Description of Artificial Sequence: Synthetic oligonucleotide
caccugugugcccuacguc

SEQ ID NO: 2256445 - RNA, 19 nt, Artificial Sequence
  Description of Artificial Sequence: Synthetic oligonucleotide
cugaaccucaaaguucucu

SEQ ID NO: 2256446 - RNA, 19 nt, Artificial Sequence
  Description of Artificial Sequence: Synthetic oligonucleotide
uccgguccucagcccuucc

SEQ ID NO: 2256447 - RNA, 19 nt, Artificial Sequence
  Description of Artificial Sequence: Synthetic oligonucleotide
auggagcgcugguucacuu

SEQ ID NO: 2256448 - RNA, 19 nt, Artificial Sequence
  Description of Artificial Sequence: Synthetic oligonucleotide
ggauuccugagcaugggcu

SEQ ID NO: 2256449 - RNA, 19 nt, Artificial Sequence
  Description of Artificial Sequence: Synthetic oligonucleotide
ccucucuagaaacuuccca

SEQ ID NO: 2256450 - RNA, 19 nt, Artificial Sequence
  Description of Artificial Sequence: Synthetic oligonucleotide
ggcuuaagccuuccuugga

SEQ ID NO: 2256451 - RNA, 19 nt, Artificial Sequence
  Description of Artificial Sequence: Synthetic oligonucleotide
  modified_base (9)..(9): a, c, u, g, unknown or other
cagugguuncagagucuga

SEQ ID NO: 2256452 - RNA, 19 nt, Artificial Sequence
  Description of Artificial Sequence: Synthetic oligonucleotide
aagcggggccugccucucu

SEQ ID NO: 2256453 - RNA, 19 nt, Artificial Sequence
  Description of Artificial Sequence: Synthetic oligonucleotide
ccaucccuuugcuggcugg

SEQ ID NO: 2256454 - RNA, 19 nt, Artificial Sequence
  Description of Artificial Sequence: Synthetic oligonucleotide
auuucaccauuugccuuua

SEQ ID NO: 2256455 - RNA, 19 nt, Artificial Sequence
  Description of Artificial Sequence: Synthetic oligonucleotide
aguccucacugggauccca

SEQ ID NO: 2256456 - RNA, 19 nt, Artificial Sequence
  Description of Artificial Sequence: Synthetic oligonucleotide
ugggcacagcagguguggu

SEQ ID NO: 2256457 - RNA, 19 nt, Artificial Sequence
  Description of Artificial Sequence: Synthetic oligonucleotide
gagcgcugguucacuuggc

SEQ ID NO: 2256458 - RNA, 19 nt, Artificial Sequence
  Description of Artificial Sequence: Synthetic oligonucleotide
cuccacgccaccggcagca

SEQ ID NO: 2256459 - RNA, 19 nt, Artificial Sequence
  Description of Artificial Sequence: Synthetic oligonucleotide
caugggcuccagacacguc

SEQ ID NO: 2256460 - RNA, 19 nt, Artificial Sequence
  Description of Artificial Sequence: Synthetic oligonucleotide
cagguccggcagauccaag

SEQ ID NO: 2256461 - RNA, 19 nt, Artificial Sequence
  Description of Artificial Sequence: Synthetic oligonucleotide
gugugagaagcggggccug

SEQ ID NO: 2256462 - RNA, 19 nt, Artificial Sequence
  Description of Artificial Sequence: Synthetic oligonucleotide
ugccaucccuuugcuggcu

SEQ ID NO: 2256463 - RNA, 19 nt, Artificial Sequence
  Description of Artificial Sequence: Synthetic oligonucleotide
ggucuacucagggacucca

SEQ ID NO: 2256464 - RNA, 19 nt, Artificial Sequence
  Description of Artificial Sequence: Synthetic oligonucleotide
cccauugggaacaaggauu

SEQ ID NO: 2256465 - RNA, 19 nt, Artificial Sequence
  Description of Artificial Sequence: Synthetic oligonucleotide
uggcuagguggugggcaca

SEQ ID NO: 2256466 - RNA, 19 nt, Artificial Sequence
  Description of Artificial Sequence: Synthetic oligonucleotide
agccuccaaaugagccuuc

SEQ ID NO: 2256467 - RNA, 19 nt, Artificial Sequence
  Description of Artificial Sequence: Synthetic oligonucleotide
caagccuuccaagguaacu

SEQ ID NO: 2256468 - RNA, 19 nt, Artificial Sequence
  Description of Artificial Sequence: Synthetic oligonucleotide
caugguacugcuggccucu

SEQ ID NO: 2256469 - RNA, 19 nt, Artificial Sequence
  Description of Artificial Sequence: Synthetic oligonucleotide
gguggacagugagcaggcg

SEQ ID NO: 2256470 - RNA, 19 nt, Artificial Sequence
  Description of Artificial Sequence: Synthetic oligonucleotide
cugguucacuuggcuuaag

SEQ ID NO: 2256471 - RNA, 19 nt, Artificial Sequence
  Description of Artificial Sequence: Synthetic oligonucleotide
gggccuggauuugggaccc

SEQ ID NO: 2256472 - RNA, 19 nt, Artificial Sequence
  Description of Artificial Sequence: Synthetic oligonucleotide
cucagcccuucccuucaga

SEQ ID NO: 2256473 - RNA, 19 nt, Artificial Sequence
  Description of Artificial Sequence: Synthetic oligonucleotide
ccuucccuucagaagaucu

SEQ ID NO: 2256474 - RNA, 19 nt, Artificial Sequence
  Description of Artificial Sequence: Synthetic oligonucleotide
gccaccggcagcagcauuc

SEQ ID NO: 2256475 - RNA, 19 nt, Artificial Sequence
  Description of Artificial Sequence: Synthetic oligonucleotide
uccacgccaccggcagcag

SEQ ID NO: 2256476 - RNA, 19 nt, Artificial Sequence
  Description of Artificial Sequence: Synthetic oligonucleotide
gggccugccucucuagaaa

SEQ ID NO: 2256477 - RNA, 19 nt, Artificial Sequence
  Description of Artificial Sequence: Synthetic oligonucleotide
uuccgguccucagcccuuc

SEQ ID NO: 2256478 - RNA, 19 nt, Artificial Sequence
  Description of Artificial Sequence: Synthetic oligonucleotide
ccaugguacugcuggccuc

SEQ ID NO: 2256479 - RNA, 19 nt, Artificial Sequence
  Description of Artificial Sequence: Synthetic oligonucleotide
caguccucacugggauccc

SEQ ID NO: 2256480 - RNA, 19 nt, Artificial Sequence
  Description of Artificial Sequence: Synthetic oligonucleotide
ggggccugccucucuagaa

SEQ ID NO: 2256481 - RNA, 19 nt, Artificial Sequence
  Description of Artificial Sequence: Synthetic oligonucleotide
aggcgcuuccaggacuaau

SEQ ID NO: 2256482 - RNA, 19 nt, Artificial Sequence
  Description of Artificial Sequence: Synthetic oligonucleotide
ccaagcgcugugccauccc

SEQ ID NO: 2256483 - RNA, 19 nt, Artificial Sequence
  Description of Artificial Sequence: Synthetic oligonucleotide
cuacgucaaaugacuugau

SEQ ID NO: 2256484 - RNA, 19 nt, Artificial Sequence
  Description of Artificial Sequence: Synthetic oligonucleotide
gccgcauagugcuguaagu

SEQ ID NO: 2256485 - RNA, 19 nt, Artificial Sequence
  Description of Artificial Sequence: Synthetic oligonucleotide
cuuugcuagcaggcuggaa

SEQ ID NO: 2256486 - RNA, 19 nt, Artificial Sequence
  Description of Artificial Sequence: Synthetic oligonucleotide
ggcuccagacacgucugca

SEQ ID NO: 2256487 - RNA, 19 nt, Artificial Sequence
  Description of Artificial Sequence: Synthetic oligonucleotide
cugugugcccuacgucaaa

SEQ ID NO: 2256488 - RNA, 19 nt, Artificial Sequence
  Description of Artificial Sequence: Synthetic oligonucleotide
ccgguccucagcccuuccc

SEQ ID NO: 2256489 - RNA, 19 nt, Artificial Sequence
  Description of Artificial Sequence: Synthetic oligonucleotide
agcaggcuggaaacauguu

SEQ ID NO: 2256490 - RNA, 19 nt, Artificial Sequence
  Description of Artificial Sequence: Synthetic oligonucleotide
cagugagcaggcgcuucca

SEQ ID NO: 2256491 - RNA, 19 nt, Artificial Sequence
  Description of Artificial Sequence: Synthetic oligonucleotide
gcuagcaggcuggaaacau

SEQ ID NO: 2256492 - RNA, 19 nt, Artificial Sequence
  Description of Artificial Sequence: Synthetic oligonucleotide
cgcugguucacuuggcuua

SEQ ID NO: 2256493 - RNA, 19 nt, Artificial Sequence
  Description of Artificial Sequence: Synthetic oligonucleotide
agggacucuuucggaggua

SEQ ID NO: 2256494 - RNA, 19 nt, Artificial Sequence
  Description of Artificial Sequence: Synthetic oligonucleotide
gggucugacuuccgguccu

SEQ ID NO: 2256495 - RNA, 19 nt, Artificial Sequence
  Description of Artificial Sequence: Synthetic oligonucleotide
gcgcugugccaucccuuug

SEQ ID NO: 2256496 - RNA, 19 nt, Artificial Sequence
  Description of Artificial Sequence: Synthetic oligonucleotide
gcugguucacuuggcuuaa

SEQ ID NO: 2256497 - RNA, 19 nt, Artificial Sequence
  Description of Artificial Sequence: Synthetic oligonucleotide
cauggagcgcugguucacu

SEQ ID NO: 2256498 - RNA, 19 nt, Artificial Sequence
  Description of Artificial Sequence: Synthetic oligonucleotide
ggcgcuuccaggacuaauu

SEQ ID NO: 2256499 - RNA, 19 nt, Artificial Sequence
  Description of Artificial Sequence: Synthetic oligonucleotide
ggaggucuacucagggacu

SEQ ID NO: 2256500 - RNA, 19 nt, Artificial Sequence
  Description of Artificial Sequence: Synthetic oligonucleotide
caaggaccccauucuccau

SEQ ID NO: 2256501 - RNA, 19 nt, Artificial Sequence
  Description of Artificial Sequence: Synthetic oligonucleotide
gcuagguggugggcacagc

SEQ ID NO: 2256502 - RNA, 19 nt, Artificial Sequence
  Description of Artificial Sequence: Synthetic oligonucleotide
ccacgccaccggcagcagc

SEQ ID NO: 2256503 - RNA, 19 nt, Artificial Sequence
  Description of Artificial Sequence: Synthetic oligonucleotide
gcacagcagguguggugga

SEQ ID NO: 2256504 - RNA, 19 nt, Artificial Sequence
  Description of Artificial Sequence: Synthetic oligonucleotide
ccucagcccuucccuucag

SEQ ID NO: 2256505 - RNA, 19 nt, Artificial Sequence
  Description of Artificial Sequence: Synthetic oligonucleotide
cccaugguacugcuggccu

SEQ ID NO: 2256506 - RNA, 19 nt, Artificial Sequence
  Description of Artificial Sequence: Synthetic oligonucleotide
cuggccgcauagugcugua

SEQ ID NO: 2256507 - RNA, 19 nt, Artificial Sequence
  Description of Artificial Sequence: Synthetic oligonucleotide
ggacuccagugagggacuc

SEQ ID NO: 2256508 - RNA, 19 nt, Artificial Sequence
  Description of Artificial Sequence: Synthetic oligonucleotide
gcuggccgcauagugcugu

SEQ ID NO: 2256509 - RNA, 19 nt, Artificial Sequence
  Description of Artificial Sequence: Synthetic oligonucleotide
ggccaaguggcagcccaaa

SEQ ID NO: 2256510 - RNA, 19 nt, Artificial Sequence
  Description of Artificial Sequence: Synthetic oligonucleotide
ccaccugugugcccuacgu

SEQ ID NO: 2256511 - RNA, 19 nt, Artificial Sequence
  Description of Artificial Sequence: Synthetic oligonucleotide
cuuccgguccucagcccuu

SEQ ID NO: 2256512 - RNA, 19 nt, Artificial Sequence
  Description of Artificial Sequence: Synthetic oligonucleotide
cgaaccacuuucagcauuu

SEQ ID NO: 2256513 - RNA, 19 nt, Artificial Sequence
  Description of Artificial Sequence: Synthetic oligonucleotide
acgccaccggcagcagcau

SEQ ID NO: 2256514 - RNA, 19 nt, Artificial Sequence
  Description of Artificial Sequence: Synthetic oligonucleotide
ccugagcaugggcuccaga

SEQ ID NO: 2256515 - RNA, 19 nt, Artificial Sequence
  Description of Artificial Sequence: Synthetic oligonucleotide
gcgcugguucacuuggcuu

SEQ ID NO: 2256516 - RNA, 19 nt, Artificial Sequence
  Description of Artificial Sequence: Synthetic oligonucleotide
ccgcauagugcuguaaguu

SEQ ID NO: 2256517 - RNA, 19 nt, Artificial Sequence
  Description of Artificial Sequence: Synthetic oligonucleotide
gccugccucucuagaaacu

SEQ ID NO: 2256518 - RNA, 19 nt, Artificial Sequence
  Description of Artificial Sequence: Synthetic oligonucleotide
ccuuugcuggcuggccgca

SEQ ID NO: 2256519 - RNA, 19 nt, Artificial Sequence
  Description of Artificial Sequence: Synthetic oligonucleotide
cuuugcuggcuggccgcau

SEQ ID NO: 2256520 - RNA, 19 nt, Artificial Sequence
  Description of Artificial Sequence: Synthetic oligonucleotide
caggcgcuuccaggacuaa

SEQ ID NO: 2256521 - RNA, 19 nt, Artificial Sequence
  Description of Artificial Sequence: Synthetic oligonucleotide
cccaaagcccagggaggga

SEQ ID NO: 2256522 - RNA, 19 nt, Artificial Sequence
  Description of Artificial Sequence: Synthetic oligonucleotide
gcccuacgucaaaugacuu

SEQ ID NO: 2256523 - RNA, 19 nt, Artificial Sequence
  Description of Artificial Sequence: Synthetic oligonucleotide
ggaccccauucuccauuuu

SEQ ID NO: 2256524 - RNA, 19 nt, Artificial Sequence
  Description of Artificial Sequence: Synthetic oligonucleotide
gcaccaccugugugcccua

SEQ ID NO: 2256525 - RNA, 19 nt, Artificial Sequence
  Description of Artificial Sequence: Synthetic oligonucleotide
ggccuggauuugggaccca

SEQ ID NO: 2256526 - RNA, 19 nt, Artificial Sequence
  Description of Artificial Sequence: Synthetic oligonucleotide
caccggcagcagcauucuu

SEQ ID NO: 2256527 - RNA, 19 nt, Artificial Sequence
  Description of Artificial Sequence: Synthetic oligonucleotide
ccaccggcagcagcauucu

SEQ ID NO: 2256528 - RNA, 19 nt, Artificial Sequence
  Description of Artificial Sequence: Synthetic oligonucleotide
cgucugcaucugcgaugga

SEQ ID NO: 2256529 - RNA, 19 nt, Artificial Sequence
  Description of Artificial Sequence: Synthetic oligonucleotide
cgccaccggcagcagcauu

SEQ ID NO: 2256530 - RNA, 19 nt, Artificial Sequence
  Description of Artificial Sequence: Synthetic oligonucleotide
aauuaaauaacucaccuuc

SEQ ID NO: 2256531 - RNA, 19 nt, Artificial Sequence
  Description of Artificial Sequence: Synthetic oligonucleotide
uguaguaacauauugaaag

SEQ ID NO: 2256532 - RNA, 19 nt, Artificial Sequence
  Description of Artificial Sequence: Synthetic oligonucleotide
uuuaaaauuaaauaacuca

SEQ ID NO: 2256533 - RNA, 19 nt, Artificial Sequence
  Description of Artificial Sequence: Synthetic oligonucleotide
cauauugaaagcuugaagg

SEQ ID NO: 2256534 - RNA, 19 nt, Artificial Sequence
  Description of Artificial Sequence: Synthetic oligonucleotide
auuuucaaaaguaaaaugc

SEQ ID NO: 2256535 - RNA, 19 nt, Artificial Sequence
  Description of Artificial Sequence: Synthetic oligonucleotide
uuaaaauuaaauaacucac

SEQ ID NO: 2256536 - RNA, 19 nt, Artificial Sequence
  Description of Artificial Sequence: Synthetic oligonucleotide
aaauaacucaccuucccac

SEQ ID NO: 2256537 - RNA, 19 nt, Artificial Sequence
  Description of Artificial Sequence: Synthetic oligonucleotide
ugagcauucaauauaggag

SEQ ID NO: 2256538 - RNA, 19 nt, Artificial Sequence
  Description of Artificial Sequence: Synthetic oligonucleotide
uuacauuucacccaggcac

SEQ ID NO: 2256539 - RNA, 19 nt, Artificial Sequence
  Description of Artificial Sequence: Synthetic oligonucleotide
gaacuuauuuugcauaugg

SEQ ID NO: 2256540 - RNA, 19 nt, Artificial Sequence
  Description of Artificial Sequence: Synthetic oligonucleotide
aaagcuugaaggccaaugg

SEQ ID NO: 2256541 - RNA, 19 nt, Artificial Sequence
  Description of Artificial Sequence: Synthetic oligonucleotide
aagagaaccaacuuuacau

SEQ ID NO: 2256542 - RNA, 19 nt, Artificial Sequence
  Description of Artificial Sequence: Synthetic oligonucleotide
uacuauaacauuuaaaauu

SEQ ID NO: 2256543 - RNA, 19 nt, Artificial Sequence
  Description of Artificial Sequence: Synthetic oligonucleotide
accaacuuuacauuucacc

SEQ ID NO: 2256544 - RNA, 19 nt, Artificial Sequence
  Description of Artificial Sequence: Synthetic oligonucleotide
uugcauauggaucucaacc

SEQ ID NO: 2256545 - RNA, 19 nt, Artificial Sequence
  Description of Artificial Sequence: Synthetic oligonucleotide
ucuauuuucaaaaguaaaa

SEQ ID NO: 2256546 - RNA, 19 nt, Artificial Sequence
  Description of Artificial Sequence: Synthetic oligonucleotide
gaaauuaaggacagaaagg

SEQ ID NO: 2256547 - RNA, 19 nt, Artificial Sequence
  Description of Artificial Sequence: Synthetic oligonucleotide
ucaaaaguaaaaugcagga

SEQ ID NO: 2256548 - RNA, 19 nt, Artificial Sequence
  Description of Artificial Sequence: Synthetic oligonucleotide
ggaaauuaaggacagaaag

SEQ ID NO: 2256549 - RNA, 19 nt, Artificial Sequence
  Description of Artificial Sequence: Synthetic oligonucleotide
uuuguguugugaauggucc

SEQ ID NO: 2256550 - RNA, 19 nt, Artificial Sequence
  Description of Artificial Sequence: Synthetic oligonucleotide
uucaauauaggagacagcu

SEQ ID NO: 2256551 - RNA, 19 nt, Artificial Sequence
  Description of Artificial Sequence: Synthetic oligonucleotide
auuucacccaggcacauac

SEQ ID NO: 2256552 - RNA, 19 nt, Artificial Sequence
  Description of Artificial Sequence: Synthetic oligonucleotide
ugugugugaacuuauuuug

SEQ ID NO: 2256553 - RNA, 19 nt, Artificial Sequence
  Description of Artificial Sequence: Synthetic oligonucleotide
guucuaauuauuuccuugg

SEQ ID NO: 2256554 - RNA, 19 nt, Artificial Sequence
  Description of Artificial Sequence: Synthetic oligonucleotide
auggaucucaacccuaacc

SEQ ID NO: 2256555 - RNA, 19 nt, Artificial Sequence
  Description of Artificial Sequence: Synthetic oligonucleotide
aguuguugcagcuuaaaca

SEQ ID NO: 2256556 - RNA, 19 nt, Artificial Sequence
  Description of Artificial Sequence: Synthetic oligonucleotide
uaugaccacacccacaugu

SEQ ID NO: 2256557 - RNA, 19 nt, Artificial Sequence
  Description of Artificial Sequence: Synthetic oligonucleotide
uauccuagaagcaaguguc

SEQ ID NO: 2256558 - RNA, 19 nt, Artificial Sequence
  Description of Artificial Sequence: Synthetic oligonucleotide
aacgauggcagcgucaaac

SEQ ID NO: 2256559 - RNA, 19 nt, Artificial Sequence
  Description of Artificial Sequence: Synthetic oligonucleotide
guuguugcagcuuaaacac

SEQ ID NO: 2256560 - RNA, 19 nt, Artificial Sequence
  Description of Artificial Sequence: Synthetic oligonucleotide
acagacaggaaauuaagga

SEQ ID NO: 2256561 - RNA, 19 nt, Artificial Sequence
  Description of Artificial Sequence: Synthetic oligonucleotide
uugugaaugguccaggggu

SEQ ID NO: 2256562 - RNA, 19 nt, Artificial Sequence
  Description of Artificial Sequence: Synthetic oligonucleotide
uuauccuagaagcaagugu

SEQ ID NO: 2256563 - RNA, 19 nt, Artificial Sequence
  Description of Artificial Sequence: Synthetic oligonucleotide
uuuuaaaauuucucagccc

SEQ ID NO: 2256564 - RNA, 19 nt, Artificial Sequence
  Description of Artificial Sequence: Synthetic oligonucleotide
ugucguaaagaguuguugc

SEQ ID NO: 2256565 - RNA, 19 nt, Artificial Sequence
  Description of Artificial Sequence: Synthetic oligonucleotide
ugcauauggaucucaaccc

SEQ ID NO: 2256566 - RNA, 19 nt, Artificial Sequence
  Description of Artificial Sequence: Synthetic oligonucleotide
guugcugggagucugagug

SEQ ID NO: 2256567 - RNA, 19 nt, Artificial Sequence
  Description of Artificial Sequence: Synthetic oligonucleotide
aaaccucaaguacagucag

SEQ ID NO: 2256568 - RNA, 19 nt, Artificial Sequence
  Description of Artificial Sequence: Synthetic oligonucleotide
auaacucaccuucccaccc

SEQ ID NO: 2256569 - RNA, 19 nt, Artificial Sequence
  Description of Artificial Sequence: Synthetic oligonucleotide
cauucaauauaggagacag

SEQ ID NO: 2256570 - RNA, 19 nt, Artificial Sequence
  Description of Artificial Sequence: Synthetic oligonucleotide
ggguauuuauccuagaagc

SEQ ID NO: 2256571 - RNA, 19 nt, Artificial Sequence
  Description of Artificial Sequence: Synthetic oligonucleotide
agaccuuaugccuccaucg

SEQ ID NO: 2256572 - RNA, 19 nt, Artificial Sequence
  Description of Artificial Sequence: Synthetic oligonucleotide
uguugcagcuuaaacacca

SEQ ID NO: 2256573 - RNA, 19 nt, Artificial Sequence
  Description of Artificial Sequence: Synthetic oligonucleotide
auuaaauaacucaccuucc

SEQ ID NO: 2256574 - RNA, 19 nt, Artificial Sequence
  Description of Artificial Sequence: Synthetic oligonucleotide
uaaauaacucaccuuccca

SEQ ID NO: 2256575 - RNA, 19 nt, Artificial Sequence
  Description of Artificial Sequence: Synthetic oligonucleotide
gaaucucuauuuucaaaag

SEQ ID NO: 2256576 - RNA, 19 nt, Artificial Sequence
  Description of Artificial Sequence: Synthetic oligonucleotide
uuguccuaugaccacaccc

SEQ ID NO: 2256577 - RNA, 19 nt, Artificial Sequence
  Description of Artificial Sequence: Synthetic oligonucleotide
uaggagacagcuuugauuu

SEQ ID NO: 2256578 - RNA, 19 nt, Artificial Sequence
  Description of Artificial Sequence: Synthetic oligonucleotide
ucuaauuauuuccuugguc

SEQ ID NO: 2256579 - RNA, 19 nt, Artificial Sequence
  Description of Artificial Sequence: Synthetic oligonucleotide
aauuaaggacagaaagggg

SEQ ID NO: 2256580 - RNA, 19 nt, Artificial Sequence
  Description of Artificial Sequence: Synthetic oligonucleotide
uguccuaugaccacaccca

SEQ ID NO: 2256581 - RNA, 19 nt, Artificial Sequence
  Description of Artificial Sequence: Synthetic oligonucleotide
ugcuuuuacuauaacauuu

SEQ ID NO: 2256582 - RNA, 19 nt, Artificial Sequence
  Description of Artificial Sequence: Synthetic oligonucleotide
ucucgcacaaaacuucaag

SEQ ID NO: 2256583 - RNA, 19 nt, Artificial Sequence
  Description of Artificial Sequence: Synthetic oligonucleotide
agccaugcauaguagggcc

SEQ ID NO: 2256584 - RNA, 19 nt, Artificial Sequence
  Description of Artificial Sequence: Synthetic oligonucleotide
uauugaaagcuugaaggcc

SEQ ID NO: 2256585 - RNA, 19 nt, Artificial Sequence
  Description of Artificial Sequence: Synthetic oligonucleotide
acccuaaccucacagacag

SEQ ID NO: 2256586 - RNA, 19 nt, Artificial Sequence
  Description of Artificial Sequence: Synthetic oligonucleotide
uuacuauaacauuuaaaau

SEQ ID NO: 2256587 - RNA, 19 nt, Artificial Sequence
  Description of Artificial Sequence: Synthetic oligonucleotide
uuuacauuucacccaggca

SEQ ID NO: 2256588 - RNA, 19 nt, Artificial Sequence
  Description of Artificial Sequence: Synthetic oligonucleotide
uuugcaagggucaggccag

SEQ ID NO: 2256589 - RNA, 19 nt, Artificial Sequence
  Description of Artificial Sequence: Synthetic oligonucleotide
aagggguugcuuugagggc

SEQ ID NO: 2256590 - RNA, 19 nt, Artificial Sequence
  Description of Artificial Sequence: Synthetic oligonucleotide
acaguucucgcacaaaacu

SEQ ID NO: 2256591 - RNA, 19 nt, Artificial Sequence
  Description of Artificial Sequence: Synthetic oligonucleotide
cuuuacauuucacccaggc

SEQ ID NO: 2256592 - RNA, 19 nt, Artificial Sequence
  Description of Artificial Sequence: Synthetic oligonucleotide
agugcuggaugccagcaac

SEQ ID NO: 2256593 - RNA, 19 nt, Artificial Sequence
  Description of Artificial Sequence: Synthetic oligonucleotide
cagacaggaaauuaaggac

SEQ ID NO: 2256594 - RNA, 19 nt, Artificial Sequence
  Description of Artificial Sequence: Synthetic oligonucleotide
ucagcacauagcuucgccg

SEQ ID NO: 2256595 - RNA, 19 nt, Artificial Sequence
  Description of Artificial Sequence: Synthetic oligonucleotide
aaagaguuguugcagcuua

SEQ ID NO: 2256596 - RNA, 19 nt, Artificial Sequence
  Description of Artificial Sequence: Synthetic oligonucleotide
uacagucagaccuuaugcc

SEQ ID NO: 2256597 - RNA, 19 nt, Artificial Sequence
  Description of Artificial Sequence: Synthetic oligonucleotide
cuaauuauuuccuuggucu

SEQ ID NO: 2256598 - RNA, 19 nt, Artificial Sequence
  Description of Artificial Sequence: Synthetic oligonucleotide
acaccaacuguuugcaagg

SEQ ID NO: 2256599 - RNA, 19 nt, Artificial Sequence
  Description of Artificial Sequence: Synthetic oligonucleotide
ccaacuuuacauuucaccc

SEQ ID NO: 2256600 - RNA, 19 nt, Artificial Sequence
  Description of Artificial Sequence: Synthetic oligonucleotide
acuauaacauuuaaaauua

SEQ ID NO: 2256601 - RNA, 19 nt, Artificial Sequence
  Description of Artificial Sequence: Synthetic oligonucleotide
gaagcaaguguccagaacu

SEQ ID NO: 2256602 - RNA, 19 nt, Artificial Sequence
  Description of Artificial Sequence: Synthetic oligonucleotide
uuaaaauuucucagcccga

SEQ ID NO: 2256603 - RNA, 19 nt, Artificial Sequence
  Description of Artificial Sequence: Synthetic oligonucleotide
uuuccagacagccaugcau

SEQ ID NO: 2256604 - RNA, 19 nt, Artificial Sequence
  Description of Artificial Sequence: Synthetic oligonucleotide
aacaguucucgcacaaaac

SEQ ID NO: 2256605 - RNA, 19 nt, Artificial Sequence
  Description of Artificial Sequence: Synthetic oligonucleotide
uguacaugugccacuuuca

SEQ ID NO: 2256606 - RNA, 19 nt, Artificial Sequence
  Description of Artificial Sequence: Synthetic oligonucleotide
gacagccaugcauaguagg

SEQ ID NO: 2256607 - RNA, 19 nt, Artificial Sequence
  Description of Artificial Sequence: Synthetic oligonucleotide
gaauguaguaacauauuga

SEQ ID NO: 2256608 - RNA, 19 nt, Artificial Sequence
  Description of Artificial Sequence: Synthetic oligonucleotide
agucagaccuuaugccucc

SEQ ID NO: 2256609 - RNA, 19 nt, Artificial Sequence
  Description of Artificial Sequence: Synthetic oligonucleotide
uaaccucacagacaggaaa

SEQ ID NO: 2256610 - RNA, 19 nt, Artificial Sequence
  Description of Artificial Sequence: Synthetic oligonucleotide
gaaagggguugcuuugagg

SEQ ID NO: 2256611 - RNA, 19 nt, Artificial Sequence
  Description of Artificial Sequence: Synthetic oligonucleotide
ugcaggaaaaccucaagua

SEQ ID NO: 2256612 - RNA, 19 nt, Artificial Sequence
  Description of Artificial Sequence: Synthetic oligonucleotide
gagggcuuguccuaugacc

SEQ ID NO: 2256613 - RNA, 19 nt, Artificial Sequence
  Description of Artificial Sequence: Synthetic oligonucleotide
auggcaacccacuacauuu

SEQ ID NO: 2256614 - RNA, 19 nt, Artificial Sequence
  Description of Artificial Sequence: Synthetic oligonucleotide
aaggccaauggcaacccac

SEQ ID NO: 2256615 - RNA, 19 nt, Artificial Sequence
  Description of Artificial Sequence: Synthetic oligonucleotide
uaguaacauauugaaagcu

SEQ ID NO: 2256616 - RNA, 19 nt, Artificial Sequence
  Description of Artificial Sequence: Synthetic oligonucleotide
guuugcaagggucaggcca

SEQ ID NO: 2256617 - RNA, 19 nt, Artificial Sequence
  Description of Artificial Sequence: Synthetic oligonucleotide
uacauuucacccaggcaca

SEQ ID NO: 2256618 - RNA, 19 nt, Artificial Sequence
  Description of Artificial Sequence: Synthetic oligonucleotide
gaaagcuugaaggccaaug

SEQ ID NO: 2256619 - RNA, 19 nt, Artificial Sequence
  Description of Artificial Sequence: Synthetic oligonucleotide
aaguguccagaacuccauc

SEQ ID NO: 2256620 - RNA, 19 nt, Artificial Sequence
  Description of Artificial Sequence: Synthetic oligonucleotide
gacaggaaauuaaggacag

SEQ ID NO: 2256621 - RNA, 19 nt, Artificial Sequence
  Description of Artificial Sequence: Synthetic oligonucleotide
uucuaauuauuuccuuggu

SEQ ID NO: 2256622 - RNA, 19 nt, Artificial Sequence
  Description of Artificial Sequence: Synthetic oligonucleotide
guugugaaugguccagggg

SEQ ID NO: 2256623 - RNA, 19 nt, Artificial Sequence
  Description of Artificial Sequence: Synthetic oligonucleotide
aauauaggagacagcuuug

SEQ ID NO: 2256624 - RNA, 19 nt, Artificial Sequence
  Description of Artificial Sequence: Synthetic oligonucleotide
uguguugugaaugguccag

SEQ ID NO: 2256625 - RNA, 19 nt, Artificial Sequence
  Description of Artificial Sequence: Synthetic oligonucleotide
gagugggcuuuccagacag

SEQ ID NO: 2256626 - RNA, 19 nt, Artificial Sequence
  Description of Artificial Sequence: Synthetic oligonucleotide
uacauuugcuuuuacuaua

SEQ ID NO: 2256627 - RNA, 19 nt, Artificial Sequence
  Description of Artificial Sequence: Synthetic oligonucleotide
uaauuauuuccuuggucuc

SEQ ID NO: 2256628 - RNA, 19 nt, Artificial Sequence
  Description of Artificial Sequence: Synthetic oligonucleotide
ucguaaagaguuguugcag

SEQ ID NO: 2256629 - RNA, 19 nt, Artificial Sequence
  Description of Artificial Sequence: Synthetic oligonucleotide
uuaucugggguccugcuuu

SEQ ID NO: 2256630 - RNA, 19 nt, Artificial Sequence
  Description of Artificial Sequence: Synthetic oligonucleotide
aacauauugaaagcuugaa

SEQ ID NO: 2256631 - RNA, 19 nt, Artificial Sequence
  Description of Artificial Sequence: Synthetic oligonucleotide
cucaaguacagucagaccu

SEQ ID NO: 2256632 - RNA, 19 nt, Artificial Sequence
  Description of Artificial Sequence: Synthetic oligonucleotide
aguucucgcacaaaacuuc

SEQ ID NO: 2256633 - RNA, 19 nt, Artificial Sequence
  Description of Artificial Sequence: Synthetic oligonucleotide
aucgaauguaguaacauau

SEQ ID NO: 2256634 - RNA, 19 nt, Artificial Sequence
  Description of Artificial Sequence: Synthetic oligonucleotide
cucaacccuaaccucacag

SEQ ID NO: 2256635 - RNA, 19 nt, Artificial Sequence
  Description of Artificial Sequence: Synthetic oligonucleotide
acagaaagggguugcuuug

SEQ ID NO: 2256636 - RNA, 19 nt, Artificial Sequence
  Description of Artificial Sequence: Synthetic oligonucleotide
aggcacauacuuuuaaaau

SEQ ID NO: 2256637 - RNA, 19 nt, Artificial Sequence
  Description of Artificial Sequence: Synthetic oligonucleotide
uuugcauauggaucucaac

SEQ ID NO: 2256638 - RNA, 19 nt, Artificial Sequence
  Description of Artificial Sequence: Synthetic oligonucleotide
acagcauccuucaugccac

SEQ ID NO: 2256639 - RNA, 19 nt, Artificial Sequence
  Description of Artificial Sequence: Synthetic oligonucleotide
uugcuuugagggcuugucc

SEQ ID NO: 2256640 - RNA, 19 nt, Artificial Sequence
  Description of Artificial Sequence: Synthetic oligonucleotide
ucaacccuaaccucacaga

SEQ ID NO: 2256641 - RNA, 19 nt, Artificial Sequence
  Description of Artificial Sequence: Synthetic oligonucleotide
caacccuaaccucacagac

SEQ ID NO: 2256642 - RNA, 19 nt, Artificial Sequence
  Description of Artificial Sequence: Synthetic oligonucleotide
cacauucucggccagguuc

SEQ ID NO: 2256643 - RNA, 19 nt, Artificial Sequence
  Description of Artificial Sequence: Synthetic oligonucleotide
gaguuguugcagcuuaaac

SEQ ID NO: 2256644 - RNA, 19 nt, Artificial Sequence
  Description of Artificial Sequence: Synthetic oligonucleotide
acagccaugcauaguaggg

SEQ ID NO: 2256645 - RNA, 19 nt, Artificial Sequence
  Description of Artificial Sequence: Synthetic oligonucleotide
guaaaaugcaggaaaaccu

SEQ ID NO: 2256646 - RNA, 19 nt, Artificial Sequence
  Description of Artificial Sequence: Synthetic oligonucleotide
agaaccaacuuuacauuuc

SEQ ID NO: 2256647 - RNA, 19 nt, Artificial Sequence
  Description of Artificial Sequence: Synthetic oligonucleotide
gggguauuuauccuagaag

SEQ ID NO: 2256648 - RNA, 19 nt, Artificial Sequence
  Description of Artificial Sequence: Synthetic oligonucleotide
agcccgaaucucuauuuuc

SEQ ID NO: 2256649 - RNA, 19 nt, Artificial Sequence
  Description of Artificial Sequence: Synthetic oligonucleotide
agcaaguguccagaacucc

SEQ ID NO: 2256650 - RNA, 19 nt, Artificial Sequence
  Description of Artificial Sequence: Synthetic oligonucleotide
uccaucgaauguaguaaca

SEQ ID NO: 2256651 - RNA, 19 nt, Artificial Sequence
  Description of Artificial Sequence: Synthetic oligonucleotide
aagcaaguguccagaacuc

SEQ ID NO: 2256652 - RNA, 19 nt, Artificial Sequence
  Description of Artificial Sequence: Synthetic oligonucleotide
agcauucaauauaggagac

SEQ ID NO: 2256653 - RNA, 19 nt, Artificial Sequence
  Description of Artificial Sequence: Synthetic oligonucleotide
ucgcacaaaacuucaaguu

SEQ ID NO: 2256654 - RNA, 19 nt, Artificial Sequence
  Description of Artificial Sequence: Synthetic oligonucleotide
uccucagcacauagcuucg

SEQ ID NO: 2256655 - RNA, 19 nt, Artificial Sequence
  Description of Artificial Sequence: Synthetic oligonucleotide
aacuuauuuugcauaugga

SEQ ID NO: 2256656 - RNA, 19 nt, Artificial Sequence
  Description of Artificial Sequence: Synthetic oligonucleotide
auucaauauaggagacagc

SEQ ID NO: 2256657 - RNA, 19 nt, Artificial Sequence
  Description of Artificial Sequence: Synthetic oligonucleotide
uaaaauuucucagcccgaa

SEQ ID NO: 2256658 - RNA, 19 nt, Artificial Sequence
  Description of Artificial Sequence: Synthetic oligonucleotide
cagcacauagcuucgccgc

SEQ ID NO: 2256659 - RNA, 19 nt, Artificial Sequence
  Description of Artificial Sequence: Synthetic oligonucleotide
gcagcuuaaacaccaacug

SEQ ID NO: 2256660 - RNA, 19 nt, Artificial Sequence
  Description of Artificial Sequence: Synthetic oligonucleotide
cuguuugcaagggucaggc

SEQ ID NO: 2256661 - RNA, 19 nt, Artificial Sequence
  Description of Artificial Sequence: Synthetic oligonucleotide
agagaaccaacuuuacauu

SEQ ID NO: 2256662 - RNA, 19 nt, Artificial Sequence
  Description of Artificial Sequence: Synthetic oligonucleotide
ucaaguacagucagaccuu

SEQ ID NO: 2256663 - RNA, 19 nt, Artificial Sequence
  Description of Artificial Sequence: Synthetic oligonucleotide
ugaggcccaacaguucucg

SEQ ID NO: 2256664 - RNA, 19 nt, Artificial Sequence
  Description of Artificial Sequence: Synthetic oligonucleotide
agcgucaaacaccucuuug

SEQ ID NO: 2256665 - RNA, 19 nt, Artificial Sequence
  Description of Artificial Sequence: Synthetic oligonucleotide
cuguacaugugccacuuuc

SEQ ID NO: 2256666 - RNA, 19 nt, Artificial Sequence
  Description of Artificial Sequence: Synthetic oligonucleotide
aacuguuugcaagggucag

SEQ ID NO: 2256667 - RNA, 19 nt, Artificial Sequence
  Description of Artificial Sequence: Synthetic oligonucleotide
uauaggagacagcuuugau

SEQ ID NO: 2256668 - RNA, 19 nt, Artificial Sequence
  Description of Artificial Sequence: Synthetic oligonucleotide
cuuaugccuccaucgaaug

SEQ ID NO: 2256669 - RNA, 19 nt, Artificial Sequence
  Description of Artificial Sequence: Synthetic oligonucleotide
ugagucaaggcugagcauu

SEQ ID NO: 2256670 - RNA, 19 nt, Artificial Sequence
  Description of Artificial Sequence: Synthetic oligonucleotide
ucaauauaggagacagcuu

SEQ ID NO: 2256671 - RNA, 19 nt, Artificial Sequence
  Description of Artificial Sequence: Synthetic oligonucleotide
uuaugccuccaucgaaugu

SEQ ID NO: 2256672 - RNA, 19 nt, Artificial Sequence
  Description of Artificial Sequence: Synthetic oligonucleotide
agaaagggguugcuuugag

SEQ ID NO: 2256673 - RNA, 19 nt, Artificial Sequence
  Description of Artificial Sequence: Synthetic oligonucleotide
augucguaaagaguuguug

SEQ ID NO: 2256674 - RNA, 19 nt, Artificial Sequence
  Description of Artificial Sequence: Synthetic oligonucleotide
ugaacuuauuuugcauaug

SEQ ID NO: 2256675 - RNA, 19 nt, Artificial Sequence
  Description of Artificial Sequence: Synthetic oligonucleotide
uggucuccacuacauuugc

SEQ ID NO: 2256676 - RNA, 19 nt, Artificial Sequence
  Description of Artificial Sequence: Synthetic oligonucleotide
uucacccaggcacauacuu

SEQ ID NO: 2256677 - RNA, 19 nt, Artificial Sequence
  Description of Artificial Sequence: Synthetic oligonucleotide
ugugugugugugaacuuau

SEQ ID NO: 2256678 - RNA, 19 nt, Artificial Sequence
  Description of Artificial Sequence: Synthetic oligonucleotide
ucgaauguaguaacauauu

SEQ ID NO: 2256679 - RNA, 19 nt, Artificial Sequence
  Description of Artificial Sequence: Synthetic oligonucleotide
caacuuuacauuucaccca

SEQ ID NO: 2256680 - RNA, 19 nt, Artificial Sequence
  Description of Artificial Sequence: Synthetic oligonucleotide
cucggagugggcuuuccag

SEQ ID NO: 2256681 - RNA, 19 nt, Artificial Sequence
  Description of Artificial Sequence: Synthetic oligonucleotide
acacccacaugucguaaag

SEQ ID NO: 2256682 - RNA, 19 nt, Artificial Sequence
  Description of Artificial Sequence: Synthetic oligonucleotide
gucguaaagaguuguugca

SEQ ID NO: 2256683 - RNA, 19 nt, Artificial Sequence
  Description of Artificial Sequence: Synthetic oligonucleotide
aguaacauauugaaagcuu

SEQ ID NO: 2256684 - RNA, 19 nt, Artificial Sequence
  Description of Artificial Sequence: Synthetic oligonucleotide
ugugaaugguccaggggua

SEQ ID NO: 2256685 - RNA, 19 nt, Artificial Sequence
  Description of Artificial Sequence: Synthetic oligonucleotide
cuccaucgaauguaguaac

SEQ ID NO: 2256686 - RNA, 19 nt, Artificial Sequence
  Description of Artificial Sequence: Synthetic oligonucleotide
auccuagaagcaagugucc

SEQ ID NO: 2256687 - RNA, 19 nt, Artificial Sequence
  Description of Artificial Sequence: Synthetic oligonucleotide
cagagucccacucggagug

SEQ ID NO: 2256688 - RNA, 19 nt, Artificial Sequence
  Description of Artificial Sequence: Synthetic oligonucleotide
agggguauuuauccuagaa

SEQ ID NO: 2256689 - RNA, 19 nt, Artificial Sequence
  Description of Artificial Sequence: Synthetic oligonucleotide
gauuuccucagcacauagc

SEQ ID NO: 2256690 - RNA, 19 nt, Artificial Sequence
  Description of Artificial Sequence: Synthetic oligonucleotide
gcaggaaaaccucaaguac

SEQ ID NO: 2256691 - RNA, 19 nt, Artificial Sequence
  Description of Artificial Sequence: Synthetic oligonucleotide
gcuuuuagacuucuuuggc

SEQ ID NO: 2256692 - RNA, 19 nt, Artificial Sequence
  Description of Artificial Sequence: Synthetic oligonucleotide
uuguguugugaauggucca

SEQ ID NO: 2256693 - RNA, 19 nt, Artificial Sequence
  Description of Artificial Sequence: Synthetic oligonucleotide
cucacagacaggaaauuaa

SEQ ID NO: 2256694 - RNA, 19 nt, Artificial Sequence
  Description of Artificial Sequence: Synthetic oligonucleotide
aggauuuggacaggucccg

SEQ ID NO: 2256695 - RNA, 19 nt, Artificial Sequence
  Description of Artificial Sequence: Synthetic oligonucleotide
agcuugaaggccaauggca

SEQ ID NO: 2256696 - RNA, 19 nt, Artificial Sequence
  Description of Artificial Sequence: Synthetic oligonucleotide
ucggagugggcuuuccaga

SEQ ID NO: 2256697 - RNA, 19 nt, Artificial Sequence
  Description of Artificial Sequence: Synthetic oligonucleotide
aacccacuacauuuguguu

SEQ ID NO: 2256698 - RNA, 19 nt, Artificial Sequence
  Description of Artificial Sequence: Synthetic oligonucleotide
cucagcacauagcuucgcc

SEQ ID NO: 2256699 - RNA, 19 nt, Artificial Sequence
  Description of Artificial Sequence: Synthetic oligonucleotide
uccuagaagcaagugucca

SEQ ID NO: 2256700 - RNA, 19 nt, Artificial Sequence
  Description of Artificial Sequence: Synthetic oligonucleotide
uauggaucucaacccuaac

SEQ ID NO: 2256701 - RNA, 19 nt, Artificial Sequence
  Description of Artificial Sequence: Synthetic oligonucleotide
gauuuggacaggucccgca

SEQ ID NO: 2256702 - RNA, 19 nt, Artificial Sequence
  Description of Artificial Sequence: Synthetic oligonucleotide
uccuaugaccacacccaca

SEQ ID NO: 2256703 - RNA, 19 nt, Artificial Sequence
  Description of Artificial Sequence: Synthetic oligonucleotide
aaccucacagacaggaaau

SEQ ID NO: 2256704 - RNA, 19 nt, Artificial Sequence
  Description of Artificial Sequence: Synthetic oligonucleotide
agggacuggcuucucccac

SEQ ID NO: 2256705 - RNA, 19 nt, Artificial Sequence
  Description of Artificial Sequence: Synthetic oligonucleotide
gcauaguagggccagugug

SEQ ID NO: 2256706 - RNA, 19 nt, Artificial Sequence
  Description of Artificial Sequence: Synthetic oligonucleotide
auauaggagacagcuuuga

SEQ ID NO: 2256707 - RNA, 19 nt, Artificial Sequence
  Description of Artificial Sequence: Synthetic oligonucleotide
ucuccacuacauuugcuuu

SEQ ID NO: 2256708 - RNA, 19 nt, Artificial Sequence
  Description of Artificial Sequence: Synthetic oligonucleotide
ggucccgcaccuuaucugg

SEQ ID NO: 2256709 - RNA, 19 nt, Artificial Sequence
  Description of Artificial Sequence: Synthetic oligonucleotide
auuuauccuagaagcaagu

SEQ ID NO: 2256710 - RNA, 19 nt, Artificial Sequence
  Description of Artificial Sequence: Synthetic oligonucleotide
accuuaucugggguccugc

SEQ ID NO: 2256711 - RNA, 19 nt, Artificial Sequence
  Description of Artificial Sequence: Synthetic oligonucleotide
ugggcuuuccagacagcca

SEQ ID NO: 2256712 - RNA, 19 nt, Artificial Sequence
  Description of Artificial Sequence: Synthetic oligonucleotide
acgauggcagcgucaaaca

SEQ ID NO: 2256713 - RNA, 19 nt, Artificial Sequence
  Description of Artificial Sequence: Synthetic oligonucleotide
gugugugaacuuauuuugc

SEQ ID NO: 2256714 - RNA, 19 nt, Artificial Sequence
  Description of Artificial Sequence: Synthetic oligonucleotide
acauagcuucgccgccucc

SEQ ID NO: 2256715 - RNA, 19 nt, Artificial Sequence
  Description of Artificial Sequence: Synthetic oligonucleotide
acaugucguaaagaguugu

SEQ ID NO: 2256716 - RNA, 19 nt, Artificial Sequence
  Description of Artificial Sequence: Synthetic oligonucleotide
cagucagaccuuaugccuc

SEQ ID NO: 2256717 - RNA, 19 nt, Artificial Sequence
  Description of Artificial Sequence: Synthetic oligonucleotide
auaguagggccagugugug

SEQ ID NO: 2256718 - RNA, 19 nt, Artificial Sequence
  Description of Artificial Sequence: Synthetic oligonucleotide
uugaaagcuugaaggccaa

SEQ ID NO: 2256719 - RNA, 19 nt, Artificial Sequence
  Description of Artificial Sequence: Synthetic oligonucleotide
ugagggcuuguccuaugac

SEQ ID NO: 2256720 - RNA, 19 nt, Artificial Sequence
  Description of Artificial Sequence: Synthetic oligonucleotide
aucucaacccuaaccucac

SEQ ID NO: 2256721 - RNA, 19 nt, Artificial Sequence
  Description of Artificial Sequence: Synthetic oligonucleotide
aacccuaaccucacagaca

SEQ ID NO: 2256722 - RNA, 19 nt, Artificial Sequence
  Description of Artificial Sequence: Synthetic oligonucleotide
cgaauguaguaacauauug

SEQ ID NO: 2256723 - RNA, 19 nt, Artificial Sequence
  Description of Artificial Sequence: Synthetic oligonucleotide
uguguguguguguguguga

SEQ ID NO: 2256724 - RNA, 19 nt, Artificial Sequence
  Description of Artificial Sequence: Synthetic oligonucleotide
ucagcccgaaucucuauuu

SEQ ID NO: 2256725 - RNA, 19 nt, Artificial Sequence
  Description of Artificial Sequence: Synthetic oligonucleotide
uuugagggcuuguccuaug

SEQ ID NO: 2256726 - RNA, 19 nt, Artificial Sequence
  Description of Artificial Sequence: Synthetic oligonucleotide
cacaugucguaaagaguug

SEQ ID NO: 2256727 - RNA, 19 nt, Artificial Sequence
  Description of Artificial Sequence: Synthetic oligonucleotide
aggcugagcauucaauaua

SEQ ID NO: 2256728 - RNA, 19 nt, Artificial Sequence
  Description of Artificial Sequence: Synthetic oligonucleotide
gaccuuaugccuccaucga

SEQ ID NO: 2256729 - RNA, 19 nt, Artificial Sequence
  Description of Artificial Sequence: Synthetic oligonucleotide
cuagaagcaaguguccaga

SEQ ID NO: 2256730 - RNA, 19 nt, Artificial Sequence
  Description of Artificial Sequence: Synthetic oligonucleotide
auuuugcauauggaucuca

SEQ ID NO: 2256731 - RNA, 19 nt, Artificial Sequence
  Description of Artificial Sequence: Synthetic oligonucleotide
caacuguuugcaaggguca

SEQ ID NO: 2256732 - RNA, 19 nt, Artificial Sequence
  Description of Artificial Sequence: Synthetic oligonucleotide
aggcccaacaguucucgca

SEQ ID NO: 2256733 - RNA, 19 nt, Artificial Sequence
  Description of Artificial Sequence: Synthetic oligonucleotide
caacaguucucgcacaaaa

SEQ ID NO: 2256734 - RNA, 19 nt, Artificial Sequence
  Description of Artificial Sequence: Synthetic oligonucleotide
ugugugugugugugugugu

SEQ ID NO: 2256735 - RNA, 19 nt, Artificial Sequence
  Description of Artificial Sequence: Synthetic oligonucleotide
caaggcugagcauucaaua

SEQ ID NO: 2256736 - RNA, 19 nt, Artificial Sequence
  Description of Artificial Sequence: Synthetic oligonucleotide
aggagacagcuuugauuuc

SEQ ID NO: 2256737 - RNA, 19 nt, Artificial Sequence
  Description of Artificial Sequence: Synthetic oligonucleotide
gguauuuauccuagaagca

SEQ ID NO: 2256738 - RNA, 19 nt, Artificial Sequence
  Description of Artificial Sequence: Synthetic oligonucleotide
caacccacuacauuugugu

SEQ ID NO: 2256739 - RNA, 19 nt, Artificial Sequence
  Description of Artificial Sequence: Synthetic oligonucleotide
uaaagaguuguugcagcuu

SEQ ID NO: 2256740 - RNA, 19 nt, Artificial Sequence
  Description of Artificial Sequence: Synthetic oligonucleotide
acauuugcuuuuacuauaa

SEQ ID NO: 2256741 - RNA, 19 nt, Artificial Sequence
  Description of Artificial Sequence: Synthetic oligonucleotide
cagccaugcauaguagggc

SEQ ID NO: 2256742 - RNA, 19 nt, Artificial Sequence
  Description of Artificial Sequence: Synthetic oligonucleotide
ucaccuucccacccacccu

SEQ ID NO: 2256743 - RNA, 19 nt, Artificial Sequence
  Description of Artificial Sequence: Synthetic oligonucleotide
agggguugcuuugagggcu

SEQ ID NO: 2256744 - RNA, 19 nt, Artificial Sequence
  Description of Artificial Sequence: Synthetic oligonucleotide
gagaaccaacuuuacauuu

SEQ ID NO: 2256745 - RNA, 19 nt, Artificial Sequence
  Description of Artificial Sequence: Synthetic oligonucleotide
cagaccuuaugccuccauc

SEQ ID NO: 2256746 - RNA, 19 nt, Artificial Sequence
  Description of Artificial Sequence: Synthetic oligonucleotide
aggucccgcaccuuaucug

SEQ ID NO: 2256747 - RNA, 19 nt, Artificial Sequence
  Description of Artificial Sequence: Synthetic oligonucleotide
cguaaagaguuguugcagc

SEQ ID NO: 2256748 - RNA, 19 nt, Artificial Sequence
  Description of Artificial Sequence: Synthetic oligonucleotide
cacgcuguacaugugccac

SEQ ID NO: 2256749 - RNA, 19 nt, Artificial Sequence
  Description of Artificial Sequence: Synthetic oligonucleotide
accuuaugccuccaucgaa

SEQ ID NO: 2256750 - RNA, 19 nt, Artificial Sequence
  Description of Artificial Sequence: Synthetic oligonucleotide
ugugugugugugugugaac

SEQ ID NO: 2256751 - RNA, 19 nt, Artificial Sequence
  Description of Artificial Sequence: Synthetic oligonucleotide
gugugugugugugugugug

SEQ ID NO: 2256752 - RNA, 19 nt, Artificial Sequence
  Description of Artificial Sequence: Synthetic oligonucleotide
gugaacuuauuuugcauau

SEQ ID NO: 2256753 - RNA, 19 nt, Artificial Sequence
  Description of Artificial Sequence: Synthetic oligonucleotide
cuacauuugcuuuuacuau

SEQ ID NO: 2256754 - RNA, 19 nt, Artificial Sequence
  Description of Artificial Sequence: Synthetic oligonucleotide
cucagggacuggcuucucc

SEQ ID NO: 2256755 - RNA, 19 nt, Artificial Sequence
  Description of Artificial Sequence: Synthetic oligonucleotide
uucucgcacaaaacuucaa

SEQ ID NO: 2256756 - RNA, 19 nt, Artificial Sequence
  Description of Artificial Sequence: Synthetic oligonucleotide
agugugugugugugugugu

SEQ ID NO: 2256757 - RNA, 19 nt, Artificial Sequence
  Description of Artificial Sequence: Synthetic oligonucleotide
augcauaguagggccagug

SEQ ID NO: 2256758 - RNA, 19 nt, Artificial Sequence
  Description of Artificial Sequence: Synthetic oligonucleotide
cucgcacaaaacuucaagu

SEQ ID NO: 2256759 - RNA, 19 nt, Artificial Sequence
  Description of Artificial Sequence: Synthetic oligonucleotide
uccacuacauuugcuuuua

SEQ ID NO: 2256760 - RNA, 19 nt, Artificial Sequence
  Description of Artificial Sequence: Synthetic oligonucleotide
cauaguagggccagugugu

SEQ ID NO: 2256761 - RNA, 19 nt, Artificial Sequence
  Description of Artificial Sequence: Synthetic oligonucleotide
uuucacccaggcacauacu

SEQ ID NO: 2256762 - RNA, 19 nt, Artificial Sequence
  Description of Artificial Sequence: Synthetic oligonucleotide
caucgaauguaguaacaua

SEQ ID NO: 2256763 - RNA, 19 nt, Artificial Sequence
  Description of Artificial Sequence: Synthetic oligonucleotide
ccuagaagcaaguguccag

SEQ ID NO: 2256764 - RNA, 19 nt, Artificial Sequence
  Description of Artificial Sequence: Synthetic oligonucleotide
cagugugugugugugugug

SEQ ID NO: 2256765 - RNA, 19 nt, Artificial Sequence
  Description of Artificial Sequence: Synthetic oligonucleotide
cuucgccgccuccucaggg

SEQ ID NO: 2256766 - RNA, 19 nt, Artificial Sequence
  Description of Artificial Sequence: Synthetic oligonucleotide
ucucaacccuaaccucaca

SEQ ID NO: 2256767 - RNA, 19 nt, Artificial Sequence
  Description of Artificial Sequence: Synthetic oligonucleotide
auguaguaacauauugaaa

SEQ ID NO: 2256768 - RNA, 19 nt, Artificial Sequence
  Description of Artificial Sequence: Synthetic oligonucleotide
uucccacccacccucugua

SEQ ID NO: 2256769 - RNA, 19 nt, Artificial Sequence
  Description of Artificial Sequence: Synthetic oligonucleotide
ugugugugugugugaacuu

SEQ ID NO: 2256770 - RNA, 19 nt, Artificial Sequence
  Description of Artificial Sequence: Synthetic oligonucleotide
auauggaucucaacccuaa

SEQ ID NO: 2256771 - RNA, 19 nt, Artificial Sequence
  Description of Artificial Sequence: Synthetic oligonucleotide
acuucccaguggcccaaag

SEQ ID NO: 2256772 - RNA, 19 nt, Artificial Sequence
  Description of Artificial Sequence: Synthetic oligonucleotide
ccagggguauuuauccuag

SEQ ID NO: 2256773 - RNA, 19 nt, Artificial Sequence
  Description of Artificial Sequence: Synthetic oligonucleotide
cacuacauuuguguuguga

SEQ ID NO: 2256774 - RNA, 19 nt, Artificial Sequence
  Description of Artificial Sequence: Synthetic oligonucleotide
guccuaugaccacacccac

SEQ ID NO: 2256775 - RNA, 19 nt, Artificial Sequence
  Description of Artificial Sequence: Synthetic oligonucleotide
uuauuuccuuggucuccac

SEQ ID NO: 2256776 - RNA, 19 nt, Artificial Sequence
  Description of Artificial Sequence: Synthetic oligonucleotide
cauauggaucucaacccua

SEQ ID NO: 2256777 - RNA, 19 nt, Artificial Sequence
  Description of Artificial Sequence: Synthetic oligonucleotide
cuucaugccacuucccagu

SEQ ID NO: 2256778 - RNA, 19 nt, Artificial Sequence
  Description of Artificial Sequence: Synthetic oligonucleotide
ucacagcauccuucaugcc

SEQ ID NO: 2256779 - RNA, 19 nt, Artificial Sequence
  Description of Artificial Sequence: Synthetic oligonucleotide
auccuucaugccacuuccc

SEQ ID NO: 2256780 - RNA, 19 nt, Artificial Sequence
  Description of Artificial Sequence: Synthetic oligonucleotide
ggcacauacuuuuaaaauu

SEQ ID NO: 2256781 - RNA, 19 nt, Artificial Sequence
  Description of Artificial Sequence: Synthetic oligonucleotide
gcaggcagagucccacucg

SEQ ID NO: 2256782 - RNA, 19 nt, Artificial Sequence
  Description of Artificial Sequence: Synthetic oligonucleotide
caccaacuguuugcaaggg

SEQ ID NO: 2256783 - RNA, 19 nt, Artificial Sequence
  Description of Artificial Sequence: Synthetic oligonucleotide
ccacccucuguacacaggc

SEQ ID NO: 2256784 - RNA, 19 nt, Artificial Sequence
  Description of Artificial Sequence: Synthetic oligonucleotide
ucagaccuuaugccuccau

SEQ ID NO: 2256785 - RNA, 19 nt, Artificial Sequence
  Description of Artificial Sequence: Synthetic oligonucleotide
guucucgcacaaaacuuca

SEQ ID NO: 2256786 - RNA, 19 nt, Artificial Sequence
  Description of Artificial Sequence: Synthetic oligonucleotide
gagucaaggcugagcauuc

SEQ ID NO: 2256787 - RNA, 19 nt, Artificial Sequence
  Description of Artificial Sequence: Synthetic oligonucleotide
gccagcaacgauggcagcg

SEQ ID NO: 2256788 - RNA, 19 nt, Artificial Sequence
  Description of Artificial Sequence: Synthetic oligonucleotide
uuagacuucuuuggcuguu

SEQ ID NO: 2256789 - RNA, 19 nt, Artificial Sequence
  Description of Artificial Sequence: Synthetic oligonucleotide
ggcccaacaguucucgcac

SEQ ID NO: 2256790 - RNA, 19 nt, Artificial Sequence
  Description of Artificial Sequence: Synthetic oligonucleotide
ucaggccaggcagcaauac

SEQ ID NO: 2256791 - RNA, 19 nt, Artificial Sequence
  Description of Artificial Sequence: Synthetic oligonucleotide
ccaauggcaacccacuaca

SEQ ID NO: 2256792 - RNA, 19 nt, Artificial Sequence
  Description of Artificial Sequence: Synthetic oligonucleotide
gugugugugugugugaacu

SEQ ID NO: 2256793 - RNA, 19 nt, Artificial Sequence
  Description of Artificial Sequence: Synthetic oligonucleotide
cacuacauuugcuuuuacu

SEQ ID NO: 2256794 - RNA, 19 nt, Artificial Sequence
  Description of Artificial Sequence: Synthetic oligonucleotide
agacagccaugcauaguag

SEQ ID NO: 2256795 - RNA, 19 nt, Artificial Sequence
  Description of Artificial Sequence: Synthetic oligonucleotide
gucuccacuacauuugcuu

SEQ ID NO: 2256796 - RNA, 19 nt, Artificial Sequence
  Description of Artificial Sequence: Synthetic oligonucleotide
accaggauuuggacagguc

SEQ ID NO: 2256797 - RNA, 19 nt, Artificial Sequence
  Description of Artificial Sequence: Synthetic oligonucleotide
acucggagugggcuuucca

SEQ ID NO: 2256798 - RNA, 19 nt, Artificial Sequence
  Description of Artificial Sequence: Synthetic oligonucleotide
gaggcccaacaguucucgc

SEQ ID NO: 2256799 - RNA, 19 nt, Artificial Sequence
  Description of Artificial Sequence: Synthetic oligonucleotide
aagaguuguugcagcuuaa

SEQ ID NO: 2256800 - RNA, 19 nt, Artificial Sequence
  Description of Artificial Sequence: Synthetic oligonucleotide
augccuccaucgaauguag

SEQ ID NO: 2256801 - RNA, 19 nt, Artificial Sequence
  Description of Artificial Sequence: Synthetic oligonucleotide
agugggcuuuccagacagc

SEQ ID NO: 2256802 - RNA, 19 nt, Artificial Sequence
  Description of Artificial Sequence: Synthetic oligonucleotide
uaguagggccagugugugu

SEQ ID NO: 2256803 - RNA, 19 nt, Artificial Sequence
  Description of Artificial Sequence: Synthetic oligonucleotide
cuaaccucacagacaggaa

SEQ ID NO: 2256804 - RNA, 19 nt, Artificial Sequence
  Description of Artificial Sequence: Synthetic oligonucleotide
ucucagcccgaaucucuau

SEQ ID NO: 2256805 - RNA, 19 nt, Artificial Sequence
  Description of Artificial Sequence: Synthetic oligonucleotide
gaaggccaauggcaaccca

SEQ ID NO: 2256806 - RNA, 19 nt, Artificial Sequence
  Description of Artificial Sequence: Synthetic oligonucleotide
agucccacucggagugggc

SEQ ID NO: 2256807 - RNA, 19 nt, Artificial Sequence
  Description of Artificial Sequence: Synthetic oligonucleotide
acgcuguacaugugccacu

SEQ ID NO: 2256808 - RNA, 19 nt, Artificial Sequence
  Description of Artificial Sequence: Synthetic oligonucleotide
agggccagugugugugugu

SEQ ID NO: 2256809 - RNA, 19 nt, Artificial Sequence
  Description of Artificial Sequence: Synthetic oligonucleotide
cagcuuaaacaccaacugu

SEQ ID NO: 2256810 - RNA, 19 nt, Artificial Sequence
  Description of Artificial Sequence: Synthetic oligonucleotide
aguggcccaaaggggcagg

SEQ ID NO: 2256811 - RNA, 19 nt, Artificial Sequence
  Description of Artificial Sequence: Synthetic oligonucleotide
ccucaaguacagucagacc

SEQ ID NO: 2256812 - RNA, 19 nt, Artificial Sequence
  Description of Artificial Sequence: Synthetic oligonucleotide
accacacccacaugucgua

SEQ ID NO: 2256813 - RNA, 19 nt, Artificial Sequence
  Description of Artificial Sequence: Synthetic oligonucleotide
cuaugaccacacccacaug

SEQ ID NO: 2256814 - RNA, 19 nt, Artificial Sequence
  Description of Artificial Sequence: Synthetic oligonucleotide
ugccuccaucgaauguagu

SEQ ID NO: 2256815 - RNA, 19 nt, Artificial Sequence
  Description of Artificial Sequence: Synthetic oligonucleotide
acaggaaauuaaggacaga

SEQ ID NO: 2256816 - RNA, 19 nt, Artificial Sequence
  Description of Artificial Sequence: Synthetic oligonucleotide
uugcaagggucaggccagg

SEQ ID NO: 2256817 - RNA, 19 nt, Artificial Sequence
  Description of Artificial Sequence: Synthetic oligonucleotide
ugcaagggucaggccaggc

SEQ ID NO: 2256818 - RNA, 19 nt, Artificial Sequence
  Description of Artificial Sequence: Synthetic oligonucleotide
gccagugugugugugugug

SEQ ID NO: 2256819 - RNA, 19 nt, Artificial Sequence
  Description of Artificial Sequence: Synthetic oligonucleotide
gugugugugugugugugaa

SEQ ID NO: 2256820 - RNA, 19 nt, Artificial Sequence
  Description of Artificial Sequence: Synthetic oligonucleotide
aaguacagucagaccuuau

SEQ ID NO: 2256821 - RNA, 19 nt, Artificial Sequence
  Description of Artificial Sequence: Synthetic oligonucleotide
agagucccacucggagugg

SEQ ID NO: 2256822 - RNA, 19 nt, Artificial Sequence
  Description of Artificial Sequence: Synthetic oligonucleotide
agcaacgauggcagcguca

SEQ ID NO: 2256823 - RNA, 19 nt, Artificial Sequence
  Description of Artificial Sequence: Synthetic oligonucleotide
cacauagcuucgccgccuc

SEQ ID NO: 2256824 - RNA, 19 nt, Artificial Sequence
  Description of Artificial Sequence: Synthetic oligonucleotide
gcaaguguccagaacucca

SEQ ID NO: 2256825 - RNA, 19 nt, Artificial Sequence
  Description of Artificial Sequence: Synthetic oligonucleotide
cagaacuccaucacagcau

SEQ ID NO: 2256826 - RNA, 19 nt, Artificial Sequence
  Description of Artificial Sequence: Synthetic oligonucleotide
uaucugggguccugcuuuu

SEQ ID NO: 2256827 - RNA, 19 nt, Artificial Sequence
  Description of Artificial Sequence: Synthetic oligonucleotide
gcugagcauucaauauagg

SEQ ID NO: 2256828 - RNA, 19 nt, Artificial Sequence
  Description of Artificial Sequence: Synthetic oligonucleotide
gaccacacccacaugucgu

SEQ ID NO: 2256829 - RNA, 19 nt, Artificial Sequence
  Description of Artificial Sequence: Synthetic oligonucleotide
ugaaugguccagggguauu

SEQ ID NO: 2256830 - RNA, 19 nt, Artificial Sequence
  Description of Artificial Sequence: Synthetic oligonucleotide
ugaaagcuugaaggccaau

SEQ ID NO: 2256831 - RNA, 19 nt, Artificial Sequence
  Description of Artificial Sequence: Synthetic oligonucleotide
gugugugugugugaacuua

SEQ ID NO: 2256832 - RNA, 19 nt, Artificial Sequence
  Description of Artificial Sequence: Synthetic oligonucleotide
gcauauggaucucaacccu

SEQ ID NO: 2256833 - RNA, 19 nt, Artificial Sequence
  Description of Artificial Sequence: Synthetic oligonucleotide
caguucucgcacaaaacuu

SEQ ID NO: 2256834 - RNA, 19 nt, Artificial Sequence
  Description of Artificial Sequence: Synthetic oligonucleotide
guggcccaaaggggcaggg

SEQ ID NO: 2256835 - RNA, 19 nt, Artificial Sequence
  Description of Artificial Sequence: Synthetic oligonucleotide
gccuccaucgaauguagua

SEQ ID NO: 2256836 - RNA, 19 nt, Artificial Sequence
  Description of Artificial Sequence: Synthetic oligonucleotide
acauuucacccaggcacau

SEQ ID NO: 2256837 - RNA, 19 nt, Artificial Sequence
  Description of Artificial Sequence: Synthetic oligonucleotide
gcccgaaucucuauuuuca

SEQ ID NO: 2256838 - RNA, 19 nt, Artificial Sequence
  Description of Artificial Sequence: Synthetic oligonucleotide
gcaagggucaggccaggca

SEQ ID NO: 2256839 - RNA, 19 nt, Artificial Sequence
  Description of Artificial Sequence: Synthetic oligonucleotide
cacacccacaugucguaaa

SEQ ID NO: 2256840 - RNA, 19 nt, Artificial Sequence
  Description of Artificial Sequence: Synthetic oligonucleotide
cagaaagggguugcuuuga

SEQ ID NO: 2256841 - RNA, 19 nt, Artificial Sequence
  Description of Artificial Sequence: Synthetic oligonucleotide
ccaugcauaguagggccag

SEQ ID NO: 2256842 - RNA, 19 nt, Artificial Sequence
  Description of Artificial Sequence: Synthetic oligonucleotide
ccacccacccucuguacac

SEQ ID NO: 2256843 - RNA, 19 nt, Artificial Sequence
  Description of Artificial Sequence: Synthetic oligonucleotide
ggauuuggacaggucccgc

SEQ ID NO: 2256844 - RNA, 19 nt, Artificial Sequence
  Description of Artificial Sequence: Synthetic oligonucleotide
gcaacccacuacauuugug

SEQ ID NO: 2256845 - RNA, 19 nt, Artificial Sequence
  Description of Artificial Sequence: Synthetic oligonucleotide
guguucuaauuauuuccuu

SEQ ID NO: 2256846 - RNA, 19 nt, Artificial Sequence
  Description of Artificial Sequence: Synthetic oligonucleotide
cacccaggcacauacuuuu

SEQ ID NO: 2256847 - RNA, 19 nt, Artificial Sequence
  Description of Artificial Sequence: Synthetic oligonucleotide
gggcuuuccagacagccau

SEQ ID NO: 2256848 - RNA, 19 nt, Artificial Sequence
  Description of Artificial Sequence: Synthetic oligonucleotide
guugcagcuuaaacaccaa

SEQ ID NO: 2256849 - RNA, 19 nt, Artificial Sequence
  Description of Artificial Sequence: Synthetic oligonucleotide
caugucguaaagaguuguu

SEQ ID NO: 2256850 - RNA, 19 nt, Artificial Sequence
  Description of Artificial Sequence: Synthetic oligonucleotide
cacccucuguacacaggca

SEQ ID NO: 2256851 - RNA, 19 nt, Artificial Sequence
  Description of Artificial Sequence: Synthetic oligonucleotide
gggccagugugugugugug

SEQ ID NO: 2256852 - RNA, 19 nt, Artificial Sequence
  Description of Artificial Sequence: Synthetic oligonucleotide
cagcaacgauggcagcguc

SEQ ID NO: 2256853 - RNA, 19 nt, Artificial Sequence
  Description of Artificial Sequence: Synthetic oligonucleotide
caccuuaucugggguccug

SEQ ID NO: 2256854 - RNA, 19 nt, Artificial Sequence
  Description of Artificial Sequence: Synthetic oligonucleotide
caaguacagucagaccuua

SEQ ID NO: 2256855 - RNA, 19 nt, Artificial Sequence
  Description of Artificial Sequence: Synthetic oligonucleotide
cagggguauuuauccuaga

SEQ ID NO: 2256856 - RNA, 19 nt, Artificial Sequence
  Description of Artificial Sequence: Synthetic oligonucleotide
ccaggcacauacuuuuaaa

SEQ ID NO: 2256857 - RNA, 19 nt, Artificial Sequence
  Description of Artificial Sequence: Synthetic oligonucleotide
ggagugggcuuuccagaca

SEQ ID NO: 2256858 - RNA, 19 nt, Artificial Sequence
  Description of Artificial Sequence: Synthetic oligonucleotide
ccgaaucucuauuuucaaa

SEQ ID NO: 2256859 - RNA, 19 nt, Artificial Sequence
  Description of Artificial Sequence: Synthetic oligonucleotide
ccuccaucgaauguaguaa

SEQ ID NO: 2256860 - RNA, 19 nt, Artificial Sequence
  Description of Artificial Sequence: Synthetic oligonucleotide
cacccacaugucguaaaga

SEQ ID NO: 2256861 - RNA, 19 nt, Artificial Sequence
  Description of Artificial Sequence: Synthetic oligonucleotide
cuccacuacauuugcuuuu

SEQ ID NO: 2256862 - RNA, 19 nt, Artificial Sequence
  Description of Artificial Sequence: Synthetic oligonucleotide
cauuuguguugugaauggu

SEQ ID NO: 2256863 - RNA, 19 nt, Artificial Sequence
  Description of Artificial Sequence: Synthetic oligonucleotide
cgcaccuuaucuggggucc

SEQ ID NO: 2256864 - RNA, 19 nt, Artificial Sequence
  Description of Artificial Sequence: Synthetic oligonucleotide
cacucggagugggcuuucc

SEQ ID NO: 2256865 - RNA, 19 nt, Artificial Sequence
  Description of Artificial Sequence: Synthetic oligonucleotide
cagcuucaaagagaaccaa

SEQ ID NO: 2256866 - RNA, 19 nt, Artificial Sequence
  Description of Artificial Sequence: Synthetic oligonucleotide
gcuucgccgccuccucagg

SEQ ID NO: 2256867 - RNA, 19 nt, Artificial Sequence
  Description of Artificial Sequence: Synthetic oligonucleotide
ggucaggccaggcagcaau

SEQ ID NO: 2256868 - RNA, 19 nt, Artificial Sequence
  Description of Artificial Sequence: Synthetic oligonucleotide
agcauccuucaugccacuu

SEQ ID NO: 2256869 - RNA, 19 nt, Artificial Sequence
  Description of Artificial Sequence: Synthetic oligonucleotide
ccuuaugccuccaucgaau

SEQ ID NO: 2256870 - RNA, 19 nt, Artificial Sequence
  Description of Artificial Sequence: Synthetic oligonucleotide
cccacuacauuuguguugu

SEQ ID NO: 2256871 - RNA, 19 nt, Artificial Sequence
  Description of Artificial Sequence: Synthetic oligonucleotide
ggcaacccacuacauuugu

SEQ ID NO: 2256872 - RNA, 19 nt, Artificial Sequence
  Description of Artificial Sequence: Synthetic oligonucleotide
gcuugaggcccaacaguuc

SEQ ID NO: 2256873 - RNA, 19 nt, Artificial Sequence
  Description of Artificial Sequence: Synthetic oligonucleotide
ggcuuuccagacagccaug

SEQ ID NO: 2256874 - RNA, 19 nt, Artificial Sequence
  Description of Artificial Sequence: Synthetic oligonucleotide
caggccaggcagcaauacu

SEQ ID NO: 2256875 - RNA, 19 nt, Artificial Sequence
  Description of Artificial Sequence: Synthetic oligonucleotide
cccgaaucucuauuuucaa

SEQ ID NO: 2256876 - RNA, 19 nt, Artificial Sequence
  Description of Artificial Sequence: Synthetic oligonucleotide
aggcagagucccacucgga

SEQ ID NO: 2256877 - RNA, 19 nt, Artificial Sequence
  Description of Artificial Sequence: Synthetic oligonucleotide
ccacuacauuugcuuuuac

SEQ ID NO: 2256878 - RNA, 19 nt, Artificial Sequence
  Description of Artificial Sequence: Synthetic oligonucleotide
cucagcccgaaucucuauu

SEQ ID NO: 2256879 - RNA, 19 nt, Artificial Sequence
  Description of Artificial Sequence: Synthetic oligonucleotide
gucccacucggagugggcu

SEQ ID NO: 2256880 - RNA, 19 nt, Artificial Sequence
  Description of Artificial Sequence: Synthetic oligonucleotide
cauuucacccaggcacaua

SEQ ID NO: 2256881 - RNA, 19 nt, Artificial Sequence
  Description of Artificial Sequence: Synthetic oligonucleotide
gccaugcauaguagggcca

SEQ ID NO: 2256882 - RNA, 19 nt, Artificial Sequence
  Description of Artificial Sequence: Synthetic oligonucleotide
gugaaugguccagggguau

SEQ ID NO: 2256883 - RNA, 19 nt, Artificial Sequence
  Description of Artificial Sequence: Synthetic oligonucleotide
ccgcaccuuaucugggguc

SEQ ID NO: 2256884 - RNA, 19 nt, Artificial Sequence
  Description of Artificial Sequence: Synthetic oligonucleotide
gucagaccuuaugccucca

SEQ ID NO: 2256885 - RNA, 19 nt, Artificial Sequence
  Description of Artificial Sequence: Synthetic oligonucleotide
ggccaauggcaacccacua

SEQ ID NO: 2256886 - RNA, 19 nt, Artificial Sequence
  Description of Artificial Sequence: Synthetic oligonucleotide
ccucagcacauagcuucgc

SEQ ID NO: 2256887 - RNA, 19 nt, Artificial Sequence
  Description of Artificial Sequence: Synthetic oligonucleotide
gucaggccaggcagcaaua

SEQ ID NO: 2256888 - RNA, 19 nt, Artificial Sequence
  Description of Artificial Sequence: Synthetic oligonucleotide
ccucacagacaggaaauua

SEQ ID NO: 2256889 - RNA, 19 nt, Artificial Sequence
  Description of Artificial Sequence: Synthetic oligonucleotide
ccacgcuguacaugugcca

SEQ ID NO: 2256890 - RNA, 19 nt, Artificial Sequence
  Description of Artificial Sequence: Synthetic oligonucleotide
ccaucgaauguaguaacau

SEQ ID NO: 2256891 - RNA, 19 nt, Artificial Sequence
  Description of Artificial Sequence: Synthetic oligonucleotide
caccaggauuuggacaggu

SEQ ID NO: 2256892 - RNA, 19 nt, Artificial Sequence
  Description of Artificial Sequence: Synthetic oligonucleotide
caacgauggcagcgucaaa

SEQ ID NO: 2256893 - RNA, 19 nt, Artificial Sequence
  Description of Artificial Sequence: Synthetic oligonucleotide
caugcauaguagggccagu

SEQ ID NO: 2256894 - RNA, 19 nt, Artificial Sequence
  Description of Artificial Sequence: Synthetic oligonucleotide
guacacaggcaggcagagu

SEQ ID NO: 2256895 - RNA, 19 nt, Artificial Sequence
  Description of Artificial Sequence: Synthetic oligonucleotide
cagcccgaaucucuauuuu

SEQ ID NO: 2256896 - RNA, 19 nt, Artificial Sequence
  Description of Artificial Sequence: Synthetic oligonucleotide
ggacuggcuucucccacau

SEQ ID NO: 2256897 - RNA, 19 nt, Artificial Sequence
  Description of Artificial Sequence: Synthetic oligonucleotide
ccuuaucugggguccugcu

SEQ ID NO: 2256898 - RNA, 19 nt, Artificial Sequence
  Description of Artificial Sequence: Synthetic oligonucleotide
gcacauagcuucgccgccu

SEQ ID NO: 2256899 - RNA, 19 nt, Artificial Sequence
  Description of Artificial Sequence: Synthetic oligonucleotide
ccaacaguucucgcacaaa

SEQ ID NO: 2256900 - RNA, 19 nt, Artificial Sequence
  Description of Artificial Sequence: Synthetic oligonucleotide
ccgagacaccacgcuguac

SEQ ID NO: 2256901 - RNA, 19 nt, Artificial Sequence
  Description of Artificial Sequence: Synthetic oligonucleotide
ccagcaacgauggcagcgu

SEQ ID NO: 2256902 - RNA, 19 nt, Artificial Sequence
  Description of Artificial Sequence: Synthetic oligonucleotide
ggccagugugugugugugu

SEQ ID NO: 2256903 - RNA, 19 nt, Artificial Sequence
  Description of Artificial Sequence: Synthetic oligonucleotide
ccagugugugugugugugu

SEQ ID NO: 2256904 - RNA, 19 nt, Artificial Sequence
  Description of Artificial Sequence: Synthetic oligonucleotide
ggccaggcagcaauacuuu

SEQ ID NO: 2256905 - RNA, 19 nt, Artificial Sequence
  Description of Artificial Sequence: Synthetic oligonucleotide
cccgcaccuuaucuggggu

SEQ ID NO: 2256906 - RNA, 19 nt, Artificial Sequence
  Description of Artificial Sequence: Synthetic oligonucleotide
gcagggcuugaggcccaac

SEQ ID NO: 2256907 - RNA, 19 nt, Artificial Sequence
  Description of Artificial Sequence: Synthetic oligonucleotide
ccacacccacaugucguaa

SEQ ID NO: 2256908 - RNA, 19 nt, Artificial Sequence
  Description of Artificial Sequence: Synthetic oligonucleotide
cccgagacaccacgcugua

SEQ ID NO: 2256909 - RNA, 19 nt, Artificial Sequence
  Description of Artificial Sequence: Synthetic oligonucleotide
ccaaaggggcagggcuuga

SEQ ID NO: 2256910 - RNA, 19 nt, Artificial Sequence
  Description of Artificial Sequence: Synthetic oligonucleotide
ccacucggagugggcuuuc

SEQ ID NO: 2256911 - RNA, 19 nt, Artificial Sequence
  Description of Artificial Sequence: Synthetic oligonucleotide
ccucagggacuggcuucuc

SEQ ID NO: 2256912 - RNA, 19 nt, Artificial Sequence
  Description of Artificial Sequence: Synthetic oligonucleotide
gggguugcuuugagggcuu

SEQ ID NO: 2256913 - RNA, 19 nt, Artificial Sequence
  Description of Artificial Sequence: Synthetic oligonucleotide
ccaucacagcauccuucau

SEQ ID NO: 2256914 - RNA, 19 nt, Artificial Sequence
  Description of Artificial Sequence: Synthetic oligonucleotide
ccgccuccucagggacugg

SEQ ID NO: 2256915 - RNA, 19 nt, Artificial Sequence
  Description of Artificial Sequence: Synthetic oligonucleotide
cccacucggagugggcuuu

SEQ ID NO: 2256916 - RNA, 19 nt, Artificial Sequence
  Description of Artificial Sequence: Synthetic oligonucleotide
aaauguuuauuauacaugc

SEQ ID NO: 2256917 - RNA, 19 nt, Artificial Sequence
  Description of Artificial Sequence: Synthetic oligonucleotide
aguggaaucaauuucauuc

SEQ ID NO: 2256918 - RNA, 19 nt, Artificial Sequence
  Description of Artificial Sequence: Synthetic oligonucleotide
uguucauggcacaagagcc

SEQ ID NO: 2256919 - RNA, 19 nt, Artificial Sequence
  Description of Artificial Sequence: Synthetic oligonucleotide
acuuauucagaucaacuuc

SEQ ID NO: 2256920 - RNA, 19 nt, Artificial Sequence
  Description of Artificial Sequence: Synthetic oligonucleotide
uuuuccuagagaauccagg

SEQ ID NO: 2256921 - RNA, 19 nt, Artificial Sequence
  Description of Artificial Sequence: Synthetic oligonucleotide
cagaucagggacuagaucc

SEQ ID NO: 2256922 - RNA, 19 nt, Artificial Sequence
  Description of Artificial Sequence: Synthetic oligonucleotide
uugacagacacauucagca

SEQ ID NO: 2256923 - RNA, 19 nt, Artificial Sequence
  Description of Artificial Sequence: Synthetic oligonucleotide
ugaucacauacauaugugg

SEQ ID NO: 2256924 - RNA, 19 nt, Artificial Sequence
  Description of Artificial Sequence: Synthetic oligonucleotide
gauuagagcauccaacacc

SEQ ID NO: 2256925 - RNA, 19 nt, Artificial Sequence
  Description of Artificial Sequence: Synthetic oligonucleotide
uccuugaucacauacauau

SEQ ID NO: 2256926 - RNA, 19 nt, Artificial Sequence
  Description of Artificial Sequence: Synthetic oligonucleotide
uguuuauuauacaugcugu

SEQ ID NO: 2256927 - RNA, 19 nt, Artificial Sequence
  Description of Artificial Sequence: Synthetic oligonucleotide
cuuaaucuugauuagagca

SEQ ID NO: 2256928 - RNA, 19 nt, Artificial Sequence
  Description of Artificial Sequence: Synthetic oligonucleotide
auacauauguggaagaggg

SEQ ID NO: 2256929 - RNA, 19 nt, Artificial Sequence
  Description of Artificial Sequence: Synthetic oligonucleotide
aguugcucagaucagggac

SEQ ID NO: 2256930 - RNA, 19 nt, Artificial Sequence
  Description of Artificial Sequence: Synthetic oligonucleotide
uucagauagggcucgauag

SEQ ID NO: 2256931 - RNA, 19 nt, Artificial Sequence
  Description of Artificial Sequence: Synthetic oligonucleotide
guagaaguugcucagauca

SEQ ID NO: 2256932 - RNA, 19 nt, Artificial Sequence
  Description of Artificial Sequence: Synthetic oligonucleotide
ucauaagucugcauucggg

SEQ ID NO: 2256933 - RNA, 19 nt, Artificial Sequence
  Description of Artificial Sequence: Synthetic oligonucleotide
uccuagagaauccaggugu

SEQ ID NO: 2256934 - RNA, 19 nt, Artificial Sequence
  Description of Artificial Sequence: Synthetic oligonucleotide
cuugauuagagcauccaac

SEQ ID NO: 2256935 - RNA, 19 nt, Artificial Sequence
  Description of Artificial Sequence: Synthetic oligonucleotide
cauaagucugcauucgggg

SEQ ID NO: 2256936 - RNA, 19 nt, Artificial Sequence
  Description of Artificial Sequence: Synthetic oligonucleotide
agauucagaguugacagac

SEQ ID NO: 2256937 - RNA, 19 nt, Artificial Sequence
  Description of Artificial Sequence: Synthetic oligonucleotide
agagaagggguccugcagc

SEQ ID NO: 2256938 - RNA, 19 nt, Artificial Sequence
  Description of Artificial Sequence: Synthetic oligonucleotide
uucagaucaacuucauaag

SEQ ID NO: 2256939 - RNA, 19 nt, Artificial Sequence
  Description of Artificial Sequence: Synthetic oligonucleotide
acacaggaugcauucauac

SEQ ID NO: 2256940 - RNA, 19 nt, Artificial Sequence
  Description of Artificial Sequence: Synthetic oligonucleotide
uuguagguugccaucaucu

SEQ ID NO: 2256941 - RNA, 19 nt, Artificial Sequence
  Description of Artificial Sequence: Synthetic oligonucleotide
agaucaacuucauaagucu

SEQ ID NO: 2256942 - RNA, 19 nt, Artificial Sequence
  Description of Artificial Sequence: Synthetic oligonucleotide
ugugcguagaaguugcuca

SEQ ID NO: 2256943 - RNA, 19 nt, Artificial Sequence
  Description of Artificial Sequence: Synthetic oligonucleotide
uuaucuccagucuugucag

SEQ ID NO: 2256944 - RNA, 19 nt, Artificial Sequence
  Description of Artificial Sequence: Synthetic oligonucleotide
ugagacuuugccgaggucc

SEQ ID NO: 2256945 - RNA, 19 nt, Artificial Sequence
  Description of Artificial Sequence: Synthetic oligonucleotide
uucauaagucugcauucgg

SEQ ID NO: 2256946 - RNA, 19 nt, Artificial Sequence
  Description of Artificial Sequence: Synthetic oligonucleotide
acauucagcacggagagag

SEQ ID NO: 2256947 - RNA, 19 nt, Artificial Sequence
  Description of Artificial Sequence: Synthetic oligonucleotide
auuauacaugcuguuuucc

SEQ ID NO: 2256948 - RNA, 19 nt, Artificial Sequence
  Description of Artificial Sequence: Synthetic oligonucleotide
agagcauccaacaccaucg

SEQ ID NO: 2256949 - RNA, 19 nt, Artificial Sequence
  Description of Artificial Sequence: Synthetic oligonucleotide
ucuuaaucuugauuagagc

SEQ ID NO: 2256950 - RNA, 19 nt, Artificial Sequence
  Description of Artificial Sequence: Synthetic oligonucleotide
ucuugucagggucccaucg

SEQ ID NO: 2256951 - RNA, 19 nt, Artificial Sequence
  Description of Artificial Sequence: Synthetic oligonucleotide
ugauguucauggcacaaga

SEQ ID NO: 2256952 - RNA, 19 nt, Artificial Sequence
  Description of Artificial Sequence: Synthetic oligonucleotide
uagauccuugaucacauac

SEQ ID NO: 2256953 - RNA, 19 nt, Artificial Sequence
  Description of Artificial Sequence: Synthetic oligonucleotide
aaucuugauuagagcaucc

SEQ ID NO: 2256954 - RNA, 19 nt, Artificial Sequence
  Description of Artificial Sequence: Synthetic oligonucleotide
uuuugauucggggagcugc

SEQ ID NO: 2256955 - RNA, 19 nt, Artificial Sequence
  Description of Artificial Sequence: Synthetic oligonucleotide
auacaugcuguuuuccuag

SEQ ID NO: 2256956 - RNA, 19 nt, Artificial Sequence
  Description of Artificial Sequence: Synthetic oligonucleotide
uuuccuagagaauccaggu

SEQ ID NO: 2256957 - RNA, 19 nt, Artificial Sequence
  Description of Artificial Sequence: Synthetic oligonucleotide
ucuccggaaggucaaagug

SEQ ID NO: 2256958 - RNA, 19 nt, Artificial Sequence
  Description of Artificial Sequence: Synthetic oligonucleotide
acacauucagcacggagag

SEQ ID NO: 2256959 - RNA, 19 nt, Artificial Sequence
  Description of Artificial Sequence: Synthetic oligonucleotide
cugaguacaguucaugaug

SEQ ID NO: 2256960 - RNA, 19 nt, Artificial Sequence
  Description of Artificial Sequence: Synthetic oligonucleotide
uuauacaugcuguuuuccu

SEQ ID NO: 2256961 - RNA, 19 nt, Artificial Sequence
  Description of Artificial Sequence: Synthetic oligonucleotide
agggacuagauccuugauc

SEQ ID NO: 2256962 - RNA, 19 nt, Artificial Sequence
  Description of Artificial Sequence: Synthetic oligonucleotide
uccgugucgauccugcgag

SEQ ID NO: 2256963 - RNA, 19 nt, Artificial Sequence
  Description of Artificial Sequence: Synthetic oligonucleotide
gaagcagcgccucaaggag

SEQ ID NO: 2256964 - RNA, 19 nt, Artificial Sequence
  Description of Artificial Sequence: Synthetic oligonucleotide
gaaucaauuucauucuuaa

SEQ ID NO: 2256965 - RNA, 19 nt, Artificial Sequence
  Description of Artificial Sequence: Synthetic oligonucleotide
gaauccaggugucugaaga

SEQ ID NO: 2256966 - RNA, 19 nt, Artificial Sequence
  Description of Artificial Sequence: Synthetic oligonucleotide
uuugccgagguccgugucg

SEQ ID NO: 2256967 - RNA, 19 nt, Artificial Sequence
  Description of Artificial Sequence: Synthetic oligonucleotide
ucaaggagacaccaaccgc

SEQ ID NO: 2256968 - RNA, 19 nt, Artificial Sequence
  Description of Artificial Sequence: Synthetic oligonucleotide
gaaguugcucagaucaggg

SEQ ID NO: 2256969 - RNA, 19 nt, Artificial Sequence
  Description of Artificial Sequence: Synthetic oligonucleotide
uuugagacuuugccgaggu

SEQ ID NO: 2256970 - RNA, 19 nt, Artificial Sequence
  Description of Artificial Sequence: Synthetic oligonucleotide
agcacggagagagucacgc

SEQ ID NO: 2256971 - RNA, 19 nt, Artificial Sequence
  Description of Artificial Sequence: Synthetic oligonucleotide
ucuugauuagagcauccaa

SEQ ID NO: 2256972 - RNA, 19 nt, Artificial Sequence
  Description of Artificial Sequence: Synthetic oligonucleotide
cauucuuaaucuugauuag

SEQ ID NO: 2256973 - RNA, 19 nt, Artificial Sequence
  Description of Artificial Sequence: Synthetic oligonucleotide
uccguugauguucauggca

SEQ ID NO: 2256974 - RNA, 19 nt, Artificial Sequence
  Description of Artificial Sequence: Synthetic oligonucleotide
ucauacaauccauccagcu

SEQ ID NO: 2256975 - RNA, 19 nt, Artificial Sequence
  Description of Artificial Sequence: Synthetic oligonucleotide
auuagagcauccaacacca

SEQ ID NO: 2256976 - RNA, 19 nt, Artificial Sequence
  Description of Artificial Sequence: Synthetic oligonucleotide
cauacauauguggaagagg

SEQ ID NO: 2256977 - RNA, 19 nt, Artificial Sequence
  Description of Artificial Sequence: Synthetic oligonucleotide
ucgauaaauggcaaauuuu

SEQ ID NO: 2256978 - RNA, 19 nt, Artificial Sequence
  Description of Artificial Sequence: Synthetic oligonucleotide
uucaugaugguguggcagc

SEQ ID NO: 2256979 - RNA, 19 nt, Artificial Sequence
  Description of Artificial Sequence: Synthetic oligonucleotide
aucgauaaauggcaaauuu

SEQ ID NO: 2256980 - RNA, 19 nt, Artificial Sequence
  Description of Artificial Sequence: Synthetic oligonucleotide
cuccggaaggucaaagugg

SEQ ID NO: 2256981 - RNA, 19 nt, Artificial Sequence
  Description of Artificial Sequence: Synthetic oligonucleotide
aacaccaucggcccacacu

SEQ ID NO: 2256982 - RNA, 19 nt, Artificial Sequence
  Description of Artificial Sequence: Synthetic oligonucleotide
uuuauuauacaugcuguuu

SEQ ID NO: 2256983 - RNA, 19 nt, Artificial Sequence
  Description of Artificial Sequence: Synthetic oligonucleotide
ucagauagggcucgauaga

SEQ ID NO: 2256984 - RNA, 19 nt, Artificial Sequence
  Description of Artificial Sequence: Synthetic oligonucleotide
uccaccaauagcuggggca

SEQ ID NO: 2256985 - RNA, 19 nt, Artificial Sequence
  Description of Artificial Sequence: Synthetic oligonucleotide
gagagagucacgccagugc

SEQ ID NO: 2256986 - RNA, 19 nt, Artificial Sequence
  Description of Artificial Sequence: Synthetic oligonucleotide
uucauacaauccauccagc

SEQ ID NO: 2256987 - RNA, 19 nt, Artificial Sequence
  Description of Artificial Sequence: Synthetic oligonucleotide
gggacuagauccuugauca

SEQ ID NO: 2256988 - RNA, 19 nt, Artificial Sequence
  Description of Artificial Sequence: Synthetic oligonucleotide
augcuguuuuccuagagaa

SEQ ID NO: 2256989 - RNA, 19 nt, Artificial Sequence
  Description of Artificial Sequence: Synthetic oligonucleotide
gauagggcucgauagaucu

SEQ ID NO: 2256990 - RNA, 19 nt, Artificial Sequence
  Description of Artificial Sequence: Synthetic oligonucleotide
uguacugugcguagaaguu

SEQ ID NO: 2256991 - RNA, 19 nt, Artificial Sequence
  Description of Artificial Sequence: Synthetic oligonucleotide
uauacaugcuguuuuccua

SEQ ID NO: 2256992 - RNA, 19 nt, Artificial Sequence
  Description of Artificial Sequence: Synthetic oligonucleotide
cauccaacaccaucggccc

SEQ ID NO: 2256993 - RNA, 19 nt, Artificial Sequence
  Description of Artificial Sequence: Synthetic oligonucleotide
gacacauucagcacggaga

SEQ ID NO: 2256994 - RNA, 19 nt, Artificial Sequence
  Description of Artificial Sequence: Synthetic oligonucleotide
uagaaguugcucagaucag

SEQ ID NO: 2256995 - RNA, 19 nt, Artificial Sequence
  Description of Artificial Sequence: Synthetic oligonucleotide
ucaacuucauaagucugca

SEQ ID NO: 2256996 - RNA, 19 nt, Artificial Sequence
  Description of Artificial Sequence: Synthetic oligonucleotide
cuucauaagucugcauucg

SEQ ID NO: 2256997 - RNA, 19 nt, Artificial Sequence
  Description of Artificial Sequence: Synthetic oligonucleotide
caugagaacugcagguccc

SEQ ID NO: 2256998 - RNA, 19 nt, Artificial Sequence
  Description of Artificial Sequence: Synthetic oligonucleotide
agcauccaacaccaucggc

SEQ ID NO: 2256999 - RNA, 19 nt, Artificial Sequence
  Description of Artificial Sequence: Synthetic oligonucleotide
auaagucugcauucggggu

SEQ ID NO: 2257000 - RNA, 19 nt, Artificial Sequence
  Description of Artificial Sequence: Synthetic oligonucleotide
agagccguugccgggaagc

SEQ ID NO: 2257001 - RNA, 19 nt, Artificial Sequence
  Description of Artificial Sequence: Synthetic oligonucleotide
uuugauucggggagcugca

SEQ ID NO: 2257002 - RNA, 19 nt, Artificial Sequence
  Description of Artificial Sequence: Synthetic oligonucleotide
acauacauauguggaagag

SEQ ID NO: 2257003 - RNA, 19 nt, Artificial Sequence
  Description of Artificial Sequence: Synthetic oligonucleotide
caauagcuggggcagcugg

SEQ ID NO: 2257004 - RNA, 19 nt, Artificial Sequence
  Description of Artificial Sequence: Synthetic oligonucleotide
ucggcccacacuuauucag

SEQ ID NO: 2257005 - RNA, 19 nt, Artificial Sequence
  Description of Artificial Sequence: Synthetic oligonucleotide
uuuugagacuuugccgagg

SEQ ID NO: 2257006 - RNA, 19 nt, Artificial Sequence
  Description of Artificial Sequence: Synthetic oligonucleotide
aggcacacaggaugcauuc

SEQ ID NO: 2257007 - RNA, 19 nt, Artificial Sequence
  Description of Artificial Sequence: Synthetic oligonucleotide
ccuccguugauguucaugg

SEQ ID NO: 2257008 - RNA, 19 nt, Artificial Sequence
  Description of Artificial Sequence: Synthetic oligonucleotide
agaucuguacugugcguag

SEQ ID NO: 2257009 - RNA, 19 nt, Artificial Sequence
  Description of Artificial Sequence: Synthetic oligonucleotide
uggagucgaucauccagcg

SEQ ID NO: 2257010 - RNA, 19 nt, Artificial Sequence
  Description of Artificial Sequence: Synthetic oligonucleotide
ucgaucauccagcgauagg

SEQ ID NO: 2257011 - RNA, 19 nt, Artificial Sequence
  Description of Artificial Sequence: Synthetic oligonucleotide
aaguugcucagaucaggga

SEQ ID NO: 2257012 - RNA, 19 nt, Artificial Sequence
  Description of Artificial Sequence: Synthetic oligonucleotide
guugccgggaagcagcgcc

SEQ ID NO: 2257013 - RNA, 19 nt, Artificial Sequence
  Description of Artificial Sequence: Synthetic oligonucleotide
gauguucauggcacaagag

SEQ ID NO: 2257014 - RNA, 19 nt, Artificial Sequence
  Description of Artificial Sequence: Synthetic oligonucleotide
ugauucggggagcugcagc

SEQ ID NO: 2257015 - RNA, 19 nt, Artificial Sequence
  Description of Artificial Sequence: Synthetic oligonucleotide
caguucaugaugguguggc

SEQ ID NO: 2257016 - RNA, 19 nt, Artificial Sequence
  Description of Artificial Sequence: Synthetic oligonucleotide
gaagucgucucuggagucg

SEQ ID NO: 2257017 - RNA, 19 nt, Artificial Sequence
  Description of Artificial Sequence: Synthetic oligonucleotide
uaagucugcauucgggguu

SEQ ID NO: 2257018 - RNA, 19 nt, Artificial Sequence
  Description of Artificial Sequence: Synthetic oligonucleotide
gagacuuugccgagguccg

SEQ ID NO: 2257019 - RNA, 19 nt, Artificial Sequence
  Description of Artificial Sequence: Synthetic oligonucleotide
cuggauucagacccuuggg

SEQ ID NO: 2257020 - RNA, 19 nt, Artificial Sequence
  Description of Artificial Sequence: Synthetic oligonucleotide
acauauguggaagagggua

SEQ ID NO: 2257021 - RNA, 19 nt, Artificial Sequence
  Description of Artificial Sequence: Synthetic oligonucleotide
acaagagccacagaucccu

SEQ ID NO: 2257022 - RNA, 19 nt, Artificial Sequence
  Description of Artificial Sequence: Synthetic oligonucleotide
ucgauagaucuguacugug

SEQ ID NO: 2257023 - RNA, 19 nt, Artificial Sequence
  Description of Artificial Sequence: Synthetic oligonucleotide
ucagaucagggacuagauc

SEQ ID NO: 2257024 - RNA, 19 nt, Artificial Sequence
  Description of Artificial Sequence: Synthetic oligonucleotide
caggccugaaucugcaggc

SEQ ID NO: 2257025 - RNA, 19 nt, Artificial Sequence
  Description of Artificial Sequence: Synthetic oligonucleotide
uaggccugcaugagaacug

SEQ ID NO: 2257026 - RNA, 19 nt, Artificial Sequence
  Description of Artificial Sequence: Synthetic oligonucleotide
ucugccgagagccguugcc

SEQ ID NO: 2257027 - RNA, 19 nt, Artificial Sequence
  Description of Artificial Sequence: Synthetic oligonucleotide
uauucagaucaacuucaua

SEQ ID NO: 2257028 - RNA, 19 nt, Artificial Sequence
  Description of Artificial Sequence: Synthetic oligonucleotide
caugaucuccggaagguca

SEQ ID NO: 2257029 - RNA, 19 nt, Artificial Sequence
  Description of Artificial Sequence: Synthetic oligonucleotide
acacuuauucagaucaacu

SEQ ID NO: 2257030 - RNA, 19 nt, Artificial Sequence
  Description of Artificial Sequence: Synthetic oligonucleotide
ucuucuccuuguagguugc

SEQ ID NO: 2257031 - RNA, 19 nt, Artificial Sequence
  Description of Artificial Sequence: Synthetic oligonucleotide
ugaaucugcaggcgggcuc

SEQ ID NO: 2257032 - RNA, 19 nt, Artificial Sequence
  Description of Artificial Sequence: Synthetic oligonucleotide
uacauauguggaagagggu

SEQ ID NO: 2257033 - RNA, 19 nt, Artificial Sequence
  Description of Artificial Sequence: Synthetic oligonucleotide
augccagaguguugccucc

SEQ ID NO: 2257034 - RNA, 19 nt, Artificial Sequence
  Description of Artificial Sequence: Synthetic oligonucleotide
ugggacucguccuucuucu

SEQ ID NO: 2257035 - RNA, 19 nt, Artificial Sequence
  Description of Artificial Sequence: Synthetic oligonucleotide
gacuagauccuugaucaca

SEQ ID NO: 2257036 - RNA, 19 nt, Artificial Sequence
  Description of Artificial Sequence: Synthetic oligonucleotide
aaguggaaucaauuucauu

SEQ ID NO: 2257037 - RNA, 19 nt, Artificial Sequence
  Description of Artificial Sequence: Synthetic oligonucleotide
gagcauccaacaccaucgg

SEQ ID NO: 2257038 - RNA, 19 nt, Artificial Sequence
  Description of Artificial Sequence: Synthetic oligonucleotide
uccugcgagugcaugccag

SEQ ID NO: 2257039 - RNA, 19 nt, Artificial Sequence
  Description of Artificial Sequence: Synthetic oligonucleotide
ugucugugccccucggcag

SEQ ID NO: 2257040 - RNA, 19 nt, Artificial Sequence
  Description of Artificial Sequence: Synthetic oligonucleotide
auaggccugcaugagaacu

SEQ ID NO: 2257041 - RNA, 19 nt, Artificial Sequence
  Description of Artificial Sequence: Synthetic oligonucleotide
augaugguguggcagcggu

SEQ ID NO: 2257042 - RNA, 19 nt, Artificial Sequence
  Description of Artificial Sequence: Synthetic oligonucleotide
ugcaugaucuccggaaggu

SEQ ID NO: 2257043 - RNA, 19 nt, Artificial Sequence
  Description of Artificial Sequence: Synthetic oligonucleotide
auagaucuguacugugcgu

SEQ ID NO: 2257044 - RNA, 19 nt, Artificial Sequence
  Description of Artificial Sequence: Synthetic oligonucleotide
gaucauccagcgauaggcc

SEQ ID NO: 2257045 - RNA, 19 nt, Artificial Sequence
  Description of Artificial Sequence: Synthetic oligonucleotide
guagagagagaaggggucc

SEQ ID NO: 2257046 - RNA, 19 nt, Artificial Sequence
  Description of Artificial Sequence: Synthetic oligonucleotide
uggaaucaauuucauucuu

SEQ ID NO: 2257047 - RNA, 19 nt, Artificial Sequence
  Description of Artificial Sequence: Synthetic oligonucleotide
gauccuugaucacauacau

SEQ ID NO: 2257048 - RNA, 19 nt, Artificial Sequence
  Description of Artificial Sequence: Synthetic oligonucleotide
ggucccaucgauaaauggc

SEQ ID NO: 2257049 - RNA, 19 nt, Artificial Sequence
  Description of Artificial Sequence: Synthetic oligonucleotide
ugucgauccugcgagugca

SEQ ID NO: 2257050 - RNA, 19 nt, Artificial Sequence
  Description of Artificial Sequence: Synthetic oligonucleotide
uccguuccaccaauagcug

SEQ ID NO: 2257051 - RNA, 19 nt, Artificial Sequence
  Description of Artificial Sequence: Synthetic oligonucleotide
gaaggucaaaguggaauca

SEQ ID NO: 2257052 - RNA, 19 nt, Artificial Sequence
  Description of Artificial Sequence: Synthetic oligonucleotide
uagggcucgauagaucugu

SEQ ID NO: 2257053 - RNA, 19 nt, Artificial Sequence
  Description of Artificial Sequence: Synthetic oligonucleotide
gugcaugccagaguguugc

SEQ ID NO: 2257054 - RNA, 19 nt, Artificial Sequence
  Description of Artificial Sequence: Synthetic oligonucleotide
uacuugucuccguuccacc

SEQ ID NO: 2257055 - RNA, 19 nt, Artificial Sequence
  Description of Artificial Sequence: Synthetic oligonucleotide
uagaucuguacugugcgua

SEQ ID NO: 2257056 - RNA, 19 nt, Artificial Sequence
  Description of Artificial Sequence: Synthetic oligonucleotide
gucuccguuccaccaauag

SEQ ID NO: 2257057 - RNA, 19 nt, Artificial Sequence
  Description of Artificial Sequence: Synthetic oligonucleotide
agauccuugaucacauaca

SEQ ID NO: 2257058 - RNA, 19 nt, Artificial Sequence
  Description of Artificial Sequence: Synthetic oligonucleotide
gauccugcgagugcaugcc

SEQ ID NO: 2257059 - RNA, 19 nt, Artificial Sequence
  Description of Artificial Sequence: Synthetic oligonucleotide
gagauucagaguugacaga

SEQ ID NO: 2257060 - RNA, 19 nt, Artificial Sequence
  Description of Artificial Sequence: Synthetic oligonucleotide
ucggcaggccugaaucugc

SEQ ID NO: 2257061 - RNA, 19 nt, Artificial Sequence
  Description of Artificial Sequence: Synthetic oligonucleotide
gugcguagaaguugcucag

SEQ ID NO: 2257062 - RNA, 19 nt, Artificial Sequence
  Description of Artificial Sequence: Synthetic oligonucleotide
ugccgagagccguugccgg

SEQ ID NO: 2257063 - RNA, 19 nt, Artificial Sequence
  Description of Artificial Sequence: Synthetic oligonucleotide
cacacuuauucagaucaac

SEQ ID NO: 2257064 - RNA, 19 nt, Artificial Sequence
  Description of Artificial Sequence: Synthetic oligonucleotide
gcauucgggguuuaucucc

SEQ ID NO: 2257065 - RNA, 19 nt, Artificial Sequence
  Description of Artificial Sequence: Synthetic oligonucleotide
aucuccggaaggucaaagu

SEQ ID NO: 2257066 - RNA, 19 nt, Artificial Sequence
  Description of Artificial Sequence: Synthetic oligonucleotide
gcgagugcaugccagagug

SEQ ID NO: 2257067 - RNA, 19 nt, Artificial Sequence
  Description of Artificial Sequence: Synthetic oligonucleotide
ugaagucgucucuggaguc

SEQ ID NO: 2257068 - RNA, 19 nt, Artificial Sequence
  Description of Artificial Sequence: Synthetic oligonucleotide
agcgguagagagagaaggg

SEQ ID NO: 2257069 - RNA, 19 nt, Artificial Sequence
  Description of Artificial Sequence: Synthetic oligonucleotide
gaucuccggaaggucaaag

SEQ ID NO: 2257070 - RNA, 19 nt, Artificial Sequence
  Description of Artificial Sequence: Synthetic oligonucleotide
gcucgauagaucuguacug

SEQ ID NO: 2257071 - RNA, 19 nt, Artificial Sequence
  Description of Artificial Sequence: Synthetic oligonucleotide
ucugcauucgggguuuauc

SEQ ID NO: 2257072 - RNA, 19 nt, Artificial Sequence
  Description of Artificial Sequence: Synthetic oligonucleotide
gcaugagaacugcaggucc

SEQ ID NO: 2257073 - RNA, 19 nt, Artificial Sequence
  Description of Artificial Sequence: Synthetic oligonucleotide
gucccaucgauaaauggca

SEQ ID NO: 2257074 - RNA, 19 nt, Artificial Sequence
  Description of Artificial Sequence: Synthetic oligonucleotide
guggaaucaauuucauucu

SEQ ID NO: 2257075 - RNA, 19 nt, Artificial Sequence
  Description of Artificial Sequence: Synthetic oligonucleotide
ugcauucgggguuuaucuc

SEQ ID NO: 2257076 - RNA, 19 nt, Artificial Sequence
  Description of Artificial Sequence: Synthetic oligonucleotide
uguagguugccaucaucuu

SEQ ID NO: 2257077 - RNA, 19 nt, Artificial Sequence
  Description of Artificial Sequence: Synthetic oligonucleotide
guacugugcguagaaguug

SEQ ID NO: 2257078 - RNA, 19 nt, Artificial Sequence
  Description of Artificial Sequence: Synthetic oligonucleotide
cacauacauauguggaaga

SEQ ID NO: 2257079 - RNA, 19 nt, Artificial Sequence
  Description of Artificial Sequence: Synthetic oligonucleotide
guguggcagcgguagagag

SEQ ID NO: 2257080 - RNA, 19 nt, Artificial Sequence
  Description of Artificial Sequence: Synthetic oligonucleotide
uacaugcuguuuuccuaga

SEQ ID NO: 2257081 - RNA, 19 nt, Artificial Sequence
  Description of Artificial Sequence: Synthetic oligonucleotide
agccacagaucccuucucu

SEQ ID NO: 2257082 - RNA, 19 nt, Artificial Sequence
  Description of Artificial Sequence: Synthetic oligonucleotide
uugccuccguugauguuca

SEQ ID NO: 2257083 - RNA, 19 nt, Artificial Sequence
  Description of Artificial Sequence: Synthetic oligonucleotide
agguccgugucgauccugc

SEQ ID NO: 2257084 - RNA, 19 nt, Artificial Sequence
  Description of Artificial Sequence: Synthetic oligonucleotide
ucgauggacugcagguacu

SEQ ID NO: 2257085 - RNA, 19 nt, Artificial Sequence
  Description of Artificial Sequence: Synthetic oligonucleotide
ugcgagugcaugccagagu

SEQ ID NO: 2257086 - RNA, 19 nt, Artificial Sequence
  Description of Artificial Sequence: Synthetic oligonucleotide
agauagggcucgauagauc

SEQ ID NO: 2257087 - RNA, 19 nt, Artificial Sequence
  Description of Artificial Sequence: Synthetic oligonucleotide
aggagacaccaaccgccac

SEQ ID NO: 2257088 - RNA, 19 nt, Artificial Sequence
  Description of Artificial Sequence: Synthetic oligonucleotide
cacggagagagucacgcca

SEQ ID NO: 2257089 - RNA, 19 nt, Artificial Sequence
  Description of Artificial Sequence: Synthetic oligonucleotide
agaucccuucucugcauga

SEQ ID NO: 2257090 - RNA, 19 nt, Artificial Sequence
  Description of Artificial Sequence: Synthetic oligonucleotide
cgaucauccagcgauaggc

SEQ ID NO: 2257091 - RNA, 19 nt, Artificial Sequence
  Description of Artificial Sequence: Synthetic oligonucleotide
ucucugcaugaucuccgga

SEQ ID NO: 2257092 - RNA, 19 nt, Artificial Sequence
  Description of Artificial Sequence: Synthetic oligonucleotide
gauaggccugcaugagaac

SEQ ID NO: 2257093 - RNA, 19 nt, Artificial Sequence
  Description of Artificial Sequence: Synthetic oligonucleotide
aauagcuggggcagcuggu

SEQ ID NO: 2257094 - RNA, 19 nt, Artificial Sequence
  Description of Artificial Sequence: Synthetic oligonucleotide
agagucacgccagugcccu

SEQ ID NO: 2257095 - RNA, 19 nt, Artificial Sequence
  Description of Artificial Sequence: Synthetic oligonucleotide
aucuugauuagagcaucca

SEQ ID NO: 2257096 - RNA, 19 nt, Artificial Sequence
  Description of Artificial Sequence: Synthetic oligonucleotide
gggucccaucgauaaaugg

SEQ ID NO: 2257097 - RNA, 19 nt, Artificial Sequence
  Description of Artificial Sequence: Synthetic oligonucleotide
gaagagauucagaguugac

SEQ ID NO: 2257098 - RNA, 19 nt, Artificial Sequence
  Description of Artificial Sequence: Synthetic oligonucleotide
ucccaucgauaaauggcaa

SEQ ID NO: 2257099 - RNA, 19 nt, Artificial Sequence
  Description of Artificial Sequence: Synthetic oligonucleotide
cacaggaugcauucauaca

SEQ ID NO: 2257100 - RNA, 19 nt, Artificial Sequence
  Description of Artificial Sequence: Synthetic oligonucleotide
gacuuugccgagguccgug

SEQ ID NO: 2257101 - RNA, 19 nt, Artificial Sequence
  Description of Artificial Sequence: Synthetic oligonucleotide
guuuauuauacaugcuguu

SEQ ID NO: 2257102 - RNA, 19 nt, Artificial Sequence
  Description of Artificial Sequence: Synthetic oligonucleotide
gucgaucauccagcgauag

SEQ ID NO: 2257103 - RNA, 19 nt, Artificial Sequence
  Description of Artificial Sequence: Synthetic oligonucleotide
aagucgucucuggagucga

SEQ ID NO: 2257104 - RNA, 19 nt, Artificial Sequence
  Description of Artificial Sequence: Synthetic oligonucleotide
gcgguagagagagaagggg

SEQ ID NO: 2257105 - RNA, 19 nt, Artificial Sequence
  Description of Artificial Sequence: Synthetic oligonucleotide
cuccguugauguucauggc

SEQ ID NO: 2257106 - RNA, 19 nt, Artificial Sequence
  Description of Artificial Sequence: Synthetic oligonucleotide
cgauagaucuguacugugc

SEQ ID NO: 2257107 - RNA, 19 nt, Artificial Sequence
  Description of Artificial Sequence: Synthetic oligonucleotide
ccagcgauaggccugcaug

SEQ ID NO: 2257108 - RNA, 19 nt, Artificial Sequence
  Description of Artificial Sequence: Synthetic oligonucleotide
agaucagggacuagauccu

SEQ ID NO: 2257109 - RNA, 19 nt, Artificial Sequence
  Description of Artificial Sequence: Synthetic oligonucleotide
ccucaaggagacaccaacc

SEQ ID NO: 2257110 - RNA, 19 nt, Artificial Sequence
  Description of Artificial Sequence: Synthetic oligonucleotide
uauguggaagaggguaaau

SEQ ID NO: 2257111 - RNA, 19 nt, Artificial Sequence
  Description of Artificial Sequence: Synthetic oligonucleotide
gauucagaguugacagaca

SEQ ID NO: 2257112 - RNA, 19 nt, Artificial Sequence
  Description of Artificial Sequence: Synthetic oligonucleotide
agcgccucaaggagacacc

SEQ ID NO: 2257113 - RNA, 19 nt, Artificial Sequence
  Description of Artificial Sequence: Synthetic oligonucleotide
acuuugccgagguccgugu

SEQ ID NO: 2257114 - RNA, 19 nt, Artificial Sequence
  Description of Artificial Sequence: Synthetic oligonucleotide
gccucaaggagacaccaac

SEQ ID NO: 2257115 - RNA, 19 nt, Artificial Sequence
  Description of Artificial Sequence: Synthetic oligonucleotide
accaucggcccacacuuau

SEQ ID NO: 2257116 - RNA, 19 nt, Artificial Sequence
  Description of Artificial Sequence: Synthetic oligonucleotide
cguuccaccaauagcuggg

SEQ ID NO: 2257117 - RNA, 19 nt, Artificial Sequence
  Description of Artificial Sequence: Synthetic oligonucleotide
gugucgauccugcgagugc

SEQ ID NO: 2257118 - RNA, 19 nt, Artificial Sequence
  Description of Artificial Sequence: Synthetic oligonucleotide
agcgauaggccugcaugag

SEQ ID NO: 2257119 - RNA, 19 nt, Artificial Sequence
  Description of Artificial Sequence: Synthetic oligonucleotide
gagagucacgccagugccc

SEQ ID NO: 2257120 - RNA, 19 nt, Artificial Sequence
  Description of Artificial Sequence: Synthetic oligonucleotide
cugcauucgggguuuaucu

SEQ ID NO: 2257121 - RNA, 19 nt, Artificial Sequence
  Description of Artificial Sequence: Synthetic oligonucleotide
cacuuauucagaucaacuu

SEQ ID NO: 2257122 - RNA, 19 nt, Artificial Sequence
  Description of Artificial Sequence: Synthetic oligonucleotide
ggccugaaucugcaggcgg

SEQ ID NO: 2257123 - RNA, 19 nt, Artificial Sequence
  Description of Artificial Sequence: Synthetic oligonucleotide
ugucagggucccaucgaua

SEQ ID NO: 2257124 - RNA, 19 nt, Artificial Sequence
  Description of Artificial Sequence: Synthetic oligonucleotide
cauucgggguuuaucucca

SEQ ID NO: 2257125 - RNA, 19 nt, Artificial Sequence
  Description of Artificial Sequence: Synthetic oligonucleotide
agucuugucagggucccau

SEQ ID NO: 2257126 - RNA, 19 nt, Artificial Sequence
  Description of Artificial Sequence: Synthetic oligonucleotide
cauccagcgauaggccugc

SEQ ID NO: 2257127 - RNA, 19 nt, Artificial Sequence
  Description of Artificial Sequence: Synthetic oligonucleotide
ccacagaucccuucucugc

SEQ ID NO: 2257128 - RNA, 19 nt, Artificial Sequence
  Description of Artificial Sequence: Synthetic oligonucleotide
ugugccccucggcaggccu

SEQ ID NO: 2257129 - RNA, 19 nt, Artificial Sequence
  Description of Artificial Sequence: Synthetic oligonucleotide
ugcguagaaguugcucaga

SEQ ID NO: 2257130 - RNA, 19 nt, Artificial Sequence
  Description of Artificial Sequence: Synthetic oligonucleotide
ucagggucccaucgauaaa

SEQ ID NO: 2257131 - RNA, 19 nt, Artificial Sequence
  Description of Artificial Sequence: Synthetic oligonucleotide
cuucagauagggcucgaua

SEQ ID NO: 2257132 - RNA, 19 nt, Artificial Sequence
  Description of Artificial Sequence: Synthetic oligonucleotide
ugccagaguguugccuccg

SEQ ID NO: 2257133 - RNA, 19 nt, Artificial Sequence
  Description of Artificial Sequence: Synthetic oligonucleotide
acagaucccuucucugcau

SEQ ID NO: 2257134 - RNA, 19 nt, Artificial Sequence
  Description of Artificial Sequence: Synthetic oligonucleotide
ccgagguccgugucgaucc

SEQ ID NO: 2257135 - RNA, 19 nt, Artificial Sequence
  Description of Artificial Sequence: Synthetic oligonucleotide
uugauucggggagcugcag

SEQ ID NO: 2257136 - RNA, 19 nt, Artificial Sequence
  Description of Artificial Sequence: Synthetic oligonucleotide
acggagagagucacgccag

SEQ ID NO: 2257137 - RNA, 19 nt, Artificial Sequence
  Description of Artificial Sequence: Synthetic oligonucleotide
aucggcccacacuuauuca

SEQ ID NO: 2257138 - RNA, 19 nt, Artificial Sequence
  Description of Artificial Sequence: Synthetic oligonucleotide
cagguacugcugcuugccc

SEQ ID NO: 2257139 - RNA, 19 nt, Artificial Sequence
  Description of Artificial Sequence: Synthetic oligonucleotide
cagcgauaggccugcauga

SEQ ID NO: 2257140 - RNA, 19 nt, Artificial Sequence
  Description of Artificial Sequence: Synthetic oligonucleotide
auucgggguuuaucuccag

SEQ ID NO: 2257141 - RNA, 19 nt, Artificial Sequence
  Description of Artificial Sequence: Synthetic oligonucleotide
cagaucccuucucugcaug

SEQ ID NO: 2257142 - RNA, 19 nt, Artificial Sequence
  Description of Artificial Sequence: Synthetic oligonucleotide
ugcaugccagaguguugcc

SEQ ID NO: 2257143 - RNA, 19 nt, Artificial Sequence
  Description of Artificial Sequence: Synthetic oligonucleotide
ugcaggucccagguacuug

SEQ ID NO: 2257144 - RNA, 19 nt, Artificial Sequence
  Description of Artificial Sequence: Synthetic oligonucleotide
cagcgccucaaggagacac

SEQ ID NO: 2257145 - RNA, 19 nt, Artificial Sequence
  Description of Artificial Sequence: Synthetic oligonucleotide
ggcucgauagaucuguacu

SEQ ID NO: 2257146 - RNA, 19 nt, Artificial Sequence
  Description of Artificial Sequence: Synthetic oligonucleotide
ucgauccugcgagugcaug

SEQ ID NO: 2257147 - RNA, 19 nt, Artificial Sequence
  Description of Artificial Sequence: Synthetic oligonucleotide
uugccgagguccgugucga

SEQ ID NO: 2257148 - RNA, 19 nt, Artificial Sequence
  Description of Artificial Sequence: Synthetic oligonucleotide
aggcgcuccucugugaagu

SEQ ID NO: 2257149 - RNA, 19 nt, Artificial Sequence
  Description of Artificial Sequence: Synthetic oligonucleotide
uucccuggauucagacccu

SEQ ID NO: 2257150 - RNA, 19 nt, Artificial Sequence
  Description of Artificial Sequence: Synthetic oligonucleotide
uugccgggaagcagcgccu

SEQ ID NO: 2257151 - RNA, 19 nt, Artificial Sequence
  Description of Artificial Sequence: Synthetic oligonucleotide
gcuuucccuggauucagac

SEQ ID NO: 2257152 - RNA, 19 nt, Artificial Sequence
  Description of Artificial Sequence: Synthetic oligonucleotide
gaucuguacugugcguaga

SEQ ID NO: 2257153 - RNA, 19 nt, Artificial Sequence
  Description of Artificial Sequence: Synthetic oligonucleotide
uccagcgauaggccugcau

SEQ ID NO: 2257154 - RNA, 19 nt, Artificial Sequence
  Description of Artificial Sequence: Synthetic oligonucleotide
cugugcguagaaguugcuc

SEQ ID NO: 2257155 - RNA, 19 nt, Artificial Sequence
  Description of Artificial Sequence: Synthetic oligonucleotide
agucacgccagugcccucu

SEQ ID NO: 2257156 - RNA, 19 nt, Artificial Sequence
  Description of Artificial Sequence: Synthetic oligonucleotide
ucuucagauagggcucgau

SEQ ID NO: 2257157 - RNA, 19 nt, Artificial Sequence
  Description of Artificial Sequence: Synthetic oligonucleotide
cauacaauccauccagcuu

SEQ ID NO: 2257158 - RNA, 19 nt, Artificial Sequence
  Description of Artificial Sequence: Synthetic oligonucleotide
aggucaaaguggaaucaau

SEQ ID NO: 2257159 - RNA, 19 nt, Artificial Sequence
  Description of Artificial Sequence: Synthetic oligonucleotide
cugcgagugcaugccagag

SEQ ID NO: 2257160 - RNA, 19 nt, Artificial Sequence
  Description of Artificial Sequence: Synthetic oligonucleotide
gacccuuggggcaggucug

SEQ ID NO: 2257161 - RNA, 19 nt, Artificial Sequence
  Description of Artificial Sequence: Synthetic oligonucleotide
gccacagaucccuucucug

SEQ ID NO: 2257162 - RNA, 19 nt, Artificial Sequence
  Description of Artificial Sequence: Synthetic oligonucleotide
guccgugucgauccugcga

SEQ ID NO: 2257163 - RNA, 19 nt, Artificial Sequence
  Description of Artificial Sequence: Synthetic oligonucleotide
uugcucagaucagggacua

SEQ ID NO: 2257164 - RNA, 19 nt, Artificial Sequence
  Description of Artificial Sequence: Synthetic oligonucleotide
ccuagagaauccagguguc

SEQ ID NO: 2257165 - RNA, 19 nt, Artificial Sequence
  Description of Artificial Sequence: Synthetic oligonucleotide
gaaucugcaggcgggcucu

SEQ ID NO: 2257166 - RNA, 19 nt, Artificial Sequence
  Description of Artificial Sequence: Synthetic oligonucleotide
ucugugccccucggcaggc

SEQ ID NO: 2257167 - RNA, 19 nt, Artificial Sequence
  Description of Artificial Sequence: Synthetic oligonucleotide
ccaccaauagcuggggcag

SEQ ID NO: 2257168 - RNA, 19 nt, Artificial Sequence
  Description of Artificial Sequence: Synthetic oligonucleotide
auagggcucgauagaucug

SEQ ID NO: 2257169 - RNA, 19 nt, Artificial Sequence
  Description of Artificial Sequence: Synthetic oligonucleotide
gcucagaucagggacuaga

SEQ ID NO: 2257170 - RNA, 19 nt, Artificial Sequence
  Description of Artificial Sequence: Synthetic oligonucleotide
gagccacagaucccuucuc

SEQ ID NO: 2257171 - RNA, 19 nt, Artificial Sequence
  Description of Artificial Sequence: Synthetic oligonucleotide
ugucuccguuccaccaaua

SEQ ID NO: 2257172 - RNA, 19 nt, Artificial Sequence
  Description of Artificial Sequence: Synthetic oligonucleotide
cucccgguccucgauggac

SEQ ID NO: 2257173 - RNA, 19 nt, Artificial Sequence
  Description of Artificial Sequence: Synthetic oligonucleotide
cuuugccgagguccguguc

SEQ ID NO: 2257174 - RNA, 19 nt, Artificial Sequence
  Description of Artificial Sequence: Synthetic oligonucleotide
auccugcgagugcaugcca

SEQ ID NO: 2257175 - RNA, 19 nt, Artificial Sequence
  Description of Artificial Sequence: Synthetic oligonucleotide
ucucccgguccucgaugga

SEQ ID NO: 2257176 - RNA, 19 nt, Artificial Sequence
  Description of Artificial Sequence: Synthetic oligonucleotide
gagagccguugccgggaag

SEQ ID NO: 2257177 - RNA, 19 nt, Artificial Sequence
  Description of Artificial Sequence: Synthetic oligonucleotide
cucgauagaucuguacugu

SEQ ID NO: 2257178 - RNA, 19 nt, Artificial Sequence
  Description of Artificial Sequence: Synthetic oligonucleotide
agggucccaucgauaaaug

SEQ ID NO: 2257179 - RNA, 19 nt, Artificial Sequence
  Description of Artificial Sequence: Synthetic oligonucleotide
ggagagagucacgccagug

SEQ ID NO: 2257180 - RNA, 19 nt, Artificial Sequence
  Description of Artificial Sequence: Synthetic oligonucleotide
ggcagcgguagagagagaa

SEQ ID NO: 2257181 - RNA, 19 nt, Artificial Sequence
  Description of Artificial Sequence: Synthetic oligonucleotide
gucuugucagggucccauc

SEQ ID NO: 2257182 - RNA, 19 nt, Artificial Sequence
  Description of Artificial Sequence: Synthetic oligonucleotide
aggcgggcucugccgagag

SEQ ID NO: 2257183 - RNA, 19 nt, Artificial Sequence
  Description of Artificial Sequence: Synthetic oligonucleotide
ugcucagaucagggacuag

SEQ ID NO: 2257184 - RNA, 19 nt, Artificial Sequence
  Description of Artificial Sequence: Synthetic oligonucleotide
uucuucagauagggcucga

SEQ ID NO: 2257185 - RNA, 19 nt, Artificial Sequence
  Description of Artificial Sequence: Synthetic oligonucleotide
cucagaucagggacuagau

SEQ ID NO: 2257186 - RNA, 19 nt, Artificial Sequence
  Description of Artificial Sequence: Synthetic oligonucleotide
ugaucuccggaaggucaaa

SEQ ID NO: 2257187 - RNA, 19 nt, Artificial Sequence
  Description of Artificial Sequence: Synthetic oligonucleotide
cuucuccuuguagguugcc

SEQ ID NO: 2257188 - RNA, 19 nt, Artificial Sequence
  Description of Artificial Sequence: Synthetic oligonucleotide
gguccgugucgauccugcg

SEQ ID NO: 2257189 - RNA, 19 nt, Artificial Sequence
  Description of Artificial Sequence: Synthetic oligonucleotide
gggcucgauagaucuguac

SEQ ID NO: 2257190 - RNA, 19 nt, Artificial Sequence
  Description of Artificial Sequence: Synthetic oligonucleotide
cgauccugcgagugcaugc

SEQ ID NO: 2257191 - RNA, 19 nt, Artificial Sequence
  Description of Artificial Sequence: Synthetic oligonucleotide
gucgucucuggagucgauc

SEQ ID NO: 2257192 - RNA, 19 nt, Artificial Sequence
  Description of Artificial Sequence: Synthetic oligonucleotide
gagguccgugucgauccug

SEQ ID NO: 2257193 - RNA, 19 nt, Artificial Sequence
  Description of Artificial Sequence: Synthetic oligonucleotide
cucugccgagagccguugc

SEQ ID NO: 2257194 - RNA, 19 nt, Artificial Sequence
  Description of Artificial Sequence: Synthetic oligonucleotide
ggacuagauccuugaucac

SEQ ID NO: 2257195 - RNA, 19 nt, Artificial Sequence
  Description of Artificial Sequence: Synthetic oligonucleotide
cuugcccuccugggacucg

SEQ ID NO: 2257196 - RNA, 19 nt, Artificial Sequence
  Description of Artificial Sequence: Synthetic oligonucleotide
guggaagaggguaaauuuu

SEQ ID NO: 2257197 - RNA, 19 nt, Artificial Sequence
  Description of Artificial Sequence: Synthetic oligonucleotide
caggaugcauucauacaau

SEQ ID NO: 2257198 - RNA, 19 nt, Artificial Sequence
  Description of Artificial Sequence: Synthetic oligonucleotide
caccaauagcuggggcagc

SEQ ID NO: 2257199 - RNA, 19 nt, Artificial Sequence
  Description of Artificial Sequence: Synthetic oligonucleotide
gccgagagccguugccggg

SEQ ID NO: 2257200 - RNA, 19 nt, Artificial Sequence
  Description of Artificial Sequence: Synthetic oligonucleotide
auccuugaucacauacaua

SEQ ID NO: 2257201 - RNA, 19 nt, Artificial Sequence
  Description of Artificial Sequence: Synthetic oligonucleotide
gcacggagagagucacgcc

SEQ ID NO: 2257202 - RNA, 19 nt, Artificial Sequence
  Description of Artificial Sequence: Synthetic oligonucleotide
gcgauaggccugcaugaga

SEQ ID NO: 2257203 - RNA, 19 nt, Artificial Sequence
  Description of Artificial Sequence: Synthetic oligonucleotide
cagauagggcucgauagau

SEQ ID NO: 2257204 - RNA, 19 nt, Artificial Sequence
  Description of Artificial Sequence: Synthetic oligonucleotide
cuagauccuugaucacaua

SEQ ID NO: 2257205 - RNA, 19 nt, Artificial Sequence
  Description of Artificial Sequence: Synthetic oligonucleotide
caacaccaucggcccacac

SEQ ID NO: 2257206 - RNA, 19 nt, Artificial Sequence
  Description of Artificial Sequence: Synthetic oligonucleotide
agucgaucauccagcgaua

SEQ ID NO: 2257207 - RNA, 19 nt, Artificial Sequence
  Description of Artificial Sequence: Synthetic oligonucleotide
cagggucccaucgauaaau

SEQ ID NO: 2257208 - RNA, 19 nt, Artificial Sequence
  Description of Artificial Sequence: Synthetic oligonucleotide
gcgcuccucugugaagucg

SEQ ID NO: 2257209 - RNA, 19 nt, Artificial Sequence
  Description of Artificial Sequence: Synthetic oligonucleotide
agacuuugccgagguccgu

SEQ ID NO: 2257210 - RNA, 19 nt, Artificial Sequence
  Description of Artificial Sequence: Synthetic oligonucleotide
gccuccguugauguucaug

SEQ ID NO: 2257211 - RNA, 19 nt, Artificial Sequence
  Description of Artificial Sequence: Synthetic oligonucleotide
gguguggcagcgguagaga

SEQ ID NO: 2257212 - RNA, 19 nt, Artificial Sequence
  Description of Artificial Sequence: Synthetic oligonucleotide
gaucccuucucugcaugau

SEQ ID NO: 2257213 - RNA, 19 nt, Artificial Sequence
  Description of Artificial Sequence: Synthetic oligonucleotide
ucagacccuuggggcaggu

SEQ ID NO: 2257214 - RNA, 19 nt, Artificial Sequence
  Description of Artificial Sequence: Synthetic oligonucleotide
ccguugccgggaagcagcg

SEQ ID NO: 2257215 - RNA, 19 nt, Artificial Sequence
  Description of Artificial Sequence: Synthetic oligonucleotide
gcaugaucuccggaagguc

SEQ ID NO: 2257216 - RNA, 19 nt, Artificial Sequence
  Description of Artificial Sequence: Synthetic oligonucleotide
caucgauaaauggcaaauu

SEQ ID NO: 2257217 - RNA, 19 nt, Artificial Sequence
  Description of Artificial Sequence: Synthetic oligonucleotide
ggccaggcgcuccucugug

SEQ ID NO: 2257218 - RNA, 19 nt, Artificial Sequence
  Description of Artificial Sequence: Synthetic oligonucleotide
ucccuggauucagacccuu

SEQ ID NO: 2257219 - RNA, 19 nt, Artificial Sequence
  Description of Artificial Sequence: Synthetic oligonucleotide
cccaucgauaaauggcaaa

SEQ ID NO: 2257220 - RNA, 19 nt, Artificial Sequence
  Description of Artificial Sequence: Synthetic oligonucleotide
caacuucauaagucugcau

SEQ ID NO: 2257221 - RNA, 19 nt, Artificial Sequence
  Description of Artificial Sequence: Synthetic oligonucleotide
gcguagaaguugcucagau

SEQ ID NO: 2257222 - RNA, 19 nt, Artificial Sequence
  Description of Artificial Sequence: Synthetic oligonucleotide
acccuuggggcaggucuga

SEQ ID NO: 2257223 - RNA, 19 nt, Artificial Sequence
  Description of Artificial Sequence: Synthetic oligonucleotide
ccaucgauaaauggcaaau

SEQ ID NO: 2257224 - RNA, 19 nt, Artificial Sequence
  Description of Artificial Sequence: Synthetic oligonucleotide
gagucacgccagugcccuc

SEQ ID NO: 2257225 - RNA, 19 nt, Artificial Sequence
  Description of Artificial Sequence: Synthetic oligonucleotide
cacauucagcacggagaga

SEQ ID NO: 2257226 - RNA, 19 nt, Artificial Sequence
  Description of Artificial Sequence: Synthetic oligonucleotide
cccuggauucagacccuug

SEQ ID NO: 2257227 - RNA, 19 nt, Artificial Sequence
  Description of Artificial Sequence: Synthetic oligonucleotide
caggcacacaggaugcauu

SEQ ID NO: 2257228 - RNA, 19 nt, Artificial Sequence
  Description of Artificial Sequence: Synthetic oligonucleotide
cgugucgauccugcgagug

SEQ ID NO: 2257229 - RNA, 19 nt, Artificial Sequence
  Description of Artificial Sequence: Synthetic oligonucleotide
cgccagugcccucuucucc

SEQ ID NO: 2257230 - RNA, 19 nt, Artificial Sequence
  Description of Artificial Sequence: Synthetic oligonucleotide
gcgccucaaggagacacca

SEQ ID NO: 2257231 - RNA, 19 nt, Artificial Sequence
  Description of Artificial Sequence: Synthetic oligonucleotide
ccugcgagugcaugccaga

SEQ ID NO: 2257232 - RNA, 19 nt, Artificial Sequence
  Description of Artificial Sequence: Synthetic oligonucleotide
ccaauagcuggggcagcug

SEQ ID NO: 2257233 - RNA, 19 nt, Artificial Sequence
  Description of Artificial Sequence: Synthetic oligonucleotide
cugaaucugcaggcgggcu

SEQ ID NO: 2257234 - RNA, 19 nt, Artificial Sequence
  Description of Artificial Sequence: Synthetic oligonucleotide
ggcccacacuuauucagau

SEQ ID NO: 2257235 - RNA, 19 nt, Artificial Sequence
  Description of Artificial Sequence: Synthetic oligonucleotide
ggcgcuccucugugaaguc

SEQ ID NO: 2257236 - RNA, 19 nt, Artificial Sequence
  Description of Artificial Sequence: Synthetic oligonucleotide
gugcccucuucuccuugua

SEQ ID NO: 2257237 - RNA, 19 nt, Artificial Sequence
  Description of Artificial Sequence: Synthetic oligonucleotide
cgguagagagagaaggggu

SEQ ID NO: 2257238 - RNA, 19 nt, Artificial Sequence
  Description of Artificial Sequence: Synthetic oligonucleotide
cugugccccucggcaggcc

SEQ ID NO: 2257239 - RNA, 19 nt, Artificial Sequence
  Description of Artificial Sequence: Synthetic oligonucleotide
gcucugccgagagccguug

SEQ ID NO: 2257240 - RNA, 19 nt, Artificial Sequence
  Description of Artificial Sequence: Synthetic oligonucleotide
agucgucucuggagucgau

SEQ ID NO: 2257241 - RNA, 19 nt, Artificial Sequence
  Description of Artificial Sequence: Synthetic oligonucleotide
agggcucgauagaucugua

SEQ ID NO: 2257242 - RNA, 19 nt, Artificial Sequence
  Description of Artificial Sequence: Synthetic oligonucleotide
ggcuuucccuggauucaga

SEQ ID NO: 2257243 - RNA, 19 nt, Artificial Sequence
  Description of Artificial Sequence: Synthetic oligonucleotide
cagaguugacagacacauu

SEQ ID NO: 2257244 - RNA, 19 nt, Artificial Sequence
  Description of Artificial Sequence: Synthetic oligonucleotide
cagggacuagauccuugau

SEQ ID NO: 2257245 - RNA, 19 nt, Artificial Sequence
  Description of Artificial Sequence: Synthetic oligonucleotide
ccaggcgcuccucugugaa

SEQ ID NO: 2257246 - RNA, 19 nt, Artificial Sequence
  Description of Artificial Sequence: Synthetic oligonucleotide
cgggaagcagcgccucaag

SEQ ID NO: 2257247 - RNA, 19 nt, Artificial Sequence
  Description of Artificial Sequence: Synthetic oligonucleotide
gccaggcgcuccucuguga

SEQ ID NO: 2257248 - RNA, 19 nt, Artificial Sequence
  Description of Artificial Sequence: Synthetic oligonucleotide
caagagccacagaucccuu

SEQ ID NO: 2257249 - RNA, 19 nt, Artificial Sequence
  Description of Artificial Sequence: Synthetic oligonucleotide
cggaaggucaaaguggaau

SEQ ID NO: 2257250 - RNA, 19 nt, Artificial Sequence
  Description of Artificial Sequence: Synthetic oligonucleotide
cggcccacacuuauucaga

SEQ ID NO: 2257251 - RNA, 19 nt, Artificial Sequence
  Description of Artificial Sequence: Synthetic oligonucleotide
ccgguccucgauggacugc

SEQ ID NO: 2257252 - RNA, 19 nt, Artificial Sequence
  Description of Artificial Sequence: Synthetic oligonucleotide
ggccugcaugagaacugca

SEQ ID NO: 2257253 - RNA, 19 nt, Artificial Sequence
  Description of Artificial Sequence: Synthetic oligonucleotide
ccucugugaagucgucucu

SEQ ID NO: 2257254 - RNA, 19 nt, Artificial Sequence
  Description of Artificial Sequence: Synthetic oligonucleotide
auccagcgauaggccugca

SEQ ID NO: 2257255 - RNA, 19 nt, Artificial Sequence
  Description of Artificial Sequence: Synthetic oligonucleotide
ccagguacuugucuccguu

SEQ ID NO: 2257256 - RNA, 19 nt, Artificial Sequence
  Description of Artificial Sequence: Synthetic oligonucleotide
gccagaguguugccuccgu

SEQ ID NO: 2257257 - RNA, 19 nt, Artificial Sequence
  Description of Artificial Sequence: Synthetic oligonucleotide
cgggguuuaucuccagucu

SEQ ID NO: 2257258 - RNA, 19 nt, Artificial Sequence
  Description of Artificial Sequence: Synthetic oligonucleotide
cccuuggggcaggucugag

SEQ ID NO: 2257259 - RNA, 19 nt, Artificial Sequence
  Description of Artificial Sequence: Synthetic oligonucleotide
ccgagagccguugccggga

SEQ ID NO: 2257260 - RNA, 19 nt, Artificial Sequence
  Description of Artificial Sequence: Synthetic oligonucleotide
gucgauccugcgagugcau

SEQ ID NO: 2257261 - RNA, 19 nt, Artificial Sequence
  Description of Artificial Sequence: Synthetic oligonucleotide
ccaggugucugaagagauu

SEQ ID NO: 2257262 - RNA, 19 nt, Artificial Sequence
  Description of Artificial Sequence: Synthetic oligonucleotide
ccggaaggucaaaguggaa

SEQ ID NO: 2257263 - RNA, 19 nt, Artificial Sequence
  Description of Artificial Sequence: Synthetic oligonucleotide
cugcaggucccagguacuu

SEQ ID NO: 2257264 - RNA, 19 nt, Artificial Sequence
  Description of Artificial Sequence: Synthetic oligonucleotide
gucacgccagugcccucuu

SEQ ID NO: 2257265 - RNA, 19 nt, Artificial Sequence
  Description of Artificial Sequence: Synthetic oligonucleotide
cggcaggccugaaucugca

SEQ ID NO: 2257266 - RNA, 19 nt, Artificial Sequence
  Description of Artificial Sequence: Synthetic oligonucleotide
ccuuguagguugccaucau

SEQ ID NO: 2257267 - RNA, 19 nt, Artificial Sequence
  Description of Artificial Sequence: Synthetic oligonucleotide
cguugccgggaagcagcgc

SEQ ID NO: 2257268 - RNA, 19 nt, Artificial Sequence
  Description of Artificial Sequence: Synthetic oligonucleotide
ccaacaccaucggcccaca

SEQ ID NO: 2257269 - RNA, 19 nt, Artificial Sequence
  Description of Artificial Sequence: Synthetic oligonucleotide
cccagguacuugucuccgu

SEQ ID NO: 2257270 - RNA, 19 nt, Artificial Sequence
  Description of Artificial Sequence: Synthetic oligonucleotide
gcagcgccucaaggagaca

SEQ ID NO: 2257271 - RNA, 19 nt, Artificial Sequence
  Description of Artificial Sequence: Synthetic oligonucleotide
ccaucggcccacacuuauu

SEQ ID NO: 2257272 - RNA, 19 nt, Artificial Sequence
  Description of Artificial Sequence: Synthetic oligonucleotide
cgagagccguugccgggaa

SEQ ID NO: 2257273 - RNA, 19 nt, Artificial Sequence
  Description of Artificial Sequence: Synthetic oligonucleotide
cgucucuggagucgaucau

SEQ ID NO: 2257274 - RNA, 19 nt, Artificial Sequence
  Description of Artificial Sequence: Synthetic oligonucleotide
ccgugucgauccugcgagu

SEQ ID NO: 2257275 - RNA, 19 nt, Artificial Sequence
  Description of Artificial Sequence: Synthetic oligonucleotide
cgagguccgugucgauccu

SEQ ID NO: 2257276 - RNA, 19 nt, Artificial Sequence
  Description of Artificial Sequence: Synthetic oligonucleotide
gccccucggcaggccugaa

SEQ ID NO: 2257277 - RNA, 19 nt, Artificial Sequence
  Description of Artificial Sequence: Synthetic oligonucleotide
aagcuugccauuuaaagcc

SEQ ID NO: 2257278 - RNA, 19 nt, Artificial Sequence
  Description of Artificial Sequence: Synthetic oligonucleotide
aaagcuugccauuuaaagc

SEQ ID NO: 2257279 - RNA, 19 nt, Artificial Sequence
  Description of Artificial Sequence: Synthetic oligonucleotide
cuugauagagaaaauaucg

SEQ ID NO: 2257280 - RNA, 19 nt, Artificial Sequence
  Description of Artificial Sequence: Synthetic oligonucleotide
auaauuuagccucuguccc

SEQ ID NO: 2257281 - RNA, 19 nt, Artificial Sequence
  Description of Artificial Sequence: Synthetic oligonucleotide
uguaacuucaaccacaaaa

SEQ ID NO: 2257282 - RNA, 19 nt, Artificial Sequence
  Description of Artificial Sequence: Synthetic oligonucleotide
gauaauuuagccucugucc

SEQ ID NO: 2257283 - RNA, 19 nt, Artificial Sequence
  Description of Artificial Sequence: Synthetic oligonucleotide
gauacuauuguuaauguug

SEQ ID NO: 2257284 - RNA, 19 nt, Artificial Sequence
  Description of Artificial Sequence: Synthetic oligonucleotide
aagcuaacuuccuugauag

SEQ ID NO: 2257285 - RNA, 19 nt, Artificial Sequence
  Description of Artificial Sequence: Synthetic oligonucleotide
ucauauaaggcccagucca

SEQ ID NO: 2257286 - RNA, 19 nt, Artificial Sequence
  Description of Artificial Sequence: Synthetic oligonucleotide
aauaucgcuguccucuucg

SEQ ID NO: 2257287 - RNA, 19 nt, Artificial Sequence
  Description of Artificial Sequence: Synthetic oligonucleotide
gaaggugauauauucuugg

SEQ ID NO: 2257288 - RNA, 19 nt, Artificial Sequence
  Description of Artificial Sequence: Synthetic oligonucleotide
ucuccagcaacuuugcgcg

SEQ ID NO: 2257289 - RNA, 19 nt, Artificial Sequence
  Description of Artificial Sequence: Synthetic oligonucleotide
aauuucauccguuaagaau

SEQ ID NO: 2257290 - RNA, 19 nt, Artificial Sequence
  Description of Artificial Sequence: Synthetic oligonucleotide
aucaaguggucauauaagg

SEQ ID NO: 2257291 - RNA, 19 nt, Artificial Sequence
  Description of Artificial Sequence: Synthetic oligonucleotide
uuaguaucccuccauuccg

SEQ ID NO: 2257292 - RNA, 19 nt, Artificial Sequence
  Description of Artificial Sequence: Synthetic oligonucleotide
agcacaagggucuucuugc

SEQ ID NO: 2257293 - RNA, 19 nt, Artificial Sequence
  Description of Artificial Sequence: Synthetic oligonucleotide
ucuagagccguacugagcu

SEQ ID NO: 2257294 - RNA, 19 nt, Artificial Sequence
  Description of Artificial Sequence: Synthetic oligonucleotide
cuugggaagggauuuaugc

SEQ ID NO: 2257295 - RNA, 19 nt, Artificial Sequence
  Description of Artificial Sequence: Synthetic oligonucleotide
uugauagagaaaauaucgc

SEQ ID NO: 2257296 - RNA, 19 nt, Artificial Sequence
  Description of Artificial Sequence: Synthetic oligonucleotide
ugauagagaaaauaucgcu

SEQ ID NO: 2257297 - RNA, 19 nt, Artificial Sequence
  Description of Artificial Sequence: Synthetic oligonucleotide
acaaaauugggaguggacg

SEQ ID NO: 2257298 - RNA, 19 nt, Artificial Sequence
  Description of Artificial Sequence: Synthetic oligonucleotide
aaaggcuuugucucccucg

SEQ ID NO: 2257299 - RNA, 19 nt, Artificial Sequence
  Description of Artificial Sequence: Synthetic oligonucleotide
uuaauuucauccguuaaga

SEQ ID NO: 2257300 - RNA, 19 nt, Artificial Sequence
  Description of Artificial Sequence: Synthetic oligonucleotide
aaguggucauauaaggccc

SEQ ID NO: 2257301 - RNA, 19 nt, Artificial Sequence
  Description of Artificial Sequence: Synthetic oligonucleotide
auagagaaaauaucgcugu

SEQ ID NO: 2257302 - RNA, 19 nt, Artificial Sequence
  Description of Artificial Sequence: Synthetic oligonucleotide
gauagagaaaauaucgcug

SEQ ID NO: 2257303 - RNA, 19 nt, Artificial Sequence
  Description of Artificial Sequence: Synthetic oligonucleotide
caaagcuugccauuuaaag

SEQ ID NO: 2257304 - RNA, 19 nt, Artificial Sequence
  Description of Artificial Sequence: Synthetic oligonucleotide
uuguuaauguugaaaguga

SEQ ID NO: 2257305 - RNA, 19 nt, Artificial Sequence
  Description of Artificial Sequence: Synthetic oligonucleotide
aagaauucaacaaaggcuu

SEQ ID NO: 2257306 - RNA, 19 nt, Artificial Sequence
  Description of Artificial Sequence: Synthetic oligonucleotide
aacuucaaccacaaaauug

SEQ ID NO: 2257307 - RNA, 19 nt, Artificial Sequence
  Description of Artificial Sequence: Synthetic oligonucleotide
ucaucugcaaaguuguugu

SEQ ID NO: 2257308 - RNA, 19 nt, Artificial Sequence
  Description of Artificial Sequence: Synthetic oligonucleotide
ugcgcgauaauuuagccuc

SEQ ID NO: 2257309 - RNA, 19 nt, Artificial Sequence
  Description of Artificial Sequence: Synthetic oligonucleotide
uccuugauagagaaaauau

SEQ ID NO: 2257310 - RNA, 19 nt, Artificial Sequence
  Description of Artificial Sequence: Synthetic oligonucleotide
agcauggugaggaagacac

SEQ ID NO: 2257311 - RNA, 19 nt, Artificial Sequence
  Description of Artificial Sequence: Synthetic oligonucleotide
aaauccaucaaguggucau

SEQ ID NO: 2257312 - RNA, 19 nt, Artificial Sequence
  Description of Artificial Sequence: Synthetic oligonucleotide
uguuggagggauacuauug

SEQ ID NO: 2257313 - RNA, 19 nt, Artificial Sequence
  Description of Artificial Sequence: Synthetic oligonucleotide
guuaguaucccuccauucc

SEQ ID NO: 2257314 - RNA, 19 nt, Artificial Sequence
  Description of Artificial Sequence: Synthetic oligonucleotide
uguuaauguugaaagugac

SEQ ID NO: 2257315 - RNA, 19 nt, Artificial Sequence
  Description of Artificial Sequence: Synthetic oligonucleotide
auuccgagucaccaguggc

SEQ ID NO: 2257316 - RNA, 19 nt, Artificial Sequence
  Description of Artificial Sequence: Synthetic oligonucleotide
ucuugacaaaaccuuugag

SEQ ID NO: 2257317 - RNA, 19 nt, Artificial Sequence
  Description of Artificial Sequence: Synthetic oligonucleotide
guagcuuuuguucacuggc

SEQ ID NO: 2257318 - RNA, 19 nt, Artificial Sequence
  Description of Artificial Sequence: Synthetic oligonucleotide
aguuaguaucccuccauuc

SEQ ID NO: 2257319 - RNA, 19 nt, Artificial Sequence
  Description of Artificial Sequence: Synthetic oligonucleotide
uaauuuagccucugucccg

SEQ ID NO: 2257320 - RNA, 19 nt, Artificial Sequence
  Description of Artificial Sequence: Synthetic oligonucleotide
uguguaguuaguaucccuc

SEQ ID NO: 2257321 - RNA, 19 nt, Artificial Sequence
  Description of Artificial Sequence: Synthetic oligonucleotide
uucaaccacaaaauuggga

SEQ ID NO: 2257322 - RNA, 19 nt, Artificial Sequence
  Description of Artificial Sequence: Synthetic oligonucleotide
aaaauugggaguggacguc

SEQ ID NO: 2257323 - RNA, 19 nt, Artificial Sequence
  Description of Artificial Sequence: Synthetic oligonucleotide
agggauacuauuguuaaug

SEQ ID NO: 2257324 - RNA, 19 nt, Artificial Sequence
  Description of Artificial Sequence: Synthetic oligonucleotide
uaucccuccauuccgaguc

SEQ ID NO: 2257325 - RNA, 19 nt, Artificial Sequence
  Description of Artificial Sequence: Synthetic oligonucleotide
agggaaucuguguugagug

SEQ ID NO: 2257326 - RNA, 19 nt, Artificial Sequence
  Description of Artificial Sequence: Synthetic oligonucleotide
uauauucuugguguucuag

SEQ ID NO: 2257327 - RNA, 19 nt, Artificial Sequence
  Description of Artificial Sequence: Synthetic oligonucleotide
auuucauccguuaagaauu

SEQ ID NO: 2257328 - RNA, 19 nt, Artificial Sequence
  Description of Artificial Sequence: Synthetic oligonucleotide
cuuugcgcgauaauuuagc

SEQ ID NO: 2257329 - RNA, 19 nt, Artificial Sequence
  Description of Artificial Sequence: Synthetic oligonucleotide
caucaaguggucauauaag

SEQ ID NO: 2257330 - RNA, 19 nt, Artificial Sequence
  Description of Artificial Sequence: Synthetic oligonucleotide
uggcaguccagcacaaggg

SEQ ID NO: 2257331 - RNA, 19 nt, Artificial Sequence
  Description of Artificial Sequence: Synthetic oligonucleotide
aauucaacaaaggcuuugu

SEQ ID NO: 2257332 - RNA, 19 nt, Artificial Sequence
  Description of Artificial Sequence: Synthetic oligonucleotide
ucuuuguaacuucaaccac

SEQ ID NO: 2257333 - RNA, 19 nt, Artificial Sequence
  Description of Artificial Sequence: Synthetic oligonucleotide
aaggugauauauucuuggu

SEQ ID NO: 2257334 - RNA, 19 nt, Artificial Sequence
  Description of Artificial Sequence: Synthetic oligonucleotide
aaauaucgcuguccucuuc

SEQ ID NO: 2257335 - RNA, 19 nt, Artificial Sequence
  Description of Artificial Sequence: Synthetic oligonucleotide
aaagcauggugaggaagac

SEQ ID NO: 2257336 - RNA, 19 nt, Artificial Sequence
  Description of Artificial Sequence: Synthetic oligonucleotide
aggugauauauucuuggug

SEQ ID NO: 2257337 - RNA, 19 nt, Artificial Sequence
  Description of Artificial Sequence: Synthetic oligonucleotide
uuugcgcgauaauuuagcc

SEQ ID NO: 2257338 - RNA, 19 nt, Artificial Sequence
  Description of Artificial Sequence: Synthetic oligonucleotide
uguaguuaguaucccucca

SEQ ID NO: 2257339 - RNA, 19 nt, Artificial Sequence
  Description of Artificial Sequence: Synthetic oligonucleotide
ucaggauaauggcagucca

SEQ ID NO: 2257340 - RNA, 19 nt, Artificial Sequence
  Description of Artificial Sequence: Synthetic oligonucleotide
agugacagugaucuuuucu

SEQ ID NO: 2257341 - RNA, 19 nt, Artificial Sequence
  Description of Artificial Sequence: Synthetic oligonucleotide
aaauguuggagggauacua

SEQ ID NO: 2257342 - RNA, 19 nt, Artificial Sequence
  Description of Artificial Sequence: Synthetic oligonucleotide
gaguguguaguuaguaucc

SEQ ID NO: 2257343 - RNA, 19 nt, Artificial Sequence
  Description of Artificial Sequence: Synthetic oligonucleotide
uguucuagagccguacuga

SEQ ID NO: 2257344 - RNA, 19 nt, Artificial Sequence
  Description of Artificial Sequence: Synthetic oligonucleotide
cauccguuaagaauucaac

SEQ ID NO: 2257345 - RNA, 19 nt, Artificial Sequence
  Description of Artificial Sequence: Synthetic oligonucleotide
uucuacuggcucuugacaa

SEQ ID NO: 2257346 - RNA, 19 nt, Artificial Sequence
  Description of Artificial Sequence: Synthetic oligonucleotide
ucauccguuaagaauucaa

SEQ ID NO: 2257347 - RNA, 19 nt, Artificial Sequence
  Description of Artificial Sequence: Synthetic oligonucleotide
acuauuguuaauguugaaa

SEQ ID NO: 2257348 - RNA, 19 nt, Artificial Sequence
  Description of Artificial Sequence: Synthetic oligonucleotide
gugacagugaucuuuucuc

SEQ ID NO: 2257349 - RNA, 19 nt, Artificial Sequence
  Description of Artificial Sequence: Synthetic oligonucleotide
cuggaagcuaacuuccuug

SEQ ID NO: 2257350 - RNA, 19 nt, Artificial Sequence
  Description of Artificial Sequence: Synthetic oligonucleotide
gccauuuaaagccaagccc

SEQ ID NO: 2257351 - RNA, 19 nt, Artificial Sequence
  Description of Artificial Sequence: Synthetic oligonucleotide
aguguguaguuaguauccc

SEQ ID NO: 2257352 - RNA, 19 nt, Artificial Sequence
  Description of Artificial Sequence: Synthetic oligonucleotide
uuagccucugucccguuca

SEQ ID NO: 2257353 - RNA, 19 nt, Artificial Sequence
  Description of Artificial Sequence: Synthetic oligonucleotide
aacuuugcgcgauaauuua

SEQ ID NO: 2257354 - RNA, 19 nt, Artificial Sequence
  Description of Artificial Sequence: Synthetic oligonucleotide
aaacucauccucaggauaa

SEQ ID NO: 2257355 - RNA, 19 nt, Artificial Sequence
  Description of Artificial Sequence: Synthetic oligonucleotide
uccauuccgagucaccagu

SEQ ID NO: 2257356 - RNA, 19 nt, Artificial Sequence
  Description of Artificial Sequence: Synthetic oligonucleotide
uuccaaacucauccucagg

SEQ ID NO: 2257357 - RNA, 19 nt, Artificial Sequence
  Description of Artificial Sequence: Synthetic oligonucleotide
gucauauaaggcccagucc

SEQ ID NO: 2257358 - RNA, 19 nt, Artificial Sequence
  Description of Artificial Sequence: Synthetic oligonucleotide
cuucaaccacaaaauuggg

SEQ ID NO: 2257359 - RNA, 19 nt, Artificial Sequence
  Description of Artificial Sequence: Synthetic oligonucleotide
uagcuuuuguucacuggcc

SEQ ID NO: 2257360 - RNA, 19 nt, Artificial Sequence
  Description of Artificial Sequence: Synthetic oligonucleotide
ugcaaaguuguuguccacc

SEQ ID NO: 2257361 - RNA, 19 nt, Artificial Sequence
  Description of Artificial Sequence: Synthetic oligonucleotide
gcuaacuuccuugauagag

SEQ ID NO: 2257362 - RNA, 19 nt, Artificial Sequence
  Description of Artificial Sequence: Synthetic oligonucleotide
agggauuuaugcuucugga

SEQ ID NO: 2257363 - RNA, 19 nt, Artificial Sequence
  Description of Artificial Sequence: Synthetic oligonucleotide
ugcggagugagugacgacc

SEQ ID NO: 2257364 - RNA, 19 nt, Artificial Sequence
  Description of Artificial Sequence: Synthetic oligonucleotide
cauacuucugauggcaaag

SEQ ID NO: 2257365 - RNA, 19 nt, Artificial Sequence
  Description of Artificial Sequence: Synthetic oligonucleotide
ucccaauucccagacaucu

SEQ ID NO: 2257366 - RNA, 19 nt, Artificial Sequence
  Description of Artificial Sequence: Synthetic oligonucleotide
uccucuucguuuccaaacu

SEQ ID NO: 2257367 - RNA, 19 nt, Artificial Sequence
  Description of Artificial Sequence: Synthetic oligonucleotide
uuuguucacuggccaaagc

SEQ ID NO: 2257368 - RNA, 19 nt, Artificial Sequence
  Description of Artificial Sequence: Synthetic oligonucleotide
uggagggauacuauuguua

SEQ ID NO: 2257369 - RNA, 19 nt, Artificial Sequence
  Description of Artificial Sequence: Synthetic oligonucleotide
aauuuagccucugucccgu

SEQ ID NO: 2257370 - RNA, 19 nt, Artificial Sequence
  Description of Artificial Sequence: Synthetic oligonucleotide
gaagcuaacuuccuugaua

SEQ ID NO: 2257371 - RNA, 19 nt, Artificial Sequence
  Description of Artificial Sequence: Synthetic oligonucleotide
uggaagcuaacuuccuuga

SEQ ID NO: 2257372 - RNA, 19 nt, Artificial Sequence
  Description of Artificial Sequence: Synthetic oligonucleotide
uugaguguguaguuaguau

SEQ ID NO: 2257373 - RNA, 19 nt, Artificial Sequence
  Description of Artificial Sequence: Synthetic oligonucleotide
ucuucguuuccaaacucau

SEQ ID NO: 2257374 - RNA, 19 nt, Artificial Sequence
  Description of Artificial Sequence: Synthetic oligonucleotide
cauauaaggcccaguccag

SEQ ID NO: 2257375 - RNA, 19 nt, Artificial Sequence
  Description of Artificial Sequence: Synthetic oligonucleotide
ucuugguguucuagagccg

SEQ ID NO: 2257376 - RNA, 19 nt, Artificial Sequence
  Description of Artificial Sequence: Synthetic oligonucleotide
uguucacuggccaaagcuu

SEQ ID NO: 2257377 - RNA, 19 nt, Artificial Sequence
  Description of Artificial Sequence: Synthetic oligonucleotide
uugccauuuaaagccaagc

SEQ ID NO: 2257378 - RNA, 19 nt, Artificial Sequence
  Description of Artificial Sequence: Synthetic oligonucleotide
auacuauuguuaauguuga

SEQ ID NO: 2257379 - RNA, 19 nt, Artificial Sequence
  Description of Artificial Sequence: Synthetic oligonucleotide
gacacgugcggagugagug

SEQ ID NO: 2257380 - RNA, 19 nt, Artificial Sequence
  Description of Artificial Sequence: Synthetic oligonucleotide
ugggaagggauuuaugcuu

SEQ ID NO: 2257381 - RNA, 19 nt, Artificial Sequence
  Description of Artificial Sequence: Synthetic oligonucleotide
ucgguccucaaggaaaucc

SEQ ID NO: 2257382 - RNA, 19 nt, Artificial Sequence
  Description of Artificial Sequence: Synthetic oligonucleotide
guguaguuaguaucccucc

SEQ ID NO: 2257383 - RNA, 19 nt, Artificial Sequence
  Description of Artificial Sequence: Synthetic oligonucleotide
ucuugggaagggauuuaug

SEQ ID NO: 2257384 - RNA, 19 nt, Artificial Sequence
  Description of Artificial Sequence: Synthetic oligonucleotide
caacaaaggcuuugucucc

SEQ ID NO: 2257385 - RNA, 19 nt, Artificial Sequence
  Description of Artificial Sequence: Synthetic oligonucleotide
aaaauaucgcuguccucuu

SEQ ID NO: 2257386 - RNA, 19 nt, Artificial Sequence
  Description of Artificial Sequence: Synthetic oligonucleotide
acaagggucuucuugccau

SEQ ID NO: 2257387 - RNA, 19 nt, Artificial Sequence
  Description of Artificial Sequence: Synthetic oligonucleotide
guucuagagccguacugag

SEQ ID NO: 2257388 - RNA, 19 nt, Artificial Sequence
  Description of Artificial Sequence: Synthetic oligonucleotide
aagugacagugaucuuuuc

SEQ ID NO: 2257389 - RNA, 19 nt, Artificial Sequence
  Description of Artificial Sequence: Synthetic oligonucleotide
ugcgggagaggcgaggccg

SEQ ID NO: 2257390 - RNA, 19 nt, Artificial Sequence
  Description of Artificial Sequence: Synthetic oligonucleotide
aagcgcgggcugcagcagc

SEQ ID NO: 2257391 - RNA, 19 nt, Artificial Sequence
  Description of Artificial Sequence: Synthetic oligonucleotide
cucaggauaauggcagucc

SEQ ID NO: 2257392 - RNA, 19 nt, Artificial Sequence
  Description of Artificial Sequence: Synthetic oligonucleotide
agcuuuuguucacuggcca

SEQ ID NO: 2257393 - RNA, 19 nt, Artificial Sequence
  Description of Artificial Sequence: Synthetic oligonucleotide
cuugccauuuaaagccaag

SEQ ID NO: 2257394 - RNA, 19 nt, Artificial Sequence
  Description of Artificial Sequence: Synthetic oligonucleotide
ugauauauucuugguguuc

SEQ ID NO: 2257395 - RNA, 19 nt, Artificial Sequence
  Description of Artificial Sequence: Synthetic oligonucleotide
cacucuuuguaacuucaac

SEQ ID NO: 2257396 - RNA, 19 nt, Artificial Sequence
  Description of Artificial Sequence: Synthetic oligonucleotide
uuucauccguuaagaauuc

SEQ ID NO: 2257397 - RNA, 19 nt, Artificial Sequence
  Description of Artificial Sequence: Synthetic oligonucleotide
uuccuugauagagaaaaua

SEQ ID NO: 2257398 - RNA, 19 nt, Artificial Sequence
  Description of Artificial Sequence: Synthetic oligonucleotide
uagagaaaauaucgcuguc

SEQ ID NO: 2257399 - RNA, 19 nt, Artificial Sequence
  Description of Artificial Sequence: Synthetic oligonucleotide
accaccaccaaauguugga

SEQ ID NO: 2257400 - RNA, 19 nt, Artificial Sequence
  Description of Artificial Sequence: Synthetic oligonucleotide
cguuaagaauucaacaaag

SEQ ID NO: 2257401 - RNA, 19 nt, Artificial Sequence
  Description of Artificial Sequence: Synthetic oligonucleotide
uugcgcgauaauuuagccu

SEQ ID NO: 2257402 - RNA, 19 nt, Artificial Sequence
  Description of Artificial Sequence: Synthetic oligonucleotide
auggcaaaguagcuuuugu

SEQ ID NO: 2257403 - RNA, 19 nt, Artificial Sequence
  Description of Artificial Sequence: Synthetic oligonucleotide
uucaagaggucggaacgcc

SEQ ID NO: 2257404 - RNA, 19 nt, Artificial Sequence
  Description of Artificial Sequence: Synthetic oligonucleotide
ggucauauaaggcccaguc

SEQ ID NO: 2257405 - RNA, 19 nt, Artificial Sequence
  Description of Artificial Sequence: Synthetic oligonucleotide
uguugaguguguaguuagu

SEQ ID NO: 2257406 - RNA, 19 nt, Artificial Sequence
  Description of Artificial Sequence: Synthetic oligonucleotide
aaagugacagugaucuuuu

SEQ ID NO: 2257407 - RNA, 19 nt, Artificial Sequence
  Description of Artificial Sequence: Synthetic oligonucleotide
gaggucggaacgccgugcg

SEQ ID NO: 2257408 - RNA, 19 nt, Artificial Sequence
  Description of Artificial Sequence: Synthetic oligonucleotide
cucugucccguucacuucc

SEQ ID NO: 2257409 - RNA, 19 nt, Artificial Sequence
  Description of Artificial Sequence: Synthetic oligonucleotide
guguucuagagccguacug

SEQ ID NO: 2257410 - RNA, 19 nt, Artificial Sequence
  Description of Artificial Sequence: Synthetic oligonucleotide
uggccuggaagcuaacuuc

SEQ ID NO: 2257411 - RNA, 19 nt, Artificial Sequence
  Description of Artificial Sequence: Synthetic oligonucleotide
aauguuggagggauacuau

SEQ ID NO: 2257412 - RNA, 19 nt, Artificial Sequence
  Description of Artificial Sequence: Synthetic oligonucleotide
cauuccgagucaccagugg

SEQ ID NO: 2257413 - RNA, 19 nt, Artificial Sequence
  Description of Artificial Sequence: Synthetic oligonucleotide
ugaggaagacacgugcgga

SEQ ID NO: 2257414 - RNA, 19 nt, Artificial Sequence
  Description of Artificial Sequence: Synthetic oligonucleotide
aguaucccuccauuccgag

SEQ ID NO: 2257415 - RNA, 19 nt, Artificial Sequence
  Description of Artificial Sequence: Synthetic oligonucleotide
uaguaucccuccauuccga

SEQ ID NO: 2257416 - RNA, 19 nt, Artificial Sequence
  Description of Artificial Sequence: Synthetic oligonucleotide
caccccucgguccucaagg

SEQ ID NO: 2257417 - RNA, 19 nt, Artificial Sequence
  Description of Artificial Sequence: Synthetic oligonucleotide
ugucccguucacuuccagc

SEQ ID NO: 2257418 - RNA, 19 nt, Artificial Sequence
  Description of Artificial Sequence: Synthetic oligonucleotide
aagaggucggaacgccgug

SEQ ID NO: 2257419 - RNA, 19 nt, Artificial Sequence
  Description of Artificial Sequence: Synthetic oligonucleotide
aagggccggaggcacgguc

SEQ ID NO: 2257420 - RNA, 19 nt, Artificial Sequence
  Description of Artificial Sequence: Synthetic oligonucleotide
cugacaguucuacuggcuc

SEQ ID NO: 2257421 - RNA, 19 nt, Artificial Sequence
  Description of Artificial Sequence: Synthetic oligonucleotide
uaguuaguaucccuccauu

SEQ ID NO: 2257422 - RNA, 19 nt, Artificial Sequence
  Description of Artificial Sequence: Synthetic oligonucleotide
ucuacuggcucuugacaaa

SEQ ID NO: 2257423 - RNA, 19 nt, Artificial Sequence
  Description of Artificial Sequence: Synthetic oligonucleotide
caggauaauggcaguccag

SEQ ID NO: 2257424 - RNA, 19 nt, Artificial Sequence
  Description of Artificial Sequence: Synthetic oligonucleotide
uggacgucaguuccggcuc

SEQ ID NO: 2257425 - RNA, 19 nt, Artificial Sequence
  Description of Artificial Sequence: Synthetic oligonucleotide
gcaaaguuguuguccaccc

SEQ ID NO: 2257426 - RNA, 19 nt, Artificial Sequence
  Description of Artificial Sequence: Synthetic oligonucleotide
guucacuggccaaagcuug

SEQ ID NO: 2257427 - RNA, 19 nt, Artificial Sequence
  Description of Artificial Sequence: Synthetic oligonucleotide
cucugacaguucuacuggc

SEQ ID NO: 2257428 - RNA, 19 nt, Artificial Sequence
  Description of Artificial Sequence: Synthetic oligonucleotide
agaggucggaacgccgugc

SEQ ID NO: 2257429 - RNA, 19 nt, Artificial Sequence
  Description of Artificial Sequence: Synthetic oligonucleotide
uggcaaaguagcuuuuguu

SEQ ID NO: 2257430 - RNA, 19 nt, Artificial Sequence
  Description of Artificial Sequence: Synthetic oligonucleotide
ccuugauagagaaaauauc

SEQ ID NO: 2257431 - RNA, 19 nt, Artificial Sequence
  Description of Artificial Sequence: Synthetic oligonucleotide
uuuagccucugucccguuc

SEQ ID NO: 2257432 - RNA, 19 nt, Artificial Sequence
  Description of Artificial Sequence: Synthetic oligonucleotide
aguggacgucaguuccggc

SEQ ID NO: 2257433 - RNA, 19 nt, Artificial Sequence
  Description of Artificial Sequence: Synthetic oligonucleotide
cuucaagaggucggaacgc

SEQ ID NO: 2257434 - RNA, 19 nt, Artificial Sequence
  Description of Artificial Sequence: Synthetic oligonucleotide
guucuacuggcucuugaca

SEQ ID NO: 2257435 - RNA, 19 nt, Artificial Sequence
  Description of Artificial Sequence: Synthetic oligonucleotide
acuuugcgcgauaauuuag

SEQ ID NO: 2257436 - RNA, 19 nt, Artificial Sequence
  Description of Artificial Sequence: Synthetic oligonucleotide
accacaaaauugggagugg

SEQ ID NO: 2257437 - RNA, 19 nt, Artificial Sequence
  Description of Artificial Sequence: Synthetic oligonucleotide
gaguggacgucaguuccgg

SEQ ID NO: 2257438 - RNA, 19 nt, Artificial Sequence
  Description of Artificial Sequence: Synthetic oligonucleotide
auaaggcccaguccaggga

SEQ ID NO: 2257439 - RNA, 19 nt, Artificial Sequence
  Description of Artificial Sequence: Synthetic oligonucleotide
cuucguuuccaaacucauc

SEQ ID NO: 2257440 - RNA, 19 nt, Artificial Sequence
  Description of Artificial Sequence: Synthetic oligonucleotide
cucuucguuuccaaacuca

SEQ ID NO: 2257441 - RNA, 19 nt, Artificial Sequence
  Description of Artificial Sequence: Synthetic oligonucleotide
cagcacaagggucuucuug

SEQ ID NO: 2257442 - RNA, 19 nt, Artificial Sequence
  Description of Artificial Sequence: Synthetic oligonucleotide
uuugucucccucggugugc

SEQ ID NO: 2257443 - RNA, 19 nt, Artificial Sequence
  Description of Artificial Sequence: Synthetic oligonucleotide
ucgaggaaggugauauauu

SEQ ID NO: 2257444 - RNA, 19 nt, Artificial Sequence
  Description of Artificial Sequence: Synthetic oligonucleotide
ggagggauacuauuguuaa

SEQ ID NO: 2257445 - RNA, 19 nt, Artificial Sequence
  Description of Artificial Sequence: Synthetic oligonucleotide
agggucuucuugccaucac

SEQ ID NO: 2257446 - RNA, 19 nt, Artificial Sequence
  Description of Artificial Sequence: Synthetic oligonucleotide
gaagggauuuaugcuucug

SEQ ID NO: 2257447 - RNA, 19 nt, Artificial Sequence
  Description of Artificial Sequence: Synthetic oligonucleotide
ggaaucuguguugagugug

SEQ ID NO: 2257448 - RNA, 19 nt, Artificial Sequence
  Description of Artificial Sequence: Synthetic oligonucleotide
ggugugcagagcuccacag

SEQ ID NO: 2257449 - RNA, 19 nt, Artificial Sequence
  Description of Artificial Sequence: Synthetic oligonucleotide
uacuauuguuaauguugaa

SEQ ID NO: 2257450 - RNA, 19 nt, Artificial Sequence
  Description of Artificial Sequence: Synthetic oligonucleotide
cuuugucucccucggugug

SEQ ID NO: 2257451 - RNA, 19 nt, Artificial Sequence
  Description of Artificial Sequence: Synthetic oligonucleotide
cagucucugacaguucuac

SEQ ID NO: 2257452 - RNA, 19 nt, Artificial Sequence
  Description of Artificial Sequence: Synthetic oligonucleotide
guggcagcggcgcccaggg

SEQ ID NO: 2257453 - RNA, 19 nt, Artificial Sequence
  Description of Artificial Sequence: Synthetic oligonucleotide
ugggaguggacgucaguuc

SEQ ID NO: 2257454 - RNA, 19 nt, Artificial Sequence
  Description of Artificial Sequence: Synthetic oligonucleotide
uuuaugcuucuggauuuuc

SEQ ID NO: 2257455 - RNA, 19 nt, Artificial Sequence
  Description of Artificial Sequence: Synthetic oligonucleotide
uuccagcucccaauuccca

SEQ ID NO: 2257456 - RNA, 19 nt, Artificial Sequence
  Description of Artificial Sequence: Synthetic oligonucleotide
cuccauuccgagucaccag

SEQ ID NO: 2257457 - RNA, 19 nt, Artificial Sequence
  Description of Artificial Sequence: Synthetic oligonucleotide
agucucugacaguucuacu

SEQ ID NO: 2257458 - RNA, 19 nt, Artificial Sequence
  Description of Artificial Sequence: Synthetic oligonucleotide
uccgagucaccaguggccu

SEQ ID NO: 2257459 - RNA, 19 nt, Artificial Sequence
  Description of Artificial Sequence: Synthetic oligonucleotide
ccaaauguuggagggauac

SEQ ID NO: 2257460 - RNA, 19 nt, Artificial Sequence
  Description of Artificial Sequence: Synthetic oligonucleotide
gaggcacggucgaagcgcg

SEQ ID NO: 2257461 - RNA, 19 nt, Artificial Sequence
  Description of Artificial Sequence: Synthetic oligonucleotide
gucccguucacuuccagcu

SEQ ID NO: 2257462 - RNA, 19 nt, Artificial Sequence
  Description of Artificial Sequence: Synthetic oligonucleotide
ugguguucuagagccguac

SEQ ID NO: 2257463 - RNA, 19 nt, Artificial Sequence
  Description of Artificial Sequence: Synthetic oligonucleotide
caaacucauccucaggaua

SEQ ID NO: 2257464 - RNA, 19 nt, Artificial Sequence
  Description of Artificial Sequence: Synthetic oligonucleotide
auaucgcuguccucuucgu

SEQ ID NO: 2257465 - RNA, 19 nt, Artificial Sequence
  Description of Artificial Sequence: Synthetic oligonucleotide
ggaaggugauauauucuug

SEQ ID NO: 2257466 - RNA, 19 nt, Artificial Sequence
  Description of Artificial Sequence: Synthetic oligonucleotide
gugugcagagcuccacagc

SEQ ID NO: 2257467 - RNA, 19 nt, Artificial Sequence
  Description of Artificial Sequence: Synthetic oligonucleotide
cagucuucuggucuuggga

SEQ ID NO: 2257468 - RNA, 19 nt, Artificial Sequence
  Description of Artificial Sequence: Synthetic oligonucleotide
ggauuuaugcuucuggauu

SEQ ID NO: 2257469 - RNA, 19 nt, Artificial Sequence
  Description of Artificial Sequence: Synthetic oligonucleotide
uucauccguuaagaauuca

SEQ ID NO: 2257470 - RNA, 19 nt, Artificial Sequence
  Description of Artificial Sequence: Synthetic oligonucleotide
ucgcuguccucuucguuuc

SEQ ID NO: 2257471 - RNA, 19 nt, Artificial Sequence
  Description of Artificial Sequence: Synthetic oligonucleotide
ccaucaaguggucauauaa

SEQ ID NO: 2257472 - RNA, 19 nt, Artificial Sequence
  Description of Artificial Sequence: Synthetic oligonucleotide
ggaagacacgugcggagug

SEQ ID NO: 2257473 - RNA, 19 nt, Artificial Sequence
  Description of Artificial Sequence: Synthetic oligonucleotide
aaucuguguugagugugua

SEQ ID NO: 2257474 - RNA, 19 nt, Artificial Sequence
  Description of Artificial Sequence: Synthetic oligonucleotide
guugaguguguaguuagua

SEQ ID NO: 2257475 - RNA, 19 nt, Artificial Sequence
  Description of Artificial Sequence: Synthetic oligonucleotide
cgauaauuuagccucuguc

SEQ ID NO: 2257476 - RNA, 19 nt, Artificial Sequence
  Description of Artificial Sequence: Synthetic oligonucleotide
aggaagacacgugcggagu

SEQ ID NO: 2257477 - RNA, 19 nt, Artificial Sequence
  Description of Artificial Sequence: Synthetic oligonucleotide
gaagacacgugcggaguga

SEQ ID NO: 2257478 - RNA, 19 nt, Artificial Sequence
  Description of Artificial Sequence: Synthetic oligonucleotide
ggauaauggcaguccagca

SEQ ID NO: 2257479 - RNA, 19 nt, Artificial Sequence
  Description of Artificial Sequence: Synthetic oligonucleotide
aacgccgugcggagccggc

SEQ ID NO: 2257480 - RNA, 19 nt, Artificial Sequence
  Description of Artificial Sequence: Synthetic oligonucleotide
uccaucaaguggucauaua

SEQ ID NO: 2257481 - RNA, 19 nt, Artificial Sequence
  Description of Artificial Sequence: Synthetic oligonucleotide
gucggaacgccgugcggag

SEQ ID NO: 2257482 - RNA, 19 nt, Artificial Sequence
  Description of Artificial Sequence: Synthetic oligonucleotide
acacgugcggagugaguga

SEQ ID NO: 2257483 - RNA, 19 nt, Artificial Sequence
  Description of Artificial Sequence: Synthetic oligonucleotide
ggaggcacggucgaagcgc

SEQ ID NO: 2257484 - RNA, 19 nt, Artificial Sequence
  Description of Artificial Sequence: Synthetic oligonucleotide
caucugcaaaguuguuguc

SEQ ID NO: 2257485 - RNA, 19 nt, Artificial Sequence
  Description of Artificial Sequence: Synthetic oligonucleotide
uaucgcuguccucuucguu

SEQ ID NO: 2257486 - RNA, 19 nt, Artificial Sequence
  Description of Artificial Sequence: Synthetic oligonucleotide
guaguuaguaucccuccau

SEQ ID NO: 2257487 - RNA, 19 nt, Artificial Sequence
  Description of Artificial Sequence: Synthetic oligonucleotide
aguggucauauaaggccca

SEQ ID NO: 2257488 - RNA, 19 nt, Artificial Sequence
  Description of Artificial Sequence: Synthetic oligonucleotide
cucccaauucccagacauc

SEQ ID NO: 2257489 - RNA, 19 nt, Artificial Sequence
  Description of Artificial Sequence: Synthetic oligonucleotide
aacucauccucaggauaau

SEQ ID NO: 2257490 - RNA, 19 nt, Artificial Sequence
  Description of Artificial Sequence: Synthetic oligonucleotide
cagccgcaggagcagggcg

SEQ ID NO: 2257491 - RNA, 19 nt, Artificial Sequence
  Description of Artificial Sequence: Synthetic oligonucleotide
cagcgcagcagagaaagca

SEQ ID NO: 2257492 - RNA, 19 nt, Artificial Sequence
  Description of Artificial Sequence: Synthetic oligonucleotide
aggucggaacgccgugcgg

SEQ ID NO: 2257493 - RNA, 19 nt, Artificial Sequence
  Description of Artificial Sequence: Synthetic oligonucleotide
uccagcaacuuugcgcgau

SEQ ID NO: 2257494 - RNA, 19 nt, Artificial Sequence
  Description of Artificial Sequence: Synthetic oligonucleotide
uugucucccucggugugca

SEQ ID NO: 2257495 - RNA, 19 nt, Artificial Sequence
  Description of Artificial Sequence: Synthetic oligonucleotide
cguacugagcuccaccagc

SEQ ID NO: 2257496 - RNA, 19 nt, Artificial Sequence
  Description of Artificial Sequence: Synthetic oligonucleotide
caacuuugcgcgauaauuu

SEQ ID NO: 2257497 - RNA, 19 nt, Artificial Sequence
  Description of Artificial Sequence: Synthetic oligonucleotide
cacgcagcgcagcagagaa

SEQ ID NO: 2257498 - RNA, 19 nt, Artificial Sequence
  Description of Artificial Sequence: Synthetic oligonucleotide
ucccguucacuuccagcuc

SEQ ID NO: 2257499 - RNA, 19 nt, Artificial Sequence
  Description of Artificial Sequence: Synthetic oligonucleotide
aucuugggaagggauuuau

SEQ ID NO: 2257500 - RNA, 19 nt, Artificial Sequence
  Description of Artificial Sequence: Synthetic oligonucleotide
guggacgucaguuccggcu

SEQ ID NO: 2257501 - RNA, 19 nt, Artificial Sequence
  Description of Artificial Sequence: Synthetic oligonucleotide
agggccggaggcacggucg

SEQ ID NO: 2257502 - RNA, 19 nt, Artificial Sequence
  Description of Artificial Sequence: Synthetic oligonucleotide
uggucauauaaggcccagu

SEQ ID NO: 2257503 - RNA, 19 nt, Artificial Sequence
  Description of Artificial Sequence: Synthetic oligonucleotide
uugguguucuagagccgua

SEQ ID NO: 2257504 - RNA, 19 nt, Artificial Sequence
  Description of Artificial Sequence: Synthetic oligonucleotide
caagggucuucuugccauc

SEQ ID NO: 2257505 - RNA, 19 nt, Artificial Sequence
  Description of Artificial Sequence: Synthetic oligonucleotide
guggucauauaaggcccag

SEQ ID NO: 2257506 - RNA, 19 nt, Artificial Sequence
  Description of Artificial Sequence: Synthetic oligonucleotide
cacgugcggagugagugac

SEQ ID NO: 2257507 - RNA, 19 nt, Artificial Sequence
  Description of Artificial Sequence: Synthetic oligonucleotide
ggaguggacgucaguuccg

SEQ ID NO: 2257508 - RNA, 19 nt, Artificial Sequence
  Description of Artificial Sequence: Synthetic oligonucleotide
uggccaaagcuugccauuu

SEQ ID NO: 2257509 - RNA, 19 nt, Artificial Sequence
  Description of Artificial Sequence: Synthetic oligonucleotide
acggucgaagcgcgggcug

SEQ ID NO: 2257510 - RNA, 19 nt, Artificial Sequence
  Description of Artificial Sequence: Synthetic oligonucleotide
cacaagggucuucuugcca

SEQ ID NO: 2257511 - RNA, 19 nt, Artificial Sequence
  Description of Artificial Sequence: Synthetic oligonucleotide
gggauacuauuguuaaugu

SEQ ID NO: 2257512 - RNA, 19 nt, Artificial Sequence
  Description of Artificial Sequence: Synthetic oligonucleotide
cuagagccguacugagcuc

SEQ ID NO: 2257513 - RNA, 19 nt, Artificial Sequence
  Description of Artificial Sequence: Synthetic oligonucleotide
gaacgccgugcggagccgg

SEQ ID NO: 2257514 - RNA, 19 nt, Artificial Sequence
  Description of Artificial Sequence: Synthetic oligonucleotide
agaauucaacaaaggcuuu

SEQ ID NO: 2257515 - RNA, 19 nt, Artificial Sequence
  Description of Artificial Sequence: Synthetic oligonucleotide
agcgcagcagagaaagcau

SEQ ID NO: 2257516 - RNA, 19 nt, Artificial Sequence
  Description of Artificial Sequence: Synthetic oligonucleotide
cacgcugagcagcccgaag

SEQ ID NO: 2257517 - RNA, 19 nt, Artificial Sequence
  Description of Artificial Sequence: Synthetic oligonucleotide
ggcacggucgaagcgcggg

SEQ ID NO: 2257518 - RNA, 19 nt, Artificial Sequence
  Description of Artificial Sequence: Synthetic oligonucleotide
aggcccaguccagggaauc

SEQ ID NO: 2257519 - RNA, 19 nt, Artificial Sequence
  Description of Artificial Sequence: Synthetic oligonucleotide
ccguuaagaauucaacaaa

SEQ ID NO: 2257520 - RNA, 19 nt, Artificial Sequence
  Description of Artificial Sequence: Synthetic oligonucleotide
cuucagucuucuggucuug

SEQ ID NO: 2257521 - RNA, 19 nt, Artificial Sequence
  Description of Artificial Sequence: Synthetic oligonucleotide
gcacaagggucuucuugcc

SEQ ID NO: 2257522 - RNA, 19 nt, Artificial Sequence
  Description of Artificial Sequence: Synthetic oligonucleotide
gaagcgcgggcugcagcag

SEQ ID NO: 2257523 - RNA, 19 nt, Artificial Sequence
  Description of Artificial Sequence: Synthetic oligonucleotide
gccguacugagcuccacca

SEQ ID NO: 2257524 - RNA, 19 nt, Artificial Sequence
  Description of Artificial Sequence: Synthetic oligonucleotide
caagaggucggaacgccgu

SEQ ID NO: 2257525 - RNA, 19 nt, Artificial Sequence
  Description of Artificial Sequence: Synthetic oligonucleotide
cagggcgcggggcacgcag

SEQ ID NO: 2257526 - RNA, 19 nt, Artificial Sequence
  Description of Artificial Sequence: Synthetic oligonucleotide
cagcccgaagggccggagg

SEQ ID NO: 2257527 - RNA, 19 nt, Artificial Sequence
  Description of Artificial Sequence: Synthetic oligonucleotide
aucccuccauuccgaguca

SEQ ID NO: 2257528 - RNA, 19 nt, Artificial Sequence
  Description of Artificial Sequence: Synthetic oligonucleotide
accccucgguccucaagga

SEQ ID NO: 2257529 - RNA, 19 nt, Artificial Sequence
  Description of Artificial Sequence: Synthetic oligonucleotide
cuacuggcucuugacaaaa

SEQ ID NO: 2257530 - RNA, 19 nt, Artificial Sequence
  Description of Artificial Sequence: Synthetic oligonucleotide
ucggugugcagagcuccac

SEQ ID NO: 2257531 - RNA, 19 nt, Artificial Sequence
  Description of Artificial Sequence: Synthetic oligonucleotide
cuucuggucuugggagggc

SEQ ID NO: 2257532 - RNA, 19 nt, Artificial Sequence
  Description of Artificial Sequence: Synthetic oligonucleotide
ggggcagcggcgcggaagc

SEQ ID NO: 2257533 - RNA, 19 nt, Artificial Sequence
  Description of Artificial Sequence: Synthetic oligonucleotide
aguuccggcuccuguucuu

SEQ ID NO: 2257534 - RNA, 19 nt, Artificial Sequence
  Description of Artificial Sequence: Synthetic oligonucleotide
cgcagcgcagcagagaaag

SEQ ID NO: 2257535 - RNA, 19 nt, Artificial Sequence
  Description of Artificial Sequence: Synthetic oligonucleotide
agcucccaauucccagaca

SEQ ID NO: 2257536 - RNA, 19 nt, Artificial Sequence
  Description of Artificial Sequence: Synthetic oligonucleotide
gcucccaauucccagacau

SEQ ID NO: 2257537 - RNA, 19 nt, Artificial Sequence
  Description of Artificial Sequence: Synthetic oligonucleotide
ccuuaauuucauccguuaa

SEQ ID NO: 2257538 - RNA, 19 nt, Artificial Sequence
  Description of Artificial Sequence: Synthetic oligonucleotide
gagggauacuauuguuaau

SEQ ID NO: 2257539 - RNA, 19 nt, Artificial Sequence
  Description of Artificial Sequence: Synthetic oligonucleotide
gacaucuugggaagggauu

SEQ ID NO: 2257540 - RNA, 19 nt, Artificial Sequence
  Description of Artificial Sequence: Synthetic oligonucleotide
guacugagcuccaccagcu

SEQ ID NO: 2257541 - RNA, 19 nt, Artificial Sequence
  Description of Artificial Sequence: Synthetic oligonucleotide
gcaacuuugcgcgauaauu

SEQ ID NO: 2257542 - RNA, 19 nt, Artificial Sequence
  Description of Artificial Sequence: Synthetic oligonucleotide
ggucggaacgccgugcgga

SEQ ID NO: 2257543 - RNA, 19 nt, Artificial Sequence
  Description of Artificial Sequence: Synthetic oligonucleotide
ggauacuauuguuaauguu

SEQ ID NO: 2257544 - RNA, 19 nt, Artificial Sequence
  Description of Artificial Sequence: Synthetic oligonucleotide
cugcgggagaggcgaggcc

SEQ ID NO: 2257545 - RNA, 19 nt, Artificial Sequence
  Description of Artificial Sequence: Synthetic oligonucleotide
ucggaacgccgugcggagc

SEQ ID NO: 2257546 - RNA, 19 nt, Artificial Sequence
  Description of Artificial Sequence: Synthetic oligonucleotide
guggccuggaagcuaacuu

SEQ ID NO: 2257547 - RNA, 19 nt, Artificial Sequence
  Description of Artificial Sequence: Synthetic oligonucleotide
ugucucccucggugugcag

SEQ ID NO: 2257548 - RNA, 19 nt, Artificial Sequence
  Description of Artificial Sequence: Synthetic oligonucleotide
gagaggcgaggccggggca

SEQ ID NO: 2257549 - RNA, 19 nt, Artificial Sequence
  Description of Artificial Sequence: Synthetic oligonucleotide
ccucggugugcagagcucc

SEQ ID NO: 2257550 - RNA, 19 nt, Artificial Sequence
  Description of Artificial Sequence: Synthetic oligonucleotide
ggacgucaguuccggcucc

SEQ ID NO: 2257551 - RNA, 19 nt, Artificial Sequence
  Description of Artificial Sequence: Synthetic oligonucleotide
ggagccggcccgcacgcug

SEQ ID NO: 2257552 - RNA, 19 nt, Artificial Sequence
  Description of Artificial Sequence: Synthetic oligonucleotide
uggucuugggagggcuccu

SEQ ID NO: 2257553 - RNA, 19 nt, Artificial Sequence
  Description of Artificial Sequence: Synthetic oligonucleotide
acgugcggagugagugacg

SEQ ID NO: 2257554 - RNA, 19 nt, Artificial Sequence
  Description of Artificial Sequence: Synthetic oligonucleotide
gccaucacucuuuguaacu

SEQ ID NO: 2257555 - RNA, 19 nt, Artificial Sequence
  Description of Artificial Sequence: Synthetic oligonucleotide
caccaaauguuggagggau

SEQ ID NO: 2257556 - RNA, 19 nt, Artificial Sequence
  Description of Artificial Sequence: Synthetic oligonucleotide
ccaguccagggaaucugug

SEQ ID NO: 2257557 - RNA, 19 nt, Artificial Sequence
  Description of Artificial Sequence: Synthetic oligonucleotide
auuuagccucugucccguu

SEQ ID NO: 2257558 - RNA, 19 nt, Artificial Sequence
  Description of Artificial Sequence: Synthetic oligonucleotide
gcggaagcccguggcagcg

SEQ ID NO: 2257559 - RNA, 19 nt, Artificial Sequence
  Description of Artificial Sequence: Synthetic oligonucleotide
gcgcagcagagaaagcaug

SEQ ID NO: 2257560 - RNA, 19 nt, Artificial Sequence
  Description of Artificial Sequence: Synthetic oligonucleotide
gguguucuagagccguacu

SEQ ID NO: 2257561 - RNA, 19 nt, Artificial Sequence
  Description of Artificial Sequence: Synthetic oligonucleotide
gucgaagcgcgggcugcag

SEQ ID NO: 2257562 - RNA, 19 nt, Artificial Sequence
  Description of Artificial Sequence: Synthetic oligonucleotide
gggcacgcagcgcagcaga

SEQ ID NO: 2257563 - RNA, 19 nt, Artificial Sequence
  Description of Artificial Sequence: Synthetic oligonucleotide
cggaacgccgugcggagcc

SEQ ID NO: 2257564 - RNA, 19 nt, Artificial Sequence
  Description of Artificial Sequence: Synthetic oligonucleotide
ccuccauuccgagucacca

SEQ ID NO: 2257565 - RNA, 19 nt, Artificial Sequence
  Description of Artificial Sequence: Synthetic oligonucleotide
ccgcacgcugagcagcccg

SEQ ID NO: 2257566 - RNA, 19 nt, Artificial Sequence
  Description of Artificial Sequence: Synthetic oligonucleotide
ccucaggauaauggcaguc

SEQ ID NO: 2257567 - RNA, 19 nt, Artificial Sequence
  Description of Artificial Sequence: Synthetic oligonucleotide
gggaaucuguguugagugu

SEQ ID NO: 2257568 - RNA, 19 nt, Artificial Sequence
  Description of Artificial Sequence: Synthetic oligonucleotide
accaaauguuggagggaua

SEQ ID NO: 2257569 - RNA, 19 nt, Artificial Sequence
  Description of Artificial Sequence: Synthetic oligonucleotide
ccguacugagcuccaccag

SEQ ID NO: 2257570 - RNA, 19 nt, Artificial Sequence
  Description of Artificial Sequence: Synthetic oligonucleotide
gcacggucgaagcgcgggc

SEQ ID NO: 2257571 - RNA, 19 nt, Artificial Sequence
  Description of Artificial Sequence: Synthetic oligonucleotide
gugcggagugagugacgac

SEQ ID NO: 2257572 - RNA, 19 nt, Artificial Sequence
  Description of Artificial Sequence: Synthetic oligonucleotide
cccuccauuccgagucacc

SEQ ID NO: 2257573 - RNA, 19 nt, Artificial Sequence
  Description of Artificial Sequence: Synthetic oligonucleotide
gagccguacugagcuccac

SEQ ID NO: 2257574 - RNA, 19 nt, Artificial Sequence
  Description of Artificial Sequence: Synthetic oligonucleotide
ggaagggauuuaugcuucu

SEQ ID NO: 2257575 - RNA, 19 nt, Artificial Sequence
  Description of Artificial Sequence: Synthetic oligonucleotide
gcgcggaagcccguggcag

SEQ ID NO: 2257576 - RNA, 19 nt, Artificial Sequence
  Description of Artificial Sequence: Synthetic oligonucleotide
cucgguccucaaggaaauc

SEQ ID NO: 2257577 - RNA, 19 nt, Artificial Sequence
  Description of Artificial Sequence: Synthetic oligonucleotide
gcgauaauuuagccucugu

SEQ ID NO: 2257578 - RNA, 19 nt, Artificial Sequence
  Description of Artificial Sequence: Synthetic oligonucleotide
agccggcccgcacgcugag

SEQ ID NO: 2257579 - RNA, 19 nt, Artificial Sequence
  Description of Artificial Sequence: Synthetic oligonucleotide
ggaagcuaacuuccuugau

SEQ ID NO: 2257580 - RNA, 19 nt, Artificial Sequence
  Description of Artificial Sequence: Synthetic oligonucleotide
ggcccgcacgcugagcagc

SEQ ID NO: 2257581 - RNA, 19 nt, Artificial Sequence
  Description of Artificial Sequence: Synthetic oligonucleotide
ggggcuucaagaggucgga

SEQ ID NO: 2257582 - RNA, 19 nt, Artificial Sequence
  Description of Artificial Sequence: Synthetic oligonucleotide
cagcugcgggagaggcgag

SEQ ID NO: 2257583 - RNA, 19 nt, Artificial Sequence
  Description of Artificial Sequence: Synthetic oligonucleotide
ggaacgccgugcggagccg

SEQ ID NO: 2257584 - RNA, 19 nt, Artificial Sequence
  Description of Artificial Sequence: Synthetic oligonucleotide
gagccggcccgcacgcuga

SEQ ID NO: 2257585 - RNA, 19 nt, Artificial Sequence
  Description of Artificial Sequence: Synthetic oligonucleotide
agcggcgcggaagcccgug

SEQ ID NO: 2257586 - RNA, 19 nt, Artificial Sequence
  Description of Artificial Sequence: Synthetic oligonucleotide
gccgugcggagccggcccg

SEQ ID NO: 2257587 - RNA, 19 nt, Artificial Sequence
  Description of Artificial Sequence: Synthetic oligonucleotide
cuccagcaacuuugcgcga

SEQ ID NO: 2257588 - RNA, 19 nt, Artificial Sequence
  Description of Artificial Sequence: Synthetic oligonucleotide
cgguccucaaggaaaucca

SEQ ID NO: 2257589 - RNA, 19 nt, Artificial Sequence
  Description of Artificial Sequence: Synthetic oligonucleotide
ccgaagggccggaggcacg

SEQ ID NO: 2257590 - RNA, 19 nt, Artificial Sequence
  Description of Artificial Sequence: Synthetic oligonucleotide
ggcgcggaagcccguggca

SEQ ID NO: 2257591 - RNA, 19 nt, Artificial Sequence
  Description of Artificial Sequence: Synthetic oligonucleotide
gagucaccaguggccugga

SEQ ID NO: 2257592 - RNA, 19 nt, Artificial Sequence
  Description of Artificial Sequence: Synthetic oligonucleotide
gcgggagaggcgaggccgg

SEQ ID NO: 2257593 - RNA, 19 nt, Artificial Sequence
  Description of Artificial Sequence: Synthetic oligonucleotide
uccaccccucgguccucaa

SEQ ID NO: 2257594 - RNA, 19 nt, Artificial Sequence
  Description of Artificial Sequence: Synthetic oligonucleotide
cggaggcacggucgaagcg

SEQ ID NO: 2257595 - RNA, 19 nt, Artificial Sequence
  Description of Artificial Sequence: Synthetic oligonucleotide
aggcacggucgaagcgcgg

SEQ ID NO: 2257596 - RNA, 19 nt, Artificial Sequence
  Description of Artificial Sequence: Synthetic oligonucleotide
gcggcgcggaagcccgugg

SEQ ID NO: 2257597 - RNA, 19 nt, Artificial Sequence
  Description of Artificial Sequence: Synthetic oligonucleotide
cgaagcgcgggcugcagca

SEQ ID NO: 2257598 - RNA, 19 nt, Artificial Sequence
  Description of Artificial Sequence: Synthetic oligonucleotide
gcgcggggcacgcagcgca

SEQ ID NO: 2257599 - RNA, 19 nt, Artificial Sequence
  Description of Artificial Sequence: Synthetic oligonucleotide
uguccaccccucgguccuc

SEQ ID NO: 2257600 - RNA, 19 nt, Artificial Sequence
  Description of Artificial Sequence: Synthetic oligonucleotide
ggggcacgcagcgcagcag

SEQ ID NO: 2257601 - RNA, 19 nt, Artificial Sequence
  Description of Artificial Sequence: Synthetic oligonucleotide
ccggcccgcacgcugagca

SEQ ID NO: 2257602 - RNA, 19 nt, Artificial Sequence
  Description of Artificial Sequence: Synthetic oligonucleotide
agcagcccgaagggccgga

SEQ ID NO: 2257603 - RNA, 19 nt, Artificial Sequence
  Description of Artificial Sequence: Synthetic oligonucleotide
ggucuugggagggcuccuc

SEQ ID NO: 2257604 - RNA, 19 nt, Artificial Sequence
  Description of Artificial Sequence: Synthetic oligonucleotide
gccgcaggagcagggcgcc

SEQ ID NO: 2257605 - RNA, 19 nt, Artificial Sequence
  Description of Artificial Sequence: Synthetic oligonucleotide
gacgucaguuccggcuccu

SEQ ID NO: 2257606 - RNA, 19 nt, Artificial Sequence
  Description of Artificial Sequence: Synthetic oligonucleotide
ccaccccucgguccucaag

SEQ ID NO: 2257607 - RNA, 19 nt, Artificial Sequence
  Description of Artificial Sequence: Synthetic oligonucleotide
cgugcggagugagugacga

SEQ ID NO: 2257608 - RNA, 19 nt, Artificial Sequence
  Description of Artificial Sequence: Synthetic oligonucleotide
ccaccaaauguuggaggga

SEQ ID NO: 2257609 - RNA, 19 nt, Artificial Sequence
  Description of Artificial Sequence: Synthetic oligonucleotide
gguccucaaggaaauccau

SEQ ID NO: 2257610 - RNA, 19 nt, Artificial Sequence
  Description of Artificial Sequence: Synthetic oligonucleotide
ccgagucaccaguggccug

SEQ ID NO: 2257611 - RNA, 19 nt, Artificial Sequence
  Description of Artificial Sequence: Synthetic oligonucleotide
cgcgauaauuuagccucug

SEQ ID NO: 2257612 - RNA, 19 nt, Artificial Sequence
  Description of Artificial Sequence: Synthetic oligonucleotide
ggucgaagcgcgggcugca

SEQ ID NO: 2257613 - RNA, 19 nt, Artificial Sequence
  Description of Artificial Sequence: Synthetic oligonucleotide
cgcgggcugcagcagcugc

SEQ ID NO: 2257614 - RNA, 19 nt, Artificial Sequence
  Description of Artificial Sequence: Synthetic oligonucleotide
gcccgcacgcugagcagcc

SEQ ID NO: 2257615 - RNA, 19 nt, Artificial Sequence
  Description of Artificial Sequence: Synthetic oligonucleotide
gggccggaggcacggucga

SEQ ID NO: 2257616 - RNA, 19 nt, Artificial Sequence
  Description of Artificial Sequence: Synthetic oligonucleotide
gcacgcagcgcagcagaga

SEQ ID NO: 2257617 - RNA, 19 nt, Artificial Sequence
  Description of Artificial Sequence: Synthetic oligonucleotide
ccuccucaccaccaccaaa

SEQ ID NO: 2257618 - RNA, 19 nt, Artificial Sequence
  Description of Artificial Sequence: Synthetic oligonucleotide
cacggucgaagcgcgggcu

SEQ ID NO: 2257619 - RNA, 19 nt, Artificial Sequence
  Description of Artificial Sequence: Synthetic oligonucleotide
acgcagcgcagcagagaaa

SEQ ID NO: 2257620 - RNA, 19 nt, Artificial Sequence
  Description of Artificial Sequence: Synthetic oligonucleotide
ccccagucucugacaguuc

SEQ ID NO: 2257621 - RNA, 19 nt, Artificial Sequence
  Description of Artificial Sequence: Synthetic oligonucleotide
ggcgcccagggcgcggggc

SEQ ID NO: 2257622 - RNA, 19 nt, Artificial Sequence
  Description of Artificial Sequence: Synthetic oligonucleotide
ccucgguccucaaggaaau

SEQ ID NO: 2257623 - RNA, 19 nt, Artificial Sequence
  Description of Artificial Sequence: Synthetic oligonucleotide
ccuggaagcuaacuuccuu

SEQ ID NO: 2257624 - RNA, 19 nt, Artificial Sequence
  Description of Artificial Sequence: Synthetic oligonucleotide
cagcggcgcccagggcgcg

SEQ ID NO: 2257625 - RNA, 19 nt, Artificial Sequence
  Description of Artificial Sequence: Synthetic oligonucleotide
cgaggccggggcagcggcg

SEQ ID NO: 2257626 - RNA, 19 nt, Artificial Sequence
  Description of Artificial Sequence: Synthetic oligonucleotide
gcccagggcgcggggcacg

SEQ ID NO: 2257627 - RNA, 19 nt, Artificial Sequence
  Description of Artificial Sequence: Synthetic oligonucleotide
gggcuucaagaggucggaa

SEQ ID NO: 2257628 - RNA, 19 nt, Artificial Sequence
  Description of Artificial Sequence: Synthetic oligonucleotide
cggucgaagcgcgggcugc

SEQ ID NO: 2257629 - RNA, 19 nt, Artificial Sequence
  Description of Artificial Sequence: Synthetic oligonucleotide
ccagcaacuuugcgcgaua

SEQ ID NO: 2257630 - RNA, 19 nt, Artificial Sequence
  Description of Artificial Sequence: Synthetic oligonucleotide
ccucgaggaaggugauaua

SEQ ID NO: 2257631 - RNA, 19 nt, Artificial Sequence
  Description of Artificial Sequence: Synthetic oligonucleotide
gcggggcacgcagcgcagc

SEQ ID NO: 2257632 - RNA, 19 nt, Artificial Sequence
  Description of Artificial Sequence: Synthetic oligonucleotide
gcgcgauaauuuagccucu

SEQ ID NO: 2257633 - RNA, 19 nt, Artificial Sequence
  Description of Artificial Sequence: Synthetic oligonucleotide
gggcagcggcgcggaagcc

SEQ ID NO: 2257634 - RNA, 19 nt, Artificial Sequence
  Description of Artificial Sequence: Synthetic oligonucleotide
gcacgcugagcagcccgaa

SEQ ID NO: 2257635 - RNA, 19 nt, Artificial Sequence
  Description of Artificial Sequence: Synthetic oligonucleotide
cggcccgcacgcugagcag

SEQ ID NO: 2257636 - RNA, 19 nt, Artificial Sequence
  Description of Artificial Sequence: Synthetic oligonucleotide
cccgcacgcugagcagccc

SEQ ID NO: 2257637 - RNA, 19 nt, Artificial Sequence
  Description of Artificial Sequence: Synthetic oligonucleotide
gcgcgggcugcagcagcug

SEQ ID NO: 2257638 - RNA, 19 nt, Artificial Sequence
  Description of Artificial Sequence: Synthetic oligonucleotide
ccgcaggagcagggcgccg

SEQ ID NO: 2257639 - RNA, 19 nt, Artificial Sequence
  Description of Artificial Sequence: Synthetic oligonucleotide
ccgugcggagccggcccgc

SEQ ID NO: 2257640 - RNA, 19 nt, Artificial Sequence
  Description of Artificial Sequence: Synthetic oligonucleotide
cggggcacgcagcgcagca

SEQ ID NO: 2257641 - RNA, 19 nt, Artificial Sequence
  Description of Artificial Sequence: Synthetic oligonucleotide
gccggcccgcacgcugagc

SEQ ID NO: 2257642 - RNA, 19 nt, Artificial Sequence
  Description of Artificial Sequence: Synthetic oligonucleotide
ggccggaggcacggucgaa

SEQ ID NO: 2257643 - RNA, 19 nt, Artificial Sequence
  Description of Artificial Sequence: Synthetic oligonucleotide
ccagcacaagggucuucuu

SEQ ID NO: 2257644 - RNA, 19 nt, Artificial Sequence
  Description of Artificial Sequence: Synthetic oligonucleotide
cgugcggagccggcccgca

SEQ ID NO: 2257645 - RNA, 19 nt, Artificial Sequence
  Description of Artificial Sequence: Synthetic oligonucleotide
cggcgcccagggcgcgggg

SEQ ID NO: 2257646 - RNA, 19 nt, Artificial Sequence
  Description of Artificial Sequence: Synthetic oligonucleotide
ccagggcgcggggcacgca

SEQ ID NO: 2257647 - RNA, 19 nt, Artificial Sequence
  Description of Artificial Sequence: Synthetic oligonucleotide
aauuaggucaauuaaauuc

SEQ ID NO: 2257648 - RNA, 19 nt, Artificial Sequence
  Description of Artificial Sequence: Synthetic oligonucleotide
aaaagguuagaacaauacc

SEQ ID NO: 2257649 - RNA, 19 nt, Artificial Sequence
  Description of Artificial Sequence: Synthetic oligonucleotide
aaaacuagaugcaaggugc

SEQ ID NO: 2257650 - RNA, 19 nt, Artificial Sequence
  Description of Artificial Sequence: Synthetic oligonucleotide
acaacuacgauuuauaugu

SEQ ID NO: 2257651 - RNA, 19 nt, Artificial Sequence
  Description of Artificial Sequence: Synthetic oligonucleotide
uacucuucaauauauaagg

SEQ ID NO: 2257652 - RNA, 19 nt, Artificial Sequence
  Description of Artificial Sequence: Synthetic oligonucleotide
uguauaauauacaacaggu

SEQ ID NO: 2257653 - RNA, 19 nt, Artificial Sequence
  Description of Artificial Sequence: Synthetic oligonucleotide
ugaauucaaacauauaugc

SEQ ID NO: 2257654 - RNA, 19 nt, Artificial Sequence
  Description of Artificial Sequence: Synthetic oligonucleotide
auuuacauaacuuggcgac

SEQ ID NO: 2257655 - RNA, 19 nt, Artificial Sequence
  Description of Artificial Sequence: Synthetic oligonucleotide
uucaggguaacauacauag

SEQ ID NO: 2257656 - RNA, 19 nt, Artificial Sequence
  Description of Artificial Sequence: Synthetic oligonucleotide
uuuauuagacuaauuagca

SEQ ID NO: 2257657 - RNA, 19 nt, Artificial Sequence
  Description of Artificial Sequence: Synthetic oligonucleotide
uauuagacuaauuagcagu

SEQ ID NO: 2257658 - RNA, 19 nt, Artificial Sequence
  Description of Artificial Sequence: Synthetic oligonucleotide
uugaaaacuagaugcaagg

SEQ ID NO: 2257659 - RNA, 19 nt, Artificial Sequence
  Description of Artificial Sequence: Synthetic oligonucleotide
aagauugguuaacauuugc

SEQ ID NO: 2257660 - RNA, 19 nt, Artificial Sequence
  Description of Artificial Sequence: Synthetic oligonucleotide
acuuaaacaaguuugccug

SEQ ID NO: 2257661 - RNA, 19 nt, Artificial Sequence
  Description of Artificial Sequence: Synthetic oligonucleotide
auugcaauucaccagaacu

SEQ ID NO: 2257662 - RNA, 19 nt, Artificial Sequence
  Description of Artificial Sequence: Synthetic oligonucleotide
aaagucaaccuuacaaugc

SEQ ID NO: 2257663 - RNA, 19 nt, Artificial Sequence
  Description of Artificial Sequence: Synthetic oligonucleotide
uuagcaguacucaucaugc

SEQ ID NO: 2257664 - RNA, 19 nt, Artificial Sequence
  Description of Artificial Sequence: Synthetic oligonucleotide
aaacaaguuugccugcucg

SEQ ID NO: 2257665 - RNA, 19 nt, Artificial Sequence
  Description of Artificial Sequence: Synthetic oligonucleotide
uuacucuucaauauauaag

SEQ ID NO: 2257666 - RNA, 19 nt, Artificial Sequence
  Description of Artificial Sequence: Synthetic oligonucleotide
aaugcaauaugugugggag

SEQ ID NO: 2257667 - RNA, 19 nt, Artificial Sequence
  Description of Artificial Sequence: Synthetic oligonucleotide
aacaauaccauuaguguuc

SEQ ID NO: 2257668 - RNA, 19 nt, Artificial Sequence
  Description of Artificial Sequence: Synthetic oligonucleotide
auuguuuacagagaugugg

SEQ ID NO: 2257669 - RNA, 19 nt, Artificial Sequence
  Description of Artificial Sequence: Synthetic oligonucleotide
aguacuugaauucaaacau

SEQ ID NO: 2257670 - RNA, 19 nt, Artificial Sequence
  Description of Artificial Sequence: Synthetic oligonucleotide
aaacauauaugcaaguuug

SEQ ID NO: 2257671 - RNA, 19 nt, Artificial Sequence
  Description of Artificial Sequence: Synthetic oligonucleotide
uaauuagcaguacucauca

SEQ ID NO: 2257672 - RNA, 19 nt, Artificial Sequence
  Description of Artificial Sequence: Synthetic oligonucleotide
acaaauaccuuucuagcuc

SEQ ID NO: 2257673 - RNA, 19 nt, Artificial Sequence
  Description of Artificial Sequence: Synthetic oligonucleotide
ucuucaauauauaaggcau

SEQ ID NO: 2257674 - RNA, 19 nt, Artificial Sequence
  Description of Artificial Sequence: Synthetic oligonucleotide
cauauuauugcacuuacuc

SEQ ID NO: 2257675 - RNA, 19 nt, Artificial Sequence
  Description of Artificial Sequence: Synthetic oligonucleotide
uuaaauucuauuuucuuua

SEQ ID NO: 2257676 - RNA, 19 nt, Artificial Sequence
  Description of Artificial Sequence: Synthetic oligonucleotide
uauacaacagguguggugc

SEQ ID NO: 2257677 - RNA, 19 nt, Artificial Sequence
  Description of Artificial Sequence: Synthetic oligonucleotide
uaauauacaacaggugugg

SEQ ID NO: 2257678 - RNA, 19 nt, Artificial Sequence
  Description of Artificial Sequence: Synthetic oligonucleotide
uucacugcagaaaguaugg

SEQ ID NO: 2257679 - RNA, 19 nt, Artificial Sequence
  Description of Artificial Sequence: Synthetic oligonucleotide
gaaaacuagaugcaaggug

SEQ ID NO: 2257680 - RNA, 19 nt, Artificial Sequence
  Description of Artificial Sequence: Synthetic oligonucleotide
acauacauagauccauagc

SEQ ID NO: 2257681 - RNA, 19 nt, Artificial Sequence
  Description of Artificial Sequence: Synthetic oligonucleotide
ucuauaacagccuuacgac

SEQ ID NO: 2257682 - RNA, 19 nt, Artificial Sequence
  Description of Artificial Sequence: Synthetic oligonucleotide
uaaagucaaccuuacaaug

SEQ ID NO: 2257683 - RNA, 19 nt, Artificial Sequence
  Description of Artificial Sequence: Synthetic oligonucleotide
ucauacauuacguucauua

SEQ ID NO: 2257684 - RNA, 19 nt, Artificial Sequence
  Description of Artificial Sequence: Synthetic oligonucleotide
acuacuugagcugucaugg

SEQ ID NO: 2257685 - RNA, 19 nt, Artificial Sequence
  Description of Artificial Sequence: Synthetic oligonucleotide
uacauuacguucauuaaaa

SEQ ID NO: 2257686 - RNA, 19 nt, Artificial Sequence
  Description of Artificial Sequence: Synthetic oligonucleotide
aaccuuacaaugcaauaug

SEQ ID NO: 2257687 - RNA, 19 nt, Artificial Sequence
  Description of Artificial Sequence: Synthetic oligonucleotide
uguugcauaauuccugagc

SEQ ID NO: 2257688 - RNA, 19 nt, Artificial Sequence
  Description of Artificial Sequence: Synthetic oligonucleotide
agccuuacgacuuacgcuc

SEQ ID NO: 2257689 - RNA, 19 nt, Artificial Sequence
  Description of Artificial Sequence: Synthetic oligonucleotide
aauaccauuaguguucacu

SEQ ID NO: 2257690 - RNA, 19 nt, Artificial Sequence
  Description of Artificial Sequence: Synthetic oligonucleotide
aaggcauuuuauuuuauau

SEQ ID NO: 2257691 - RNA, 19 nt, Artificial Sequence
  Description of Artificial Sequence: Synthetic oligonucleotide
gauuuauaugucaugacac

SEQ ID NO: 2257692 - RNA, 19 nt, Artificial Sequence
  Description of Artificial Sequence: Synthetic oligonucleotide
aaauucuauuuucuuuaag

SEQ ID NO: 2257693 - RNA, 19 nt, Artificial Sequence
  Description of Artificial Sequence: Synthetic oligonucleotide
uuauuagacuaauuagcag

SEQ ID NO: 2257694 - RNA, 19 nt, Artificial Sequence
  Description of Artificial Sequence: Synthetic oligonucleotide
acagccuuacgacuuacgc

SEQ ID NO: 2257695 - RNA, 19 nt, Artificial Sequence
  Description of Artificial Sequence: Synthetic oligonucleotide
auuagcaguacucaucaug

SEQ ID NO: 2257696 - RNA, 19 nt, Artificial Sequence
  Description of Artificial Sequence: Synthetic oligonucleotide
auaccuuucuagcucaggg

SEQ ID NO: 2257697 - RNA, 19 nt, Artificial Sequence
  Description of Artificial Sequence: Synthetic oligonucleotide
aauuaaauucuauuuucuu

SEQ ID NO: 2257698 - RNA, 19 nt, Artificial Sequence
  Description of Artificial Sequence: Synthetic oligonucleotide
uaguguucacugcagaaag

SEQ ID NO: 2257699 - RNA, 19 nt, Artificial Sequence
  Description of Artificial Sequence: Synthetic oligonucleotide
guuagaacaauaccauuag

SEQ ID NO: 2257700 - RNA, 19 nt, Artificial Sequence
  Description of Artificial Sequence: Synthetic oligonucleotide
gguuuauuagacuaauuag

SEQ ID NO: 2257701 - RNA, 19 nt, Artificial Sequence
  Description of Artificial Sequence: Synthetic oligonucleotide
uaacaauuaggucaauuaa

SEQ ID NO: 2257702 - RNA, 19 nt, Artificial Sequence
  Description of Artificial Sequence: Synthetic oligonucleotide
augguauuuucuuacaacu

SEQ ID NO: 2257703 - RNA, 19 nt, Artificial Sequence
  Description of Artificial Sequence: Synthetic oligonucleotide
aacuuccuaguccacauca

SEQ ID NO: 2257704 - RNA, 19 nt, Artificial Sequence
  Description of Artificial Sequence: Synthetic oligonucleotide
augcaaggugcuuucaggc

SEQ ID NO: 2257705 - RNA, 19 nt, Artificial Sequence
  Description of Artificial Sequence: Synthetic oligonucleotide
uugcaauucaccagaacug

SEQ ID NO: 2257706 - RNA, 19 nt, Artificial Sequence
  Description of Artificial Sequence: Synthetic oligonucleotide
ucuggugacuuaaacaagu

SEQ ID NO: 2257707 - RNA, 19 nt, Artificial Sequence
  Description of Artificial Sequence: Synthetic oligonucleotide
aaugccacccaacuacuug

SEQ ID NO: 2257708 - RNA, 19 nt, Artificial Sequence
  Description of Artificial Sequence: Synthetic oligonucleotide
gagauguggauuuacauaa

SEQ ID NO: 2257709 - RNA, 19 nt, Artificial Sequence
  Description of Artificial Sequence: Synthetic oligonucleotide
auauuauugcacuuacucu

SEQ ID NO: 2257710 - RNA, 19 nt, Artificial Sequence
  Description of Artificial Sequence: Synthetic oligonucleotide
uggauuuacauaacuuggc

SEQ ID NO: 2257711 - RNA, 19 nt, Artificial Sequence
  Description of Artificial Sequence: Synthetic oligonucleotide
auaccauuaguguucacug

SEQ ID NO: 2257712 - RNA, 19 nt, Artificial Sequence
  Description of Artificial Sequence: Synthetic oligonucleotide
ugaaauggaaaugccaccc

SEQ ID NO: 2257713 - RNA, 19 nt, Artificial Sequence
  Description of Artificial Sequence: Synthetic oligonucleotide
uacaacuacgauuuauaug

SEQ ID NO: 2257714 - RNA, 19 nt, Artificial Sequence
  Description of Artificial Sequence: Synthetic oligonucleotide
guuuauugcaauucaccag

SEQ ID NO: 2257715 - RNA, 19 nt, Artificial Sequence
  Description of Artificial Sequence: Synthetic oligonucleotide
uucauauuauugcacuuac

SEQ ID NO: 2257716 - RNA, 19 nt, Artificial Sequence
  Description of Artificial Sequence: Synthetic oligonucleotide
uuuacagagauguggauuu

SEQ ID NO: 2257717 - RNA, 19 nt, Artificial Sequence
  Description of Artificial Sequence: Synthetic oligonucleotide
gugcuuucaggcuagaacc

SEQ ID NO: 2257718 - RNA, 19 nt, Artificial Sequence
  Description of Artificial Sequence: Synthetic oligonucleotide
cuuacugugaaugacugac

SEQ ID NO: 2257719 - RNA, 19 nt, Artificial Sequence
  Description of Artificial Sequence: Synthetic oligonucleotide
aaugacugaccacuuaaaa

SEQ ID NO: 2257720 - RNA, 19 nt, Artificial Sequence
  Description of Artificial Sequence: Synthetic oligonucleotide
aagucaaccuuacaaugca

SEQ ID NO: 2257721 - RNA, 19 nt, Artificial Sequence
  Description of Artificial Sequence: Synthetic oligonucleotide
uacgauuuauaugucauga

SEQ ID NO: 2257722 - RNA, 19 nt, Artificial Sequence
  Description of Artificial Sequence: Synthetic oligonucleotide
cugccuaacaauuagguca

SEQ ID NO: 2257723 - RNA, 19 nt, Artificial Sequence
  Description of Artificial Sequence: Synthetic oligonucleotide
ugaaugacugaccacuuaa

SEQ ID NO: 2257724 - RNA, 19 nt, Artificial Sequence
  Description of Artificial Sequence: Synthetic oligonucleotide
aaauuuucaggguaacaua

SEQ ID NO: 2257725 - RNA, 19 nt, Artificial Sequence
  Description of Artificial Sequence: Synthetic oligonucleotide
uagacuaauuagcaguacu

SEQ ID NO: 2257726 - RNA, 19 nt, Artificial Sequence
  Description of Artificial Sequence: Synthetic oligonucleotide
auaauuccugagcucugcc

SEQ ID NO: 2257727 - RNA, 19 nt, Artificial Sequence
  Description of Artificial Sequence: Synthetic oligonucleotide
auuugcuucgucccuuuac

SEQ ID NO: 2257728 - RNA, 19 nt, Artificial Sequence
  Description of Artificial Sequence: Synthetic oligonucleotide
uacgcucucagaaacagaa

SEQ ID NO: 2257729 - RNA, 19 nt, Artificial Sequence
  Description of Artificial Sequence: Synthetic oligonucleotide
ugcaaguuugaaaacuaga

SEQ ID NO: 2257730 - RNA, 19 nt, Artificial Sequence
  Description of Artificial Sequence: Synthetic oligonucleotide
uuugcuucgucccuuuaca

SEQ ID NO: 2257731 - RNA, 19 nt, Artificial Sequence
  Description of Artificial Sequence: Synthetic oligonucleotide
accuuucuagcucaggguc

SEQ ID NO: 2257732 - RNA, 19 nt, Artificial Sequence
  Description of Artificial Sequence: Synthetic oligonucleotide
uacugugaaugacugacca

SEQ ID NO: 2257733 - RNA, 19 nt, Artificial Sequence
  Description of Artificial Sequence: Synthetic oligonucleotide
aacuacuugagcugucaug

SEQ ID NO: 2257734 - RNA, 19 nt, Artificial Sequence
  Description of Artificial Sequence: Synthetic oligonucleotide
auuuauaugucaugacaca

SEQ ID NO: 2257735 - RNA, 19 nt, Artificial Sequence
  Description of Artificial Sequence: Synthetic oligonucleotide
ucauagcuuacugugaaug

SEQ ID NO: 2257736 - RNA, 19 nt, Artificial Sequence
  Description of Artificial Sequence: Synthetic oligonucleotide
uacauagauccauagcucu

SEQ ID NO: 2257737 - RNA, 19 nt, Artificial Sequence
  Description of Artificial Sequence: Synthetic oligonucleotide
uuuuaaauguacaggccau

SEQ ID NO: 2257738 - RNA, 19 nt, Artificial Sequence
  Description of Artificial Sequence: Synthetic oligonucleotide
gauuuacauaacuuggcga

SEQ ID NO: 2257739 - RNA, 19 nt, Artificial Sequence
  Description of Artificial Sequence: Synthetic oligonucleotide
cacaucauacauuacguuc

SEQ ID NO: 2257740 - RNA, 19 nt, Artificial Sequence
  Description of Artificial Sequence: Synthetic oligonucleotide
uguacaggccauuucauau

SEQ ID NO: 2257741 - RNA, 19 nt, Artificial Sequence
  Description of Artificial Sequence: Synthetic oligonucleotide
cuaauuagcaguacucauc

SEQ ID NO: 2257742 - RNA, 19 nt, Artificial Sequence
  Description of Artificial Sequence: Synthetic oligonucleotide
caaguuugaaaacuagaug

SEQ ID NO: 2257743 - RNA, 19 nt, Artificial Sequence
  Description of Artificial Sequence: Synthetic oligonucleotide
cucuauaacagccuuacga

SEQ ID NO: 2257744 - RNA, 19 nt, Artificial Sequence
  Description of Artificial Sequence: Synthetic oligonucleotide
ggauuuacauaacuuggcg

SEQ ID NO: 2257745 - RNA, 19 nt, Artificial Sequence
  Description of Artificial Sequence: Synthetic oligonucleotide
cucagaaacagaaaauuga

SEQ ID NO: 2257746 - RNA, 19 nt, Artificial Sequence
  Description of Artificial Sequence: Synthetic oligonucleotide
acgauuuauaugucaugac

SEQ ID NO: 2257747 - RNA, 19 nt, Artificial Sequence
  Description of Artificial Sequence: Synthetic oligonucleotide
ggguaacauacauagaucc

SEQ ID NO: 2257748 - RNA, 19 nt, Artificial Sequence
  Description of Artificial Sequence: Synthetic oligonucleotide
auagcuuacugugaaugac

SEQ ID NO: 2257749 - RNA, 19 nt, Artificial Sequence
  Description of Artificial Sequence: Synthetic oligonucleotide
caugguauuuucuuacaac

SEQ ID NO: 2257750 - RNA, 19 nt, Artificial Sequence
  Description of Artificial Sequence: Synthetic oligonucleotide
ggugacuuaaacaaguuug

SEQ ID NO: 2257751 - RNA, 19 nt, Artificial Sequence
  Description of Artificial Sequence: Synthetic oligonucleotide
cauacauagauccauagcu

SEQ ID NO: 2257752 - RNA, 19 nt, Artificial Sequence
  Description of Artificial Sequence: Synthetic oligonucleotide
auauacaacagguguggug

SEQ ID NO: 2257753 - RNA, 19 nt, Artificial Sequence
  Description of Artificial Sequence: Synthetic oligonucleotide
ggaaaugccacccaacuac

SEQ ID NO: 2257754 - RNA, 19 nt, Artificial Sequence
  Description of Artificial Sequence: Synthetic oligonucleotide
gaacugucacucuauaaca

SEQ ID NO: 2257755 - RNA, 19 nt, Artificial Sequence
  Description of Artificial Sequence: Synthetic oligonucleotide
auacauuacguucauuaaa

SEQ ID NO: 2257756 - RNA, 19 nt, Artificial Sequence
  Description of Artificial Sequence: Synthetic oligonucleotide
gguauuuucuuacaacuac

SEQ ID NO: 2257757 - RNA, 19 nt, Artificial Sequence
  Description of Artificial Sequence: Synthetic oligonucleotide
ugccaauuaaagucaaccu

SEQ ID NO: 2257758 - RNA, 19 nt, Artificial Sequence
  Description of Artificial Sequence: Synthetic oligonucleotide
ugcacuuacucuucaauau

SEQ ID NO: 2257759 - RNA, 19 nt, Artificial Sequence
  Description of Artificial Sequence: Synthetic oligonucleotide
acucuucaauauauaaggc

SEQ ID NO: 2257760 - RNA, 19 nt, Artificial Sequence
  Description of Artificial Sequence: Synthetic oligonucleotide
agacuaauuagcaguacuc

SEQ ID NO: 2257761 - RNA, 19 nt, Artificial Sequence
  Description of Artificial Sequence: Synthetic oligonucleotide
acgacuuacgcucucagaa

SEQ ID NO: 2257762 - RNA, 19 nt, Artificial Sequence
  Description of Artificial Sequence: Synthetic oligonucleotide
uuuauaugucaugacacau

SEQ ID NO: 2257763 - RNA, 19 nt, Artificial Sequence
  Description of Artificial Sequence: Synthetic oligonucleotide
aacuuggcgacuaacauuu

SEQ ID NO: 2257764 - RNA, 19 nt, Artificial Sequence
  Description of Artificial Sequence: Synthetic oligonucleotide
accauuaguguucacugca

SEQ ID NO: 2257765 - RNA, 19 nt, Artificial Sequence
  Description of Artificial Sequence: Synthetic oligonucleotide
aauaccuuucuagcucagg

SEQ ID NO: 2257766 - RNA, 19 nt, Artificial Sequence
  Description of Artificial Sequence: Synthetic oligonucleotide
auaacuuggcgacuaacau

SEQ ID NO: 2257767 - RNA, 19 nt, Artificial Sequence
  Description of Artificial Sequence: Synthetic oligonucleotide
ugcaauaugugugggaggu

SEQ ID NO: 2257768 - RNA, 19 nt, Artificial Sequence
  Description of Artificial Sequence: Synthetic oligonucleotide
cuuaaacaaguuugccugc

SEQ ID NO: 2257769 - RNA, 19 nt, Artificial Sequence
  Description of Artificial Sequence: Synthetic oligonucleotide
aacaaguuugccugcucgu

SEQ ID NO: 2257770 - RNA, 19 nt, Artificial Sequence
  Description of Artificial Sequence: Synthetic oligonucleotide
uuucacuguugcauaauuc

SEQ ID NO: 2257771 - RNA, 19 nt, Artificial Sequence
  Description of Artificial Sequence: Synthetic oligonucleotide
uugagcacaacuuccuagu

SEQ ID NO: 2257772 - RNA, 19 nt, Artificial Sequence
  Description of Artificial Sequence: Synthetic oligonucleotide
acuaauuagcaguacucau

SEQ ID NO: 2257773 - RNA, 19 nt, Artificial Sequence
  Description of Artificial Sequence: Synthetic oligonucleotide
ccuacuguuagccaggaag

SEQ ID NO: 2257774 - RNA, 19 nt, Artificial Sequence
  Description of Artificial Sequence: Synthetic oligonucleotide
acccucauagcuuacugug

SEQ ID NO: 2257775 - RNA, 19 nt, Artificial Sequence
  Description of Artificial Sequence: Synthetic oligonucleotide
ugugcugaccaguacuuga

SEQ ID NO: 2257776 - RNA, 19 nt, Artificial Sequence
  Description of Artificial Sequence: Synthetic oligonucleotide
augucuggugacuuaaaca

SEQ ID NO: 2257777 - RNA, 19 nt, Artificial Sequence
  Description of Artificial Sequence: Synthetic oligonucleotide
uuauaugucaugacacauu

SEQ ID NO: 2257778 - RNA, 19 nt, Artificial Sequence
  Description of Artificial Sequence: Synthetic oligonucleotide
auggaaaugccacccaacu

SEQ ID NO: 2257779 - RNA, 19 nt, Artificial Sequence
  Description of Artificial Sequence: Synthetic oligonucleotide
aaguuugccugcucgugug

SEQ ID NO: 2257780 - RNA, 19 nt, Artificial Sequence
  Description of Artificial Sequence: Synthetic oligonucleotide
auacauagauccauagcuc

SEQ ID NO: 2257781 - RNA, 19 nt, Artificial Sequence
  Description of Artificial Sequence: Synthetic oligonucleotide
uuacccucauagcuuacug

SEQ ID NO: 2257782 - RNA, 19 nt, Artificial Sequence
  Description of Artificial Sequence: Synthetic oligonucleotide
aacugucacucuauaacag

SEQ ID NO: 2257783 - RNA, 19 nt, Artificial Sequence
  Description of Artificial Sequence: Synthetic oligonucleotide
cugaccaguacuugaauuc

SEQ ID NO: 2257784 - RNA, 19 nt, Artificial Sequence
  Description of Artificial Sequence: Synthetic oligonucleotide
ucacuguugcauaauuccu

SEQ ID NO: 2257785 - RNA, 19 nt, Artificial Sequence
  Description of Artificial Sequence: Synthetic oligonucleotide
ggccauuucauauuauugc

SEQ ID NO: 2257786 - RNA, 19 nt, Artificial Sequence
  Description of Artificial Sequence: Synthetic oligonucleotide
uuacaacuacgauuuauau

SEQ ID NO: 2257787 - RNA, 19 nt, Artificial Sequence
  Description of Artificial Sequence: Synthetic oligonucleotide
ucaugguauuuucuuacaa

SEQ ID NO: 2257788 - RNA, 19 nt, Artificial Sequence
  Description of Artificial Sequence: Synthetic oligonucleotide
gugccaauuaaagucaacc

SEQ ID NO: 2257789 - RNA, 19 nt, Artificial Sequence
  Description of Artificial Sequence: Synthetic oligonucleotide
agagauguggauuuacaua

SEQ ID NO: 2257790 - RNA, 19 nt, Artificial Sequence
  Description of Artificial Sequence: Synthetic oligonucleotide
uuuaaauuuucaggguaac

SEQ ID NO: 2257791 - RNA, 19 nt, Artificial Sequence
  Description of Artificial Sequence: Synthetic oligonucleotide
gacuuacgcucucagaaac

SEQ ID NO: 2257792 - RNA, 19 nt, Artificial Sequence
  Description of Artificial Sequence: Synthetic oligonucleotide
aagguuagaacaauaccau

SEQ ID NO: 2257793 - RNA, 19 nt, Artificial Sequence
  Description of Artificial Sequence: Synthetic oligonucleotide
agauccauagcucugccuu

SEQ ID NO: 2257794 - RNA, 19 nt, Artificial Sequence
  Description of Artificial Sequence: Synthetic oligonucleotide
uaaauucuauuuucuuuaa

SEQ ID NO: 2257795 - RNA, 19 nt, Artificial Sequence
  Description of Artificial Sequence: Synthetic oligonucleotide
acucaucaugccuuuaaca

SEQ ID NO: 2257796 - RNA, 19 nt, Artificial Sequence
  Description of Artificial Sequence: Synthetic oligonucleotide
uagcuuacugugaaugacu

SEQ ID NO: 2257797 - RNA, 19 nt, Artificial Sequence
  Description of Artificial Sequence: Synthetic oligonucleotide
agcaguacucaucaugccu

SEQ ID NO: 2257798 - RNA, 19 nt, Artificial Sequence
  Description of Artificial Sequence: Synthetic oligonucleotide
guauaauauacaacaggug

SEQ ID NO: 2257799 - RNA, 19 nt, Artificial Sequence
  Description of Artificial Sequence: Synthetic oligonucleotide
acuguugcauaauuccuga

SEQ ID NO: 2257800 - RNA, 19 nt, Artificial Sequence
  Description of Artificial Sequence: Synthetic oligonucleotide
agcucugccuaacaauuag

SEQ ID NO: 2257801 - RNA, 19 nt, Artificial Sequence
  Description of Artificial Sequence: Synthetic oligonucleotide
uuacugugaaugacugacc

SEQ ID NO: 2257802 - RNA, 19 nt, Artificial Sequence
  Description of Artificial Sequence: Synthetic oligonucleotide
ucgaagauugguuaacauu

SEQ ID NO: 2257803 - RNA, 19 nt, Artificial Sequence
  Description of Artificial Sequence: Synthetic oligonucleotide
uacaucccuacuguuagcc

SEQ ID NO: 2257804 - RNA, 19 nt, Artificial Sequence
  Description of Artificial Sequence: Synthetic oligonucleotide
caucccuacuguuagccag

SEQ ID NO: 2257805 - RNA, 19 nt, Artificial Sequence
  Description of Artificial Sequence: Synthetic oligonucleotide
cauaacuuggcgacuaaca

SEQ ID NO: 2257806 - RNA, 19 nt, Artificial Sequence
  Description of Artificial Sequence: Synthetic oligonucleotide
aggucaauuaaauucuauu

SEQ ID NO: 2257807 - RNA, 19 nt, Artificial Sequence
  Description of Artificial Sequence: Synthetic oligonucleotide
uuucauauuauugcacuua

SEQ ID NO: 2257808 - RNA, 19 nt, Artificial Sequence
  Description of Artificial Sequence: Synthetic oligonucleotide
ugacuuaaacaaguuugcc

SEQ ID NO: 2257809 - RNA, 19 nt, Artificial Sequence
  Description of Artificial Sequence: Synthetic oligonucleotide
ugggaggugaaauggaaau

SEQ ID NO: 2257810 - RNA, 19 nt, Artificial Sequence
  Description of Artificial Sequence: Synthetic oligonucleotide
uuuucacuguugcauaauu

SEQ ID NO: 2257811 - RNA, 19 nt, Artificial Sequence
  Description of Artificial Sequence: Synthetic oligonucleotide
ugaaaacuagaugcaaggu

SEQ ID NO: 2257812 - RNA, 19 nt, Artificial Sequence
  Description of Artificial Sequence: Synthetic oligonucleotide
auacaacagguguggugcc

SEQ ID NO: 2257813 - RNA, 19 nt, Artificial Sequence
  Description of Artificial Sequence: Synthetic oligonucleotide
uucaauauauaaggcauuu

SEQ ID NO: 2257814 - RNA, 19 nt, Artificial Sequence
  Description of Artificial Sequence: Synthetic oligonucleotide
agaugcaaggugcuuucag

SEQ ID NO: 2257815 - RNA, 19 nt, Artificial Sequence
  Description of Artificial Sequence: Synthetic oligonucleotide
gcuucgucccuuuacaucc

SEQ ID NO: 2257816 - RNA, 19 nt, Artificial Sequence
  Description of Artificial Sequence: Synthetic oligonucleotide
uuacgacuuacgcucucag

SEQ ID NO: 2257817 - RNA, 19 nt, Artificial Sequence
  Description of Artificial Sequence: Synthetic oligonucleotide
gugaaauggaaaugccacc

SEQ ID NO: 2257818 - RNA, 19 nt, Artificial Sequence
  Description of Artificial Sequence: Synthetic oligonucleotide
guugcauaauuccugagcu

SEQ ID NO: 2257819 - RNA, 19 nt, Artificial Sequence
  Description of Artificial Sequence: Synthetic oligonucleotide
cauagauccauagcucugc

SEQ ID NO: 2257820 - RNA, 19 nt, Artificial Sequence
  Description of Artificial Sequence: Synthetic oligonucleotide
cuuacgcucucagaaacag

SEQ ID NO: 2257821 - RNA, 19 nt, Artificial Sequence
  Description of Artificial Sequence: Synthetic oligonucleotide
ucgugugcugaccaguacu

SEQ ID NO: 2257822 - RNA, 19 nt, Artificial Sequence
  Description of Artificial Sequence: Synthetic oligonucleotide
ucaaccuuacaaugcaaua

SEQ ID NO: 2257823 - RNA, 19 nt, Artificial Sequence
  Description of Artificial Sequence: Synthetic oligonucleotide
cacuguugcauaauuccug

SEQ ID NO: 2257824 - RNA, 19 nt, Artificial Sequence
  Description of Artificial Sequence: Synthetic oligonucleotide
uuaguguucacugcagaaa

SEQ ID NO: 2257825 - RNA, 19 nt, Artificial Sequence
  Description of Artificial Sequence: Synthetic oligonucleotide
gugacuuaaacaaguuugc

SEQ ID NO: 2257826 - RNA, 19 nt, Artificial Sequence
  Description of Artificial Sequence: Synthetic oligonucleotide
ugccuaacaauuaggucaa

SEQ ID NO: 2257827 - RNA, 19 nt, Artificial Sequence
  Description of Artificial Sequence: Synthetic oligonucleotide
ucuuacaacuacgauuuau

SEQ ID NO: 2257828 - RNA, 19 nt, Artificial Sequence
  Description of Artificial Sequence: Synthetic oligonucleotide
ucaggcuagaaccucccuc

SEQ ID NO: 2257829 - RNA, 19 nt, Artificial Sequence
  Description of Artificial Sequence: Synthetic oligonucleotide
uccuaguccacaucauaca

SEQ ID NO: 2257830 - RNA, 19 nt, Artificial Sequence
  Description of Artificial Sequence: Synthetic oligonucleotide
ugucacucuauaacagccu

SEQ ID NO: 2257831 - RNA, 19 nt, Artificial Sequence
  Description of Artificial Sequence: Synthetic oligonucleotide
gacuaauuagcaguacuca

SEQ ID NO: 2257832 - RNA, 19 nt, Artificial Sequence
  Description of Artificial Sequence: Synthetic oligonucleotide
uuucaggcuagaaccuccc

SEQ ID NO: 2257833 - RNA, 19 nt, Artificial Sequence
  Description of Artificial Sequence: Synthetic oligonucleotide
cuuacaacuacgauuuaua

SEQ ID NO: 2257834 - RNA, 19 nt, Artificial Sequence
  Description of Artificial Sequence: Synthetic oligonucleotide
uacucaucaugccuuuaac

SEQ ID NO: 2257835 - RNA, 19 nt, Artificial Sequence
  Description of Artificial Sequence: Synthetic oligonucleotide
uaacauuugcuucgucccu

SEQ ID NO: 2257836 - RNA, 19 nt, Artificial Sequence
  Description of Artificial Sequence: Synthetic oligonucleotide
aauauacaacagguguggu

SEQ ID NO: 2257837 - RNA, 19 nt, Artificial Sequence
  Description of Artificial Sequence: Synthetic oligonucleotide
augcaauaugugugggagg

SEQ ID NO: 2257838 - RNA, 19 nt, Artificial Sequence
  Description of Artificial Sequence: Synthetic oligonucleotide
gaagacuuucuggaaggcc

SEQ ID NO: 2257839 - RNA, 19 nt, Artificial Sequence
  Description of Artificial Sequence: Synthetic oligonucleotide
uaccauuaguguucacugc

SEQ ID NO: 2257840 - RNA, 19 nt, Artificial Sequence
  Description of Artificial Sequence: Synthetic oligonucleotide
gauugguuaacauuugcuu

SEQ ID NO: 2257841 - RNA, 19 nt, Artificial Sequence
  Description of Artificial Sequence: Synthetic oligonucleotide
cuacgauuuauaugucaug

SEQ ID NO: 2257842 - RNA, 19 nt, Artificial Sequence
  Description of Artificial Sequence: Synthetic oligonucleotide
acauaacuuggcgacuaac

SEQ ID NO: 2257843 - RNA, 19 nt, Artificial Sequence
  Description of Artificial Sequence: Synthetic oligonucleotide
aggguaacauacauagauc

SEQ ID NO: 2257844 - RNA, 19 nt, Artificial Sequence
  Description of Artificial Sequence: Synthetic oligonucleotide
aauuguuuacagagaugug

SEQ ID NO: 2257845 - RNA, 19 nt, Artificial Sequence
  Description of Artificial Sequence: Synthetic oligonucleotide
cucacagccguuuauugca

SEQ ID NO: 2257846 - RNA, 19 nt, Artificial Sequence
  Description of Artificial Sequence: Synthetic oligonucleotide
gaagauugguuaacauuug

SEQ ID NO: 2257847 - RNA, 19 nt, Artificial Sequence
  Description of Artificial Sequence: Synthetic oligonucleotide
cuacuguuagccaggaaga

SEQ ID NO: 2257848 - RNA, 19 nt, Artificial Sequence
  Description of Artificial Sequence: Synthetic oligonucleotide
uuuacauaacuuggcgacu

SEQ ID NO: 2257849 - RNA, 19 nt, Artificial Sequence
  Description of Artificial Sequence: Synthetic oligonucleotide
uacaggccauuucauauua

SEQ ID NO: 2257850 - RNA, 19 nt, Artificial Sequence
  Description of Artificial Sequence: Synthetic oligonucleotide
acaaugcaauauguguggg

SEQ ID NO: 2257851 - RNA, 19 nt, Artificial Sequence
  Description of Artificial Sequence: Synthetic oligonucleotide
uaggucaauuaaauucuau

SEQ ID NO: 2257852 - RNA, 19 nt, Artificial Sequence
  Description of Artificial Sequence: Synthetic oligonucleotide
uaacuuggcgacuaacauu

SEQ ID NO: 2257853 - RNA, 19 nt, Artificial Sequence
  Description of Artificial Sequence: Synthetic oligonucleotide
cauaauuccugagcucugc

SEQ ID NO: 2257854 - RNA, 19 nt, Artificial Sequence
  Description of Artificial Sequence: Synthetic oligonucleotide
acuacgauuuauaugucau

SEQ ID NO: 2257855 - RNA, 19 nt, Artificial Sequence
  Description of Artificial Sequence: Synthetic oligonucleotide
uacuugagcugucauggua

SEQ ID NO: 2257856 - RNA, 19 nt, Artificial Sequence
  Description of Artificial Sequence: Synthetic oligonucleotide
uuaggucaauuaaauucua

SEQ ID NO: 2257857 - RNA, 19 nt, Artificial Sequence
  Description of Artificial Sequence: Synthetic oligonucleotide
gaaauggaaaugccaccca

SEQ ID NO: 2257858 - RNA, 19 nt, Artificial Sequence
  Description of Artificial Sequence: Synthetic oligonucleotide
uuauugcaauucaccagaa

SEQ ID NO: 2257859 - RNA, 19 nt, Artificial Sequence
  Description of Artificial Sequence: Synthetic oligonucleotide
ugccuuuaacacugaagac

SEQ ID NO: 2257860 - RNA, 19 nt, Artificial Sequence
  Description of Artificial Sequence: Synthetic oligonucleotide
uaccuuucuagcucagggu

SEQ ID NO: 2257861 - RNA, 19 nt, Artificial Sequence
  Description of Artificial Sequence: Synthetic oligonucleotide
acucuauaacagccuuacg

SEQ ID NO: 2257862 - RNA, 19 nt, Artificial Sequence
  Description of Artificial Sequence: Synthetic oligonucleotide
uggugacuuaaacaaguuu

SEQ ID NO: 2257863 - RNA, 19 nt, Artificial Sequence
  Description of Artificial Sequence: Synthetic oligonucleotide
gcuagaaccucccuccucc

SEQ ID NO: 2257864 - RNA, 19 nt, Artificial Sequence
  Description of Artificial Sequence: Synthetic oligonucleotide
ucagggucgaagauugguu

SEQ ID NO: 2257865 - RNA, 19 nt, Artificial Sequence
  Description of Artificial Sequence: Synthetic oligonucleotide
augugugggaggugaaaug

SEQ ID NO: 2257866 - RNA, 19 nt, Artificial Sequence
  Description of Artificial Sequence: Synthetic oligonucleotide
ucaggguaacauacauaga

SEQ ID NO: 2257867 - RNA, 19 nt, Artificial Sequence
  Description of Artificial Sequence: Synthetic oligonucleotide
uuagacuaauuagcaguac

SEQ ID NO: 2257868 - RNA, 19 nt, Artificial Sequence
  Description of Artificial Sequence: Synthetic oligonucleotide
agaaccucccuccucccca

SEQ ID NO: 2257869 - RNA, 19 nt, Artificial Sequence
  Description of Artificial Sequence: Synthetic oligonucleotide
ccguuuauugcaauucacc

SEQ ID NO: 2257870 - RNA, 19 nt, Artificial Sequence
  Description of Artificial Sequence: Synthetic oligonucleotide
cauagcuuacugugaauga

SEQ ID NO: 2257871 - RNA, 19 nt, Artificial Sequence
  Description of Artificial Sequence: Synthetic oligonucleotide
uggaaaugccacccaacua

SEQ ID NO: 2257872 - RNA, 19 nt, Artificial Sequence
  Description of Artificial Sequence: Synthetic oligonucleotide
aauguacaggccauuucau

SEQ ID NO: 2257873 - RNA, 19 nt, Artificial Sequence
  Description of Artificial Sequence: Synthetic oligonucleotide
uuuacccucauagcuuacu

SEQ ID NO: 2257874 - RNA, 19 nt, Artificial Sequence
  Description of Artificial Sequence: Synthetic oligonucleotide
agccguuuauugcaauuca

SEQ ID NO: 2257875 - RNA, 19 nt, Artificial Sequence
  Description of Artificial Sequence: Synthetic oligonucleotide
auuagacuaauuagcagua

SEQ ID NO: 2257876 - RNA, 19 nt, Artificial Sequence
  Description of Artificial Sequence: Synthetic oligonucleotide
gguguggugccaauuaaag

SEQ ID NO: 2257877 - RNA, 19 nt, Artificial Sequence
  Description of Artificial Sequence: Synthetic oligonucleotide
aaacuagaugcaaggugcu

SEQ ID NO: 2257878 - RNA, 19 nt, Artificial Sequence
  Description of Artificial Sequence: Synthetic oligonucleotide
aauuagcaguacucaucau

SEQ ID NO: 2257879 - RNA, 19 nt, Artificial Sequence
  Description of Artificial Sequence: Synthetic oligonucleotide
caaggugcuuucaggcuag

SEQ ID NO: 2257880 - RNA, 19 nt, Artificial Sequence
  Description of Artificial Sequence: Synthetic oligonucleotide
uguuuacagagauguggau

SEQ ID NO: 2257881 - RNA, 19 nt, Artificial Sequence
  Description of Artificial Sequence: Synthetic oligonucleotide
ugagcacaacuuccuaguc

SEQ ID NO: 2257882 - RNA, 19 nt, Artificial Sequence
  Description of Artificial Sequence: Synthetic oligonucleotide
uacccucauagcuuacugu

SEQ ID NO: 2257883 - RNA, 19 nt, Artificial Sequence
  Description of Artificial Sequence: Synthetic oligonucleotide
uauugcacuuacucuucaa

SEQ ID NO: 2257884 - RNA, 19 nt, Artificial Sequence
  Description of Artificial Sequence: Synthetic oligonucleotide
ugcuucgucccuuuacauc

SEQ ID NO: 2257885 - RNA, 19 nt, Artificial Sequence
  Description of Artificial Sequence: Synthetic oligonucleotide
caggguaacauacauagau

SEQ ID NO: 2257886 - RNA, 19 nt, Artificial Sequence
  Description of Artificial Sequence: Synthetic oligonucleotide
uacgacuuacgcucucaga

SEQ ID NO: 2257887 - RNA, 19 nt, Artificial Sequence
  Description of Artificial Sequence: Synthetic oligonucleotide
uuacgcucucagaaacaga

SEQ ID NO: 2257888 - RNA, 19 nt, Artificial Sequence
  Description of Artificial Sequence: Synthetic oligonucleotide
uacagagauguggauuuac

SEQ ID NO: 2257889 - RNA, 19 nt, Artificial Sequence
  Description of Artificial Sequence: Synthetic oligonucleotide
acuguuagccaggaagacu

SEQ ID NO: 2257890 - RNA, 19 nt, Artificial Sequence
  Description of Artificial Sequence: Synthetic oligonucleotide
caauaugugugggagguga

SEQ ID NO: 2257891 - RNA, 19 nt, Artificial Sequence
  Description of Artificial Sequence: Synthetic oligonucleotide
agcuuacugugaaugacug

SEQ ID NO: 2257892 - RNA, 19 nt, Artificial Sequence
  Description of Artificial Sequence: Synthetic oligonucleotide
uagcaguacucaucaugcc

SEQ ID NO: 2257893 - RNA, 19 nt, Artificial Sequence
  Description of Artificial Sequence: Synthetic oligonucleotide
uuuaaauguacaggccauu

SEQ ID NO: 2257894 - RNA, 19 nt, Artificial Sequence
  Description of Artificial Sequence: Synthetic oligonucleotide
uuacaucccuacuguuagc

SEQ ID NO: 2257895 - RNA, 19 nt, Artificial Sequence
  Description of Artificial Sequence: Synthetic oligonucleotide
acuagaugcaaggugcuuu

SEQ ID NO: 2257896 - RNA, 19 nt, Artificial Sequence
  Description of Artificial Sequence: Synthetic oligonucleotide
uugcauaauuccugagcuc

SEQ ID NO: 2257897 - RNA, 19 nt, Artificial Sequence
  Description of Artificial Sequence: Synthetic oligonucleotide
acaauaccauuaguguuca

SEQ ID NO: 2257898 - RNA, 19 nt, Artificial Sequence
  Description of Artificial Sequence: Synthetic oligonucleotide
agauguggauuuacauaac

SEQ ID NO: 2257899 - RNA, 19 nt, Artificial Sequence
  Description of Artificial Sequence: Synthetic oligonucleotide
uagaaccucccuccucccc

SEQ ID NO: 2257900 - RNA, 19 nt, Artificial Sequence
  Description of Artificial Sequence: Synthetic oligonucleotide
gguuagaacaauaccauua

SEQ ID NO: 2257901 - RNA, 19 nt, Artificial Sequence
  Description of Artificial Sequence: Synthetic oligonucleotide
acaaguuugccugcucgug

SEQ ID NO: 2257902 - RNA, 19 nt, Artificial Sequence
  Description of Artificial Sequence: Synthetic oligonucleotide
ucacucuauaacagccuua

SEQ ID NO: 2257903 - RNA, 19 nt, Artificial Sequence
  Description of Artificial Sequence: Synthetic oligonucleotide
uagauccauagcucugccu

SEQ ID NO: 2257904 - RNA, 19 nt, Artificial Sequence
  Description of Artificial Sequence: Synthetic oligonucleotide
acuugagcugucaugguau

SEQ ID NO: 2257905 - RNA, 19 nt, Artificial Sequence
  Description of Artificial Sequence: Synthetic oligonucleotide
gauccauagcucugccuuc

SEQ ID NO: 2257906 - RNA, 19 nt, Artificial Sequence
  Description of Artificial Sequence: Synthetic oligonucleotide
uuuuacccucauagcuuac

SEQ ID NO: 2257907 - RNA, 19 nt, Artificial Sequence
  Description of Artificial Sequence: Synthetic oligonucleotide
guaacauacauagauccau

SEQ ID NO: 2257908 - RNA, 19 nt, Artificial Sequence
  Description of Artificial Sequence: Synthetic oligonucleotide
uacuguuagccaggaagac

SEQ ID NO: 2257909 - RNA, 19 nt, Artificial Sequence
  Description of Artificial Sequence: Synthetic oligonucleotide
accuuacaaugcaauaugu

SEQ ID NO: 2257910 - RNA, 19 nt, Artificial Sequence
  Description of Artificial Sequence: Synthetic oligonucleotide
acauagauccauagcucug

SEQ ID NO: 2257911 - RNA, 19 nt, Artificial Sequence
  Description of Artificial Sequence: Synthetic oligonucleotide
guacucaucaugccuuuaa

SEQ ID NO: 2257912 - RNA, 19 nt, Artificial Sequence
  Description of Artificial Sequence: Synthetic oligonucleotide
cuguugcauaauuccugag

SEQ ID NO: 2257913 - RNA, 19 nt, Artificial Sequence
  Description of Artificial Sequence: Synthetic oligonucleotide
caaugcaauauguguggga

SEQ ID NO: 2257914 - RNA, 19 nt, Artificial Sequence
  Description of Artificial Sequence: Synthetic oligonucleotide
ccuuucuagcucagggucg

SEQ ID NO: 2257915 - RNA, 19 nt, Artificial Sequence
  Description of Artificial Sequence: Synthetic oligonucleotide
auguacaggccauuucaua

SEQ ID NO: 2257916 - RNA, 19 nt, Artificial Sequence
  Description of Artificial Sequence: Synthetic oligonucleotide
auaacagccuuacgacuua

SEQ ID NO: 2257917 - RNA, 19 nt, Artificial Sequence
  Description of Artificial Sequence: Synthetic oligonucleotide
cuagaaccucccuccuccc

SEQ ID NO: 2257918 - RNA, 19 nt, Artificial Sequence
  Description of Artificial Sequence: Synthetic oligonucleotide
uucaggcuagaaccucccu

SEQ ID NO: 2257919 - RNA, 19 nt, Artificial Sequence
  Description of Artificial Sequence: Synthetic oligonucleotide
acaucccuacuguuagcca

SEQ ID NO: 2257920 - RNA, 19 nt, Artificial Sequence
  Description of Artificial Sequence: Synthetic oligonucleotide
aauaugugugggaggugaa

SEQ ID NO: 2257921 - RNA, 19 nt, Artificial Sequence
  Description of Artificial Sequence: Synthetic oligonucleotide
acagccguuuauugcaauu

SEQ ID NO: 2257922 - RNA, 19 nt, Artificial Sequence
  Description of Artificial Sequence: Synthetic oligonucleotide
aaggccgaguccacauguc

SEQ ID NO: 2257923 - RNA, 19 nt, Artificial Sequence
  Description of Artificial Sequence: Synthetic oligonucleotide
agggucgaagauugguuaa

SEQ ID NO: 2257924 - RNA, 19 nt, Artificial Sequence
  Description of Artificial Sequence: Synthetic oligonucleotide
aucccuacuguuagccagg

SEQ ID NO: 2257925 - RNA, 19 nt, Artificial Sequence
  Description of Artificial Sequence: Synthetic oligonucleotide
gaaggccgaguccacaugu

SEQ ID NO: 2257926 - RNA, 19 nt, Artificial Sequence
  Description of Artificial Sequence: Synthetic oligonucleotide
ucacagccguuuauugcaa

SEQ ID NO: 2257927 - RNA, 19 nt, Artificial Sequence
  Description of Artificial Sequence: Synthetic oligonucleotide
cuauaacagccuuacgacu

SEQ ID NO: 2257928 - RNA, 19 nt, Artificial Sequence
  Description of Artificial Sequence: Synthetic oligonucleotide
gcucacagccguuuauugc

SEQ ID NO: 2257929 - RNA, 19 nt, Artificial Sequence
  Description of Artificial Sequence: Synthetic oligonucleotide
cuucgucccuuuacauccc

SEQ ID NO: 2257930 - RNA, 19 nt, Artificial Sequence
  Description of Artificial Sequence: Synthetic oligonucleotide
cuguuagccaggaagacuu

SEQ ID NO: 2257931 - RNA, 19 nt, Artificial Sequence
  Description of Artificial Sequence: Synthetic oligonucleotide
uucgucccuuuacaucccu

SEQ ID NO: 2257932 - RNA, 19 nt, Artificial Sequence
  Description of Artificial Sequence: Synthetic oligonucleotide
ugguuaacauuugcuucgu

SEQ ID NO: 2257933 - RNA, 19 nt, Artificial Sequence
  Description of Artificial Sequence: Synthetic oligonucleotide
aagcucacagccguuuauu

SEQ ID NO: 2257934 - RNA, 19 nt, Artificial Sequence
  Description of Artificial Sequence: Synthetic oligonucleotide
cagccguuuauugcaauuc

SEQ ID NO: 2257935 - RNA, 19 nt, Artificial Sequence
  Description of Artificial Sequence: Synthetic oligonucleotide
uugcuucgucccuuuacau

SEQ ID NO: 2257936 - RNA, 19 nt, Artificial Sequence
  Description of Artificial Sequence: Synthetic oligonucleotide
caacuacgauuuauauguc

SEQ ID NO: 2257937 - RNA, 19 nt, Artificial Sequence
  Description of Artificial Sequence: Synthetic oligonucleotide
cgauuuauaugucaugaca

SEQ ID NO: 2257938 - RNA, 19 nt, Artificial Sequence
  Description of Artificial Sequence: Synthetic oligonucleotide
aacuagaugcaaggugcuu

SEQ ID NO: 2257939 - RNA, 19 nt, Artificial Sequence
  Description of Artificial Sequence: Synthetic oligonucleotide
cacuuacucuucaauauau

SEQ ID NO: 2257940 - RNA, 19 nt, Artificial Sequence
  Description of Artificial Sequence: Synthetic oligonucleotide
uugccugcucgugugcuga

SEQ ID NO: 2257941 - RNA, 19 nt, Artificial Sequence
  Description of Artificial Sequence: Synthetic oligonucleotide
aacagguguggugccaauu

SEQ ID NO: 2257942 - RNA, 19 nt, Artificial Sequence
  Description of Artificial Sequence: Synthetic oligonucleotide
ugcucgugugcugaccagu

SEQ ID NO: 2257943 - RNA, 19 nt, Artificial Sequence
  Description of Artificial Sequence: Synthetic oligonucleotide
aguguucacugcagaaagu

SEQ ID NO: 2257944 - RNA, 19 nt, Artificial Sequence
  Description of Artificial Sequence: Synthetic oligonucleotide
acuuacgcucucagaaaca

SEQ ID NO: 2257945 - RNA, 19 nt, Artificial Sequence
  Description of Artificial Sequence: Synthetic oligonucleotide
auaugugugggaggugaaa

SEQ ID NO: 2257946 - RNA, 19 nt, Artificial Sequence
  Description of Artificial Sequence: Synthetic oligonucleotide
cugucaugguauuuucuua

SEQ ID NO: 2257947 - RNA, 19 nt, Artificial Sequence
  Description of Artificial Sequence: Synthetic oligonucleotide
acccaacuacuugagcugu

SEQ ID NO: 2257948 - RNA, 19 nt, Artificial Sequence
  Description of Artificial Sequence: Synthetic oligonucleotide
uaacagccuuacgacuuac

SEQ ID NO: 2257949 - RNA, 19 nt, Artificial Sequence
  Description of Artificial Sequence: Synthetic oligonucleotide
gcaaguuugaaaacuagau

SEQ ID NO: 2257950 - RNA, 19 nt, Artificial Sequence
  Description of Artificial Sequence: Synthetic oligonucleotide
cuuucuagcucagggucga

SEQ ID NO: 2257951 - RNA, 19 nt, Artificial Sequence
  Description of Artificial Sequence: Synthetic oligonucleotide
cagggucgaagauugguua

SEQ ID NO: 2257952 - RNA, 19 nt, Artificial Sequence
  Description of Artificial Sequence: Synthetic oligonucleotide
cuuacgacuuacgcucuca

SEQ ID NO: 2257953 - RNA, 19 nt, Artificial Sequence
  Description of Artificial Sequence: Synthetic oligonucleotide
uucuuacaacuacgauuua

SEQ ID NO: 2257954 - RNA, 19 nt, Artificial Sequence
  Description of Artificial Sequence: Synthetic oligonucleotide
acuuacucuucaauauaua

SEQ ID NO: 2257955 - RNA, 19 nt, Artificial Sequence
  Description of Artificial Sequence: Synthetic oligonucleotide
aaaugccacccaacuacuu

SEQ ID NO: 2257956 - RNA, 19 nt, Artificial Sequence
  Description of Artificial Sequence: Synthetic oligonucleotide
gaaaugccacccaacuacu

SEQ ID NO: 2257957 - RNA, 19 nt, Artificial Sequence
  Description of Artificial Sequence: Synthetic oligonucleotide
caaccuuacaaugcaauau

SEQ ID NO: 2257958 - RNA, 19 nt, Artificial Sequence
  Description of Artificial Sequence: Synthetic oligonucleotide
cucgugugcugaccaguac

SEQ ID NO: 2257959 - RNA, 19 nt, Artificial Sequence
  Description of Artificial Sequence: Synthetic oligonucleotide
guguggugccaauuaaagu

SEQ ID NO: 2257960 - RNA, 19 nt, Artificial Sequence
  Description of Artificial Sequence: Synthetic oligonucleotide
aaccucccuccuccccaag

SEQ ID NO: 2257961 - RNA, 19 nt, Artificial Sequence
  Description of Artificial Sequence: Synthetic oligonucleotide
agacuuucuggaaggccga

SEQ ID NO: 2257962 - RNA, 19 nt, Artificial Sequence
  Description of Artificial Sequence: Synthetic oligonucleotide
gccaauuaaagucaaccuu

SEQ ID NO: 2257963 - RNA, 19 nt, Artificial Sequence
  Description of Artificial Sequence: Synthetic oligonucleotide
gugaaugacugaccacuua

SEQ ID NO: 2257964 - RNA, 19 nt, Artificial Sequence
  Description of Artificial Sequence: Synthetic oligonucleotide
gaagcucacagccguuuau

SEQ ID NO: 2257965 - RNA, 19 nt, Artificial Sequence
  Description of Artificial Sequence: Synthetic oligonucleotide
uuacagagauguggauuua

SEQ ID NO: 2257966 - RNA, 19 nt, Artificial Sequence
  Description of Artificial Sequence: Synthetic oligonucleotide
aggcuagaaccucccuccu

SEQ ID NO: 2257967 - RNA, 19 nt, Artificial Sequence
  Description of Artificial Sequence: Synthetic oligonucleotide
agguguggugccaauuaaa

SEQ ID NO: 2257968 - RNA, 19 nt, Artificial Sequence
  Description of Artificial Sequence: Synthetic oligonucleotide
gucgaagauugguuaacau

SEQ ID NO: 2257969 - RNA, 19 nt, Artificial Sequence
  Description of Artificial Sequence: Synthetic oligonucleotide
cagccuuacgacuuacgcu

SEQ ID NO: 2257970 - RNA, 19 nt, Artificial Sequence
  Description of Artificial Sequence: Synthetic oligonucleotide
gucacucuauaacagccuu

SEQ ID NO: 2257971 - RNA, 19 nt, Artificial Sequence
  Description of Artificial Sequence: Synthetic oligonucleotide
cacaugucuggugacuuaa

SEQ ID NO: 2257972 - RNA, 19 nt, Artificial Sequence
  Description of Artificial Sequence: Synthetic oligonucleotide
agucaaccuuacaaugcaa

SEQ ID NO: 2257973 - RNA, 19 nt, Artificial Sequence
  Description of Artificial Sequence: Synthetic oligonucleotide
gcagggaagcucacagccg

SEQ ID NO: 2257974 - RNA, 19 nt, Artificial Sequence
  Description of Artificial Sequence: Synthetic oligonucleotide
gucaaccuuacaaugcaau

SEQ ID NO: 2257975 - RNA, 19 nt, Artificial Sequence
  Description of Artificial Sequence: Synthetic oligonucleotide
cugcucgugugcugaccag

SEQ ID NO: 2257976 - RNA, 19 nt, Artificial Sequence
  Description of Artificial Sequence: Synthetic oligonucleotide
gcaaggugcuuucaggcua

SEQ ID NO: 2257977 - RNA, 19 nt, Artificial Sequence
  Description of Artificial Sequence: Synthetic oligonucleotide
uugagcugucaugguauuu

SEQ ID NO: 2257978 - RNA, 19 nt, Artificial Sequence
  Description of Artificial Sequence: Synthetic oligonucleotide
ucgucccuuuacaucccua

SEQ ID NO: 2257979 - RNA, 19 nt, Artificial Sequence
  Description of Artificial Sequence: Synthetic oligonucleotide
caaguuugccugcucgugu

SEQ ID NO: 2257980 - RNA, 19 nt, Artificial Sequence
  Description of Artificial Sequence: Synthetic oligonucleotide
ggucgaagauugguuaaca

SEQ ID NO: 2257981 - RNA, 19 nt, Artificial Sequence
  Description of Artificial Sequence: Synthetic oligonucleotide
ggaaggccgaguccacaug

SEQ ID NO: 2257982 - RNA, 19 nt, Artificial Sequence
  Description of Artificial Sequence: Synthetic oligonucleotide
gcacuuacucuucaauaua

SEQ ID NO: 2257983 - RNA, 19 nt, Artificial Sequence
  Description of Artificial Sequence: Synthetic oligonucleotide
acuuccuaguccacaucau

SEQ ID NO: 2257984 - RNA, 19 nt, Artificial Sequence
  Description of Artificial Sequence: Synthetic oligonucleotide
ccacccaacuacuugagcu

SEQ ID NO: 2257985 - RNA, 19 nt, Artificial Sequence
  Description of Artificial Sequence: Synthetic oligonucleotide
gccguuuauugcaauucac

SEQ ID NO: 2257986 - RNA, 19 nt, Artificial Sequence
  Description of Artificial Sequence: Synthetic oligonucleotide
cagggaagcucacagccgu

SEQ ID NO: 2257987 - RNA, 19 nt, Artificial Sequence
  Description of Artificial Sequence: Synthetic oligonucleotide
gcuuacugugaaugacuga

SEQ ID NO: 2257988 - RNA, 19 nt, Artificial Sequence
  Description of Artificial Sequence: Synthetic oligonucleotide
caccagaacugucacucua

SEQ ID NO: 2257989 - RNA, 19 nt, Artificial Sequence
  Description of Artificial Sequence: Synthetic oligonucleotide
cgucccuuuacaucccuac

SEQ ID NO: 2257990 - RNA, 19 nt, Artificial Sequence
  Description of Artificial Sequence: Synthetic oligonucleotide
gcugucaugguauuuucuu

SEQ ID NO: 2257991 - RNA, 19 nt, Artificial Sequence
  Description of Artificial Sequence: Synthetic oligonucleotide
cagguguggugccaauuaa

SEQ ID NO: 2257992 - RNA, 19 nt, Artificial Sequence
  Description of Artificial Sequence: Synthetic oligonucleotide
gaaccucccuccuccccaa

SEQ ID NO: 2257993 - RNA, 19 nt, Artificial Sequence
  Description of Artificial Sequence: Synthetic oligonucleotide
gguuaacauuugcuucguc

SEQ ID NO: 2257994 - RNA, 19 nt, Artificial Sequence
  Description of Artificial Sequence: Synthetic oligonucleotide
guacaggccauuucauauu

SEQ ID NO: 2257995 - RNA, 19 nt, Artificial Sequence
  Description of Artificial Sequence: Synthetic oligonucleotide
gugcugaccaguacuugaa

SEQ ID NO: 2257996 - RNA, 19 nt, Artificial Sequence
  Description of Artificial Sequence: Synthetic oligonucleotide
ggccgaguccacaugucug

SEQ ID NO: 2257997 - RNA, 19 nt, Artificial Sequence
  Description of Artificial Sequence: Synthetic oligonucleotide
gcauaauuccugagcucug

SEQ ID NO: 2257998 - RNA, 19 nt, Artificial Sequence
  Description of Artificial Sequence: Synthetic oligonucleotide
gggucgaagauugguuaac

SEQ ID NO: 2257999 - RNA, 19 nt, Artificial Sequence
  Description of Artificial Sequence: Synthetic oligonucleotide
aguacucaucaugccuuua

SEQ ID NO: 2258000 - RNA, 19 nt, Artificial Sequence
  Description of Artificial Sequence: Synthetic oligonucleotide
ggugccaauuaaagucaac

SEQ ID NO: 2258001 - RNA, 19 nt, Artificial Sequence
  Description of Artificial Sequence: Synthetic oligonucleotide
cucagggucgaagauuggu

SEQ ID NO: 2258002 - RNA, 19 nt, Artificial Sequence
  Description of Artificial Sequence: Synthetic oligonucleotide
gagcucugccuaacaauua

SEQ ID NO: 2258003 - RNA, 19 nt, Artificial Sequence
  Description of Artificial Sequence: Synthetic oligonucleotide
ggcuagaaccucccuccuc

SEQ ID NO: 2258004 - RNA, 19 nt, Artificial Sequence
  Description of Artificial Sequence: Synthetic oligonucleotide
acaugucuggugacuuaaa

SEQ ID NO: 2258005 - RNA, 19 nt, Artificial Sequence
  Description of Artificial Sequence: Synthetic oligonucleotide
uuucuagcucagggucgaa

SEQ ID NO: 2258006 - RNA, 19 nt, Artificial Sequence
  Description of Artificial Sequence: Synthetic oligonucleotide
acaggccauuucauauuau

SEQ ID NO: 2258007 - RNA, 19 nt, Artificial Sequence
  Description of Artificial Sequence: Synthetic oligonucleotide
gcaauaugugugggaggug

SEQ ID NO: 2258008 - RNA, 19 nt, Artificial Sequence
  Description of Artificial Sequence: Synthetic oligonucleotide
gcugaccaguacuugaauu

SEQ ID NO: 2258009 - RNA, 19 nt, Artificial Sequence
  Description of Artificial Sequence: Synthetic oligonucleotide
aggugcuuucaggcuagaa

SEQ ID NO: 2258010 - RNA, 19 nt, Artificial Sequence
  Description of Artificial Sequence: Synthetic oligonucleotide
cucauagcuuacugugaau

SEQ ID NO: 2258011 - RNA, 19 nt, Artificial Sequence
  Description of Artificial Sequence: Synthetic oligonucleotide
ggaagcucacagccguuua

SEQ ID NO: 2258012 - RNA, 19 nt, Artificial Sequence
  Description of Artificial Sequence: Synthetic oligonucleotide
cuacuugagcugucauggu

SEQ ID NO: 2258013 - RNA, 19 nt, Artificial Sequence
  Description of Artificial Sequence: Synthetic oligonucleotide
ccaacuacuugagcuguca

SEQ ID NO: 2258014 - RNA, 19 nt, Artificial Sequence
  Description of Artificial Sequence: Synthetic oligonucleotide
acgcucucagaaacagaaa

SEQ ID NO: 2258015 - RNA, 19 nt, Artificial Sequence
  Description of Artificial Sequence: Synthetic oligonucleotide
cuugagcugucaugguauu

SEQ ID NO: 2258016 - RNA, 19 nt, Artificial Sequence
  Description of Artificial Sequence: Synthetic oligonucleotide
caacuacuugagcugucau

SEQ ID NO: 2258017 - RNA, 19 nt, Artificial Sequence
  Description of Artificial Sequence: Synthetic oligonucleotide
ccuaguccacaucauacau

SEQ ID NO: 2258018 - RNA, 19 nt, Artificial Sequence
  Description of Artificial Sequence: Synthetic oligonucleotide
gcaguacucaucaugccuu

SEQ ID NO: 2258019 - RNA, 19 nt, Artificial Sequence
  Description of Artificial Sequence: Synthetic oligonucleotide
ccuuacgacuuacgcucuc

SEQ ID NO: 2258020 - RNA, 19 nt, Artificial Sequence
  Description of Artificial Sequence: Synthetic oligonucleotide
cccaacuacuugagcuguc

SEQ ID NO: 2258021 - RNA, 19 nt, Artificial Sequence
  Description of Artificial Sequence: Synthetic oligonucleotide
caguacucaucaugccuuu

SEQ ID NO: 2258022 - RNA, 19 nt, Artificial Sequence
  Description of Artificial Sequence: Synthetic oligonucleotide
ccagaacugucacucuaua

SEQ ID NO: 2258023 - RNA, 19 nt, Artificial Sequence
  Description of Artificial Sequence: Synthetic oligonucleotide
cgacuuacgcucucagaaa

SEQ ID NO: 2258024 - RNA, 19 nt, Artificial Sequence
  Description of Artificial Sequence: Synthetic oligonucleotide
cacagccguuuauugcaau

SEQ ID NO: 2258025 - RNA, 19 nt, Artificial Sequence
  Description of Artificial Sequence: Synthetic oligonucleotide
cccaagcagggaagcucac

SEQ ID NO: 2258026 - RNA, 19 nt, Artificial Sequence
  Description of Artificial Sequence: Synthetic oligonucleotide
agggaagcucacagccguu

SEQ ID NO: 2258027 - RNA, 19 nt, Artificial Sequence
  Description of Artificial Sequence: Synthetic oligonucleotide
acuuggcgacuaacauuuu

SEQ ID NO: 2258028 - RNA, 19 nt, Artificial Sequence
  Description of Artificial Sequence: Synthetic oligonucleotide
ccuaacaauuaggucaauu

SEQ ID NO: 2258029 - RNA, 19 nt, Artificial Sequence
  Description of Artificial Sequence: Synthetic oligonucleotide
ccaagcagggaagcucaca

SEQ ID NO: 2258030 - RNA, 19 nt, Artificial Sequence
  Description of Artificial Sequence: Synthetic oligonucleotide
gcucgugugcugaccagua

SEQ ID NO: 2258031 - RNA, 19 nt, Artificial Sequence
  Description of Artificial Sequence: Synthetic oligonucleotide
ccacaucauacauuacguu

SEQ ID NO: 2258032 - RNA, 19 nt, Artificial Sequence
  Description of Artificial Sequence: Synthetic oligonucleotide
ccacaugucuggugacuua

SEQ ID NO: 2258033 - RNA, 19 nt, Artificial Sequence
  Description of Artificial Sequence: Synthetic oligonucleotide
gggaagcucacagccguuu

SEQ ID NO: 2258034 - RNA, 19 nt, Artificial Sequence
  Description of Artificial Sequence: Synthetic oligonucleotide
gccuuacgacuuacgcucu

SEQ ID NO: 2258035 - RNA, 19 nt, Artificial Sequence
  Description of Artificial Sequence: Synthetic oligonucleotide
cccuacuguuagccaggaa

SEQ ID NO: 2258036 - RNA, 19 nt, Artificial Sequence
  Description of Artificial Sequence: Synthetic oligonucleotide
gccuaacaauuaggucaau

SEQ ID NO: 2258037 - RNA, 19 nt, Artificial Sequence
  Description of Artificial Sequence: Synthetic oligonucleotide
aagauugggucucccaacc

SEQ ID NO: 2258038 - RNA, 19 nt, Artificial Sequence
  Description of Artificial Sequence: Synthetic oligonucleotide
ucuuuaauucagaggaggg

SEQ ID NO: 2258039 - RNA, 19 nt, Artificial Sequence
  Description of Artificial Sequence: Synthetic oligonucleotide
aacguagccagcucagacc

SEQ ID NO: 2258040 - RNA, 19 nt, Artificial Sequence
  Description of Artificial Sequence: Synthetic oligonucleotide
ucuucuagcagcuggaaca

SEQ ID NO: 2258041 - RNA, 19 nt, Artificial Sequence
  Description of Artificial Sequence: Synthetic oligonucleotide
uuuaauucagaggaggggc

SEQ ID NO: 2258042 - RNA, 19 nt, Artificial Sequence
  Description of Artificial Sequence: Synthetic oligonucleotide
gugucuuuaauucagagga

SEQ ID NO: 2258043 - RNA, 19 nt, Artificial Sequence
  Description of Artificial Sequence: Synthetic oligonucleotide
aucagguggauccuggggc

SEQ ID NO: 2258044 - RNA, 19 nt, Artificial Sequence
  Description of Artificial Sequence: Synthetic oligonucleotide
cuguguagaaccuuacugg

SEQ ID NO: 2258045 - RNA, 19 nt, Artificial Sequence
  Description of Artificial Sequence: Synthetic oligonucleotide
auuaccacccaugaucugc

SEQ ID NO: 2258046 - RNA, 19 nt, Artificial Sequence
  Description of Artificial Sequence: Synthetic oligonucleotide
uguagaaccuuacuggccu

SEQ ID NO: 2258047 - RNA, 19 nt, Artificial Sequence
  Description of Artificial Sequence: Synthetic oligonucleotide
acucgcagcccacaaaucc

SEQ ID NO: 2258048 - RNA, 19 nt, Artificial Sequence
  Description of Artificial Sequence: Synthetic oligonucleotide
agcugcauauuucagguuc

SEQ ID NO: 2258049 - RNA, 19 nt, Artificial Sequence
  Description of Artificial Sequence: Synthetic oligonucleotide
aguguuaaugggcuccagc

SEQ ID NO: 2258050 - RNA, 19 nt, Artificial Sequence
  Description of Artificial Sequence: Synthetic oligonucleotide
acguagccagcucagaccc

SEQ ID NO: 2258051 - RNA, 19 nt, Artificial Sequence
  Description of Artificial Sequence: Synthetic oligonucleotide
gaacagguaagaaaagucc

SEQ ID NO: 2258052 - RNA, 19 nt, Artificial Sequence
  Description of Artificial Sequence: Synthetic oligonucleotide
gacacguuggccgagaagc

SEQ ID NO: 2258053 - RNA, 19 nt, Artificial Sequence
  Description of Artificial Sequence: Synthetic oligonucleotide
ugauucgaguguuaauggg

SEQ ID NO: 2258054 - RNA, 19 nt, Artificial Sequence
  Description of Artificial Sequence: Synthetic oligonucleotide
guagccuucaucuucuagc

SEQ ID NO: 2258055 - RNA, 19 nt, Artificial Sequence
  Description of Artificial Sequence: Synthetic oligonucleotide
cagauuaccacccaugauc

SEQ ID NO: 2258056 - RNA, 19 nt, Artificial Sequence
  Description of Artificial Sequence: Synthetic oligonucleotide
ugucccaguaugaacguag

SEQ ID NO: 2258057 - RNA, 19 nt, Artificial Sequence
  Description of Artificial Sequence: Synthetic oligonucleotide
uuggauugcagcucgguca

SEQ ID NO: 2258058 - RNA, 19 nt, Artificial Sequence
  Description of Artificial Sequence: Synthetic oligonucleotide
uuaauucagaggaggggcc

SEQ ID NO: 2258059 - RNA, 19 nt, Artificial Sequence
  Description of Artificial Sequence: Synthetic oligonucleotide
uccgggaacagccaggaca

SEQ ID NO: 2258060 - RNA, 19 nt, Artificial Sequence
  Description of Artificial Sequence: Synthetic oligonucleotide
uccuugguagccuucaucu

SEQ ID NO: 2258061 - RNA, 19 nt, Artificial Sequence
  Description of Artificial Sequence: Synthetic oligonucleotide
uguuaaugggcuccagcag

SEQ ID NO: 2258062 - RNA, 19 nt, Artificial Sequence
  Description of Artificial Sequence: Synthetic oligonucleotide
ugcaguugaagauuggguc

SEQ ID NO: 2258063 - RNA, 19 nt, Artificial Sequence
  Description of Artificial Sequence: Synthetic oligonucleotide
aaaaguccagcucuccaga

SEQ ID NO: 2258064 - RNA, 19 nt, Artificial Sequence
  Description of Artificial Sequence: Synthetic oligonucleotide
ugagccaaaaccccagcug

SEQ ID NO: 2258065 - RNA, 19 nt, Artificial Sequence
  Description of Artificial Sequence: Synthetic oligonucleotide
cauauuucagguucuccag

SEQ ID NO: 2258066 - RNA, 19 nt, Artificial Sequence
  Description of Artificial Sequence: Synthetic oligonucleotide
gucagugugucuuuaauuc

SEQ ID NO: 2258067 - RNA, 19 nt, Artificial Sequence
  Description of Artificial Sequence: Synthetic oligonucleotide
ugucagauuaccacccaug

SEQ ID NO: 2258068 - RNA, 19 nt, Artificial Sequence
  Description of Artificial Sequence: Synthetic oligonucleotide
ucucccaaccuucugcaag

SEQ ID NO: 2258069 - RNA, 19 nt, Artificial Sequence
  Description of Artificial Sequence: Synthetic oligonucleotide
gauucgaguguuaaugggc

SEQ ID NO: 2258070 - RNA, 19 nt, Artificial Sequence
  Description of Artificial Sequence: Synthetic oligonucleotide
gucuuuaauucagaggagg

SEQ ID NO: 2258071 - RNA, 19 nt, Artificial Sequence
  Description of Artificial Sequence: Synthetic oligonucleotide
gugauucgaguguuaaugg

SEQ ID NO: 2258072 - RNA, 19 nt, Artificial Sequence
  Description of Artificial Sequence: Synthetic oligonucleotide
cuuuaauucagaggagggg

SEQ ID NO: 2258073 - RNA, 19 nt, Artificial Sequence
  Description of Artificial Sequence: Synthetic oligonucleotide
uuacuggccugucuguggg

SEQ ID NO: 2258074 - RNA, 19 nt, Artificial Sequence
  Description of Artificial Sequence: Synthetic oligonucleotide
ugaagauugggucucccaa

SEQ ID NO: 2258075 - RNA, 19 nt, Artificial Sequence
  Description of Artificial Sequence: Synthetic oligonucleotide
gucugucccaguaugaacg

SEQ ID NO: 2258076 - RNA, 19 nt, Artificial Sequence
  Description of Artificial Sequence: Synthetic oligonucleotide
guucuccugagccaaaacc

SEQ ID NO: 2258077 - RNA, 19 nt, Artificial Sequence
  Description of Artificial Sequence: Synthetic oligonucleotide
gagccaaaaccccagcugc

SEQ ID NO: 2258078 - RNA, 19 nt, Artificial Sequence
  Description of Artificial Sequence: Synthetic oligonucleotide
guaagaaaaguccagcucu

SEQ ID NO: 2258079 - RNA, 19 nt, Artificial Sequence
  Description of Artificial Sequence: Synthetic oligonucleotide
ugucuuuaauucagaggag

SEQ ID NO: 2258080 - RNA, 19 nt, Artificial Sequence
  Description of Artificial Sequence: Synthetic oligonucleotide
gcagguacuguguagaacc

SEQ ID NO: 2258081 - RNA, 19 nt, Artificial Sequence
  Description of Artificial Sequence: Synthetic oligonucleotide
aacucccugauguuugcug

SEQ ID NO: 2258082 - RNA, 19 nt, Artificial Sequence
  Description of Artificial Sequence: Synthetic oligonucleotide
aucuucuagcagcuggaac

SEQ ID NO: 2258083 - RNA, 19 nt, Artificial Sequence
  Description of Artificial Sequence: Synthetic oligonucleotide
uggauugcagcucggucag

SEQ ID NO: 2258084 - RNA, 19 nt, Artificial Sequence
  Description of Artificial Sequence: Synthetic oligonucleotide
aguggaauauguccauuug

SEQ ID NO: 2258085 - RNA, 19 nt, Artificial Sequence
  Description of Artificial Sequence: Synthetic oligonucleotide
guggaauauguccauuugc

SEQ ID NO: 2258086 - RNA, 19 nt, Artificial Sequence
  Description of Artificial Sequence: Synthetic oligonucleotide
ugcugucagauuaccaccc

SEQ ID NO: 2258087 - RNA, 19 nt, Artificial Sequence
  Description of Artificial Sequence: Synthetic oligonucleotide
agccccaagccccaucucc

SEQ ID NO: 2258088 - RNA, 19 nt, Artificial Sequence
  Description of Artificial Sequence: Synthetic oligonucleotide
uugcaguugaagauugggu

SEQ ID NO: 2258089 - RNA, 19 nt, Artificial Sequence
  Description of Artificial Sequence: Synthetic oligonucleotide
cuuggcguacagcacagcc

SEQ ID NO: 2258090 - RNA, 19 nt, Artificial Sequence
  Description of Artificial Sequence: Synthetic oligonucleotide
acaaugggcaggaacuccc

SEQ ID NO: 2258091 - RNA, 19 nt, Artificial Sequence
  Description of Artificial Sequence: Synthetic oligonucleotide
agguaagaaaaguccagcu

SEQ ID NO: 2258092 - RNA, 19 nt, Artificial Sequence
  Description of Artificial Sequence: Synthetic oligonucleotide
cagugugucuuuaauucag

SEQ ID NO: 2258093 - RNA, 19 nt, Artificial Sequence
  Description of Artificial Sequence: Synthetic oligonucleotide
uucucuugguuuccccgcg

SEQ ID NO: 2258094 - RNA, 19 nt, Artificial Sequence
  Description of Artificial Sequence: Synthetic oligonucleotide
cuuacuggccugucugugg

SEQ ID NO: 2258095 - RNA, 19 nt, Artificial Sequence
  Description of Artificial Sequence: Synthetic oligonucleotide
cuugguagccuucaucuuc

SEQ ID NO: 2258096 - RNA, 19 nt, Artificial Sequence
  Description of Artificial Sequence: Synthetic oligonucleotide
cacgagguucuccugagcc

SEQ ID NO: 2258097 - RNA, 19 nt, Artificial Sequence
  Description of Artificial Sequence: Synthetic oligonucleotide
uguauccaggaaguacugg

SEQ ID NO: 2258098 - RNA, 19 nt, Artificial Sequence
  Description of Artificial Sequence: Synthetic oligonucleotide
uuaacggucagugugucuu

SEQ ID NO: 2258099 - RNA, 19 nt, Artificial Sequence
  Description of Artificial Sequence: Synthetic oligonucleotide
guguuaaugggcuccagca

SEQ ID NO: 2258100 - RNA, 19 nt, Artificial Sequence
  Description of Artificial Sequence: Synthetic oligonucleotide
uuaccacccaugaucugcc

SEQ ID NO: 2258101 - RNA, 19 nt, Artificial Sequence
  Description of Artificial Sequence: Synthetic oligonucleotide
ucuugguuuccccgcggcg

SEQ ID NO: 2258102 - RNA, 19 nt, Artificial Sequence
  Description of Artificial Sequence: Synthetic oligonucleotide
uggaacagguaagaaaagu

SEQ ID NO: 2258103 - RNA, 19 nt, Artificial Sequence
  Description of Artificial Sequence: Synthetic oligonucleotide
uugguagccuucaucuucu

SEQ ID NO: 2258104 - RNA, 19 nt, Artificial Sequence
  Description of Artificial Sequence: Synthetic oligonucleotide
aguaugaacguagccagcu

SEQ ID NO: 2258105 - RNA, 19 nt, Artificial Sequence
  Description of Artificial Sequence: Synthetic oligonucleotide
gaacguagccagcucagac

SEQ ID NO: 2258106 - RNA, 19 nt, Artificial Sequence
  Description of Artificial Sequence: Synthetic oligonucleotide
uccucgaggccgauacucg

SEQ ID NO: 2258107 - RNA, 19 nt, Artificial Sequence
  Description of Artificial Sequence: Synthetic oligonucleotide
auacucgcagcccacaaau

SEQ ID NO: 2258108 - RNA, 19 nt, Artificial Sequence
  Description of Artificial Sequence: Synthetic oligonucleotide
ucgaguguuaaugggcucc

SEQ ID NO: 2258109 - RNA, 19 nt, Artificial Sequence
  Description of Artificial Sequence: Synthetic oligonucleotide
aacugccuggcuccccucg

SEQ ID NO: 2258110 - RNA, 19 nt, Artificial Sequence
  Description of Artificial Sequence: Synthetic oligonucleotide
ucggcguacggccaggcca

SEQ ID NO: 2258111 - RNA, 19 nt, Artificial Sequence
  Description of Artificial Sequence: Synthetic oligonucleotide
ucggucagccccuuggggc

SEQ ID NO: 2258112 - RNA, 19 nt, Artificial Sequence
  Description of Artificial Sequence: Synthetic oligonucleotide
uuaaugggcuccagcaguc

SEQ ID NO: 2258113 - RNA, 19 nt, Artificial Sequence
  Description of Artificial Sequence: Synthetic oligonucleotide
cugggguguauccaggaag

SEQ ID NO: 2258114 - RNA, 19 nt, Artificial Sequence
  Description of Artificial Sequence: Synthetic oligonucleotide
aauucagaggaggggccuc

SEQ ID NO: 2258115 - RNA, 19 nt, Artificial Sequence
  Description of Artificial Sequence: Synthetic oligonucleotide
ucggucugggaccugugcc

SEQ ID NO: 2258116 - RNA, 19 nt, Artificial Sequence
  Description of Artificial Sequence: Synthetic oligonucleotide
ggaauauguccauuugcag

SEQ ID NO: 2258117 - RNA, 19 nt, Artificial Sequence
  Description of Artificial Sequence: Synthetic oligonucleotide
gauugcagcucggucagcc

SEQ ID NO: 2258118 - RNA, 19 nt, Artificial Sequence
  Description of Artificial Sequence: Synthetic oligonucleotide
cuucucuugguuuccccgc

SEQ ID NO: 2258119 - RNA, 19 nt, Artificial Sequence
  Description of Artificial Sequence: Synthetic oligonucleotide
gaggccgauacucgcagcc

SEQ ID NO: 2258120 - RNA, 19 nt, Artificial Sequence
  Description of Artificial Sequence: Synthetic oligonucleotide
agcuggaacagguaagaaa

SEQ ID NO: 2258121 - RNA, 19 nt, Artificial Sequence
  Description of Artificial Sequence: Synthetic oligonucleotide
ugccacuugcacaugccca

SEQ ID NO: 2258122 - RNA, 19 nt, Artificial Sequence
  Description of Artificial Sequence: Synthetic oligonucleotide
agauuaccacccaugaucu

SEQ ID NO: 2258123 - RNA, 19 nt, Artificial Sequence
  Description of Artificial Sequence: Synthetic oligonucleotide
ugaucugccaguggaauau

SEQ ID NO: 2258124 - RNA, 19 nt, Artificial Sequence
  Description of Artificial Sequence: Synthetic oligonucleotide
ugugccacuugcacaugcc

SEQ ID NO: 2258125 - RNA, 19 nt, Artificial Sequence
  Description of Artificial Sequence: Synthetic oligonucleotide
agacccuccaccgugucuc

SEQ ID NO: 2258126 - RNA, 19 nt, Artificial Sequence
  Description of Artificial Sequence: Synthetic oligonucleotide
ccaguaugaacguagccag

SEQ ID NO: 2258127 - RNA, 19 nt, Artificial Sequence
  Description of Artificial Sequence: Synthetic oligonucleotide
ucggccgccucgaagcccg

SEQ ID NO: 2258128 - RNA, 19 nt, Artificial Sequence
  Description of Artificial Sequence: Synthetic oligonucleotide
gguaagaaaaguccagcuc

SEQ ID NO: 2258129 - RNA, 19 nt, Artificial Sequence
  Description of Artificial Sequence: Synthetic oligonucleotide
ucagauuaccacccaugau

SEQ ID NO: 2258130 - RNA, 19 nt, Artificial Sequence
  Description of Artificial Sequence: Synthetic oligonucleotide
agucccacgagguucuccu

SEQ ID NO: 2258131 - RNA, 19 nt, Artificial Sequence
  Description of Artificial Sequence: Synthetic oligonucleotide
ucccaguaugaacguagcc

SEQ ID NO: 2258132 - RNA, 19 nt, Artificial Sequence
  Description of Artificial Sequence: Synthetic oligonucleotide
ucucuugguuuccccgcgg

SEQ ID NO: 2258133 - RNA, 19 nt, Artificial Sequence
  Description of Artificial Sequence: Synthetic oligonucleotide
cucgccagcgccuggggcg

SEQ ID NO: 2258134 - RNA, 19 nt, Artificial Sequence
  Description of Artificial Sequence: Synthetic oligonucleotide
auugggucucccaaccuuc

SEQ ID NO: 2258135 - RNA, 19 nt, Artificial Sequence
  Description of Artificial Sequence: Synthetic oligonucleotide
aguugaagauugggucucc

SEQ ID NO: 2258136 - RNA, 19 nt, Artificial Sequence
  Description of Artificial Sequence: Synthetic oligonucleotide
accugugccacuugcacau

SEQ ID NO: 2258137 - RNA, 19 nt, Artificial Sequence
  Description of Artificial Sequence: Synthetic oligonucleotide
auucgaguguuaaugggcu

SEQ ID NO: 2258138 - RNA, 19 nt, Artificial Sequence
  Description of Artificial Sequence: Synthetic oligonucleotide
gucuccucgaggccgauac

SEQ ID NO: 2258139 - RNA, 19 nt, Artificial Sequence
  Description of Artificial Sequence: Synthetic oligonucleotide
ugcaagauggcugccgccu

SEQ ID NO: 2258140 - RNA, 19 nt, Artificial Sequence
  Description of Artificial Sequence: Synthetic oligonucleotide
uuuaacggucagugugucu

SEQ ID NO: 2258141 - RNA, 19 nt, Artificial Sequence
  Description of Artificial Sequence: Synthetic oligonucleotide
cuuggauugcagcucgguc

SEQ ID NO: 2258142 - RNA, 19 nt, Artificial Sequence
  Description of Artificial Sequence: Synthetic oligonucleotide
guuaaugggcuccagcagu

SEQ ID NO: 2258143 - RNA, 19 nt, Artificial Sequence
  Description of Artificial Sequence: Synthetic oligonucleotide
ggaacagguaagaaaaguc

SEQ ID NO: 2258144 - RNA, 19 nt, Artificial Sequence
  Description of Artificial Sequence: Synthetic oligonucleotide
gcccacaaauccuugguag

SEQ ID NO: 2258145 - RNA, 19 nt, Artificial Sequence
  Description of Artificial Sequence: Synthetic oligonucleotide
cagcucagacccuccaccg

SEQ ID NO: 2258146 - RNA, 19 nt, Artificial Sequence
  Description of Artificial Sequence: Synthetic oligonucleotide
ucccacgagguucuccuga

SEQ ID NO: 2258147 - RNA, 19 nt, Artificial Sequence
  Description of Artificial Sequence: Synthetic oligonucleotide
gcuggaacagguaagaaaa

SEQ ID NO: 2258148 - RNA, 19 nt, Artificial Sequence
  Description of Artificial Sequence: Synthetic oligonucleotide
uaauucagaggaggggccu

SEQ ID NO: 2258149 - RNA, 19 nt, Artificial Sequence
  Description of Artificial Sequence: Synthetic oligonucleotide
ucugucccaguaugaacgu

SEQ ID NO: 2258150 - RNA, 19 nt, Artificial Sequence
  Description of Artificial Sequence: Synthetic oligonucleotide
uuuuaacggucaguguguc

SEQ ID NO: 2258151 - RNA, 19 nt, Artificial Sequence
  Description of Artificial Sequence: Synthetic oligonucleotide
gauuaccacccaugaucug

SEQ ID NO: 2258152 - RNA, 19 nt, Artificial Sequence
  Description of Artificial Sequence: Synthetic oligonucleotide
caguaugaacguagccagc

SEQ ID NO: 2258153 - RNA, 19 nt, Artificial Sequence
  Description of Artificial Sequence: Synthetic oligonucleotide
cugucuccaucucaccuug

SEQ ID NO: 2258154 - RNA, 19 nt, Artificial Sequence
  Description of Artificial Sequence: Synthetic oligonucleotide
auuugcaguugaagauugg

SEQ ID NO: 2258155 - RNA, 19 nt, Artificial Sequence
  Description of Artificial Sequence: Synthetic oligonucleotide
acaaauccuugguagccuu

SEQ ID NO: 2258156 - RNA, 19 nt, Artificial Sequence
  Description of Artificial Sequence: Synthetic oligonucleotide
guguagaaccuuacuggcc

SEQ ID NO: 2258157 - RNA, 19 nt, Artificial Sequence
  Description of Artificial Sequence: Synthetic oligonucleotide
aauccuugguagccuucau

SEQ ID NO: 2258158 - RNA, 19 nt, Artificial Sequence
  Description of Artificial Sequence: Synthetic oligonucleotide
cugugccacuugcacaugc

SEQ ID NO: 2258159 - RNA, 19 nt, Artificial Sequence
  Description of Artificial Sequence: Synthetic oligonucleotide
cuccagaacugccuggcuc

SEQ ID NO: 2258160 - RNA, 19 nt, Artificial Sequence
  Description of Artificial Sequence: Synthetic oligonucleotide
guacggccaggccaccucg

SEQ ID NO: 2258161 - RNA, 19 nt, Artificial Sequence
  Description of Artificial Sequence: Synthetic oligonucleotide
augaacguagccagcucag

SEQ ID NO: 2258162 - RNA, 19 nt, Artificial Sequence
  Description of Artificial Sequence: Synthetic oligonucleotide
gacccuugcccgcugcccc

SEQ ID NO: 2258163 - RNA, 19 nt, Artificial Sequence
  Description of Artificial Sequence: Synthetic oligonucleotide
caugcagguacuguguaga

SEQ ID NO: 2258164 - RNA, 19 nt, Artificial Sequence
  Description of Artificial Sequence: Synthetic oligonucleotide
uccgugauucgaguguuaa

SEQ ID NO: 2258165 - RNA, 19 nt, Artificial Sequence
  Description of Artificial Sequence: Synthetic oligonucleotide
gauacucgcagcccacaaa

SEQ ID NO: 2258166 - RNA, 19 nt, Artificial Sequence
  Description of Artificial Sequence: Synthetic oligonucleotide
ugcagguacuguguagaac

SEQ ID NO: 2258167 - RNA, 19 nt, Artificial Sequence
  Description of Artificial Sequence: Synthetic oligonucleotide
ugcccaacaaugggcagga

SEQ ID NO: 2258168 - RNA, 19 nt, Artificial Sequence
  Description of Artificial Sequence: Synthetic oligonucleotide
cgugauucgaguguuaaug

SEQ ID NO: 2258169 - RNA, 19 nt, Artificial Sequence
  Description of Artificial Sequence: Synthetic oligonucleotide
agauugggucucccaaccu

SEQ ID NO: 2258170 - RNA, 19 nt, Artificial Sequence
  Description of Artificial Sequence: Synthetic oligonucleotide
ccuucucuugguuuccccg

SEQ ID NO: 2258171 - RNA, 19 nt, Artificial Sequence
  Description of Artificial Sequence: Synthetic oligonucleotide
acgagguucuccugagcca

SEQ ID NO: 2258172 - RNA, 19 nt, Artificial Sequence
  Description of Artificial Sequence: Synthetic oligonucleotide
agcagcuggaacagguaag

SEQ ID NO: 2258173 - RNA, 19 nt, Artificial Sequence
  Description of Artificial Sequence: Synthetic oligonucleotide
agaaccuuacuggccuguc

SEQ ID NO: 2258174 - RNA, 19 nt, Artificial Sequence
  Description of Artificial Sequence: Synthetic oligonucleotide
ugggcaggaacucccugau

SEQ ID NO: 2258175 - RNA, 19 nt, Artificial Sequence
  Description of Artificial Sequence: Synthetic oligonucleotide
ucaccuuggauugcagcuc

SEQ ID NO: 2258176 - RNA, 19 nt, Artificial Sequence
  Description of Artificial Sequence: Synthetic oligonucleotide
uucgaguguuaaugggcuc

SEQ ID NO: 2258177 - RNA, 19 nt, Artificial Sequence
  Description of Artificial Sequence: Synthetic oligonucleotide
acccaugaucugccagugg

SEQ ID NO: 2258178 - RNA, 19 nt, Artificial Sequence
  Description of Artificial Sequence: Synthetic oligonucleotide
augaucugccaguggaaua

SEQ ID NO: 2258179 - RNA, 19 nt, Artificial Sequence
  Description of Artificial Sequence: Synthetic oligonucleotide
aggccgauacucgcagccc

SEQ ID NO: 2258180 - RNA, 19 nt, Artificial Sequence
  Description of Artificial Sequence: Synthetic oligonucleotide
guagaaccuuacuggccug

SEQ ID NO: 2258181 - RNA, 19 nt, Artificial Sequence
  Description of Artificial Sequence: Synthetic oligonucleotide
gagcuccgggaacagccag

SEQ ID NO: 2258182 - RNA, 19 nt, Artificial Sequence
  Description of Artificial Sequence: Synthetic oligonucleotide
ugaacguagccagcucaga

SEQ ID NO: 2258183 - RNA, 19 nt, Artificial Sequence
  Description of Artificial Sequence: Synthetic oligonucleotide
ggccucaggacccuugccc

SEQ ID NO: 2258184 - RNA, 19 nt, Artificial Sequence
  Description of Artificial Sequence: Synthetic oligonucleotide
guaugaacguagccagcuc

SEQ ID NO: 2258185 - RNA, 19 nt, Artificial Sequence
  Description of Artificial Sequence: Synthetic oligonucleotide
gggucucccaaccuucugc

SEQ ID NO: 2258186 - RNA, 19 nt, Artificial Sequence
  Description of Artificial Sequence: Synthetic oligonucleotide
caguugaagauugggucuc

SEQ ID NO: 2258187 - RNA, 19 nt, Artificial Sequence
  Description of Artificial Sequence: Synthetic oligonucleotide
ugggucucccaaccuucug

SEQ ID NO: 2258188 - RNA, 19 nt, Artificial Sequence
  Description of Artificial Sequence: Synthetic oligonucleotide
agugugucuuuaauucaga

SEQ ID NO: 2258189 - RNA, 19 nt, Artificial Sequence
  Description of Artificial Sequence: Synthetic oligonucleotide
gcagcccacaaauccuugg

SEQ ID NO: 2258190 - RNA, 19 nt, Artificial Sequence
  Description of Artificial Sequence: Synthetic oligonucleotide
cucggucugggaccugugc

SEQ ID NO: 2258191 - RNA, 19 nt, Artificial Sequence
  Description of Artificial Sequence: Synthetic oligonucleotide
agguggauccuggggcagc

SEQ ID NO: 2258192 - RNA, 19 nt, Artificial Sequence
  Description of Artificial Sequence: Synthetic oligonucleotide
uacucgcagcccacaaauc

SEQ ID NO: 2258193 - RNA, 19 nt, Artificial Sequence
  Description of Artificial Sequence: Synthetic oligonucleotide
cccaacaaugggcaggaac

SEQ ID NO: 2258194 - RNA, 19 nt, Artificial Sequence
  Description of Artificial Sequence: Synthetic oligonucleotide
cugcaagauggcugccgcc

SEQ ID NO: 2258195 - RNA, 19 nt, Artificial Sequence
  Description of Artificial Sequence: Synthetic oligonucleotide
cuccucgaggccgauacuc

SEQ ID NO: 2258196 - RNA, 19 nt, Artificial Sequence
  Description of Artificial Sequence: Synthetic oligonucleotide
guuugcugucagauuacca

SEQ ID NO: 2258197 - RNA, 19 nt, Artificial Sequence
  Description of Artificial Sequence: Synthetic oligonucleotide
ggaccugugccacuugcac

SEQ ID NO: 2258198 - RNA, 19 nt, Artificial Sequence
  Description of Artificial Sequence: Synthetic oligonucleotide
caacaaugggcaggaacuc

SEQ ID NO: 2258199 - RNA, 19 nt, Artificial Sequence
  Description of Artificial Sequence: Synthetic oligonucleotide
gguguauccaggaaguacu

SEQ ID NO: 2258200 - RNA, 19 nt, Artificial Sequence
  Description of Artificial Sequence: Synthetic oligonucleotide
guguauccaggaaguacug

SEQ ID NO: 2258201 - RNA, 19 nt, Artificial Sequence
  Description of Artificial Sequence: Synthetic oligonucleotide
ccaacaaugggcaggaacu

SEQ ID NO: 2258202 - RNA, 19 nt, Artificial Sequence
  Description of Artificial Sequence: Synthetic oligonucleotide
ccagcucagacccuccacc

SEQ ID NO: 2258203 - RNA, 19 nt, Artificial Sequence
  Description of Artificial Sequence: Synthetic oligonucleotide
agcccacaaauccuuggua

SEQ ID NO: 2258204 - RNA, 19 nt, Artificial Sequence
  Description of Artificial Sequence: Synthetic oligonucleotide
ccgggaacagccaggacac

SEQ ID NO: 2258205 - RNA, 19 nt, Artificial Sequence
  Description of Artificial Sequence: Synthetic oligonucleotide
uuuccccgcggcguguuga

SEQ ID NO: 2258206 - RNA, 19 nt, Artificial Sequence
  Description of Artificial Sequence: Synthetic oligonucleotide
gcucagacccuccaccgug

SEQ ID NO: 2258207 - RNA, 19 nt, Artificial Sequence
  Description of Artificial Sequence: Synthetic oligonucleotide
ggguguauccaggaaguac

SEQ ID NO: 2258208 - RNA, 19 nt, Artificial Sequence
  Description of Artificial Sequence: Synthetic oligonucleotide
aaaaccccagcugcauauu

SEQ ID NO: 2258209 - RNA, 19 nt, Artificial Sequence
  Description of Artificial Sequence: Synthetic oligonucleotide
ggaacucccugauguuugc

SEQ ID NO: 2258210 - RNA, 19 nt, Artificial Sequence
  Description of Artificial Sequence: Synthetic oligonucleotide
augcagguacuguguagaa

SEQ ID NO: 2258211 - RNA, 19 nt, Artificial Sequence
  Description of Artificial Sequence: Synthetic oligonucleotide
guacuguguagaaccuuac

SEQ ID NO: 2258212 - RNA, 19 nt, Artificial Sequence
  Description of Artificial Sequence: Synthetic oligonucleotide
uagccagcucagacccucc

SEQ ID NO: 2258213 - RNA, 19 nt, Artificial Sequence
  Description of Artificial Sequence: Synthetic oligonucleotide
cuugcccgcugccccagag

SEQ ID NO: 2258214 - RNA, 19 nt, Artificial Sequence
  Description of Artificial Sequence: Synthetic oligonucleotide
caaaaccccagcugcauau

SEQ ID NO: 2258215 - RNA, 19 nt, Artificial Sequence
  Description of Artificial Sequence: Synthetic oligonucleotide
cccaguaugaacguagcca

SEQ ID NO: 2258216 - RNA, 19 nt, Artificial Sequence
  Description of Artificial Sequence: Synthetic oligonucleotide
gaaggccgccugucucccg

SEQ ID NO: 2258217 - RNA, 19 nt, Artificial Sequence
  Description of Artificial Sequence: Synthetic oligonucleotide
gcaguugaagauugggucu

SEQ ID NO: 2258218 - RNA, 19 nt, Artificial Sequence
  Description of Artificial Sequence: Synthetic oligonucleotide
ucucccggggacagcccca

SEQ ID NO: 2258219 - RNA, 19 nt, Artificial Sequence
  Description of Artificial Sequence: Synthetic oligonucleotide
cucccugauguuugcuguc

SEQ ID NO: 2258220 - RNA, 19 nt, Artificial Sequence
  Description of Artificial Sequence: Synthetic oligonucleotide
ccagcucuccagaacugcc

SEQ ID NO: 2258221 - RNA, 19 nt, Artificial Sequence
  Description of Artificial Sequence: Synthetic oligonucleotide
acguuggccgagaagcgca

SEQ ID NO: 2258222 - RNA, 19 nt, Artificial Sequence
  Description of Artificial Sequence: Synthetic oligonucleotide
agagcagcaugcagguacu

SEQ ID NO: 2258223 - RNA, 19 nt, Artificial Sequence
  Description of Artificial Sequence: Synthetic oligonucleotide
gguacuguguagaaccuua

SEQ ID NO: 2258224 - RNA, 19 nt, Artificial Sequence
  Description of Artificial Sequence: Synthetic oligonucleotide
gaaccuuacuggccugucu

SEQ ID NO: 2258225 - RNA, 19 nt, Artificial Sequence
  Description of Artificial Sequence: Synthetic oligonucleotide
agccccucucggaaggccg

SEQ ID NO: 2258226 - RNA, 19 nt, Artificial Sequence
  Description of Artificial Sequence: Synthetic oligonucleotide
ugucucccggggacagccc

SEQ ID NO: 2258227 - RNA, 19 nt, Artificial Sequence
  Description of Artificial Sequence: Synthetic oligonucleotide
agcccgcacggcccgcggc

SEQ ID NO: 2258228 - RNA, 19 nt, Artificial Sequence
  Description of Artificial Sequence: Synthetic oligonucleotide
ggucucccaaccuucugca

SEQ ID NO: 2258229 - RNA, 19 nt, Artificial Sequence
  Description of Artificial Sequence: Synthetic oligonucleotide
aucugccaguggaauaugu

SEQ ID NO: 2258230 - RNA, 19 nt, Artificial Sequence
  Description of Artificial Sequence: Synthetic oligonucleotide
agcagucccacgagguucu

SEQ ID NO: 2258231 - RNA, 19 nt, Artificial Sequence
  Description of Artificial Sequence: Synthetic oligonucleotide
gaagcccgcacggcccgcg

SEQ ID NO: 2258232 - RNA, 19 nt, Artificial Sequence
  Description of Artificial Sequence: Synthetic oligonucleotide
cucgaggccgauacucgca

SEQ ID NO: 2258233 - RNA, 19 nt, Artificial Sequence
  Description of Artificial Sequence: Synthetic oligonucleotide
aacggucagugugucuuua

SEQ ID NO: 2258234 - RNA, 19 nt, Artificial Sequence
  Description of Artificial Sequence: Synthetic oligonucleotide
gguucuccugagccaaaac

SEQ ID NO: 2258235 - RNA, 19 nt, Artificial Sequence
  Description of Artificial Sequence: Synthetic oligonucleotide
acggucagugugucuuuaa

SEQ ID NO: 2258236 - RNA, 19 nt, Artificial Sequence
  Description of Artificial Sequence: Synthetic oligonucleotide
ggacacguuggccgagaag

SEQ ID NO: 2258237 - RNA, 19 nt, Artificial Sequence
  Description of Artificial Sequence: Synthetic oligonucleotide
caucucaccuuggauugca

SEQ ID NO: 2258238 - RNA, 19 nt, Artificial Sequence
  Description of Artificial Sequence: Synthetic oligonucleotide
cguguugaugagcaccagc

SEQ ID NO: 2258239 - RNA, 19 nt, Artificial Sequence
  Description of Artificial Sequence: Synthetic oligonucleotide
ucgccagcgccuggggcgg

SEQ ID NO: 2258240 - RNA, 19 nt, Artificial Sequence
  Description of Artificial Sequence: Synthetic oligonucleotide
ucucggaaggccgccuguc

SEQ ID NO: 2258241 - RNA, 19 nt, Artificial Sequence
  Description of Artificial Sequence: Synthetic oligonucleotide
cacuugcacaugcccaaca

SEQ ID NO: 2258242 - RNA, 19 nt, Artificial Sequence
  Description of Artificial Sequence: Synthetic oligonucleotide
cuagcagcuggaacaggua

SEQ ID NO: 2258243 - RNA, 19 nt, Artificial Sequence
  Description of Artificial Sequence: Synthetic oligonucleotide
cucgcagcccacaaauccu

SEQ ID NO: 2258244 - RNA, 19 nt, Artificial Sequence
  Description of Artificial Sequence: Synthetic oligonucleotide
ccucgaagcccgcacggcc

SEQ ID NO: 2258245 - RNA, 19 nt, Artificial Sequence
  Description of Artificial Sequence: Synthetic oligonucleotide
ccggggacagccccaagcc

SEQ ID NO: 2258246 - RNA, 19 nt, Artificial Sequence
  Description of Artificial Sequence: Synthetic oligonucleotide
cucggcguacggccaggcc

SEQ ID NO: 2258247 - RNA, 19 nt, Artificial Sequence
  Description of Artificial Sequence: Synthetic oligonucleotide
uggggcacucggccagcca

SEQ ID NO: 2258248 - RNA, 19 nt, Artificial Sequence
  Description of Artificial Sequence: Synthetic oligonucleotide
cuucugcaagauggcugcc

SEQ ID NO: 2258249 - RNA, 19 nt, Artificial Sequence
  Description of Artificial Sequence: Synthetic oligonucleotide
ugccccagagcagcaugca

SEQ ID NO: 2258250 - RNA, 19 nt, Artificial Sequence
  Description of Artificial Sequence: Synthetic oligonucleotide
ggcguguugaugagcacca

SEQ ID NO: 2258251 - RNA, 19 nt, Artificial Sequence
  Description of Artificial Sequence: Synthetic oligonucleotide
ccagcugcauauuucaggu

SEQ ID NO: 2258252 - RNA, 19 nt, Artificial Sequence
  Description of Artificial Sequence: Synthetic oligonucleotide
caccucggccgccucgaag

SEQ ID NO: 2258253 - RNA, 19 nt, Artificial Sequence
  Description of Artificial Sequence: Synthetic oligonucleotide
aggacacguuggccgagaa

SEQ ID NO: 2258254 - RNA, 19 nt, Artificial Sequence
  Description of Artificial Sequence: Synthetic oligonucleotide
gcuccccucggucugggac

SEQ ID NO: 2258255 - RNA, 19 nt, Artificial Sequence
  Description of Artificial Sequence: Synthetic oligonucleotide
caguggaauauguccauuu

SEQ ID NO: 2258256 - RNA, 19 nt, Artificial Sequence
  Description of Artificial Sequence: Synthetic oligonucleotide
cagucccacgagguucucc

SEQ ID NO: 2258257 - RNA, 19 nt, Artificial Sequence
  Description of Artificial Sequence: Synthetic oligonucleotide
ccucgaggccgauacucgc

SEQ ID NO: 2258258 - RNA, 19 nt, Artificial Sequence
  Description of Artificial Sequence: Synthetic oligonucleotide
cuugguuuccccgcggcgu

SEQ ID NO: 2258259 - RNA, 19 nt, Artificial Sequence
  Description of Artificial Sequence: Synthetic oligonucleotide
uggggcggcucggcguacg

SEQ ID NO: 2258260 - RNA, 19 nt, Artificial Sequence
  Description of Artificial Sequence: Synthetic oligonucleotide
gccacuugcacaugcccaa

SEQ ID NO: 2258261 - RNA, 19 nt, Artificial Sequence
  Description of Artificial Sequence: Synthetic oligonucleotide
ggucagugugucuuuaauu

SEQ ID NO: 2258262 - RNA, 19 nt, Artificial Sequence
  Description of Artificial Sequence: Synthetic oligonucleotide
auguccauuugcaguugaa

SEQ ID NO: 2258263 - RNA, 19 nt, Artificial Sequence
  Description of Artificial Sequence: Synthetic oligonucleotide
accuuggauugcagcucgg

SEQ ID NO: 2258264 - RNA, 19 nt, Artificial Sequence
  Description of Artificial Sequence: Synthetic oligonucleotide
cgagaagcgcagcggagcc

SEQ ID NO: 2258265 - RNA, 19 nt, Artificial Sequence
  Description of Artificial Sequence: Synthetic oligonucleotide
aggccgccugucucccggg

SEQ ID NO: 2258266 - RNA, 19 nt, Artificial Sequence
  Description of Artificial Sequence: Synthetic oligonucleotide
ggccgauacucgcagccca

SEQ ID NO: 2258267 - RNA, 19 nt, Artificial Sequence
  Description of Artificial Sequence: Synthetic oligonucleotide
gaacugccuggcuccccuc

SEQ ID NO: 2258268 - RNA, 19 nt, Artificial Sequence
  Description of Artificial Sequence: Synthetic oligonucleotide
cuuggggcacucggccagc

SEQ ID NO: 2258269 - RNA, 19 nt, Artificial Sequence
  Description of Artificial Sequence: Synthetic oligonucleotide
ccgugucuccucgaggccg

SEQ ID NO: 2258270 - RNA, 19 nt, Artificial Sequence
  Description of Artificial Sequence: Synthetic oligonucleotide
cagguggauccuggggcag

SEQ ID NO: 2258271 - RNA, 19 nt, Artificial Sequence
  Description of Artificial Sequence: Synthetic oligonucleotide
caugaucugccaguggaau

SEQ ID NO: 2258272 - RNA, 19 nt, Artificial Sequence
  Description of Artificial Sequence: Synthetic oligonucleotide
gucccacgagguucuccug

SEQ ID NO: 2258273 - RNA, 19 nt, Artificial Sequence
  Description of Artificial Sequence: Synthetic oligonucleotide
ggccgagaagcgcagcgga

SEQ ID NO: 2258274 - RNA, 19 nt, Artificial Sequence
  Description of Artificial Sequence: Synthetic oligonucleotide
guuuccccgcggcguguug

SEQ ID NO: 2258275 - RNA, 19 nt, Artificial Sequence
  Description of Artificial Sequence: Synthetic oligonucleotide
cgucugucccaguaugaac

SEQ ID NO: 2258276 - RNA, 19 nt, Artificial Sequence
  Description of Artificial Sequence: Synthetic oligonucleotide
ccaccgugucuccucgagg

SEQ ID NO: 2258277 - RNA, 19 nt, Artificial Sequence
  Description of Artificial Sequence: Synthetic oligonucleotide
uuccccgcggcguguugau

SEQ ID NO: 2258278 - RNA, 19 nt, Artificial Sequence
  Description of Artificial Sequence: Synthetic oligonucleotide
cagguacuguguagaaccu

SEQ ID NO: 2258279 - RNA, 19 nt, Artificial Sequence
  Description of Artificial Sequence: Synthetic oligonucleotide
cucggccgccucgaagccc

SEQ ID NO: 2258280 - RNA, 19 nt, Artificial Sequence
  Description of Artificial Sequence: Synthetic oligonucleotide
ccuuacuggccugucugug

SEQ ID NO: 2258281 - RNA, 19 nt, Artificial Sequence
  Description of Artificial Sequence: Synthetic oligonucleotide
cagcccacaaauccuuggu

SEQ ID NO: 2258282 - RNA, 19 nt, Artificial Sequence
  Description of Artificial Sequence: Synthetic oligonucleotide
ucccggggacagccccaag

SEQ ID NO: 2258283 - RNA, 19 nt, Artificial Sequence
  Description of Artificial Sequence: Synthetic oligonucleotide
gucucccaaccuucugcaa

SEQ ID NO: 2258284 - RNA, 19 nt, Artificial Sequence
  Description of Artificial Sequence: Synthetic oligonucleotide
cagcucuccagaacugccu

SEQ ID NO: 2258285 - RNA, 19 nt, Artificial Sequence
  Description of Artificial Sequence: Synthetic oligonucleotide
ggaaggccgccugucuccc

SEQ ID NO: 2258286 - RNA, 19 nt, Artificial Sequence
  Description of Artificial Sequence: Synthetic oligonucleotide
ccucaggacccuugcccgc

SEQ ID NO: 2258287 - RNA, 19 nt, Artificial Sequence
  Description of Artificial Sequence: Synthetic oligonucleotide
caaugggcaggaacucccu

SEQ ID NO: 2258288 - RNA, 19 nt, Artificial Sequence
  Description of Artificial Sequence: Synthetic oligonucleotide
ugguuuccccgcggcgugu

SEQ ID NO: 2258289 - RNA, 19 nt, Artificial Sequence
  Description of Artificial Sequence: Synthetic oligonucleotide
ggacccuugcccgcugccc

SEQ ID NO: 2258290 - RNA, 19 nt, Artificial Sequence
  Description of Artificial Sequence: Synthetic oligonucleotide
guggccccgucugucccag

SEQ ID NO: 2258291 - RNA, 19 nt, Artificial Sequence
  Description of Artificial Sequence: Synthetic oligonucleotide
gaacucccugauguuugcu

SEQ ID NO: 2258292 - RNA, 19 nt, Artificial Sequence
  Description of Artificial Sequence: Synthetic oligonucleotide
cggcguguugaugagcacc

SEQ ID NO: 2258293 - RNA, 19 nt, Artificial Sequence
  Description of Artificial Sequence: Synthetic oligonucleotide
cuccgggaacagccaggac

SEQ ID NO: 2258294 - RNA, 19 nt, Artificial Sequence
  Description of Artificial Sequence: Synthetic oligonucleotide
gggaacagccaggacacgu

SEQ ID NO: 2258295 - RNA, 19 nt, Artificial Sequence
  Description of Artificial Sequence: Synthetic oligonucleotide
ugucuccucgaggccgaua

SEQ ID NO: 2258296 - RNA, 19 nt, Artificial Sequence
  Description of Artificial Sequence: Synthetic oligonucleotide
gcuccgggaacagccagga

SEQ ID NO: 2258297 - RNA, 19 nt, Artificial Sequence
  Description of Artificial Sequence: Synthetic oligonucleotide
gccgccucgaagcccgcac

SEQ ID NO: 2258298 - RNA, 19 nt, Artificial Sequence
  Description of Artificial Sequence: Synthetic oligonucleotide
ccaugaucugccaguggaa

SEQ ID NO: 2258299 - RNA, 19 nt, Artificial Sequence
  Description of Artificial Sequence: Synthetic oligonucleotide
ggggcggcucggcguacgg

SEQ ID NO: 2258300 - RNA, 19 nt, Artificial Sequence
  Description of Artificial Sequence: Synthetic oligonucleotide
gcugcauauuucagguucu

SEQ ID NO: 2258301 - RNA, 19 nt, Artificial Sequence
  Description of Artificial Sequence: Synthetic oligonucleotide
cgcggcguguugaugagca

SEQ ID NO: 2258302 - RNA, 19 nt, Artificial Sequence
  Description of Artificial Sequence: Synthetic oligonucleotide
ccgccucgaagcccgcacg

SEQ ID NO: 2258303 - RNA, 19 nt, Artificial Sequence
  Description of Artificial Sequence: Synthetic oligonucleotide
gucuguggguggccccguc

SEQ ID NO: 2258304 - RNA, 19 nt, Artificial Sequence
  Description of Artificial Sequence: Synthetic oligonucleotide
uccccgcggcguguugaug

SEQ ID NO: 2258305 - RNA, 19 nt, Artificial Sequence
  Description of Artificial Sequence: Synthetic oligonucleotide
ccaucucaccuuggauugc

SEQ ID NO: 2258306 - RNA, 19 nt, Artificial Sequence
  Description of Artificial Sequence: Synthetic oligonucleotide
gagguucuccugagccaaa

SEQ ID NO: 2258307 - RNA, 19 nt, Artificial Sequence
  Description of Artificial Sequence: Synthetic oligonucleotide
ccccgcggcguguugauga

SEQ ID NO: 2258308 - RNA, 19 nt, Artificial Sequence
  Description of Artificial Sequence: Synthetic oligonucleotide
ccgccugucucccggggac

SEQ ID NO: 2258309 - RNA, 19 nt, Artificial Sequence
  Description of Artificial Sequence: Synthetic oligonucleotide
ggagcuccgggaacagcca

SEQ ID NO: 2258310 - RNA, 19 nt, Artificial Sequence
  Description of Artificial Sequence: Synthetic oligonucleotide
cgccucgaagcccgcacgg

SEQ ID NO: 2258311 - RNA, 19 nt, Artificial Sequence
  Description of Artificial Sequence: Synthetic oligonucleotide
ccucucggaaggccgccug

SEQ ID NO: 2258312 - RNA, 19 nt, Artificial Sequence
  Description of Artificial Sequence: Synthetic oligonucleotide
cguuggccgagaagcgcag

SEQ ID NO: 2258313 - RNA, 19 nt, Artificial Sequence
  Description of Artificial Sequence: Synthetic oligonucleotide
gcccgcacggcccgcggcc

SEQ ID NO: 2258314 - RNA, 19 nt, Artificial Sequence
  Description of Artificial Sequence: Synthetic oligonucleotide
ucagccccuuggggcacuc

SEQ ID NO: 2258315 - RNA, 19 nt, Artificial Sequence
  Description of Artificial Sequence: Synthetic oligonucleotide
gccaguggaauauguccau

SEQ ID NO: 2258316 - RNA, 19 nt, Artificial Sequence
  Description of Artificial Sequence: Synthetic oligonucleotide
gccgauacucgcagcccac

SEQ ID NO: 2258317 - RNA, 19 nt, Artificial Sequence
  Description of Artificial Sequence: Synthetic oligonucleotide
gcguguugaugagcaccag

SEQ ID NO: 2258318 - RNA, 19 nt, Artificial Sequence
  Description of Artificial Sequence: Synthetic oligonucleotide
cggcguacggccaggccac

SEQ ID NO: 2258319 - RNA, 19 nt, Artificial Sequence
  Description of Artificial Sequence: Synthetic oligonucleotide
cagcgcucgccagcgccug

SEQ ID NO: 2258320 - RNA, 19 nt, Artificial Sequence
  Description of Artificial Sequence: Synthetic oligonucleotide
cccgcggcguguugaugag

SEQ ID NO: 2258321 - RNA, 19 nt, Artificial Sequence
  Description of Artificial Sequence: Synthetic oligonucleotide
cuccaccgugucuccucga

SEQ ID NO: 2258322 - RNA, 19 nt, Artificial Sequence
  Description of Artificial Sequence: Synthetic oligonucleotide
ggcucggcguacggccagg

SEQ ID NO: 2258323 - RNA, 19 nt, Artificial Sequence
  Description of Artificial Sequence: Synthetic oligonucleotide
cugucccaguaugaacgua

SEQ ID NO: 2258324 - RNA, 19 nt, Artificial Sequence
  Description of Artificial Sequence: Synthetic oligonucleotide
ccaaaaccccagcugcaua

SEQ ID NO: 2258325 - RNA, 19 nt, Artificial Sequence
  Description of Artificial Sequence: Synthetic oligonucleotide
ggauugcagcucggucagc

SEQ ID NO: 2258326 - RNA, 19 nt, Artificial Sequence
  Description of Artificial Sequence: Synthetic oligonucleotide
cucaggacccuugcccgcu

SEQ ID NO: 2258327 - RNA, 19 nt, Artificial Sequence
  Description of Artificial Sequence: Synthetic oligonucleotide
ggccccgucugucccagua

SEQ ID NO: 2258328 - RNA, 19 nt, Artificial Sequence
  Description of Artificial Sequence: Synthetic oligonucleotide
ccauuugcaguugaagauu

SEQ ID NO: 2258329 - RNA, 19 nt, Artificial Sequence
  Description of Artificial Sequence: Synthetic oligonucleotide
ggaacagccaggacacguu

SEQ ID NO: 2258330 - RNA, 19 nt, Artificial Sequence
  Description of Artificial Sequence: Synthetic oligonucleotide
gcggcguguugaugagcac

SEQ ID NO: 2258331 - RNA, 19 nt, Artificial Sequence
  Description of Artificial Sequence: Synthetic oligonucleotide
cgcgcagcgcucgccagcg

SEQ ID NO: 2258332 - RNA, 19 nt, Artificial Sequence
  Description of Artificial Sequence: Synthetic oligonucleotide
ccuuggcguacagcacagc

SEQ ID NO: 2258333 - RNA, 19 nt, Artificial Sequence
  Description of Artificial Sequence: Synthetic oligonucleotide
cacggcccgcggccugcag

SEQ ID NO: 2258334 - RNA, 19 nt, Artificial Sequence
  Description of Artificial Sequence: Synthetic oligonucleotide
gucugggaccugugccacu

SEQ ID NO: 2258335 - RNA, 19 nt, Artificial Sequence
  Description of Artificial Sequence: Synthetic oligonucleotide
ccaggacacguuggccgag

SEQ ID NO: 2258336 - RNA, 19 nt, Artificial Sequence
  Description of Artificial Sequence: Synthetic oligonucleotide
gccgccugucucccgggga

SEQ ID NO: 2258337 - RNA, 19 nt, Artificial Sequence
  Description of Artificial Sequence: Synthetic oligonucleotide
ggucagccccuuggggcac

SEQ ID NO: 2258338 - RNA, 19 nt, Artificial Sequence
  Description of Artificial Sequence: Synthetic oligonucleotide
gcucggcguacggccaggc

SEQ ID NO: 2258339 - RNA, 19 nt, Artificial Sequence
  Description of Artificial Sequence: Synthetic oligonucleotide
gccaaaaccccagcugcau

SEQ ID NO: 2258340 - RNA, 19 nt, Artificial Sequence
  Description of Artificial Sequence: Synthetic oligonucleotide
cggccagccaucaggugga

SEQ ID NO: 2258341 - RNA, 19 nt, Artificial Sequence
  Description of Artificial Sequence: Synthetic oligonucleotide
gggguguauccaggaagua

SEQ ID NO: 2258342 - RNA, 19 nt, Artificial Sequence
  Description of Artificial Sequence: Synthetic oligonucleotide
cgaguguuaaugggcucca

SEQ ID NO: 2258343 - RNA, 19 nt, Artificial Sequence
  Description of Artificial Sequence: Synthetic oligonucleotide
gcccgcgcagcgcucgcca

SEQ ID NO: 2258344 - RNA, 19 nt, Artificial Sequence
  Description of Artificial Sequence: Synthetic oligonucleotide
cgauacucgcagcccacaa

SEQ ID NO: 2258345 - RNA, 19 nt, Artificial Sequence
  Description of Artificial Sequence: Synthetic oligonucleotide
cuggggcggcucggcguac

SEQ ID NO: 2258346 - RNA, 19 nt, Artificial Sequence
  Description of Artificial Sequence: Synthetic oligonucleotide
cucccggggacagccccaa

SEQ ID NO: 2258347 - RNA, 19 nt, Artificial Sequence
  Description of Artificial Sequence: Synthetic oligonucleotide
ccggggagcuccgggaaca

SEQ ID NO: 2258348 - RNA, 19 nt, Artificial Sequence
  Description of Artificial Sequence: Synthetic oligonucleotide
ccgauacucgcagcccaca

SEQ ID NO: 2258349 - RNA, 19 nt, Artificial Sequence
  Description of Artificial Sequence: Synthetic oligonucleotide
ccccucucggaaggccgcc

SEQ ID NO: 2258350 - RNA, 19 nt, Artificial Sequence
  Description of Artificial Sequence: Synthetic oligonucleotide
ccuuggauugcagcucggu

SEQ ID NO: 2258351 - RNA, 19 nt, Artificial Sequence
  Description of Artificial Sequence: Synthetic oligonucleotide
ggcguacggccaggccacc

SEQ ID NO: 2258352 - RNA, 19 nt, Artificial Sequence
  Description of Artificial Sequence: Synthetic oligonucleotide
ccgcggcguguugaugagc

SEQ ID NO: 2258353 - RNA, 19 nt, Artificial Sequence
  Description of Artificial Sequence: Synthetic oligonucleotide
ccuggggcggcucggcgua

SEQ ID NO: 2258354 - RNA, 19 nt, Artificial Sequence
  Description of Artificial Sequence: Synthetic oligonucleotide
ccgugauucgaguguuaau

SEQ ID NO: 2258355 - RNA, 19 nt, Artificial Sequence
  Description of Artificial Sequence: Synthetic oligonucleotide
gcggcucggcguacggcca

SEQ ID NO: 2258356 - RNA, 19 nt, Artificial Sequence
  Description of Artificial Sequence: Synthetic oligonucleotide
ggcccgcggccugcagccg

SEQ ID NO: 2258357 - RNA, 19 nt, Artificial Sequence
  Description of Artificial Sequence: Synthetic oligonucleotide
ggcuccccucggucuggga

SEQ ID NO: 2258358 - RNA, 19 nt, Artificial Sequence
  Description of Artificial Sequence: Synthetic oligonucleotide
cccuugcccgcugccccag

SEQ ID NO: 2258359 - RNA, 19 nt, Artificial Sequence
  Description of Artificial Sequence: Synthetic oligonucleotide
cggcucggcguacggccag

SEQ ID NO: 2258360 - RNA, 19 nt, Artificial Sequence
  Description of Artificial Sequence: Synthetic oligonucleotide
gcagcgcucgccagcgccu

SEQ ID NO: 2258361 - RNA, 19 nt, Artificial Sequence
  Description of Artificial Sequence: Synthetic oligonucleotide
gcgccuggggcggcucggc

SEQ ID NO: 2258362 - RNA, 19 nt, Artificial Sequence
  Description of Artificial Sequence: Synthetic oligonucleotide
gccccgucugucccaguau

SEQ ID NO: 2258363 - RNA, 19 nt, Artificial Sequence
  Description of Artificial Sequence: Synthetic oligonucleotide
ccagcagucccacgagguu

SEQ ID NO: 2258364 - RNA, 19 nt, Artificial Sequence
  Description of Artificial Sequence: Synthetic oligonucleotide
gcgcagcgcucgccagcgc

SEQ ID NO: 2258365 - RNA, 19 nt, Artificial Sequence
  Description of Artificial Sequence: Synthetic oligonucleotide
cugccgccugcuggggugu

SEQ ID NO: 2258366 - RNA, 19 nt, Artificial Sequence
  Description of Artificial Sequence: Synthetic oligonucleotide
ggccgccucgaagcccgca

SEQ ID NO: 2258367 - RNA, 19 nt, Artificial Sequence
  Description of Artificial Sequence: Synthetic oligonucleotide
ccgcacggcccgcggccug

SEQ ID NO: 2258368 - RNA, 19 nt, Artificial Sequence
  Description of Artificial Sequence: Synthetic oligonucleotide
gaggggccucaggacccuu

SEQ ID NO: 2258369 - RNA, 19 nt, Artificial Sequence
  Description of Artificial Sequence: Synthetic oligonucleotide
cgaagcccgcacggcccgc

SEQ ID NO: 2258370 - RNA, 19 nt, Artificial Sequence
  Description of Artificial Sequence: Synthetic oligonucleotide
gcguacggccaggccaccu

SEQ ID NO: 2258371 - RNA, 19 nt, Artificial Sequence
  Description of Artificial Sequence: Synthetic oligonucleotide
ccagagcagcaugcaggua

SEQ ID NO: 2258372 - RNA, 19 nt, Artificial Sequence
  Description of Artificial Sequence: Synthetic oligonucleotide
ccuugcccgcugccccaga

SEQ ID NO: 2258373 - RNA, 19 nt, Artificial Sequence
  Description of Artificial Sequence: Synthetic oligonucleotide
gcacggcccgcggccugca

SEQ ID NO: 2258374 - RNA, 19 nt, Artificial Sequence
  Description of Artificial Sequence: Synthetic oligonucleotide
cgccugucucccggggaca

SEQ ID NO: 2258375 - RNA, 19 nt, Artificial Sequence
  Description of Artificial Sequence: Synthetic oligonucleotide
ggacagccccaagccccau

SEQ ID NO: 2258376 - RNA, 19 nt, Artificial Sequence
  Description of Artificial Sequence: Synthetic oligonucleotide
cggccgccucgaagcccgc

SEQ ID NO: 2258377 - RNA, 19 nt, Artificial Sequence
  Description of Artificial Sequence: Synthetic oligonucleotide
gccgccugcugggguguau

SEQ ID NO: 2258378 - RNA, 19 nt, Artificial Sequence
  Description of Artificial Sequence: Synthetic oligonucleotide
ccccucggucugggaccug

SEQ ID NO: 2258379 - RNA, 19 nt, Artificial Sequence
  Description of Artificial Sequence: Synthetic oligonucleotide
ccgcggccugcagccgcuc

SEQ ID NO: 2258380 - RNA, 19 nt, Artificial Sequence
  Description of Artificial Sequence: Synthetic oligonucleotide
cccgcacggcccgcggccu

SEQ ID NO: 2258381 - RNA, 19 nt, Artificial Sequence
  Description of Artificial Sequence: Synthetic oligonucleotide
uguauaguaaguaggauag

SEQ ID NO: 2258382 - RNA, 19 nt, Artificial Sequence
  Description of Artificial Sequence: Synthetic oligonucleotide
augaagucgacacacagac

SEQ ID NO: 2258383 - RNA, 19 nt, Artificial Sequence
  Description of Artificial Sequence: Synthetic oligonucleotide
agagaagaagaccaugugc

SEQ ID NO: 2258384 - RNA, 19 nt, Artificial Sequence
  Description of Artificial Sequence: Synthetic oligonucleotide
gaugacacaaaguccaccg

SEQ ID NO: 2258385 - RNA, 19 nt, Artificial Sequence
  Description of Artificial Sequence: Synthetic oligonucleotide
uaucggaucacaaugcagc

SEQ ID NO: 2258386 - RNA, 19 nt, Artificial Sequence
  Description of Artificial Sequence: Synthetic oligonucleotide
uaccauacguuccacaucc

SEQ ID NO: 2258387 - RNA, 19 nt, Artificial Sequence
  Description of Artificial Sequence: Synthetic oligonucleotide
uuuugcaugaagucgacac

SEQ ID NO: 2258388 - RNA, 19 nt, Artificial Sequence
  Description of Artificial Sequence: Synthetic oligonucleotide
acuccagcagggcugaucc

SEQ ID NO: 2258389 - RNA, 19 nt, Artificial Sequence
  Description of Artificial Sequence: Synthetic oligonucleotide
aaugcagccccuuuuguga

SEQ ID NO: 2258390 - RNA, 19 nt, Artificial Sequence
  Description of Artificial Sequence: Synthetic oligonucleotide
ugggccaucacacgaaggg

SEQ ID NO: 2258391 - RNA, 19 nt, Artificial Sequence
  Description of Artificial Sequence: Synthetic oligonucleotide
uuuuccagcacguagcggu

SEQ ID NO: 2258392 - RNA, 19 nt, Artificial Sequence
  Description of Artificial Sequence: Synthetic oligonucleotide
aaucucguagucaaagagg

SEQ ID NO: 2258393 - RNA, 19 nt, Artificial Sequence
  Description of Artificial Sequence: Synthetic oligonucleotide
auuacugaagacauggaag

SEQ ID NO: 2258394 - RNA, 19 nt, Artificial Sequence
  Description of Artificial Sequence: Synthetic oligonucleotide
gacuuguauaguaaguagg

SEQ ID NO: 2258395 - RNA, 19 nt, Artificial Sequence
  Description of Artificial Sequence: Synthetic oligonucleotide
uauuucugaagcaggaccu

SEQ ID NO: 2258396 - RNA, 19 nt, Artificial Sequence
  Description of Artificial Sequence: Synthetic oligonucleotide
aacaggacuaccaccaagg

SEQ ID NO: 2258397 - RNA, 19 nt, Artificial Sequence
  Description of Artificial Sequence: Synthetic oligonucleotide
ugcccaaggauucagagaa

SEQ ID NO: 2258398 - RNA, 19 nt, Artificial Sequence
  Description of Artificial Sequence: Synthetic oligonucleotide
aaggauucagagaagaaga

SEQ ID NO: 2258399 - RNA, 19 nt, Artificial Sequence
  Description of Artificial Sequence: Synthetic oligonucleotide
ugcaacaggacuaccacca

SEQ ID NO: 2258400 - RNA, 19 nt, Artificial Sequence
  Description of Artificial Sequence: Synthetic oligonucleotide
accacugucaaacacggug

SEQ ID NO: 2258401 - RNA, 19 nt, Artificial Sequence
  Description of Artificial Sequence: Synthetic oligonucleotide
agugcaacaggacuaccac

SEQ ID NO: 2258402 - RNA, 19 nt, Artificial Sequence
  Description of Artificial Sequence: Synthetic oligonucleotide
gacacacagacuuguauag

SEQ ID NO: 2258403 - RNA, 19 nt, Artificial Sequence
  Description of Artificial Sequence: Synthetic oligonucleotide
ugacacaaaguccaccgag

SEQ ID NO: 2258404 - RNA, 19 nt, Artificial Sequence
  Description of Artificial Sequence: Synthetic oligonucleotide
uacuagguugcuaucacca

SEQ ID NO: 2258405 - RNA, 19 nt, Artificial Sequence
  Description of Artificial Sequence: Synthetic oligonucleotide
agagguagagcucaggcca

SEQ ID NO: 2258406 - RNA, 19 nt, Artificial Sequence
  Description of Artificial Sequence: Synthetic oligonucleotide
uuguauaguaaguaggaua

SEQ ID NO: 2258407 - RNA, 19 nt, Artificial Sequence
  Description of Artificial Sequence: Synthetic oligonucleotide
aaagaggagcucgagcaac

SEQ ID NO: 2258408 - RNA, 19 nt, Artificial Sequence
  Description of Artificial Sequence: Synthetic oligonucleotide
caagagaaucaccacaggc

SEQ ID NO: 2258409 - RNA, 19 nt, Artificial Sequence
  Description of Artificial Sequence: Synthetic oligonucleotide
auacguuccacaucccugg

SEQ ID NO: 2258410 - RNA, 19 nt, Artificial Sequence
  Description of Artificial Sequence: Synthetic oligonucleotide
ugagacuaccucaucagcu

SEQ ID NO: 2258411 - RNA, 19 nt, Artificial Sequence
  Description of Artificial Sequence: Synthetic oligonucleotide
aauccagcucggccgaggc

SEQ ID NO: 2258412 - RNA, 19 nt, Artificial Sequence
  Description of Artificial Sequence: Synthetic oligonucleotide
cuguaauccagcucggccg

SEQ ID NO: 2258413 - RNA, 19 nt, Artificial Sequence
  Description of Artificial Sequence: Synthetic oligonucleotide
uauaguaaguaggauaguc

SEQ ID NO: 2258414 - RNA, 19 nt, Artificial Sequence
  Description of Artificial Sequence: Synthetic oligonucleotide
uagcgguagagcaugacgc

SEQ ID NO: 2258415 - RNA, 19 nt, Artificial Sequence
  Description of Artificial Sequence: Synthetic oligonucleotide
agguucuugucccugcagc

SEQ ID NO: 2258416 - RNA, 19 nt, Artificial Sequence
  Description of Artificial Sequence: Synthetic oligonucleotide
ugauagauggcgcuauacu

SEQ ID NO: 2258417 - RNA, 19 nt, Artificial Sequence
  Description of Artificial Sequence: Synthetic oligonucleotide
aucggaucacaaugcagcc

SEQ ID NO: 2258418 - RNA, 19 nt, Artificial Sequence
  Description of Artificial Sequence: Synthetic oligonucleotide
aguaggauagucacggagg

SEQ ID NO: 2258419 - RNA, 19 nt, Artificial Sequence
  Description of Artificial Sequence: Synthetic oligonucleotide
gaugcccaaggauucagag

SEQ ID NO: 2258420 - RNA, 19 nt, Artificial Sequence
  Description of Artificial Sequence: Synthetic oligonucleotide
cucguagucaaagaggagc

SEQ ID NO: 2258421 - RNA, 19 nt, Artificial Sequence
  Description of Artificial Sequence: Synthetic oligonucleotide
caaucucguagucaaagag

SEQ ID NO: 2258422 - RNA, 19 nt, Artificial Sequence
  Description of Artificial Sequence: Synthetic oligonucleotide
ucugacuccagcagggcug

SEQ ID NO: 2258423 - RNA, 19 nt, Artificial Sequence
  Description of Artificial Sequence: Synthetic oligonucleotide
uguaucggaucacaaugca

SEQ ID NO: 2258424 - RNA, 19 nt, Artificial Sequence
  Description of Artificial Sequence: Synthetic oligonucleotide
guagagguagagcucaggc

SEQ ID NO: 2258425 - RNA, 19 nt, Artificial Sequence
  Description of Artificial Sequence: Synthetic oligonucleotide
uuuugugauagauggcgcu

SEQ ID NO: 2258426 - RNA, 19 nt, Artificial Sequence
  Description of Artificial Sequence: Synthetic oligonucleotide
gauggcgcuauacuuggcc

SEQ ID NO: 2258427 - RNA, 19 nt, Artificial Sequence
  Description of Artificial Sequence: Synthetic oligonucleotide
uuugcaugaagucgacaca

SEQ ID NO: 2258428 - RNA, 19 nt, Artificial Sequence
  Description of Artificial Sequence: Synthetic oligonucleotide
cuagguugcuaucaccagg

SEQ ID NO: 2258429 - RNA, 19 nt, Artificial Sequence
  Description of Artificial Sequence: Synthetic oligonucleotide
gaagacauggaagagcaga

SEQ ID NO: 2258430 - RNA, 19 nt, Artificial Sequence
  Description of Artificial Sequence: Synthetic oligonucleotide
ugacaugcgccgaugacac

SEQ ID NO: 2258431 - RNA, 19 nt, Artificial Sequence
  Description of Artificial Sequence: Synthetic oligonucleotide
ugaagcaggaccucagcac

SEQ ID NO: 2258432 - RNA, 19 nt, Artificial Sequence
  Description of Artificial Sequence: Synthetic oligonucleotide
cuuuugugauagauggcgc

SEQ ID NO: 2258433 - RNA, 19 nt, Artificial Sequence
  Description of Artificial Sequence: Synthetic oligonucleotide
ucguagucaaagaggagcu

SEQ ID NO: 2258434 - RNA, 19 nt, Artificial Sequence
  Description of Artificial Sequence: Synthetic oligonucleotide
acaggacuaccaccaaggc

SEQ ID NO: 2258435 - RNA, 19 nt, Artificial Sequence
  Description of Artificial Sequence: Synthetic oligonucleotide
aggacuaccaccaaggcaa

SEQ ID NO: 2258436 - RNA, 19 nt, Artificial Sequence
  Description of Artificial Sequence: Synthetic oligonucleotide
aaggcaaaagccacuagga

SEQ ID NO: 2258437 - RNA, 19 nt, Artificial Sequence
  Description of Artificial Sequence: Synthetic oligonucleotide
agcgguagagcaugacgcc

SEQ ID NO: 2258438 - RNA, 19 nt, Artificial Sequence
  Description of Artificial Sequence: Synthetic oligonucleotide
cugaagacauggaagagca

SEQ ID NO: 2258439 - RNA, 19 nt, Artificial Sequence
  Description of Artificial Sequence: Synthetic oligonucleotide
ggcaaaagccacuaggagc

SEQ ID NO: 2258440 - RNA, 19 nt, Artificial Sequence
  Description of Artificial Sequence: Synthetic oligonucleotide
uagagguagagcucaggcc

SEQ ID NO: 2258441 - RNA, 19 nt, Artificial Sequence
  Description of Artificial Sequence: Synthetic oligonucleotide
ucucgaugcuguaauccag

SEQ ID NO: 2258442 - RNA, 19 nt, Artificial Sequence
  Description of Artificial Sequence: Synthetic oligonucleotide
guggcggaagcgcugaugg

SEQ ID NO: 2258443 - RNA, 19 nt, Artificial Sequence
  Description of Artificial Sequence: Synthetic oligonucleotide
uaccaccaaggcaaaagcc

SEQ ID NO: 2258444 - RNA, 19 nt, Artificial Sequence
  Description of Artificial Sequence: Synthetic oligonucleotide
cacagacuuguauaguaag

SEQ ID NO: 2258445 - RNA, 19 nt, Artificial Sequence
  Description of Artificial Sequence: Synthetic oligonucleotide
acuaccaccaaggcaaaag

SEQ ID NO: 2258446 - RNA, 19 nt, Artificial Sequence
  Description of Artificial Sequence: Synthetic oligonucleotide
uguaauccagcucggccga

SEQ ID NO: 2258447 - RNA, 19 nt, Artificial Sequence
  Description of Artificial Sequence: Synthetic oligonucleotide
acuuguauaguaaguagga

SEQ ID NO: 2258448 - RNA, 19 nt, Artificial Sequence
  Description of Artificial Sequence: Synthetic oligonucleotide
aguuucaccucgccuggac

SEQ ID NO: 2258449 - RNA, 19 nt, Artificial Sequence
  Description of Artificial Sequence: Synthetic oligonucleotide
aagagggcagugaacgggg

SEQ ID NO: 2258450 - RNA, 19 nt, Artificial Sequence
  Description of Artificial Sequence: Synthetic oligonucleotide
cuaccaccaaggcaaaagc

SEQ ID NO: 2258451 - RNA, 19 nt, Artificial Sequence
  Description of Artificial Sequence: Synthetic oligonucleotide
aguaaguaggauagucacg

SEQ ID NO: 2258452 - RNA, 19 nt, Artificial Sequence
  Description of Artificial Sequence: Synthetic oligonucleotide
uugcaugaagucgacacac

SEQ ID NO: 2258453 - RNA, 19 nt, Artificial Sequence
  Description of Artificial Sequence: Synthetic oligonucleotide
aggaccucagcacuggaca

SEQ ID NO: 2258454 - RNA, 19 nt, Artificial Sequence
  Description of Artificial Sequence: Synthetic oligonucleotide
cucgaugcuguaauccagc

SEQ ID NO: 2258455 - RNA, 19 nt, Artificial Sequence
  Description of Artificial Sequence: Synthetic oligonucleotide
aggaccacugucaaacacg

SEQ ID NO: 2258456 - RNA, 19 nt, Artificial Sequence
  Description of Artificial Sequence: Synthetic oligonucleotide
ucggccgaggccaugguga

SEQ ID NO: 2258457 - RNA, 19 nt, Artificial Sequence
  Description of Artificial Sequence: Synthetic oligonucleotide
cucccucucaaucucguag

SEQ ID NO: 2258458 - RNA, 19 nt, Artificial Sequence
  Description of Artificial Sequence: Synthetic oligonucleotide
gagacuaccucaucagcuc

SEQ ID NO: 2258459 - RNA, 19 nt, Artificial Sequence
  Description of Artificial Sequence: Synthetic oligonucleotide
aucucguagucaaagagga

SEQ ID NO: 2258460 - RNA, 19 nt, Artificial Sequence
  Description of Artificial Sequence: Synthetic oligonucleotide
aucucgaugcuguaaucca

SEQ ID NO: 2258461 - RNA, 19 nt, Artificial Sequence
  Description of Artificial Sequence: Synthetic oligonucleotide
uccgggaucucgaugcugu

SEQ ID NO: 2258462 - RNA, 19 nt, Artificial Sequence
  Description of Artificial Sequence: Synthetic oligonucleotide
aaguccaccgagcgcacca

SEQ ID NO: 2258463 - RNA, 19 nt, Artificial Sequence
  Description of Artificial Sequence: Synthetic oligonucleotide
agaagaagaccaugugcca

SEQ ID NO: 2258464 - RNA, 19 nt, Artificial Sequence
  Description of Artificial Sequence: Synthetic oligonucleotide
acacgaagggaggggaugc

SEQ ID NO: 2258465 - RNA, 19 nt, Artificial Sequence
  Description of Artificial Sequence: Synthetic oligonucleotide
ucgacacacagacuuguau

SEQ ID NO: 2258466 - RNA, 19 nt, Artificial Sequence
  Description of Artificial Sequence: Synthetic oligonucleotide
cuacuagguugcuaucacc

SEQ ID NO: 2258467 - RNA, 19 nt, Artificial Sequence
  Description of Artificial Sequence: Synthetic oligonucleotide
ucugggccaucacacgaag

SEQ ID NO: 2258468 - RNA, 19 nt, Artificial Sequence
  Description of Artificial Sequence: Synthetic oligonucleotide
ucucguagucaaagaggag

SEQ ID NO: 2258469 - RNA, 19 nt, Artificial Sequence
  Description of Artificial Sequence: Synthetic oligonucleotide
cacuaggagcaacaggcgc

SEQ ID NO: 2258470 - RNA, 19 nt, Artificial Sequence
  Description of Artificial Sequence: Synthetic oligonucleotide
aacggggaaagcaggaagu

SEQ ID NO: 2258471 - RNA, 19 nt, Artificial Sequence
  Description of Artificial Sequence: Synthetic oligonucleotide
agccacuaggagcaacagg

SEQ ID NO: 2258472 - RNA, 19 nt, Artificial Sequence
  Description of Artificial Sequence: Synthetic oligonucleotide
agcccaagagaaucaccac

SEQ ID NO: 2258473 - RNA, 19 nt, Artificial Sequence
  Description of Artificial Sequence: Synthetic oligonucleotide
ugaugggucuggaggagcu

SEQ ID NO: 2258474 - RNA, 19 nt, Artificial Sequence
  Description of Artificial Sequence: Synthetic oligonucleotide
caaugcagccccuuuugug

SEQ ID NO: 2258475 - RNA, 19 nt, Artificial Sequence
  Description of Artificial Sequence: Synthetic oligonucleotide
acuggacacaguuuugcau

SEQ ID NO: 2258476 - RNA, 19 nt, Artificial Sequence
  Description of Artificial Sequence: Synthetic oligonucleotide
auagucacggagguggcug

SEQ ID NO: 2258477 - RNA, 19 nt, Artificial Sequence
  Description of Artificial Sequence: Synthetic oligonucleotide
uucccaucauggcaggggu

SEQ ID NO: 2258478 - RNA, 19 nt, Artificial Sequence
  Description of Artificial Sequence: Synthetic oligonucleotide
cauuacugaagacauggaa

SEQ ID NO: 2258479 - RNA, 19 nt, Artificial Sequence
  Description of Artificial Sequence: Synthetic oligonucleotide
cugagacuaccucaucagc

SEQ ID NO: 2258480 - RNA, 19 nt, Artificial Sequence
  Description of Artificial Sequence: Synthetic oligonucleotide
agcaugacgccgccauuac

SEQ ID NO: 2258481 - RNA, 19 nt, Artificial Sequence
  Description of Artificial Sequence: Synthetic oligonucleotide
aggcgcagcacaguaggcc

SEQ ID NO: 2258482 - RNA, 19 nt, Artificial Sequence
  Description of Artificial Sequence: Synthetic oligonucleotide
gucagcacgggccuccugc

SEQ ID NO: 2258483 - RNA, 19 nt, Artificial Sequence
  Description of Artificial Sequence: Synthetic oligonucleotide
gguugcuaucaccaggacc

SEQ ID NO: 2258484 - RNA, 19 nt, Artificial Sequence
  Description of Artificial Sequence: Synthetic oligonucleotide
ugcaugaagucgacacaca

SEQ ID NO: 2258485 - RNA, 19 nt, Artificial Sequence
  Description of Artificial Sequence: Synthetic oligonucleotide
gagcucgagcaacuucugg

SEQ ID NO: 2258486 - RNA, 19 nt, Artificial Sequence
  Description of Artificial Sequence: Synthetic oligonucleotide
cagagaagaagaccaugug

SEQ ID NO: 2258487 - RNA, 19 nt, Artificial Sequence
  Description of Artificial Sequence: Synthetic oligonucleotide
ucccucucaaucucguagu

SEQ ID NO: 2258488 - RNA, 19 nt, Artificial Sequence
  Description of Artificial Sequence: Synthetic oligonucleotide
gcaaaagccacuaggagca

SEQ ID NO: 2258489 - RNA, 19 nt, Artificial Sequence
  Description of Artificial Sequence: Synthetic oligonucleotide
guaucggaucacaaugcag

SEQ ID NO: 2258490 - RNA, 19 nt, Artificial Sequence
  Description of Artificial Sequence: Synthetic oligonucleotide
guguaucggaucacaaugc

SEQ ID NO: 2258491 - RNA, 19 nt, Artificial Sequence
  Description of Artificial Sequence: Synthetic oligonucleotide
caacaggacuaccaccaag

SEQ ID NO: 2258492 - RNA, 19 nt, Artificial Sequence
  Description of Artificial Sequence: Synthetic oligonucleotide
uucuugucccugcagccuc

SEQ ID NO: 2258493 - RNA, 19 nt, Artificial Sequence
  Description of Artificial Sequence: Synthetic oligonucleotide
gcugagacuaccucaucag

SEQ ID NO: 2258494 - RNA, 19 nt, Artificial Sequence
  Description of Artificial Sequence: Synthetic oligonucleotide
uggcgcuauacuuggccag

SEQ ID NO: 2258495 - RNA, 19 nt, Artificial Sequence
  Description of Artificial Sequence: Synthetic oligonucleotide
gcuguaauccagcucggcc

SEQ ID NO: 2258496 - RNA, 19 nt, Artificial Sequence
  Description of Artificial Sequence: Synthetic oligonucleotide
gaccaugugccagggagcc

SEQ ID NO: 2258497 - RNA, 19 nt, Artificial Sequence
  Description of Artificial Sequence: Synthetic oligonucleotide
uuugugauagauggcgcua

SEQ ID NO: 2258498 - RNA, 19 nt, Artificial Sequence
  Description of Artificial Sequence: Synthetic oligonucleotide
guuucaccucgccuggacc

SEQ ID NO: 2258499 - RNA, 19 nt, Artificial Sequence
  Description of Artificial Sequence: Synthetic oligonucleotide
gacgccgccauuacugaag

SEQ ID NO: 2258500 - RNA, 19 nt, Artificial Sequence
  Description of Artificial Sequence: Synthetic oligonucleotide
agacuaccucaucagcucu

SEQ ID NO: 2258501 - RNA, 19 nt, Artificial Sequence
  Description of Artificial Sequence: Synthetic oligonucleotide
ugcgccgaugacacaaagu

SEQ ID NO: 2258502 - RNA, 19 nt, Artificial Sequence
  Description of Artificial Sequence: Synthetic oligonucleotide
auggcgcuauacuuggcca

SEQ ID NO: 2258503 - RNA, 19 nt, Artificial Sequence
  Description of Artificial Sequence: Synthetic oligonucleotide
acuaggagcaacaggcgca

SEQ ID NO: 2258504 - RNA, 19 nt, Artificial Sequence
  Description of Artificial Sequence: Synthetic oligonucleotide
ggauucagagaagaagacc

SEQ ID NO: 2258505 - RNA, 19 nt, Artificial Sequence
  Description of Artificial Sequence: Synthetic oligonucleotide
agcacaguaggccggcgcu

SEQ ID NO: 2258506 - RNA, 19 nt, Artificial Sequence
  Description of Artificial Sequence: Synthetic oligonucleotide
gaagcaggaccucagcacu

SEQ ID NO: 2258507 - RNA, 19 nt, Artificial Sequence
  Description of Artificial Sequence: Synthetic oligonucleotide
ucacaaugcagccccuuuu

SEQ ID NO: 2258508 - RNA, 19 nt, Artificial Sequence
  Description of Artificial Sequence: Synthetic oligonucleotide
aguaggccggcgcuccagg

SEQ ID NO: 2258509 - RNA, 19 nt, Artificial Sequence
  Description of Artificial Sequence: Synthetic oligonucleotide
ugaagucgacacacagacu

SEQ ID NO: 2258510 - RNA, 19 nt, Artificial Sequence
  Description of Artificial Sequence: Synthetic oligonucleotide
uaauccagcucggccgagg

SEQ ID NO: 2258511 - RNA, 19 nt, Artificial Sequence
  Description of Artificial Sequence: Synthetic oligonucleotide
gcuauacuuggccagguuc

SEQ ID NO: 2258512 - RNA, 19 nt, Artificial Sequence
  Description of Artificial Sequence: Synthetic oligonucleotide
auggaagagcagaggcucc

SEQ ID NO: 2258513 - RNA, 19 nt, Artificial Sequence
  Description of Artificial Sequence: Synthetic oligonucleotide
ucacggagguggcugacau

SEQ ID NO: 2258514 - RNA, 19 nt, Artificial Sequence
  Description of Artificial Sequence: Synthetic oligonucleotide
acaaugcagccccuuuugu

SEQ ID NO: 2258515 - RNA, 19 nt, Artificial Sequence
  Description of Artificial Sequence: Synthetic oligonucleotide
ggcgcagcacaguaggccg

SEQ ID NO: 2258516 - RNA, 19 nt, Artificial Sequence
  Description of Artificial Sequence: Synthetic oligonucleotide
gugcaacaggacuaccacc

SEQ ID NO: 2258517 - RNA, 19 nt, Artificial Sequence
  Description of Artificial Sequence: Synthetic oligonucleotide
cguguaucggaucacaaug

SEQ ID NO: 2258518 - RNA, 19 nt, Artificial Sequence
  Description of Artificial Sequence: Synthetic oligonucleotide
gcgcugaugggucuggagg

SEQ ID NO: 2258519 - RNA, 19 nt, Artificial Sequence
  Description of Artificial Sequence: Synthetic oligonucleotide
augacacaaaguccaccga

SEQ ID NO: 2258520 - RNA, 19 nt, Artificial Sequence
  Description of Artificial Sequence: Synthetic oligonucleotide
aacaggcgcagcacaguag

SEQ ID NO: 2258521 - RNA, 19 nt, Artificial Sequence
  Description of Artificial Sequence: Synthetic oligonucleotide
cacacagacuuguauagua

SEQ ID NO: 2258522 - RNA, 19 nt, Artificial Sequence
  Description of Artificial Sequence: Synthetic oligonucleotide
aagccacuaggagcaacag

SEQ ID NO: 2258523 - RNA, 19 nt, Artificial Sequence
  Description of Artificial Sequence: Synthetic oligonucleotide
uucugggccaucacacgaa

SEQ ID NO: 2258524 - RNA, 19 nt, Artificial Sequence
  Description of Artificial Sequence: Synthetic oligonucleotide
ucaucagcucuggaguaga

SEQ ID NO: 2258525 - RNA, 19 nt, Artificial Sequence
  Description of Artificial Sequence: Synthetic oligonucleotide
caucacacgaagggagggg

SEQ ID NO: 2258526 - RNA, 19 nt, Artificial Sequence
  Description of Artificial Sequence: Synthetic oligonucleotide
ucuugucccugcagccucc

SEQ ID NO: 2258527 - RNA, 19 nt, Artificial Sequence
  Description of Artificial Sequence: Synthetic oligonucleotide
gcgccgaugacacaaaguc

SEQ ID NO: 2258528 - RNA, 19 nt, Artificial Sequence
  Description of Artificial Sequence: Synthetic oligonucleotide
ucggaucacaaugcagccc

SEQ ID NO: 2258529 - RNA, 19 nt, Artificial Sequence
  Description of Artificial Sequence: Synthetic oligonucleotide
uggaagagcagaggcuccc

SEQ ID NO: 2258530 - RNA, 19 nt, Artificial Sequence
  Description of Artificial Sequence: Synthetic oligonucleotide
caccgagcgcaccaggacc

SEQ ID NO: 2258531 - RNA, 19 nt, Artificial Sequence
  Description of Artificial Sequence: Synthetic oligonucleotide
cuauacuuggccagguucu

SEQ ID NO: 2258532 - RNA, 19 nt, Artificial Sequence
  Description of Artificial Sequence: Synthetic oligonucleotide
gcguuuauuucugaagcag

SEQ ID NO: 2258533 - RNA, 19 nt, Artificial Sequence
  Description of Artificial Sequence: Synthetic oligonucleotide
aagucgacacacagacuug

SEQ ID NO: 2258534 - RNA, 19 nt, Artificial Sequence
  Description of Artificial Sequence: Synthetic oligonucleotide
caggaccacugucaaacac

SEQ ID NO: 2258535 - RNA, 19 nt, Artificial Sequence
  Description of Artificial Sequence: Synthetic oligonucleotide
aggggaugcccaaggauuc

SEQ ID NO: 2258536 - RNA, 19 nt, Artificial Sequence
  Description of Artificial Sequence: Synthetic oligonucleotide
cagggguucuucugacucc

SEQ ID NO: 2258537 - RNA, 19 nt, Artificial Sequence
  Description of Artificial Sequence: Synthetic oligonucleotide
acaucccuggcugagacua

SEQ ID NO: 2258538 - RNA, 19 nt, Artificial Sequence
  Description of Artificial Sequence: Synthetic oligonucleotide
cuaccauacguuccacauc

SEQ ID NO: 2258539 - RNA, 19 nt, Artificial Sequence
  Description of Artificial Sequence: Synthetic oligonucleotide
caugcagguggcggaagcg

SEQ ID NO: 2258540 - RNA, 19 nt, Artificial Sequence
  Description of Artificial Sequence: Synthetic oligonucleotide
acaugcgccgaugacacaa

SEQ ID NO: 2258541 - RNA, 19 nt, Artificial Sequence
  Description of Artificial Sequence: Synthetic oligonucleotide
gccagugggagccugaguc

SEQ ID NO: 2258542 - RNA, 19 nt, Artificial Sequence
  Description of Artificial Sequence: Synthetic oligonucleotide
ugugauagauggcgcuaua

SEQ ID NO: 2258543 - RNA, 19 nt, Artificial Sequence
  Description of Artificial Sequence: Synthetic oligonucleotide
gugauagauggcgcuauac

SEQ ID NO: 2258544 - RNA, 19 nt, Artificial Sequence
  Description of Artificial Sequence: Synthetic oligonucleotide
uacguuccacaucccuggc

SEQ ID NO: 2258545 - RNA, 19 nt, Artificial Sequence
  Description of Artificial Sequence: Synthetic oligonucleotide
caccacaugcagguggcgg

SEQ ID NO: 2258546 - RNA, 19 nt, Artificial Sequence
  Description of Artificial Sequence: Synthetic oligonucleotide
cacguagcgguagagcaug

SEQ ID NO: 2258547 - RNA, 19 nt, Artificial Sequence
  Description of Artificial Sequence: Synthetic oligonucleotide
agucgacacacagacuugu

SEQ ID NO: 2258548 - RNA, 19 nt, Artificial Sequence
  Description of Artificial Sequence: Synthetic oligonucleotide
agcgcugaugggucuggag

SEQ ID NO: 2258549 - RNA, 19 nt, Artificial Sequence
  Description of Artificial Sequence: Synthetic oligonucleotide
acauggaagagcagaggcu

SEQ ID NO: 2258550 - RNA, 19 nt, Artificial Sequence
  Description of Artificial Sequence: Synthetic oligonucleotide
gaagcgcugaugggucugg

SEQ ID NO: 2258551 - RNA, 19 nt, Artificial Sequence
  Description of Artificial Sequence: Synthetic oligonucleotide
aucacacgaagggagggga

SEQ ID NO: 2258552 - RNA, 19 nt, Artificial Sequence
  Description of Artificial Sequence: Synthetic oligonucleotide
aucacaaugcagccccuuu

SEQ ID NO: 2258553 - RNA, 19 nt, Artificial Sequence
  Description of Artificial Sequence: Synthetic oligonucleotide
uugugauagauggcgcuau

SEQ ID NO: 2258554 - RNA, 19 nt, Artificial Sequence
  Description of Artificial Sequence: Synthetic oligonucleotide
ugcccggcguuuauuucug

SEQ ID NO: 2258555 - RNA, 19 nt, Artificial Sequence
  Description of Artificial Sequence: Synthetic oligonucleotide
cugggccaucacacgaagg

SEQ ID NO: 2258556 - RNA, 19 nt, Artificial Sequence
  Description of Artificial Sequence: Synthetic oligonucleotide
gaggagcucgagcaacuuc

SEQ ID NO: 2258557 - RNA, 19 nt, Artificial Sequence
  Description of Artificial Sequence: Synthetic oligonucleotide
gcaguuucaccucgccugg

SEQ ID NO: 2258558 - RNA, 19 nt, Artificial Sequence
  Description of Artificial Sequence: Synthetic oligonucleotide
ugaacggggaaagcaggaa

SEQ ID NO: 2258559 - RNA, 19 nt, Artificial Sequence
  Description of Artificial Sequence: Synthetic oligonucleotide
gccgaugacacaaagucca

SEQ ID NO: 2258560 - RNA, 19 nt, Artificial Sequence
  Description of Artificial Sequence: Synthetic oligonucleotide
guaggauagucacggaggu

SEQ ID NO: 2258561 - RNA, 19 nt, Artificial Sequence
  Description of Artificial Sequence: Synthetic oligonucleotide
gcucgagcaacuucugggc

SEQ ID NO: 2258562 - RNA, 19 nt, Artificial Sequence
  Description of Artificial Sequence: Synthetic oligonucleotide
cugacaugcgccgaugaca

SEQ ID NO: 2258563 - RNA, 19 nt, Artificial Sequence
  Description of Artificial Sequence: Synthetic oligonucleotide
ggagccguguaucggauca

SEQ ID NO: 2258564 - RNA, 19 nt, Artificial Sequence
  Description of Artificial Sequence: Synthetic oligonucleotide
ugaguccugcagccuguca

SEQ ID NO: 2258565 - RNA, 19 nt, Artificial Sequence
  Description of Artificial Sequence: Synthetic oligonucleotide
agggccccuacuagguugc

SEQ ID NO: 2258566 - RNA, 19 nt, Artificial Sequence
  Description of Artificial Sequence: Synthetic oligonucleotide
cggaucacaaugcagcccc

SEQ ID NO: 2258567 - RNA, 19 nt, Artificial Sequence
  Description of Artificial Sequence: Synthetic oligonucleotide
gacuaccucaucagcucug

SEQ ID NO: 2258568 - RNA, 19 nt, Artificial Sequence
  Description of Artificial Sequence: Synthetic oligonucleotide
caucagcucuggaguagag

SEQ ID NO: 2258569 - RNA, 19 nt, Artificial Sequence
  Description of Artificial Sequence: Synthetic oligonucleotide
caggacuaccaccaaggca

SEQ ID NO: 2258570 - RNA, 19 nt, Artificial Sequence
  Description of Artificial Sequence: Synthetic oligonucleotide
gagcaacaggcgcagcaca

SEQ ID NO: 2258571 - RNA, 19 nt, Artificial Sequence
  Description of Artificial Sequence: Synthetic oligonucleotide
augcgccgaugacacaaag

SEQ ID NO: 2258572 - RNA, 19 nt, Artificial Sequence
  Description of Artificial Sequence: Synthetic oligonucleotide
uggcggaagcgcugauggg

SEQ ID NO: 2258573 - RNA, 19 nt, Artificial Sequence
  Description of Artificial Sequence: Synthetic oligonucleotide
ggccaucacacgaagggag

SEQ ID NO: 2258574 - RNA, 19 nt, Artificial Sequence
  Description of Artificial Sequence: Synthetic oligonucleotide
cugauccgggaucucgaug

SEQ ID NO: 2258575 - RNA, 19 nt, Artificial Sequence
  Description of Artificial Sequence: Synthetic oligonucleotide
ucacacgaagggaggggau

SEQ ID NO: 2258576 - RNA, 19 nt, Artificial Sequence
  Description of Artificial Sequence: Synthetic oligonucleotide
augauugccagggcccuca

SEQ ID NO: 2258577 - RNA, 19 nt, Artificial Sequence
  Description of Artificial Sequence: Synthetic oligonucleotide
aggccggcgcuccaggaug

SEQ ID NO: 2258578 - RNA, 19 nt, Artificial Sequence
  Description of Artificial Sequence: Synthetic oligonucleotide
cggcguuuauuucugaagc

SEQ ID NO: 2258579 - RNA, 19 nt, Artificial Sequence
  Description of Artificial Sequence: Synthetic oligonucleotide
ugauugccagggcccucag

SEQ ID NO: 2258580 - RNA, 19 nt, Artificial Sequence
  Description of Artificial Sequence: Synthetic oligonucleotide
acggggaaagcaggaagug

SEQ ID NO: 2258581 - RNA, 19 nt, Artificial Sequence
  Description of Artificial Sequence: Synthetic oligonucleotide
caggaagugcaacaggacu

SEQ ID NO: 2258582 - RNA, 19 nt, Artificial Sequence
  Description of Artificial Sequence: Synthetic oligonucleotide
ggucuggaggagcuuuucc

SEQ ID NO: 2258583 - RNA, 19 nt, Artificial Sequence
  Description of Artificial Sequence: Synthetic oligonucleotide
ggcguuuauuucugaagca

SEQ ID NO: 2258584 - RNA, 19 nt, Artificial Sequence
  Description of Artificial Sequence: Synthetic oligonucleotide
cacacgaagggaggggaug

SEQ ID NO: 2258585 - RNA, 19 nt, Artificial Sequence
  Description of Artificial Sequence: Synthetic oligonucleotide
cacaguaggccggcgcucc

SEQ ID NO: 2258586 - RNA, 19 nt, Artificial Sequence
  Description of Artificial Sequence: Synthetic oligonucleotide
gcagggguucuucugacuc

SEQ ID NO: 2258587 - RNA, 19 nt, Artificial Sequence
  Description of Artificial Sequence: Synthetic oligonucleotide
uggugagccaggcguuccu

SEQ ID NO: 2258588 - RNA, 19 nt, Artificial Sequence
  Description of Artificial Sequence: Synthetic oligonucleotide
acguuccacaucccuggcu

SEQ ID NO: 2258589 - RNA, 19 nt, Artificial Sequence
  Description of Artificial Sequence: Synthetic oligonucleotide
ccuacuagguugcuaucac

SEQ ID NO: 2258590 - RNA, 19 nt, Artificial Sequence
  Description of Artificial Sequence: Synthetic oligonucleotide
ucccuggcugagacuaccu

SEQ ID NO: 2258591 - RNA, 19 nt, Artificial Sequence
  Description of Artificial Sequence: Synthetic oligonucleotide
ggguucuucugacuccagc

SEQ ID NO: 2258592 - RNA, 19 nt, Artificial Sequence
  Description of Artificial Sequence: Synthetic oligonucleotide
accaaggcaaaagccacua

SEQ ID NO: 2258593 - RNA, 19 nt, Artificial Sequence
  Description of Artificial Sequence: Synthetic oligonucleotide
ggaagugcaacaggacuac

SEQ ID NO: 2258594 - RNA, 19 nt, Artificial Sequence
  Description of Artificial Sequence: Synthetic oligonucleotide
ccggcguuuauuucugaag

SEQ ID NO: 2258595 - RNA, 19 nt, Artificial Sequence
  Description of Artificial Sequence: Synthetic oligonucleotide
ucgccuggaccggacgccg

SEQ ID NO: 2258596 - RNA, 19 nt, Artificial Sequence
  Description of Artificial Sequence: Synthetic oligonucleotide
cuucugacuccagcagggc

SEQ ID NO: 2258597 - RNA, 19 nt, Artificial Sequence
  Description of Artificial Sequence: Synthetic oligonucleotide
accucgccuggaccggacg

SEQ ID NO: 2258598 - RNA, 19 nt, Artificial Sequence
  Description of Artificial Sequence: Synthetic oligonucleotide
accauacguuccacauccc

SEQ ID NO: 2258599 - RNA, 19 nt, Artificial Sequence
  Description of Artificial Sequence: Synthetic oligonucleotide
acgccgccauuacugaaga

SEQ ID NO: 2258600 - RNA, 19 nt, Artificial Sequence
  Description of Artificial Sequence: Synthetic oligonucleotide
agccccuuuugugauagau

SEQ ID NO: 2258601 - RNA, 19 nt, Artificial Sequence
  Description of Artificial Sequence: Synthetic oligonucleotide
ccaagagaaucaccacagg

SEQ ID NO: 2258602 - RNA, 19 nt, Artificial Sequence
  Description of Artificial Sequence: Synthetic oligonucleotide
agauggcgcuauacuuggc

SEQ ID NO: 2258603 - RNA, 19 nt, Artificial Sequence
  Description of Artificial Sequence: Synthetic oligonucleotide
gccgccauuacugaagaca

SEQ ID NO: 2258604 - RNA, 19 nt, Artificial Sequence
  Description of Artificial Sequence: Synthetic oligonucleotide
caaaguccaccgagcgcac

SEQ ID NO: 2258605 - RNA, 19 nt, Artificial Sequence
  Description of Artificial Sequence: Synthetic oligonucleotide
gccagggagccguguaucg

SEQ ID NO: 2258606 - RNA, 19 nt, Artificial Sequence
  Description of Artificial Sequence: Synthetic oligonucleotide
ccacuaggagcaacaggcg

SEQ ID NO: 2258607 - RNA, 19 nt, Artificial Sequence
  Description of Artificial Sequence: Synthetic oligonucleotide
agucacggagguggcugac

SEQ ID NO: 2258608 - RNA, 19 nt, Artificial Sequence
  Description of Artificial Sequence: Synthetic oligonucleotide
uaggccggcgcuccaggau

SEQ ID NO: 2258609 - RNA, 19 nt, Artificial Sequence
  Description of Artificial Sequence: Synthetic oligonucleotide
ggcgcuauacuuggccagg

SEQ ID NO: 2258610 - RNA, 19 nt, Artificial Sequence
  Description of Artificial Sequence: Synthetic oligonucleotide
ucgcuuccuggccuucuuc

SEQ ID NO: 2258611 - RNA, 19 nt, Artificial Sequence
  Description of Artificial Sequence: Synthetic oligonucleotide
ugcuaucaccaggaccacu

SEQ ID NO: 2258612 - RNA, 19 nt, Artificial Sequence
  Description of Artificial Sequence: Synthetic oligonucleotide
ccucagggccccuacuagg

SEQ ID NO: 2258613 - RNA, 19 nt, Artificial Sequence
  Description of Artificial Sequence: Synthetic oligonucleotide
augcagccccuuuugugau

SEQ ID NO: 2258614 - RNA, 19 nt, Artificial Sequence
  Description of Artificial Sequence: Synthetic oligonucleotide
gguagagcaugacgccgcc

SEQ ID NO: 2258615 - RNA, 19 nt, Artificial Sequence
  Description of Artificial Sequence: Synthetic oligonucleotide
caggcgcagcacaguaggc

SEQ ID NO: 2258616 - RNA, 19 nt, Artificial Sequence
  Description of Artificial Sequence: Synthetic oligonucleotide
gcucaggccagugggagcc

SEQ ID NO: 2258617 - RNA, 19 nt, Artificial Sequence
  Description of Artificial Sequence: Synthetic oligonucleotide
gccaucacacgaagggagg

SEQ ID NO: 2258618 - RNA, 19 nt, Artificial Sequence
  Description of Artificial Sequence: Synthetic oligonucleotide
gagcaugacgccgccauua

SEQ ID NO: 2258619 - RNA, 19 nt, Artificial Sequence
  Description of Artificial Sequence: Synthetic oligonucleotide
augcuguaauccagcucgg

SEQ ID NO: 2258620 - RNA, 19 nt, Artificial Sequence
  Description of Artificial Sequence: Synthetic oligonucleotide
gugaacggggaaagcagga

SEQ ID NO: 2258621 - RNA, 19 nt, Artificial Sequence
  Description of Artificial Sequence: Synthetic oligonucleotide
gaggggaugcccaaggauu

SEQ ID NO: 2258622 - RNA, 19 nt, Artificial Sequence
  Description of Artificial Sequence: Synthetic oligonucleotide
agcgcaccaggaccuggug

SEQ ID NO: 2258623 - RNA, 19 nt, Artificial Sequence
  Description of Artificial Sequence: Synthetic oligonucleotide
caggcguuccucuaccaua

SEQ ID NO: 2258624 - RNA, 19 nt, Artificial Sequence
  Description of Artificial Sequence: Synthetic oligonucleotide
gaccucagcacuggacaca

SEQ ID NO: 2258625 - RNA, 19 nt, Artificial Sequence
  Description of Artificial Sequence: Synthetic oligonucleotide
cuccagcagggcugauccg

SEQ ID NO: 2258626 - RNA, 19 nt, Artificial Sequence
  Description of Artificial Sequence: Synthetic oligonucleotide
cuggugagccaggcguucc

SEQ ID NO: 2258627 - RNA, 19 nt, Artificial Sequence
  Description of Artificial Sequence: Synthetic oligonucleotide
gccuucuucccaucauggc

SEQ ID NO: 2258628 - RNA, 19 nt, Artificial Sequence
  Description of Artificial Sequence: Synthetic oligonucleotide
agccguguaucggaucaca

SEQ ID NO: 2258629 - RNA, 19 nt, Artificial Sequence
  Description of Artificial Sequence: Synthetic oligonucleotide
accgagcgcaccaggaccu

SEQ ID NO: 2258630 - RNA, 19 nt, Artificial Sequence
  Description of Artificial Sequence: Synthetic oligonucleotide
ggaccuggugagccaggcg

SEQ ID NO: 2258631 - RNA, 19 nt, Artificial Sequence
  Description of Artificial Sequence: Synthetic oligonucleotide
ccaucacacgaagggaggg

SEQ ID NO: 2258632 - RNA, 19 nt, Artificial Sequence
  Description of Artificial Sequence: Synthetic oligonucleotide
gugggagccugaguccugc

SEQ ID NO: 2258633 - RNA, 19 nt, Artificial Sequence
  Description of Artificial Sequence: Synthetic oligonucleotide
cucggccgaggccauggug

SEQ ID NO: 2258634 - RNA, 19 nt, Artificial Sequence
  Description of Artificial Sequence: Synthetic oligonucleotide
gugcgggccgucagcacgg

SEQ ID NO: 2258635 - RNA, 19 nt, Artificial Sequence
  Description of Artificial Sequence: Synthetic oligonucleotide
augggucuggaggagcuuu

SEQ ID NO: 2258636 - RNA, 19 nt, Artificial Sequence
  Description of Artificial Sequence: Synthetic oligonucleotide
gcugacaugcgccgaugac

SEQ ID NO: 2258637 - RNA, 19 nt, Artificial Sequence
  Description of Artificial Sequence: Synthetic oligonucleotide
gaugauugccagggcccuc

SEQ ID NO: 2258638 - RNA, 19 nt, Artificial Sequence
  Description of Artificial Sequence: Synthetic oligonucleotide
acacggugcccaccacaug

SEQ ID NO: 2258639 - RNA, 19 nt, Artificial Sequence
  Description of Artificial Sequence: Synthetic oligonucleotide
ccugcaguuucaccucgcc

SEQ ID NO: 2258640 - RNA, 19 nt, Artificial Sequence
  Description of Artificial Sequence: Synthetic oligonucleotide
cacgaagggaggggaugcc

SEQ ID NO: 2258641 - RNA, 19 nt, Artificial Sequence
  Description of Artificial Sequence: Synthetic oligonucleotide
ggaucucgaugcuguaauc

SEQ ID NO: 2258642 - RNA, 19 nt, Artificial Sequence
  Description of Artificial Sequence: Synthetic oligonucleotide
cagcacgggccuccugccg

SEQ ID NO: 2258643 - RNA, 19 nt, Artificial Sequence
  Description of Artificial Sequence: Synthetic oligonucleotide
accaugugccagggagccg

SEQ ID NO: 2258644 - RNA, 19 nt, Artificial Sequence
  Description of Artificial Sequence: Synthetic oligonucleotide
caacaggcgcagcacagua

SEQ ID NO: 2258645 - RNA, 19 nt, Artificial Sequence
  Description of Artificial Sequence: Synthetic oligonucleotide
gugcccggcguuuauuucu

SEQ ID NO: 2258646 - RNA, 19 nt, Artificial Sequence
  Description of Artificial Sequence: Synthetic oligonucleotide
gggcagugaacggggaaag

SEQ ID NO: 2258647 - RNA, 19 nt, Artificial Sequence
  Description of Artificial Sequence: Synthetic oligonucleotide
cacggagguggcugacaug

SEQ ID NO: 2258648 - RNA, 19 nt, Artificial Sequence
  Description of Artificial Sequence: Synthetic oligonucleotide
uugcuaucaccaggaccac

SEQ ID NO: 2258649 - RNA, 19 nt, Artificial Sequence
  Description of Artificial Sequence: Synthetic oligonucleotide
gggaugcccaaggauucag

SEQ ID NO: 2258650 - RNA, 19 nt, Artificial Sequence
  Description of Artificial Sequence: Synthetic oligonucleotide
agagcaugacgccgccauu

SEQ ID NO: 2258651 - RNA, 19 nt, Artificial Sequence
  Description of Artificial Sequence: Synthetic oligonucleotide
cuugucccugcagccuccc

SEQ ID NO: 2258652 - RNA, 19 nt, Artificial Sequence
  Description of Artificial Sequence: Synthetic oligonucleotide
cggcgcuccaggaugauug

SEQ ID NO: 2258653 - RNA, 19 nt, Artificial Sequence
  Description of Artificial Sequence: Synthetic oligonucleotide
uggugaaggugcgggccgu

SEQ ID NO: 2258654 - RNA, 19 nt, Artificial Sequence
  Description of Artificial Sequence: Synthetic oligonucleotide
cacaugcagguggcggaag

SEQ ID NO: 2258655 - RNA, 19 nt, Artificial Sequence
  Description of Artificial Sequence: Synthetic oligonucleotide
ccacaucccuggcugagac

SEQ ID NO: 2258656 - RNA, 19 nt, Artificial Sequence
  Description of Artificial Sequence: Synthetic oligonucleotide
guaauccagcucggccgag

SEQ ID NO: 2258657 - RNA, 19 nt, Artificial Sequence
  Description of Artificial Sequence: Synthetic oligonucleotide
gguagagcucaggccagug

SEQ ID NO: 2258658 - RNA, 19 nt, Artificial Sequence
  Description of Artificial Sequence: Synthetic oligonucleotide
cucagggccccuacuaggu

SEQ ID NO: 2258659 - RNA, 19 nt, Artificial Sequence
  Description of Artificial Sequence: Synthetic oligonucleotide
cgccgaugacacaaagucc

SEQ ID NO: 2258660 - RNA, 19 nt, Artificial Sequence
  Description of Artificial Sequence: Synthetic oligonucleotide
acaguaggccggcgcucca

SEQ ID NO: 2258661 - RNA, 19 nt, Artificial Sequence
  Description of Artificial Sequence: Synthetic oligonucleotide
gauagucacggagguggcu

SEQ ID NO: 2258662 - RNA, 19 nt, Artificial Sequence
  Description of Artificial Sequence: Synthetic oligonucleotide
ugcagccccuuuugugaua

SEQ ID NO: 2258663 - RNA, 19 nt, Artificial Sequence
  Description of Artificial Sequence: Synthetic oligonucleotide
caugugccagggagccgug

SEQ ID NO: 2258664 - RNA, 19 nt, Artificial Sequence
  Description of Artificial Sequence: Synthetic oligonucleotide
ggauagucacggagguggc

SEQ ID NO: 2258665 - RNA, 19 nt, Artificial Sequence
  Description of Artificial Sequence: Synthetic oligonucleotide
cccaaggauucagagaaga

SEQ ID NO: 2258666 - RNA, 19 nt, Artificial Sequence
  Description of Artificial Sequence: Synthetic oligonucleotide
aagcgcugaugggucugga

SEQ ID NO: 2258667 - RNA, 19 nt, Artificial Sequence
  Description of Artificial Sequence: Synthetic oligonucleotide
guauaguaaguaggauagu

SEQ ID NO: 2258668 - RNA, 19 nt, Artificial Sequence
  Description of Artificial Sequence: Synthetic oligonucleotide
gacaugcgccgaugacaca

SEQ ID NO: 2258669 - RNA, 19 nt, Artificial Sequence
  Description of Artificial Sequence: Synthetic oligonucleotide
ucaccucgccuggaccgga

SEQ ID NO: 2258670 - RNA, 19 nt, Artificial Sequence
  Description of Artificial Sequence: Synthetic oligonucleotide
ggaagcgcugaugggucug

SEQ ID NO: 2258671 - RNA, 19 nt, Artificial Sequence
  Description of Artificial Sequence: Synthetic oligonucleotide
guaggccggcgcuccagga

SEQ ID NO: 2258672 - RNA, 19 nt, Artificial Sequence
  Description of Artificial Sequence: Synthetic oligonucleotide
guucuugucccugcagccu

SEQ ID NO: 2258673 - RNA, 19 nt, Artificial Sequence
  Description of Artificial Sequence: Synthetic oligonucleotide
caguaggccggcgcuccag

SEQ ID NO: 2258674 - RNA, 19 nt, Artificial Sequence
  Description of Artificial Sequence: Synthetic oligonucleotide
gagccguguaucggaucac

SEQ ID NO: 2258675 - RNA, 19 nt, Artificial Sequence
  Description of Artificial Sequence: Synthetic oligonucleotide
agugggagccugaguccug

SEQ ID NO: 2258676 - RNA, 19 nt, Artificial Sequence
  Description of Artificial Sequence: Synthetic oligonucleotide
agaggagcucgagcaacuu

SEQ ID NO: 2258677 - RNA, 19 nt, Artificial Sequence
  Description of Artificial Sequence: Synthetic oligonucleotide
ggcugacaugcgccgauga

SEQ ID NO: 2258678 - RNA, 19 nt, Artificial Sequence
  Description of Artificial Sequence: Synthetic oligonucleotide
gguggcggaagcgcugaug

SEQ ID NO: 2258679 - RNA, 19 nt, Artificial Sequence
  Description of Artificial Sequence: Synthetic oligonucleotide
ggugcccggcguuuauuuc

SEQ ID NO: 2258680 - RNA, 19 nt, Artificial Sequence
  Description of Artificial Sequence: Synthetic oligonucleotide
cgaugacacaaaguccacc

SEQ ID NO: 2258681 - RNA, 19 nt, Artificial Sequence
  Description of Artificial Sequence: Synthetic oligonucleotide
caugcgccgaugacacaaa

SEQ ID NO: 2258682 - RNA, 19 nt, Artificial Sequence
  Description of Artificial Sequence: Synthetic oligonucleotide
cuaccucaucagcucugga

SEQ ID NO: 2258683 - RNA, 19 nt, Artificial Sequence
  Description of Artificial Sequence: Synthetic oligonucleotide
gauccgggaucucgaugcu

SEQ ID NO: 2258684 - RNA, 19 nt, Artificial Sequence
  Description of Artificial Sequence: Synthetic oligonucleotide
ggagcucgagcaacuucug

SEQ ID NO: 2258685 - RNA, 19 nt, Artificial Sequence
  Description of Artificial Sequence: Synthetic oligonucleotide
cugcaguuucaccucgccu

SEQ ID NO: 2258686 - RNA, 19 nt, Artificial Sequence
  Description of Artificial Sequence: Synthetic oligonucleotide
gacuaccaccaaggcaaaa

SEQ ID NO: 2258687 - RNA, 19 nt, Artificial Sequence
  Description of Artificial Sequence: Synthetic oligonucleotide
gccccuacuagguugcuau

SEQ ID NO: 2258688 - RNA, 19 nt, Artificial Sequence
  Description of Artificial Sequence: Synthetic oligonucleotide
cgacacacagacuuguaua

SEQ ID NO: 2258689 - RNA, 19 nt, Artificial Sequence
  Description of Artificial Sequence: Synthetic oligonucleotide
caccaaggcaaaagccacu

SEQ ID NO: 2258690 - RNA, 19 nt, Artificial Sequence
  Description of Artificial Sequence: Synthetic oligonucleotide
caccucgccuggaccggac

SEQ ID NO: 2258691 - RNA, 19 nt, Artificial Sequence
  Description of Artificial Sequence: Synthetic oligonucleotide
cccuacuagguugcuauca

SEQ ID NO: 2258692 - RNA, 19 nt, Artificial Sequence
  Description of Artificial Sequence: Synthetic oligonucleotide
cugaguccugcagccuguc

SEQ ID NO: 2258693 - RNA, 19 nt, Artificial Sequence
  Description of Artificial Sequence: Synthetic oligonucleotide
ggcggaagcgcugaugggu

SEQ ID NO: 2258694 - RNA, 19 nt, Artificial Sequence
  Description of Artificial Sequence: Synthetic oligonucleotide
ccaccgagcgcaccaggac

SEQ ID NO: 2258695 - RNA, 19 nt, Artificial Sequence
  Description of Artificial Sequence: Synthetic oligonucleotide
gcguuccucuaccauacgu

SEQ ID NO: 2258696 - RNA, 19 nt, Artificial Sequence
  Description of Artificial Sequence: Synthetic oligonucleotide
ggcugauccgggaucucga

SEQ ID NO: 2258697 - RNA, 19 nt, Artificial Sequence
  Description of Artificial Sequence: Synthetic oligonucleotide
agggagccguguaucggau

SEQ ID NO: 2258698 - RNA, 19 nt, Artificial Sequence
  Description of Artificial Sequence: Synthetic oligonucleotide
gcgcaccaggaccugguga

SEQ ID NO: 2258699 - RNA, 19 nt, Artificial Sequence
  Description of Artificial Sequence: Synthetic oligonucleotide
gcaacaggacuaccaccaa

SEQ ID NO: 2258700 - RNA, 19 nt, Artificial Sequence
  Description of Artificial Sequence: Synthetic oligonucleotide
gucgacacacagacuugua

SEQ ID NO: 2258701 - RNA, 19 nt, Artificial Sequence
  Description of Artificial Sequence: Synthetic oligonucleotide
guggcugacaugcgccgau

SEQ ID NO: 2258702 - RNA, 19 nt, Artificial Sequence
  Description of Artificial Sequence: Synthetic oligonucleotide
ggccagguucuugucccug

SEQ ID NO: 2258703 - RNA, 19 nt, Artificial Sequence
  Description of Artificial Sequence: Synthetic oligonucleotide
gggagccguguaucggauc

SEQ ID NO: 2258704 - RNA, 19 nt, Artificial Sequence
  Description of Artificial Sequence: Synthetic oligonucleotide
gccgucagcacgggccucc

SEQ ID NO: 2258705 - RNA, 19 nt, Artificial Sequence
  Description of Artificial Sequence: Synthetic oligonucleotide
ccgccauuacugaagacau

SEQ ID NO: 2258706 - RNA, 19 nt, Artificial Sequence
  Description of Artificial Sequence: Synthetic oligonucleotide
caccaggaccacugucaaa

SEQ ID NO: 2258707 - RNA, 19 nt, Artificial Sequence
  Description of Artificial Sequence: Synthetic oligonucleotide
acguagcgguagagcauga

SEQ ID NO: 2258708 - RNA, 19 nt, Artificial Sequence
  Description of Artificial Sequence: Synthetic oligonucleotide
cccagcccaagagaaucac

SEQ ID NO: 2258709 - RNA, 19 nt, Artificial Sequence
  Description of Artificial Sequence: Synthetic oligonucleotide
gcccaaggauucagagaag

SEQ ID NO: 2258710 - RNA, 19 nt, Artificial Sequence
  Description of Artificial Sequence: Synthetic oligonucleotide
cagugggagccugaguccu

SEQ ID NO: 2258711 - RNA, 19 nt, Artificial Sequence
  Description of Artificial Sequence: Synthetic oligonucleotide
gcagcacaguaggccggcg

SEQ ID NO: 2258712 - RNA, 19 nt, Artificial Sequence
  Description of Artificial Sequence: Synthetic oligonucleotide
cugccggaacuccugcagu

SEQ ID NO: 2258713 - RNA, 19 nt, Artificial Sequence
  Description of Artificial Sequence: Synthetic oligonucleotide
gagcgcaccaggaccuggu

SEQ ID NO: 2258714 - RNA, 19 nt, Artificial Sequence
  Description of Artificial Sequence: Synthetic oligonucleotide
ggagcuuuuccagcacgua

SEQ ID NO: 2258715 - RNA, 19 nt, Artificial Sequence
  Description of Artificial Sequence: Synthetic oligonucleotide
ccucaucagcucuggagua

SEQ ID NO: 2258716 - RNA, 19 nt, Artificial Sequence
  Description of Artificial Sequence: Synthetic oligonucleotide
gugccagggagccguguau

SEQ ID NO: 2258717 - RNA, 19 nt, Artificial Sequence
  Description of Artificial Sequence: Synthetic oligonucleotide
gcgcuccaggaugauugcc

SEQ ID NO: 2258718 - RNA, 19 nt, Artificial Sequence
  Description of Artificial Sequence: Synthetic oligonucleotide
ggaugauugccagggcccu

SEQ ID NO: 2258719 - RNA, 19 nt, Artificial Sequence
  Description of Artificial Sequence: Synthetic oligonucleotide
cagggcugauccgggaucu

SEQ ID NO: 2258720 - RNA, 19 nt, Artificial Sequence
  Description of Artificial Sequence: Synthetic oligonucleotide
gggucuggaggagcuuuuc

SEQ ID NO: 2258721 - RNA, 19 nt, Artificial Sequence
  Description of Artificial Sequence: Synthetic oligonucleotide
ccaggaccacugucaaaca

SEQ ID NO: 2258722 - RNA, 19 nt, Artificial Sequence
  Description of Artificial Sequence: Synthetic oligonucleotide
ggggaugcccaaggauuca

SEQ ID NO: 2258723 - RNA, 19 nt, Artificial Sequence
  Description of Artificial Sequence: Synthetic oligonucleotide
cgccauuacugaagacaug

SEQ ID NO: 2258724 - RNA, 19 nt, Artificial Sequence
  Description of Artificial Sequence: Synthetic oligonucleotide
ccuggaccggacgccgccg

SEQ ID NO: 2258725 - RNA, 19 nt, Artificial Sequence
  Description of Artificial Sequence: Synthetic oligonucleotide
cuggccuucuucccaucau

SEQ ID NO: 2258726 - RNA, 19 nt, Artificial Sequence
  Description of Artificial Sequence: Synthetic oligonucleotide
gccaggcguuccucuacca

SEQ ID NO: 2258727 - RNA, 19 nt, Artificial Sequence
  Description of Artificial Sequence: Synthetic oligonucleotide
caguuucaccucgccugga

SEQ ID NO: 2258728 - RNA, 19 nt, Artificial Sequence
  Description of Artificial Sequence: Synthetic oligonucleotide
cccggcguuuauuucugaa

SEQ ID NO: 2258729 - RNA, 19 nt, Artificial Sequence
  Description of Artificial Sequence: Synthetic oligonucleotide
gccguguaucggaucacaa

SEQ ID NO: 2258730 - RNA, 19 nt, Artificial Sequence
  Description of Artificial Sequence: Synthetic oligonucleotide
ccaccacaugcagguggcg

SEQ ID NO: 2258731 - RNA, 19 nt, Artificial Sequence
  Description of Artificial Sequence: Synthetic oligonucleotide
ccccagcccaagagaauca

SEQ ID NO: 2258732 - RNA, 19 nt, Artificial Sequence
  Description of Artificial Sequence: Synthetic oligonucleotide
ccaugugccagggagccgu

SEQ ID NO: 2258733 - RNA, 19 nt, Artificial Sequence
  Description of Artificial Sequence: Synthetic oligonucleotide
ccguguaucggaucacaau

SEQ ID NO: 2258734 - RNA, 19 nt, Artificial Sequence
  Description of Artificial Sequence: Synthetic oligonucleotide
ggugaaggugcgggccguc

SEQ ID NO: 2258735 - RNA, 19 nt, Artificial Sequence
  Description of Artificial Sequence: Synthetic oligonucleotide
gggcccucagggccccuac

SEQ ID NO: 2258736 - RNA, 19 nt, Artificial Sequence
  Description of Artificial Sequence: Synthetic oligonucleotide
gcugauccgggaucucgau

SEQ ID NO: 2258737 - RNA, 19 nt, Artificial Sequence
  Description of Artificial Sequence: Synthetic oligonucleotide
gucgcuuccuggccuucuu

SEQ ID NO: 2258738 - RNA, 19 nt, Artificial Sequence
  Description of Artificial Sequence: Synthetic oligonucleotide
cgagcgcaccaggaccugg

SEQ ID NO: 2258739 - RNA, 19 nt, Artificial Sequence
  Description of Artificial Sequence: Synthetic oligonucleotide
gcucccucucaaucucgua

SEQ ID NO: 2258740 - RNA, 19 nt, Artificial Sequence
  Description of Artificial Sequence: Synthetic oligonucleotide
ugacuccagcagggcugau

SEQ ID NO: 2258741 - RNA, 19 nt, Artificial Sequence
  Description of Artificial Sequence: Synthetic oligonucleotide
ggacuaccaccaaggcaaa

SEQ ID NO: 2258742 - RNA, 19 nt, Artificial Sequence
  Description of Artificial Sequence: Synthetic oligonucleotide
cagccccuuuugugauaga

SEQ ID NO: 2258743 - RNA, 19 nt, Artificial Sequence
  Description of Artificial Sequence: Synthetic oligonucleotide
gggccgucagcacgggccu

SEQ ID NO: 2258744 - RNA, 19 nt, Artificial Sequence
  Description of Artificial Sequence: Synthetic oligonucleotide
gaggugcccggcguuuauu

SEQ ID NO: 2258745 - RNA, 19 nt, Artificial Sequence
  Description of Artificial Sequence: Synthetic oligonucleotide
gcgggccgucagcacgggc

SEQ ID NO: 2258746 - RNA, 19 nt, Artificial Sequence
  Description of Artificial Sequence: Synthetic oligonucleotide
ggcucccucucaaucucgu

SEQ ID NO: 2258747 - RNA, 19 nt, Artificial Sequence
  Description of Artificial Sequence: Synthetic oligonucleotide
gcacguagcgguagagcau

SEQ ID NO: 2258748 - RNA, 19 nt, Artificial Sequence
  Description of Artificial Sequence: Synthetic oligonucleotide
gcccggcguuuauuucuga

SEQ ID NO: 2258749 - RNA, 19 nt, Artificial Sequence
  Description of Artificial Sequence: Synthetic oligonucleotide
ggccggcgcuccaggauga

SEQ ID NO: 2258750 - RNA, 19 nt, Artificial Sequence
  Description of Artificial Sequence: Synthetic oligonucleotide
ggaucacaaugcagccccu

SEQ ID NO: 2258751 - RNA, 19 nt, Artificial Sequence
  Description of Artificial Sequence: Synthetic oligonucleotide
ccacaugcagguggcggaa

SEQ ID NO: 2258752 - RNA, 19 nt, Artificial Sequence
  Description of Artificial Sequence: Synthetic oligonucleotide
ggccccuacuagguugcua

SEQ ID NO: 2258753 - RNA, 19 nt, Artificial Sequence
  Description of Artificial Sequence: Synthetic oligonucleotide
gccugucauagaagugggu

SEQ ID NO: 2258754 - RNA, 19 nt, Artificial Sequence
  Description of Artificial Sequence: Synthetic oligonucleotide
ccaggcguuccucuaccau

SEQ ID NO: 2258755 - RNA, 19 nt, Artificial Sequence
  Description of Artificial Sequence: Synthetic oligonucleotide
cgccgccauuacugaagac

SEQ ID NO: 2258756 - RNA, 19 nt, Artificial Sequence
  Description of Artificial Sequence: Synthetic oligonucleotide
gcgcuauacuuggccaggu

SEQ ID NO: 2258757 - RNA, 19 nt, Artificial Sequence
  Description of Artificial Sequence: Synthetic oligonucleotide
cgccuggaccggacgccgc

SEQ ID NO: 2258758 - RNA, 19 nt, Artificial Sequence
  Description of Artificial Sequence: Synthetic oligonucleotide
ccgagcgcaccaggaccug

SEQ ID NO: 2258759 - RNA, 19 nt, Artificial Sequence
  Description of Artificial Sequence: Synthetic oligonucleotide
cucaggccagugggagccu

SEQ ID NO: 2258760 - RNA, 19 nt, Artificial Sequence
  Description of Artificial Sequence: Synthetic oligonucleotide
gccggaacuccugcaguuu

SEQ ID NO: 2258761 - RNA, 19 nt, Artificial Sequence
  Description of Artificial Sequence: Synthetic oligonucleotide
ccgggaucucgaugcugua

SEQ ID NO: 2258762 - RNA, 19 nt, Artificial Sequence
  Description of Artificial Sequence: Synthetic oligonucleotide
ccgaggccauggugaaggu

SEQ ID NO: 2258763 - RNA, 19 nt, Artificial Sequence
  Description of Artificial Sequence: Synthetic oligonucleotide
cgcuauacuuggccagguu

SEQ ID NO: 2258764 - RNA, 19 nt, Artificial Sequence
  Description of Artificial Sequence: Synthetic oligonucleotide
gggccccuacuagguugcu

SEQ ID NO: 2258765 - RNA, 19 nt, Artificial Sequence
  Description of Artificial Sequence: Synthetic oligonucleotide
ccgucagcacgggccuccu

SEQ ID NO: 2258766 - RNA, 19 nt, Artificial Sequence
  Description of Artificial Sequence: Synthetic oligonucleotide
ccggcgcuccaggaugauu

SEQ ID NO: 2258767 - RNA, 19 nt, Artificial Sequence
  Description of Artificial Sequence: Synthetic oligonucleotide
aaaggcgcucuucagagcc

SEQ ID NO: 2258768 - RNA, 19 nt, Artificial Sequence
  Description of Artificial Sequence: Synthetic oligonucleotide
ugcaacuucacuuucauug

SEQ ID NO: 2258769 - RNA, 19 nt, Artificial Sequence
  Description of Artificial Sequence: Synthetic oligonucleotide
uucuugaaggguuagaaag

SEQ ID NO: 2258770 - RNA, 19 nt, Artificial Sequence
  Description of Artificial Sequence: Synthetic oligonucleotide
aauggcgagaguucugucc

SEQ ID NO: 2258771 - RNA, 19 nt, Artificial Sequence
  Description of Artificial Sequence: Synthetic oligonucleotide
auguccauaggacacaacc

SEQ ID NO: 2258772 - RNA, 19 nt, Artificial Sequence
  Description of Artificial Sequence: Synthetic oligonucleotide
uucacuuucauugacuugg

SEQ ID NO: 2258773 - RNA, 19 nt, Artificial Sequence
  Description of Artificial Sequence: Synthetic oligonucleotide
aguacggccacuucaaggc

SEQ ID NO: 2258774 - RNA, 19 nt, Artificial Sequence
  Description of Artificial Sequence: Synthetic oligonucleotide
caaaggucagcuuauaccg

SEQ ID NO: 2258775 - RNA, 19 nt, Artificial Sequence
  Description of Artificial Sequence: Synthetic oligonucleotide
acaagcaccucacucagcc

SEQ ID NO: 2258776 - RNA, 19 nt, Artificial Sequence
  Description of Artificial Sequence: Synthetic oligonucleotide
agaguucugucccagaggg

SEQ ID NO: 2258777 - RNA, 19 nt, Artificial Sequence
  Description of Artificial Sequence: Synthetic oligonucleotide
caagcuauaagcacugucc

SEQ ID NO: 2258778 - RNA, 19 nt, Artificial Sequence
  Description of Artificial Sequence: Synthetic oligonucleotide
ucuugaaggguuagaaagg

SEQ ID NO: 2258779 - RNA, 19 nt, Artificial Sequence
  Description of Artificial Sequence: Synthetic oligonucleotide
ugcuggacuagccagagcc

SEQ ID NO: 2258780 - RNA, 19 nt, Artificial Sequence
  Description of Artificial Sequence: Synthetic oligonucleotide
agcacuaugcuccugacug

SEQ ID NO: 2258781 - RNA, 19 nt, Artificial Sequence
  Description of Artificial Sequence: Synthetic oligonucleotide
cuggauaggacuaaauggc

SEQ ID NO: 2258782 - RNA, 19 nt, Artificial Sequence
  Description of Artificial Sequence: Synthetic oligonucleotide
ucuacgccaagcuauaagc

SEQ ID NO: 2258783 - RNA, 19 nt, Artificial Sequence
  Description of Artificial Sequence: Synthetic oligonucleotide
aaggcaguauucccugucc

SEQ ID NO: 2258784 - RNA, 19 nt, Artificial Sequence
  Description of Artificial Sequence: Synthetic oligonucleotide
uaugcuuuccaggagagcc

SEQ ID NO: 2258785 - RNA, 19 nt, Artificial Sequence
  Description of Artificial Sequence: Synthetic oligonucleotide
aguaggauguccccauucc

SEQ ID NO: 2258786 - RNA, 19 nt, Artificial Sequence
  Description of Artificial Sequence: Synthetic oligonucleotide
uuuauuucaugccaagcaa

SEQ ID NO: 2258787 - RNA, 19 nt, Artificial Sequence
  Description of Artificial Sequence: Synthetic oligonucleotide
cuuucauugacuugggcac

SEQ ID NO: 2258788 - RNA, 19 nt, Artificial Sequence
  Description of Artificial Sequence: Synthetic oligonucleotide
gauaggacuaaauggcgag

SEQ ID NO: 2258789 - RNA, 19 nt, Artificial Sequence
  Description of Artificial Sequence: Synthetic oligonucleotide
acuuucauugacuugggca

SEQ ID NO: 2258790 - RNA, 19 nt, Artificial Sequence
  Description of Artificial Sequence: Synthetic oligonucleotide
aaaggagccguguucagca

SEQ ID NO: 2258791 - RNA, 19 nt, Artificial Sequence
  Description of Artificial Sequence: Synthetic oligonucleotide
ucugaagggaacccgcacg

SEQ ID NO: 2258792 - RNA, 19 nt, Artificial Sequence
  Description of Artificial Sequence: Synthetic oligonucleotide
ucuaaguagagauggcagc

SEQ ID NO: 2258793 - RNA, 19 nt, Artificial Sequence
  Description of Artificial Sequence: Synthetic oligonucleotide
agaugaucacagcagcggc

SEQ ID NO: 2258794 - RNA, 19 nt, Artificial Sequence
  Description of Artificial Sequence: Synthetic oligonucleotide
uggauaggacuaaauggcg

SEQ ID NO: 2258795 - RNA, 19 nt, Artificial Sequence
  Description of Artificial Sequence: Synthetic oligonucleotide
gcuggauaggacuaaaugg

SEQ ID NO: 2258796 - RNA, 19 nt, Artificial Sequence
  Description of Artificial Sequence: Synthetic oligonucleotide
ugagauguccauaggacac

SEQ ID NO: 2258797 - RNA, 19 nt, Artificial Sequence
  Description of Artificial Sequence: Synthetic oligonucleotide
auggcgagaguucuguccc

SEQ ID NO: 2258798 - RNA, 19 nt, Artificial Sequence
  Description of Artificial Sequence: Synthetic oligonucleotide
auaggacacaaccugccac

SEQ ID NO: 2258799 - RNA, 19 nt, Artificial Sequence
  Description of Artificial Sequence: Synthetic oligonucleotide
agaaaggcgcucuucagag

SEQ ID NO: 2258800 - RNA, 19 nt, Artificial Sequence
  Description of Artificial Sequence: Synthetic oligonucleotide
uauaaggcaguauucccug

SEQ ID NO: 2258801 - RNA, 19 nt, Artificial Sequence
  Description of Artificial Sequence: Synthetic oligonucleotide
aguuuauuucaugccaagc

SEQ ID NO: 2258802 - RNA, 19 nt, Artificial Sequence
  Description of Artificial Sequence: Synthetic oligonucleotide
ugacaaauguccagggccc

SEQ ID NO: 2258803 - RNA, 19 nt, Artificial Sequence
  Description of Artificial Sequence: Synthetic oligonucleotide
aaggggagugaccaaagca

SEQ ID NO: 2258804 - RNA, 19 nt, Artificial Sequence
  Description of Artificial Sequence: Synthetic oligonucleotide
agccagugaagccacacac

SEQ ID NO: 2258805 - RNA, 19 nt, Artificial Sequence
  Description of Artificial Sequence: Synthetic oligonucleotide
agagguagugaguaggaug

SEQ ID NO: 2258806 - RNA, 19 nt, Artificial Sequence
  Description of Artificial Sequence: Synthetic oligonucleotide
aagcuauaagcacugucca

SEQ ID NO: 2258807 - RNA, 19 nt, Artificial Sequence
  Description of Artificial Sequence: Synthetic oligonucleotide
aaaagguuaaggggagcac

SEQ ID NO: 2258808 - RNA, 19 nt, Artificial Sequence
  Description of Artificial Sequence: Synthetic oligonucleotide
uccauuacccuuccugucc

SEQ ID NO: 2258809 - RNA, 19 nt, Artificial Sequence
  Description of Artificial Sequence: Synthetic oligonucleotide
uuaaggggagcacagcagu

SEQ ID NO: 2258810 - RNA, 19 nt, Artificial Sequence
  Description of Artificial Sequence: Synthetic oligonucleotide
agcaaaggucagcuuauac

SEQ ID NO: 2258811 - RNA, 19 nt, Artificial Sequence
  Description of Artificial Sequence: Synthetic oligonucleotide
cauuggguuagccagcagc

SEQ ID NO: 2258812 - RNA, 19 nt, Artificial Sequence
  Description of Artificial Sequence: Synthetic oligonucleotide
agcacagcaguuuauuuca

SEQ ID NO: 2258813 - RNA, 19 nt, Artificial Sequence
  Description of Artificial Sequence: Synthetic oligonucleotide
acacccacacaguacggcc

SEQ ID NO: 2258814 - RNA, 19 nt, Artificial Sequence
  Description of Artificial Sequence: Synthetic oligonucleotide
cuacucuaggcccagaguc

SEQ ID NO: 2258815 - RNA, 19 nt, Artificial Sequence
  Description of Artificial Sequence: Synthetic oligonucleotide
cuauaagcacuguccaggg

SEQ ID NO: 2258816 - RNA, 19 nt, Artificial Sequence
  Description of Artificial Sequence: Synthetic oligonucleotide
uccugacuggcaaaggagc

SEQ ID NO: 2258817 - RNA, 19 nt, Artificial Sequence
  Description of Artificial Sequence: Synthetic oligonucleotide
uccauaggacacaaccugc

SEQ ID NO: 2258818 - RNA, 19 nt, Artificial Sequence
  Description of Artificial Sequence: Synthetic oligonucleotide
agcaggagggugcagagug

SEQ ID NO: 2258819 - RNA, 19 nt, Artificial Sequence
  Description of Artificial Sequence: Synthetic oligonucleotide
uagaaaggcgcucuucaga

SEQ ID NO: 2258820 - RNA, 19 nt, Artificial Sequence
  Description of Artificial Sequence: Synthetic oligonucleotide
uuagaaaggcgcucuucag

SEQ ID NO: 2258821 - RNA, 19 nt, Artificial Sequence
  Description of Artificial Sequence: Synthetic oligonucleotide
uccccgagagcaaagguca

SEQ ID NO: 2258822 - RNA, 19 nt, Artificial Sequence
  Description of Artificial Sequence: Synthetic oligonucleotide
acuagccagagccugucuc

SEQ ID NO: 2258823 - RNA, 19 nt, Artificial Sequence
  Description of Artificial Sequence: Synthetic oligonucleotide
cuugaaggguuagaaaggc

SEQ ID NO: 2258824 - RNA, 19 nt, Artificial Sequence
  Description of Artificial Sequence: Synthetic oligonucleotide
cacagggagaugaucacag

SEQ ID NO: 2258825 - RNA, 19 nt, Artificial Sequence
  Description of Artificial Sequence: Synthetic oligonucleotide
gagaguucugucccagagg

SEQ ID NO: 2258826 - RNA, 19 nt, Artificial Sequence
  Description of Artificial Sequence: Synthetic oligonucleotide
acuugcuggggucauaggu

SEQ ID NO: 2258827 - RNA, 19 nt, Artificial Sequence
  Description of Artificial Sequence: Synthetic oligonucleotide
guuagaaaggcgcucuuca

SEQ ID NO: 2258828 - RNA, 19 nt, Artificial Sequence
  Description of Artificial Sequence: Synthetic oligonucleotide
aaauggcgagaguucuguc

SEQ ID NO: 2258829 - RNA, 19 nt, Artificial Sequence
  Description of Artificial Sequence: Synthetic oligonucleotide
ucacuuucauugacuuggg

SEQ ID NO: 2258830 - RNA, 19 nt, Artificial Sequence
  Description of Artificial Sequence: Synthetic oligonucleotide
gcuauaagcacuguccagg

SEQ ID NO: 2258831 - RNA, 19 nt, Artificial Sequence
  Description of Artificial Sequence: Synthetic oligonucleotide
uacgccaagcuauaagcac

SEQ ID NO: 2258832 - RNA, 19 nt, Artificial Sequence
  Description of Artificial Sequence: Synthetic oligonucleotide
uacucuaggcccagagucc

SEQ ID NO: 2258833 - RNA, 19 nt, Artificial Sequence
  Description of Artificial Sequence: Synthetic oligonucleotide
gauguccccauucccacug

SEQ ID NO: 2258834 - RNA, 19 nt, Artificial Sequence
  Description of Artificial Sequence: Synthetic oligonucleotide
auaccgaagccgcaccuuc

SEQ ID NO: 2258835 - RNA, 19 nt, Artificial Sequence
  Description of Artificial Sequence: Synthetic oligonucleotide
uaaauggcgagaguucugu

SEQ ID NO: 2258836 - RNA, 19 nt, Artificial Sequence
  Description of Artificial Sequence: Synthetic oligonucleotide
gagcacagcaguuuauuuc

SEQ ID NO: 2258837 - RNA, 19 nt, Artificial Sequence
  Description of Artificial Sequence: Synthetic oligonucleotide
ccuucauuggguuagccag

SEQ ID NO: 2258838 - RNA, 19 nt, Artificial Sequence
  Description of Artificial Sequence: Synthetic oligonucleotide
caguacggccacuucaagg

SEQ ID NO: 2258839 - RNA, 19 nt, Artificial Sequence
  Description of Artificial Sequence: Synthetic oligonucleotide
ggaaaaccuacucuaggcc

SEQ ID NO: 2258840 - RNA, 19 nt, Artificial Sequence
  Description of Artificial Sequence: Synthetic oligonucleotide
gggaaaaccuacucuaggc

SEQ ID NO: 2258841 - RNA, 19 nt, Artificial Sequence
  Description of Artificial Sequence: Synthetic oligonucleotide
cuuauaccgaagccgcacc

SEQ ID NO: 2258842 - RNA, 19 nt, Artificial Sequence
  Description of Artificial Sequence: Synthetic oligonucleotide
aaaaccuacucuaggccca

SEQ ID NO: 2258843 - RNA, 19 nt, Artificial Sequence
  Description of Artificial Sequence: Synthetic oligonucleotide
ccaagcaagagguagugag

SEQ ID NO: 2258844 - RNA, 19 nt, Artificial Sequence
  Description of Artificial Sequence: Synthetic oligonucleotide
uucccugucccguugagau

SEQ ID NO: 2258845 - RNA, 19 nt, Artificial Sequence
  Description of Artificial Sequence: Synthetic oligonucleotide
agguaugcuuuccaggaga

SEQ ID NO: 2258846 - RNA, 19 nt, Artificial Sequence
  Description of Artificial Sequence: Synthetic oligonucleotide
caguucugugcucagcugc

SEQ ID NO: 2258847 - RNA, 19 nt, Artificial Sequence
  Description of Artificial Sequence: Synthetic oligonucleotide
uaggacacaaccugccacu

SEQ ID NO: 2258848 - RNA, 19 nt, Artificial Sequence
  Description of Artificial Sequence: Synthetic oligonucleotide
uuauaccgaagccgcaccu

SEQ ID NO: 2258849 - RNA, 19 nt, Artificial Sequence
  Description of Artificial Sequence: Synthetic oligonucleotide
uaagcacuguccagggugu

SEQ ID NO: 2258850 - RNA, 19 nt, Artificial Sequence
  Description of Artificial Sequence: Synthetic oligonucleotide
acacaguacggccacuuca

SEQ ID NO: 2258851 - RNA, 19 nt, Artificial Sequence
  Description of Artificial Sequence: Synthetic oligonucleotide
ugucccguugagaugucca

SEQ ID NO: 2258852 - RNA, 19 nt, Artificial Sequence
  Description of Artificial Sequence: Synthetic oligonucleotide
guagugaguaggauguccc

SEQ ID NO: 2258853 - RNA, 19 nt, Artificial Sequence
  Description of Artificial Sequence: Synthetic oligonucleotide
aacuucacuuucauugacu

SEQ ID NO: 2258854 - RNA, 19 nt, Artificial Sequence
  Description of Artificial Sequence: Synthetic oligonucleotide
cugaagggaacccgcacgc

SEQ ID NO: 2258855 - RNA, 19 nt, Artificial Sequence
  Description of Artificial Sequence: Synthetic oligonucleotide
cuucauuggguuagccagc

SEQ ID NO: 2258856 - RNA, 19 nt, Artificial Sequence
  Description of Artificial Sequence: Synthetic oligonucleotide
aguucuugaaggguuagaa

SEQ ID NO: 2258857 - RNA, 19 nt, Artificial Sequence
  Description of Artificial Sequence: Synthetic oligonucleotide
gaucacagcagcggcuugg

SEQ ID NO: 2258858 - RNA, 19 nt, Artificial Sequence
  Description of Artificial Sequence: Synthetic oligonucleotide
cuccugacuggcaaaggag

SEQ ID NO: 2258859 - RNA, 19 nt, Artificial Sequence
  Description of Artificial Sequence: Synthetic oligonucleotide
uaaggcaguauucccuguc

SEQ ID NO: 2258860 - RNA, 19 nt, Artificial Sequence
  Description of Artificial Sequence: Synthetic oligonucleotide
gaggaaacuggucuaccuc

SEQ ID NO: 2258861 - RNA, 19 nt, Artificial Sequence
  Description of Artificial Sequence: Synthetic oligonucleotide
aagagguugucuucccuua

SEQ ID NO: 2258862 - RNA, 19 nt, Artificial Sequence
  Description of Artificial Sequence: Synthetic oligonucleotide
ugacuugggcacugcagcc

SEQ ID NO: 2258863 - RNA, 19 nt, Artificial Sequence
  Description of Artificial Sequence: Synthetic oligonucleotide
gcuauaaggcaguauuccc

SEQ ID NO: 2258864 - RNA, 19 nt, Artificial Sequence
  Description of Artificial Sequence: Synthetic oligonucleotide
gucuacgccaagcuauaag

SEQ ID NO: 2258865 - RNA, 19 nt, Artificial Sequence
  Description of Artificial Sequence: Synthetic oligonucleotide
auugacuugggcacugcag

SEQ ID NO: 2258866 - RNA, 19 nt, Artificial Sequence
  Description of Artificial Sequence: Synthetic oligonucleotide
gaaggggagugaccaaagc

SEQ ID NO: 2258867 - RNA, 19 nt, Artificial Sequence
  Description of Artificial Sequence: Synthetic oligonucleotide
guaggauguccccauuccc

SEQ ID NO: 2258868 - RNA, 19 nt, Artificial Sequence
  Description of Artificial Sequence: Synthetic oligonucleotide
cauggacacgaccaccacc

SEQ ID NO: 2258869 - RNA, 19 nt, Artificial Sequence
  Description of Artificial Sequence: Synthetic oligonucleotide
agggagaugaucacagcag

SEQ ID NO: 2258870 - RNA, 19 nt, Artificial Sequence
  Description of Artificial Sequence: Synthetic oligonucleotide
ggcuggauaggacuaaaug

SEQ ID NO: 2258871 - RNA, 19 nt, Artificial Sequence
  Description of Artificial Sequence: Synthetic oligonucleotide
uggguaauggcugcaggug

SEQ ID NO: 2258872 - RNA, 19 nt, Artificial Sequence
  Description of Artificial Sequence: Synthetic oligonucleotide
cacgcuuccauuacccuuc

SEQ ID NO: 2258873 - RNA, 19 nt, Artificial Sequence
  Description of Artificial Sequence: Synthetic oligonucleotide
aguauucccugucccguug

SEQ ID NO: 2258874 - RNA, 19 nt, Artificial Sequence
  Description of Artificial Sequence: Synthetic oligonucleotide
agccguguucagcauggac

SEQ ID NO: 2258875 - RNA, 19 nt, Artificial Sequence
  Description of Artificial Sequence: Synthetic oligonucleotide
uagugaguaggaugucccc

SEQ ID NO: 2258876 - RNA, 19 nt, Artificial Sequence
  Description of Artificial Sequence: Synthetic oligonucleotide
gaggcuauaaggcaguauu

SEQ ID NO: 2258877 - RNA, 19 nt, Artificial Sequence
  Description of Artificial Sequence: Synthetic oligonucleotide
uccaccggaggaaacuggu

SEQ ID NO: 2258878 - RNA, 19 nt, Artificial Sequence
  Description of Artificial Sequence: Synthetic oligonucleotide
auuggguuagccagcagca

SEQ ID NO: 2258879 - RNA, 19 nt, Artificial Sequence
  Description of Artificial Sequence: Synthetic oligonucleotide
cuaaguagagauggcagca

SEQ ID NO: 2258880 - RNA, 19 nt, Artificial Sequence
  Description of Artificial Sequence: Synthetic oligonucleotide
uauucccugucccguugag

SEQ ID NO: 2258881 - RNA, 19 nt, Artificial Sequence
  Description of Artificial Sequence: Synthetic oligonucleotide
gagguagugaguaggaugu

SEQ ID NO: 2258882 - RNA, 19 nt, Artificial Sequence
  Description of Artificial Sequence: Synthetic oligonucleotide
ugcagagaugcaguucuug

SEQ ID NO: 2258883 - RNA, 19 nt, Artificial Sequence
  Description of Artificial Sequence: Synthetic oligonucleotide
ggcuauaaggcaguauucc

SEQ ID NO: 2258884 - RNA, 19 nt, Artificial Sequence
  Description of Artificial Sequence: Synthetic oligonucleotide
ugguaccaagggaugccag

SEQ ID NO: 2258885 - RNA, 19 nt, Artificial Sequence
  Description of Artificial Sequence: Synthetic oligonucleotide
agggaacccgcacgcuucc

SEQ ID NO: 2258886 - RNA, 19 nt, Artificial Sequence
  Description of Artificial Sequence: Synthetic oligonucleotide
cuucuaaguagagauggca

SEQ ID NO: 2258887 - RNA, 19 nt, Artificial Sequence
  Description of Artificial Sequence: Synthetic oligonucleotide
gaguaggauguccccauuc

SEQ ID NO: 2258888 - RNA, 19 nt, Artificial Sequence
  Description of Artificial Sequence: Synthetic oligonucleotide
uaaguagagauggcagcac

SEQ ID NO: 2258889 - RNA, 19 nt, Artificial Sequence
  Description of Artificial Sequence: Synthetic oligonucleotide
uucauugacuugggcacug

SEQ ID NO: 2258890 - RNA, 19 nt, Artificial Sequence
  Description of Artificial Sequence: Synthetic oligonucleotide
aggcuauaaggcaguauuc

SEQ ID NO: 2258891 - RNA, 19 nt, Artificial Sequence
  Description of Artificial Sequence: Synthetic oligonucleotide
aucacagcagcggcuuggc

SEQ ID NO: 2258892 - RNA, 19 nt, Artificial Sequence
  Description of Artificial Sequence: Synthetic oligonucleotide
agugaguaggaugucccca

SEQ ID NO: 2258893 - RNA, 19 nt, Artificial Sequence
  Description of Artificial Sequence: Synthetic oligonucleotide
cuauaaggcaguauucccu

SEQ ID NO: 2258894 - RNA, 19 nt, Artificial Sequence
  Description of Artificial Sequence: Synthetic oligonucleotide
cugacuggcaaaggagccg

SEQ ID NO: 2258895 - RNA, 19 nt, Artificial Sequence
  Description of Artificial Sequence: Synthetic oligonucleotide
accgaagccgcaccuucuc

SEQ ID NO: 2258896 - RNA, 19 nt, Artificial Sequence
  Description of Artificial Sequence: Synthetic oligonucleotide
uuccauuacccuuccuguc

SEQ ID NO: 2258897 - RNA, 19 nt, Artificial Sequence
  Description of Artificial Sequence: Synthetic oligonucleotide
aaaccuacucuaggcccag

SEQ ID NO: 2258898 - RNA, 19 nt, Artificial Sequence
  Description of Artificial Sequence: Synthetic oligonucleotide
ugcaguucuugaaggguua

SEQ ID NO: 2258899 - RNA, 19 nt, Artificial Sequence
  Description of Artificial Sequence: Synthetic oligonucleotide
uaccucacccaguucugug

SEQ ID NO: 2258900 - RNA, 19 nt, Artificial Sequence
  Description of Artificial Sequence: Synthetic oligonucleotide
ggucagcuuauaccgaagc

SEQ ID NO: 2258901 - RNA, 19 nt, Artificial Sequence
  Description of Artificial Sequence: Synthetic oligonucleotide
cuccccgagagcaaagguc

SEQ ID NO: 2258902 - RNA, 19 nt, Artificial Sequence
  Description of Artificial Sequence: Synthetic oligonucleotide
ucacccaguucugugcuca

SEQ ID NO: 2258903 - RNA, 19 nt, Artificial Sequence
  Description of Artificial Sequence: Synthetic oligonucleotide
ugacuggcaaaggagccgu

SEQ ID NO: 2258904 - RNA, 19 nt, Artificial Sequence
  Description of Artificial Sequence: Synthetic oligonucleotide
ggagaugaucacagcagcg

SEQ ID NO: 2258905 - RNA, 19 nt, Artificial Sequence
  Description of Artificial Sequence: Synthetic oligonucleotide
caagagguagugaguagga

SEQ ID NO: 2258906 - RNA, 19 nt, Artificial Sequence
  Description of Artificial Sequence: Synthetic oligonucleotide
cacaaccugccacugccag

SEQ ID NO: 2258907 - RNA, 19 nt, Artificial Sequence
  Description of Artificial Sequence: Synthetic oligonucleotide
ugccaagcaagagguagug

SEQ ID NO: 2258908 - RNA, 19 nt, Artificial Sequence
  Description of Artificial Sequence: Synthetic oligonucleotide
gguagugaguaggaugucc

SEQ ID NO: 2258909 - RNA, 19 nt, Artificial Sequence
  Description of Artificial Sequence: Synthetic oligonucleotide
aaggcgcucuucagagccc

SEQ ID NO: 2258910 - RNA, 19 nt, Artificial Sequence
  Description of Artificial Sequence: Synthetic oligonucleotide
gcagguaugcuuuccagga

SEQ ID NO: 2258911 - RNA, 19 nt, Artificial Sequence
  Description of Artificial Sequence: Synthetic oligonucleotide
agggugugcacugcuggac

SEQ ID NO: 2258912 - RNA, 19 nt, Artificial Sequence
  Description of Artificial Sequence: Synthetic oligonucleotide
cacacagggagaugaucac

SEQ ID NO: 2258913 - RNA, 19 nt, Artificial Sequence
  Description of Artificial Sequence: Synthetic oligonucleotide
uguucagcauggacacgac

SEQ ID NO: 2258914 - RNA, 19 nt, Artificial Sequence
  Description of Artificial Sequence: Synthetic oligonucleotide
cuacgccaagcuauaagca

SEQ ID NO: 2258915 - RNA, 19 nt, Artificial Sequence
  Description of Artificial Sequence: Synthetic oligonucleotide
accaagggaugccaguaaa

SEQ ID NO: 2258916 - RNA, 19 nt, Artificial Sequence
  Description of Artificial Sequence: Synthetic oligonucleotide
acaguacggccacuucaag

SEQ ID NO: 2258917 - RNA, 19 nt, Artificial Sequence
  Description of Artificial Sequence: Synthetic oligonucleotide
ugcagaguggcaagagguu

SEQ ID NO: 2258918 - RNA, 19 nt, Artificial Sequence
  Description of Artificial Sequence: Synthetic oligonucleotide
cacuaugcuccugacuggc

SEQ ID NO: 2258919 - RNA, 19 nt, Artificial Sequence
  Description of Artificial Sequence: Synthetic oligonucleotide
uggacuagccagagccugu

SEQ ID NO: 2258920 - RNA, 19 nt, Artificial Sequence
  Description of Artificial Sequence: Synthetic oligonucleotide
cuccaccggaggaaacugg

SEQ ID NO: 2258921 - RNA, 19 nt, Artificial Sequence
  Description of Artificial Sequence: Synthetic oligonucleotide
uaccaagggaugccaguaa

SEQ ID NO: 2258922 - RNA, 19 nt, Artificial Sequence
  Description of Artificial Sequence: Synthetic oligonucleotide
guugccugccuucuaagua

SEQ ID NO: 2258923 - RNA, 19 nt, Artificial Sequence
  Description of Artificial Sequence: Synthetic oligonucleotide
aacccgcacgcuuccauua

SEQ ID NO: 2258924 - RNA, 19 nt, Artificial Sequence
  Description of Artificial Sequence: Synthetic oligonucleotide
cacuuucauugacuugggc

SEQ ID NO: 2258925 - RNA, 19 nt, Artificial Sequence
  Description of Artificial Sequence: Synthetic oligonucleotide
acgcuuccauuacccuucc

SEQ ID NO: 2258926 - RNA, 19 nt, Artificial Sequence
  Description of Artificial Sequence: Synthetic oligonucleotide
gcucuugacaaauguccag

SEQ ID NO: 2258927 - RNA, 19 nt, Artificial Sequence
  Description of Artificial Sequence: Synthetic oligonucleotide
cuagccagagccugucuca

SEQ ID NO: 2258928 - RNA, 19 nt, Artificial Sequence
  Description of Artificial Sequence: Synthetic oligonucleotide
cccguugagauguccauag

SEQ ID NO: 2258929 - RNA, 19 nt, Artificial Sequence
  Description of Artificial Sequence: Synthetic oligonucleotide
agguugccugccuucuaag

SEQ ID NO: 2258930 - RNA, 19 nt, Artificial Sequence
  Description of Artificial Sequence: Synthetic oligonucleotide
ugaucacagcagcggcuug

SEQ ID NO: 2258931 - RNA, 19 nt, Artificial Sequence
  Description of Artificial Sequence: Synthetic oligonucleotide
agcauggacacgaccacca

SEQ ID NO: 2258932 - RNA, 19 nt, Artificial Sequence
  Description of Artificial Sequence: Synthetic oligonucleotide
agaguggcaagagguuguc

SEQ ID NO: 2258933 - RNA, 19 nt, Artificial Sequence
  Description of Artificial Sequence: Synthetic oligonucleotide
ggagugaccaaagcaggag

SEQ ID NO: 2258934 - RNA, 19 nt, Artificial Sequence
  Description of Artificial Sequence: Synthetic oligonucleotide
cagguaugcuuuccaggag

SEQ ID NO: 2258935 - RNA, 19 nt, Artificial Sequence
  Description of Artificial Sequence: Synthetic oligonucleotide
aggagccguguucagcaug

SEQ ID NO: 2258936 - RNA, 19 nt, Artificial Sequence
  Description of Artificial Sequence: Synthetic oligonucleotide
acccgcacgcuuccauuac

SEQ ID NO: 2258937 - RNA, 19 nt, Artificial Sequence
  Description of Artificial Sequence: Synthetic oligonucleotide
ugccugccuucuaaguaga

SEQ ID NO: 2258938 - RNA, 19 nt, Artificial Sequence
  Description of Artificial Sequence: Synthetic oligonucleotide
ccauaggacacaaccugcc

SEQ ID NO: 2258939 - RNA, 19 nt, Artificial Sequence
  Description of Artificial Sequence: Synthetic oligonucleotide
ggagccguguucagcaugg

SEQ ID NO: 2258940 - RNA, 19 nt, Artificial Sequence
  Description of Artificial Sequence: Synthetic oligonucleotide
auaggacuaaauggcgaga

SEQ ID NO: 2258941 - RNA, 19 nt, Artificial Sequence
  Description of Artificial Sequence: Synthetic oligonucleotide
ugcuuuccaggagagccac

SEQ ID NO: 2258942 - RNA, 19 nt, Artificial Sequence
  Description of Artificial Sequence: Synthetic oligonucleotide
gguaugcuuuccaggagag

SEQ ID NO: 2258943 - RNA, 19 nt, Artificial Sequence
  Description of Artificial Sequence: Synthetic oligonucleotide
acgccaagcuauaagcacu

SEQ ID NO: 2258944 - RNA, 19 nt, Artificial Sequence
  Description of Artificial Sequence: Synthetic oligonucleotide
cuggacuagccagagccug

SEQ ID NO: 2258945 - RNA, 19 nt, Artificial Sequence
  Description of Artificial Sequence: Synthetic oligonucleotide
ccugacuggcaaaggagcc

SEQ ID NO: 2258946 - RNA, 19 nt, Artificial Sequence
  Description of Artificial Sequence: Synthetic oligonucleotide
agagcaaaggucagcuuau

SEQ ID NO: 2258947 - RNA, 19 nt, Artificial Sequence
  Description of Artificial Sequence: Synthetic oligonucleotide
uggucuacgccaagcuaua

SEQ ID NO: 2258948 - RNA, 19 nt, Artificial Sequence
  Description of Artificial Sequence: Synthetic oligonucleotide
ggggagugaccaaagcagg

SEQ ID NO: 2258949 - RNA, 19 nt, Artificial Sequence
  Description of Artificial Sequence: Synthetic oligonucleotide
cacaguacggccacuucaa

SEQ ID NO: 2258950 - RNA, 19 nt, Artificial Sequence
  Description of Artificial Sequence: Synthetic oligonucleotide
gcagagaugcaguucuuga

SEQ ID NO: 2258951 - RNA, 19 nt, Artificial Sequence
  Description of Artificial Sequence: Synthetic oligonucleotide
caugaccuggguaauggcu

SEQ ID NO: 2258952 - RNA, 19 nt, Artificial Sequence
  Description of Artificial Sequence: Synthetic oligonucleotide
cagagaugcaguucuugaa

SEQ ID NO: 2258953 - RNA, 19 nt, Artificial Sequence
  Description of Artificial Sequence: Synthetic oligonucleotide
uggcuggauaggacuaaau

SEQ ID NO: 2258954 - RNA, 19 nt, Artificial Sequence
  Description of Artificial Sequence: Synthetic oligonucleotide
agagguugucuucccuuaa

SEQ ID NO: 2258955 - RNA, 19 nt, Artificial Sequence
  Description of Artificial Sequence: Synthetic oligonucleotide
cauuacccuuccugucccc

SEQ ID NO: 2258956 - RNA, 19 nt, Artificial Sequence
  Description of Artificial Sequence: Synthetic oligonucleotide
cuaugcuccugacuggcaa

SEQ ID NO: 2258957 - RNA, 19 nt, Artificial Sequence
  Description of Artificial Sequence: Synthetic oligonucleotide
auuacccuuccugucccca

SEQ ID NO: 2258958 - RNA, 19 nt, Artificial Sequence
  Description of Artificial Sequence: Synthetic oligonucleotide
uccagggcccuggucuacg

SEQ ID NO: 2258959 - RNA, 19 nt, Artificial Sequence
  Description of Artificial Sequence: Synthetic oligonucleotide
gguaauggcugcagguggc

SEQ ID NO: 2258960 - RNA, 19 nt, Artificial Sequence
  Description of Artificial Sequence: Synthetic oligonucleotide
ugaggcuauaaggcaguau

SEQ ID NO: 2258961 - RNA, 19 nt, Artificial Sequence
  Description of Artificial Sequence: Synthetic oligonucleotide
accugccacugccaggaca

SEQ ID NO: 2258962 - RNA, 19 nt, Artificial Sequence
  Description of Artificial Sequence: Synthetic oligonucleotide
cuggucuacgccaagcuau

SEQ ID NO: 2258963 - RNA, 19 nt, Artificial Sequence
  Description of Artificial Sequence: Synthetic oligonucleotide
acggugcccgcuucugaag

SEQ ID NO: 2258964 - RNA, 19 nt, Artificial Sequence
  Description of Artificial Sequence: Synthetic oligonucleotide
caucccagggcagccagug

SEQ ID NO: 2258965 - RNA, 19 nt, Artificial Sequence
  Description of Artificial Sequence: Synthetic oligonucleotide
gcacuaugcuccugacugg

SEQ ID NO: 2258966 - RNA, 19 nt, Artificial Sequence
  Description of Artificial Sequence: Synthetic oligonucleotide
cacucagccaugccucuuc

SEQ ID NO: 2258967 - RNA, 19 nt, Artificial Sequence
  Description of Artificial Sequence: Synthetic oligonucleotide
ccagggugugcacugcugg

SEQ ID NO: 2258968 - RNA, 19 nt, Artificial Sequence
  Description of Artificial Sequence: Synthetic oligonucleotide
aaggagccguguucagcau

SEQ ID NO: 2258969 - RNA, 19 nt, Artificial Sequence
  Description of Artificial Sequence: Synthetic oligonucleotide
uauaccgaagccgcaccuu

SEQ ID NO: 2258970 - RNA, 19 nt, Artificial Sequence
  Description of Artificial Sequence: Synthetic oligonucleotide
aggggagcacagcaguuua

SEQ ID NO: 2258971 - RNA, 19 nt, Artificial Sequence
  Description of Artificial Sequence: Synthetic oligonucleotide
ggauaggacuaaauggcga

SEQ ID NO: 2258972 - RNA, 19 nt, Artificial Sequence
  Description of Artificial Sequence: Synthetic oligonucleotide
cucagccaugccucuucag

SEQ ID NO: 2258973 - RNA, 19 nt, Artificial Sequence
  Description of Artificial Sequence: Synthetic oligonucleotide
ggacacgaccaccaccagc

SEQ ID NO: 2258974 - RNA, 19 nt, Artificial Sequence
  Description of Artificial Sequence: Synthetic oligonucleotide
ccaagcuauaagcacuguc

SEQ ID NO: 2258975 - RNA, 19 nt, Artificial Sequence
  Description of Artificial Sequence: Synthetic oligonucleotide
accggaggaaacuggucua

SEQ ID NO: 2258976 - RNA, 19 nt, Artificial Sequence
  Description of Artificial Sequence: Synthetic oligonucleotide
uggcugcaacuucacuuuc

SEQ ID NO: 2258977 - RNA, 19 nt, Artificial Sequence
  Description of Artificial Sequence: Synthetic oligonucleotide
ucccugucccguugagaug

SEQ ID NO: 2258978 - RNA, 19 nt, Artificial Sequence
  Description of Artificial Sequence: Synthetic oligonucleotide
cauugacuugggcacugca

SEQ ID NO: 2258979 - RNA, 19 nt, Artificial Sequence
  Description of Artificial Sequence: Synthetic oligonucleotide
guaugcuuuccaggagagc

SEQ ID NO: 2258980 - RNA, 19 nt, Artificial Sequence
  Description of Artificial Sequence: Synthetic oligonucleotide
ggugcccgcuucugaaggg

SEQ ID NO: 2258981 - RNA, 19 nt, Artificial Sequence
  Description of Artificial Sequence: Synthetic oligonucleotide
gccugucucagguugccug

SEQ ID NO: 2258982 - RNA, 19 nt, Artificial Sequence
  Description of Artificial Sequence: Synthetic oligonucleotide
ugaagggaacccgcacgcu

SEQ ID NO: 2258983 - RNA, 19 nt, Artificial Sequence
  Description of Artificial Sequence: Synthetic oligonucleotide
gcuuauaccgaagccgcac

SEQ ID NO: 2258984 - RNA, 19 nt, Artificial Sequence
  Description of Artificial Sequence: Synthetic oligonucleotide
guauucccugucccguuga

SEQ ID NO: 2258985 - RNA, 19 nt, Artificial Sequence
  Description of Artificial Sequence: Synthetic oligonucleotide
aggacacaaccugccacug

SEQ ID NO: 2258986 - RNA, 19 nt, Artificial Sequence
  Description of Artificial Sequence: Synthetic oligonucleotide
gugcagaguggcaagaggu

SEQ ID NO: 2258987 - RNA, 19 nt, Artificial Sequence
  Description of Artificial Sequence: Synthetic oligonucleotide
augccaagcaagagguagu

SEQ ID NO: 2258988 - RNA, 19 nt, Artificial Sequence
  Description of Artificial Sequence: Synthetic oligonucleotide
gauguccauaggacacaac

SEQ ID NO: 2258989 - RNA, 19 nt, Artificial Sequence
  Description of Artificial Sequence: Synthetic oligonucleotide
caagcaagagguagugagu

SEQ ID NO: 2258990 - RNA, 19 nt, Artificial Sequence
  Description of Artificial Sequence: Synthetic oligonucleotide
ggaaggggagugaccaaag

SEQ ID NO: 2258991 - RNA, 19 nt, Artificial Sequence
  Description of Artificial Sequence: Synthetic oligonucleotide
cacacaguacggccacuuc

SEQ ID NO: 2258992 - RNA, 19 nt, Artificial Sequence
  Description of Artificial Sequence: Synthetic oligonucleotide
ucagguugccugccuucua

SEQ ID NO: 2258993 - RNA, 19 nt, Artificial Sequence
  Description of Artificial Sequence: Synthetic oligonucleotide
cucccugguaccaagggau

SEQ ID NO: 2258994 - RNA, 19 nt, Artificial Sequence
  Description of Artificial Sequence: Synthetic oligonucleotide
ggcaagagguugucuuccc

SEQ ID NO: 2258995 - RNA, 19 nt, Artificial Sequence
  Description of Artificial Sequence: Synthetic oligonucleotide
uggcagcacuugcuggggu

SEQ ID NO: 2258996 - RNA, 19 nt, Artificial Sequence
  Description of Artificial Sequence: Synthetic oligonucleotide
gagccugucucagguugcc

SEQ ID NO: 2258997 - RNA, 19 nt, Artificial Sequence
  Description of Artificial Sequence: Synthetic oligonucleotide
ugcccgcuucugaagggaa

SEQ ID NO: 2258998 - RNA, 19 nt, Artificial Sequence
  Description of Artificial Sequence: Synthetic oligonucleotide
cuggguaauggcugcaggu

SEQ ID NO: 2258999 - RNA, 19 nt, Artificial Sequence
  Description of Artificial Sequence: Synthetic oligonucleotide
cuccuucauuggguuagcc

SEQ ID NO: 2259000 - RNA, 19 nt, Artificial Sequence
  Description of Artificial Sequence: Synthetic oligonucleotide
auucccugucccguugaga

SEQ ID NO: 2259001 - RNA, 19 nt, Artificial Sequence
  Description of Artificial Sequence: Synthetic oligonucleotide
gcggcuuggcucuugacaa

SEQ ID NO: 2259002 - RNA, 19 nt, Artificial Sequence
  Description of Artificial Sequence: Synthetic oligonucleotide
agagccacggugcccgcuu

SEQ ID NO: 2259003 - RNA, 19 nt, Artificial Sequence
  Description of Artificial Sequence: Synthetic oligonucleotide
uaggcccagaguccaccau

SEQ ID NO: 2259004 - RNA, 19 nt, Artificial Sequence
  Description of Artificial Sequence: Synthetic oligonucleotide
cuugcuggggucauagguu

SEQ ID NO: 2259005 - RNA, 19 nt, Artificial Sequence
  Description of Artificial Sequence: Synthetic oligonucleotide
uggcgagaguucuguccca

SEQ ID NO: 2259006 - RNA, 19 nt, Artificial Sequence
  Description of Artificial Sequence: Synthetic oligonucleotide
guacggccacuucaaggca

SEQ ID NO: 2259007 - RNA, 19 nt, Artificial Sequence
  Description of Artificial Sequence: Synthetic oligonucleotide
gguuagaaaggcgcucuuc

SEQ ID NO: 2259008 - RNA, 19 nt, Artificial Sequence
  Description of Artificial Sequence: Synthetic oligonucleotide
uuggguuagccagcagcau

SEQ ID NO: 2259009 - RNA, 19 nt, Artificial Sequence
  Description of Artificial Sequence: Synthetic oligonucleotide
cuaggcccagaguccacca

SEQ ID NO: 2259010 - RNA, 19 nt, Artificial Sequence
  Description of Artificial Sequence: Synthetic oligonucleotide
cguugagauguccauagga

SEQ ID NO: 2259011 - RNA, 19 nt, Artificial Sequence
  Description of Artificial Sequence: Synthetic oligonucleotide
cagugaagccacacaccca

SEQ ID NO: 2259012 - RNA, 19 nt, Artificial Sequence
  Description of Artificial Sequence: Synthetic oligonucleotide
ucccguugagauguccaua

SEQ ID NO: 2259013 - RNA, 19 nt, Artificial Sequence
  Description of Artificial Sequence: Synthetic oligonucleotide
ggcucuugacaaaugucca

SEQ ID NO: 2259014 - RNA, 19 nt, Artificial Sequence
  Description of Artificial Sequence: Synthetic oligonucleotide
cagguugccugccuucuaa

SEQ ID NO: 2259015 - RNA, 19 nt, Artificial Sequence
  Description of Artificial Sequence: Synthetic oligonucleotide
ccgcacgcuuccauuaccc

SEQ ID NO: 2259016 - RNA, 19 nt, Artificial Sequence
  Description of Artificial Sequence: Synthetic oligonucleotide
gugaguaggauguccccau

SEQ ID NO: 2259017 - RNA, 19 nt, Artificial Sequence
  Description of Artificial Sequence: Synthetic oligonucleotide
ccugguaccaagggaugcc

SEQ ID NO: 2259018 - RNA, 19 nt, Artificial Sequence
  Description of Artificial Sequence: Synthetic oligonucleotide
cucacccaguucugugcuc

SEQ ID NO: 2259019 - RNA, 19 nt, Artificial Sequence
  Description of Artificial Sequence: Synthetic oligonucleotide
cugcuccccgagagcaaag

SEQ ID NO: 2259020 - RNA, 19 nt, Artificial Sequence
  Description of Artificial Sequence: Synthetic oligonucleotide
gcaguucuugaaggguuag

SEQ ID NO: 2259021 - RNA, 19 nt, Artificial Sequence
  Description of Artificial Sequence: Synthetic oligonucleotide
ggacuaaauggcgagaguu

SEQ ID NO: 2259022 - RNA, 19 nt, Artificial Sequence
  Description of Artificial Sequence: Synthetic oligonucleotide
cugucccguugagaugucc

SEQ ID NO: 2259023 - RNA, 19 nt, Artificial Sequence
  Description of Artificial Sequence: Synthetic oligonucleotide
ggcccagaguccaccaucc

SEQ ID NO: 2259024 - RNA, 19 nt, Artificial Sequence
  Description of Artificial Sequence: Synthetic oligonucleotide
cagggcccuggucuacgcc

SEQ ID NO: 2259025 - RNA, 19 nt, Artificial Sequence
  Description of Artificial Sequence: Synthetic oligonucleotide
caagagguugucuucccuu

SEQ ID NO: 2259026 - RNA, 19 nt, Artificial Sequence
  Description of Artificial Sequence: Synthetic oligonucleotide
agcuuauaccgaagccgca

SEQ ID NO: 2259027 - RNA, 19 nt, Artificial Sequence
  Description of Artificial Sequence: Synthetic oligonucleotide
cugcuggacuagccagagc

SEQ ID NO: 2259028 - RNA, 19 nt, Artificial Sequence
  Description of Artificial Sequence: Synthetic oligonucleotide
cugguaccaagggaugcca

SEQ ID NO: 2259029 - RNA, 19 nt, Artificial Sequence
  Description of Artificial Sequence: Synthetic oligonucleotide
cacggugcccgcuucugaa

SEQ ID NO: 2259030 - RNA, 19 nt, Artificial Sequence
  Description of Artificial Sequence: Synthetic oligonucleotide
cagccagugaagccacaca

SEQ ID NO: 2259031 - RNA, 19 nt, Artificial Sequence
  Description of Artificial Sequence: Synthetic oligonucleotide
ggcgagaguucugucccag

SEQ ID NO: 2259032 - RNA, 19 nt, Artificial Sequence
  Description of Artificial Sequence: Synthetic oligonucleotide
ggcagcacuugcugggguc

SEQ ID NO: 2259033 - RNA, 19 nt, Artificial Sequence
  Description of Artificial Sequence: Synthetic oligonucleotide
ccuuccuguccccagguga

SEQ ID NO: 2259034 - RNA, 19 nt, Artificial Sequence
  Description of Artificial Sequence: Synthetic oligonucleotide
aucccagggcagccaguga

SEQ ID NO: 2259035 - RNA, 19 nt, Artificial Sequence
  Description of Artificial Sequence: Synthetic oligonucleotide
cagcaugaccuggguaaug

SEQ ID NO: 2259036 - RNA, 19 nt, Artificial Sequence
  Description of Artificial Sequence: Synthetic oligonucleotide
aggcgcucuucagagcccu

SEQ ID NO: 2259037 - RNA, 19 nt, Artificial Sequence
  Description of Artificial Sequence: Synthetic oligonucleotide
ggagggugcagaguggcaa

SEQ ID NO: 2259038 - RNA, 19 nt, Artificial Sequence
  Description of Artificial Sequence: Synthetic oligonucleotide
cugcuccaccggaggaaac

SEQ ID NO: 2259039 - RNA, 19 nt, Artificial Sequence
  Description of Artificial Sequence: Synthetic oligonucleotide
aaccuacucuaggcccaga

SEQ ID NO: 2259040 - RNA, 19 nt, Artificial Sequence
  Description of Artificial Sequence: Synthetic oligonucleotide
acacaaccugccacugcca

SEQ ID NO: 2259041 - RNA, 19 nt, Artificial Sequence
  Description of Artificial Sequence: Synthetic oligonucleotide
gacuggcaaaggagccgug

SEQ ID NO: 2259042 - RNA, 19 nt, Artificial Sequence
  Description of Artificial Sequence: Synthetic oligonucleotide
ccguugagauguccauagg

SEQ ID NO: 2259043 - RNA, 19 nt, Artificial Sequence
  Description of Artificial Sequence: Synthetic oligonucleotide
gcagcacuaugcuccugac

SEQ ID NO: 2259044 - RNA, 19 nt, Artificial Sequence
  Description of Artificial Sequence: Synthetic oligonucleotide
cugcugcagguaugcuuuc

SEQ ID NO: 2259045 - RNA, 19 nt, Artificial Sequence
  Description of Artificial Sequence: Synthetic oligonucleotide
agguggcuggauaggacua

SEQ ID NO: 2259046 - RNA, 19 nt, Artificial Sequence
  Description of Artificial Sequence: Synthetic oligonucleotide
gggaaggggagugaccaaa

SEQ ID NO: 2259047 - RNA, 19 nt, Artificial Sequence
  Description of Artificial Sequence: Synthetic oligonucleotide
gugaccaaagcaggagggu

SEQ ID NO: 2259048 - RNA, 19 nt, Artificial Sequence
  Description of Artificial Sequence: Synthetic oligonucleotide
gacuagccagagccugucu

SEQ ID NO: 2259049 - RNA, 19 nt, Artificial Sequence
  Description of Artificial Sequence: Synthetic oligonucleotide
gguugccugccuucuaagu

SEQ ID NO: 2259050 - RNA, 19 nt, Artificial Sequence
  Description of Artificial Sequence: Synthetic oligonucleotide
gaacccgcacgcuuccauu

SEQ ID NO: 2259051 - RNA, 19 nt, Artificial Sequence
  Description of Artificial Sequence: Synthetic oligonucleotide
ccaagggaugccaguaaaa

SEQ ID NO: 2259052 - RNA, 19 nt, Artificial Sequence
  Description of Artificial Sequence: Synthetic oligonucleotide
ggugugcacugcuggacua

SEQ ID NO: 2259053 - RNA, 19 nt, Artificial Sequence
  Description of Artificial Sequence: Synthetic oligonucleotide
gagcaaaggucagcuuaua

SEQ ID NO: 2259054 - RNA, 19 nt, Artificial Sequence
  Description of Artificial Sequence: Synthetic oligonucleotide
gcuuggcucuugacaaaug

SEQ ID NO: 2259055 - RNA, 19 nt, Artificial Sequence
  Description of Artificial Sequence: Synthetic oligonucleotide
cagcggcuuggcucuugac

SEQ ID NO: 2259056 - RNA, 19 nt, Artificial Sequence
  Description of Artificial Sequence: Synthetic oligonucleotide
gugcccgcuucugaaggga

SEQ ID NO: 2259057 - RNA, 19 nt, Artificial Sequence
  Description of Artificial Sequence: Synthetic oligonucleotide
cggugcccgcuucugaagg

SEQ ID NO: 2259058 - RNA, 19 nt, Artificial Sequence
  Description of Artificial Sequence: Synthetic oligonucleotide
gagccacggugcccgcuuc

SEQ ID NO: 2259059 - RNA, 19 nt, Artificial Sequence
  Description of Artificial Sequence: Synthetic oligonucleotide
cccgcacgcuuccauuacc

SEQ ID NO: 2259060 - RNA, 19 nt, Artificial Sequence
  Description of Artificial Sequence: Synthetic oligonucleotide
ggagcacagcaguuuauuu

SEQ ID NO: 2259061 - RNA, 19 nt, Artificial Sequence
  Description of Artificial Sequence: Synthetic oligonucleotide
cccgagagcaaaggucagc

SEQ ID NO: 2259062 - RNA, 19 nt, Artificial Sequence
  Description of Artificial Sequence: Synthetic oligonucleotide
ggacuagccagagccuguc

SEQ ID NO: 2259063 - RNA, 19 nt, Artificial Sequence
  Description of Artificial Sequence: Synthetic oligonucleotide
ggugaggcuauaaggcagu

SEQ ID NO: 2259064 - RNA, 19 nt, Artificial Sequence
  Description of Artificial Sequence: Synthetic oligonucleotide
gcaguauucccugucccgu

SEQ ID NO: 2259065 - RNA, 19 nt, Artificial Sequence
  Description of Artificial Sequence: Synthetic oligonucleotide
gggugcagagaugcaguuc

SEQ ID NO: 2259066 - RNA, 19 nt, Artificial Sequence
  Description of Artificial Sequence: Synthetic oligonucleotide
ccaccggaggaaacugguc

SEQ ID NO: 2259067 - RNA, 19 nt, Artificial Sequence
  Description of Artificial Sequence: Synthetic oligonucleotide
gggugugcacugcuggacu

SEQ ID NO: 2259068 - RNA, 19 nt, Artificial Sequence
  Description of Artificial Sequence: Synthetic oligonucleotide
gaguggcaagagguugucu

SEQ ID NO: 2259069 - RNA, 19 nt, Artificial Sequence
  Description of Artificial Sequence: Synthetic oligonucleotide
cagcacuaugcuccugacu

SEQ ID NO: 2259070 - RNA, 19 nt, Artificial Sequence
  Description of Artificial Sequence: Synthetic oligonucleotide
cccagaggguggcugcaac

SEQ ID NO: 2259071 - RNA, 19 nt, Artificial Sequence
  Description of Artificial Sequence: Synthetic oligonucleotide
ccggaggaaacuggucuac

SEQ ID NO: 2259072 - RNA, 19 nt, Artificial Sequence
  Description of Artificial Sequence: Synthetic oligonucleotide
cucagguugccugccuucu

SEQ ID NO: 2259073 - RNA, 19 nt, Artificial Sequence
  Description of Artificial Sequence: Synthetic oligonucleotide
gcccuggucuacgccaagc

SEQ ID NO: 2259074 - RNA, 19 nt, Artificial Sequence
  Description of Artificial Sequence: Synthetic oligonucleotide
ccgcuucugaagggaaccc

SEQ ID NO: 2259075 - RNA, 19 nt, Artificial Sequence
  Description of Artificial Sequence: Synthetic oligonucleotide
gguggcuggauaggacuaa

SEQ ID NO: 2259076 - RNA, 19 nt, Artificial Sequence
  Description of Artificial Sequence: Synthetic oligonucleotide
aggcacacagggagaugau

SEQ ID NO: 2259077 - RNA, 19 nt, Artificial Sequence
  Description of Artificial Sequence: Synthetic oligonucleotide
ccccgagagcaaaggucag

SEQ ID NO: 2259078 - RNA, 19 nt, Artificial Sequence
  Description of Artificial Sequence: Synthetic oligonucleotide
gcagcggcuuggcucuuga

SEQ ID NO: 2259079 - RNA, 19 nt, Artificial Sequence
  Description of Artificial Sequence: Synthetic oligonucleotide
gccaagcaagagguaguga

SEQ ID NO: 2259080 - RNA, 19 nt, Artificial Sequence
  Description of Artificial Sequence: Synthetic oligonucleotide
gugaggcuauaaggcagua

SEQ ID NO: 2259081 - RNA, 19 nt, Artificial Sequence
  Description of Artificial Sequence: Synthetic oligonucleotide
gcgagaguucugucccaga

SEQ ID NO: 2259082 - RNA, 19 nt, Artificial Sequence
  Description of Artificial Sequence: Synthetic oligonucleotide
cuaccucacccaguucugu

SEQ ID NO: 2259083 - RNA, 19 nt, Artificial Sequence
  Description of Artificial Sequence: Synthetic oligonucleotide
gcacgcuuccauuacccuu

SEQ ID NO: 2259084 - RNA, 19 nt, Artificial Sequence
  Description of Artificial Sequence: Synthetic oligonucleotide
gagccguguucagcaugga

SEQ ID NO: 2259085 - RNA, 19 nt, Artificial Sequence
  Description of Artificial Sequence: Synthetic oligonucleotide
ggagagccacggugcccgc

SEQ ID NO: 2259086 - RNA, 19 nt, Artificial Sequence
  Description of Artificial Sequence: Synthetic oligonucleotide
guccagggcccuggucuac

SEQ ID NO: 2259087 - RNA, 19 nt, Artificial Sequence
  Description of Artificial Sequence: Synthetic oligonucleotide
ccuggucuacgccaagcua

SEQ ID NO: 2259088 - RNA, 19 nt, Artificial Sequence
  Description of Artificial Sequence: Synthetic oligonucleotide
ggaacccgcacgcuuccau

SEQ ID NO: 2259089 - RNA, 19 nt, Artificial Sequence
  Description of Artificial Sequence: Synthetic oligonucleotide
caguauucccugucccguu

SEQ ID NO: 2259090 - RNA, 19 nt, Artificial Sequence
  Description of Artificial Sequence: Synthetic oligonucleotide
ccgagagcaaaggucagcu

SEQ ID NO: 2259091 - RNA, 19 nt, Artificial Sequence
  Description of Artificial Sequence: Synthetic oligonucleotide
cccugucccguugagaugu

SEQ ID NO: 2259092 - RNA, 19 nt, Artificial Sequence
  Description of Artificial Sequence: Synthetic oligonucleotide
ccuacucuaggcccagagu

SEQ ID NO: 2259093 - RNA, 19 nt, Artificial Sequence
  Description of Artificial Sequence: Synthetic oligonucleotide
caccaucccagggcagcca

SEQ ID NO: 2259094 - RNA, 19 nt, Artificial Sequence
  Description of Artificial Sequence: Synthetic oligonucleotide
gccacggugcccgcuucug

SEQ ID NO: 2259095 - RNA, 19 nt, Artificial Sequence
  Description of Artificial Sequence: Synthetic oligonucleotide
gcuccccgagagcaaaggu

SEQ ID NO: 2259096 - RNA, 19 nt, Artificial Sequence
  Description of Artificial Sequence: Synthetic oligonucleotide
agcugcuccccgagagcaa

SEQ ID NO: 2259097 - RNA, 19 nt, Artificial Sequence
  Description of Artificial Sequence: Synthetic oligonucleotide
ggucuacgccaagcuauaa

SEQ ID NO: 2259098 - RNA, 19 nt, Artificial Sequence
  Description of Artificial Sequence: Synthetic oligonucleotide
gcccgcuucugaagggaac

SEQ ID NO: 2259099 - RNA, 19 nt, Artificial Sequence
  Description of Artificial Sequence: Synthetic oligonucleotide
gggagcacagcaguuuauu

SEQ ID NO: 2259100 - RNA, 19 nt, Artificial Sequence
  Description of Artificial Sequence: Synthetic oligonucleotide
ccucacccaguucugugcu

SEQ ID NO: 2259101 - RNA, 19 nt, Artificial Sequence
  Description of Artificial Sequence: Synthetic oligonucleotide
gcuggacuagccagagccu

SEQ ID NO: 2259102 - RNA, 19 nt, Artificial Sequence
  Description of Artificial Sequence: Synthetic oligonucleotide
cccuggucuacgccaagcu

SEQ ID NO: 2259103 - RNA, 19 nt, Artificial Sequence
  Description of Artificial Sequence: Synthetic oligonucleotide
ggguuagaaaggcgcucuu

SEQ ID NO: 2259104 - RNA, 19 nt, Artificial Sequence
  Description of Artificial Sequence: Synthetic oligonucleotide
ccugucccguugagauguc

SEQ ID NO: 2259105 - RNA, 19 nt, Artificial Sequence
  Description of Artificial Sequence: Synthetic oligonucleotide
ccacggugcccgcuucuga

SEQ ID NO: 2259106 - RNA, 19 nt, Artificial Sequence
  Description of Artificial Sequence: Synthetic oligonucleotide
gggaacccgcacgcuucca

SEQ ID NO: 2259107 - RNA, 19 nt, Artificial Sequence
  Description of Artificial Sequence: Synthetic oligonucleotide
gccaagcuauaagcacugu

SEQ ID NO: 2259108 - RNA, 19 nt, Artificial Sequence
  Description of Artificial Sequence: Synthetic oligonucleotide
ggggagcacagcaguuuau

SEQ ID NO: 2259109 - RNA, 19 nt, Artificial Sequence
  Description of Artificial Sequence: Synthetic oligonucleotide
ggcgcucuucagagcccuc

SEQ ID NO: 2259110 - RNA, 19 nt, Artificial Sequence
  Description of Artificial Sequence: Synthetic oligonucleotide
cgcacgcuuccauuacccu

SEQ ID NO: 2259111 - RNA, 19 nt, Artificial Sequence
  Description of Artificial Sequence: Synthetic oligonucleotide
gcccucucccugguaccaa

SEQ ID NO: 2259112 - RNA, 19 nt, Artificial Sequence
  Description of Artificial Sequence: Synthetic oligonucleotide
ccgcaccuucuccuucauu

SEQ ID NO: 2259113 - RNA, 19 nt, Artificial Sequence
  Description of Artificial Sequence: Synthetic oligonucleotide
aaguuuaaggccuucaggg

SEQ ID NO: 2259114 - RNA, 19 nt, Artificial Sequence
  Description of Artificial Sequence: Synthetic oligonucleotide
acugacaacaaacaguucc

SEQ ID NO: 2259115 - RNA, 19 nt, Artificial Sequence
  Description of Artificial Sequence: Synthetic oligonucleotide
aauaccuggaaauucuccc

SEQ ID NO: 2259116 - RNA, 19 nt, Artificial Sequence
  Description of Artificial Sequence: Synthetic oligonucleotide
aguaauccaaguuuaaggc

SEQ ID NO: 2259117 - RNA, 19 nt, Artificial Sequence
  Description of Artificial Sequence: Synthetic oligonucleotide
aaguaauccaaguuuaagg

SEQ ID NO: 2259118 - RNA, 19 nt, Artificial Sequence
  Description of Artificial Sequence: Synthetic oligonucleotide
uuaauucaaaaucaaauac

SEQ ID NO: 2259119 - RNA, 19 nt, Artificial Sequence
  Description of Artificial Sequence: Synthetic oligonucleotide
ucuauuauggcaaaacuca

SEQ ID NO: 2259120 - RNA, 19 nt, Artificial Sequence
  Description of Artificial Sequence: Synthetic oligonucleotide
ugugguauaaguaagcaca

SEQ ID NO: 2259121 - RNA, 19 nt, Artificial Sequence
  Description of Artificial Sequence: Synthetic oligonucleotide
ucaucaguacucuauaugg

SEQ ID NO: 2259122 - RNA, 19 nt, Artificial Sequence
  Description of Artificial Sequence: Synthetic oligonucleotide
uaauucaaaaucaaauacc

SEQ ID NO: 2259123 - RNA, 19 nt, Artificial Sequence
  Description of Artificial Sequence: Synthetic oligonucleotide
uguuaauucaaaaucaaau

SEQ ID NO: 2259124 - RNA, 19 nt, Artificial Sequence
  Description of Artificial Sequence: Synthetic oligonucleotide
gaaaggauaguccuugugg

SEQ ID NO: 2259125 - RNA, 19 nt, Artificial Sequence
  Description of Artificial Sequence: Synthetic oligonucleotide
aaaucaaauaccuggaaau

SEQ ID NO: 2259126 - RNA, 19 nt, Artificial Sequence
  Description of Artificial Sequence: Synthetic oligonucleotide
ucaguuaaggggaaugugg

SEQ ID NO: 2259127 - RNA, 19 nt, Artificial Sequence
  Description of Artificial Sequence: Synthetic oligonucleotide
caugguuaaaguuugacac

SEQ ID NO: 2259128 - RNA, 19 nt, Artificial Sequence
  Description of Artificial Sequence: Synthetic oligonucleotide
ucuugaaccuccaagagga

SEQ ID NO: 2259129 - RNA, 19 nt, Artificial Sequence
  Description of Artificial Sequence: Synthetic oligonucleotide
aaaagcugguauuacuggg

SEQ ID NO: 2259130 - RNA, 19 nt, Artificial Sequence
  Description of Artificial Sequence: Synthetic oligonucleotide
auuacuaucacauuccuuu

SEQ ID NO: 2259131 - RNA, 19 nt, Artificial Sequence
  Description of Artificial Sequence: Synthetic oligonucleotide
aaagacuucuuaugguagg

SEQ ID NO: 2259132 - RNA, 19 nt, Artificial Sequence
  Description of Artificial Sequence: Synthetic oligonucleotide
uucuguuaauucaaaauca

SEQ ID NO: 2259133 - RNA, 19 nt, Artificial Sequence
  Description of Artificial Sequence: Synthetic oligonucleotide
cucuauauggaaaggauag

SEQ ID NO: 2259134 - RNA, 19 nt, Artificial Sequence
  Description of Artificial Sequence: Synthetic oligonucleotide
guuuaaaaguuucucaagc

SEQ ID NO: 2259135 - RNA, 19 nt, Artificial Sequence
  Description of Artificial Sequence: Synthetic oligonucleotide
uuagugauuggcuuaaacu

SEQ ID NO: 2259136 - RNA, 19 nt, Artificial Sequence
  Description of Artificial Sequence: Synthetic oligonucleotide
uucggaauuacuaucacau

SEQ ID NO: 2259137 - RNA, 19 nt, Artificial Sequence
  Description of Artificial Sequence: Synthetic oligonucleotide
uaauccaaguuuaaggccu

SEQ ID NO: 2259138 - RNA, 19 nt, Artificial Sequence
  Description of Artificial Sequence: Synthetic oligonucleotide
aaguuugacaccccaaugu

SEQ ID NO: 2259139 - RNA, 19 nt, Artificial Sequence
  Description of Artificial Sequence: Synthetic oligonucleotide
uaaguaagcacagucaaug

SEQ ID NO: 2259140 - RNA, 19 nt, Artificial Sequence
  Description of Artificial Sequence: Synthetic oligonucleotide
acaacaaacaguuccucuc

SEQ ID NO: 2259141 - RNA, 19 nt, Artificial Sequence
  Description of Artificial Sequence: Synthetic oligonucleotide
auuucuauuauggcaaaac

SEQ ID NO: 2259142 - RNA, 19 nt, Artificial Sequence
  Description of Artificial Sequence: Synthetic oligonucleotide
cauccaacaacucagcccc

SEQ ID NO: 2259143 - RNA, 19 nt, Artificial Sequence
  Description of Artificial Sequence: Synthetic oligonucleotide
ucaaauaccuggaaauucu

SEQ ID NO: 2259144 - RNA, 19 nt, Artificial Sequence
  Description of Artificial Sequence: Synthetic oligonucleotide
aaaggauaguccuuguggu

SEQ ID NO: 2259145 - RNA, 19 nt, Artificial Sequence
  Description of Artificial Sequence: Synthetic oligonucleotide
uuacugacaacaaacaguu

SEQ ID NO: 2259146 - RNA, 19 nt, Artificial Sequence
  Description of Artificial Sequence: Synthetic oligonucleotide
aaauaccuggaaauucucc

SEQ ID NO: 2259147 - RNA, 19 nt, Artificial Sequence
  Description of Artificial Sequence: Synthetic oligonucleotide
gugguguucaguuaagggg

SEQ ID NO: 2259148 - RNA, 19 nt, Artificial Sequence
  Description of Artificial Sequence: Synthetic oligonucleotide
augguuaaaguuugacacc

SEQ ID NO: 2259149 - RNA, 19 nt, Artificial Sequence
  Description of Artificial Sequence: Synthetic oligonucleotide
uguucaugguuaaaguuug

SEQ ID NO: 2259150 - RNA, 19 nt, Artificial Sequence
  Description of Artificial Sequence: Synthetic oligonucleotide
ugugguguucaguuaaggg

SEQ ID NO: 2259151 - RNA, 19 nt, Artificial Sequence
  Description of Artificial Sequence: Synthetic oligonucleotide
uucuauuauggcaaaacuc

SEQ ID NO: 2259152 - RNA, 19 nt, Artificial Sequence
  Description of Artificial Sequence: Synthetic oligonucleotide
auuccuuuggaucugaaau

SEQ ID NO: 2259153 - RNA, 19 nt, Artificial Sequence
  Description of Artificial Sequence: Synthetic oligonucleotide
ucggaucacaaucugagca

SEQ ID NO: 2259154 - RNA, 19 nt, Artificial Sequence
  Description of Artificial Sequence: Synthetic oligonucleotide
uugauagcggucuuaacug

SEQ ID NO: 2259155 - RNA, 19 nt, Artificial Sequence
  Description of Artificial Sequence: Synthetic oligonucleotide
acagggaugguuugcaugg

SEQ ID NO: 2259156 - RNA, 19 nt, Artificial Sequence
  Description of Artificial Sequence: Synthetic oligonucleotide
ucauugugguauaaguaag

SEQ ID NO: 2259157 - RNA, 19 nt, Artificial Sequence
  Description of Artificial Sequence: Synthetic oligonucleotide
aaaguuugacaccccaaug

SEQ ID NO: 2259158 - RNA, 19 nt, Artificial Sequence
  Description of Artificial Sequence: Synthetic oligonucleotide
uuugacaccccaaugugcu

SEQ ID NO: 2259159 - RNA, 19 nt, Artificial Sequence
  Description of Artificial Sequence: Synthetic oligonucleotide
ugaaaucggaucacaaucu

SEQ ID NO: 2259160 - RNA, 19 nt, Artificial Sequence
  Description of Artificial Sequence: Synthetic oligonucleotide
agauuucggaauuacuauc

SEQ ID NO: 2259161 - RNA, 19 nt, Artificial Sequence
  Description of Artificial Sequence: Synthetic oligonucleotide
uggaucugaaaucggauca

SEQ ID NO: 2259162 - RNA, 19 nt, Artificial Sequence
  Description of Artificial Sequence: Synthetic oligonucleotide
aucacauuccuuuggaucu

SEQ ID NO: 2259163 - RNA, 19 nt, Artificial Sequence
  Description of Artificial Sequence: Synthetic oligonucleotide
gaucuugcgaaugacaaug

SEQ ID NO: 2259164 - RNA, 19 nt, Artificial Sequence
  Description of Artificial Sequence: Synthetic oligonucleotide
acgguaagcugucacagac

SEQ ID NO: 2259165 - RNA, 19 nt, Artificial Sequence
  Description of Artificial Sequence: Synthetic oligonucleotide
uggcuuaaacuucaaacca

SEQ ID NO: 2259166 - RNA, 19 nt, Artificial Sequence
  Description of Artificial Sequence: Synthetic oligonucleotide
ugguguucaguuaagggga

SEQ ID NO: 2259167 - RNA, 19 nt, Artificial Sequence
  Description of Artificial Sequence: Synthetic oligonucleotide
ucaugguuaaaguuugaca

SEQ ID NO: 2259168 - RNA, 19 nt, Artificial Sequence
  Description of Artificial Sequence: Synthetic oligonucleotide
aaucagauucuucugguua

SEQ ID NO: 2259169 - RNA, 19 nt, Artificial Sequence
  Description of Artificial Sequence: Synthetic oligonucleotide
uccuuuggaucugaaaucg

SEQ ID NO: 2259170 - RNA, 19 nt, Artificial Sequence
  Description of Artificial Sequence: Synthetic oligonucleotide
uacuaucacauuccuuugg

SEQ ID NO: 2259171 - RNA, 19 nt, Artificial Sequence
  Description of Artificial Sequence: Synthetic oligonucleotide
uuaucuccgggcuugaaac

SEQ ID NO: 2259172 - RNA, 19 nt, Artificial Sequence
  Description of Artificial Sequence: Synthetic oligonucleotide
aguuaaggggaauguggcc

SEQ ID NO: 2259173 - RNA, 19 nt, Artificial Sequence
  Description of Artificial Sequence: Synthetic oligonucleotide
uaugguaggugcaccacag

SEQ ID NO: 2259174 - RNA, 19 nt, Artificial Sequence
  Description of Artificial Sequence: Synthetic oligonucleotide
guuaauucaaaaucaaaua

SEQ ID NO: 2259175 - RNA, 19 nt, Artificial Sequence
  Description of Artificial Sequence: Synthetic oligonucleotide
guacccaaaguugauagcg

SEQ ID NO: 2259176 - RNA, 19 nt, Artificial Sequence
  Description of Artificial Sequence: Synthetic oligonucleotide
uugauucccauuccgaccu

SEQ ID NO: 2259177 - RNA, 19 nt, Artificial Sequence
  Description of Artificial Sequence: Synthetic oligonucleotide
uagugauuggcuuaaacuu

SEQ ID NO: 2259178 - RNA, 19 nt, Artificial Sequence
  Description of Artificial Sequence: Synthetic oligonucleotide
cuugggguaacagauuucg

SEQ ID NO: 2259179 - RNA, 19 nt, Artificial Sequence
  Description of Artificial Sequence: Synthetic oligonucleotide
caaguuuaaggccuucagg

SEQ ID NO: 2259180 - RNA, 19 nt, Artificial Sequence
  Description of Artificial Sequence: Synthetic oligonucleotide
uauuggugcaugcuguucu

SEQ ID NO: 2259181 - RNA, 19 nt, Artificial Sequence
  Description of Artificial Sequence: Synthetic oligonucleotide
ugguuaaaguuugacaccc

SEQ ID NO: 2259182 - RNA, 19 nt, Artificial Sequence
  Description of Artificial Sequence: Synthetic oligonucleotide
uucuuugcgaucuugcgaa

SEQ ID NO: 2259183 - RNA, 19 nt, Artificial Sequence
  Description of Artificial Sequence: Synthetic oligonucleotide
ucaccaaagacuucuuaug

SEQ ID NO: 2259184 - RNA, 19 nt, Artificial Sequence
  Description of Artificial Sequence: Synthetic oligonucleotide
uccgaccucacccucauug

SEQ ID NO: 2259185 - RNA, 19 nt, Artificial Sequence
  Description of Artificial Sequence: Synthetic oligonucleotide
ucccauuccgaccucaccc

SEQ ID NO: 2259186 - RNA, 19 nt, Artificial Sequence
  Description of Artificial Sequence: Synthetic oligonucleotide
aaccaggcuuguuuaaaag

SEQ ID NO: 2259187 - RNA, 19 nt, Artificial Sequence
  Description of Artificial Sequence: Synthetic oligonucleotide
guaauccaaguuuaaggcc

SEQ ID NO: 2259188 - RNA, 19 nt, Artificial Sequence
  Description of Artificial Sequence: Synthetic oligonucleotide
uugcgaaugacaaugucau

SEQ ID NO: 2259189 - RNA, 19 nt, Artificial Sequence
  Description of Artificial Sequence: Synthetic oligonucleotide
uuauggcaaaacucaauca

SEQ ID NO: 2259190 - RNA, 19 nt, Artificial Sequence
  Description of Artificial Sequence: Synthetic oligonucleotide
aguaagcacagucaaugug

SEQ ID NO: 2259191 - RNA, 19 nt, Artificial Sequence
  Description of Artificial Sequence: Synthetic oligonucleotide
ucccuaauccgacuugggg

SEQ ID NO: 2259192 - RNA, 19 nt, Artificial Sequence
  Description of Artificial Sequence: Synthetic oligonucleotide
aaauucucccuaauccgac

SEQ ID NO: 2259193 - RNA, 19 nt, Artificial Sequence
  Description of Artificial Sequence: Synthetic oligonucleotide
uuugcgaucuugcgaauga

SEQ ID NO: 2259194 - RNA, 19 nt, Artificial Sequence
  Description of Artificial Sequence: Synthetic oligonucleotide
cauugcaauucaaaggcac

SEQ ID NO: 2259195 - RNA, 19 nt, Artificial Sequence
  Description of Artificial Sequence: Synthetic oligonucleotide
auuucggaauuacuaucac

SEQ ID NO: 2259196 - RNA, 19 nt, Artificial Sequence
  Description of Artificial Sequence: Synthetic oligonucleotide
ugggguaacagauuucgga

SEQ ID NO: 2259197 - RNA, 19 nt, Artificial Sequence
  Description of Artificial Sequence: Synthetic oligonucleotide
aucucuugaaccuccaaga

SEQ ID NO: 2259198 - RNA, 19 nt, Artificial Sequence
  Description of Artificial Sequence: Synthetic oligonucleotide
uaagauauggguggcauuc

SEQ ID NO: 2259199 - RNA, 19 nt, Artificial Sequence
  Description of Artificial Sequence: Synthetic oligonucleotide
gccauugcaauucaaaggc

SEQ ID NO: 2259200 - RNA, 19 nt, Artificial Sequence
  Description of Artificial Sequence: Synthetic oligonucleotide
cagcuuacugacaacaaac

SEQ ID NO: 2259201 - RNA, 19 nt, Artificial Sequence
  Description of Artificial Sequence: Synthetic oligonucleotide
auucaaucugguuagugau

SEQ ID NO: 2259202 - RNA, 19 nt, Artificial Sequence
  Description of Artificial Sequence: Synthetic oligonucleotide
uuacuggguauuaccaggc

SEQ ID NO: 2259203 - RNA, 19 nt, Artificial Sequence
  Description of Artificial Sequence: Synthetic oligonucleotide
agcggucuuaacugcaucg

SEQ ID NO: 2259204 - RNA, 19 nt, Artificial Sequence
  Description of Artificial Sequence: Synthetic oligonucleotide
uacccaaaguugauagcgg

SEQ ID NO: 2259205 - RNA, 19 nt, Artificial Sequence
  Description of Artificial Sequence: Synthetic oligonucleotide
caguacucuauauggaaag

SEQ ID NO: 2259206 - RNA, 19 nt, Artificial Sequence
  Description of Artificial Sequence: Synthetic oligonucleotide
uacucuauauggaaaggau

SEQ ID NO: 2259207 - RNA, 19 nt, Artificial Sequence
  Description of Artificial Sequence: Synthetic oligonucleotide
ucaaucagauucuucuggu

SEQ ID NO: 2259208 - RNA, 19 nt, Artificial Sequence
  Description of Artificial Sequence: Synthetic oligonucleotide
aaugugccgguacccaaag

SEQ ID NO: 2259209 - RNA, 19 nt, Artificial Sequence
  Description of Artificial Sequence: Synthetic oligonucleotide
aucugagcagcagauuucc

SEQ ID NO: 2259210 - RNA, 19 nt, Artificial Sequence
  Description of Artificial Sequence: Synthetic oligonucleotide
aaguaagcacagucaaugu

SEQ ID NO: 2259211 - RNA, 19 nt, Artificial Sequence
  Description of Artificial Sequence: Synthetic oligonucleotide
aggccauugcaauucaaag

SEQ ID NO: 2259212 - RNA, 19 nt, Artificial Sequence
  Description of Artificial Sequence: Synthetic oligonucleotide
aaggauaguccuuguggug

SEQ ID NO: 2259213 - RNA, 19 nt, Artificial Sequence
  Description of Artificial Sequence: Synthetic oligonucleotide
agugauuggcuuaaacuuc

SEQ ID NO: 2259214 - RNA, 19 nt, Artificial Sequence
  Description of Artificial Sequence: Synthetic oligonucleotide
caguuaaggggaauguggc

SEQ ID NO: 2259215 - RNA, 19 nt, Artificial Sequence
  Description of Artificial Sequence: Synthetic oligonucleotide
uuucggaauuacuaucaca

SEQ ID NO: 2259216 - RNA, 19 nt, Artificial Sequence
  Description of Artificial Sequence: Synthetic oligonucleotide
uuuggaucugaaaucggau

SEQ ID NO: 2259217 - RNA, 19 nt, Artificial Sequence
  Description of Artificial Sequence: Synthetic oligonucleotide
ucaguacucuauauggaaa

SEQ ID NO: 2259218 - RNA, 19 nt, Artificial Sequence
  Description of Artificial Sequence: Synthetic oligonucleotide
uuaaaguuugacaccccaa

SEQ ID NO: 2259219 - RNA, 19 nt, Artificial Sequence
  Description of Artificial Sequence: Synthetic oligonucleotide
gaaaucggaucacaaucug

SEQ ID NO: 2259220 - RNA, 19 nt, Artificial Sequence
  Description of Artificial Sequence: Synthetic oligonucleotide
cuugcgaaugacaauguca

SEQ ID NO: 2259221 - RNA, 19 nt, Artificial Sequence
  Description of Artificial Sequence: Synthetic oligonucleotide
ggaauugauucccauuccg

SEQ ID NO: 2259222 - RNA, 19 nt, Artificial Sequence
  Description of Artificial Sequence: Synthetic oligonucleotide
uugaaccuccaagaggacg

SEQ ID NO: 2259223 - RNA, 19 nt, Artificial Sequence
  Description of Artificial Sequence: Synthetic oligonucleotide
ucaccagucccucagucac

SEQ ID NO: 2259224 - RNA, 19 nt, Artificial Sequence
  Description of Artificial Sequence: Synthetic oligonucleotide
acuaucacauuccuuugga

SEQ ID NO: 2259225 - RNA, 19 nt, Artificial Sequence
  Description of Artificial Sequence: Synthetic oligonucleotide
aucggaucacaaucugagc

SEQ ID NO: 2259226 - RNA, 19 nt, Artificial Sequence
  Description of Artificial Sequence: Synthetic oligonucleotide
ugguaggugcaccacagcu

SEQ ID NO: 2259227 - RNA, 19 nt, Artificial Sequence
  Description of Artificial Sequence: Synthetic oligonucleotide
uguucaguuaaggggaaug

SEQ ID NO: 2259228 - RNA, 19 nt, Artificial Sequence
  Description of Artificial Sequence: Synthetic oligonucleotide
gucaucaguacucuauaug

SEQ ID NO: 2259229 - RNA, 19 nt, Artificial Sequence
  Description of Artificial Sequence: Synthetic oligonucleotide
gaagcugucaucaguacuc

SEQ ID NO: 2259230 - RNA, 19 nt, Artificial Sequence
  Description of Artificial Sequence: Synthetic oligonucleotide
uggcaaaacucaaucagau

SEQ ID NO: 2259231 - RNA, 19 nt, Artificial Sequence
  Description of Artificial Sequence: Synthetic oligonucleotide
uuaugguaggugcaccaca

SEQ ID NO: 2259232 - RNA, 19 nt, Artificial Sequence
  Description of Artificial Sequence: Synthetic oligonucleotide
ucugaaaucggaucacaau

SEQ ID NO: 2259233 - RNA, 19 nt, Artificial Sequence
  Description of Artificial Sequence: Synthetic oligonucleotide
ucuuaugguaggugcacca

SEQ ID NO: 2259234 - RNA, 19 nt, Artificial Sequence
  Description of Artificial Sequence: Synthetic oligonucleotide
aaucugagcagcagauuuc

SEQ ID NO: 2259235 - RNA, 19 nt, Artificial Sequence
  Description of Artificial Sequence: Synthetic oligonucleotide
gauuucggaauuacuauca

SEQ ID NO: 2259236 - RNA, 19 nt, Artificial Sequence
  Description of Artificial Sequence: Synthetic oligonucleotide
aucaguacucuauauggaa

SEQ ID NO: 2259237 - RNA, 19 nt, Artificial Sequence
  Description of Artificial Sequence: Synthetic oligonucleotide
cucauugugguauaaguaa

SEQ ID NO: 2259238 - RNA, 19 nt, Artificial Sequence
  Description of Artificial Sequence: Synthetic oligonucleotide
ugugccgguacccaaaguu

SEQ ID NO: 2259239 - RNA, 19 nt, Artificial Sequence
  Description of Artificial Sequence: Synthetic oligonucleotide
aaggggaauguggccaacc

SEQ ID NO: 2259240 - RNA, 19 nt, Artificial Sequence
  Description of Artificial Sequence: Synthetic oligonucleotide
aaaccaggcuuguuuaaaa

SEQ ID NO: 2259241 - RNA, 19 nt, Artificial Sequence
  Description of Artificial Sequence: Synthetic oligonucleotide
uuuaaggccuucaggguau

SEQ ID NO: 2259242 - RNA, 19 nt, Artificial Sequence
  Description of Artificial Sequence: Synthetic oligonucleotide
uuacuaucacauuccuuug

SEQ ID NO: 2259243 - RNA, 19 nt, Artificial Sequence
  Description of Artificial Sequence: Synthetic oligonucleotide
uccaagaggacgguaagcu

SEQ ID NO: 2259244 - RNA, 19 nt, Artificial Sequence
  Description of Artificial Sequence: Synthetic oligonucleotide
ggccauugcaauucaaagg

SEQ ID NO: 2259245 - RNA, 19 nt, Artificial Sequence
  Description of Artificial Sequence: Synthetic oligonucleotide
aguacucuauauggaaagg

SEQ ID NO: 2259246 - RNA, 19 nt, Artificial Sequence
  Description of Artificial Sequence: Synthetic oligonucleotide
cuuacugacaacaaacagu

SEQ ID NO: 2259247 - RNA, 19 nt, Artificial Sequence
  Description of Artificial Sequence: Synthetic oligonucleotide
caugggccaauguaugagg

SEQ ID NO: 2259248 - RNA, 19 nt, Artificial Sequence
  Description of Artificial Sequence: Synthetic oligonucleotide
aauucucccuaauccgacu

SEQ ID NO: 2259249 - RNA, 19 nt, Artificial Sequence
  Description of Artificial Sequence: Synthetic oligonucleotide
uuggaucugaaaucggauc

SEQ ID NO: 2259250 - RNA, 19 nt, Artificial Sequence
  Description of Artificial Sequence: Synthetic oligonucleotide
caaguaauccaaguuuaag

SEQ ID NO: 2259251 - RNA, 19 nt, Artificial Sequence
  Description of Artificial Sequence: Synthetic oligonucleotide
guuagugauuggcuuaaac

SEQ ID NO: 2259252 - RNA, 19 nt, Artificial Sequence
  Description of Artificial Sequence: Synthetic oligonucleotide
ggaauuacuaucacauucc

SEQ ID NO: 2259253 - RNA, 19 nt, Artificial Sequence
  Description of Artificial Sequence: Synthetic oligonucleotide
ucucccuaauccgacuugg

SEQ ID NO: 2259254 - RNA, 19 nt, Artificial Sequence
  Description of Artificial Sequence: Synthetic oligonucleotide
agcagauuucccaugcuuc

SEQ ID NO: 2259255 - RNA, 19 nt, Artificial Sequence
  Description of Artificial Sequence: Synthetic oligonucleotide
gguauuaccaggccauugc

SEQ ID NO: 2259256 - RNA, 19 nt, Artificial Sequence
  Description of Artificial Sequence: Synthetic oligonucleotide
aguuuaaggccuucagggu

SEQ ID NO: 2259257 - RNA, 19 nt, Artificial Sequence
  Description of Artificial Sequence: Synthetic oligonucleotide
ugauagcggucuuaacugc

SEQ ID NO: 2259258 - RNA, 19 nt, Artificial Sequence
  Description of Artificial Sequence: Synthetic oligonucleotide
aacucagccccaucucuug

SEQ ID NO: 2259259 - RNA, 19 nt, Artificial Sequence
  Description of Artificial Sequence: Synthetic oligonucleotide
aucuccgggcuugaaaccc

SEQ ID NO: 2259260 - RNA, 19 nt, Artificial Sequence
  Description of Artificial Sequence: Synthetic oligonucleotide
aaagcugguauuacugggu

SEQ ID NO: 2259261 - RNA, 19 nt, Artificial Sequence
  Description of Artificial Sequence: Synthetic oligonucleotide
accaaagacuucuuauggu

SEQ ID NO: 2259262 - RNA, 19 nt, Artificial Sequence
  Description of Artificial Sequence: Synthetic oligonucleotide
uugggguaacagauuucgg

SEQ ID NO: 2259263 - RNA, 19 nt, Artificial Sequence
  Description of Artificial Sequence: Synthetic oligonucleotide
aggggaauguggccaaccg

SEQ ID NO: 2259264 - RNA, 19 nt, Artificial Sequence
  Description of Artificial Sequence: Synthetic oligonucleotide
uaugagguagagguccaag

SEQ ID NO: 2259265 - RNA, 19 nt, Artificial Sequence
  Description of Artificial Sequence: Synthetic oligonucleotide
uucaguuaaggggaaugug

SEQ ID NO: 2259266 - RNA, 19 nt, Artificial Sequence
  Description of Artificial Sequence: Synthetic oligonucleotide
uuugcauggcuucccuuga

SEQ ID NO: 2259267 - RNA, 19 nt, Artificial Sequence
  Description of Artificial Sequence: Synthetic oligonucleotide
gaaauucucccuaauccga

SEQ ID NO: 2259268 - RNA, 19 nt, Artificial Sequence
  Description of Artificial Sequence: Synthetic oligonucleotide
uuaacugcaucgaccacuu

SEQ ID NO: 2259269 - RNA, 19 nt, Artificial Sequence
  Description of Artificial Sequence: Synthetic oligonucleotide
acagauuucggaauuacua

SEQ ID NO: 2259270 - RNA, 19 nt, Artificial Sequence
  Description of Artificial Sequence: Synthetic oligonucleotide
aguugauagcggucuuaac

SEQ ID NO: 2259271 - RNA, 19 nt, Artificial Sequence
  Description of Artificial Sequence: Synthetic oligonucleotide
cuuuggaucugaaaucgga

SEQ ID NO: 2259272 - RNA, 19 nt, Artificial Sequence
  Description of Artificial Sequence: Synthetic oligonucleotide
ugcauggcuucccuugacc

SEQ ID NO: 2259273 - RNA, 19 nt, Artificial Sequence
  Description of Artificial Sequence: Synthetic oligonucleotide
agcuguucaugguuaaagu

SEQ ID NO: 2259274 - RNA, 19 nt, Artificial Sequence
  Description of Artificial Sequence: Synthetic oligonucleotide
guuaaggggaauguggcca

SEQ ID NO: 2259275 - RNA, 19 nt, Artificial Sequence
  Description of Artificial Sequence: Synthetic oligonucleotide
auaccuggaaauucucccu

SEQ ID NO: 2259276 - RNA, 19 nt, Artificial Sequence
  Description of Artificial Sequence: Synthetic oligonucleotide
gaccucacccucauugugg

SEQ ID NO: 2259277 - RNA, 19 nt, Artificial Sequence
  Description of Artificial Sequence: Synthetic oligonucleotide
aagacuucuuaugguaggu

SEQ ID NO: 2259278 - RNA, 19 nt, Artificial Sequence
  Description of Artificial Sequence: Synthetic oligonucleotide
ucgaccacuucuccuggag

SEQ ID NO: 2259279 - RNA, 19 nt, Artificial Sequence
  Description of Artificial Sequence: Synthetic oligonucleotide
uccgacuugggguaacaga

SEQ ID NO: 2259280 - RNA, 19 nt, Artificial Sequence
  Description of Artificial Sequence: Synthetic oligonucleotide
aacagauuucggaauuacu

SEQ ID NO: 2259281 - RNA, 19 nt, Artificial Sequence
  Description of Artificial Sequence: Synthetic oligonucleotide
gcuuacugacaacaaacag

SEQ ID NO: 2259282 - RNA, 19 nt, Artificial Sequence
  Description of Artificial Sequence: Synthetic oligonucleotide
gcuuaaacuucaaaccagg

SEQ ID NO: 2259283 - RNA, 19 nt, Artificial Sequence
  Description of Artificial Sequence: Synthetic oligonucleotide
ugccgguacccaaaguuga

SEQ ID NO: 2259284 - RNA, 19 nt, Artificial Sequence
  Description of Artificial Sequence: Synthetic oligonucleotide
acugcaucgaccacuucuc

SEQ ID NO: 2259285 - RNA, 19 nt, Artificial Sequence
  Description of Artificial Sequence: Synthetic oligonucleotide
uaacagauuucggaauuac

SEQ ID NO: 2259286 - RNA, 19 nt, Artificial Sequence
  Description of Artificial Sequence: Synthetic oligonucleotide
agcugucacagacacauuu

SEQ ID NO: 2259287 - RNA, 19 nt, Artificial Sequence
  Description of Artificial Sequence: Synthetic oligonucleotide
aaguugauagcggucuuaa

SEQ ID NO: 2259288 - RNA, 19 nt, Artificial Sequence
  Description of Artificial Sequence: Synthetic oligonucleotide
gaauugauucccauuccga

SEQ ID NO: 2259289 - RNA, 19 nt, Artificial Sequence
  Description of Artificial Sequence: Synthetic oligonucleotide
gaugguuugcauggcuucc

SEQ ID NO: 2259290 - RNA, 19 nt, Artificial Sequence
  Description of Artificial Sequence: Synthetic oligonucleotide
aggauaguccuuguggugu

SEQ ID NO: 2259291 - RNA, 19 nt, Artificial Sequence
  Description of Artificial Sequence: Synthetic oligonucleotide
ucuugcgaaugacaauguc

SEQ ID NO: 2259292 - RNA, 19 nt, Artificial Sequence
  Description of Artificial Sequence: Synthetic oligonucleotide
aagaggacgguaagcuguc

SEQ ID NO: 2259293 - RNA, 19 nt, Artificial Sequence
  Description of Artificial Sequence: Synthetic oligonucleotide
uugacccacuggcucagcc

SEQ ID NO: 2259294 - RNA, 19 nt, Artificial Sequence
  Description of Artificial Sequence: Synthetic oligonucleotide
uucucccuaauccgacuug

SEQ ID NO: 2259295 - RNA, 19 nt, Artificial Sequence
  Description of Artificial Sequence: Synthetic oligonucleotide
ugacaaugucauccaacaa

SEQ ID NO: 2259296 - RNA, 19 nt, Artificial Sequence
  Description of Artificial Sequence: Synthetic oligonucleotide
uacuggguauuaccaggcc

SEQ ID NO: 2259297 - RNA, 19 nt, Artificial Sequence
  Description of Artificial Sequence: Synthetic oligonucleotide
ugucaucaguacucuauau

SEQ ID NO: 2259298 - RNA, 19 nt, Artificial Sequence
  Description of Artificial Sequence: Synthetic oligonucleotide
cuugugguguucaguuaag

SEQ ID NO: 2259299 - RNA, 19 nt, Artificial Sequence
  Description of Artificial Sequence: Synthetic oligonucleotide
caaaggcacaucuuuaucu

SEQ ID NO: 2259300 - RNA, 19 nt, Artificial Sequence
  Description of Artificial Sequence: Synthetic oligonucleotide
uuaaggggaauguggccaa

SEQ ID NO: 2259301 - RNA, 19 nt, Artificial Sequence
  Description of Artificial Sequence: Synthetic oligonucleotide
ugcaucgaccacuucuccu

SEQ ID NO: 2259302 - RNA, 19 nt, Artificial Sequence
  Description of Artificial Sequence: Synthetic oligonucleotide
guuugacaccccaaugugc

SEQ ID NO: 2259303 - RNA, 19 nt, Artificial Sequence
  Description of Artificial Sequence: Synthetic oligonucleotide
guuuaaggccuucagggua

SEQ ID NO: 2259304 - RNA, 19 nt, Artificial Sequence
  Description of Artificial Sequence: Synthetic oligonucleotide
ucaggguauuggugcaugc

SEQ ID NO: 2259305 - RNA, 19 nt, Artificial Sequence
  Description of Artificial Sequence: Synthetic oligonucleotide
uugcaauucaaaggcacau

SEQ ID NO: 2259306 - RNA, 19 nt, Artificial Sequence
  Description of Artificial Sequence: Synthetic oligonucleotide
uucuuaugguaggugcacc

SEQ ID NO: 2259307 - RNA, 19 nt, Artificial Sequence
  Description of Artificial Sequence: Synthetic oligonucleotide
aacccaugggccaauguau

SEQ ID NO: 2259308 - RNA, 19 nt, Artificial Sequence
  Description of Artificial Sequence: Synthetic oligonucleotide
auugcaauucaaaggcaca

SEQ ID NO: 2259309 - RNA, 19 nt, Artificial Sequence
  Description of Artificial Sequence: Synthetic oligonucleotide
aggacgguaagcugucaca

SEQ ID NO: 2259310 - RNA, 19 nt, Artificial Sequence
  Description of Artificial Sequence: Synthetic oligonucleotide
aauuacuaucacauuccuu

SEQ ID NO: 2259311 - RNA, 19 nt, Artificial Sequence
  Description of Artificial Sequence: Synthetic oligonucleotide
cuucuuugcgaucuugcga

SEQ ID NO: 2259312 - RNA, 19 nt, Artificial Sequence
  Description of Artificial Sequence: Synthetic oligonucleotide
ucugagcagcagauuuccc

SEQ ID NO: 2259313 - RNA, 19 nt, Artificial Sequence
  Description of Artificial Sequence: Synthetic oligonucleotide
ucaaaccaggcuuguuuaa

SEQ ID NO: 2259314 - RNA, 19 nt, Artificial Sequence
  Description of Artificial Sequence: Synthetic oligonucleotide
uuaagauauggguggcauu

SEQ ID NO: 2259315 - RNA, 19 nt, Artificial Sequence
  Description of Artificial Sequence: Synthetic oligonucleotide
uccaaguuuaaggccuuca

SEQ ID NO: 2259316 - RNA, 19 nt, Artificial Sequence
  Description of Artificial Sequence: Synthetic oligonucleotide
gaauuacuaucacauuccu

SEQ ID NO: 2259317 - RNA, 19 nt, Artificial Sequence
  Description of Artificial Sequence: Synthetic oligonucleotide
uugucuaggcugaggaguu

SEQ ID NO: 2259318 - RNA, 19 nt, Artificial Sequence
  Description of Artificial Sequence: Synthetic oligonucleotide
guacucuauauggaaagga

SEQ ID NO: 2259319 - RNA, 19 nt, Artificial Sequence
  Description of Artificial Sequence: Synthetic oligonucleotide
gaggacgguaagcugucac

SEQ ID NO: 2259320 - RNA, 19 nt, Artificial Sequence
  Description of Artificial Sequence: Synthetic oligonucleotide
aaaguugauagcggucuua

SEQ ID NO: 2259321 - RNA, 19 nt, Artificial Sequence
  Description of Artificial Sequence: Synthetic oligonucleotide
uaccuggaaauucucccua

SEQ ID NO: 2259322 - RNA, 19 nt, Artificial Sequence
  Description of Artificial Sequence: Synthetic oligonucleotide
ucccuugacccacuggcuc

SEQ ID NO: 2259323 - RNA, 19 nt, Artificial Sequence
  Description of Artificial Sequence: Synthetic oligonucleotide
ucuuaacugcaucgaccac

SEQ ID NO: 2259324 - RNA, 19 nt, Artificial Sequence
  Description of Artificial Sequence: Synthetic oligonucleotide
ggcuuaaacuucaaaccag

SEQ ID NO: 2259325 - RNA, 19 nt, Artificial Sequence
  Description of Artificial Sequence: Synthetic oligonucleotide
aaccggagguucuugucua

SEQ ID NO: 2259326 - RNA, 19 nt, Artificial Sequence
  Description of Artificial Sequence: Synthetic oligonucleotide
gggccaauguaugagguag

SEQ ID NO: 2259327 - RNA, 19 nt, Artificial Sequence
  Description of Artificial Sequence: Synthetic oligonucleotide
gugcaugcuguucucacca

SEQ ID NO: 2259328 - RNA, 19 nt, Artificial Sequence
  Description of Artificial Sequence: Synthetic oligonucleotide
cuauuauggcaaaacucaa

SEQ ID NO: 2259329 - RNA, 19 nt, Artificial Sequence
  Description of Artificial Sequence: Synthetic oligonucleotide
ggucuuaacugcaucgacc

SEQ ID NO: 2259330 - RNA, 19 nt, Artificial Sequence
  Description of Artificial Sequence: Synthetic oligonucleotide
aagauauggguggcauuca

SEQ ID NO: 2259331 - RNA, 19 nt, Artificial Sequence
  Description of Artificial Sequence: Synthetic oligonucleotide
agcuuacugacaacaaaca

SEQ ID NO: 2259332 - RNA, 19 nt, Artificial Sequence
  Description of Artificial Sequence: Synthetic oligonucleotide
ucccaugcuucuuugcgau

SEQ ID NO: 2259333 - RNA, 19 nt, Artificial Sequence
  Description of Artificial Sequence: Synthetic oligonucleotide
uggugcaugcuguucucac

SEQ ID NO: 2259334 - RNA, 19 nt, Artificial Sequence
  Description of Artificial Sequence: Synthetic oligonucleotide
caaaaucaaauaccuggaa

SEQ ID NO: 2259335 - RNA, 19 nt, Artificial Sequence
  Description of Artificial Sequence: Synthetic oligonucleotide
ugaggaguuccuccauauc

SEQ ID NO: 2259336 - RNA, 19 nt, Artificial Sequence
  Description of Artificial Sequence: Synthetic oligonucleotide
ugcaauucaaaggcacauc

SEQ ID NO: 2259337 - RNA, 19 nt, Artificial Sequence
  Description of Artificial Sequence: Synthetic oligonucleotide
ggaaaggauaguccuugug

SEQ ID NO: 2259338 - RNA, 19 nt, Artificial Sequence
  Description of Artificial Sequence: Synthetic oligonucleotide
caagaggacgguaagcugu

SEQ ID NO: 2259339 - RNA, 19 nt, Artificial Sequence
  Description of Artificial Sequence: Synthetic oligonucleotide
agauauggguggcauucaa

SEQ ID NO: 2259340 - RNA, 19 nt, Artificial Sequence
  Description of Artificial Sequence: Synthetic oligonucleotide
acuucuuaugguaggugca

SEQ ID NO: 2259341 - RNA, 19 nt, Artificial Sequence
  Description of Artificial Sequence: Synthetic oligonucleotide
guaggugcaccacagcuua

SEQ ID NO: 2259342 - RNA, 19 nt, Artificial Sequence
  Description of Artificial Sequence: Synthetic oligonucleotide
gauagcggucuuaacugca

SEQ ID NO: 2259343 - RNA, 19 nt, Artificial Sequence
  Description of Artificial Sequence: Synthetic oligonucleotide
gcaucgaccacuucuccug

SEQ ID NO: 2259344 - RNA, 19 nt, Artificial Sequence
  Description of Artificial Sequence: Synthetic oligonucleotide
cggaauuacuaucacauuc

SEQ ID NO: 2259345 - RNA, 19 nt, Artificial Sequence
  Description of Artificial Sequence: Synthetic oligonucleotide
ugguauuacuggguauuac

SEQ ID NO: 2259346 - RNA, 19 nt, Artificial Sequence
  Description of Artificial Sequence: Synthetic oligonucleotide
cuuaugguaggugcaccac

SEQ ID NO: 2259347 - RNA, 19 nt, Artificial Sequence
  Description of Artificial Sequence: Synthetic oligonucleotide
uucccuugacccacuggcu

SEQ ID NO: 2259348 - RNA, 19 nt, Artificial Sequence
  Description of Artificial Sequence: Synthetic oligonucleotide
aacuucaaaccaggcuugu

SEQ ID NO: 2259349 - RNA, 19 nt, Artificial Sequence
  Description of Artificial Sequence: Synthetic oligonucleotide
uggagaggccuuccaggug

SEQ ID NO: 2259350 - RNA, 19 nt, Artificial Sequence
  Description of Artificial Sequence: Synthetic oligonucleotide
gaucugaaaucggaucaca

SEQ ID NO: 2259351 - RNA, 19 nt, Artificial Sequence
  Description of Artificial Sequence: Synthetic oligonucleotide
ugguuugcauggcuucccu

SEQ ID NO: 2259352 - RNA, 19 nt, Artificial Sequence
  Description of Artificial Sequence: Synthetic oligonucleotide
auucucccuaauccgacuu

SEQ ID NO: 2259353 - RNA, 19 nt, Artificial Sequence
  Description of Artificial Sequence: Synthetic oligonucleotide
uaccaggccauugcaauuc

SEQ ID NO: 2259354 - RNA, 19 nt, Artificial Sequence
  Description of Artificial Sequence: Synthetic oligonucleotide
caucgaccacuucuccugg

SEQ ID NO: 2259355 - RNA, 19 nt, Artificial Sequence
  Description of Artificial Sequence: Synthetic oligonucleotide
cucccuaauccgacuuggg

SEQ ID NO: 2259356 - RNA, 19 nt, Artificial Sequence
  Description of Artificial Sequence: Synthetic oligonucleotide
uggaaaggauaguccuugu

SEQ ID NO: 2259357 - RNA, 19 nt, Artificial Sequence
  Description of Artificial Sequence: Synthetic oligonucleotide
aagcugucaucaguacucu

SEQ ID NO: 2259358 - RNA, 19 nt, Artificial Sequence
  Description of Artificial Sequence: Synthetic oligonucleotide
ugacaccccaaugugcuuc

SEQ ID NO: 2259359 - RNA, 19 nt, Artificial Sequence
  Description of Artificial Sequence: Synthetic oligonucleotide
cacagacacauuucuauua

SEQ ID NO: 2259360 - RNA, 19 nt, Artificial Sequence
  Description of Artificial Sequence: Synthetic oligonucleotide
cacaacagggaugguuugc

SEQ ID NO: 2259361 - RNA, 19 nt, Artificial Sequence
  Description of Artificial Sequence: Synthetic oligonucleotide
ucuccgggcuugaaaccca

SEQ ID NO: 2259362 - RNA, 19 nt, Artificial Sequence
  Description of Artificial Sequence: Synthetic oligonucleotide
cuucaccagucccucaguc

SEQ ID NO: 2259363 - RNA, 19 nt, Artificial Sequence
  Description of Artificial Sequence: Synthetic oligonucleotide
ugguauaaguaagcacagu

SEQ ID NO: 2259364 - RNA, 19 nt, Artificial Sequence
  Description of Artificial Sequence: Synthetic oligonucleotide
cuuugcgaucuugcgaaug

SEQ ID NO: 2259365 - RNA, 19 nt, Artificial Sequence
  Description of Artificial Sequence: Synthetic oligonucleotide
gucuaggcugaggaguucc

SEQ ID NO: 2259366 - RNA, 19 nt, Artificial Sequence
  Description of Artificial Sequence: Synthetic oligonucleotide
gcaauucaaaggcacaucu

SEQ ID NO: 2259367 - RNA, 19 nt, Artificial Sequence
  Description of Artificial Sequence: Synthetic oligonucleotide
ucggaauuacuaucacauu

SEQ ID NO: 2259368 - RNA, 19 nt, Artificial Sequence
  Description of Artificial Sequence: Synthetic oligonucleotide
ccaaguuuaaggccuucag

SEQ ID NO: 2259369 - RNA, 19 nt, Artificial Sequence
  Description of Artificial Sequence: Synthetic oligonucleotide
cuuaacugcaucgaccacu

SEQ ID NO: 2259370 - RNA, 19 nt, Artificial Sequence
  Description of Artificial Sequence: Synthetic oligonucleotide
gggguaacagauuucggaa

SEQ ID NO: 2259371 - RNA, 19 nt, Artificial Sequence
  Description of Artificial Sequence: Synthetic oligonucleotide
aauccgacuugggguaaca

SEQ ID NO: 2259372 - RNA, 19 nt, Artificial Sequence
  Description of Artificial Sequence: Synthetic oligonucleotide
ccgggcuugaaacccaugg

SEQ ID NO: 2259373 - RNA, 19 nt, Artificial Sequence
  Description of Artificial Sequence: Synthetic oligonucleotide
cugacaacaaacaguuccu

SEQ ID NO: 2259374 - RNA, 19 nt, Artificial Sequence
  Description of Artificial Sequence: Synthetic oligonucleotide
acuugggguaacagauuuc

SEQ ID NO: 2259375 - RNA, 19 nt, Artificial Sequence
  Description of Artificial Sequence: Synthetic oligonucleotide
ggacgguaagcugucacag

SEQ ID NO: 2259376 - RNA, 19 nt, Artificial Sequence
  Description of Artificial Sequence: Synthetic oligonucleotide
cucaccaaagacuucuuau

SEQ ID NO: 2259377 - RNA, 19 nt, Artificial Sequence
  Description of Artificial Sequence: Synthetic oligonucleotide
gacuugggguaacagauuu

SEQ ID NO: 2259378 - RNA, 19 nt, Artificial Sequence
  Description of Artificial Sequence: Synthetic oligonucleotide
cuccaagaggacgguaagc

SEQ ID NO: 2259379 - RNA, 19 nt, Artificial Sequence
  Description of Artificial Sequence: Synthetic oligonucleotide
gaucacaaucugagcagca

SEQ ID NO: 2259380 - RNA, 19 nt, Artificial Sequence
  Description of Artificial Sequence: Synthetic oligonucleotide
gacgguaagcugucacaga

SEQ ID NO: 2259381 - RNA, 19 nt, Artificial Sequence
  Description of Artificial Sequence: Synthetic oligonucleotide
caccccaaugugcuucacc

SEQ ID NO: 2259382 - RNA, 19 nt, Artificial Sequence
  Description of Artificial Sequence: Synthetic oligonucleotide
uugcauggcuucccuugac

SEQ ID NO: 2259383 - RNA, 19 nt, Artificial Sequence
  Description of Artificial Sequence: Synthetic oligonucleotide
cucaagcuguucaugguua

SEQ ID NO: 2259384 - RNA, 19 nt, Artificial Sequence
  Description of Artificial Sequence: Synthetic oligonucleotide
uacugacaacaaacaguuc

SEQ ID NO: 2259385 - RNA, 19 nt, Artificial Sequence
  Description of Artificial Sequence: Synthetic oligonucleotide
cuugucuaggcugaggagu

SEQ ID NO: 2259386 - RNA, 19 nt, Artificial Sequence
  Description of Artificial Sequence: Synthetic oligonucleotide
cagauuucggaauuacuau

SEQ ID NO: 2259387 - RNA, 19 nt, Artificial Sequence
  Description of Artificial Sequence: Synthetic oligonucleotide
ggugcaugcuguucucacc

SEQ ID NO: 2259388 - RNA, 19 nt, Artificial Sequence
  Description of Artificial Sequence: Synthetic oligonucleotide
caggccauugcaauucaaa

SEQ ID NO: 2259389 - RNA, 19 nt, Artificial Sequence
  Description of Artificial Sequence: Synthetic oligonucleotide
uagcggucuuaacugcauc

SEQ ID NO: 2259390 - RNA, 19 nt, Artificial Sequence
  Description of Artificial Sequence: Synthetic oligonucleotide
gugccgguacccaaaguug

SEQ ID NO: 2259391 - RNA, 19 nt, Artificial Sequence
  Description of Artificial Sequence: Synthetic oligonucleotide
ggaucacaaucugagcagc

SEQ ID NO: 2259392 - RNA, 19 nt, Artificial Sequence
  Description of Artificial Sequence: Synthetic oligonucleotide
guuaagauauggguggcau

SEQ ID NO: 2259393 - RNA, 19 nt, Artificial Sequence
  Description of Artificial Sequence: Synthetic oligonucleotide
cugcaucgaccacuucucc

SEQ ID NO: 2259394 - RNA, 19 nt, Artificial Sequence
  Description of Artificial Sequence: Synthetic oligonucleotide
ggaugguuugcauggcuuc

SEQ ID NO: 2259395 - RNA, 19 nt, Artificial Sequence
  Description of Artificial Sequence: Synthetic oligonucleotide
accggagguucuugucuag

SEQ ID NO: 2259396 - RNA, 19 nt, Artificial Sequence
  Description of Artificial Sequence: Synthetic oligonucleotide
ugaaacccaugggccaaug

SEQ ID NO: 2259397 - RNA, 19 nt, Artificial Sequence
  Description of Artificial Sequence: Synthetic oligonucleotide
ugggccaauguaugaggua

SEQ ID NO: 2259398 - RNA, 19 nt, Artificial Sequence
  Description of Artificial Sequence: Synthetic oligonucleotide
uuggugcaugcuguucuca

SEQ ID NO: 2259399 - RNA, 19 nt, Artificial Sequence
  Description of Artificial Sequence: Synthetic oligonucleotide
cugguuagugauuggcuua

SEQ ID NO: 2259400 - RNA, 19 nt, Artificial Sequence
  Description of Artificial Sequence: Synthetic oligonucleotide
acccucauugugguauaag

SEQ ID NO: 2259401 - RNA, 19 nt, Artificial Sequence
  Description of Artificial Sequence: Synthetic oligonucleotide
cuucaaaccaggcuuguuu

SEQ ID NO: 2259402 - RNA, 19 nt, Artificial Sequence
  Description of Artificial Sequence: Synthetic oligonucleotide
auuccgaccucacccucau

SEQ ID NO: 2259403 - RNA, 19 nt, Artificial Sequence
  Description of Artificial Sequence: Synthetic oligonucleotide
gccaauguaugagguagag

SEQ ID NO: 2259404 - RNA, 19 nt, Artificial Sequence
  Description of Artificial Sequence: Synthetic oligonucleotide
uccuugugguguucaguua

SEQ ID NO: 2259405 - RNA, 19 nt, Artificial Sequence
  Description of Artificial Sequence: Synthetic oligonucleotide
uucucaccaaagacuucuu

SEQ ID NO: 2259406 - RNA, 19 nt, Artificial Sequence
  Description of Artificial Sequence: Synthetic oligonucleotide
caacaaacaguuccucucu

SEQ ID NO: 2259407 - RNA, 19 nt, Artificial Sequence
  Description of Artificial Sequence: Synthetic oligonucleotide
uugcgaucuugcgaaugac

SEQ ID NO: 2259408 - RNA, 19 nt, Artificial Sequence
  Description of Artificial Sequence: Synthetic oligonucleotide
ccaauguaugagguagagg

SEQ ID NO: 2259409 - RNA, 19 nt, Artificial Sequence
  Description of Artificial Sequence: Synthetic oligonucleotide
guauuggugcaugcuguuc

SEQ ID NO: 2259410 - RNA, 19 nt, Artificial Sequence
  Description of Artificial Sequence: Synthetic oligonucleotide
ccaaagacuucuuauggua

SEQ ID NO: 2259411 - RNA, 19 nt, Artificial Sequence
  Description of Artificial Sequence: Synthetic oligonucleotide
accuccaagaggacgguaa

SEQ ID NO: 2259412 - RNA, 19 nt, Artificial Sequence
  Description of Artificial Sequence: Synthetic oligonucleotide
cauuccgaccucacccuca

SEQ ID NO: 2259413 - RNA, 19 nt, Artificial Sequence
  Description of Artificial Sequence: Synthetic oligonucleotide
cacagcuuacugacaacaa

SEQ ID NO: 2259414 - RNA, 19 nt, Artificial Sequence
  Description of Artificial Sequence: Synthetic oligonucleotide
cuggguauuaccaggccau

SEQ ID NO: 2259415 - RNA, 19 nt, Artificial Sequence
  Description of Artificial Sequence: Synthetic oligonucleotide
cuccuugaucuuggaauug

SEQ ID NO: 2259416 - RNA, 19 nt, Artificial Sequence
  Description of Artificial Sequence: Synthetic oligonucleotide
uccaacaacucagccccau

SEQ ID NO: 2259417 - RNA, 19 nt, Artificial Sequence
  Description of Artificial Sequence: Synthetic oligonucleotide
acccaugggccaauguaug

SEQ ID NO: 2259418 - RNA, 19 nt, Artificial Sequence
  Description of Artificial Sequence: Synthetic oligonucleotide
uaauccgacuugggguaac

SEQ ID NO: 2259419 - RNA, 19 nt, Artificial Sequence
  Description of Artificial Sequence: Synthetic oligonucleotide
cggaucacaaucugagcag

SEQ ID NO: 2259420 - RNA, 19 nt, Artificial Sequence
  Description of Artificial Sequence: Synthetic oligonucleotide
aucuugcgaaugacaaugu

SEQ ID NO: 2259421 - RNA, 19 nt, Artificial Sequence
  Description of Artificial Sequence: Synthetic oligonucleotide
auccgacuugggguaacag

SEQ ID NO: 2259422 - RNA, 19 nt, Artificial Sequence
  Description of Artificial Sequence: Synthetic oligonucleotide
cugucaucaguacucuaua

SEQ ID NO: 2259423 - RNA, 19 nt, Artificial Sequence
  Description of Artificial Sequence: Synthetic oligonucleotide
guucaguuaaggggaaugu

SEQ ID NO: 2259424 - RNA, 19 nt, Artificial Sequence
  Description of Artificial Sequence: Synthetic oligonucleotide
uccgggcuugaaacccaug

SEQ ID NO: 2259425 - RNA, 19 nt, Artificial Sequence
  Description of Artificial Sequence: Synthetic oligonucleotide
cuugaaacccaugggccaa

SEQ ID NO: 2259426 - RNA, 19 nt, Artificial Sequence
  Description of Artificial Sequence: Synthetic oligonucleotide
gcuguucucaccaaagacu

SEQ ID NO: 2259427 - RNA, 19 nt, Artificial Sequence
  Description of Artificial Sequence: Synthetic oligonucleotide
ggaucugaaaucggaucac

SEQ ID NO: 2259428 - RNA, 19 nt, Artificial Sequence
  Description of Artificial Sequence: Synthetic oligonucleotide
gaaacccaugggccaaugu

SEQ ID NO: 2259429 - RNA, 19 nt, Artificial Sequence
  Description of Artificial Sequence: Synthetic oligonucleotide
gguuaaaguuugacacccc

SEQ ID NO: 2259430 - RNA, 19 nt, Artificial Sequence
  Description of Artificial Sequence: Synthetic oligonucleotide
agaggccuuccaggugccc

SEQ ID NO: 2259431 - RNA, 19 nt, Artificial Sequence
  Description of Artificial Sequence: Synthetic oligonucleotide
aucgaccacuucuccugga

SEQ ID NO: 2259432 - RNA, 19 nt, Artificial Sequence
  Description of Artificial Sequence: Synthetic oligonucleotide
caaaccaggcuuguuuaaa

SEQ ID NO: 2259433 - RNA, 19 nt, Artificial Sequence
  Description of Artificial Sequence: Synthetic oligonucleotide
gguaacagauuucggaauu

SEQ ID NO: 2259434 - RNA, 19 nt, Artificial Sequence
  Description of Artificial Sequence: Synthetic oligonucleotide
auagcggucuuaacugcau

SEQ ID NO: 2259435 - RNA, 19 nt, Artificial Sequence
  Description of Artificial Sequence: Synthetic oligonucleotide
ggguauuaccaggccauug

SEQ ID NO: 2259436 - RNA, 19 nt, Artificial Sequence
  Description of Artificial Sequence: Synthetic oligonucleotide
ugauucccauuccgaccuc

SEQ ID NO: 2259437 - RNA, 19 nt, Artificial Sequence
  Description of Artificial Sequence: Synthetic oligonucleotide
ccaugggccaauguaugag

SEQ ID NO: 2259438 - RNA, 19 nt, Artificial Sequence
  Description of Artificial Sequence: Synthetic oligonucleotide
ccucauugugguauaagua

SEQ ID NO: 2259439 - RNA, 19 nt, Artificial Sequence
  Description of Artificial Sequence: Synthetic oligonucleotide
cuggagaggccuuccaggu

SEQ ID NO: 2259440 - RNA, 19 nt, Artificial Sequence
  Description of Artificial Sequence: Synthetic oligonucleotide
augugccgguacccaaagu

SEQ ID NO: 2259441 - RNA, 19 nt, Artificial Sequence
  Description of Artificial Sequence: Synthetic oligonucleotide
uugaaacccaugggccaau

SEQ ID NO: 2259442 - RNA, 19 nt, Artificial Sequence
  Description of Artificial Sequence: Synthetic oligonucleotide
guucaugguuaaaguuuga

SEQ ID NO: 2259443 - RNA, 19 nt, Artificial Sequence
  Description of Artificial Sequence: Synthetic oligonucleotide
ccuaauccgacuuggggua

SEQ ID NO: 2259444 - RNA, 19 nt, Artificial Sequence
  Description of Artificial Sequence: Synthetic oligonucleotide
cucacccucauugugguau

SEQ ID NO: 2259445 - RNA, 19 nt, Artificial Sequence
  Description of Artificial Sequence: Synthetic oligonucleotide
gagaggccuuccaggugcc

SEQ ID NO: 2259446 - RNA, 19 nt, Artificial Sequence
  Description of Artificial Sequence: Synthetic oligonucleotide
acuucaaaccaggcuuguu

SEQ ID NO: 2259447 - RNA, 19 nt, Artificial Sequence
  Description of Artificial Sequence: Synthetic oligonucleotide
gguuaagauauggguggca

SEQ ID NO: 2259448 - RNA, 19 nt, Artificial Sequence
  Description of Artificial Sequence: Synthetic oligonucleotide
ugucuaggcugaggaguuc

SEQ ID NO: 2259449 - RNA, 19 nt, Artificial Sequence
  Description of Artificial Sequence: Synthetic oligonucleotide
cggagguucuugucuaggc

SEQ ID NO: 2259450 - RNA, 19 nt, Artificial Sequence
  Description of Artificial Sequence: Synthetic oligonucleotide
aaccuccaagaggacggua

SEQ ID NO: 2259451 - RNA, 19 nt, Artificial Sequence
  Description of Artificial Sequence: Synthetic oligonucleotide
caggcuuguuuaaaaguuu

SEQ ID NO: 2259452 - RNA, 19 nt, Artificial Sequence
  Description of Artificial Sequence: Synthetic oligonucleotide
uggguauuaccaggccauu

SEQ ID NO: 2259453 - RNA, 19 nt, Artificial Sequence
  Description of Artificial Sequence: Synthetic oligonucleotide
cccuaauccgacuuggggu

SEQ ID NO: 2259454 - RNA, 19 nt, Artificial Sequence
  Description of Artificial Sequence: Synthetic oligonucleotide
ccauugcaauucaaaggca

SEQ ID NO: 2259455 - RNA, 19 nt, Artificial Sequence
  Description of Artificial Sequence: Synthetic oligonucleotide
ccaaguaauccaaguuuaa

SEQ ID NO: 2259456 - RNA, 19 nt, Artificial Sequence
  Description of Artificial Sequence: Synthetic oligonucleotide
acaccccaaugugcuucac

SEQ ID NO: 2259457 - RNA, 19 nt, Artificial Sequence
  Description of Artificial Sequence: Synthetic oligonucleotide
agaggacgguaagcuguca

SEQ ID NO: 2259458 - RNA, 19 nt, Artificial Sequence
  Description of Artificial Sequence: Synthetic oligonucleotide
caaucagauucuucugguu

SEQ ID NO: 2259459 - RNA, 19 nt, Artificial Sequence
  Description of Artificial Sequence: Synthetic oligonucleotide
gcugucaucaguacucuau

SEQ ID NO: 2259460 - RNA, 19 nt, Artificial Sequence
  Description of Artificial Sequence: Synthetic oligonucleotide
cugguauuacuggguauua

SEQ ID NO: 2259461 - RNA, 19 nt, Artificial Sequence
  Description of Artificial Sequence: Synthetic oligonucleotide
ccgacuugggguaacagau

SEQ ID NO: 2259462 - RNA, 19 nt, Artificial Sequence
  Description of Artificial Sequence: Synthetic oligonucleotide
ggguaacagauuucggaau

SEQ ID NO: 2259463 - RNA, 19 nt, Artificial Sequence
  Description of Artificial Sequence: Synthetic oligonucleotide
cccucauugugguauaagu

SEQ ID NO: 2259464 - RNA, 19 nt, Artificial Sequence
  Description of Artificial Sequence: Synthetic oligonucleotide
ccccaaugugcuucaccag

SEQ ID NO: 2259465 - RNA, 19 nt, Artificial Sequence
  Description of Artificial Sequence: Synthetic oligonucleotide
ggguauuggugcaugcugu

SEQ ID NO: 2259466 - RNA, 19 nt, Artificial Sequence
  Description of Artificial Sequence: Synthetic oligonucleotide
guaugagguagagguccaa

SEQ ID NO: 2259467 - RNA, 19 nt, Artificial Sequence
  Description of Artificial Sequence: Synthetic oligonucleotide
acauuccuuuggaucugaa

SEQ ID NO: 2259468 - RNA, 19 nt, Artificial Sequence
  Description of Artificial Sequence: Synthetic oligonucleotide
cuaauccgacuugggguaa

SEQ ID NO: 2259469 - RNA, 19 nt, Artificial Sequence
  Description of Artificial Sequence: Synthetic oligonucleotide
ccaacaacucagccccauc

SEQ ID NO: 2259470 - RNA, 19 nt, Artificial Sequence
  Description of Artificial Sequence: Synthetic oligonucleotide
gcggucuuaacugcaucga

SEQ ID NO: 2259471 - RNA, 19 nt, Artificial Sequence
  Description of Artificial Sequence: Synthetic oligonucleotide
cggucuuaacugcaucgac

SEQ ID NO: 2259472 - RNA, 19 nt, Artificial Sequence
  Description of Artificial Sequence: Synthetic oligonucleotide
ggcaaaacucaaucagauu

SEQ ID NO: 2259473 - RNA, 19 nt, Artificial Sequence
  Description of Artificial Sequence: Synthetic oligonucleotide
ccggagguucuugucuagg

SEQ ID NO: 2259474 - RNA, 19 nt, Artificial Sequence
  Description of Artificial Sequence: Synthetic oligonucleotide
gcugaggaguuccuccaua

SEQ ID NO: 2259475 - RNA, 19 nt, Artificial Sequence
  Description of Artificial Sequence: Synthetic oligonucleotide
gguguucaguuaaggggaa

SEQ ID NO: 2259476 - RNA, 19 nt, Artificial Sequence
  Description of Artificial Sequence: Synthetic oligonucleotide
uggccaaccggagguucuu

SEQ ID NO: 2259477 - RNA, 19 nt, Artificial Sequence
  Description of Artificial Sequence: Synthetic oligonucleotide
caggguauuggugcaugcu

SEQ ID NO: 2259478 - RNA, 19 nt, Artificial Sequence
  Description of Artificial Sequence: Synthetic oligonucleotide
cccuugacccacuggcuca

SEQ ID NO: 2259479 - RNA, 19 nt, Artificial Sequence
  Description of Artificial Sequence: Synthetic oligonucleotide
cccaugggccaauguauga

SEQ ID NO: 2259480 - RNA, 19 nt, Artificial Sequence
  Description of Artificial Sequence: Synthetic oligonucleotide
cuuuaucuccgggcuugaa

SEQ ID NO: 2259481 - RNA, 19 nt, Artificial Sequence
  Description of Artificial Sequence: Synthetic oligonucleotide
gaaccuccaagaggacggu

SEQ ID NO: 2259482 - RNA, 19 nt, Artificial Sequence
  Description of Artificial Sequence: Synthetic oligonucleotide
caaaguugauagcggucuu

SEQ ID NO: 2259483 - RNA, 19 nt, Artificial Sequence
  Description of Artificial Sequence: Synthetic oligonucleotide
caucuuuaucuccgggcuu

SEQ ID NO: 2259484 - RNA, 19 nt, Artificial Sequence
  Description of Artificial Sequence: Synthetic oligonucleotide
ggcuucccuugacccacug

SEQ ID NO: 2259485 - RNA, 19 nt, Artificial Sequence
  Description of Artificial Sequence: Synthetic oligonucleotide
ggccaauguaugagguaga

SEQ ID NO: 2259486 - RNA, 19 nt, Artificial Sequence
  Description of Artificial Sequence: Synthetic oligonucleotide
cgaccucacccucauugug

SEQ ID NO: 2259487 - RNA, 19 nt, Artificial Sequence
  Description of Artificial Sequence: Synthetic oligonucleotide
auccaacaacucagcccca

SEQ ID NO: 2259488 - RNA, 19 nt, Artificial Sequence
  Description of Artificial Sequence: Synthetic oligonucleotide
uuccgaccucacccucauu

SEQ ID NO: 2259489 - RNA, 19 nt, Artificial Sequence
  Description of Artificial Sequence: Synthetic oligonucleotide
ccauuccgaccucacccuc

SEQ ID NO: 2259490 - RNA, 19 nt, Artificial Sequence
  Description of Artificial Sequence: Synthetic oligonucleotide
guggccaaccggagguucu

SEQ ID NO: 2259491 - RNA, 19 nt, Artificial Sequence
  Description of Artificial Sequence: Synthetic oligonucleotide
gccaaccggagguucuugu

SEQ ID NO: 2259492 - RNA, 19 nt, Artificial Sequence
  Description of Artificial Sequence: Synthetic oligonucleotide
gcagcagauuucccaugcu

SEQ ID NO: 2259493 - RNA, 19 nt, Artificial Sequence
  Description of Artificial Sequence: Synthetic oligonucleotide
gguuagugauuggcuuaaa

SEQ ID NO: 2259494 - RNA, 19 nt, Artificial Sequence
  Description of Artificial Sequence: Synthetic oligonucleotide
gggaugguuugcauggcuu

SEQ ID NO: 2259495 - RNA, 19 nt, Artificial Sequence
  Description of Artificial Sequence: Synthetic oligonucleotide
guguucaguuaaggggaau

SEQ ID NO: 2259496 - RNA, 19 nt, Artificial Sequence
  Description of Artificial Sequence: Synthetic oligonucleotide
cuucaggguauuggugcau

SEQ ID NO: 2259497 - RNA, 19 nt, Artificial Sequence
  Description of Artificial Sequence: Synthetic oligonucleotide
cacccucauugugguauaa

SEQ ID NO: 2259498 - RNA, 19 nt, Artificial Sequence
  Description of Artificial Sequence: Synthetic oligonucleotide
gcuucaccagucccucagu

SEQ ID NO: 2259499 - RNA, 19 nt, Artificial Sequence
  Description of Artificial Sequence: Synthetic oligonucleotide
cccauuccgaccucacccu

SEQ ID NO: 2259500 - RNA, 19 nt, Artificial Sequence
  Description of Artificial Sequence: Synthetic oligonucleotide
ccagucccucagucaccag

SEQ ID NO: 2259501 - RNA, 19 nt, Artificial Sequence
  Description of Artificial Sequence: Synthetic oligonucleotide
gguccuccauggccuccca

SEQ ID NO: 2259502 - RNA, 19 nt, Artificial Sequence
  Description of Artificial Sequence: Synthetic oligonucleotide
ccaggccauugcaauucaa

SEQ ID NO: 2259503 - RNA, 19 nt, Artificial Sequence
  Description of Artificial Sequence: Synthetic oligonucleotide
gcccacaacagggaugguu

SEQ ID NO: 2259504 - RNA, 19 nt, Artificial Sequence
  Description of Artificial Sequence: Synthetic oligonucleotide
ccgaccucacccucauugu

SEQ ID NO: 2259505 - RNA, 19 nt, Artificial Sequence
  Description of Artificial Sequence: Synthetic oligonucleotide
ccgguacccaaaguugaua

SEQ ID NO: 2259506 - RNA, 19 nt, Artificial Sequence
  Description of Artificial Sequence: Synthetic oligonucleotide
gccgguacccaaaguugau

SEQ ID NO: 2259507 - RNA, 19 nt, Artificial Sequence
  Description of Artificial Sequence: Synthetic oligonucleotide
ggccucccauguguccaaa

SEQ ID NO: 2259508 - RNA, 19 nt, Artificial Sequence
  Description of Artificial Sequence: Synthetic oligonucleotide
cgacuugggguaacagauu

SEQ ID NO: 2259509 - RNA, 19 nt, Artificial Sequence
  Description of Artificial Sequence: Synthetic oligonucleotide
aaauacuaaaauuaccacc

SEQ ID NO: 2259510 - RNA, 19 nt, Artificial Sequence
  Description of Artificial Sequence: Synthetic oligonucleotide
aauacuaaaauuaccaccc

SEQ ID NO: 2259511 - RNA, 19 nt, Artificial Sequence
  Description of Artificial Sequence: Synthetic oligonucleotide
uucaauauagucauaaucc

SEQ ID NO: 2259512 - RNA, 19 nt, Artificial Sequence
  Description of Artificial Sequence: Synthetic oligonucleotide
aaaauuaccacccaguuaa

SEQ ID NO: 2259513 - RNA, 19 nt, Artificial Sequence
  Description of Artificial Sequence: Synthetic oligonucleotide
augaguaucacauaugaac

SEQ ID NO: 2259514 - RNA, 19 nt, Artificial Sequence
  Description of Artificial Sequence: Synthetic oligonucleotide
aaaauacuaaaauuaccac

SEQ ID NO: 2259515 - RNA, 19 nt, Artificial Sequence
  Description of Artificial Sequence: Synthetic oligonucleotide
uucagaacauuccaaaucg

SEQ ID NO: 2259516 - RNA, 19 nt, Artificial Sequence
  Description of Artificial Sequence: Synthetic oligonucleotide
uuaaagacaacaauccgag

SEQ ID NO: 2259517 - RNA, 19 nt, Artificial Sequence
  Description of Artificial Sequence: Synthetic oligonucleotide
aauccgagaaaacacauug

SEQ ID NO: 2259518 - RNA, 19 nt, Artificial Sequence
  Description of Artificial Sequence: Synthetic oligonucleotide
aaacauucuauguauaaca

SEQ ID NO: 2259519 - RNA, 19 nt, Artificial Sequence
  Description of Artificial Sequence: Synthetic oligonucleotide
aaaggagaaaacugagccc

SEQ ID NO: 2259520 - RNA, 19 nt, Artificial Sequence
  Description of Artificial Sequence: Synthetic oligonucleotide
uugucaguuucaaagaccg

SEQ ID NO: 2259521 - RNA, 19 nt, Artificial Sequence
  Description of Artificial Sequence: Synthetic oligonucleotide
uauaauaaacauucuaugu

SEQ ID NO: 2259522 - RNA, 19 nt, Artificial Sequence
  Description of Artificial Sequence: Synthetic oligonucleotide
uuauccuucaauauaguca

SEQ ID NO: 2259523 - RNA, 19 nt, Artificial Sequence
  Description of Artificial Sequence: Synthetic oligonucleotide
aauuuauccuucaauauag

SEQ ID NO: 2259524 - RNA, 19 nt, Artificial Sequence
  Description of Artificial Sequence: Synthetic oligonucleotide
ugcaauaugaguaucacau

SEQ ID NO: 2259525 - RNA, 19 nt, Artificial Sequence
  Description of Artificial Sequence: Synthetic oligonucleotide
aacacauucaaaaggcucc

SEQ ID NO: 2259526 - RNA, 19 nt, Artificial Sequence
  Description of Artificial Sequence: Synthetic oligonucleotide
uuauaauaaacauucuaug

SEQ ID NO: 2259527 - RNA, 19 nt, Artificial Sequence
  Description of Artificial Sequence: Synthetic oligonucleotide
uguauaacauguuuuaacu

SEQ ID NO: 2259528 - RNA, 19 nt, Artificial Sequence
  Description of Artificial Sequence: Synthetic oligonucleotide
uagaucaaguguaaaaugc

SEQ ID NO: 2259529 - RNA, 19 nt, Artificial Sequence
  Description of Artificial Sequence: Synthetic oligonucleotide
uguaaaaugcaauaugagu

SEQ ID NO: 2259530 - RNA, 19 nt, Artificial Sequence
  Description of Artificial Sequence: Synthetic oligonucleotide
auguauaacauguuuuaac

SEQ ID NO: 2259531 - RNA, 19 nt, Artificial Sequence
  Description of Artificial Sequence: Synthetic oligonucleotide
uguaacugcagucaguaca

SEQ ID NO: 2259532 - RNA, 19 nt, Artificial Sequence
  Description of Artificial Sequence: Synthetic oligonucleotide
ugauauuuaccccagcucu

SEQ ID NO: 2259533 - RNA, 19 nt, Artificial Sequence
  Description of Artificial Sequence: Synthetic oligonucleotide
ucauaauccaauuaauaac

SEQ ID NO: 2259534 - RNA, 19 nt, Artificial Sequence
  Description of Artificial Sequence: Synthetic oligonucleotide
ucaaagaccgaacuuaacu

SEQ ID NO: 2259535 - RNA, 19 nt, Artificial Sequence
  Description of Artificial Sequence: Synthetic oligonucleotide
uuauguaagacaguuuggg

SEQ ID NO: 2259536 - RNA, 19 nt, Artificial Sequence
  Description of Artificial Sequence: Synthetic oligonucleotide
uacccauuauguaagacag

SEQ ID NO: 2259537 - RNA, 19 nt, Artificial Sequence
  Description of Artificial Sequence: Synthetic oligonucleotide
aguauucacauuuuaaaga

SEQ ID NO: 2259538 - RNA, 19 nt, Artificial Sequence
  Description of Artificial Sequence: Synthetic oligonucleotide
gauaucaaaaguucacuug

SEQ ID NO: 2259539 - RNA, 19 nt, Artificial Sequence
  Description of Artificial Sequence: Synthetic oligonucleotide
uuugauauuuaccccagcu

SEQ ID NO: 2259540 - RNA, 19 nt, Artificial Sequence
  Description of Artificial Sequence: Synthetic oligonucleotide
aaugcaauaugaguaucac

SEQ ID NO: 2259541 - RNA, 19 nt, Artificial Sequence
  Description of Artificial Sequence: Synthetic oligonucleotide
acugaguacacucuguaag

SEQ ID NO: 2259542 - RNA, 19 nt, Artificial Sequence
  Description of Artificial Sequence: Synthetic oligonucleotide
auagucauaauccaauuaa

SEQ ID NO: 2259543 - RNA, 19 nt, Artificial Sequence
  Description of Artificial Sequence: Synthetic oligonucleotide
uuagcaguuauggugaacc

SEQ ID NO: 2259544 - RNA, 19 nt, Artificial Sequence
  Description of Artificial Sequence: Synthetic oligonucleotide
auguaagacaguuugggug

SEQ ID NO: 2259545 - RNA, 19 nt, Artificial Sequence
  Description of Artificial Sequence: Synthetic oligonucleotide
ucaauauagucauaaucca

SEQ ID NO: 2259546 - RNA, 19 nt, Artificial Sequence
  Description of Artificial Sequence: Synthetic oligonucleotide
uuaguuuauaauaaacauu

SEQ ID NO: 2259547 - RNA, 19 nt, Artificial Sequence
  Description of Artificial Sequence: Synthetic oligonucleotide
uuaaagauugucaguuuca

SEQ ID NO: 2259548 - RNA, 19 nt, Artificial Sequence
  Description of Artificial Sequence: Synthetic oligonucleotide
aaagaccgaacuuaacuga

SEQ ID NO: 2259549 - RNA, 19 nt, Artificial Sequence
  Description of Artificial Sequence: Synthetic oligonucleotide
caaacagcaggaaugacac

SEQ ID NO: 2259550 - RNA, 19 nt, Artificial Sequence
  Description of Artificial Sequence: Synthetic oligonucleotide
aucaaaaguucacuugacg

SEQ ID NO: 2259551 - RNA, 19 nt, Artificial Sequence
  Description of Artificial Sequence: Synthetic oligonucleotide
aauguuccaggguucuaac

SEQ ID NO: 2259552 - RNA, 19 nt, Artificial Sequence
  Description of Artificial Sequence: Synthetic oligonucleotide
uccaaaucgagagacaagc

SEQ ID NO: 2259553 - RNA, 19 nt, Artificial Sequence
  Description of Artificial Sequence: Synthetic oligonucleotide
guuauggugaaccuccucc

SEQ ID NO: 2259554 - RNA, 19 nt, Artificial Sequence
  Description of Artificial Sequence: Synthetic oligonucleotide
uguaagacaguuugggugu

SEQ ID NO: 2259555 - RNA, 19 nt, Artificial Sequence
  Description of Artificial Sequence: Synthetic oligonucleotide
cuucaauauagucauaauc

SEQ ID NO: 2259556 - RNA, 19 nt, Artificial Sequence
  Description of Artificial Sequence: Synthetic oligonucleotide
aauauagucauaauccaau

SEQ ID NO: 2259557 - RNA, 19 nt, Artificial Sequence
  Description of Artificial Sequence: Synthetic oligonucleotide
ucuauguauaacauguuuu

SEQ ID NO: 2259558 - RNA, 19 nt, Artificial Sequence
  Description of Artificial Sequence: Synthetic oligonucleotide
uacuaaaauuaccacccag

SEQ ID NO: 2259559 - RNA, 19 nt, Artificial Sequence
  Description of Artificial Sequence: Synthetic oligonucleotide
aguacauccuacugaguac

SEQ ID NO: 2259560 - RNA, 19 nt, Artificial Sequence
  Description of Artificial Sequence: Synthetic oligonucleotide
auucaaaaggcuccaaugu

SEQ ID NO: 2259561 - RNA, 19 nt, Artificial Sequence
  Description of Artificial Sequence: Synthetic oligonucleotide
caguauucacauuuuaaag

SEQ ID NO: 2259562 - RNA, 19 nt, Artificial Sequence
  Description of Artificial Sequence: Synthetic oligonucleotide
aaaucgagagacaagcaug

SEQ ID NO: 2259563 - RNA, 19 nt, Artificial Sequence
  Description of Artificial Sequence: Synthetic oligonucleotide
ugucuacccauuauguaag

SEQ ID NO: 2259564 - RNA, 19 nt, Artificial Sequence
  Description of Artificial Sequence: Synthetic oligonucleotide
ucgagagacaagcaugugc

SEQ ID NO: 2259565 - RNA, 19 nt, Artificial Sequence
  Description of Artificial Sequence: Synthetic oligonucleotide
gacuguaggucucagaaca

SEQ ID NO: 2259566 - RNA, 19 nt, Artificial Sequence
  Description of Artificial Sequence: Synthetic oligonucleotide
ucaaguguaaaaugcaaua

SEQ ID NO: 2259567 - RNA, 19 nt, Artificial Sequence
  Description of Artificial Sequence: Synthetic oligonucleotide
cauucaaaaggcuccaaug

SEQ ID NO: 2259568 - RNA, 19 nt, Artificial Sequence
  Description of Artificial Sequence: Synthetic oligonucleotide
uguuugauauuuaccccag

SEQ ID NO: 2259569 - RNA, 19 nt, Artificial Sequence
  Description of Artificial Sequence: Synthetic oligonucleotide
uagagcacauuuuauauua

SEQ ID NO: 2259570 - RNA, 19 nt, Artificial Sequence
  Description of Artificial Sequence: Synthetic oligonucleotide
gucaguacauccuacugag

SEQ ID NO: 2259571 - RNA, 19 nt, Artificial Sequence
  Description of Artificial Sequence: Synthetic oligonucleotide
caaagaccgaacuuaacug

SEQ ID NO: 2259572 - RNA, 19 nt, Artificial Sequence
  Description of Artificial Sequence: Synthetic oligonucleotide
gucauaauccaauuaauaa

SEQ ID NO: 2259573 - RNA, 19 nt, Artificial Sequence
  Description of Artificial Sequence: Synthetic oligonucleotide
aguguaaaaugcaauauga

SEQ ID NO: 2259574 - RNA, 19 nt, Artificial Sequence
  Description of Artificial Sequence: Synthetic oligonucleotide
auuuaccccagcucugagc

SEQ ID NO: 2259575 - RNA, 19 nt, Artificial Sequence
  Description of Artificial Sequence: Synthetic oligonucleotide
uggagauaucaaaaguuca

SEQ ID NO: 2259576 - RNA, 19 nt, Artificial Sequence
  Description of Artificial Sequence: Synthetic oligonucleotide
auacacuucuacuugacaa

SEQ ID NO: 2259577 - RNA, 19 nt, Artificial Sequence
  Description of Artificial Sequence: Synthetic oligonucleotide
uuuauccuucaauauaguc

SEQ ID NO: 2259578 - RNA, 19 nt, Artificial Sequence
  Description of Artificial Sequence: Synthetic oligonucleotide
cuagaucaaguguaaaaug

SEQ ID NO: 2259579 - RNA, 19 nt, Artificial Sequence
  Description of Artificial Sequence: Synthetic oligonucleotide
aacuuccaggugucuaccc

SEQ ID NO: 2259580 - RNA, 19 nt, Artificial Sequence
  Description of Artificial Sequence: Synthetic oligonucleotide
acgguuguuuccuuuuagc

SEQ ID NO: 2259581 - RNA, 19 nt, Artificial Sequence
  Description of Artificial Sequence: Synthetic oligonucleotide
cuguaagaugccuagauca

SEQ ID NO: 2259582 - RNA, 19 nt, Artificial Sequence
  Description of Artificial Sequence: Synthetic oligonucleotide
auaaacauucuauguauaa

SEQ ID NO: 2259583 - RNA, 19 nt, Artificial Sequence
  Description of Artificial Sequence: Synthetic oligonucleotide
ggguguuugauauuuaccc

SEQ ID NO: 2259584 - RNA, 19 nt, Artificial Sequence
  Description of Artificial Sequence: Synthetic oligonucleotide
acaacaauccgagaaaaca

SEQ ID NO: 2259585 - RNA, 19 nt, Artificial Sequence
  Description of Artificial Sequence: Synthetic oligonucleotide
cauucuauguauaacaugu

SEQ ID NO: 2259586 - RNA, 19 nt, Artificial Sequence
  Description of Artificial Sequence: Synthetic oligonucleotide
uacuugacaaucuggacuc

SEQ ID NO: 2259587 - RNA, 19 nt, Artificial Sequence
  Description of Artificial Sequence: Synthetic oligonucleotide
uuuccuuuuagcaguuaug

SEQ ID NO: 2259588 - RNA, 19 nt, Artificial Sequence
  Description of Artificial Sequence: Synthetic oligonucleotide
aagcaugugcuguuccuuc

SEQ ID NO: 2259589 - RNA, 19 nt, Artificial Sequence
  Description of Artificial Sequence: Synthetic oligonucleotide
ugaacacaaaacuggagau

SEQ ID NO: 2259590 - RNA, 19 nt, Artificial Sequence
  Description of Artificial Sequence: Synthetic oligonucleotide
aguuaacauggccaggcag

SEQ ID NO: 2259591 - RNA, 19 nt, Artificial Sequence
  Description of Artificial Sequence: Synthetic oligonucleotide
cagaacauuccaaaucgag

SEQ ID NO: 2259592 - RNA, 19 nt, Artificial Sequence
  Description of Artificial Sequence: Synthetic oligonucleotide
ugcacauugcauauacacu

SEQ ID NO: 2259593 - RNA, 19 nt, Artificial Sequence
  Description of Artificial Sequence: Synthetic oligonucleotide
uugcauauacacuucuacu

SEQ ID NO: 2259594 - RNA, 19 nt, Artificial Sequence
  Description of Artificial Sequence: Synthetic oligonucleotide
auuaccacccaguuaacau

SEQ ID NO: 2259595 - RNA, 19 nt, Artificial Sequence
  Description of Artificial Sequence: Synthetic oligonucleotide
aaaugcaauaugaguauca

SEQ ID NO: 2259596 - RNA, 19 nt, Artificial Sequence
  Description of Artificial Sequence: Synthetic oligonucleotide
cuggagauaucaaaaguuc

SEQ ID NO: 2259597 - RNA, 19 nt, Artificial Sequence
  Description of Artificial Sequence: Synthetic oligonucleotide
uauguaagacaguuugggu

SEQ ID NO: 2259598 - RNA, 19 nt, Artificial Sequence
  Description of Artificial Sequence: Synthetic oligonucleotide
ccuuuuaaagacaacaauc

SEQ ID NO: 2259599 - RNA, 19 nt, Artificial Sequence
  Description of Artificial Sequence: Synthetic oligonucleotide
aagaugccuagaucaagug

SEQ ID NO: 2259600 - RNA, 19 nt, Artificial Sequence
  Description of Artificial Sequence: Synthetic oligonucleotide
gugcacauugcauauacac

SEQ ID NO: 2259601 - RNA, 19 nt, Artificial Sequence
  Description of Artificial Sequence: Synthetic oligonucleotide
uuucaaagaccgaacuuaa

SEQ ID NO: 2259602 - RNA, 19 nt, Artificial Sequence
  Description of Artificial Sequence: Synthetic oligonucleotide
agauugucaguuucaaaga

SEQ ID NO: 2259603 - RNA, 19 nt, Artificial Sequence
  Description of Artificial Sequence: Synthetic oligonucleotide
aacauuccaaaucgagaga

SEQ ID NO: 2259604 - RNA, 19 nt, Artificial Sequence
  Description of Artificial Sequence: Synthetic oligonucleotide
augugggaggagcacgucc

SEQ ID NO: 2259605 - RNA, 19 nt, Artificial Sequence
  Description of Artificial Sequence: Synthetic oligonucleotide
ucagcccuagccagaaggg

SEQ ID NO: 2259606 - RNA, 19 nt, Artificial Sequence
  Description of Artificial Sequence: Synthetic oligonucleotide
gaaaacugagcccaccaga

SEQ ID NO: 2259607 - RNA, 19 nt, Artificial Sequence
  Description of Artificial Sequence: Synthetic oligonucleotide
agucaguacauccuacuga

SEQ ID NO: 2259608 - RNA, 19 nt, Artificial Sequence
  Description of Artificial Sequence: Synthetic oligonucleotide
uggcccaucagcccuagcc

SEQ ID NO: 2259609 - RNA, 19 nt, Artificial Sequence
  Description of Artificial Sequence: Synthetic oligonucleotide
uccgagaaaacacauuguu

SEQ ID NO: 2259610 - RNA, 19 nt, Artificial Sequence
  Description of Artificial Sequence: Synthetic oligonucleotide
uaucaaaaguucacuugac

SEQ ID NO: 2259611 - RNA, 19 nt, Artificial Sequence
  Description of Artificial Sequence: Synthetic oligonucleotide
ucacauuuuaaagauuguc

SEQ ID NO: 2259612 - RNA, 19 nt, Artificial Sequence
  Description of Artificial Sequence: Synthetic oligonucleotide
aacaauccgagaaaacaca

SEQ ID NO: 2259613 - RNA, 19 nt, Artificial Sequence
  Description of Artificial Sequence: Synthetic oligonucleotide
uguaagaugccuagaucaa

SEQ ID NO: 2259614 - RNA, 19 nt, Artificial Sequence
  Description of Artificial Sequence: Synthetic oligonucleotide
gguuguuuccuuuuagcag

SEQ ID NO: 2259615 - RNA, 19 nt, Artificial Sequence
  Description of Artificial Sequence: Synthetic oligonucleotide
ucuguaagaugccuagauc

SEQ ID NO: 2259616 - RNA, 19 nt, Artificial Sequence
  Description of Artificial Sequence: Synthetic oligonucleotide
agaaaacugagcccaccag

SEQ ID NO: 2259617 - RNA, 19 nt, Artificial Sequence
  Description of Artificial Sequence: Synthetic oligonucleotide
agauaucaaaaguucacuu

SEQ ID NO: 2259618 - RNA, 19 nt, Artificial Sequence
  Description of Artificial Sequence: Synthetic oligonucleotide
gacacagguugacuguagg

SEQ ID NO: 2259619 - RNA, 19 nt, Artificial Sequence
  Description of Artificial Sequence: Synthetic oligonucleotide
auuucugcgaggcagccaa

SEQ ID NO: 2259620 - RNA, 19 nt, Artificial Sequence
  Description of Artificial Sequence: Synthetic oligonucleotide
gaguaucacauaugaacac

SEQ ID NO: 2259621 - RNA, 19 nt, Artificial Sequence
  Description of Artificial Sequence: Synthetic oligonucleotide
agggccacagugcacauug

SEQ ID NO: 2259622 - RNA, 19 nt, Artificial Sequence
  Description of Artificial Sequence: Synthetic oligonucleotide
ugccuuucagaacauucca

SEQ ID NO: 2259623 - RNA, 19 nt, Artificial Sequence
  Description of Artificial Sequence: Synthetic oligonucleotide
aggguucuaacuuccaggu

SEQ ID NO: 2259624 - RNA, 19 nt, Artificial Sequence
  Description of Artificial Sequence: Synthetic oligonucleotide
caggcagccauguaacugc

SEQ ID NO: 2259625 - RNA, 19 nt, Artificial Sequence
  Description of Artificial Sequence: Synthetic oligonucleotide
uuggguguuugauauuuac

SEQ ID NO: 2259626 - RNA, 19 nt, Artificial Sequence
  Description of Artificial Sequence: Synthetic oligonucleotide
guguuugauauuuacccca

SEQ ID NO: 2259627 - RNA, 19 nt, Artificial Sequence
  Description of Artificial Sequence: Synthetic oligonucleotide
uguaggucucagaacacau

SEQ ID NO: 2259628 - RNA, 19 nt, Artificial Sequence
  Description of Artificial Sequence: Synthetic oligonucleotide
cuacccauuauguaagaca

SEQ ID NO: 2259629 - RNA, 19 nt, Artificial Sequence
  Description of Artificial Sequence: Synthetic oligonucleotide
guguaaaaugcaauaugag

SEQ ID NO: 2259630 - RNA, 19 nt, Artificial Sequence
  Description of Artificial Sequence: Synthetic oligonucleotide
aauuaccacccaguuaaca

SEQ ID NO: 2259631 - RNA, 19 nt, Artificial Sequence
  Description of Artificial Sequence: Synthetic oligonucleotide
uauggugaaccuccucccc

SEQ ID NO: 2259632 - RNA, 19 nt, Artificial Sequence
  Description of Artificial Sequence: Synthetic oligonucleotide
cagucuagauuucugcgag

SEQ ID NO: 2259633 - RNA, 19 nt, Artificial Sequence
  Description of Artificial Sequence: Synthetic oligonucleotide
aaaacugagcccaccagau

SEQ ID NO: 2259634 - RNA, 19 nt, Artificial Sequence
  Description of Artificial Sequence: Synthetic oligonucleotide
accagauggguggucagcc

SEQ ID NO: 2259635 - RNA, 19 nt, Artificial Sequence
  Description of Artificial Sequence: Synthetic oligonucleotide
uccuacugaguacacucug

SEQ ID NO: 2259636 - RNA, 19 nt, Artificial Sequence
  Description of Artificial Sequence: Synthetic oligonucleotide
ucagaacauuccaaaucga

SEQ ID NO: 2259637 - RNA, 19 nt, Artificial Sequence
  Description of Artificial Sequence: Synthetic oligonucleotide
uucacuugacgguuguuuc

SEQ ID NO: 2259638 - RNA, 19 nt, Artificial Sequence
  Description of Artificial Sequence: Synthetic oligonucleotide
ucacuugacgguuguuucc

SEQ ID NO: 2259639 - RNA, 19 nt, Artificial Sequence
  Description of Artificial Sequence: Synthetic oligonucleotide
ugugggcgaagccuucagg

SEQ ID NO: 2259640 - RNA, 19 nt, Artificial Sequence
  Description of Artificial Sequence: Synthetic oligonucleotide
gaugccuagaucaagugua

SEQ ID NO: 2259641 - RNA, 19 nt, Artificial Sequence
  Description of Artificial Sequence: Synthetic oligonucleotide
uuaacauggccaggcagcc

SEQ ID NO: 2259642 - RNA, 19 nt, Artificial Sequence
  Description of Artificial Sequence: Synthetic oligonucleotide
auauacacuucuacuugac

SEQ ID NO: 2259643 - RNA, 19 nt, Artificial Sequence
  Description of Artificial Sequence: Synthetic oligonucleotide
aagacaguuuggguguuug

SEQ ID NO: 2259644 - RNA, 19 nt, Artificial Sequence
  Description of Artificial Sequence: Synthetic oligonucleotide
uuacaguauucacauuuua

SEQ ID NO: 2259645 - RNA, 19 nt, Artificial Sequence
  Description of Artificial Sequence: Synthetic oligonucleotide
aggaaugacacagguugac

SEQ ID NO: 2259646 - RNA, 19 nt, Artificial Sequence
  Description of Artificial Sequence: Synthetic oligonucleotide
aguuauggugaaccuccuc

SEQ ID NO: 2259647 - RNA, 19 nt, Artificial Sequence
  Description of Artificial Sequence: Synthetic oligonucleotide
auaaaucaauugcuucaca

SEQ ID NO: 2259648 - RNA, 19 nt, Artificial Sequence
  Description of Artificial Sequence: Synthetic oligonucleotide
gacgguuguuuccuuuuag

SEQ ID NO: 2259649 - RNA, 19 nt, Artificial Sequence
  Description of Artificial Sequence: Synthetic oligonucleotide
acauugcauauacacuucu

SEQ ID NO: 2259650 - RNA, 19 nt, Artificial Sequence
  Description of Artificial Sequence: Synthetic oligonucleotide
gugucuacccauuauguaa

SEQ ID NO: 2259651 - RNA, 19 nt, Artificial Sequence
  Description of Artificial Sequence: Synthetic oligonucleotide
uauuuaccccagcucugag

SEQ ID NO: 2259652 - RNA, 19 nt, Artificial Sequence
  Description of Artificial Sequence: Synthetic oligonucleotide
gguguuugauauuuacccc

SEQ ID NO: 2259653 - RNA, 19 nt, Artificial Sequence
  Description of Artificial Sequence: Synthetic oligonucleotide
guuucaaagaccgaacuua

SEQ ID NO: 2259654 - RNA, 19 nt, Artificial Sequence
  Description of Artificial Sequence: Synthetic oligonucleotide
acauucaaaaggcuccaau

SEQ ID NO: 2259655 - RNA, 19 nt, Artificial Sequence
  Description of Artificial Sequence: Synthetic oligonucleotide
aguuucaaagaccgaacuu

SEQ ID NO: 2259656 - RNA, 19 nt, Artificial Sequence
  Description of Artificial Sequence: Synthetic oligonucleotide
uucaaagaccgaacuuaac

SEQ ID NO: 2259657 - RNA, 19 nt, Artificial Sequence
  Description of Artificial Sequence: Synthetic oligonucleotide
cagugcacauugcauauac

SEQ ID NO: 2259658 - RNA, 19 nt, Artificial Sequence
  Description of Artificial Sequence: Synthetic oligonucleotide
agcaguuauggugaaccuc

SEQ ID NO: 2259659 - RNA, 19 nt, Artificial Sequence
  Description of Artificial Sequence: Synthetic oligonucleotide
auaauccaauuaauaacug

SEQ ID NO: 2259660 - RNA, 19 nt, Artificial Sequence
  Description of Artificial Sequence: Synthetic oligonucleotide
gacaagcaugugcuguucc

SEQ ID NO: 2259661 - RNA, 19 nt, Artificial Sequence
  Description of Artificial Sequence: Synthetic oligonucleotide
agcccuagccagaagggcc

SEQ ID NO: 2259662 - RNA, 19 nt, Artificial Sequence
  Description of Artificial Sequence: Synthetic oligonucleotide
cugcgaggcagccaaacag

SEQ ID NO: 2259663 - RNA, 19 nt, Artificial Sequence
  Description of Artificial Sequence: Synthetic oligonucleotide
gucuagauuucugcgaggc

SEQ ID NO: 2259664 - RNA, 19 nt, Artificial Sequence
  Description of Artificial Sequence: Synthetic oligonucleotide
agaucaaguguaaaaugca

SEQ ID NO: 2259665 - RNA, 19 nt, Artificial Sequence
  Description of Artificial Sequence: Synthetic oligonucleotide
aaguucacuugacgguugu

SEQ ID NO: 2259666 - RNA, 19 nt, Artificial Sequence
  Description of Artificial Sequence: Synthetic oligonucleotide
agucuagauuucugcgagg

SEQ ID NO: 2259667 - RNA, 19 nt, Artificial Sequence
  Description of Artificial Sequence: Synthetic oligonucleotide
auguaacugcagucaguac

SEQ ID NO: 2259668 - RNA, 19 nt, Artificial Sequence
  Description of Artificial Sequence: Synthetic oligonucleotide
acuggagauaucaaaaguu

SEQ ID NO: 2259669 - RNA, 19 nt, Artificial Sequence
  Description of Artificial Sequence: Synthetic oligonucleotide
ugacacagguugacuguag

SEQ ID NO: 2259670 - RNA, 19 nt, Artificial Sequence
  Description of Artificial Sequence: Synthetic oligonucleotide
augcaauaugaguaucaca

SEQ ID NO: 2259671 - RNA, 19 nt, Artificial Sequence
  Description of Artificial Sequence: Synthetic oligonucleotide
agagacaagcaugugcugu

SEQ ID NO: 2259672 - RNA, 19 nt, Artificial Sequence
  Description of Artificial Sequence: Synthetic oligonucleotide
agauuucugcgaggcagcc

SEQ ID NO: 2259673 - RNA, 19 nt, Artificial Sequence
  Description of Artificial Sequence: Synthetic oligonucleotide
auacuaaaauuaccaccca

SEQ ID NO: 2259674 - RNA, 19 nt, Artificial Sequence
  Description of Artificial Sequence: Synthetic oligonucleotide
aaauuaccacccaguuaac

SEQ ID NO: 2259675 - RNA, 19 nt, Artificial Sequence
  Description of Artificial Sequence: Synthetic oligonucleotide
uugacaaucuggacucaaa

SEQ ID NO: 2259676 - RNA, 19 nt, Artificial Sequence
  Description of Artificial Sequence: Synthetic oligonucleotide
ucgggcagcccacacaggu

SEQ ID NO: 2259677 - RNA, 19 nt, Artificial Sequence
  Description of Artificial Sequence: Synthetic oligonucleotide
caauauagucauaauccaa

SEQ ID NO: 2259678 - RNA, 19 nt, Artificial Sequence
  Description of Artificial Sequence: Synthetic oligonucleotide
guaagaugccuagaucaag

SEQ ID NO: 2259679 - RNA, 19 nt, Artificial Sequence
  Description of Artificial Sequence: Synthetic oligonucleotide
uccuuuuagcaguuauggu

SEQ ID NO: 2259680 - RNA, 19 nt, Artificial Sequence
  Description of Artificial Sequence: Synthetic oligonucleotide
gcaguuauggugaaccucc

SEQ ID NO: 2259681 - RNA, 19 nt, Artificial Sequence
  Description of Artificial Sequence: Synthetic oligonucleotide
gaccgaacuuaacugaaaa

SEQ ID NO: 2259682 - RNA, 19 nt, Artificial Sequence
  Description of Artificial Sequence: Synthetic oligonucleotide
ucugcgaggcagccaaaca

SEQ ID NO: 2259683 - RNA, 19 nt, Artificial Sequence
  Description of Artificial Sequence: Synthetic oligonucleotide
caggugucuacccauuaug

SEQ ID NO: 2259684 - RNA, 19 nt, Artificial Sequence
  Description of Artificial Sequence: Synthetic oligonucleotide
acugccgaguuccauggcu

SEQ ID NO: 2259685 - RNA, 19 nt, Artificial Sequence
  Description of Artificial Sequence: Synthetic oligonucleotide
guauaacauguuuuaacua

SEQ ID NO: 2259686 - RNA, 19 nt, Artificial Sequence
  Description of Artificial Sequence: Synthetic oligonucleotide
gaucaaguguaaaaugcaa

SEQ ID NO: 2259687 - RNA, 19 nt, Artificial Sequence
  Description of Artificial Sequence: Synthetic oligonucleotide
agcaugugggaggagcacg

SEQ ID NO: 2259688 - RNA, 19 nt, Artificial Sequence
  Description of Artificial Sequence: Synthetic oligonucleotide
ugcagucaguacauccuac

SEQ ID NO: 2259689 - RNA, 19 nt, Artificial Sequence
  Description of Artificial Sequence: Synthetic oligonucleotide
uggccaggcagccauguaa

SEQ ID NO: 2259690 - RNA, 19 nt, Artificial Sequence
  Description of Artificial Sequence: Synthetic oligonucleotide
ggagauaucaaaaguucac

SEQ ID NO: 2259691 - RNA, 19 nt, Artificial Sequence
  Description of Artificial Sequence: Synthetic oligonucleotide
acacagguugacuguaggu

SEQ ID NO: 2259692 - RNA, 19 nt, Artificial Sequence
  Description of Artificial Sequence: Synthetic oligonucleotide
cacauuguuacaguauuca

SEQ ID NO: 2259693 - RNA, 19 nt, Artificial Sequence
  Description of Artificial Sequence: Synthetic oligonucleotide
cuacuugacaaucuggacu

SEQ ID NO: 2259694 - RNA, 19 nt, Artificial Sequence
  Description of Artificial Sequence: Synthetic oligonucleotide
gguucuaacuuccaggugu

SEQ ID NO: 2259695 - RNA, 19 nt, Artificial Sequence
  Description of Artificial Sequence: Synthetic oligonucleotide
cugaguacacucuguaaga

SEQ ID NO: 2259696 - RNA, 19 nt, Artificial Sequence
  Description of Artificial Sequence: Synthetic oligonucleotide
cacagguugacuguagguc

SEQ ID NO: 2259697 - RNA, 19 nt, Artificial Sequence
  Description of Artificial Sequence: Synthetic oligonucleotide
ugacuguaggucucagaac

SEQ ID NO: 2259698 - RNA, 19 nt, Artificial Sequence
  Description of Artificial Sequence: Synthetic oligonucleotide
uacugaguacacucuguaa

SEQ ID NO: 2259699 - RNA, 19 nt, Artificial Sequence
  Description of Artificial Sequence: Synthetic oligonucleotide
ucuacccauuauguaagac

SEQ ID NO: 2259700 - RNA, 19 nt, Artificial Sequence
  Description of Artificial Sequence: Synthetic oligonucleotide
gccagucuagauuucugcg

SEQ ID NO: 2259701 - RNA, 19 nt, Artificial Sequence
  Description of Artificial Sequence: Synthetic oligonucleotide
uacacucuguaagaugccu

SEQ ID NO: 2259702 - RNA, 19 nt, Artificial Sequence
  Description of Artificial Sequence: Synthetic oligonucleotide
acacauuguuacaguauuc

SEQ ID NO: 2259703 - RNA, 19 nt, Artificial Sequence
  Description of Artificial Sequence: Synthetic oligonucleotide
acaguuuggguguuugaua

SEQ ID NO: 2259704 - RNA, 19 nt, Artificial Sequence
  Description of Artificial Sequence: Synthetic oligonucleotide
cagacugccgaguuccaug

SEQ ID NO: 2259705 - RNA, 19 nt, Artificial Sequence
  Description of Artificial Sequence: Synthetic oligonucleotide
aucaaguguaaaaugcaau

SEQ ID NO: 2259706 - RNA, 19 nt, Artificial Sequence
  Description of Artificial Sequence: Synthetic oligonucleotide
cacauugcauauacacuuc

SEQ ID NO: 2259707 - RNA, 19 nt, Artificial Sequence
  Description of Artificial Sequence: Synthetic oligonucleotide
cagucaguacauccuacug

SEQ ID NO: 2259708 - RNA, 19 nt, Artificial Sequence
  Description of Artificial Sequence: Synthetic oligonucleotide
caaaaguucacuugacggu

SEQ ID NO: 2259709 - RNA, 19 nt, Artificial Sequence
  Description of Artificial Sequence: Synthetic oligonucleotide
aguuuauaauaaacauucu

SEQ ID NO: 2259710 - RNA, 19 nt, Artificial Sequence
  Description of Artificial Sequence: Synthetic oligonucleotide
ugagcccaccagaugggug

SEQ ID NO: 2259711 - RNA, 19 nt, Artificial Sequence
  Description of Artificial Sequence: Synthetic oligonucleotide
guuugauauuuaccccagc

SEQ ID NO: 2259712 - RNA, 19 nt, Artificial Sequence
  Description of Artificial Sequence: Synthetic oligonucleotide
auauuuaccccagcucuga

SEQ ID NO: 2259713 - RNA, 19 nt, Artificial Sequence
  Description of Artificial Sequence: Synthetic oligonucleotide
aagaccgaacuuaacugaa

SEQ ID NO: 2259714 - RNA, 19 nt, Artificial Sequence
  Description of Artificial Sequence: Synthetic oligonucleotide
ugaguacacucuguaagau

SEQ ID NO: 2259715 - RNA, 19 nt, Artificial Sequence
  Description of Artificial Sequence: Synthetic oligonucleotide
agccauguaacugcaguca

SEQ ID NO: 2259716 - RNA, 19 nt, Artificial Sequence
  Description of Artificial Sequence: Synthetic oligonucleotide
gagauaucaaaaguucacu

SEQ ID NO: 2259717 - RNA, 19 nt, Artificial Sequence
  Description of Artificial Sequence: Synthetic oligonucleotide
guuccaggguucuaacuuc

SEQ ID NO: 2259718 - RNA, 19 nt, Artificial Sequence
  Description of Artificial Sequence: Synthetic oligonucleotide
gagagacaagcaugugcug

SEQ ID NO: 2259719 - RNA, 19 nt, Artificial Sequence
  Description of Artificial Sequence: Synthetic oligonucleotide
acuguaggucucagaacac

SEQ ID NO: 2259720 - RNA, 19 nt, Artificial Sequence
  Description of Artificial Sequence: Synthetic oligonucleotide
agacaacaauccgagaaaa

SEQ ID NO: 2259721 - RNA, 19 nt, Artificial Sequence
  Description of Artificial Sequence: Synthetic oligonucleotide
guacauccuacugaguaca

SEQ ID NO: 2259722 - RNA, 19 nt, Artificial Sequence
  Description of Artificial Sequence: Synthetic oligonucleotide
uuuuagcaguuauggugaa

SEQ ID NO: 2259723 - RNA, 19 nt, Artificial Sequence
  Description of Artificial Sequence: Synthetic oligonucleotide
uccaauguuccaggguucu

SEQ ID NO: 2259724 - RNA, 19 nt, Artificial Sequence
  Description of Artificial Sequence: Synthetic oligonucleotide
uacauccuacugaguacac

SEQ ID NO: 2259725 - RNA, 19 nt, Artificial Sequence
  Description of Artificial Sequence: Synthetic oligonucleotide
auguuccaggguucuaacu

SEQ ID NO: 2259726 - RNA, 19 nt, Artificial Sequence
  Description of Artificial Sequence: Synthetic oligonucleotide
uuuggguguuugauauuua

SEQ ID NO: 2259727 - RNA, 19 nt, Artificial Sequence
  Description of Artificial Sequence: Synthetic oligonucleotide
gaggagcacguccucgggc

SEQ ID NO: 2259728 - RNA, 19 nt, Artificial Sequence
  Description of Artificial Sequence: Synthetic oligonucleotide
uuuagcaguuauggugaac

SEQ ID NO: 2259729 - RNA, 19 nt, Artificial Sequence
  Description of Artificial Sequence: Synthetic oligonucleotide
ugggaggagcacguccucg

SEQ ID NO: 2259730 - RNA, 19 nt, Artificial Sequence
  Description of Artificial Sequence: Synthetic oligonucleotide
guaucacauaugaacacaa

SEQ ID NO: 2259731 - RNA, 19 nt, Artificial Sequence
  Description of Artificial Sequence: Synthetic oligonucleotide
cuagaaauuuauccuucaa

SEQ ID NO: 2259732 - RNA, 19 nt, Artificial Sequence
  Description of Artificial Sequence: Synthetic oligonucleotide
uugacgguuguuuccuuuu

SEQ ID NO: 2259733 - RNA, 19 nt, Artificial Sequence
  Description of Artificial Sequence: Synthetic oligonucleotide
agcacguccucgggcagcc

SEQ ID NO: 2259734 - RNA, 19 nt, Artificial Sequence
  Description of Artificial Sequence: Synthetic oligonucleotide
cauguaacugcagucagua

SEQ ID NO: 2259735 - RNA, 19 nt, Artificial Sequence
  Description of Artificial Sequence: Synthetic oligonucleotide
ccaguuaacauggccaggc

SEQ ID NO: 2259736 - RNA, 19 nt, Artificial Sequence
  Description of Artificial Sequence: Synthetic oligonucleotide
agacaagcaugugcuguuc

SEQ ID NO: 2259737 - RNA, 19 nt, Artificial Sequence
  Description of Artificial Sequence: Synthetic oligonucleotide
aggugucuacccauuaugu

SEQ ID NO: 2259738 - RNA, 19 nt, Artificial Sequence
  Description of Artificial Sequence: Synthetic oligonucleotide
acaauccgagaaaacacau

SEQ ID NO: 2259739 - RNA, 19 nt, Artificial Sequence
  Description of Artificial Sequence: Synthetic oligonucleotide
gguagagcacauuuuauau

SEQ ID NO: 2259740 - RNA, 19 nt, Artificial Sequence
  Description of Artificial Sequence: Synthetic oligonucleotide
aggcuccaauguuccaggg

SEQ ID NO: 2259741 - RNA, 19 nt, Artificial Sequence
  Description of Artificial Sequence: Synthetic oligonucleotide
acacauucaaaaggcucca

SEQ ID NO: 2259742 - RNA, 19 nt, Artificial Sequence
  Description of Artificial Sequence: Synthetic oligonucleotide
cuaaaauuaccacccaguu

SEQ ID NO: 2259743 - RNA, 19 nt, Artificial Sequence
  Description of Artificial Sequence: Synthetic oligonucleotide
ugacgguuguuuccuuuua

SEQ ID NO: 2259744 - RNA, 19 nt, Artificial Sequence
  Description of Artificial Sequence: Synthetic oligonucleotide
gccauguaacugcagucag

SEQ ID NO: 2259745 - RNA, 19 nt, Artificial Sequence
  Description of Artificial Sequence: Synthetic oligonucleotide
caaaucgagagacaagcau

SEQ ID NO: 2259746 - RNA, 19 nt, Artificial Sequence
  Description of Artificial Sequence: Synthetic oligonucleotide
cuccaauguuccaggguuc

SEQ ID NO: 2259747 - RNA, 19 nt, Artificial Sequence
  Description of Artificial Sequence: Synthetic oligonucleotide
uccaggugucuacccauua

SEQ ID NO: 2259748 - RNA, 19 nt, Artificial Sequence
  Description of Artificial Sequence: Synthetic oligonucleotide
uaccugugggcgaagccuu

SEQ ID NO: 2259749 - RNA, 19 nt, Artificial Sequence
  Description of Artificial Sequence: Synthetic oligonucleotide
caguuuggguguuugauau

SEQ ID NO: 2259750 - RNA, 19 nt, Artificial Sequence
  Description of Artificial Sequence: Synthetic oligonucleotide
cacacaggugcgcaggcca

SEQ ID NO: 2259751 - RNA, 19 nt, Artificial Sequence
  Description of Artificial Sequence: Synthetic oligonucleotide
cagguugacuguaggucuc

SEQ ID NO: 2259752 - RNA, 19 nt, Artificial Sequence
  Description of Artificial Sequence: Synthetic oligonucleotide
acauccuacugaguacacu

SEQ ID NO: 2259753 - RNA, 19 nt, Artificial Sequence
  Description of Artificial Sequence: Synthetic oligonucleotide
gccuagaucaaguguaaaa

SEQ ID NO: 2259754 - RNA, 19 nt, Artificial Sequence
  Description of Artificial Sequence: Synthetic oligonucleotide
ugccgaguuccauggcuac

SEQ ID NO: 2259755 - RNA, 19 nt, Artificial Sequence
  Description of Artificial Sequence: Synthetic oligonucleotide
gcacauugcauauacacuu

SEQ ID NO: 2259756 - RNA, 19 nt, Artificial Sequence
  Description of Artificial Sequence: Synthetic oligonucleotide
auccgagaaaacacauugu

SEQ ID NO: 2259757 - RNA, 19 nt, Artificial Sequence
  Description of Artificial Sequence: Synthetic oligonucleotide
cuacugaguacacucugua

SEQ ID NO: 2259758 - RNA, 19 nt, Artificial Sequence
  Description of Artificial Sequence: Synthetic oligonucleotide
caauguuccaggguucuaa

SEQ ID NO: 2259759 - RNA, 19 nt, Artificial Sequence
  Description of Artificial Sequence: Synthetic oligonucleotide
ggguagagcacauuuuaua

SEQ ID NO: 2259760 - RNA, 19 nt, Artificial Sequence
  Description of Artificial Sequence: Synthetic oligonucleotide
acaggugcgcaggccacuc

SEQ ID NO: 2259761 - RNA, 19 nt, Artificial Sequence
  Description of Artificial Sequence: Synthetic oligonucleotide
caggaaugacacagguuga

SEQ ID NO: 2259762 - RNA, 19 nt, Artificial Sequence
  Description of Artificial Sequence: Synthetic oligonucleotide
ccuuucagaacauuccaaa

SEQ ID NO: 2259763 - RNA, 19 nt, Artificial Sequence
  Description of Artificial Sequence: Synthetic oligonucleotide
acacaggugcgcaggccac

SEQ ID NO: 2259764 - RNA, 19 nt, Artificial Sequence
  Description of Artificial Sequence: Synthetic oligonucleotide
ggcacucccugccagcaug

SEQ ID NO: 2259765 - RNA, 19 nt, Artificial Sequence
  Description of Artificial Sequence: Synthetic oligonucleotide
agccaguggguagagcaca

SEQ ID NO: 2259766 - RNA, 19 nt, Artificial Sequence
  Description of Artificial Sequence: Synthetic oligonucleotide
caguuucaaagaccgaacu

SEQ ID NO: 2259767 - RNA, 19 nt, Artificial Sequence
  Description of Artificial Sequence: Synthetic oligonucleotide
guaacugcagucaguacau

SEQ ID NO: 2259768 - RNA, 19 nt, Artificial Sequence
  Description of Artificial Sequence: Synthetic oligonucleotide
aggucucagaacacauuca

SEQ ID NO: 2259769 - RNA, 19 nt, Artificial Sequence
  Description of Artificial Sequence: Synthetic oligonucleotide
ugggcacucccugccagca

SEQ ID NO: 2259770 - RNA, 19 nt, Artificial Sequence
  Description of Artificial Sequence: Synthetic oligonucleotide
gauuucugcgaggcagcca

SEQ ID NO: 2259771 - RNA, 19 nt, Artificial Sequence
  Description of Artificial Sequence: Synthetic oligonucleotide
auccuacugaguacacucu

SEQ ID NO: 2259772 - RNA, 19 nt, Artificial Sequence
  Description of Artificial Sequence: Synthetic oligonucleotide
ccucgggcagcccacacag

SEQ ID NO: 2259773 - RNA, 19 nt, Artificial Sequence
  Description of Artificial Sequence: Synthetic oligonucleotide
ggaggagcacguccucggg

SEQ ID NO: 2259774 - RNA, 19 nt, Artificial Sequence
  Description of Artificial Sequence: Synthetic oligonucleotide
uuaccccagcucugagcca

SEQ ID NO: 2259775 - RNA, 19 nt, Artificial Sequence
  Description of Artificial Sequence: Synthetic oligonucleotide
cugugggcgaagccuucag

SEQ ID NO: 2259776 - RNA, 19 nt, Artificial Sequence
  Description of Artificial Sequence: Synthetic oligonucleotide
gucuacccauuauguaaga

SEQ ID NO: 2259777 - RNA, 19 nt, Artificial Sequence
  Description of Artificial Sequence: Synthetic oligonucleotide
agugcacauugcauauaca

SEQ ID NO: 2259778 - RNA, 19 nt, Artificial Sequence
  Description of Artificial Sequence: Synthetic oligonucleotide
cagcccuagccagaagggc

SEQ ID NO: 2259779 - RNA, 19 nt, Artificial Sequence
  Description of Artificial Sequence: Synthetic oligonucleotide
ugccuagaucaaguguaaa

SEQ ID NO: 2259780 - RNA, 19 nt, Artificial Sequence
  Description of Artificial Sequence: Synthetic oligonucleotide
aucgagagacaagcaugug

SEQ ID NO: 2259781 - RNA, 19 nt, Artificial Sequence
  Description of Artificial Sequence: Synthetic oligonucleotide
gagacaagcaugugcuguu

SEQ ID NO: 2259782 - RNA, 19 nt, Artificial Sequence
  Description of Artificial Sequence: Synthetic oligonucleotide
caccagauggguggucagc

SEQ ID NO: 2259783 - RNA, 19 nt, Artificial Sequence
  Description of Artificial Sequence: Synthetic oligonucleotide
gacugccgaguuccauggc

SEQ ID NO: 2259784 - RNA, 19 nt, Artificial Sequence
  Description of Artificial Sequence: Synthetic oligonucleotide
cuguuccuucucuagaaau

SEQ ID NO: 2259785 - RNA, 19 nt, Artificial Sequence
  Description of Artificial Sequence: Synthetic oligonucleotide
agcucugagccagugggua

SEQ ID NO: 2259786 - RNA, 19 nt, Artificial Sequence
  Description of Artificial Sequence: Synthetic oligonucleotide
aggggagcaggagaccaca

SEQ ID NO: 2259787 - RNA, 19 nt, Artificial Sequence
  Description of Artificial Sequence: Synthetic oligonucleotide
gaguuccauggcuaccugu

SEQ ID NO: 2259788 - RNA, 19 nt, Artificial Sequence
  Description of Artificial Sequence: Synthetic oligonucleotide
ccagucuagauuucugcga

SEQ ID NO: 2259789 - RNA, 19 nt, Artificial Sequence
  Description of Artificial Sequence: Synthetic oligonucleotide
ggagcaggagaccacacau

SEQ ID NO: 2259790 - RNA, 19 nt, Artificial Sequence
  Description of Artificial Sequence: Synthetic oligonucleotide
caguuaacauggccaggca

SEQ ID NO: 2259791 - RNA, 19 nt, Artificial Sequence
  Description of Artificial Sequence: Synthetic oligonucleotide
ggguucuaacuuccaggug

SEQ ID NO: 2259792 - RNA, 19 nt, Artificial Sequence
  Description of Artificial Sequence: Synthetic oligonucleotide
uuucugcgaggcagccaaa

SEQ ID NO: 2259793 - RNA, 19 nt, Artificial Sequence
  Description of Artificial Sequence: Synthetic oligonucleotide
agauggguggucagccagu

SEQ ID NO: 2259794 - RNA, 19 nt, Artificial Sequence
  Description of Artificial Sequence: Synthetic oligonucleotide
ggucagccagucuagauuu

SEQ ID NO: 2259795 - RNA, 19 nt, Artificial Sequence
  Description of Artificial Sequence: Synthetic oligonucleotide
gcaauaugaguaucacaua

SEQ ID NO: 2259796 - RNA, 19 nt, Artificial Sequence
  Description of Artificial Sequence: Synthetic oligonucleotide
agaccgaacuuaacugaaa

SEQ ID NO: 2259797 - RNA, 19 nt, Artificial Sequence
  Description of Artificial Sequence: Synthetic oligonucleotide
acacucuguaagaugccua

SEQ ID NO: 2259798 - RNA, 19 nt, Artificial Sequence
  Description of Artificial Sequence: Synthetic oligonucleotide
uaagacaguuuggguguuu

SEQ ID NO: 2259799 - RNA, 19 nt, Artificial Sequence
  Description of Artificial Sequence: Synthetic oligonucleotide
cucgggcagcccacacagg

SEQ ID NO: 2259800 - RNA, 19 nt, Artificial Sequence
  Description of Artificial Sequence: Synthetic oligonucleotide
uaacugcagucaguacauc

SEQ ID NO: 2259801 - RNA, 19 nt, Artificial Sequence
  Description of Artificial Sequence: Synthetic oligonucleotide
cuaccugugggcgaagccu

SEQ ID NO: 2259802 - RNA, 19 nt, Artificial Sequence
  Description of Artificial Sequence: Synthetic oligonucleotide
agcaggaaugacacagguu

SEQ ID NO: 2259803 - RNA, 19 nt, Artificial Sequence
  Description of Artificial Sequence: Synthetic oligonucleotide
augccuagaucaaguguaa

SEQ ID NO: 2259804 - RNA, 19 nt, Artificial Sequence
  Description of Artificial Sequence: Synthetic oligonucleotide
ccauggcuaccugugggcg

SEQ ID NO: 2259805 - RNA, 19 nt, Artificial Sequence
  Description of Artificial Sequence: Synthetic oligonucleotide
ccaaaucgagagacaagca

SEQ ID NO: 2259806 - RNA, 19 nt, Artificial Sequence
  Description of Artificial Sequence: Synthetic oligonucleotide
acccauuauguaagacagu

SEQ ID NO: 2259807 - RNA, 19 nt, Artificial Sequence
  Description of Artificial Sequence: Synthetic oligonucleotide
acguccucgggcagcccac

SEQ ID NO: 2259808 - RNA, 19 nt, Artificial Sequence
  Description of Artificial Sequence: Synthetic oligonucleotide
ccaggcagccauguaacug

SEQ ID NO: 2259809 - RNA, 19 nt, Artificial Sequence
  Description of Artificial Sequence: Synthetic oligonucleotide
caucagcccuagccagaag

SEQ ID NO: 2259810 - RNA, 19 nt, Artificial Sequence
  Description of Artificial Sequence: Synthetic oligonucleotide
ccgagaaaacacauuguua

SEQ ID NO: 2259811 - RNA, 19 nt, Artificial Sequence
  Description of Artificial Sequence: Synthetic oligonucleotide
cgagagacaagcaugugcu

SEQ ID NO: 2259812 - RNA, 19 nt, Artificial Sequence
  Description of Artificial Sequence: Synthetic oligonucleotide
cgguuguuuccuuuuagca

SEQ ID NO: 2259813 - RNA, 19 nt, Artificial Sequence
  Description of Artificial Sequence: Synthetic oligonucleotide
cacguccucgggcagccca

SEQ ID NO: 2259814 - RNA, 19 nt, Artificial Sequence
  Description of Artificial Sequence: Synthetic oligonucleotide
cugccgaguuccauggcua

SEQ ID NO: 2259815 - RNA, 19 nt, Artificial Sequence
  Description of Artificial Sequence: Synthetic oligonucleotide
ccuagaucaaguguaaaau

SEQ ID NO: 2259816 - RNA, 19 nt, Artificial Sequence
  Description of Artificial Sequence: Synthetic oligonucleotide
caauccgagaaaacacauu

SEQ ID NO: 2259817 - RNA, 19 nt, Artificial Sequence
  Description of Artificial Sequence: Synthetic oligonucleotide
acagugcacauugcauaua

SEQ ID NO: 2259818 - RNA, 19 nt, Artificial Sequence
  Description of Artificial Sequence: Synthetic oligonucleotide
cacuugacgguuguuuccu

SEQ ID NO: 2259819 - RNA, 19 nt, Artificial Sequence
  Description of Artificial Sequence: Synthetic oligonucleotide
ggguggucagccagucuag

SEQ ID NO: 2259820 - RNA, 19 nt, Artificial Sequence
  Description of Artificial Sequence: Synthetic oligonucleotide
accacacauggggcggcug

SEQ ID NO: 2259821 - RNA, 19 nt, Artificial Sequence
  Description of Artificial Sequence: Synthetic oligonucleotide
cccaguuaacauggccagg

SEQ ID NO: 2259822 - RNA, 19 nt, Artificial Sequence
  Description of Artificial Sequence: Synthetic oligonucleotide
ggcggcugccuuucagaac

SEQ ID NO: 2259823 - RNA, 19 nt, Artificial Sequence
  Description of Artificial Sequence: Synthetic oligonucleotide
gccuuucagaacauuccaa

SEQ ID NO: 2259824 - RNA, 19 nt, Artificial Sequence
  Description of Artificial Sequence: Synthetic oligonucleotide
cacauucaaaaggcuccaa

SEQ ID NO: 2259825 - RNA, 19 nt, Artificial Sequence
  Description of Artificial Sequence: Synthetic oligonucleotide
ggcuaccugugggcgaagc

SEQ ID NO: 2259826 - RNA, 19 nt, Artificial Sequence
  Description of Artificial Sequence: Synthetic oligonucleotide
caguuauggugaaccuccu

SEQ ID NO: 2259827 - RNA, 19 nt, Artificial Sequence
  Description of Artificial Sequence: Synthetic oligonucleotide
ccuacugaguacacucugu

SEQ ID NO: 2259828 - RNA, 19 nt, Artificial Sequence
  Description of Artificial Sequence: Synthetic oligonucleotide
cagcccacacaggugcgca

SEQ ID NO: 2259829 - RNA, 19 nt, Artificial Sequence
  Description of Artificial Sequence: Synthetic oligonucleotide
ugccagcaugugggaggag

SEQ ID NO: 2259830 - RNA, 19 nt, Artificial Sequence
  Description of Artificial Sequence: Synthetic oligonucleotide
uggcuaccugugggcgaag

SEQ ID NO: 2259831 - RNA, 19 nt, Artificial Sequence
  Description of Artificial Sequence: Synthetic oligonucleotide
gggcggcugccuuucagaa

SEQ ID NO: 2259832 - RNA, 19 nt, Artificial Sequence
  Description of Artificial Sequence: Synthetic oligonucleotide
gcccuagccagaagggcca

SEQ ID NO: 2259833 - RNA, 19 nt, Artificial Sequence
  Description of Artificial Sequence: Synthetic oligonucleotide
guggcccaucagcccuagc

SEQ ID NO: 2259834 - RNA, 19 nt, Artificial Sequence
  Description of Artificial Sequence: Synthetic oligonucleotide
ccagauggguggucagcca

SEQ ID NO: 2259835 - RNA, 19 nt, Artificial Sequence
  Description of Artificial Sequence: Synthetic oligonucleotide
aggcuacacaguggcccau

SEQ ID NO: 2259836 - RNA, 19 nt, Artificial Sequence
  Description of Artificial Sequence: Synthetic oligonucleotide
caggugcgcaggccacuca

SEQ ID NO: 2259837 - RNA, 19 nt, Artificial Sequence
  Description of Artificial Sequence: Synthetic oligonucleotide
cccaccagaugggugguca

SEQ ID NO: 2259838 - RNA, 19 nt, Artificial Sequence
  Description of Artificial Sequence: Synthetic oligonucleotide
gccacagugcacauugcau

SEQ ID NO: 2259839 - RNA, 19 nt, Artificial Sequence
  Description of Artificial Sequence: Synthetic oligonucleotide
ggggagcaggagaccacac

SEQ ID NO: 2259840 - RNA, 19 nt, Artificial Sequence
  Description of Artificial Sequence: Synthetic oligonucleotide
guaagacaguuuggguguu

SEQ ID NO: 2259841 - RNA, 19 nt, Artificial Sequence
  Description of Artificial Sequence: Synthetic oligonucleotide
gcaugugggaggagcacgu

SEQ ID NO: 2259842 - RNA, 19 nt, Artificial Sequence
  Description of Artificial Sequence: Synthetic oligonucleotide
ccauuauguaagacaguuu

SEQ ID NO: 2259843 - RNA, 19 nt, Artificial Sequence
  Description of Artificial Sequence: Synthetic oligonucleotide
cgaguuccauggcuaccug

SEQ ID NO: 2259844 - RNA, 19 nt, Artificial Sequence
  Description of Artificial Sequence: Synthetic oligonucleotide
cugagcccaccagaugggu

SEQ ID NO: 2259845 - RNA, 19 nt, Artificial Sequence
  Description of Artificial Sequence: Synthetic oligonucleotide
gccaggcagccauguaacu

SEQ ID NO: 2259846 - RNA, 19 nt, Artificial Sequence
  Description of Artificial Sequence: Synthetic oligonucleotide
ccugugggcgaagccuuca

SEQ ID NO: 2259847 - RNA, 19 nt, Artificial Sequence
  Description of Artificial Sequence: Synthetic oligonucleotide
cacauggggcggcugccuu

SEQ ID NO: 2259848 - RNA, 19 nt, Artificial Sequence
  Description of Artificial Sequence: Synthetic oligonucleotide
cacaggugcgcaggccacu

SEQ ID NO: 2259849 - RNA, 19 nt, Artificial Sequence
  Description of Artificial Sequence: Synthetic oligonucleotide
cccuagccagaagggccac

SEQ ID NO: 2259850 - RNA, 19 nt, Artificial Sequence
  Description of Artificial Sequence: Synthetic oligonucleotide
gcacucccugccagcaugu

SEQ ID NO: 2259851 - RNA, 19 nt, Artificial Sequence
  Description of Artificial Sequence: Synthetic oligonucleotide
ccuagccagaagggccaca

SEQ ID NO: 2259852 - RNA, 19 nt, Artificial Sequence
  Description of Artificial Sequence: Synthetic oligonucleotide
ccaauguuccaggguucua

SEQ ID NO: 2259853 - RNA, 19 nt, Artificial Sequence
  Description of Artificial Sequence: Synthetic oligonucleotide
ggcugccuuucagaacauu

SEQ ID NO: 2259854 - RNA, 19 nt, Artificial Sequence
  Description of Artificial Sequence: Synthetic oligonucleotide
cggcugccuuucagaacau

SEQ ID NO: 2259855 - RNA, 19 nt, Artificial Sequence
  Description of Artificial Sequence: Synthetic oligonucleotide
gaaaacauagcuucgaaag

SEQ ID NO: 2259856 - RNA, 19 nt, Artificial Sequence
  Description of Artificial Sequence: Synthetic oligonucleotide
agucugaagacaaagaucc

SEQ ID NO: 2259857 - RNA, 19 nt, Artificial Sequence
  Description of Artificial Sequence: Synthetic oligonucleotide
aagaauugucaucacaauc

SEQ ID NO: 2259858 - RNA, 19 nt, Artificial Sequence
  Description of Artificial Sequence: Synthetic oligonucleotide
aaggacacagguuuggagg

SEQ ID NO: 2259859 - RNA, 19 nt, Artificial Sequence
  Description of Artificial Sequence: Synthetic oligonucleotide
aaacauagcuucgaaagac

SEQ ID NO: 2259860 - RNA, 19 nt, Artificial Sequence
  Description of Artificial Sequence: Synthetic oligonucleotide
ugagaguccagccacaaag

SEQ ID NO: 2259861 - RNA, 19 nt, Artificial Sequence
  Description of Artificial Sequence: Synthetic oligonucleotide
uccaaugauagcaagcugc

SEQ ID NO: 2259862 - RNA, 19 nt, Artificial Sequence
  Description of Artificial Sequence: Synthetic oligonucleotide
uauuuccagacacagagga

SEQ ID NO: 2259863 - RNA, 19 nt, Artificial Sequence
  Description of Artificial Sequence: Synthetic oligonucleotide
uugguagacauacagggcc

SEQ ID NO: 2259864 - RNA, 19 nt, Artificial Sequence
  Description of Artificial Sequence: Synthetic oligonucleotide
auagcuucgaaagaccucc

SEQ ID NO: 2259865 - RNA, 19 nt, Artificial Sequence
  Description of Artificial Sequence: Synthetic oligonucleotide
gaugcaauggugcaguaug

SEQ ID NO: 2259866 - RNA, 19 nt, Artificial Sequence
  Description of Artificial Sequence: Synthetic oligonucleotide
gaagaaucuguguaccacg

SEQ ID NO: 2259867 - RNA, 19 nt, Artificial Sequence
  Description of Artificial Sequence: Synthetic oligonucleotide
ucugaagacaaagaucccg

SEQ ID NO: 2259868 - RNA, 19 nt, Artificial Sequence
  Description of Artificial Sequence: Synthetic oligonucleotide
aaucuuggugaagaguucg

SEQ ID NO: 2259869 - RNA, 19 nt, Artificial Sequence
  Description of Artificial Sequence: Synthetic oligonucleotide
aaagaccuccucugugucc

SEQ ID NO: 2259870 - RNA, 19 nt, Artificial Sequence
  Description of Artificial Sequence: Synthetic oligonucleotide
caaauuguccaucucgggg

SEQ ID NO: 2259871 - RNA, 19 nt, Artificial Sequence
  Description of Artificial Sequence: Synthetic oligonucleotide
aacauagcuucgaaagacc

SEQ ID NO: 2259872 - RNA, 19 nt, Artificial Sequence
  Description of Artificial Sequence: Synthetic oligonucleotide
aauggugcaguaugauauc

SEQ ID NO: 2259873 - RNA, 19 nt, Artificial Sequence
  Description of Artificial Sequence: Synthetic oligonucleotide
ugcaguaugauauccgcca

SEQ ID NO: 2259874 - RNA, 19 nt, Artificial Sequence
  Description of Artificial Sequence: Synthetic oligonucleotide
cucuuaaauaggcuggagg

SEQ ID NO: 2259875 - RNA, 19 nt, Artificial Sequence
  Description of Artificial Sequence: Synthetic oligonucleotide
gaugcuguuggguucuagg

SEQ ID NO: 2259876 - RNA, 19 nt, Artificial Sequence
  Description of Artificial Sequence: Synthetic oligonucleotide
uuauuuccagacacagagg

SEQ ID NO: 2259877 - RNA, 19 nt, Artificial Sequence
  Description of Artificial Sequence: Synthetic oligonucleotide
ggucaaaccacguugguag

SEQ ID NO: 2259878 - RNA, 19 nt, Artificial Sequence
  Description of Artificial Sequence: Synthetic oligonucleotide
accacguugguagacauac

SEQ ID NO: 2259879 - RNA, 19 nt, Artificial Sequence
  Description of Artificial Sequence: Synthetic oligonucleotide
uccaguaaauucuggaacu

SEQ ID NO: 2259880 - RNA, 19 nt, Artificial Sequence
  Description of Artificial Sequence: Synthetic oligonucleotide
agaguccagccacaaaggc

SEQ ID NO: 2259881 - RNA, 19 nt, Artificial Sequence
  Description of Artificial Sequence: Synthetic oligonucleotide
gacauacagggccaggcgg

SEQ ID NO: 2259882 - RNA, 19 nt, Artificial Sequence
  Description of Artificial Sequence: Synthetic oligonucleotide
cacaguaucccugagaguc

SEQ ID NO: 2259883 - RNA, 19 nt, Artificial Sequence
  Description of Artificial Sequence: Synthetic oligonucleotide
ugaugccgcucuuaaauag

SEQ ID NO: 2259884 - RNA, 19 nt, Artificial Sequence
  Description of Artificial Sequence: Synthetic oligonucleotide
ggucucuuguuccugaugg

SEQ ID NO: 2259885 - RNA, 19 nt, Artificial Sequence
  Description of Artificial Sequence: Synthetic oligonucleotide
uccgguuaaugucaucucc

SEQ ID NO: 2259886 - RNA, 19 nt, Artificial Sequence
  Description of Artificial Sequence: Synthetic oligonucleotide
ugcgcaauccaccuggcga

SEQ ID NO: 2259887 - RNA, 19 nt, Artificial Sequence
  Description of Artificial Sequence: Synthetic oligonucleotide
ucucugcgcagauucaggg

SEQ ID NO: 2259888 - RNA, 19 nt, Artificial Sequence
  Description of Artificial Sequence: Synthetic oligonucleotide
agaguucguaggcauuccc

SEQ ID NO: 2259889 - RNA, 19 nt, Artificial Sequence
  Description of Artificial Sequence: Synthetic oligonucleotide
ucugaagaaucuguguacc

SEQ ID NO: 2259890 - RNA, 19 nt, Artificial Sequence
  Description of Artificial Sequence: Synthetic oligonucleotide
ugugagauggcucggcagu

SEQ ID NO: 2259891 - RNA, 19 nt, Artificial Sequence
  Description of Artificial Sequence: Synthetic oligonucleotide
aguucguaggcauucccag

SEQ ID NO: 2259892 - RNA, 19 nt, Artificial Sequence
  Description of Artificial Sequence: Synthetic oligonucleotide
ucuccaaugauagcaagcu

SEQ ID NO: 2259893 - RNA, 19 nt, Artificial Sequence
  Description of Artificial Sequence: Synthetic oligonucleotide
ugcuguuggguucuaggag

SEQ ID NO: 2259894 - RNA, 19 nt, Artificial Sequence
  Description of Artificial Sequence: Synthetic oligonucleotide
uucguaggcauucccagcu

SEQ ID NO: 2259895 - RNA, 19 nt, Artificial Sequence
  Description of Artificial Sequence: Synthetic oligonucleotide
uuaaauaggcuggaggcaa

SEQ ID NO: 2259896 - RNA, 19 nt, Artificial Sequence
  Description of Artificial Sequence: Synthetic oligonucleotide
cacguugguagacauacag

SEQ ID NO: 2259897 - RNA, 19 nt, Artificial Sequence
  Description of Artificial Sequence: Synthetic oligonucleotide
gaaggacacagguuuggag

SEQ ID NO: 2259898 - RNA, 19 nt, Artificial Sequence
  Description of Artificial Sequence: Synthetic oligonucleotide
cacaguccugccuaggagg

SEQ ID NO: 2259899 - RNA, 19 nt, Artificial Sequence
  Description of Artificial Sequence: Synthetic oligonucleotide
ggcacaguaucccugagag

SEQ ID NO: 2259900 - RNA, 19 nt, Artificial Sequence
  Description of Artificial Sequence: Synthetic oligonucleotide
gaucugaagaaucugugua

SEQ ID NO: 2259901 - RNA, 19 nt, Artificial Sequence
  Description of Artificial Sequence: Synthetic oligonucleotide
agcaaauuguccaucucgg

SEQ ID NO: 2259902 - RNA, 19 nt, Artificial Sequence
  Description of Artificial Sequence: Synthetic oligonucleotide
aagaguucguaggcauucc

SEQ ID NO: 2259903 - RNA, 19 nt, Artificial Sequence
  Description of Artificial Sequence: Synthetic oligonucleotide
cuccaguaaauucuggaac

SEQ ID NO: 2259904 - RNA, 19 nt, Artificial Sequence
  Description of Artificial Sequence: Synthetic oligonucleotide
ucuccgguuaaugucaucu

SEQ ID NO: 2259905 - RNA, 19 nt, Artificial Sequence
  Description of Artificial Sequence: Synthetic oligonucleotide
guacuggcccaacagaacc

SEQ ID NO: 2259906 - RNA, 19 nt, Artificial Sequence
  Description of Artificial Sequence: Synthetic oligonucleotide
auucagacagcuguggucu

SEQ ID NO: 2259907 - RNA, 19 nt, Artificial Sequence
  Description of Artificial Sequence: Synthetic oligonucleotide
aucacaaucaggauugggu

SEQ ID NO: 2259908 - RNA, 19 nt, Artificial Sequence
  Description of Artificial Sequence: Synthetic oligonucleotide
ugaagaaucuguguaccac

SEQ ID NO: 2259909 - RNA, 19 nt, Artificial Sequence
  Description of Artificial Sequence: Synthetic oligonucleotide
uugguuggcagcacuguca

SEQ ID NO: 2259910 - RNA, 19 nt, Artificial Sequence
  Description of Artificial Sequence: Synthetic oligonucleotide
agucaagaucugaagaauc

SEQ ID NO: 2259911 - RNA, 19 nt, Artificial Sequence
  Description of Artificial Sequence: Synthetic oligonucleotide
caggagagccaccacacgg

SEQ ID NO: 2259912 - RNA, 19 nt, Artificial Sequence
  Description of Artificial Sequence: Synthetic oligonucleotide
uccccgggagucaagaucu

SEQ ID NO: 2259913 - RNA, 19 nt, Artificial Sequence
  Description of Artificial Sequence: Synthetic oligonucleotide
uggcucggcagucugaaga

SEQ ID NO: 2259914 - RNA, 19 nt, Artificial Sequence
  Description of Artificial Sequence: Synthetic oligonucleotide
cucugcgcaauccaccugg

SEQ ID NO: 2259915 - RNA, 19 nt, Artificial Sequence
  Description of Artificial Sequence: Synthetic oligonucleotide
uguaccacguacuggccca

SEQ ID NO: 2259916 - RNA, 19 nt, Artificial Sequence
  Description of Artificial Sequence: Synthetic oligonucleotide
ucgaaagaccuccucugug

SEQ ID NO: 2259917 - RNA, 19 nt, Artificial Sequence
  Description of Artificial Sequence: Synthetic oligonucleotide
cguugguagacauacaggg

SEQ ID NO: 2259918 - RNA, 19 nt, Artificial Sequence
  Description of Artificial Sequence: Synthetic oligonucleotide
aaauaggcuggaggcaauc

SEQ ID NO: 2259919 - RNA, 19 nt, Artificial Sequence
  Description of Artificial Sequence: Synthetic oligonucleotide
ucacaguccugccuaggag

SEQ ID NO: 2259920 - RNA, 19 nt, Artificial Sequence
  Description of Artificial Sequence: Synthetic oligonucleotide
aguccugccuaggaggacc

SEQ ID NO: 2259921 - RNA, 19 nt, Artificial Sequence
  Description of Artificial Sequence: Synthetic oligonucleotide
gaugccgcucuuaaauagg

SEQ ID NO: 2259922 - RNA, 19 nt, Artificial Sequence
  Description of Artificial Sequence: Synthetic oligonucleotide
uggagggccuugaugaaca

SEQ ID NO: 2259923 - RNA, 19 nt, Artificial Sequence
  Description of Artificial Sequence: Synthetic oligonucleotide
acaaucaggauugggucuc

SEQ ID NO: 2259924 - RNA, 19 nt, Artificial Sequence
  Description of Artificial Sequence: Synthetic oligonucleotide
agacaaagaucccgagggg

SEQ ID NO: 2259925 - RNA, 19 nt, Artificial Sequence
  Description of Artificial Sequence: Synthetic oligonucleotide
uagccgaagcccaggagag

SEQ ID NO: 2259926 - RNA, 19 nt, Artificial Sequence
  Description of Artificial Sequence: Synthetic oligonucleotide
uggaaaacauagcuucgaa

SEQ ID NO: 2259927 - RNA, 19 nt, Artificial Sequence
  Description of Artificial Sequence: Synthetic oligonucleotide
uagacauacagggccaggc

SEQ ID NO: 2259928 - RNA, 19 nt, Artificial Sequence
  Description of Artificial Sequence: Synthetic oligonucleotide
uguccagacgccaucuuuc

SEQ ID NO: 2259929 - RNA, 19 nt, Artificial Sequence
  Description of Artificial Sequence: Synthetic oligonucleotide
cagucugaagacaaagauc

SEQ ID NO: 2259930 - RNA, 19 nt, Artificial Sequence
  Description of Artificial Sequence: Synthetic oligonucleotide
ucaucuccaaugauagcaa

SEQ ID NO: 2259931 - RNA, 19 nt, Artificial Sequence
  Description of Artificial Sequence: Synthetic oligonucleotide
accaagaauugucaucaca

SEQ ID NO: 2259932 - RNA, 19 nt, Artificial Sequence
  Description of Artificial Sequence: Synthetic oligonucleotide
uaucccugagaguccagcc

SEQ ID NO: 2259933 - RNA, 19 nt, Artificial Sequence
  Description of Artificial Sequence: Synthetic oligonucleotide
ucugugucguaucuccggu

SEQ ID NO: 2259934 - RNA, 19 nt, Artificial Sequence
  Description of Artificial Sequence: Synthetic oligonucleotide
ugugucguaucuccgguua

SEQ ID NO: 2259935 - RNA, 19 nt, Artificial Sequence
  Description of Artificial Sequence: Synthetic oligonucleotide
uucgaaagaccuccucugu

SEQ ID NO: 2259936 - RNA, 19 nt, Artificial Sequence
  Description of Artificial Sequence: Synthetic oligonucleotide
aagaccuccucuguguccu

SEQ ID NO: 2259937 - RNA, 19 nt, Artificial Sequence
  Description of Artificial Sequence: Synthetic oligonucleotide
agccggucaaaccacguug

SEQ ID NO: 2259938 - RNA, 19 nt, Artificial Sequence
  Description of Artificial Sequence: Synthetic oligonucleotide
ucguaucuccgguuaaugu

SEQ ID NO: 2259939 - RNA, 19 nt, Artificial Sequence
  Description of Artificial Sequence: Synthetic oligonucleotide
ucacucugggcacaguauc

SEQ ID NO: 2259940 - RNA, 19 nt, Artificial Sequence
  Description of Artificial Sequence: Synthetic oligonucleotide
uggcccaacagaaccacac

SEQ ID NO: 2259941 - RNA, 19 nt, Artificial Sequence
  Description of Artificial Sequence: Synthetic oligonucleotide
cauucagacagcugugguc

SEQ ID NO: 2259942 - RNA, 19 nt, Artificial Sequence
  Description of Artificial Sequence: Synthetic oligonucleotide
aggauugggucucugcgca

SEQ ID NO: 2259943 - RNA, 19 nt, Artificial Sequence
  Description of Artificial Sequence: Synthetic oligonucleotide
aaucuguguaccacguacu

SEQ ID NO: 2259944 - RNA, 19 nt, Artificial Sequence
  Description of Artificial Sequence: Synthetic oligonucleotide
aguaugauauccgccaaaa

SEQ ID NO: 2259945 - RNA, 19 nt, Artificial Sequence
  Description of Artificial Sequence: Synthetic oligonucleotide
acacggccccagcugaugc

SEQ ID NO: 2259946 - RNA, 19 nt, Artificial Sequence
  Description of Artificial Sequence: Synthetic oligonucleotide
cugcuguucagaaggggag

SEQ ID NO: 2259947 - RNA, 19 nt, Artificial Sequence
  Description of Artificial Sequence: Synthetic oligonucleotide
ggugcaguaugauauccgc

SEQ ID NO: 2259948 - RNA, 19 nt, Artificial Sequence
  Description of Artificial Sequence: Synthetic oligonucleotide
aauaggcuggaggcaaucu

SEQ ID NO: 2259949 - RNA, 19 nt, Artificial Sequence
  Description of Artificial Sequence: Synthetic oligonucleotide
ccaccugcuguucagaagg

SEQ ID NO: 2259950 - RNA, 19 nt, Artificial Sequence
  Description of Artificial Sequence: Synthetic oligonucleotide
ugugguccagaugugagau

SEQ ID NO: 2259951 - RNA, 19 nt, Artificial Sequence
  Description of Artificial Sequence: Synthetic oligonucleotide
ggagauggaaaacauagcu

SEQ ID NO: 2259952 - RNA, 19 nt, Artificial Sequence
  Description of Artificial Sequence: Synthetic oligonucleotide
augccgcucuuaaauaggc

SEQ ID NO: 2259953 - RNA, 19 nt, Artificial Sequence
  Description of Artificial Sequence: Synthetic oligonucleotide
ccaaugauagcaagcugcg

SEQ ID NO: 2259954 - RNA, 19 nt, Artificial Sequence
  Description of Artificial Sequence: Synthetic oligonucleotide
cacucugggcacaguaucc

SEQ ID NO: 2259955 - RNA, 19 nt, Artificial Sequence
  Description of Artificial Sequence: Synthetic oligonucleotide
caggauugggucucugcgc

SEQ ID NO: 2259956 - RNA, 19 nt, Artificial Sequence
  Description of Artificial Sequence: Synthetic oligonucleotide
caauggugcaguaugauau

SEQ ID NO: 2259957 - RNA, 19 nt, Artificial Sequence
  Description of Artificial Sequence: Synthetic oligonucleotide
caucuccaaugauagcaag

SEQ ID NO: 2259958 - RNA, 19 nt, Artificial Sequence
  Description of Artificial Sequence: Synthetic oligonucleotide
gaaagaccuccucuguguc

SEQ ID NO: 2259959 - RNA, 19 nt, Artificial Sequence
  Description of Artificial Sequence: Synthetic oligonucleotide
cauagcuucgaaagaccuc

SEQ ID NO: 2259960 - RNA, 19 nt, Artificial Sequence
  Description of Artificial Sequence: Synthetic oligonucleotide
acaguaucccugagagucc

SEQ ID NO: 2259961 - RNA, 19 nt, Artificial Sequence
  Description of Artificial Sequence: Synthetic oligonucleotide
agcuucgaaagaccuccuc

SEQ ID NO: 2259962 - RNA, 19 nt, Artificial Sequence
  Description of Artificial Sequence: Synthetic oligonucleotide
gaugguggagauggaaaac

SEQ ID NO: 2259963 - RNA, 19 nt, Artificial Sequence
  Description of Artificial Sequence: Synthetic oligonucleotide
guugguagacauacagggc

SEQ ID NO: 2259964 - RNA, 19 nt, Artificial Sequence
  Description of Artificial Sequence: Synthetic oligonucleotide
ugguggagauggaaaacau

SEQ ID NO: 2259965 - RNA, 19 nt, Artificial Sequence
  Description of Artificial Sequence: Synthetic oligonucleotide
guaucuccgguuaauguca

SEQ ID NO: 2259966 - RNA, 19 nt, Artificial Sequence
  Description of Artificial Sequence: Synthetic oligonucleotide
auggaaaacauagcuucga

SEQ ID NO: 2259967 - RNA, 19 nt, Artificial Sequence
  Description of Artificial Sequence: Synthetic oligonucleotide
acauagcuucgaaagaccu

SEQ ID NO: 2259968 - RNA, 19 nt, Artificial Sequence
  Description of Artificial Sequence: Synthetic oligonucleotide
gacacagguuuggagggcc

SEQ ID NO: 2259969 - RNA, 19 nt, Artificial Sequence
  Description of Artificial Sequence: Synthetic oligonucleotide
ggagucaagaucugaagaa

SEQ ID NO: 2259970 - RNA, 19 nt, Artificial Sequence
  Description of Artificial Sequence: Synthetic oligonucleotide
gcaaauuguccaucucggg

SEQ ID NO: 2259971 - RNA, 19 nt, Artificial Sequence
  Description of Artificial Sequence: Synthetic oligonucleotide
gccgcucuuaaauaggcug

SEQ ID NO: 2259972 - RNA, 19 nt, Artificial Sequence
  Description of Artificial Sequence: Synthetic oligonucleotide
guucguaggcauucccagc

SEQ ID NO: 2259973 - RNA, 19 nt, Artificial Sequence
  Description of Artificial Sequence: Synthetic oligonucleotide
guguaccacguacuggccc

SEQ ID NO: 2259974 - RNA, 19 nt, Artificial Sequence
  Description of Artificial Sequence: Synthetic oligonucleotide
auucagggccgccacccag

SEQ ID NO: 2259975 - RNA, 19 nt, Artificial Sequence
  Description of Artificial Sequence: Synthetic oligonucleotide
ucaaaccacguugguagac

SEQ ID NO: 2259976 - RNA, 19 nt, Artificial Sequence
  Description of Artificial Sequence: Synthetic oligonucleotide
uaaauaggcuggaggcaau

SEQ ID NO: 2259977 - RNA, 19 nt, Artificial Sequence
  Description of Artificial Sequence: Synthetic oligonucleotide
ccaagaauugucaucacaa

SEQ ID NO: 2259978 - RNA, 19 nt, Artificial Sequence
  Description of Artificial Sequence: Synthetic oligonucleotide
cucugcgcagauucagggc

SEQ ID NO: 2259979 - RNA, 19 nt, Artificial Sequence
  Description of Artificial Sequence: Synthetic oligonucleotide
gucaucacaguccugccua

SEQ ID NO: 2259980 - RNA, 19 nt, Artificial Sequence
  Description of Artificial Sequence: Synthetic oligonucleotide
gggagucaagaucugaaga

SEQ ID NO: 2259981 - RNA, 19 nt, Artificial Sequence
  Description of Artificial Sequence: Synthetic oligonucleotide
caaugauagcaagcugcgg

SEQ ID NO: 2259982 - RNA, 19 nt, Artificial Sequence
  Description of Artificial Sequence: Synthetic oligonucleotide
cuugguuggcagcacuguc

SEQ ID NO: 2259983 - RNA, 19 nt, Artificial Sequence
  Description of Artificial Sequence: Synthetic oligonucleotide
ugcagcugcuccaguaaau

SEQ ID NO: 2259984 - RNA, 19 nt, Artificial Sequence
  Description of Artificial Sequence: Synthetic oligonucleotide
uggaacucugugucguauc

SEQ ID NO: 2259985 - RNA, 19 nt, Artificial Sequence
  Description of Artificial Sequence: Synthetic oligonucleotide
auaggcuggaggcaaucuu

SEQ ID NO: 2259986 - RNA, 19 nt, Artificial Sequence
  Description of Artificial Sequence: Synthetic oligonucleotide
aggcaaucuuggugaagag

SEQ ID NO: 2259987 - RNA, 19 nt, Artificial Sequence
  Description of Artificial Sequence: Synthetic oligonucleotide
gguuuggagggccuugaug

SEQ ID NO: 2259988 - RNA, 19 nt, Artificial Sequence
  Description of Artificial Sequence: Synthetic oligonucleotide
cuccaaugauagcaagcug

SEQ ID NO: 2259989 - RNA, 19 nt, Artificial Sequence
  Description of Artificial Sequence: Synthetic oligonucleotide
uuuggagggccuugaugaa

SEQ ID NO: 2259990 - RNA, 19 nt, Artificial Sequence
  Description of Artificial Sequence: Synthetic oligonucleotide
ccuggcgaugcaauggugc

SEQ ID NO: 2259991 - RNA, 19 nt, Artificial Sequence
  Description of Artificial Sequence: Synthetic oligonucleotide
ucucgggguuggcaggggc

SEQ ID NO: 2259992 - RNA, 19 nt, Artificial Sequence
  Description of Artificial Sequence: Synthetic oligonucleotide
guagacauacagggccagg

SEQ ID NO: 2259993 - RNA, 19 nt, Artificial Sequence
  Description of Artificial Sequence: Synthetic oligonucleotide
cagaaccacaccaagaauu

SEQ ID NO: 2259994 - RNA, 19 nt, Artificial Sequence
  Description of Artificial Sequence: Synthetic oligonucleotide
ucguaggcauucccagcug

SEQ ID NO: 2259995 - RNA, 19 nt, Artificial Sequence
  Description of Artificial Sequence: Synthetic oligonucleotide
ucugcgcaauccaccuggc

SEQ ID NO: 2259996 - RNA, 19 nt, Artificial Sequence
  Description of Artificial Sequence: Synthetic oligonucleotide
gccuaggaggaccuggucc

SEQ ID NO: 2259997 - RNA, 19 nt, Artificial Sequence
  Description of Artificial Sequence: Synthetic oligonucleotide
gaguucguaggcauuccca

SEQ ID NO: 2259998 - RNA, 19 nt, Artificial Sequence
  Description of Artificial Sequence: Synthetic oligonucleotide
accacacggccccagcuga

SEQ ID NO: 2259999 - RNA, 19 nt, Artificial Sequence
  Description of Artificial Sequence: Synthetic oligonucleotide
guaucccugagaguccagc

SEQ ID NO: 2260000 - RNA, 19 nt, Artificial Sequence
  Description of Artificial Sequence: Synthetic oligonucleotide
cugcgcagauucagggccg

SEQ ID NO: 2260001 - RNA, 19 nt, Artificial Sequence
  Description of Artificial Sequence: Synthetic oligonucleotide
ucucugcgcaauccaccug

SEQ ID NO: 2260002 - RNA, 19 nt, Artificial Sequence
  Description of Artificial Sequence: Synthetic oligonucleotide
ugccgcucuuaaauaggcu

SEQ ID NO: 2260003 - RNA, 19 nt, Artificial Sequence
  Description of Artificial Sequence: Synthetic oligonucleotide
gguucuaggagcaaauugu

SEQ ID NO: 2260004 - RNA, 19 nt, Artificial Sequence
  Description of Artificial Sequence: Synthetic oligonucleotide
ccgcucuuaaauaggcugg

SEQ ID NO: 2260005 - RNA, 19 nt, Artificial Sequence
  Description of Artificial Sequence: Synthetic oligonucleotide
gucaccuggcccaggaagc

SEQ ID NO: 2260006 - RNA, 19 nt, Artificial Sequence
  Description of Artificial Sequence: Synthetic oligonucleotide
auugcacaguuuauuucca

SEQ ID NO: 2260007 - RNA, 19 nt, Artificial Sequence
  Description of Artificial Sequence: Synthetic oligonucleotide
gucguaucuccgguuaaug

SEQ ID NO: 2260008 - RNA, 19 nt, Artificial Sequence
  Description of Artificial Sequence: Synthetic oligonucleotide
uuggagggccuugaugaac

SEQ ID NO: 2260009 - RNA, 19 nt, Artificial Sequence
  Description of Artificial Sequence: Synthetic oligonucleotide
gugcaguaugauauccgcc

SEQ ID NO: 2260010 - RNA, 19 nt, Artificial Sequence
  Description of Artificial Sequence: Synthetic oligonucleotide
uaucuccgguuaaugucau

SEQ ID NO: 2260011 - RNA, 19 nt, Artificial Sequence
  Description of Artificial Sequence: Synthetic oligonucleotide
acugucacccugcccggcu

SEQ ID NO: 2260012 - RNA, 19 nt, Artificial Sequence
  Description of Artificial Sequence: Synthetic oligonucleotide
ugggcacaguaucccugag

SEQ ID NO: 2260013 - RNA, 19 nt, Artificial Sequence
  Description of Artificial Sequence: Synthetic oligonucleotide
aauccaccuggcgaugcaa

SEQ ID NO: 2260014 - RNA, 19 nt, Artificial Sequence
  Description of Artificial Sequence: Synthetic oligonucleotide
gauugggucucugcgcaga

SEQ ID NO: 2260015 - RNA, 19 nt, Artificial Sequence
  Description of Artificial Sequence: Synthetic oligonucleotide
cuccccgggagucaagauc

SEQ ID NO: 2260016 - RNA, 19 nt, Artificial Sequence
  Description of Artificial Sequence: Synthetic oligonucleotide
aucuccgguuaaugucauc

SEQ ID NO: 2260017 - RNA, 19 nt, Artificial Sequence
  Description of Artificial Sequence: Synthetic oligonucleotide
acauacagggccaggcggu

SEQ ID NO: 2260018 - RNA, 19 nt, Artificial Sequence
  Description of Artificial Sequence: Synthetic oligonucleotide
cucggcagucugaagacaa

SEQ ID NO: 2260019 - RNA, 19 nt, Artificial Sequence
  Description of Artificial Sequence: Synthetic oligonucleotide
caucucgggguuggcaggg

SEQ ID NO: 2260020 - RNA, 19 nt, Artificial Sequence
  Description of Artificial Sequence: Synthetic oligonucleotide
ugucguaucuccgguuaau

SEQ ID NO: 2260021 - RNA, 19 nt, Artificial Sequence
  Description of Artificial Sequence: Synthetic oligonucleotide
agaaucuguguaccacgua

SEQ ID NO: 2260022 - RNA, 19 nt, Artificial Sequence
  Description of Artificial Sequence: Synthetic oligonucleotide
cuccgguuaaugucaucuc

SEQ ID NO: 2260023 - RNA, 19 nt, Artificial Sequence
  Description of Artificial Sequence: Synthetic oligonucleotide
ggcauucccagcugugggc

SEQ ID NO: 2260024 - RNA, 19 nt, Artificial Sequence
  Description of Artificial Sequence: Synthetic oligonucleotide
acguacuggcccaacagaa

SEQ ID NO: 2260025 - RNA, 19 nt, Artificial Sequence
  Description of Artificial Sequence: Synthetic oligonucleotide
ucggcagucugaagacaaa

SEQ ID NO: 2260026 - RNA, 19 nt, Artificial Sequence
  Description of Artificial Sequence: Synthetic oligonucleotide
caaaccacguugguagaca

SEQ ID NO: 2260027 - RNA, 19 nt, Artificial Sequence
  Description of Artificial Sequence: Synthetic oligonucleotide
gagauggaaaacauagcuu

SEQ ID NO: 2260028 - RNA, 19 nt, Artificial Sequence
  Description of Artificial Sequence: Synthetic oligonucleotide
cugcgcaauccaccuggcg

SEQ ID NO: 2260029 - RNA, 19 nt, Artificial Sequence
  Description of Artificial Sequence: Synthetic oligonucleotide
guaggcauucccagcugug

SEQ ID NO: 2260030 - RNA, 19 nt, Artificial Sequence
  Description of Artificial Sequence: Synthetic oligonucleotide
acggccccagcugaugccg

SEQ ID NO: 2260031 - RNA, 19 nt, Artificial Sequence
  Description of Artificial Sequence: Synthetic oligonucleotide
gauggcucggcagucugaa

SEQ ID NO: 2260032 - RNA, 19 nt, Artificial Sequence
  Description of Artificial Sequence: Synthetic oligonucleotide
uagcuucgaaagaccuccu

SEQ ID NO: 2260033 - RNA, 19 nt, Artificial Sequence
  Description of Artificial Sequence: Synthetic oligonucleotide
cacguacuggcccaacaga

SEQ ID NO: 2260034 - RNA, 19 nt, Artificial Sequence
  Description of Artificial Sequence: Synthetic oligonucleotide
cacaaucaggauugggucu

SEQ ID NO: 2260035 - RNA, 19 nt, Artificial Sequence
  Description of Artificial Sequence: Synthetic oligonucleotide
cuuucaggccuugguuggc

SEQ ID NO: 2260036 - RNA, 19 nt, Artificial Sequence
  Description of Artificial Sequence: Synthetic oligonucleotide
gcugaugccgcucuuaaau

SEQ ID NO: 2260037 - RNA, 19 nt, Artificial Sequence
  Description of Artificial Sequence: Synthetic oligonucleotide
guuggguucuaggagcaaa

SEQ ID NO: 2260038 - RNA, 19 nt, Artificial Sequence
  Description of Artificial Sequence: Synthetic oligonucleotide
acaguccugccuaggagga

SEQ ID NO: 2260039 - RNA, 19 nt, Artificial Sequence
  Description of Artificial Sequence: Synthetic oligonucleotide
auugggucucugcgcagau

SEQ ID NO: 2260040 - RNA, 19 nt, Artificial Sequence
  Description of Artificial Sequence: Synthetic oligonucleotide
gucaaaccacguugguaga

SEQ ID NO: 2260041 - RNA, 19 nt, Artificial Sequence
  Description of Artificial Sequence: Synthetic oligonucleotide
guccagacgccaucuuuca

SEQ ID NO: 2260042 - RNA, 19 nt, Artificial Sequence
  Description of Artificial Sequence: Synthetic oligonucleotide
gagucaagaucugaagaau

SEQ ID NO: 2260043 - RNA, 19 nt, Artificial Sequence
  Description of Artificial Sequence: Synthetic oligonucleotide
gcagucugaagacaaagau

SEQ ID NO: 2260044 - RNA, 19 nt, Artificial Sequence
  Description of Artificial Sequence: Synthetic oligonucleotide
accugacccaagaugcugu

SEQ ID NO: 2260045 - RNA, 19 nt, Artificial Sequence
  Description of Artificial Sequence: Synthetic oligonucleotide
caccugacccaagaugcug

SEQ ID NO: 2260046 - RNA, 19 nt, Artificial Sequence
  Description of Artificial Sequence: Synthetic oligonucleotide
ccucucugcgcaauccacc

SEQ ID NO: 2260047 - RNA, 19 nt, Artificial Sequence
  Description of Artificial Sequence: Synthetic oligonucleotide
gccggucaaaccacguugg

SEQ ID NO: 2260048 - RNA, 19 nt, Artificial Sequence
  Description of Artificial Sequence: Synthetic oligonucleotide
gagagccaccacacggccc

SEQ ID NO: 2260049 - RNA, 19 nt, Artificial Sequence
  Description of Artificial Sequence: Synthetic oligonucleotide
gccgaagcccaggagagcc

SEQ ID NO: 2260050 - RNA, 19 nt, Artificial Sequence
  Description of Artificial Sequence: Synthetic oligonucleotide
agcaagcugcggcccaccu

SEQ ID NO: 2260051 - RNA, 19 nt, Artificial Sequence
  Description of Artificial Sequence: Synthetic oligonucleotide
ugccuaggaggaccugguc

SEQ ID NO: 2260052 - RNA, 19 nt, Artificial Sequence
  Description of Artificial Sequence: Synthetic oligonucleotide
agcuguggucugaacucuc

SEQ ID NO: 2260053 - RNA, 19 nt, Artificial Sequence
  Description of Artificial Sequence: Synthetic oligonucleotide
guuccugaugguggagaug

SEQ ID NO: 2260054 - RNA, 19 nt, Artificial Sequence
  Description of Artificial Sequence: Synthetic oligonucleotide
ccugcuguucagaagggga

SEQ ID NO: 2260055 - RNA, 19 nt, Artificial Sequence
  Description of Artificial Sequence: Synthetic oligonucleotide
gugguccagaugugagaug

SEQ ID NO: 2260056 - RNA, 19 nt, Artificial Sequence
  Description of Artificial Sequence: Synthetic oligonucleotide
auggcucggcagucugaag

SEQ ID NO: 2260057 - RNA, 19 nt, Artificial Sequence
  Description of Artificial Sequence: Synthetic oligonucleotide
gcuucgaaagaccuccucu

SEQ ID NO: 2260058 - RNA, 19 nt, Artificial Sequence
  Description of Artificial Sequence: Synthetic oligonucleotide
gcccaccugacccaagaug

SEQ ID NO: 2260059 - RNA, 19 nt, Artificial Sequence
  Description of Artificial Sequence: Synthetic oligonucleotide
cugaugccgcucuuaaaua

SEQ ID NO: 2260060 - RNA, 19 nt, Artificial Sequence
  Description of Artificial Sequence: Synthetic oligonucleotide
cacggccccagcugaugcc

SEQ ID NO: 2260061 - RNA, 19 nt, Artificial Sequence
  Description of Artificial Sequence: Synthetic oligonucleotide
gcaauggugcaguaugaua

SEQ ID NO: 2260062 - RNA, 19 nt, Artificial Sequence
  Description of Artificial Sequence: Synthetic oligonucleotide
ugcgcagauucagggccgc

SEQ ID NO: 2260063 - RNA, 19 nt, Artificial Sequence
  Description of Artificial Sequence: Synthetic oligonucleotide
ugggucucuuguuccugau

SEQ ID NO: 2260064 - RNA, 19 nt, Artificial Sequence
  Description of Artificial Sequence: Synthetic oligonucleotide
caguaugauauccgccaaa

SEQ ID NO: 2260065 - RNA, 19 nt, Artificial Sequence
  Description of Artificial Sequence: Synthetic oligonucleotide
agcugaugccgcucuuaaa

SEQ ID NO: 2260066 - RNA, 19 nt, Artificial Sequence
  Description of Artificial Sequence: Synthetic oligonucleotide
ccugccuaggaggaccugg

SEQ ID NO: 2260067 - RNA, 19 nt, Artificial Sequence
  Description of Artificial Sequence: Synthetic oligonucleotide
cugacccaagaugcuguug

SEQ ID NO: 2260068 - RNA, 19 nt, Artificial Sequence
  Description of Artificial Sequence: Synthetic oligonucleotide
gaacucucaucuccacccu

SEQ ID NO: 2260069 - RNA, 19 nt, Artificial Sequence
  Description of Artificial Sequence: Synthetic oligonucleotide
ggaacucugugucguaucu

SEQ ID NO: 2260070 - RNA, 19 nt, Artificial Sequence
  Description of Artificial Sequence: Synthetic oligonucleotide
ccaccuggcgaugcaaugg

SEQ ID NO: 2260071 - RNA, 19 nt, Artificial Sequence
  Description of Artificial Sequence: Synthetic oligonucleotide
ccgguuaaugucaucucca

SEQ ID NO: 2260072 - RNA, 19 nt, Artificial Sequence
  Description of Artificial Sequence: Synthetic oligonucleotide
ggcagucugaagacaaaga

SEQ ID NO: 2260073 - RNA, 19 nt, Artificial Sequence
  Description of Artificial Sequence: Synthetic oligonucleotide
gguuggcaggggcagccgc

SEQ ID NO: 2260074 - RNA, 19 nt, Artificial Sequence
  Description of Artificial Sequence: Synthetic oligonucleotide
cucucugcgcaauccaccu

SEQ ID NO: 2260075 - RNA, 19 nt, Artificial Sequence
  Description of Artificial Sequence: Synthetic oligonucleotide
agguuuggagggccuugau

SEQ ID NO: 2260076 - RNA, 19 nt, Artificial Sequence
  Description of Artificial Sequence: Synthetic oligonucleotide
caucuuucaggccuugguu

SEQ ID NO: 2260077 - RNA, 19 nt, Artificial Sequence
  Description of Artificial Sequence: Synthetic oligonucleotide
caguaaauucuggaacucu

SEQ ID NO: 2260078 - RNA, 19 nt, Artificial Sequence
  Description of Artificial Sequence: Synthetic oligonucleotide
ggauugggucucugcgcag

SEQ ID NO: 2260079 - RNA, 19 nt, Artificial Sequence
  Description of Artificial Sequence: Synthetic oligonucleotide
gggauugcacaguuuauuu

SEQ ID NO: 2260080 - RNA, 19 nt, Artificial Sequence
  Description of Artificial Sequence: Synthetic oligonucleotide
aguaucccugagaguccag

SEQ ID NO: 2260081 - RNA, 19 nt, Artificial Sequence
  Description of Artificial Sequence: Synthetic oligonucleotide
cgggagucaagaucugaag

SEQ ID NO: 2260082 - RNA, 19 nt, Artificial Sequence
  Description of Artificial Sequence: Synthetic oligonucleotide
gugagauggcucggcaguc

SEQ ID NO: 2260083 - RNA, 19 nt, Artificial Sequence
  Description of Artificial Sequence: Synthetic oligonucleotide
aaccacguugguagacaua

SEQ ID NO: 2260084 - RNA, 19 nt, Artificial Sequence
  Description of Artificial Sequence: Synthetic oligonucleotide
ggaccugguccuuguccag

SEQ ID NO: 2260085 - RNA, 19 nt, Artificial Sequence
  Description of Artificial Sequence: Synthetic oligonucleotide
caauccaccuggcgaugca

SEQ ID NO: 2260086 - RNA, 19 nt, Artificial Sequence
  Description of Artificial Sequence: Synthetic oligonucleotide
aggccuugguuggcagcac

SEQ ID NO: 2260087 - RNA, 19 nt, Artificial Sequence
  Description of Artificial Sequence: Synthetic oligonucleotide
gugucguaucuccgguuaa

SEQ ID NO: 2260088 - RNA, 19 nt, Artificial Sequence
  Description of Artificial Sequence: Synthetic oligonucleotide
ccaggagagccaccacacg

SEQ ID NO: 2260089 - RNA, 19 nt, Artificial Sequence
  Description of Artificial Sequence: Synthetic oligonucleotide
ggggagucaucacaguccu

SEQ ID NO: 2260090 - RNA, 19 nt, Artificial Sequence
  Description of Artificial Sequence: Synthetic oligonucleotide
cagcugaugccgcucuuaa

SEQ ID NO: 2260091 - RNA, 19 nt, Artificial Sequence
  Description of Artificial Sequence: Synthetic oligonucleotide
gcaguaugauauccgccaa

SEQ ID NO: 2260092 - RNA, 19 nt, Artificial Sequence
  Description of Artificial Sequence: Synthetic oligonucleotide
gcaauccaccuggcgaugc

SEQ ID NO: 2260093 - RNA, 19 nt, Artificial Sequence
  Description of Artificial Sequence: Synthetic oligonucleotide
agauggcucggcagucuga

SEQ ID NO: 2260094 - RNA, 19 nt, Artificial Sequence
  Description of Artificial Sequence: Synthetic oligonucleotide
gcaagcugcggcccaccug

SEQ ID NO: 2260095 - RNA, 19 nt, Artificial Sequence
  Description of Artificial Sequence: Synthetic oligonucleotide
gguuaaugucaucuccaau

SEQ ID NO: 2260096 - RNA, 19 nt, Artificial Sequence
  Description of Artificial Sequence: Synthetic oligonucleotide
aggcgguagccgaagccca

SEQ ID NO: 2260097 - RNA, 19 nt, Artificial Sequence
  Description of Artificial Sequence: Synthetic oligonucleotide
gaagccggucaaaccacgu

SEQ ID NO: 2260098 - RNA, 19 nt, Artificial Sequence
  Description of Artificial Sequence: Synthetic oligonucleotide
auccaccuggcgaugcaau

SEQ ID NO: 2260099 - RNA, 19 nt, Artificial Sequence
  Description of Artificial Sequence: Synthetic oligonucleotide
cuggcccaacagaaccaca

SEQ ID NO: 2260100 - RNA, 19 nt, Artificial Sequence
  Description of Artificial Sequence: Synthetic oligonucleotide
gguuggcagcacugucacc

SEQ ID NO: 2260101 - RNA, 19 nt, Artificial Sequence
  Description of Artificial Sequence: Synthetic oligonucleotide
accuggcgaugcaauggug

SEQ ID NO: 2260102 - RNA, 19 nt, Artificial Sequence
  Description of Artificial Sequence: Synthetic oligonucleotide
ccuaggaggaccugguccu

SEQ ID NO: 2260103 - RNA, 19 nt, Artificial Sequence
  Description of Artificial Sequence: Synthetic oligonucleotide
uaccacguacuggcccaac

SEQ ID NO: 2260104 - RNA, 19 nt, Artificial Sequence
  Description of Artificial Sequence: Synthetic oligonucleotide
gccccagagggcuccccgg

SEQ ID NO: 2260105 - RNA, 19 nt, Artificial Sequence
  Description of Artificial Sequence: Synthetic oligonucleotide
cacugucacccugcccggc

SEQ ID NO: 2260106 - RNA, 19 nt, Artificial Sequence
  Description of Artificial Sequence: Synthetic oligonucleotide
gccuugguuggcagcacug

SEQ ID NO: 2260107 - RNA, 19 nt, Artificial Sequence
  Description of Artificial Sequence: Synthetic oligonucleotide
ggcgaugcaauggugcagu

SEQ ID NO: 2260108 - RNA, 19 nt, Artificial Sequence
  Description of Artificial Sequence: Synthetic oligonucleotide
uccugccuaggaggaccug

SEQ ID NO: 2260109 - RNA, 19 nt, Artificial Sequence
  Description of Artificial Sequence: Synthetic oligonucleotide
gguccagaugugagauggc

SEQ ID NO: 2260110 - RNA, 19 nt, Artificial Sequence
  Description of Artificial Sequence: Synthetic oligonucleotide
cugccuaggaggaccuggu

SEQ ID NO: 2260111 - RNA, 19 nt, Artificial Sequence
  Description of Artificial Sequence: Synthetic oligonucleotide
cucugggcacaguaucccu

SEQ ID NO: 2260112 - RNA, 19 nt, Artificial Sequence
  Description of Artificial Sequence: Synthetic oligonucleotide
ccgggagucaagaucugaa

SEQ ID NO: 2260113 - RNA, 19 nt, Artificial Sequence
  Description of Artificial Sequence: Synthetic oligonucleotide
caccuggcgaugcaauggu

SEQ ID NO: 2260114 - RNA, 19 nt, Artificial Sequence
  Description of Artificial Sequence: Synthetic oligonucleotide
ugcggcccaccugacccaa

SEQ ID NO: 2260115 - RNA, 19 nt, Artificial Sequence
  Description of Artificial Sequence: Synthetic oligonucleotide
cggcagucugaagacaaag

SEQ ID NO: 2260116 - RNA, 19 nt, Artificial Sequence
  Description of Artificial Sequence: Synthetic oligonucleotide
gcgguagccgaagcccagg

SEQ ID NO: 2260117 - RNA, 19 nt, Artificial Sequence
  Description of Artificial Sequence: Synthetic oligonucleotide
caguccugccuaggaggac

SEQ ID NO: 2260118 - RNA, 19 nt, Artificial Sequence
  Description of Artificial Sequence: Synthetic oligonucleotide
ccccagagggcuccccggg

SEQ ID NO: 2260119 - RNA, 19 nt, Artificial Sequence
  Description of Artificial Sequence: Synthetic oligonucleotide
agccaccacacggccccag

SEQ ID NO: 2260120 - RNA, 19 nt, Artificial Sequence
  Description of Artificial Sequence: Synthetic oligonucleotide
ggcgguagccgaagcccag

SEQ ID NO: 2260121 - RNA, 19 nt, Artificial Sequence
  Description of Artificial Sequence: Synthetic oligonucleotide
cgaaagaccuccucugugu

SEQ ID NO: 2260122 - RNA, 19 nt, Artificial Sequence
  Description of Artificial Sequence: Synthetic oligonucleotide
cccugcccggcuguggucc

SEQ ID NO: 2260123 - RNA, 19 nt, Artificial Sequence
  Description of Artificial Sequence: Synthetic oligonucleotide
gccaggcgguagccgaagc

SEQ ID NO: 2260124 - RNA, 19 nt, Artificial Sequence
  Description of Artificial Sequence: Synthetic oligonucleotide
cuguggucugaacucucau

SEQ ID NO: 2260125 - RNA, 19 nt, Artificial Sequence
  Description of Artificial Sequence: Synthetic oligonucleotide
ggggauugcacaguuuauu

SEQ ID NO: 2260126 - RNA, 19 nt, Artificial Sequence
  Description of Artificial Sequence: Synthetic oligonucleotide
gcgcaauccaccuggcgau

SEQ ID NO: 2260127 - RNA, 19 nt, Artificial Sequence
  Description of Artificial Sequence: Synthetic oligonucleotide
ggcuccccgggagucaaga

SEQ ID NO: 2260128 - RNA, 19 nt, Artificial Sequence
  Description of Artificial Sequence: Synthetic oligonucleotide
ccgccucucugcgcaaucc

SEQ ID NO: 2260129 - RNA, 19 nt, Artificial Sequence
  Description of Artificial Sequence: Synthetic oligonucleotide
guaccacguacuggcccaa

SEQ ID NO: 2260130 - RNA, 19 nt, Artificial Sequence
  Description of Artificial Sequence: Synthetic oligonucleotide
cacccugcccggcuguggu

SEQ ID NO: 2260131 - RNA, 19 nt, Artificial Sequence
  Description of Artificial Sequence: Synthetic oligonucleotide
gcucggcagucugaagaca

SEQ ID NO: 2260132 - RNA, 19 nt, Artificial Sequence
  Description of Artificial Sequence: Synthetic oligonucleotide
gcacaguaucccugagagu

SEQ ID NO: 2260133 - RNA, 19 nt, Artificial Sequence
  Description of Artificial Sequence: Synthetic oligonucleotide
ccacguugguagacauaca

SEQ ID NO: 2260134 - RNA, 19 nt, Artificial Sequence
  Description of Artificial Sequence: Synthetic oligonucleotide
cagagggcuccccgggagu

SEQ ID NO: 2260135 - RNA, 19 nt, Artificial Sequence
  Description of Artificial Sequence: Synthetic oligonucleotide
agccgccucucugcgcaau

SEQ ID NO: 2260136 - RNA, 19 nt, Artificial Sequence
  Description of Artificial Sequence: Synthetic oligonucleotide
cccggcugugguccagaug

SEQ ID NO: 2260137 - RNA, 19 nt, Artificial Sequence
  Description of Artificial Sequence: Synthetic oligonucleotide
gccgccacccagccgccuc

SEQ ID NO: 2260138 - RNA, 19 nt, Artificial Sequence
  Description of Artificial Sequence: Synthetic oligonucleotide
gccgccucucugcgcaauc

SEQ ID NO: 2260139 - RNA, 19 nt, Artificial Sequence
  Description of Artificial Sequence: Synthetic oligonucleotide
ggcuggggccccagagggc

SEQ ID NO: 2260140 - RNA, 19 nt, Artificial Sequence
  Description of Artificial Sequence: Synthetic oligonucleotide
cgcucuuaaauaggcugga

SEQ ID NO: 2260141 - RNA, 19 nt, Artificial Sequence
  Description of Artificial Sequence: Synthetic oligonucleotide
ccacaccaagaauugucau

SEQ ID NO: 2260142 - RNA, 19 nt, Artificial Sequence
  Description of Artificial Sequence: Synthetic oligonucleotide
ccgaagcccaggagagcca

SEQ ID NO: 2260143 - RNA, 19 nt, Artificial Sequence
  Description of Artificial Sequence: Synthetic oligonucleotide
gcgaugcaauggugcagua

SEQ ID NO: 2260144 - RNA, 19 nt, Artificial Sequence
  Description of Artificial Sequence: Synthetic oligonucleotide
cgcagauucagggccgcca

SEQ ID NO: 2260145 - RNA, 19 nt, Artificial Sequence
  Description of Artificial Sequence: Synthetic oligonucleotide
ccuuguccagacgccaucu

SEQ ID NO: 2260146 - RNA, 19 nt, Artificial Sequence
  Description of Artificial Sequence: Synthetic oligonucleotide
cguaggcauucccagcugu

SEQ ID NO: 2260147 - RNA, 19 nt, Artificial Sequence
  Description of Artificial Sequence: Synthetic oligonucleotide
gcgcagauucagggccgcc

SEQ ID NO: 2260148 - RNA, 19 nt, Artificial Sequence
  Description of Artificial Sequence: Synthetic oligonucleotide
cccgggagucaagaucuga

SEQ ID NO: 2260149 - RNA, 19 nt, Artificial Sequence
  Description of Artificial Sequence: Synthetic oligonucleotide
ccccgggagucaagaucug

SEQ ID NO: 2260150 - RNA, 19 nt, Artificial Sequence
  Description of Artificial Sequence: Synthetic oligonucleotide
ccuugguuggcagcacugu

SEQ ID NO: 2260151 - RNA, 19 nt, Artificial Sequence
  Description of Artificial Sequence: Synthetic oligonucleotide
ccaccugacccaagaugcu

SEQ ID NO: 2260152 - RNA, 19 nt, Artificial Sequence
  Description of Artificial Sequence: Synthetic oligonucleotide
cccagagggcuccccggga

SEQ ID NO: 2260153 - RNA, 19 nt, Artificial Sequence
  Description of Artificial Sequence: Synthetic oligonucleotide
cgcaauccaccuggcgaug

SEQ ID NO: 2260154 - RNA, 19 nt, Artificial Sequence
  Description of Artificial Sequence: Synthetic oligonucleotide
ccaccacacggccccagcu

SEQ ID NO: 2260155 - RNA, 19 nt, Artificial Sequence
  Description of Artificial Sequence: Synthetic oligonucleotide
cggcccaccugacccaaga

SEQ ID NO: 2260156 - RNA, 19 nt, Artificial Sequence
  Description of Artificial Sequence: Synthetic oligonucleotide
gcuccccgggagucaagau

SEQ ID NO: 2260157 - RNA, 19 nt, Artificial Sequence
  Description of Artificial Sequence: Synthetic oligonucleotide
gggcuccccgggagucaag

SEQ ID NO: 2260158 - RNA, 19 nt, Artificial Sequence
  Description of Artificial Sequence: Synthetic oligonucleotide
ccggucaaaccacguuggu

SEQ ID NO: 2260159 - RNA, 19 nt, Artificial Sequence
  Description of Artificial Sequence: Synthetic oligonucleotide
ccugacccaagaugcuguu

SEQ ID NO: 2260160 - RNA, 19 nt, Artificial Sequence
  Description of Artificial Sequence: Synthetic oligonucleotide
ccugcccggcuguggucca

SEQ ID NO: 2260161 - RNA, 19 nt, Artificial Sequence
  Description of Artificial Sequence: Synthetic oligonucleotide
ccacacggccccagcugau

SEQ ID NO: 2260162 - RNA, 19 nt, Artificial Sequence
  Description of Artificial Sequence: Synthetic oligonucleotide
aaaugauugaaaucagucc

SEQ ID NO: 2260163 - RNA, 19 nt, Artificial Sequence
  Description of Artificial Sequence: Synthetic oligonucleotide
aaugaagaaaaucaaugac

SEQ ID NO: 2260164 - RNA, 19 nt, Artificial Sequence
  Description of Artificial Sequence: Synthetic oligonucleotide
aacauggagaacuaaugcc

SEQ ID NO: 2260165 - RNA, 19 nt, Artificial Sequence
  Description of Artificial Sequence: Synthetic oligonucleotide
uuguuaacagaaaauaggg

SEQ ID NO: 2260166 - RNA, 19 nt, Artificial Sequence
  Description of Artificial Sequence: Synthetic oligonucleotide
uuuaugugauaaaacaagg

SEQ ID NO: 2260167 - RNA, 19 nt, Artificial Sequence
  Description of Artificial Sequence: Synthetic oligonucleotide
aacaacguggcagagaggc

SEQ ID NO: 2260168 - RNA, 19 nt, Artificial Sequence
  Description of Artificial Sequence: Synthetic oligonucleotide
aauaugauaggccuuucag

SEQ ID NO: 2260169 - RNA, 19 nt, Artificial Sequence
  Description of Artificial Sequence: Synthetic oligonucleotide
aucacaaacacuuucuaac

SEQ ID NO: 2260170 - RNA, 19 nt, Artificial Sequence
  Description of Artificial Sequence: Synthetic oligonucleotide
aagucuucaucacaaacac

SEQ ID NO: 2260171 - RNA, 19 nt, Artificial Sequence
  Description of Artificial Sequence: Synthetic oligonucleotide
gacaugaacaguuuuagcc

SEQ ID NO: 2260172 - RNA, 19 nt, Artificial Sequence
  Description of Artificial Sequence: Synthetic oligonucleotide
ugugauaaaacaagguuag

SEQ ID NO: 2260173 - RNA, 19 nt, Artificial Sequence
  Description of Artificial Sequence: Synthetic oligonucleotide
uaaacaacguggcagagag

SEQ ID NO: 2260174 - RNA, 19 nt, Artificial Sequence
  Description of Artificial Sequence: Synthetic oligonucleotide
uuagaauuuagaaucaccu

SEQ ID NO: 2260175 - RNA, 19 nt, Artificial Sequence
  Description of Artificial Sequence: Synthetic oligonucleotide
aguccuaugaaauagcgag

SEQ ID NO: 2260176 - RNA, 19 nt, Artificial Sequence
  Description of Artificial Sequence: Synthetic oligonucleotide
ugaaauagcgagcaaauga

SEQ ID NO: 2260177 - RNA, 19 nt, Artificial Sequence
  Description of Artificial Sequence: Synthetic oligonucleotide
aaaguaaacaacguggcag

SEQ ID NO: 2260178 - RNA, 19 nt, Artificial Sequence
  Description of Artificial Sequence: Synthetic oligonucleotide
uuuagaaucaccucaacaa

SEQ ID NO: 2260179 - RNA, 19 nt, Artificial Sequence
  Description of Artificial Sequence: Synthetic oligonucleotide
ucuccuaaaguacauauug

SEQ ID NO: 2260180 - RNA, 19 nt, Artificial Sequence
  Description of Artificial Sequence: Synthetic oligonucleotide
uaagaauagcauuuuaaag

SEQ ID NO: 2260181 - RNA, 19 nt, Artificial Sequence
  Description of Artificial Sequence: Synthetic oligonucleotide
uggaaaauuguuaacagaa

SEQ ID NO: 2260182 - RNA, 19 nt, Artificial Sequence
  Description of Artificial Sequence: Synthetic oligonucleotide
ucuaacuagauguuuaugu

SEQ ID NO: 2260183 - RNA, 19 nt, Artificial Sequence
  Description of Artificial Sequence: Synthetic oligonucleotide
agaauuuagaaucaccuca

SEQ ID NO: 2260184 - RNA, 19 nt, Artificial Sequence
  Description of Artificial Sequence: Synthetic oligonucleotide
cuaaaguacauauugggac

SEQ ID NO: 2260185 - RNA, 19 nt, Artificial Sequence
  Description of Artificial Sequence: Synthetic oligonucleotide
acacuuucuaacuagaugu

SEQ ID NO: 2260186 - RNA, 19 nt, Artificial Sequence
  Description of Artificial Sequence: Synthetic oligonucleotide
aaucuugugacgucaauca

SEQ ID NO: 2260187 - RNA, 19 nt, Artificial Sequence
  Description of Artificial Sequence: Synthetic oligonucleotide
uccuaaaguacauauuggg

SEQ ID NO: 2260188 - RNA, 19 nt, Artificial Sequence
  Description of Artificial Sequence: Synthetic oligonucleotide
aguaccaauuauuuaaaag

SEQ ID NO: 2260189 - RNA, 19 nt, Artificial Sequence
  Description of Artificial Sequence: Synthetic oligonucleotide
aacaagguuaguuuuagaa

SEQ ID NO: 2260190 - RNA, 19 nt, Artificial Sequence
  Description of Artificial Sequence: Synthetic oligonucleotide
uuuagaauuuagaaucacc

SEQ ID NO: 2260191 - RNA, 19 nt, Artificial Sequence
  Description of Artificial Sequence: Synthetic oligonucleotide
auugcaggcuacucgaucc

SEQ ID NO: 2260192 - RNA, 19 nt, Artificial Sequence
  Description of Artificial Sequence: Synthetic oligonucleotide
aucucgaacaugcagaaag

SEQ ID NO: 2260193 - RNA, 19 nt, Artificial Sequence
  Description of Artificial Sequence: Synthetic oligonucleotide
aacaaucucgaacaugcag

SEQ ID NO: 2260194 - RNA, 19 nt, Artificial Sequence
  Description of Artificial Sequence: Synthetic oligonucleotide
aaaaucuacaacaguagag

SEQ ID NO: 2260195 - RNA, 19 nt, Artificial Sequence
  Description of Artificial Sequence: Synthetic oligonucleotide
aacacuuucuaacuagaug

SEQ ID NO: 2260196 - RNA, 19 nt, Artificial Sequence
  Description of Artificial Sequence: Synthetic oligonucleotide
uacacucacaguuaaagug

SEQ ID NO: 2260197 - RNA, 19 nt, Artificial Sequence
  Description of Artificial Sequence: Synthetic oligonucleotide
uuaagaauagcauuuuaaa

SEQ ID NO: 2260198 - RNA, 19 nt, Artificial Sequence
  Description of Artificial Sequence: Synthetic oligonucleotide
aaaacugacaucagucuac

SEQ ID NO: 2260199 - RNA, 19 nt, Artificial Sequence
  Description of Artificial Sequence: Synthetic oligonucleotide
aagauacaagucuucauca

SEQ ID NO: 2260200 - RNA, 19 nt, Artificial Sequence
  Description of Artificial Sequence: Synthetic oligonucleotide
uaugugauaaaacaagguu

SEQ ID NO: 2260201 - RNA, 19 nt, Artificial Sequence
  Description of Artificial Sequence: Synthetic oligonucleotide
uacauauugggacauggug

SEQ ID NO: 2260202 - RNA, 19 nt, Artificial Sequence
  Description of Artificial Sequence: Synthetic oligonucleotide
aauagcauuuuaaagacaa

SEQ ID NO: 2260203 - RNA, 19 nt, Artificial Sequence
  Description of Artificial Sequence: Synthetic oligonucleotide
uacaaaacugacaucaguc

SEQ ID NO: 2260204 - RNA, 19 nt, Artificial Sequence
  Description of Artificial Sequence: Synthetic oligonucleotide
uauugugagauccuugugu

SEQ ID NO: 2260205 - RNA, 19 nt, Artificial Sequence
  Description of Artificial Sequence: Synthetic oligonucleotide
auaugauaggccuuucagg

SEQ ID NO: 2260206 - RNA, 19 nt, Artificial Sequence
  Description of Artificial Sequence: Synthetic oligonucleotide
aauuuagaaucaccucaac

SEQ ID NO: 2260207 - RNA, 19 nt, Artificial Sequence
  Description of Artificial Sequence: Synthetic oligonucleotide
caacguauggagaagaaac

SEQ ID NO: 2260208 - RNA, 19 nt, Artificial Sequence
  Description of Artificial Sequence: Synthetic oligonucleotide
ucaguccuaugaaauagcg

SEQ ID NO: 2260209 - RNA, 19 nt, Artificial Sequence
  Description of Artificial Sequence: Synthetic oligonucleotide
guuuaugugauaaaacaag

SEQ ID NO: 2260210 - RNA, 19 nt, Artificial Sequence
  Description of Artificial Sequence: Synthetic oligonucleotide
uguuuaugugauaaaacaa

SEQ ID NO: 2260211 - RNA, 19 nt, Artificial Sequence
  Description of Artificial Sequence: Synthetic oligonucleotide
caaaugauugaaaucaguc

SEQ ID NO: 2260212 - RNA, 19 nt, Artificial Sequence
  Description of Artificial Sequence: Synthetic oligonucleotide
acaagucuucaucacaaac

SEQ ID NO: 2260213 - RNA, 19 nt, Artificial Sequence
  Description of Artificial Sequence: Synthetic oligonucleotide
acaaacacuuucuaacuag

SEQ ID NO: 2260214 - RNA, 19 nt, Artificial Sequence
  Description of Artificial Sequence: Synthetic oligonucleotide
ugaaguacaguccaugcuc

SEQ ID NO: 2260215 - RNA, 19 nt, Artificial Sequence
  Description of Artificial Sequence: Synthetic oligonucleotide
auugugagauccuuguguc

SEQ ID NO: 2260216 - RNA, 19 nt, Artificial Sequence
  Description of Artificial Sequence: Synthetic oligonucleotide
aauagcgagcaaaugacag

SEQ ID NO: 2260217 - RNA, 19 nt, Artificial Sequence
  Description of Artificial Sequence: Synthetic oligonucleotide
uaaaguacauauugggaca

SEQ ID NO: 2260218 - RNA, 19 nt, Artificial Sequence
  Description of Artificial Sequence: Synthetic oligonucleotide
aguuuuagccaacguaugg

SEQ ID NO: 2260219 - RNA, 19 nt, Artificial Sequence
  Description of Artificial Sequence: Synthetic oligonucleotide
accgcauaaaauaugauag

SEQ ID NO: 2260220 - RNA, 19 nt, Artificial Sequence
  Description of Artificial Sequence: Synthetic oligonucleotide
uuaugugauaaaacaaggu

SEQ ID NO: 2260221 - RNA, 19 nt, Artificial Sequence
  Description of Artificial Sequence: Synthetic oligonucleotide
auuacuaaguaccaauuau

SEQ ID NO: 2260222 - RNA, 19 nt, Artificial Sequence
  Description of Artificial Sequence: Synthetic oligonucleotide
cuuggaaaauuguuaacag

SEQ ID NO: 2260223 - RNA, 19 nt, Artificial Sequence
  Description of Artificial Sequence: Synthetic oligonucleotide
aaaacaagguuaguuuuag

SEQ ID NO: 2260224 - RNA, 19 nt, Artificial Sequence
  Description of Artificial Sequence: Synthetic oligonucleotide
gaaaagcacauccagcuac

SEQ ID NO: 2260225 - RNA, 19 nt, Artificial Sequence
  Description of Artificial Sequence: Synthetic oligonucleotide
uuuuagccaacguauggag

SEQ ID NO: 2260226 - RNA, 19 nt, Artificial Sequence
  Description of Artificial Sequence: Synthetic oligonucleotide
aacaguuuuagccaacgua

SEQ ID NO: 2260227 - RNA, 19 nt, Artificial Sequence
  Description of Artificial Sequence: Synthetic oligonucleotide
uguuaacagaaaauaggga

SEQ ID NO: 2260228 - RNA, 19 nt, Artificial Sequence
  Description of Artificial Sequence: Synthetic oligonucleotide
aauuacuaaguaccaauua

SEQ ID NO: 2260229 - RNA, 19 nt, Artificial Sequence
  Description of Artificial Sequence: Synthetic oligonucleotide
aaguaaacaacguggcaga

SEQ ID NO: 2260230 - RNA, 19 nt, Artificial Sequence
  Description of Artificial Sequence: Synthetic oligonucleotide
uauacagccacuacauuaa

SEQ ID NO: 2260231 - RNA, 19 nt, Artificial Sequence
  Description of Artificial Sequence: Synthetic oligonucleotide
aagccuuauacugugcagg

SEQ ID NO: 2260232 - RNA, 19 nt, Artificial Sequence
  Description of Artificial Sequence: Synthetic oligonucleotide
aacaacagugacuguccac

SEQ ID NO: 2260233 - RNA, 19 nt, Artificial Sequence
  Description of Artificial Sequence: Synthetic oligonucleotide
acauauugggacauggugg

SEQ ID NO: 2260234 - RNA, 19 nt, Artificial Sequence
  Description of Artificial Sequence: Synthetic oligonucleotide
uaacuagauguuuauguga

SEQ ID NO: 2260235 - RNA, 19 nt, Artificial Sequence
  Description of Artificial Sequence: Synthetic oligonucleotide
cuaacuagauguuuaugug

SEQ ID NO: 2260236 - RNA, 19 nt, Artificial Sequence
  Description of Artificial Sequence: Synthetic oligonucleotide
aaauaugauaggccuuuca

SEQ ID NO: 2260237 - RNA, 19 nt, Artificial Sequence
  Description of Artificial Sequence: Synthetic oligonucleotide
ugcacacacacacacacac

SEQ ID NO: 2260238 - RNA, 19 nt, Artificial Sequence
  Description of Artificial Sequence: Synthetic oligonucleotide
uaccaauuauuuaaaagua

SEQ ID NO: 2260239 - RNA, 19 nt, Artificial Sequence
  Description of Artificial Sequence: Synthetic oligonucleotide
aaaagcacauccagcuacc

SEQ ID NO: 2260240 - RNA, 19 nt, Artificial Sequence
  Description of Artificial Sequence: Synthetic oligonucleotide
auaaaaucuacaacaguag

SEQ ID NO: 2260241 - RNA, 19 nt, Artificial Sequence
  Description of Artificial Sequence: Synthetic oligonucleotide
gaaauagcgagcaaaugac

SEQ ID NO: 2260242 - RNA, 19 nt, Artificial Sequence
  Description of Artificial Sequence: Synthetic oligonucleotide
agauacaagucuucaucac

SEQ ID NO: 2260243 - RNA, 19 nt, Artificial Sequence
  Description of Artificial Sequence: Synthetic oligonucleotide
gaaacauggagaacuaaug

SEQ ID NO: 2260244 - RNA, 19 nt, Artificial Sequence
  Description of Artificial Sequence: Synthetic oligonucleotide
ugccacaagauacaagucu

SEQ ID NO: 2260245 - RNA, 19 nt, Artificial Sequence
  Description of Artificial Sequence: Synthetic oligonucleotide
caagauacaagucuucauc

SEQ ID NO: 2260246 - RNA, 19 nt, Artificial Sequence
  Description of Artificial Sequence: Synthetic oligonucleotide
ucucgaacaugcagaaagg

SEQ ID NO: 2260247 - RNA, 19 nt, Artificial Sequence
  Description of Artificial Sequence: Synthetic oligonucleotide
ucuucucuccuaaaguaca

SEQ ID NO: 2260248 - RNA, 19 nt, Artificial Sequence
  Description of Artificial Sequence: Synthetic oligonucleotide
uuagccaacguauggagaa

SEQ ID NO: 2260249 - RNA, 19 nt, Artificial Sequence
  Description of Artificial Sequence: Synthetic oligonucleotide
agcacauccagcuaccgug

SEQ ID NO: 2260250 - RNA, 19 nt, Artificial Sequence
  Description of Artificial Sequence: Synthetic oligonucleotide
acaugguacaggcuuauug

SEQ ID NO: 2260251 - RNA, 19 nt, Artificial Sequence
  Description of Artificial Sequence: Synthetic oligonucleotide
cauaaaauaugauaggccu

SEQ ID NO: 2260252 - RNA, 19 nt, Artificial Sequence
  Description of Artificial Sequence: Synthetic oligonucleotide
aauuaagaauagcauuuua

SEQ ID NO: 2260253 - RNA, 19 nt, Artificial Sequence
  Description of Artificial Sequence: Synthetic oligonucleotide
acaguuaaagugcuaagaa

SEQ ID NO: 2260254 - RNA, 19 nt, Artificial Sequence
  Description of Artificial Sequence: Synthetic oligonucleotide
acaaaacugacaucagucu

SEQ ID NO: 2260255 - RNA, 19 nt, Artificial Sequence
  Description of Artificial Sequence: Synthetic oligonucleotide
uuggaaaauuguuaacaga

SEQ ID NO: 2260256 - RNA, 19 nt, Artificial Sequence
  Description of Artificial Sequence: Synthetic oligonucleotide
auugagcagagcugcacac

SEQ ID NO: 2260257 - RNA, 19 nt, Artificial Sequence
  Description of Artificial Sequence: Synthetic oligonucleotide
uacuaaguaccaauuauuu

SEQ ID NO: 2260258 - RNA, 19 nt, Artificial Sequence
  Description of Artificial Sequence: Synthetic oligonucleotide
uuagaaucaccucaacaau

SEQ ID NO: 2260259 - RNA, 19 nt, Artificial Sequence
  Description of Artificial Sequence: Synthetic oligonucleotide
uuacuaaguaccaauuauu

SEQ ID NO: 2260260 - RNA, 19 nt, Artificial Sequence
  Description of Artificial Sequence: Synthetic oligonucleotide
ugauaaaacaagguuaguu

SEQ ID NO: 2260261 - RNA, 19 nt, Artificial Sequence
  Description of Artificial Sequence: Synthetic oligonucleotide
gauacaagucuucaucaca

SEQ ID NO: 2260262 - RNA, 19 nt, Artificial Sequence
  Description of Artificial Sequence: Synthetic oligonucleotide
ucacaaacacuuucuaacu

SEQ ID NO: 2260263 - RNA, 19 nt, Artificial Sequence
  Description of Artificial Sequence: Synthetic oligonucleotide
uguagcagaccgcauaaaa

SEQ ID NO: 2260264 - RNA, 19 nt, Artificial Sequence
  Description of Artificial Sequence: Synthetic oligonucleotide
agaaaauagggaaagacuu

SEQ ID NO: 2260265 - RNA, 19 nt, Artificial Sequence
  Description of Artificial Sequence: Synthetic oligonucleotide
cuccuaaaguacauauugg

SEQ ID NO: 2260266 - RNA, 19 nt, Artificial Sequence
  Description of Artificial Sequence: Synthetic oligonucleotide
aguucuucucuccuaaagu

SEQ ID NO: 2260267 - RNA, 19 nt, Artificial Sequence
  Description of Artificial Sequence: Synthetic oligonucleotide
ugaaaucaguccuaugaaa

SEQ ID NO: 2260268 - RNA, 19 nt, Artificial Sequence
  Description of Artificial Sequence: Synthetic oligonucleotide
uuuugagcaggcacggaca

SEQ ID NO: 2260269 - RNA, 19 nt, Artificial Sequence
  Description of Artificial Sequence: Synthetic oligonucleotide
uacucgauccucaagcaaa

SEQ ID NO: 2260270 - RNA, 19 nt, Artificial Sequence
  Description of Artificial Sequence: Synthetic oligonucleotide
gaagaaaaucaaugacacc

SEQ ID NO: 2260271 - RNA, 19 nt, Artificial Sequence
  Description of Artificial Sequence: Synthetic oligonucleotide
acaagguuaguuuuagaau

SEQ ID NO: 2260272 - RNA, 19 nt, Artificial Sequence
  Description of Artificial Sequence: Synthetic oligonucleotide
uggacaugaacaguuuuag

SEQ ID NO: 2260273 - RNA, 19 nt, Artificial Sequence
  Description of Artificial Sequence: Synthetic oligonucleotide
aacggaaucuugugacguc

SEQ ID NO: 2260274 - RNA, 19 nt, Artificial Sequence
  Description of Artificial Sequence: Synthetic oligonucleotide
gagaacuaaugccacaaga

SEQ ID NO: 2260275 - RNA, 19 nt, Artificial Sequence
  Description of Artificial Sequence: Synthetic oligonucleotide
acaguguucaccuguaaau

SEQ ID NO: 2260276 - RNA, 19 nt, Artificial Sequence
  Description of Artificial Sequence: Synthetic oligonucleotide
augcauugcaggcuacucg

SEQ ID NO: 2260277 - RNA, 19 nt, Artificial Sequence
  Description of Artificial Sequence: Synthetic oligonucleotide
auuaagaauagcauuuuaa

SEQ ID NO: 2260278 - RNA, 19 nt, Artificial Sequence
  Description of Artificial Sequence: Synthetic oligonucleotide
uagaauuuagaaucaccuc

SEQ ID NO: 2260279 - RNA, 19 nt, Artificial Sequence
  Description of Artificial Sequence: Synthetic oligonucleotide
uaaaauaugauaggccuuu

SEQ ID NO: 2260280 - RNA, 19 nt, Artificial Sequence
  Description of Artificial Sequence: Synthetic oligonucleotide
ugcauugcaggcuacucga

SEQ ID NO: 2260281 - RNA, 19 nt, Artificial Sequence
  Description of Artificial Sequence: Synthetic oligonucleotide
guaaauuucccaucauuga

SEQ ID NO: 2260282 - RNA, 19 nt, Artificial Sequence
  Description of Artificial Sequence: Synthetic oligonucleotide
cacacacacacacacacac

SEQ ID NO: 2260283 - RNA, 19 nt, Artificial Sequence
  Description of Artificial Sequence: Synthetic oligonucleotide
uuuagccaacguauggaga

SEQ ID NO: 2260284 - RNA, 19 nt, Artificial Sequence
  Description of Artificial Sequence: Synthetic oligonucleotide
caggcuuauugugagaucc

SEQ ID NO: 2260285 - RNA, 19 nt, Artificial Sequence
  Description of Artificial Sequence: Synthetic oligonucleotide
ucucuccuaaaguacauau

SEQ ID NO: 2260286 - RNA, 19 nt, Artificial Sequence
  Description of Artificial Sequence: Synthetic oligonucleotide
guaacggaaucuugugacg

SEQ ID NO: 2260287 - RNA, 19 nt, Artificial Sequence
  Description of Artificial Sequence: Synthetic oligonucleotide
uagcagaccgcauaaaaua

SEQ ID NO: 2260288 - RNA, 19 nt, Artificial Sequence
  Description of Artificial Sequence: Synthetic oligonucleotide
caucauugagcagagcugc

SEQ ID NO: 2260289 - RNA, 19 nt, Artificial Sequence
  Description of Artificial Sequence: Synthetic oligonucleotide
uuacacucacaguuaaagu

SEQ ID NO: 2260290 - RNA, 19 nt, Artificial Sequence
  Description of Artificial Sequence: Synthetic oligonucleotide
uaaugccacaagauacaag

SEQ ID NO: 2260291 - RNA, 19 nt, Artificial Sequence
  Description of Artificial Sequence: Synthetic oligonucleotide
aacuagauguuuaugugau

SEQ ID NO: 2260292 - RNA, 19 nt, Artificial Sequence
  Description of Artificial Sequence: Synthetic oligonucleotide
agccuuauacugugcaggg

SEQ ID NO: 2260293 - RNA, 19 nt, Artificial Sequence
  Description of Artificial Sequence: Synthetic oligonucleotide
uuauugugagauccuugug

SEQ ID NO: 2260294 - RNA, 19 nt, Artificial Sequence
  Description of Artificial Sequence: Synthetic oligonucleotide
cacuguggaagccuuauac

SEQ ID NO: 2260295 - RNA, 19 nt, Artificial Sequence
  Description of Artificial Sequence: Synthetic oligonucleotide
ugagcagagcugcacacac

SEQ ID NO: 2260296 - RNA, 19 nt, Artificial Sequence
  Description of Artificial Sequence: Synthetic oligonucleotide
ugauaggccuuucagggua

SEQ ID NO: 2260297 - RNA, 19 nt, Artificial Sequence
  Description of Artificial Sequence: Synthetic oligonucleotide
agugacuguccacucaucu

SEQ ID NO: 2260298 - RNA, 19 nt, Artificial Sequence
  Description of Artificial Sequence: Synthetic oligonucleotide
ugguacaggcuuauuguga

SEQ ID NO: 2260299 - RNA, 19 nt, Artificial Sequence
  Description of Artificial Sequence: Synthetic oligonucleotide
guggugaacaaucucgaac

SEQ ID NO: 2260300 - RNA, 19 nt, Artificial Sequence
  Description of Artificial Sequence: Synthetic oligonucleotide
acaguuuuagccaacguau

SEQ ID NO: 2260301 - RNA, 19 nt, Artificial Sequence
  Description of Artificial Sequence: Synthetic oligonucleotide
gguaacggaaucuugugac

SEQ ID NO: 2260302 - RNA, 19 nt, Artificial Sequence
  Description of Artificial Sequence: Synthetic oligonucleotide
uagaaucaccucaacaauu

SEQ ID NO: 2260303 - RNA, 19 nt, Artificial Sequence
  Description of Artificial Sequence: Synthetic oligonucleotide
aaguaccaauuauuuaaaa

SEQ ID NO: 2260304 - RNA, 19 nt, Artificial Sequence
  Description of Artificial Sequence: Synthetic oligonucleotide
uauugggacauggugguga

SEQ ID NO: 2260305 - RNA, 19 nt, Artificial Sequence
  Description of Artificial Sequence: Synthetic oligonucleotide
accccaacaacagugacug

SEQ ID NO: 2260306 - RNA, 19 nt, Artificial Sequence
  Description of Artificial Sequence: Synthetic oligonucleotide
cuugugucacuguggaagc

SEQ ID NO: 2260307 - RNA, 19 nt, Artificial Sequence
  Description of Artificial Sequence: Synthetic oligonucleotide
aacagugacuguccacuca

SEQ ID NO: 2260308 - RNA, 19 nt, Artificial Sequence
  Description of Artificial Sequence: Synthetic oligonucleotide
uuucuaacuagauguuuau

SEQ ID NO: 2260309 - RNA, 19 nt, Artificial Sequence
  Description of Artificial Sequence: Synthetic oligonucleotide
acauggagaacuaaugcca

SEQ ID NO: 2260310 - RNA, 19 nt, Artificial Sequence
  Description of Artificial Sequence: Synthetic oligonucleotide
cuaccgugaaguacagucc

SEQ ID NO: 2260311 - RNA, 19 nt, Artificial Sequence
  Description of Artificial Sequence: Synthetic oligonucleotide
aggccuuucaggguaacgg

SEQ ID NO: 2260312 - RNA, 19 nt, Artificial Sequence
  Description of Artificial Sequence: Synthetic oligonucleotide
aacguauggagaagaaaca

SEQ ID NO: 2260313 - RNA, 19 nt, Artificial Sequence
  Description of Artificial Sequence: Synthetic oligonucleotide
aucaguccuaugaaauagc

SEQ ID NO: 2260314 - RNA, 19 nt, Artificial Sequence
  Description of Artificial Sequence: Synthetic oligonucleotide
acuaaguaccaauuauuua

SEQ ID NO: 2260315 - RNA, 19 nt, Artificial Sequence
  Description of Artificial Sequence: Synthetic oligonucleotide
gaccgcauaaaauaugaua

SEQ ID NO: 2260316 - RNA, 19 nt, Artificial Sequence
  Description of Artificial Sequence: Synthetic oligonucleotide
gaacuaaugccacaagaua

SEQ ID NO: 2260317 - RNA, 19 nt, Artificial Sequence
  Description of Artificial Sequence: Synthetic oligonucleotide
gaaucuugugacgucaauc

SEQ ID NO: 2260318 - RNA, 19 nt, Artificial Sequence
  Description of Artificial Sequence: Synthetic oligonucleotide
augugauaaaacaagguua

SEQ ID NO: 2260319 - RNA, 19 nt, Artificial Sequence
  Description of Artificial Sequence: Synthetic oligonucleotide
gguacaggcuuauugugag

SEQ ID NO: 2260320 - RNA, 19 nt, Artificial Sequence
  Description of Artificial Sequence: Synthetic oligonucleotide
aaaguacauauugggacau

SEQ ID NO: 2260321 - RNA, 19 nt, Artificial Sequence
  Description of Artificial Sequence: Synthetic oligonucleotide
ucaggguaacggaaucuug

SEQ ID NO: 2260322 - RNA, 19 nt, Artificial Sequence
  Description of Artificial Sequence: Synthetic oligonucleotide
uguccacucaucuggacau

SEQ ID NO: 2260323 - RNA, 19 nt, Artificial Sequence
  Description of Artificial Sequence: Synthetic oligonucleotide
agaacuaaugccacaagau

SEQ ID NO: 2260324 - RNA, 19 nt, Artificial Sequence
  Description of Artificial Sequence: Synthetic oligonucleotide
gugugcucgcccuacacag

SEQ ID NO: 2260325 - RNA, 19 nt, Artificial Sequence
  Description of Artificial Sequence: Synthetic oligonucleotide
aaagcacauccagcuaccg

SEQ ID NO: 2260326 - RNA, 19 nt, Artificial Sequence
  Description of Artificial Sequence: Synthetic oligonucleotide
gacaugguggugaacaauc

SEQ ID NO: 2260327 - RNA, 19 nt, Artificial Sequence
  Description of Artificial Sequence: Synthetic oligonucleotide
acucaucuggacaugaaca

SEQ ID NO: 2260328 - RNA, 19 nt, Artificial Sequence
  Description of Artificial Sequence: Synthetic oligonucleotide
auagcgagcaaaugacagu

SEQ ID NO: 2260329 - RNA, 19 nt, Artificial Sequence
  Description of Artificial Sequence: Synthetic oligonucleotide
aaauagcgagcaaaugaca

SEQ ID NO: 2260330 - RNA, 19 nt, Artificial Sequence
  Description of Artificial Sequence: Synthetic oligonucleotide
cuugugacgucaaucaaaa

SEQ ID NO: 2260331 - RNA, 19 nt, Artificial Sequence
  Description of Artificial Sequence: Synthetic oligonucleotide
cuagauguuuaugugauaa

SEQ ID NO: 2260332 - RNA, 19 nt, Artificial Sequence
  Description of Artificial Sequence: Synthetic oligonucleotide
gauugaaaucaguccuaug

SEQ ID NO: 2260333 - RNA, 19 nt, Artificial Sequence
  Description of Artificial Sequence: Synthetic oligonucleotide
caaugacaccaucauguag

SEQ ID NO: 2260334 - RNA, 19 nt, Artificial Sequence
  Description of Artificial Sequence: Synthetic oligonucleotide
ggcuacucgauccucaagc

SEQ ID NO: 2260335 - RNA, 19 nt, Artificial Sequence
  Description of Artificial Sequence: Synthetic oligonucleotide
ucaucacaaacacuuucua

SEQ ID NO: 2260336 - RNA, 19 nt, Artificial Sequence
  Description of Artificial Sequence: Synthetic oligonucleotide
ugguggugaacaaucucga

SEQ ID NO: 2260337 - RNA, 19 nt, Artificial Sequence
  Description of Artificial Sequence: Synthetic oligonucleotide
agcaaaugacaguucuucu

SEQ ID NO: 2260338 - RNA, 19 nt, Artificial Sequence
  Description of Artificial Sequence: Synthetic oligonucleotide
cuuucuaacuagauguuua

SEQ ID NO: 2260339 - RNA, 19 nt, Artificial Sequence
  Description of Artificial Sequence: Synthetic oligonucleotide
caguucuucucuccuaaag

SEQ ID NO: 2260340 - RNA, 19 nt, Artificial Sequence
  Description of Artificial Sequence: Synthetic oligonucleotide
uaacggaaucuugugacgu

SEQ ID NO: 2260341 - RNA, 19 nt, Artificial Sequence
  Description of Artificial Sequence: Synthetic oligonucleotide
acaagauacaagucuucau

SEQ ID NO: 2260342 - RNA, 19 nt, Artificial Sequence
  Description of Artificial Sequence: Synthetic oligonucleotide
agaaacauggagaacuaau

SEQ ID NO: 2260343 - RNA, 19 nt, Artificial Sequence
  Description of Artificial Sequence: Synthetic oligonucleotide
uacugugcagggcuagaug

SEQ ID NO: 2260344 - RNA, 19 nt, Artificial Sequence
  Description of Artificial Sequence: Synthetic oligonucleotide
aaacugacaucagucuacu

SEQ ID NO: 2260345 - RNA, 19 nt, Artificial Sequence
  Description of Artificial Sequence: Synthetic oligonucleotide
cucuaacugggugugcucg

SEQ ID NO: 2260346 - RNA, 19 nt, Artificial Sequence
  Description of Artificial Sequence: Synthetic oligonucleotide
aguccaugcucuaacuggg

SEQ ID NO: 2260347 - RNA, 19 nt, Artificial Sequence
  Description of Artificial Sequence: Synthetic oligonucleotide
aguagagugaaaagcacau

SEQ ID NO: 2260348 - RNA, 19 nt, Artificial Sequence
  Description of Artificial Sequence: Synthetic oligonucleotide
uucuaacuagauguuuaug

SEQ ID NO: 2260349 - RNA, 19 nt, Artificial Sequence
  Description of Artificial Sequence: Synthetic oligonucleotide
agaccccaacaacagugac

SEQ ID NO: 2260350 - RNA, 19 nt, Artificial Sequence
  Description of Artificial Sequence: Synthetic oligonucleotide
uggagaacuaaugccacaa

SEQ ID NO: 2260351 - RNA, 19 nt, Artificial Sequence
  Description of Artificial Sequence: Synthetic oligonucleotide
cagaccgcauaaaauauga

SEQ ID NO: 2260352 - RNA, 19 nt, Artificial Sequence
  Description of Artificial Sequence: Synthetic oligonucleotide
uuauacugugcagggcuag

SEQ ID NO: 2260353 - RNA, 19 nt, Artificial Sequence
  Description of Artificial Sequence: Synthetic oligonucleotide
uacagccacuacauuaaaa

SEQ ID NO: 2260354 - RNA, 19 nt, Artificial Sequence
  Description of Artificial Sequence: Synthetic oligonucleotide
acuaaugccacaagauaca

SEQ ID NO: 2260355 - RNA, 19 nt, Artificial Sequence
  Description of Artificial Sequence: Synthetic oligonucleotide
aggguaacggaaucuugug

SEQ ID NO: 2260356 - RNA, 19 nt, Artificial Sequence
  Description of Artificial Sequence: Synthetic oligonucleotide
ugaaaagcacauccagcua

SEQ ID NO: 2260357 - RNA, 19 nt, Artificial Sequence
  Description of Artificial Sequence: Synthetic oligonucleotide
gagcugcacacacacacac

SEQ ID NO: 2260358 - RNA, 19 nt, Artificial Sequence
  Description of Artificial Sequence: Synthetic oligonucleotide
cuuauugugagauccuugu

SEQ ID NO: 2260359 - RNA, 19 nt, Artificial Sequence
  Description of Artificial Sequence: Synthetic oligonucleotide
gaaaucaguccuaugaaau

SEQ ID NO: 2260360 - RNA, 19 nt, Artificial Sequence
  Description of Artificial Sequence: Synthetic oligonucleotide
ucuaacugggugugcucgc

SEQ ID NO: 2260361 - RNA, 19 nt, Artificial Sequence
  Description of Artificial Sequence: Synthetic oligonucleotide
cagaaaauagggaaagacu

SEQ ID NO: 2260362 - RNA, 19 nt, Artificial Sequence
  Description of Artificial Sequence: Synthetic oligonucleotide
guucuucucuccuaaagua

SEQ ID NO: 2260363 - RNA, 19 nt, Artificial Sequence
  Description of Artificial Sequence: Synthetic oligonucleotide
auacaagucuucaucacaa

SEQ ID NO: 2260364 - RNA, 19 nt, Artificial Sequence
  Description of Artificial Sequence: Synthetic oligonucleotide
uagauguuuaugugauaaa

SEQ ID NO: 2260365 - RNA, 19 nt, Artificial Sequence
  Description of Artificial Sequence: Synthetic oligonucleotide
cuacacagaccccaacaac

SEQ ID NO: 2260366 - RNA, 19 nt, Artificial Sequence
  Description of Artificial Sequence: Synthetic oligonucleotide
cuaugaaauagcgagcaaa

SEQ ID NO: 2260367 - RNA, 19 nt, Artificial Sequence
  Description of Artificial Sequence: Synthetic oligonucleotide
acaggcuuauugugagauc

SEQ ID NO: 2260368 - RNA, 19 nt, Artificial Sequence
  Description of Artificial Sequence: Synthetic oligonucleotide
caaacacuuucuaacuaga

SEQ ID NO: 2260369 - RNA, 19 nt, Artificial Sequence
  Description of Artificial Sequence: Synthetic oligonucleotide
guuuuagccaacguaugga

SEQ ID NO: 2260370 - RNA, 19 nt, Artificial Sequence
  Description of Artificial Sequence: Synthetic oligonucleotide
caagguuaguuuuagaauu

SEQ ID NO: 2260371 - RNA, 19 nt, Artificial Sequence
  Description of Artificial Sequence: Synthetic oligonucleotide
uacaguccaugcucuaacu

SEQ ID NO: 2260372 - RNA, 19 nt, Artificial Sequence
  Description of Artificial Sequence: Synthetic oligonucleotide
ccuugugucacuguggaag

SEQ ID NO: 2260373 - RNA, 19 nt, Artificial Sequence
  Description of Artificial Sequence: Synthetic oligonucleotide
acggacaguguucaccugu

SEQ ID NO: 2260374 - RNA, 19 nt, Artificial Sequence
  Description of Artificial Sequence: Synthetic oligonucleotide
caguuuuagccaacguaug

SEQ ID NO: 2260375 - RNA, 19 nt, Artificial Sequence
  Description of Artificial Sequence: Synthetic oligonucleotide
ugagauccuugugucacug

SEQ ID NO: 2260376 - RNA, 19 nt, Artificial Sequence
  Description of Artificial Sequence: Synthetic oligonucleotide
caguagagugaaaagcaca

SEQ ID NO: 2260377 - RNA, 19 nt, Artificial Sequence
  Description of Artificial Sequence: Synthetic oligonucleotide
ugauugaaaucaguccuau

SEQ ID NO: 2260378 - RNA, 19 nt, Artificial Sequence
  Description of Artificial Sequence: Synthetic oligonucleotide
caucagucuacuguaaaca

SEQ ID NO: 2260379 - RNA, 19 nt, Artificial Sequence
  Description of Artificial Sequence: Synthetic oligonucleotide
agagaggcaaaugauugaa

SEQ ID NO: 2260380 - RNA, 19 nt, Artificial Sequence
  Description of Artificial Sequence: Synthetic oligonucleotide
guacaguccaugcucuaac

SEQ ID NO: 2260381 - RNA, 19 nt, Artificial Sequence
  Description of Artificial Sequence: Synthetic oligonucleotide
gcugcacacacacacacac

SEQ ID NO: 2260382 - RNA, 19 nt, Artificial Sequence
  Description of Artificial Sequence: Synthetic oligonucleotide
aaaacaugguacaggcuua

SEQ ID NO: 2260383 - RNA, 19 nt, Artificial Sequence
  Description of Artificial Sequence: Synthetic oligonucleotide
gguuaguuuuagaauuuag

SEQ ID NO: 2260384 - RNA, 19 nt, Artificial Sequence
  Description of Artificial Sequence: Synthetic oligonucleotide
gcagagaggcaaaugauug

SEQ ID NO: 2260385 - RNA, 19 nt, Artificial Sequence
  Description of Artificial Sequence: Synthetic oligonucleotide
ccaacaacagugacugucc

SEQ ID NO: 2260386 - RNA, 19 nt, Artificial Sequence
  Description of Artificial Sequence: Synthetic oligonucleotide
ucaucuggacaugaacagu

SEQ ID NO: 2260387 - RNA, 19 nt, Artificial Sequence
  Description of Artificial Sequence: Synthetic oligonucleotide
aguaaacaacguggcagag

SEQ ID NO: 2260388 - RNA, 19 nt, Artificial Sequence
  Description of Artificial Sequence: Synthetic oligonucleotide
aagguuaguuuuagaauuu

SEQ ID NO: 2260389 - RNA, 19 nt, Artificial Sequence
  Description of Artificial Sequence: Synthetic oligonucleotide
caugguacaggcuuauugu

SEQ ID NO: 2260390 - RNA, 19 nt, Artificial Sequence
  Description of Artificial Sequence: Synthetic oligonucleotide
uagcgagcaaaugacaguu

SEQ ID NO: 2260391 - RNA, 19 nt, Artificial Sequence
  Description of Artificial Sequence: Synthetic oligonucleotide
agaaucaccucaacaauuu

SEQ ID NO: 2260392 - RNA, 19 nt, Artificial Sequence
  Description of Artificial Sequence: Synthetic oligonucleotide
augauaggccuuucagggu

SEQ ID NO: 2260393 - RNA, 19 nt, Artificial Sequence
  Description of Artificial Sequence: Synthetic oligonucleotide
ucaccucaacaauuuaauu

SEQ ID NO: 2260394 - RNA, 19 nt, Artificial Sequence
  Description of Artificial Sequence: Synthetic oligonucleotide
gacaucagucuacuguaaa

SEQ ID NO: 2260395 - RNA, 19 nt, Artificial Sequence
  Description of Artificial Sequence: Synthetic oligonucleotide
cacaguuaaagugcuaaga

SEQ ID NO: 2260396 - RNA, 19 nt, Artificial Sequence
  Description of Artificial Sequence: Synthetic oligonucleotide
acacacacacacacguuuc

SEQ ID NO: 2260397 - RNA, 19 nt, Artificial Sequence
  Description of Artificial Sequence: Synthetic oligonucleotide
ugacaucagucuacuguaa

SEQ ID NO: 2260398 - RNA, 19 nt, Artificial Sequence
  Description of Artificial Sequence: Synthetic oligonucleotide
uccagcuaccgugaaguac

SEQ ID NO: 2260399 - RNA, 19 nt, Artificial Sequence
  Description of Artificial Sequence: Synthetic oligonucleotide
ugcucuaacugggugugcu

SEQ ID NO: 2260400 - RNA, 19 nt, Artificial Sequence
  Description of Artificial Sequence: Synthetic oligonucleotide
caucacaaacacuuucuaa

SEQ ID NO: 2260401 - RNA, 19 nt, Artificial Sequence
  Description of Artificial Sequence: Synthetic oligonucleotide
gugaacaaucucgaacaug

SEQ ID NO: 2260402 - RNA, 19 nt, Artificial Sequence
  Description of Artificial Sequence: Synthetic oligonucleotide
gccacuacauuaaaaucag

SEQ ID NO: 2260403 - RNA, 19 nt, Artificial Sequence
  Description of Artificial Sequence: Synthetic oligonucleotide
acacacacguuucuucaaa

SEQ ID NO: 2260404 - RNA, 19 nt, Artificial Sequence
  Description of Artificial Sequence: Synthetic oligonucleotide
aaguacauauugggacaug

SEQ ID NO: 2260405 - RNA, 19 nt, Artificial Sequence
  Description of Artificial Sequence: Synthetic oligonucleotide
acguauggagaagaaacau

SEQ ID NO: 2260406 - RNA, 19 nt, Artificial Sequence
  Description of Artificial Sequence: Synthetic oligonucleotide
caaaacugacaucagucua

SEQ ID NO: 2260407 - RNA, 19 nt, Artificial Sequence
  Description of Artificial Sequence: Synthetic oligonucleotide
cauauugggacaugguggu

SEQ ID NO: 2260408 - RNA, 19 nt, Artificial Sequence
  Description of Artificial Sequence: Synthetic oligonucleotide
cgcauaaaauaugauaggc

SEQ ID NO: 2260409 - RNA, 19 nt, Artificial Sequence
  Description of Artificial Sequence: Synthetic oligonucleotide
aaacaugguacaggcuuau

SEQ ID NO: 2260410 - RNA, 19 nt, Artificial Sequence
  Description of Artificial Sequence: Synthetic oligonucleotide
caucauguagcagaccgca

SEQ ID NO: 2260411 - RNA, 19 nt, Artificial Sequence
  Description of Artificial Sequence: Synthetic oligonucleotide
augaacaguuuuagccaac

SEQ ID NO: 2260412 - RNA, 19 nt, Artificial Sequence
  Description of Artificial Sequence: Synthetic oligonucleotide
ccuaaaguacauauuggga

SEQ ID NO: 2260413 - RNA, 19 nt, Artificial Sequence
  Description of Artificial Sequence: Synthetic oligonucleotide
ccgcauaaaauaugauagg

SEQ ID NO: 2260414 - RNA, 19 nt, Artificial Sequence
  Description of Artificial Sequence: Synthetic oligonucleotide
uaggccuuucaggguaacg

SEQ ID NO: 2260415 - RNA, 19 nt, Artificial Sequence
  Description of Artificial Sequence: Synthetic oligonucleotide
cauugcaggcuacucgauc

SEQ ID NO: 2260416 - RNA, 19 nt, Artificial Sequence
  Description of Artificial Sequence: Synthetic oligonucleotide
uucacaucccuuggaaaau

SEQ ID NO: 2260417 - RNA, 19 nt, Artificial Sequence
  Description of Artificial Sequence: Synthetic oligonucleotide
cauugagcagagcugcaca

SEQ ID NO: 2260418 - RNA, 19 nt, Artificial Sequence
  Description of Artificial Sequence: Synthetic oligonucleotide
aaacaacguggcagagagg

SEQ ID NO: 2260419 - RNA, 19 nt, Artificial Sequence
  Description of Artificial Sequence: Synthetic oligonucleotide
uauacugugcagggcuaga

SEQ ID NO: 2260420 - RNA, 19 nt, Artificial Sequence
  Description of Artificial Sequence: Synthetic oligonucleotide
guguucaccuguaaauuuc

SEQ ID NO: 2260421 - RNA, 19 nt, Artificial Sequence
  Description of Artificial Sequence: Synthetic oligonucleotide
cauguagcagaccgcauaa

SEQ ID NO: 2260422 - RNA, 19 nt, Artificial Sequence
  Description of Artificial Sequence: Synthetic oligonucleotide
acacacacacacacacacg

SEQ ID NO: 2260423 - RNA, 19 nt, Artificial Sequence
  Description of Artificial Sequence: Synthetic oligonucleotide
aucuugugacgucaaucaa

SEQ ID NO: 2260424 - RNA, 19 nt, Artificial Sequence
  Description of Artificial Sequence: Synthetic oligonucleotide
ucgcccuacacagacccca

SEQ ID NO: 2260425 - RNA, 19 nt, Artificial Sequence
  Description of Artificial Sequence: Synthetic oligonucleotide
cacacacacacacacacgu

SEQ ID NO: 2260426 - RNA, 19 nt, Artificial Sequence
  Description of Artificial Sequence: Synthetic oligonucleotide
ggagaacuaaugccacaag

SEQ ID NO: 2260427 - RNA, 19 nt, Artificial Sequence
  Description of Artificial Sequence: Synthetic oligonucleotide
acggaaucuugugacguca

SEQ ID NO: 2260428 - RNA, 19 nt, Artificial Sequence
  Description of Artificial Sequence: Synthetic oligonucleotide
uugcaggcuacucgauccu

SEQ ID NO: 2260429 - RNA, 19 nt, Artificial Sequence
  Description of Artificial Sequence: Synthetic oligonucleotide
ugugcucgcccuacacaga

SEQ ID NO: 2260430 - RNA, 19 nt, Artificial Sequence
  Description of Artificial Sequence: Synthetic oligonucleotide
auugggacaugguggugaa

SEQ ID NO: 2260431 - RNA, 19 nt, Artificial Sequence
  Description of Artificial Sequence: Synthetic oligonucleotide
cuaacugggugugcucgcc

SEQ ID NO: 2260432 - RNA, 19 nt, Artificial Sequence
  Description of Artificial Sequence: Synthetic oligonucleotide
aguacaguccaugcucuaa

SEQ ID NO: 2260433 - RNA, 19 nt, Artificial Sequence
  Description of Artificial Sequence: Synthetic oligonucleotide
ggcaaaugauugaaaucag

SEQ ID NO: 2260434 - RNA, 19 nt, Artificial Sequence
  Description of Artificial Sequence: Synthetic oligonucleotide
guaaacaacguggcagaga

SEQ ID NO: 2260435 - RNA, 19 nt, Artificial Sequence
  Description of Artificial Sequence: Synthetic oligonucleotide
uagccaacguauggagaag

SEQ ID NO: 2260436 - RNA, 19 nt, Artificial Sequence
  Description of Artificial Sequence: Synthetic oligonucleotide
augccacaagauacaaguc

SEQ ID NO: 2260437 - RNA, 19 nt, Artificial Sequence
  Description of Artificial Sequence: Synthetic oligonucleotide
ccagcuaccgugaaguaca

SEQ ID NO: 2260438 - RNA, 19 nt, Artificial Sequence
  Description of Artificial Sequence: Synthetic oligonucleotide
agcagaccgcauaaaauau

SEQ ID NO: 2260439 - RNA, 19 nt, Artificial Sequence
  Description of Artificial Sequence: Synthetic oligonucleotide
gugcucgcccuacacagac

SEQ ID NO: 2260440 - RNA, 19 nt, Artificial Sequence
  Description of Artificial Sequence: Synthetic oligonucleotide
aaguacaguccaugcucua

SEQ ID NO: 2260441 - RNA, 19 nt, Artificial Sequence
  Description of Artificial Sequence: Synthetic oligonucleotide
acuagauguuuaugugaua

SEQ ID NO: 2260442 - RNA, 19 nt, Artificial Sequence
  Description of Artificial Sequence: Synthetic oligonucleotide
cagagaggcaaaugauuga

SEQ ID NO: 2260443 - RNA, 19 nt, Artificial Sequence
  Description of Artificial Sequence: Synthetic oligonucleotide
caguccuaugaaauagcga

SEQ ID NO: 2260444 - RNA, 19 nt, Artificial Sequence
  Description of Artificial Sequence: Synthetic oligonucleotide
agccaaugaagaaaaucaa

SEQ ID NO: 2260445 - RNA, 19 nt, Artificial Sequence
  Description of Artificial Sequence: Synthetic oligonucleotide
uagaugcauugcaggcuac

SEQ ID NO: 2260446 - RNA, 19 nt, Artificial Sequence
  Description of Artificial Sequence: Synthetic oligonucleotide
gaaguacaguccaugcucu

SEQ ID NO: 2260447 - RNA, 19 nt, Artificial Sequence
  Description of Artificial Sequence: Synthetic oligonucleotide
agccaacguauggagaaga

SEQ ID NO: 2260448 - RNA, 19 nt, Artificial Sequence
  Description of Artificial Sequence: Synthetic oligonucleotide
gugaaguacaguccaugcu

SEQ ID NO: 2260449 - RNA, 19 nt, Artificial Sequence
  Description of Artificial Sequence: Synthetic oligonucleotide
caacagugacuguccacuc

SEQ ID NO: 2260450 - RNA, 19 nt, Artificial Sequence
  Description of Artificial Sequence: Synthetic oligonucleotide
cagggcuagaugcauugca

SEQ ID NO: 2260451 - RNA, 19 nt, Artificial Sequence
  Description of Artificial Sequence: Synthetic oligonucleotide
augauugaaaucaguccua

SEQ ID NO: 2260452 - RNA, 19 nt, Artificial Sequence
  Description of Artificial Sequence: Synthetic oligonucleotide
auacagccacuacauuaaa

SEQ ID NO: 2260453 - RNA, 19 nt, Artificial Sequence
  Description of Artificial Sequence: Synthetic oligonucleotide
guagagugaaaagcacauc

SEQ ID NO: 2260454 - RNA, 19 nt, Artificial Sequence
  Description of Artificial Sequence: Synthetic oligonucleotide
agaugcauugcaggcuacu

SEQ ID NO: 2260455 - RNA, 19 nt, Artificial Sequence
  Description of Artificial Sequence: Synthetic oligonucleotide
gcuuauugugagauccuug

SEQ ID NO: 2260456 - RNA, 19 nt, Artificial Sequence
  Description of Artificial Sequence: Synthetic oligonucleotide
caggguaacggaaucuugu

SEQ ID NO: 2260457 - RNA, 19 nt, Artificial Sequence
  Description of Artificial Sequence: Synthetic oligonucleotide
acaugguggugaacaaucu

SEQ ID NO: 2260458 - RNA, 19 nt, Artificial Sequence
  Description of Artificial Sequence: Synthetic oligonucleotide
gaacaguuuuagccaacgu

SEQ ID NO: 2260459 - RNA, 19 nt, Artificial Sequence
  Description of Artificial Sequence: Synthetic oligonucleotide
auaggccuuucaggguaac

SEQ ID NO: 2260460 - RNA, 19 nt, Artificial Sequence
  Description of Artificial Sequence: Synthetic oligonucleotide
agcgagcaaaugacaguuc

SEQ ID NO: 2260461 - RNA, 19 nt, Artificial Sequence
  Description of Artificial Sequence: Synthetic oligonucleotide
cuuauacugugcagggcua

SEQ ID NO: 2260462 - RNA, 19 nt, Artificial Sequence
  Description of Artificial Sequence: Synthetic oligonucleotide
ggguaacggaaucuuguga

SEQ ID NO: 2260463 - RNA, 19 nt, Artificial Sequence
  Description of Artificial Sequence: Synthetic oligonucleotide
cccaacaacagugacuguc

SEQ ID NO: 2260464 - RNA, 19 nt, Artificial Sequence
  Description of Artificial Sequence: Synthetic oligonucleotide
gaacaaucucgaacaugca

SEQ ID NO: 2260465 - RNA, 19 nt, Artificial Sequence
  Description of Artificial Sequence: Synthetic oligonucleotide
cuaaugccacaagauacaa

SEQ ID NO: 2260466 - RNA, 19 nt, Artificial Sequence
  Description of Artificial Sequence: Synthetic oligonucleotide
cagaccccaacaacaguga

SEQ ID NO: 2260467 - RNA, 19 nt, Artificial Sequence
  Description of Artificial Sequence: Synthetic oligonucleotide
agguuaguuuuagaauuua

SEQ ID NO: 2260468 - RNA, 19 nt, Artificial Sequence
  Description of Artificial Sequence: Synthetic oligonucleotide
agcaggcacggacaguguu

SEQ ID NO: 2260469 - RNA, 19 nt, Artificial Sequence
  Description of Artificial Sequence: Synthetic oligonucleotide
agucuucaucacaaacacu

SEQ ID NO: 2260470 - RNA, 19 nt, Artificial Sequence
  Description of Artificial Sequence: Synthetic oligonucleotide
ugucacuguggaagccuua

SEQ ID NO: 2260471 - RNA, 19 nt, Artificial Sequence
  Description of Artificial Sequence: Synthetic oligonucleotide
cacacacguuucuucaaaa

SEQ ID NO: 2260472 - RNA, 19 nt, Artificial Sequence
  Description of Artificial Sequence: Synthetic oligonucleotide
gcuacucgauccucaagca

SEQ ID NO: 2260473 - RNA, 19 nt, Artificial Sequence
  Description of Artificial Sequence: Synthetic oligonucleotide
caacguggcagagaggcaa

SEQ ID NO: 2260474 - RNA, 19 nt, Artificial Sequence
  Description of Artificial Sequence: Synthetic oligonucleotide
auauugggacaugguggug

SEQ ID NO: 2260475 - RNA, 19 nt, Artificial Sequence
  Description of Artificial Sequence: Synthetic oligonucleotide
caacaacagugacugucca

SEQ ID NO: 2260476 - RNA, 19 nt, Artificial Sequence
  Description of Artificial Sequence: Synthetic oligonucleotide
agagcugcacacacacaca

SEQ ID NO: 2260477 - RNA, 19 nt, Artificial Sequence
  Description of Artificial Sequence: Synthetic oligonucleotide
ccaucauguagcagaccgc

SEQ ID NO: 2260478 - RNA, 19 nt, Artificial Sequence
  Description of Artificial Sequence: Synthetic oligonucleotide
cuguaaauuucccaucauu

SEQ ID NO: 2260479 - RNA, 19 nt, Artificial Sequence
  Description of Artificial Sequence: Synthetic oligonucleotide
guagcagaccgcauaaaau

SEQ ID NO: 2260480 - RNA, 19 nt, Artificial Sequence
  Description of Artificial Sequence: Synthetic oligonucleotide
cuacucgauccucaagcaa

SEQ ID NO: 2260481 - RNA, 19 nt, Artificial Sequence
  Description of Artificial Sequence: Synthetic oligonucleotide
uccuugugucacuguggaa

SEQ ID NO: 2260482 - RNA, 19 nt, Artificial Sequence
  Description of Artificial Sequence: Synthetic oligonucleotide
gcagaccgcauaaaauaug

SEQ ID NO: 2260483 - RNA, 19 nt, Artificial Sequence
  Description of Artificial Sequence: Synthetic oligonucleotide
cagcuaccgugaaguacag

SEQ ID NO: 2260484 - RNA, 19 nt, Artificial Sequence
  Description of Artificial Sequence: Synthetic oligonucleotide
acacacacacacacacaca

SEQ ID NO: 2260485 - RNA, 19 nt, Artificial Sequence
  Description of Artificial Sequence: Synthetic oligonucleotide
ugggugugcucgcccuaca

SEQ ID NO: 2260486 - RNA, 19 nt, Artificial Sequence
  Description of Artificial Sequence: Synthetic oligonucleotide
aacaugguacaggcuuauu

SEQ ID NO: 2260487 - RNA, 19 nt, Artificial Sequence
  Description of Artificial Sequence: Synthetic oligonucleotide
cugugcagggcuagaugca

SEQ ID NO: 2260488 - RNA, 19 nt, Artificial Sequence
  Description of Artificial Sequence: Synthetic oligonucleotide
ccuuauacugugcagggcu

SEQ ID NO: 2260489 - RNA, 19 nt, Artificial Sequence
  Description of Artificial Sequence: Synthetic oligonucleotide
acucgauccucaagcaaaa

SEQ ID NO: 2260490 - RNA, 19 nt, Artificial Sequence
  Description of Artificial Sequence: Synthetic oligonucleotide
ggccuuucaggguaacgga

SEQ ID NO: 2260491 - RNA, 19 nt, Artificial Sequence
  Description of Artificial Sequence: Synthetic oligonucleotide
cucgcccuacacagacccc

SEQ ID NO: 2260492 - RNA, 19 nt, Artificial Sequence
  Description of Artificial Sequence: Synthetic oligonucleotide
aacguggcagagaggcaaa

SEQ ID NO: 2260493 - RNA, 19 nt, Artificial Sequence
  Description of Artificial Sequence: Synthetic oligonucleotide
cacacacacacacacguuu

SEQ ID NO: 2260494 - RNA, 19 nt, Artificial Sequence
  Description of Artificial Sequence: Synthetic oligonucleotide
gaccccaacaacagugacu

SEQ ID NO: 2260495 - RNA, 19 nt, Artificial Sequence
  Description of Artificial Sequence: Synthetic oligonucleotide
cccuuggaaaauuguuaac

SEQ ID NO: 2260496 - RNA, 19 nt, Artificial Sequence
  Description of Artificial Sequence: Synthetic oligonucleotide
ugcaggcuacucgauccuc

SEQ ID NO: 2260497 - RNA, 19 nt, Artificial Sequence
  Description of Artificial Sequence: Synthetic oligonucleotide
cugcacacacacacacaca

SEQ ID NO: 2260498 - RNA, 19 nt, Artificial Sequence
  Description of Artificial Sequence: Synthetic oligonucleotide
gauaggccuuucaggguaa

SEQ ID NO: 2260499 - RNA, 19 nt, Artificial Sequence
  Description of Artificial Sequence: Synthetic oligonucleotide
acacacacacacguuucuu

SEQ ID NO: 2260500 - RNA, 19 nt, Artificial Sequence
  Description of Artificial Sequence: Synthetic oligonucleotide
aggcuuauugugagauccu

SEQ ID NO: 2260501 - RNA, 19 nt, Artificial Sequence
  Description of Artificial Sequence: Synthetic oligonucleotide
gcgagcaaaugacaguucu

SEQ ID NO: 2260502 - RNA, 19 nt, Artificial Sequence
  Description of Artificial Sequence: Synthetic oligonucleotide
cagugacuguccacucauc

SEQ ID NO: 2260503 - RNA, 19 nt, Artificial Sequence
  Description of Artificial Sequence: Synthetic oligonucleotide
caggcacggacaguguuca

SEQ ID NO: 2260504 - RNA, 19 nt, Artificial Sequence
  Description of Artificial Sequence: Synthetic oligonucleotide
guacauauugggacauggu

SEQ ID NO: 2260505 - RNA, 19 nt, Artificial Sequence
  Description of Artificial Sequence: Synthetic oligonucleotide
agaccgcauaaaauaugau

SEQ ID NO: 2260506 - RNA, 19 nt, Artificial Sequence
  Description of Artificial Sequence: Synthetic oligonucleotide
cugggugugcucgcccuac

SEQ ID NO: 2260507 - RNA, 19 nt, Artificial Sequence
  Description of Artificial Sequence: Synthetic oligonucleotide
cacggacaguguucaccug

SEQ ID NO: 2260508 - RNA, 19 nt, Artificial Sequence
  Description of Artificial Sequence: Synthetic oligonucleotide
gguggugaacaaucucgaa

SEQ ID NO: 2260509 - RNA, 19 nt, Artificial Sequence
  Description of Artificial Sequence: Synthetic oligonucleotide
agcugcacacacacacaca

SEQ ID NO: 2260510 - RNA, 19 nt, Artificial Sequence
  Description of Artificial Sequence: Synthetic oligonucleotide
gccuucacaucccuuggaa

SEQ ID NO: 2260511 - RNA, 19 nt, Artificial Sequence
  Description of Artificial Sequence: Synthetic oligonucleotide
acaacguggcagagaggca

SEQ ID NO: 2260512 - RNA, 19 nt, Artificial Sequence
  Description of Artificial Sequence: Synthetic oligonucleotide
cacacacacacacguuucu

SEQ ID NO: 2260513 - RNA, 19 nt, Artificial Sequence
  Description of Artificial Sequence: Synthetic oligonucleotide
caggcuacucgauccucaa

SEQ ID NO: 2260514 - RNA, 19 nt, Artificial Sequence
  Description of Artificial Sequence: Synthetic oligonucleotide
cucuccuaaaguacauauu

SEQ ID NO: 2260515 - RNA, 19 nt, Artificial Sequence
  Description of Artificial Sequence: Synthetic oligonucleotide
gugauaaaacaagguuagu

SEQ ID NO: 2260516 - RNA, 19 nt, Artificial Sequence
  Description of Artificial Sequence: Synthetic oligonucleotide
uugggacaugguggugaac

SEQ ID NO: 2260517 - RNA, 19 nt, Artificial Sequence
  Description of Artificial Sequence: Synthetic oligonucleotide
cacuuucuaacuagauguu

SEQ ID NO: 2260518 - RNA, 19 nt, Artificial Sequence
  Description of Artificial Sequence: Synthetic oligonucleotide
ccgugaaguacaguccaug

SEQ ID NO: 2260519 - RNA, 19 nt, Artificial Sequence
  Description of Artificial Sequence: Synthetic oligonucleotide
gggugugcucgcccuacac

SEQ ID NO: 2260520 - RNA, 19 nt, Artificial Sequence
  Description of Artificial Sequence: Synthetic oligonucleotide
gccuuauacugugcagggc

SEQ ID NO: 2260521 - RNA, 19 nt, Artificial Sequence
  Description of Artificial Sequence: Synthetic oligonucleotide
acacacacacacacacguu

SEQ ID NO: 2260522 - RNA, 19 nt, Artificial Sequence
  Description of Artificial Sequence: Synthetic oligonucleotide
gugagauccuugugucacu

SEQ ID NO: 2260523 - RNA, 19 nt, Artificial Sequence
  Description of Artificial Sequence: Synthetic oligonucleotide
guccacucaucuggacaug

SEQ ID NO: 2260524 - RNA, 19 nt, Artificial Sequence
  Description of Artificial Sequence: Synthetic oligonucleotide
gcuagaugcauugcaggcu

SEQ ID NO: 2260525 - RNA, 19 nt, Artificial Sequence
  Description of Artificial Sequence: Synthetic oligonucleotide
agcuaccgugaaguacagu

SEQ ID NO: 2260526 - RNA, 19 nt, Artificial Sequence
  Description of Artificial Sequence: Synthetic oligonucleotide
gcaggcacggacaguguuc

SEQ ID NO: 2260527 - RNA, 19 nt, Artificial Sequence
  Description of Artificial Sequence: Synthetic oligonucleotide
cacagaccccaacaacagu

SEQ ID NO: 2260528 - RNA, 19 nt, Artificial Sequence
  Description of Artificial Sequence: Synthetic oligonucleotide
ccaacguauggagaagaaa

SEQ ID NO: 2260529 - RNA, 19 nt, Artificial Sequence
  Description of Artificial Sequence: Synthetic oligonucleotide
ggacaguguucaccuguaa

SEQ ID NO: 2260530 - RNA, 19 nt, Artificial Sequence
  Description of Artificial Sequence: Synthetic oligonucleotide
gccuuucaggguaacggaa

SEQ ID NO: 2260531 - RNA, 19 nt, Artificial Sequence
  Description of Artificial Sequence: Synthetic oligonucleotide
cacauccagcuaccgugaa

SEQ ID NO: 2260532 - RNA, 19 nt, Artificial Sequence
  Description of Artificial Sequence: Synthetic oligonucleotide
ggaaucuugugacgucaau

SEQ ID NO: 2260533 - RNA, 19 nt, Artificial Sequence
  Description of Artificial Sequence: Synthetic oligonucleotide
gcacacacacacacacaca

SEQ ID NO: 2260534 - RNA, 19 nt, Artificial Sequence
  Description of Artificial Sequence: Synthetic oligonucleotide
ccuaugaaauagcgagcaa

SEQ ID NO: 2260535 - RNA, 19 nt, Artificial Sequence
  Description of Artificial Sequence: Synthetic oligonucleotide
gccaacguauggagaagaa

SEQ ID NO: 2260536 - RNA, 19 nt, Artificial Sequence
  Description of Artificial Sequence: Synthetic oligonucleotide
cguggcagagaggcaaaug

SEQ ID NO: 2260537 - RNA, 19 nt, Artificial Sequence
  Description of Artificial Sequence: Synthetic oligonucleotide
gcccuacacagaccccaac

SEQ ID NO: 2260538 - RNA, 19 nt, Artificial Sequence
  Description of Artificial Sequence: Synthetic oligonucleotide
ggcuuauugugagauccuu

SEQ ID NO: 2260539 - RNA, 19 nt, Artificial Sequence
  Description of Artificial Sequence: Synthetic oligonucleotide
ccuguaaauuucccaucau

SEQ ID NO: 2260540 - RNA, 19 nt, Artificial Sequence
  Description of Artificial Sequence: Synthetic oligonucleotide
cggaaucuugugacgucaa

SEQ ID NO: 2260541 - RNA, 19 nt, Artificial Sequence
  Description of Artificial Sequence: Synthetic oligonucleotide
cggacaguguucaccugua

SEQ ID NO: 2260542 - RNA, 19 nt, Artificial Sequence
  Description of Artificial Sequence: Synthetic oligonucleotide
cgagcaaaugacaguucuu

SEQ ID NO: 2260543 - RNA, 19 nt, Artificial Sequence
  Description of Artificial Sequence: Synthetic oligonucleotide
gcauugcaggcuacucgau

SEQ ID NO: 2260544 - RNA, 19 nt, Artificial Sequence
  Description of Artificial Sequence: Synthetic oligonucleotide
cgcccuacacagaccccaa

SEQ ID NO: 2260545 - RNA, 19 nt, Artificial Sequence
  Description of Artificial Sequence: Synthetic oligonucleotide
ccccaacaacagugacugu

SEQ ID NO: 2260546 - RNA, 19 nt, Artificial Sequence
  Description of Artificial Sequence: Synthetic oligonucleotide
augacaagcaaucauaagc

SEQ ID NO: 2260547 - RNA, 19 nt, Artificial Sequence
  Description of Artificial Sequence: Synthetic oligonucleotide
ugacaagcaaucauaagcg

SEQ ID NO: 2260548 - RNA, 19 nt, Artificial Sequence
  Description of Artificial Sequence: Synthetic oligonucleotide
ucaccuauaucacagaagc

SEQ ID NO: 2260549 - RNA, 19 nt, Artificial Sequence
  Description of Artificial Sequence: Synthetic oligonucleotide
aguagaugauguuacacac

SEQ ID NO: 2260550 - RNA, 19 nt, Artificial Sequence
  Description of Artificial Sequence: Synthetic oligonucleotide
ugggcaauagcuaacuugg

SEQ ID NO: 2260551 - RNA, 19 nt, Artificial Sequence
  Description of Artificial Sequence: Synthetic oligonucleotide
ucauaagcgagcuauuggg

SEQ ID NO: 2260552 - RNA, 19 nt, Artificial Sequence
  Description of Artificial Sequence: Synthetic oligonucleotide
gaugauguuacacacucgc

SEQ ID NO: 2260553 - RNA, 19 nt, Artificial Sequence
  Description of Artificial Sequence: Synthetic oligonucleotide
auucuuuggaauccugucc

SEQ ID NO: 2260554 - RNA, 19 nt, Artificial Sequence
  Description of Artificial Sequence: Synthetic oligonucleotide
aauagcuaacuugggaggc

SEQ ID NO: 2260555 - RNA, 19 nt, Artificial Sequence
  Description of Artificial Sequence: Synthetic oligonucleotide
uucugauucaccuggaucu

SEQ ID NO: 2260556 - RNA, 19 nt, Artificial Sequence
  Description of Artificial Sequence: Synthetic oligonucleotide
agugugaucaccacgaggg

SEQ ID NO: 2260557 - RNA, 19 nt, Artificial Sequence
  Description of Artificial Sequence: Synthetic oligonucleotide
ugaugaaagagccuccaag

SEQ ID NO: 2260558 - RNA, 19 nt, Artificial Sequence
  Description of Artificial Sequence: Synthetic oligonucleotide
aaaccaugcuuccugcugg

SEQ ID NO: 2260559 - RNA, 19 nt, Artificial Sequence
  Description of Artificial Sequence: Synthetic oligonucleotide
aggcuuuccacuuccaggc

SEQ ID NO: 2260560 - RNA, 19 nt, Artificial Sequence
  Description of Artificial Sequence: Synthetic oligonucleotide
aaaagagccugccucagcu

SEQ ID NO: 2260561 - RNA, 19 nt, Artificial Sequence
  Description of Artificial Sequence: Synthetic oligonucleotide
auccaaucagcacugaauc

SEQ ID NO: 2260562 - RNA, 19 nt, Artificial Sequence
  Description of Artificial Sequence: Synthetic oligonucleotide
cugauuugagcuaagcagc

SEQ ID NO: 2260563 - RNA, 19 nt, Artificial Sequence
  Description of Artificial Sequence: Synthetic oligonucleotide
aguucuuucugauucaccu

SEQ ID NO: 2260564 - RNA, 19 nt, Artificial Sequence
  Description of Artificial Sequence: Synthetic oligonucleotide
uagaugauguuacacacuc

SEQ ID NO: 2260565 - RNA, 19 nt, Artificial Sequence
  Description of Artificial Sequence: Synthetic oligonucleotide
ucgagacugaaccaggcag

SEQ ID NO: 2260566 - RNA, 19 nt, Artificial Sequence
  Description of Artificial Sequence: Synthetic oligonucleotide
acaacaaugggagagcauc

SEQ ID NO: 2260567 - RNA, 19 nt, Artificial Sequence
  Description of Artificial Sequence: Synthetic oligonucleotide
gauguuacacacucgcuug

SEQ ID NO: 2260568 - RNA, 19 nt, Artificial Sequence
  Description of Artificial Sequence: Synthetic oligonucleotide
aucauaagcgagcuauugg

SEQ ID NO: 2260569 - RNA, 19 nt, Artificial Sequence
  Description of Artificial Sequence: Synthetic oligonucleotide
ucuucuauucuuuggaauc

SEQ ID NO: 2260570 - RNA, 19 nt, Artificial Sequence
  Description of Artificial Sequence: Synthetic oligonucleotide
auaguagaugauguuacac

SEQ ID NO: 2260571 - RNA, 19 nt, Artificial Sequence
  Description of Artificial Sequence: Synthetic oligonucleotide
auuugagcuaagcagccag

SEQ ID NO: 2260572 - RNA, 19 nt, Artificial Sequence
  Description of Artificial Sequence: Synthetic oligonucleotide
cagauuuuggcaaggaaac

SEQ ID NO: 2260573 - RNA, 19 nt, Artificial Sequence
  Description of Artificial Sequence: Synthetic oligonucleotide
aaaggagcccuuucucaac

SEQ ID NO: 2260574 - RNA, 19 nt, Artificial Sequence
  Description of Artificial Sequence: Synthetic oligonucleotide
agcaaggaggaauccaugg

SEQ ID NO: 2260575 - RNA, 19 nt, Artificial Sequence
  Description of Artificial Sequence: Synthetic oligonucleotide
uucaccuauaucacagaag

SEQ ID NO: 2260576 - RNA, 19 nt, Artificial Sequence
  Description of Artificial Sequence: Synthetic oligonucleotide
caauagcuaacuugggagg

SEQ ID NO: 2260577 - RNA, 19 nt, Artificial Sequence
  Description of Artificial Sequence: Synthetic oligonucleotide
augccuguagcaaaggagc

SEQ ID NO: 2260578 - RNA, 19 nt, Artificial Sequence
  Description of Artificial Sequence: Synthetic oligonucleotide
aaucauaagcgagcuauug

SEQ ID NO: 2260579 - RNA, 19 nt, Artificial Sequence
  Description of Artificial Sequence: Synthetic oligonucleotide
uuuggaauccuguccaaac

SEQ ID NO: 2260580 - RNA, 19 nt, Artificial Sequence
  Description of Artificial Sequence: Synthetic oligonucleotide
agcuugaugaaagagccuc

SEQ ID NO: 2260581 - RNA, 19 nt, Artificial Sequence
  Description of Artificial Sequence: Synthetic oligonucleotide
ugauuugagcuaagcagcc

SEQ ID NO: 2260582 - RNA, 19 nt, Artificial Sequence
  Description of Artificial Sequence: Synthetic oligonucleotide
cagaauacaguucccuugg

SEQ ID NO: 2260583 - RNA, 19 nt, Artificial Sequence
  Description of Artificial Sequence: Synthetic oligonucleotide
accuauaucacagaagccu

SEQ ID NO: 2260584 - RNA, 19 nt, Artificial Sequence
  Description of Artificial Sequence: Synthetic oligonucleotide
caaggaaacguguuuggag

SEQ ID NO: 2260585 - RNA, 19 nt, Artificial Sequence
  Description of Artificial Sequence: Synthetic oligonucleotide
aaugggagagcaucacucu

SEQ ID NO: 2260586 - RNA, 19 nt, Artificial Sequence
  Description of Artificial Sequence: Synthetic oligonucleotide
uuugagcuaagcagccagg

SEQ ID NO: 2260587 - RNA, 19 nt, Artificial Sequence
  Description of Artificial Sequence: Synthetic oligonucleotide
ggaaaaggagcucuggcgg

SEQ ID NO: 2260588 - RNA, 19 nt, Artificial Sequence
  Description of Artificial Sequence: Synthetic oligonucleotide
ucaucgagacugaaccagg

SEQ ID NO: 2260589 - RNA, 19 nt, Artificial Sequence
  Description of Artificial Sequence: Synthetic oligonucleotide
ccugauuugagcuaagcag

SEQ ID NO: 2260590 - RNA, 19 nt, Artificial Sequence
  Description of Artificial Sequence: Synthetic oligonucleotide
gcaauagcuaacuugggag

SEQ ID NO: 2260591 - RNA, 19 nt, Artificial Sequence
  Description of Artificial Sequence: Synthetic oligonucleotide
aaaaggagcucuggcgggc

SEQ ID NO: 2260592 - RNA, 19 nt, Artificial Sequence
  Description of Artificial Sequence: Synthetic oligonucleotide
aauccuguccaaacuuccc

SEQ ID NO: 2260593 - RNA, 19 nt, Artificial Sequence
  Description of Artificial Sequence: Synthetic oligonucleotide
ugauguuacacacucgcuu

SEQ ID NO: 2260594 - RNA, 19 nt, Artificial Sequence
  Description of Artificial Sequence: Synthetic oligonucleotide
ugcaugacaagcaaucaua

SEQ ID NO: 2260595 - RNA, 19 nt, Artificial Sequence
  Description of Artificial Sequence: Synthetic oligonucleotide
gguaucgauguccugaugc

SEQ ID NO: 2260596 - RNA, 19 nt, Artificial Sequence
  Description of Artificial Sequence: Synthetic oligonucleotide
uuucugauucaccuggauc

SEQ ID NO: 2260597 - RNA, 19 nt, Artificial Sequence
  Description of Artificial Sequence: Synthetic oligonucleotide
cagggcagaauacaguucc

SEQ ID NO: 2260598 - RNA, 19 nt, Artificial Sequence
  Description of Artificial Sequence: Synthetic oligonucleotide
aucuguggauaguagauga

SEQ ID NO: 2260599 - RNA, 19 nt, Artificial Sequence
  Description of Artificial Sequence: Synthetic oligonucleotide
  modified_base (10)..(10): a, c, u, g, unknown or other
ucccaggacncccuuacca

SEQ ID NO: 2260600 - RNA, 19 nt, Artificial Sequence
  Description of Artificial Sequence: Synthetic oligonucleotide
ugaaagagccuccaagcuc

SEQ ID NO: 2260601 - RNA, 19 nt, Artificial Sequence
  Description of Artificial Sequence: Synthetic oligonucleotide
agcaaaccaugcuuccugc

SEQ ID NO: 2260602 - RNA, 19 nt, Artificial Sequence
  Description of Artificial Sequence: Synthetic oligonucleotide
gaugccuguagcaaaggag

SEQ ID NO: 2260603 - RNA, 19 nt, Artificial Sequence
  Description of Artificial Sequence: Synthetic oligonucleotide
aacaaugggagagcaucac

SEQ ID NO: 2260604 - RNA, 19 nt, Artificial Sequence
  Description of Artificial Sequence: Synthetic oligonucleotide
aaucuucuauucuuuggaa

SEQ ID NO: 2260605 - RNA, 19 nt, Artificial Sequence
  Description of Artificial Sequence: Synthetic oligonucleotide
gaacuggugaccaucgugc

SEQ ID NO: 2260606 - RNA, 19 nt, Artificial Sequence
  Description of Artificial Sequence: Synthetic oligonucleotide
uuucaccuauaucacagaa

SEQ ID NO: 2260607 - RNA, 19 nt, Artificial Sequence
  Description of Artificial Sequence: Synthetic oligonucleotide
  modified_base (16)..(16): a, c, u, g, unknown or other
caaacuucccaggacnccc

SEQ ID NO: 2260608 - RNA, 19 nt, Artificial Sequence
  Description of Artificial Sequence: Synthetic oligonucleotide
auguuacacacucgcuugc

SEQ ID NO: 2260609 - RNA, 19 nt, Artificial Sequence
  Description of Artificial Sequence: Synthetic oligonucleotide
uucagcagugcccgggagg

SEQ ID NO: 2260610 - RNA, 19 nt, Artificial Sequence
  Description of Artificial Sequence: Synthetic oligonucleotide
gaauccauggaguucagcu

SEQ ID NO: 2260611 - RNA, 19 nt, Artificial Sequence
  Description of Artificial Sequence: Synthetic oligonucleotide
aaguaggccaccgggcccc

SEQ ID NO: 2260612 - RNA, 19 nt, Artificial Sequence
  Description of Artificial Sequence: Synthetic oligonucleotide
ucuauucuuuggaauccug

SEQ ID NO: 2260613 - RNA, 19 nt, Artificial Sequence
  Description of Artificial Sequence: Synthetic oligonucleotide
agaaaggagcccuuucuca

SEQ ID NO: 2260614 - RNA, 19 nt, Artificial Sequence
  Description of Artificial Sequence: Synthetic oligonucleotide
uuucucaacagggcugugg

SEQ ID NO: 2260615 - RNA, 19 nt, Artificial Sequence
  Description of Artificial Sequence: Synthetic oligonucleotide
cagaccuagauccaaagca

SEQ ID NO: 2260616 - RNA, 19 nt, Artificial Sequence
  Description of Artificial Sequence: Synthetic oligonucleotide
acaagcaaucauaagcgag

SEQ ID NO: 2260617 - RNA, 19 nt, Artificial Sequence
  Description of Artificial Sequence: Synthetic oligonucleotide
gacgaagaguacuguaggc

SEQ ID NO: 2260618 - RNA, 19 nt, Artificial Sequence
  Description of Artificial Sequence: Synthetic oligonucleotide
ugauggccugauuugagcu

SEQ ID NO: 2260619 - RNA, 19 nt, Artificial Sequence
  Description of Artificial Sequence: Synthetic oligonucleotide
uuggaauccuguccaaacu

SEQ ID NO: 2260620 - RNA, 19 nt, Artificial Sequence
  Description of Artificial Sequence: Synthetic oligonucleotide
uauaucacagaagccugcc

SEQ ID NO: 2260621 - RNA, 19 nt, Artificial Sequence
  Description of Artificial Sequence: Synthetic oligonucleotide
gugggcaauagcuaacuug

SEQ ID NO: 2260622 - RNA, 19 nt, Artificial Sequence
  Description of Artificial Sequence: Synthetic oligonucleotide
uugagcuaagcagccaggg

SEQ ID NO: 2260623 - RNA, 19 nt, Artificial Sequence
  Description of Artificial Sequence: Synthetic oligonucleotide
uucugcaaccucucgccgg

SEQ ID NO: 2260624 - RNA, 19 nt, Artificial Sequence
  Description of Artificial Sequence: Synthetic oligonucleotide
uuuaaucauguggugggca

SEQ ID NO: 2260625 - RNA, 19 nt, Artificial Sequence
  Description of Artificial Sequence: Synthetic oligonucleotide
gggaaaaggagcucuggcg

SEQ ID NO: 2260626 - RNA, 19 nt, Artificial Sequence
  Description of Artificial Sequence: Synthetic oligonucleotide
cuauaucacagaagccugc

SEQ ID NO: 2260627 - RNA, 19 nt, Artificial Sequence
  Description of Artificial Sequence: Synthetic oligonucleotide
uaacuugggaggcaacaac

SEQ ID NO: 2260628 - RNA, 19 nt, Artificial Sequence
  Description of Artificial Sequence: Synthetic oligonucleotide
uguggugggcaauagcuaa

SEQ ID NO: 2260629 - RNA, 19 nt, Artificial Sequence
  Description of Artificial Sequence: Synthetic oligonucleotide
agucuugauggccugauuu

SEQ ID NO: 2260630 - RNA, 19 nt, Artificial Sequence
  Description of Artificial Sequence: Synthetic oligonucleotide
augaaagagccuccaagcu

SEQ ID NO: 2260631 - RNA, 19 nt, Artificial Sequence
  Description of Artificial Sequence: Synthetic oligonucleotide
cuagauccaaagcaaacca

SEQ ID NO: 2260632 - RNA, 19 nt, Artificial Sequence
  Description of Artificial Sequence: Synthetic oligonucleotide
ucaccguugcaugacaagc

SEQ ID NO: 2260633 - RNA, 19 nt, Artificial Sequence
  Description of Artificial Sequence: Synthetic oligonucleotide
cauuucagauuuuggcaag

SEQ ID NO: 2260634 - RNA, 19 nt, Artificial Sequence
  Description of Artificial Sequence: Synthetic oligonucleotide
uucagauuuuggcaaggaa

SEQ ID NO: 2260635 - RNA, 19 nt, Artificial Sequence
  Description of Artificial Sequence: Synthetic oligonucleotide
gagcccuuucucaacaggg

SEQ ID NO: 2260636 - RNA, 19 nt, Artificial Sequence
  Description of Artificial Sequence: Synthetic oligonucleotide
uguccugaugccuguagca

SEQ ID NO: 2260637 - RNA, 19 nt, Artificial Sequence
  Description of Artificial Sequence: Synthetic oligonucleotide
ugaccaucgugccagcgga

SEQ ID NO: 2260638 - RNA, 19 nt, Artificial Sequence
  Description of Artificial Sequence: Synthetic oligonucleotide
gaggcugcgcuauucagac

SEQ ID NO: 2260639 - RNA, 19 nt, Artificial Sequence
  Description of Artificial Sequence: Synthetic oligonucleotide
auaagcgagcuauugggaa

SEQ ID NO: 2260640 - RNA, 19 nt, Artificial Sequence
  Description of Artificial Sequence: Synthetic oligonucleotide
aaggagcccuuucucaaca

SEQ ID NO: 2260641 - RNA, 19 nt, Artificial Sequence
  Description of Artificial Sequence: Synthetic oligonucleotide
caugacaagcaaucauaag

SEQ ID NO: 2260642 - RNA, 19 nt, Artificial Sequence
  Description of Artificial Sequence: Synthetic oligonucleotide
gauaguagaugauguuaca

SEQ ID NO: 2260643 - RNA, 19 nt, Artificial Sequence
  Description of Artificial Sequence: Synthetic oligonucleotide
aucacucugcugcugaaga

SEQ ID NO: 2260644 - RNA, 19 nt, Artificial Sequence
  Description of Artificial Sequence: Synthetic oligonucleotide
ugugaucaccacgaggggc

SEQ ID NO: 2260645 - RNA, 19 nt, Artificial Sequence
  Description of Artificial Sequence: Synthetic oligonucleotide
gcggagaagagccugagcc

SEQ ID NO: 2260646 - RNA, 19 nt, Artificial Sequence
  Description of Artificial Sequence: Synthetic oligonucleotide
aaacguguuuggaggcugc

SEQ ID NO: 2260647 - RNA, 19 nt, Artificial Sequence
  Description of Artificial Sequence: Synthetic oligonucleotide
agauccaaagcaaaccaug

SEQ ID NO: 2260648 - RNA, 19 nt, Artificial Sequence
  Description of Artificial Sequence: Synthetic oligonucleotide
gaauacaguucccuuggga

SEQ ID NO: 2260649 - RNA, 19 nt, Artificial Sequence
  Description of Artificial Sequence: Synthetic oligonucleotide
  modified_base (18)..(18): a, c, u, g, unknown or other
uccaaacuucccaggacnc

SEQ ID NO: 2260650 - RNA, 19 nt, Artificial Sequence
  Description of Artificial Sequence: Synthetic oligonucleotide
ugaugccuguagcaaagga

SEQ ID NO: 2260651 - RNA, 19 nt, Artificial Sequence
  Description of Artificial Sequence: Synthetic oligonucleotide
aagcgagcuauugggaaag

SEQ ID NO: 2260652 - RNA, 19 nt, Artificial Sequence
  Description of Artificial Sequence: Synthetic oligonucleotide
cuugauggccugauuugag

SEQ ID NO: 2260653 - RNA, 19 nt, Artificial Sequence
  Description of Artificial Sequence: Synthetic oligonucleotide
uugcaugacaagcaaucau

SEQ ID NO: 2260654 - RNA, 19 nt, Artificial Sequence
  Description of Artificial Sequence: Synthetic oligonucleotide
ggcaacaacaaugggagag

SEQ ID NO: 2260655 - RNA, 19 nt, Artificial Sequence
  Description of Artificial Sequence: Synthetic oligonucleotide
uuuuaaucauguggugggc

SEQ ID NO: 2260656 - RNA, 19 nt, Artificial Sequence
  Description of Artificial Sequence: Synthetic oligonucleotide
ucauguggugggcaauagc

SEQ ID NO: 2260657 - RNA, 19 nt, Artificial Sequence
  Description of Artificial Sequence: Synthetic oligonucleotide
uuuggcaaggaaacguguu

SEQ ID NO: 2260658 - RNA, 19 nt, Artificial Sequence
  Description of Artificial Sequence: Synthetic oligonucleotide
ccauguucuucuuaguggg

SEQ ID NO: 2260659 - RNA, 19 nt, Artificial Sequence
  Description of Artificial Sequence: Synthetic oligonucleotide
aaagcaaaccaugcuuccu

SEQ ID NO: 2260660 - RNA, 19 nt, Artificial Sequence
  Description of Artificial Sequence: Synthetic oligonucleotide
aucuucuauucuuuggaau

SEQ ID NO: 2260661 - RNA, 19 nt, Artificial Sequence
  Description of Artificial Sequence: Synthetic oligonucleotide
cucaucgagacugaaccag

SEQ ID NO: 2260662 - RNA, 19 nt, Artificial Sequence
  Description of Artificial Sequence: Synthetic oligonucleotide
agaauacaguucccuuggg

SEQ ID NO: 2260663 - RNA, 19 nt, Artificial Sequence
  Description of Artificial Sequence: Synthetic oligonucleotide
uucaccguugcaugacaag

SEQ ID NO: 2260664 - RNA, 19 nt, Artificial Sequence
  Description of Artificial Sequence: Synthetic oligonucleotide
uguccaaacuucccaggac

SEQ ID NO: 2260665 - RNA, 19 nt, Artificial Sequence
  Description of Artificial Sequence: Synthetic oligonucleotide
acacuuucaccuauaucac

SEQ ID NO: 2260666 - RNA, 19 nt, Artificial Sequence
  Description of Artificial Sequence: Synthetic oligonucleotide
uggaauccuguccaaacuu

SEQ ID NO: 2260667 - RNA, 19 nt, Artificial Sequence
  Description of Artificial Sequence: Synthetic oligonucleotide
ggacgaagaguacuguagg

SEQ ID NO: 2260668 - RNA, 19 nt, Artificial Sequence
  Description of Artificial Sequence: Synthetic oligonucleotide
aagcaaucauaagcgagcu

SEQ ID NO: 2260669 - RNA, 19 nt, Artificial Sequence
  Description of Artificial Sequence: Synthetic oligonucleotide
uuaccaacucugcucggcu

SEQ ID NO: 2260670 - RNA, 19 nt, Artificial Sequence
  Description of Artificial Sequence: Synthetic oligonucleotide
uccaaucagcacugaaucu

SEQ ID NO: 2260671 - RNA, 19 nt, Artificial Sequence
  Description of Artificial Sequence: Synthetic oligonucleotide
  modified_base (4)..(4): a, c, u, g, unknown or other
gacncccuuaccaacucug

SEQ ID NO: 2260672 - RNA, 19 nt, Artificial Sequence
  Description of Artificial Sequence: Synthetic oligonucleotide
ucugcaaccucucgccgga

SEQ ID NO: 2260673 - RNA, 19 nt, Artificial Sequence
  Description of Artificial Sequence: Synthetic oligonucleotide
gucuugauggccugauuug

SEQ ID NO: 2260674 - RNA, 19 nt, Artificial Sequence
  Description of Artificial Sequence: Synthetic oligonucleotide
uaagcgagcuauugggaaa

SEQ ID NO: 2260675 - RNA, 19 nt, Artificial Sequence
  Description of Artificial Sequence: Synthetic oligonucleotide
gccgugaacagcaaggagg

SEQ ID NO: 2260676 - RNA, 19 nt, Artificial Sequence
  Description of Artificial Sequence: Synthetic oligonucleotide
ugcaaccucucgccggacg

SEQ ID NO: 2260677 - RNA, 19 nt, Artificial Sequence
  Description of Artificial Sequence: Synthetic oligonucleotide
agagccugagccgugaaca

SEQ ID NO: 2260678 - RNA, 19 nt, Artificial Sequence
  Description of Artificial Sequence: Synthetic oligonucleotide
ugccuguagcaaaggagcc

SEQ ID NO: 2260679 - RNA, 19 nt, Artificial Sequence
  Description of Artificial Sequence: Synthetic oligonucleotide
auuuuggcaaggaaacgug

SEQ ID NO: 2260680 - RNA, 19 nt, Artificial Sequence
  Description of Artificial Sequence: Synthetic oligonucleotide
gauuuuggcaaggaaacgu

SEQ ID NO: 2260681 - RNA, 19 nt, Artificial Sequence
  Description of Artificial Sequence: Synthetic oligonucleotide
auccaaagcaaaccaugcu

SEQ ID NO: 2260682 - RNA, 19 nt, Artificial Sequence
  Description of Artificial Sequence: Synthetic oligonucleotide
gaagaaaggagcccuuucu

SEQ ID NO: 2260683 - RNA, 19 nt, Artificial Sequence
  Description of Artificial Sequence: Synthetic oligonucleotide
uggcaaggaaacguguuug

SEQ ID NO: 2260684 - RNA, 19 nt, Artificial Sequence
  Description of Artificial Sequence: Synthetic oligonucleotide
agcggagaagagccugagc

SEQ ID NO: 2260685 - RNA, 19 nt, Artificial Sequence
  Description of Artificial Sequence: Synthetic oligonucleotide
guaggcuuuccacuuccag

SEQ ID NO: 2260686 - RNA, 19 nt, Artificial Sequence
  Description of Artificial Sequence: Synthetic oligonucleotide
caucgagacugaaccaggc

SEQ ID NO: 2260687 - RNA, 19 nt, Artificial Sequence
  Description of Artificial Sequence: Synthetic oligonucleotide
ucuuucugauucaccugga

SEQ ID NO: 2260688 - RNA, 19 nt, Artificial Sequence
  Description of Artificial Sequence: Synthetic oligonucleotide
gaaacguguuuggaggcug

SEQ ID NO: 2260689 - RNA, 19 nt, Artificial Sequence
  Description of Artificial Sequence: Synthetic oligonucleotide
uguagcaaaggagccagau

SEQ ID NO: 2260690 - RNA, 19 nt, Artificial Sequence
  Description of Artificial Sequence: Synthetic oligonucleotide
uggagcauccaaucagcac

SEQ ID NO: 2260691 - RNA, 19 nt, Artificial Sequence
  Description of Artificial Sequence: Synthetic oligonucleotide
acgaagaguacuguaggcu

SEQ ID NO: 2260692 - RNA, 19 nt, Artificial Sequence
  Description of Artificial Sequence: Synthetic oligonucleotide
uuggcaaggaaacguguuu

SEQ ID NO: 2260693 - RNA, 19 nt, Artificial Sequence
  Description of Artificial Sequence: Synthetic oligonucleotide
accacgaggggccaucugu

SEQ ID NO: 2260694 - RNA, 19 nt, Artificial Sequence
  Description of Artificial Sequence: Synthetic oligonucleotide
cuuaccaacucugcucggc

SEQ ID NO: 2260695 - RNA, 19 nt, Artificial Sequence
  Description of Artificial Sequence: Synthetic oligonucleotide
accagugugaucaccacga

SEQ ID NO: 2260696 - RNA, 19 nt, Artificial Sequence
  Description of Artificial Sequence: Synthetic oligonucleotide
cauguggugggcaauagcu

SEQ ID NO: 2260697 - RNA, 19 nt, Artificial Sequence
  Description of Artificial Sequence: Synthetic oligonucleotide
  modified_base (12)..(12): a, c, u, g, unknown or other
cuucccaggacncccuuac

SEQ ID NO: 2260698 - RNA, 19 nt, Artificial Sequence
  Description of Artificial Sequence: Synthetic oligonucleotide
  modified_base (6)..(6): a, c, u, g, unknown or other
aggacncccuuaccaacuc

SEQ ID NO: 2260699 - RNA, 19 nt, Artificial Sequence
  Description of Artificial Sequence: Synthetic oligonucleotide
aacguguuuggaggcugcg

SEQ ID NO: 2260700 - RNA, 19 nt, Artificial Sequence
  Description of Artificial Sequence: Synthetic oligonucleotide
ggauaguagaugauguuac

SEQ ID NO: 2260701 - RNA, 19 nt, Artificial Sequence
  Description of Artificial Sequence: Synthetic oligonucleotide
uuggaggcugcgcuauuca

SEQ ID NO: 2260702 - RNA, 19 nt, Artificial Sequence
  Description of Artificial Sequence: Synthetic oligonucleotide
uugaugaaagagccuccaa

SEQ ID NO: 2260703 - RNA, 19 nt, Artificial Sequence
  Description of Artificial Sequence: Synthetic oligonucleotide
cuugggaaaaggagcucug

SEQ ID NO: 2260704 - RNA, 19 nt, Artificial Sequence
  Description of Artificial Sequence: Synthetic oligonucleotide
caccuauaucacagaagcc

SEQ ID NO: 2260705 - RNA, 19 nt, Artificial Sequence
  Description of Artificial Sequence: Synthetic oligonucleotide
  modified_base (3)..(3): a, c, u, g, unknown or other
acncccuuaccaacucugc

SEQ ID NO: 2260706 - RNA, 19 nt, Artificial Sequence
  Description of Artificial Sequence: Synthetic oligonucleotide
agcccuuucucaacagggc

SEQ ID NO: 2260707 - RNA, 19 nt, Artificial Sequence
  Description of Artificial Sequence: Synthetic oligonucleotide
agccuccaagcucugcuuc

SEQ ID NO: 2260708 - RNA, 19 nt, Artificial Sequence
  Description of Artificial Sequence: Synthetic oligonucleotide
caccagugugaucaccacg

SEQ ID NO: 2260709 - RNA, 19 nt, Artificial Sequence
  Description of Artificial Sequence: Synthetic oligonucleotide
ugcuuucaccguugcauga

SEQ ID NO: 2260710 - RNA, 19 nt, Artificial Sequence
  Description of Artificial Sequence: Synthetic oligonucleotide
cgagcuauugggaaagggg

SEQ ID NO: 2260711 - RNA, 19 nt, Artificial Sequence
  Description of Artificial Sequence: Synthetic oligonucleotide
uucuuagugggcugcccac

SEQ ID NO: 2260712 - RNA, 19 nt, Artificial Sequence
  Description of Artificial Sequence: Synthetic oligonucleotide
ugcgcuauucagaccuaga

SEQ ID NO: 2260713 - RNA, 19 nt, Artificial Sequence
  Description of Artificial Sequence: Synthetic oligonucleotide
cacaggucugccuuuccac

SEQ ID NO: 2260714 - RNA, 19 nt, Artificial Sequence
  Description of Artificial Sequence: Synthetic oligonucleotide
auaucacagaagccugcca

SEQ ID NO: 2260715 - RNA, 19 nt, Artificial Sequence
  Description of Artificial Sequence: Synthetic oligonucleotide
aucgagacugaaccaggca

SEQ ID NO: 2260716 - RNA, 19 nt, Artificial Sequence
  Description of Artificial Sequence: Synthetic oligonucleotide
cauaagcgagcuauuggga

SEQ ID NO: 2260717 - RNA, 19 nt, Artificial Sequence
  Description of Artificial Sequence: Synthetic oligonucleotide
ccuagauccaaagcaaacc

SEQ ID NO: 2260718 - RNA, 19 nt, Artificial Sequence
  Description of Artificial Sequence: Synthetic oligonucleotide
ccuauaucacagaagccug

SEQ ID NO: 2260719 - RNA, 19 nt, Artificial Sequence
  Description of Artificial Sequence: Synthetic oligonucleotide
cugcuuucaccguugcaug

SEQ ID NO: 2260720 - RNA, 19 nt, Artificial Sequence
  Description of Artificial Sequence: Synthetic oligonucleotide
ggagcauccaaucagcacu

SEQ ID NO: 2260721 - RNA, 19 nt, Artificial Sequence
  Description of Artificial Sequence: Synthetic oligonucleotide
aaucauguggugggcaaua

SEQ ID NO: 2260722 - RNA, 19 nt, Artificial Sequence
  Description of Artificial Sequence: Synthetic oligonucleotide
cuucugcaaccucucgccg

SEQ ID NO: 2260723 - RNA, 19 nt, Artificial Sequence
  Description of Artificial Sequence: Synthetic oligonucleotide
agaugauguuacacacucg

SEQ ID NO: 2260724 - RNA, 19 nt, Artificial Sequence
  Description of Artificial Sequence: Synthetic oligonucleotide
guagcaaaggagccagauc

SEQ ID NO: 2260725 - RNA, 19 nt, Artificial Sequence
  Description of Artificial Sequence: Synthetic oligonucleotide
aaccaugcuuccugcuggu

SEQ ID NO: 2260726 - RNA, 19 nt, Artificial Sequence
  Description of Artificial Sequence: Synthetic oligonucleotide
uguaggcuuuccacuucca

SEQ ID NO: 2260727 - RNA, 19 nt, Artificial Sequence
  Description of Artificial Sequence: Synthetic oligonucleotide
uaucgauguccugaugccu

SEQ ID NO: 2260728 - RNA, 19 nt, Artificial Sequence
  Description of Artificial Sequence: Synthetic oligonucleotide
agaguacuguaggcuuucc

SEQ ID NO: 2260729 - RNA, 19 nt, Artificial Sequence
  Description of Artificial Sequence: Synthetic oligonucleotide
aucgauguccugaugccug

SEQ ID NO: 2260730 - RNA, 19 nt, Artificial Sequence
  Description of Artificial Sequence: Synthetic oligonucleotide
uugcugccggccauguucu

SEQ ID NO: 2260731 - RNA, 19 nt, Artificial Sequence
  Description of Artificial Sequence: Synthetic oligonucleotide
ggccauguucuucuuagug

SEQ ID NO: 2260732 - RNA, 19 nt, Artificial Sequence
  Description of Artificial Sequence: Synthetic oligonucleotide
caucuguggauaguagaug

SEQ ID NO: 2260733 - RNA, 19 nt, Artificial Sequence
  Description of Artificial Sequence: Synthetic oligonucleotide
gggacgaagaguacuguag

SEQ ID NO: 2260734 - RNA, 19 nt, Artificial Sequence
  Description of Artificial Sequence: Synthetic oligonucleotide
ggcaauagcuaacuuggga

SEQ ID NO: 2260735 - RNA, 19 nt, Artificial Sequence
  Description of Artificial Sequence: Synthetic oligonucleotide
gagccugagccgugaacag

SEQ ID NO: 2260736 - RNA, 19 nt, Artificial Sequence
  Description of Artificial Sequence: Synthetic oligonucleotide
cauggaguucagcugaaaa

SEQ ID NO: 2260737 - RNA, 19 nt, Artificial Sequence
  Description of Artificial Sequence: Synthetic oligonucleotide
cccuuaccaacucugcucg

SEQ ID NO: 2260738 - RNA, 19 nt, Artificial Sequence
  Description of Artificial Sequence: Synthetic oligonucleotide
caaguaggccaccgggccc

SEQ ID NO: 2260739 - RNA, 19 nt, Artificial Sequence
  Description of Artificial Sequence: Synthetic oligonucleotide
gugugaucaccacgagggg

SEQ ID NO: 2260740 - RNA, 19 nt, Artificial Sequence
  Description of Artificial Sequence: Synthetic oligonucleotide
ugcugggacgaagaguacu

SEQ ID NO: 2260741 - RNA, 19 nt, Artificial Sequence
  Description of Artificial Sequence: Synthetic oligonucleotide
ucuucuuagugggcugccc

SEQ ID NO: 2260742 - RNA, 19 nt, Artificial Sequence
  Description of Artificial Sequence: Synthetic oligonucleotide
gagcauccaaucagcacug

SEQ ID NO: 2260743 - RNA, 19 nt, Artificial Sequence
  Description of Artificial Sequence: Synthetic oligonucleotide
agccugagccgugaacagc

SEQ ID NO: 2260744 - RNA, 19 nt, Artificial Sequence
  Description of Artificial Sequence: Synthetic oligonucleotide
ugcucggcuaagccgggga

SEQ ID NO: 2260745 - RNA, 19 nt, Artificial Sequence
  Description of Artificial Sequence: Synthetic oligonucleotide
accguugcaugacaagcaa

SEQ ID NO: 2260746 - RNA, 19 nt, Artificial Sequence
  Description of Artificial Sequence: Synthetic oligonucleotide
ucgccggacggccucuucc

SEQ ID NO: 2260747 - RNA, 19 nt, Artificial Sequence
  Description of Artificial Sequence: Synthetic oligonucleotide
acuggugaccaucgugcca

SEQ ID NO: 2260748 - RNA, 19 nt, Artificial Sequence
  Description of Artificial Sequence: Synthetic oligonucleotide
ugucugcccugcuuucacc

SEQ ID NO: 2260749 - RNA, 19 nt, Artificial Sequence
  Description of Artificial Sequence: Synthetic oligonucleotide
ugggacgaagaguacugua

SEQ ID NO: 2260750 - RNA, 19 nt, Artificial Sequence
  Description of Artificial Sequence: Synthetic oligonucleotide
gcaaguaggccaccgggcc

SEQ ID NO: 2260751 - RNA, 19 nt, Artificial Sequence
  Description of Artificial Sequence: Synthetic oligonucleotide
ucaccagugugaucaccac

SEQ ID NO: 2260752 - RNA, 19 nt, Artificial Sequence
  Description of Artificial Sequence: Synthetic oligonucleotide
accaacucugcucggcuaa

SEQ ID NO: 2260753 - RNA, 19 nt, Artificial Sequence
  Description of Artificial Sequence: Synthetic oligonucleotide
ggaaaggggccagugcugg

SEQ ID NO: 2260754 - RNA, 19 nt, Artificial Sequence
  Description of Artificial Sequence: Synthetic oligonucleotide
cuucuuagugggcugccca

SEQ ID NO: 2260755 - RNA, 19 nt, Artificial Sequence
  Description of Artificial Sequence: Synthetic oligonucleotide
cacgaggggccaucugugg

SEQ ID NO: 2260756 - RNA, 19 nt, Artificial Sequence
  Description of Artificial Sequence: Synthetic oligonucleotide
ggagcccuuucucaacagg

SEQ ID NO: 2260757 - RNA, 19 nt, Artificial Sequence
  Description of Artificial Sequence: Synthetic oligonucleotide
uguuuggaggcugcgcuau

SEQ ID NO: 2260758 - RNA, 19 nt, Artificial Sequence
  Description of Artificial Sequence: Synthetic oligonucleotide
guugcaugacaagcaauca

SEQ ID NO: 2260759 - RNA, 19 nt, Artificial Sequence
  Description of Artificial Sequence: Synthetic oligonucleotide
caccucaucgagacugaac

SEQ ID NO: 2260760 - RNA, 19 nt, Artificial Sequence
  Description of Artificial Sequence: Synthetic oligonucleotide
aguucccuugggaaaagga

SEQ ID NO: 2260761 - RNA, 19 nt, Artificial Sequence
  Description of Artificial Sequence: Synthetic oligonucleotide
ucggcuaagccggggacca

SEQ ID NO: 2260762 - RNA, 19 nt, Artificial Sequence
  Description of Artificial Sequence: Synthetic oligonucleotide
gaacagcaaggaggaaucc

SEQ ID NO: 2260763 - RNA, 19 nt, Artificial Sequence
  Description of Artificial Sequence: Synthetic oligonucleotide
  modified_base (11)..(11): a, c, u, g, unknown or other
uucccaggacncccuuacc

SEQ ID NO: 2260764 - RNA, 19 nt, Artificial Sequence
  Description of Artificial Sequence: Synthetic oligonucleotide
cgggagggagucuugaugg

SEQ ID NO: 2260765 - RNA, 19 nt, Artificial Sequence
  Description of Artificial Sequence: Synthetic oligonucleotide
agggcagaauacaguuccc

SEQ ID NO: 2260766 - RNA, 19 nt, Artificial Sequence
  Description of Artificial Sequence: Synthetic oligonucleotide
cacacucgcuugcugccgg

SEQ ID NO: 2260767 - RNA, 19 nt, Artificial Sequence
  Description of Artificial Sequence: Synthetic oligonucleotide
auagcuaacuugggaggca

SEQ ID NO: 2260768 - RNA, 19 nt, Artificial Sequence
  Description of Artificial Sequence: Synthetic oligonucleotide
gcaaccucucgccggacgg

SEQ ID NO: 2260769 - RNA, 19 nt, Artificial Sequence
  Description of Artificial Sequence: Synthetic oligonucleotide
ccugaugccuguagcaaag

SEQ ID NO: 2260770 - RNA, 19 nt, Artificial Sequence
  Description of Artificial Sequence: Synthetic oligonucleotide
uucuucuuagugggcugcc

SEQ ID NO: 2260771 - RNA, 19 nt, Artificial Sequence
  Description of Artificial Sequence: Synthetic oligonucleotide
aucauguggugggcaauag

SEQ ID NO: 2260772 - RNA, 19 nt, Artificial Sequence
  Description of Artificial Sequence: Synthetic oligonucleotide
cuauucagaccuagaucca

SEQ ID NO: 2260773 - RNA, 19 nt, Artificial Sequence
  Description of Artificial Sequence: Synthetic oligonucleotide
ggaccagguaucgaugucc

SEQ ID NO: 2260774 - RNA, 19 nt, Artificial Sequence
  Description of Artificial Sequence: Synthetic oligonucleotide
gauuugagcuaagcagcca

SEQ ID NO: 2260775 - RNA, 19 nt, Artificial Sequence
  Description of Artificial Sequence: Synthetic oligonucleotide
ucgauguccugaugccugu

SEQ ID NO: 2260776 - RNA, 19 nt, Artificial Sequence
  Description of Artificial Sequence: Synthetic oligonucleotide
aggagcccuuucucaacag

SEQ ID NO: 2260777 - RNA, 19 nt, Artificial Sequence
  Description of Artificial Sequence: Synthetic oligonucleotide
cuuucaccuauaucacaga

SEQ ID NO: 2260778 - RNA, 19 nt, Artificial Sequence
  Description of Artificial Sequence: Synthetic oligonucleotide
ucuuagugggcugcccacu

SEQ ID NO: 2260779 - RNA, 19 nt, Artificial Sequence
  Description of Artificial Sequence: Synthetic oligonucleotide
accgggccccaucugucac

SEQ ID NO: 2260780 - RNA, 19 nt, Artificial Sequence
  Description of Artificial Sequence: Synthetic oligonucleotide
cagcaaggaggaauccaug

SEQ ID NO: 2260781 - RNA, 19 nt, Artificial Sequence
  Description of Artificial Sequence: Synthetic oligonucleotide
  modified_base (15)..(15): a, c, u, g, unknown or other
aaacuucccaggacncccu

SEQ ID NO: 2260782 - RNA, 19 nt, Artificial Sequence
  Description of Artificial Sequence: Synthetic oligonucleotide
ugucaccagugugaucacc

SEQ ID NO: 2260783 - RNA, 19 nt, Artificial Sequence
  Description of Artificial Sequence: Synthetic oligonucleotide
aucaccacgaggggccauc

SEQ ID NO: 2260784 - RNA, 19 nt, Artificial Sequence
  Description of Artificial Sequence: Synthetic oligonucleotide
cauccaaucagcacugaau

SEQ ID NO: 2260785 - RNA, 19 nt, Artificial Sequence
  Description of Artificial Sequence: Synthetic oligonucleotide
aggcugcgcuauucagacc

SEQ ID NO: 2260786 - RNA, 19 nt, Artificial Sequence
  Description of Artificial Sequence: Synthetic oligonucleotide
caccguugcaugacaagca

SEQ ID NO: 2260787 - RNA, 19 nt, Artificial Sequence
  Description of Artificial Sequence: Synthetic oligonucleotide
gcaaucauaagcgagcuau

SEQ ID NO: 2260788 - RNA, 19 nt, Artificial Sequence
  Description of Artificial Sequence: Synthetic oligonucleotide
uagcuaacuugggaggcaa

SEQ ID NO: 2260789 - RNA, 19 nt, Artificial Sequence
  Description of Artificial Sequence: Synthetic oligonucleotide
uaaucauguggugggcaau

SEQ ID NO: 2260790 - RNA, 19 nt, Artificial Sequence
  Description of Artificial Sequence: Synthetic oligonucleotide
ccggccauguucuucuuag

SEQ ID NO: 2260791 - RNA, 19 nt, Artificial Sequence
  Description of Artificial Sequence: Synthetic oligonucleotide
auggccugauuugagcuaa

SEQ ID NO: 2260792 - RNA, 19 nt, Artificial Sequence
  Description of Artificial Sequence: Synthetic oligonucleotide
ccauuucagauuuuggcaa

SEQ ID NO: 2260793 - RNA, 19 nt, Artificial Sequence
  Description of Artificial Sequence: Synthetic oligonucleotide
cuuucaccguugcaugaca

SEQ ID NO: 2260794 - RNA, 19 nt, Artificial Sequence
  Description of Artificial Sequence: Synthetic oligonucleotide
agggagucuugauggccug

SEQ ID NO: 2260795 - RNA, 19 nt, Artificial Sequence
  Description of Artificial Sequence: Synthetic oligonucleotide
gcucuggcgggcaaguagg

SEQ ID NO: 2260796 - RNA, 19 nt, Artificial Sequence
  Description of Artificial Sequence: Synthetic oligonucleotide
gccugauuugagcuaagca

SEQ ID NO: 2260797 - RNA, 19 nt, Artificial Sequence
  Description of Artificial Sequence: Synthetic oligonucleotide
aggucugccuuuccaccca

SEQ ID NO: 2260798 - RNA, 19 nt, Artificial Sequence
  Description of Artificial Sequence: Synthetic oligonucleotide
uuccacacuuucaccuaua

SEQ ID NO: 2260799 - RNA, 19 nt, Artificial Sequence
  Description of Artificial Sequence: Synthetic oligonucleotide
aucucugucugcccugcuu

SEQ ID NO: 2260800 - RNA, 19 nt, Artificial Sequence
  Description of Artificial Sequence: Synthetic oligonucleotide
gaaccaggcagcugcuucu

SEQ ID NO: 2260801 - RNA, 19 nt, Artificial Sequence
  Description of Artificial Sequence: Synthetic oligonucleotide
cucggcuaagccggggacc

SEQ ID NO: 2260802 - RNA, 19 nt, Artificial Sequence
  Description of Artificial Sequence: Synthetic oligonucleotide
gaccuagauccaaagcaaa

SEQ ID NO: 2260803 - RNA, 19 nt, Artificial Sequence
  Description of Artificial Sequence: Synthetic oligonucleotide
agguaucgauguccugaug

SEQ ID NO: 2260804 - RNA, 19 nt, Artificial Sequence
  Description of Artificial Sequence: Synthetic oligonucleotide
ggcugcgcuauucagaccu

SEQ ID NO: 2260805 - RNA, 19 nt, Artificial Sequence
  Description of Artificial Sequence: Synthetic oligonucleotide
caacaacaaugggagagca

SEQ ID NO: 2260806 - RNA, 19 nt, Artificial Sequence
  Description of Artificial Sequence: Synthetic oligonucleotide
uuagugggcugcccacuuu

SEQ ID NO: 2260807 - RNA, 19 nt, Artificial Sequence
  Description of Artificial Sequence: Synthetic oligonucleotide
gcaaggaggaauccaugga

SEQ ID NO: 2260808 - RNA, 19 nt, Artificial Sequence
  Description of Artificial Sequence: Synthetic oligonucleotide
acucgcuugcugccggcca

SEQ ID NO: 2260809 - RNA, 19 nt, Artificial Sequence
  Description of Artificial Sequence: Synthetic oligonucleotide
cuaacuugggaggcaacaa

SEQ ID NO: 2260810 - RNA, 19 nt, Artificial Sequence
  Description of Artificial Sequence: Synthetic oligonucleotide
uggccugauuugagcuaag

SEQ ID NO: 2260811 - RNA, 19 nt, Artificial Sequence
  Description of Artificial Sequence: Synthetic oligonucleotide
uaccaacucugcucggcua

SEQ ID NO: 2260812 - RNA, 19 nt, Artificial Sequence
  Description of Artificial Sequence: Synthetic oligonucleotide
gagccgugaacagcaagga

SEQ ID NO: 2260813 - RNA, 19 nt, Artificial Sequence
  Description of Artificial Sequence: Synthetic oligonucleotide
aggggccaucuguggauag

SEQ ID NO: 2260814 - RNA, 19 nt, Artificial Sequence
  Description of Artificial Sequence: Synthetic oligonucleotide
uauugggaaaggggccagu

SEQ ID NO: 2260815 - RNA, 19 nt, Artificial Sequence
  Description of Artificial Sequence: Synthetic oligonucleotide
agcuaacuugggaggcaac

SEQ ID NO: 2260816 - RNA, 19 nt, Artificial Sequence
  Description of Artificial Sequence: Synthetic oligonucleotide
acaguucccuugggaaaag

SEQ ID NO: 2260817 - RNA, 19 nt, Artificial Sequence
  Description of Artificial Sequence: Synthetic oligonucleotide
ggaauccuguccaaacuuc

SEQ ID NO: 2260818 - RNA, 19 nt, Artificial Sequence
  Description of Artificial Sequence: Synthetic oligonucleotide
gcugggacgaagaguacug

SEQ ID NO: 2260819 - RNA, 19 nt, Artificial Sequence
  Description of Artificial Sequence: Synthetic oligonucleotide
accagguaucgauguccug

SEQ ID NO: 2260820 - RNA, 19 nt, Artificial Sequence
  Description of Artificial Sequence: Synthetic oligonucleotide
  modified_base (7)..(7): a, c, u, g, unknown or other
caggacncccuuaccaacu

SEQ ID NO: 2260821 - RNA, 19 nt, Artificial Sequence
  Description of Artificial Sequence: Synthetic oligonucleotide
aggcaacaacaaugggaga

SEQ ID NO: 2260822 - RNA, 19 nt, Artificial Sequence
  Description of Artificial Sequence: Synthetic oligonucleotide
cccuuucucaacagggcug

SEQ ID NO: 2260823 - RNA, 19 nt, Artificial Sequence
  Description of Artificial Sequence: Synthetic oligonucleotide
gcuaacuugggaggcaaca

SEQ ID NO: 2260824 - RNA, 19 nt, Artificial Sequence
  Description of Artificial Sequence: Synthetic oligonucleotide
agcgagcuauugggaaagg

SEQ ID NO: 2260825 - RNA, 19 nt, Artificial Sequence
  Description of Artificial Sequence: Synthetic oligonucleotide
gcgagcuauugggaaaggg

SEQ ID NO: 2260826 - RNA, 19 nt, Artificial Sequence
  Description of Artificial Sequence: Synthetic oligonucleotide
ggcaaguaggccaccgggc

SEQ ID NO: 2260827 - RNA, 19 nt, Artificial Sequence
  Description of Artificial Sequence: Synthetic oligonucleotide
cugcgcuauucagaccuag

SEQ ID NO: 2260828 - RNA, 19 nt, Artificial Sequence
  Description of Artificial Sequence: Synthetic oligonucleotide
ucgugccagcggagaagag

SEQ ID NO: 2260829 - RNA, 19 nt, Artificial Sequence
  Description of Artificial Sequence: Synthetic oligonucleotide
gcuugaugaaagagccucc

SEQ ID NO: 2260830 - RNA, 19 nt, Artificial Sequence
  Description of Artificial Sequence: Synthetic oligonucleotide
guagaugauguuacacacu

SEQ ID NO: 2260831 - RNA, 19 nt, Artificial Sequence
  Description of Artificial Sequence: Synthetic oligonucleotide
uaggccaccgggccccauc

SEQ ID NO: 2260832 - RNA, 19 nt, Artificial Sequence
  Description of Artificial Sequence: Synthetic oligonucleotide
ggcuaagccggggaccagg

SEQ ID NO: 2260833 - RNA, 19 nt, Artificial Sequence
  Description of Artificial Sequence: Synthetic oligonucleotide
agccugccagggcagaaua

SEQ ID NO: 2260834 - RNA, 19 nt, Artificial Sequence
  Description of Artificial Sequence: Synthetic oligonucleotide
ugaucaccacgaggggcca

SEQ ID NO: 2260835 - RNA, 19 nt, Artificial Sequence
  Description of Artificial Sequence: Synthetic oligonucleotide
gagacugaaccaggcagcu

SEQ ID NO: 2260836 - RNA, 19 nt, Artificial Sequence
  Description of Artificial Sequence: Synthetic oligonucleotide
cuuuggaauccuguccaaa

SEQ ID NO: 2260837 - RNA, 19 nt, Artificial Sequence
  Description of Artificial Sequence: Synthetic oligonucleotide
ccagguaucgauguccuga

SEQ ID NO: 2260838 - RNA, 19 nt, Artificial Sequence
  Description of Artificial Sequence: Synthetic oligonucleotide
  modified_base (8)..(8): a, c, u, g, unknown or other
ccaggacncccuuaccaac

SEQ ID NO: 2260839 - RNA, 19 nt, Artificial Sequence
  Description of Artificial Sequence: Synthetic oligonucleotide
ccgugaacagcaaggagga

SEQ ID NO: 2260840 - RNA, 19 nt, Artificial Sequence
  Description of Artificial Sequence: Synthetic oligonucleotide
aggccaccgggccccaucu

SEQ ID NO: 2260841 - RNA, 19 nt, Artificial Sequence
  Description of Artificial Sequence: Synthetic oligonucleotide
gcaugacaagcaaucauaa

SEQ ID NO: 2260842 - RNA, 19 nt, Artificial Sequence
  Description of Artificial Sequence: Synthetic oligonucleotide
aggagcucuggcgggcaag

SEQ ID NO: 2260843 - RNA, 19 nt, Artificial Sequence
  Description of Artificial Sequence: Synthetic oligonucleotide
agacugaaccaggcagcug

SEQ ID NO: 2260844 - RNA, 19 nt, Artificial Sequence
  Description of Artificial Sequence: Synthetic oligonucleotide
guggugggcaauagcuaac

SEQ ID NO: 2260845 - RNA, 19 nt, Artificial Sequence
  Description of Artificial Sequence: Synthetic oligonucleotide
ugccagcggagaagagccu

SEQ ID NO: 2260846 - RNA, 19 nt, Artificial Sequence
  Description of Artificial Sequence: Synthetic oligonucleotide
gaccaucgugccagcggag

SEQ ID NO: 2260847 - RNA, 19 nt, Artificial Sequence
  Description of Artificial Sequence: Synthetic oligonucleotide
  modified_base (17)..(17): a, c, u, g, unknown or other
ccaaacuucccaggacncc

SEQ ID NO: 2260848 - RNA, 19 nt, Artificial Sequence
  Description of Artificial Sequence: Synthetic oligonucleotide
caaccucucgccggacggc

SEQ ID NO: 2260849 - RNA, 19 nt, Artificial Sequence
  Description of Artificial Sequence: Synthetic oligonucleotide
gggcaauagcuaacuuggg

SEQ ID NO: 2260850 - RNA, 19 nt, Artificial Sequence
  Description of Artificial Sequence: Synthetic oligonucleotide
agccggggaccagguaucg

SEQ ID NO: 2260851 - RNA, 19 nt, Artificial Sequence
  Description of Artificial Sequence: Synthetic oligonucleotide
guggauaguagaugauguu

SEQ ID NO: 2260852 - RNA, 19 nt, Artificial Sequence
  Description of Artificial Sequence: Synthetic oligonucleotide
gaagaguacuguaggcuuu

SEQ ID NO: 2260853 - RNA, 19 nt, Artificial Sequence
  Description of Artificial Sequence: Synthetic oligonucleotide
ggaagcacaggucugccuu

SEQ ID NO: 2260854 - RNA, 19 nt, Artificial Sequence
  Description of Artificial Sequence: Synthetic oligonucleotide
gcuuucaccguugcaugac

SEQ ID NO: 2260855 - RNA, 19 nt, Artificial Sequence
  Description of Artificial Sequence: Synthetic oligonucleotide
gaccagguaucgauguccu

SEQ ID NO: 2260856 - RNA, 19 nt, Artificial Sequence
  Description of Artificial Sequence: Synthetic oligonucleotide
auguggugggcaauagcua

SEQ ID NO: 2260857 - RNA, 19 nt, Artificial Sequence
  Description of Artificial Sequence: Synthetic oligonucleotide
aaccaggcagcugcuucua

SEQ ID NO: 2260858 - RNA, 19 nt, Artificial Sequence
  Description of Artificial Sequence: Synthetic oligonucleotide
ggaggcugcgcuauucaga

SEQ ID NO: 2260859 - RNA, 19 nt, Artificial Sequence
  Description of Artificial Sequence: Synthetic oligonucleotide
cagcggagaagagccugag

SEQ ID NO: 2260860 - RNA, 19 nt, Artificial Sequence
  Description of Artificial Sequence: Synthetic oligonucleotide
gccugagccgugaacagca

SEQ ID NO: 2260861 - RNA, 19 nt, Artificial Sequence
  Description of Artificial Sequence: Synthetic oligonucleotide
ggccugauuugagcuaagc

SEQ ID NO: 2260862 - RNA, 19 nt, Artificial Sequence
  Description of Artificial Sequence: Synthetic oligonucleotide
ugcccgggagggagucuug

SEQ ID NO: 2260863 - RNA, 19 nt, Artificial Sequence
  Description of Artificial Sequence: Synthetic oligonucleotide
ccgggagggagucuugaug

SEQ ID NO: 2260864 - RNA, 19 nt, Artificial Sequence
  Description of Artificial Sequence: Synthetic oligonucleotide
ggccaucuguggauaguag

SEQ ID NO: 2260865 - RNA, 19 nt, Artificial Sequence
  Description of Artificial Sequence: Synthetic oligonucleotide
guguuuggaggcugcgcua

SEQ ID NO: 2260866 - RNA, 19 nt, Artificial Sequence
  Description of Artificial Sequence: Synthetic oligonucleotide
cacucgcuugcugccggcc

SEQ ID NO: 2260867 - RNA, 19 nt, Artificial Sequence
  Description of Artificial Sequence: Synthetic oligonucleotide
ccacacuuucaccuauauc

SEQ ID NO: 2260868 - RNA, 19 nt, Artificial Sequence
  Description of Artificial Sequence: Synthetic oligonucleotide
ccagggcagaauacaguuc

SEQ ID NO: 2260869 - RNA, 19 nt, Artificial Sequence
  Description of Artificial Sequence: Synthetic oligonucleotide
cuuucugauucaccuggau

SEQ ID NO: 2260870 - RNA, 19 nt, Artificial Sequence
  Description of Artificial Sequence: Synthetic oligonucleotide
gcacaggucugccuuucca

SEQ ID NO: 2260871 - RNA, 19 nt, Artificial Sequence
  Description of Artificial Sequence: Synthetic oligonucleotide
ccuuaccaacucugcucgg

SEQ ID NO: 2260872 - RNA, 19 nt, Artificial Sequence
  Description of Artificial Sequence: Synthetic oligonucleotide
cgugccagcggagaagagc

SEQ ID NO: 2260873 - RNA, 19 nt, Artificial Sequence
  Description of Artificial Sequence: Synthetic oligonucleotide
ccacgaggggccaucugug

SEQ ID NO: 2260874 - RNA, 19 nt, Artificial Sequence
  Description of Artificial Sequence: Synthetic oligonucleotide
  modified_base (2)..(2): a, c, u, g, unknown or other
cncccuuaccaacucugcu

SEQ ID NO: 2260875 - RNA, 19 nt, Artificial Sequence
  Description of Artificial Sequence: Synthetic oligonucleotide
gaagccugccagggcagaa

SEQ ID NO: 2260876 - RNA, 19 nt, Artificial Sequence
  Description of Artificial Sequence: Synthetic oligonucleotide
agcauccaaucagcacuga

SEQ ID NO: 2260877 - RNA, 19 nt, Artificial Sequence
  Description of Artificial Sequence: Synthetic oligonucleotide
cuguagcaaaggagccaga

SEQ ID NO: 2260878 - RNA, 19 nt, Artificial Sequence
  Description of Artificial Sequence: Synthetic oligonucleotide
agccugccucagcuugaug

SEQ ID NO: 2260879 - RNA, 19 nt, Artificial Sequence
  Description of Artificial Sequence: Synthetic oligonucleotide
cagguaucgauguccugau

SEQ ID NO: 2260880 - RNA, 19 nt, Artificial Sequence
  Description of Artificial Sequence: Synthetic oligonucleotide
gggaccagguaucgauguc

SEQ ID NO: 2260881 - RNA, 19 nt, Artificial Sequence
  Description of Artificial Sequence: Synthetic oligonucleotide
gccccaucugucaccagug

SEQ ID NO: 2260882 - RNA, 19 nt, Artificial Sequence
  Description of Artificial Sequence: Synthetic oligonucleotide
caaucauaagcgagcuauu

SEQ ID NO: 2260883 - RNA, 19 nt, Artificial Sequence
  Description of Artificial Sequence: Synthetic oligonucleotide
ggcagaauacaguucccuu

SEQ ID NO: 2260884 - RNA, 19 nt, Artificial Sequence
  Description of Artificial Sequence: Synthetic oligonucleotide
gcucggcuaagccggggac

SEQ ID NO: 2260885 - RNA, 19 nt, Artificial Sequence
  Description of Artificial Sequence: Synthetic oligonucleotide
gcgcuauucagaccuagau

SEQ ID NO: 2260886 - RNA, 19 nt, Artificial Sequence
  Description of Artificial Sequence: Synthetic oligonucleotide
cugcucggcuaagccgggg

SEQ ID NO: 2260887 - RNA, 19 nt, Artificial Sequence
  Description of Artificial Sequence: Synthetic oligonucleotide
gcgggcaaguaggccaccg

SEQ ID NO: 2260888 - RNA, 19 nt, Artificial Sequence
  Description of Artificial Sequence: Synthetic oligonucleotide
caccacgaggggccaucug

SEQ ID NO: 2260889 - RNA, 19 nt, Artificial Sequence
  Description of Artificial Sequence: Synthetic oligonucleotide
ccucaucgagacugaacca

SEQ ID NO: 2260890 - RNA, 19 nt, Artificial Sequence
  Description of Artificial Sequence: Synthetic oligonucleotide
  modified_base (13)..(13): a, c, u, g, unknown or other
acuucccaggacncccuua

SEQ ID NO: 2260891 - RNA, 19 nt, Artificial Sequence
  Description of Artificial Sequence: Synthetic oligonucleotide
cggacggccucuuccacac

SEQ ID NO: 2260892 - RNA, 19 nt, Artificial Sequence
  Description of Artificial Sequence: Synthetic oligonucleotide
caccgggccccaucuguca

SEQ ID NO: 2260893 - RNA, 19 nt, Artificial Sequence
  Description of Artificial Sequence: Synthetic oligonucleotide
  modified_base (9)..(9): a, c, u, g, unknown or other
cccaggacncccuuaccaa

SEQ ID NO: 2260894 - RNA, 19 nt, Artificial Sequence
  Description of Artificial Sequence: Synthetic oligonucleotide
cuuagugggcugcccacuu

SEQ ID NO: 2260895 - RNA, 19 nt, Artificial Sequence
  Description of Artificial Sequence: Synthetic oligonucleotide
ggaaacguguuuggaggcu

SEQ ID NO: 2260896 - RNA, 19 nt, Artificial Sequence
  Description of Artificial Sequence: Synthetic oligonucleotide
gagucuugauggccugauu

SEQ ID NO: 2260897 - RNA, 19 nt, Artificial Sequence
  Description of Artificial Sequence: Synthetic oligonucleotide
gcaaaccaugcuuccugcu

SEQ ID NO: 2260898 - RNA, 19 nt, Artificial Sequence
  Description of Artificial Sequence: Synthetic oligonucleotide
cagugcccgggagggaguc

SEQ ID NO: 2260899 - RNA, 19 nt, Artificial Sequence
  Description of Artificial Sequence: Synthetic oligonucleotide
gggcagaauacaguucccu

SEQ ID NO: 2260900 - RNA, 19 nt, Artificial Sequence
  Description of Artificial Sequence: Synthetic oligonucleotide
ccaacucugcucggcuaag

SEQ ID NO: 2260901 - RNA, 19 nt, Artificial Sequence
  Description of Artificial Sequence: Synthetic oligonucleotide
ccuugggaaaaggagcucu

SEQ ID NO: 2260902 - RNA, 19 nt, Artificial Sequence
  Description of Artificial Sequence: Synthetic oligonucleotide
  modified_base (5)..(5): a, c, u, g, unknown or other
ggacncccuuaccaacucu

SEQ ID NO: 2260903 - RNA, 19 nt, Artificial Sequence
  Description of Artificial Sequence: Synthetic oligonucleotide
cuaagccggggaccaggua

SEQ ID NO: 2260904 - RNA, 19 nt, Artificial Sequence
  Description of Artificial Sequence: Synthetic oligonucleotide
cgggcaaguaggccaccgg

SEQ ID NO: 2260905 - RNA, 19 nt, Artificial Sequence
  Description of Artificial Sequence: Synthetic oligonucleotide
gcugccggccauguucuuc

SEQ ID NO: 2260906 - RNA, 19 nt, Artificial Sequence
  Description of Artificial Sequence: Synthetic oligonucleotide
gugcugggacgaagaguac

SEQ ID NO: 2260907 - RNA, 19 nt, Artificial Sequence
  Description of Artificial Sequence: Synthetic oligonucleotide
gggccaucuguggauagua

SEQ ID NO: 2260908 - RNA, 19 nt, Artificial Sequence
  Description of Artificial Sequence: Synthetic oligonucleotide
accaugcuuccugcugguu

SEQ ID NO: 2260909 - RNA, 19 nt, Artificial Sequence
  Description of Artificial Sequence: Synthetic oligonucleotide
ccgggccccaucugucacc

SEQ ID NO: 2260910 - RNA, 19 nt, Artificial Sequence
  Description of Artificial Sequence: Synthetic oligonucleotide
cggggaccagguaucgaug

SEQ ID NO: 2260911 - RNA, 19 nt, Artificial Sequence
  Description of Artificial Sequence: Synthetic oligonucleotide
cgaagaguacuguaggcuu

SEQ ID NO: 2260912 - RNA, 19 nt, Artificial Sequence
  Description of Artificial Sequence: Synthetic oligonucleotide
ccaccgggccccaucuguc

SEQ ID NO: 2260913 - RNA, 19 nt, Artificial Sequence
  Description of Artificial Sequence: Synthetic oligonucleotide
acggccucuuccacacuuu

SEQ ID NO: 2260914 - RNA, 19 nt, Artificial Sequence
  Description of Artificial Sequence: Synthetic oligonucleotide
cugggacgaagaguacugu

SEQ ID NO: 2260915 - RNA, 19 nt, Artificial Sequence
  Description of Artificial Sequence: Synthetic oligonucleotide
cugcaaccucucgccggac

SEQ ID NO: 2260916 - RNA, 19 nt, Artificial Sequence
  Description of Artificial Sequence: Synthetic oligonucleotide
gggagucuugauggccuga

SEQ ID NO: 2260917 - RNA, 19 nt, Artificial Sequence
  Description of Artificial Sequence: Synthetic oligonucleotide
aguaggccaccgggcccca

SEQ ID NO: 2260918 - RNA, 19 nt, Artificial Sequence
  Description of Artificial Sequence: Synthetic oligonucleotide
ggagucuugauggccugau

SEQ ID NO: 2260919 - RNA, 19 nt, Artificial Sequence
  Description of Artificial Sequence: Synthetic oligonucleotide
ugcugccggccauguucuu

SEQ ID NO: 2260920 - RNA, 19 nt, Artificial Sequence
  Description of Artificial Sequence: Synthetic oligonucleotide
gccaccgggccccaucugu

SEQ ID NO: 2260921 - RNA, 19 nt, Artificial Sequence
  Description of Artificial Sequence: Synthetic oligonucleotide
gccggacggccucuuccac

SEQ ID NO: 2260922 - RNA, 19 nt, Artificial Sequence
  Description of Artificial Sequence: Synthetic oligonucleotide
ccggacggccucuuccaca

SEQ ID NO: 2260923 - RNA, 19 nt, Artificial Sequence
  Description of Artificial Sequence: Synthetic oligonucleotide
guuuggaggcugcgcuauu

SEQ ID NO: 2260924 - RNA, 19 nt, Artificial Sequence
  Description of Artificial Sequence: Synthetic oligonucleotide
ccggggaccagguaucgau

SEQ ID NO: 2260925 - RNA, 19 nt, Artificial Sequence
  Description of Artificial Sequence: Synthetic oligonucleotide
cugcagaacuggugaccau

SEQ ID NO: 2260926 - RNA, 19 nt, Artificial Sequence
  Description of Artificial Sequence: Synthetic oligonucleotide
ucucgccggacggccucuu

SEQ ID NO: 2260927 - RNA, 19 nt, Artificial Sequence
  Description of Artificial Sequence: Synthetic oligonucleotide
ggccaccgggccccaucug

SEQ ID NO: 2260928 - RNA, 19 nt, Artificial Sequence
  Description of Artificial Sequence: Synthetic oligonucleotide
gcuaagccggggaccaggu

SEQ ID NO: 2260929 - RNA, 19 nt, Artificial Sequence
  Description of Artificial Sequence: Synthetic oligonucleotide
gaucaccacgaggggccau

SEQ ID NO: 2260930 - RNA, 19 nt, Artificial Sequence
  Description of Artificial Sequence: Synthetic oligonucleotide
gccggccauguucuucuua

SEQ ID NO: 2260931 - RNA, 19 nt, Artificial Sequence
  Description of Artificial Sequence: Synthetic oligonucleotide
gcugaagaaaggagcccuu

SEQ ID NO: 2260932 - RNA, 19 nt, Artificial Sequence
  Description of Artificial Sequence: Synthetic oligonucleotide
ggcgggcaaguaggccacc

SEQ ID NO: 2260933 - RNA, 19 nt, Artificial Sequence
  Description of Artificial Sequence: Synthetic oligonucleotide
ggggccaucuguggauagu

SEQ ID NO: 2260934 - RNA, 19 nt, Artificial Sequence
  Description of Artificial Sequence: Synthetic oligonucleotide
gcccgggagggagucuuga

SEQ ID NO: 2260935 - RNA, 19 nt, Artificial Sequence
  Description of Artificial Sequence: Synthetic oligonucleotide
ccauggaguucagcugaaa

SEQ ID NO: 2260936 - RNA, 19 nt, Artificial Sequence
  Description of Artificial Sequence: Synthetic oligonucleotide
cgccggacggccucuucca

SEQ ID NO: 2260937 - RNA, 19 nt, Artificial Sequence
  Description of Artificial Sequence: Synthetic oligonucleotide
gcugcgcuauucagaccua

SEQ ID NO: 2260938 - RNA, 19 nt, Artificial Sequence
  Description of Artificial Sequence: Synthetic oligonucleotide
gccggggaccagguaucga

SEQ ID NO: 2260939 - RNA, 19 nt, Artificial Sequence
  Description of Artificial Sequence: Synthetic oligonucleotide
cgaggggccaucuguggau

SEQ ID NO: 2260940 - RNA, 19 nt, Artificial Sequence
  Description of Artificial Sequence: Synthetic oligonucleotide
cucucgccggacggccucu

SEQ ID NO: 2260941 - RNA, 19 nt, Artificial Sequence
  Description of Artificial Sequence: Synthetic oligonucleotide
guaggccaccgggccccau

SEQ ID NO: 2260942 - RNA, 19 nt, Artificial Sequence
  Description of Artificial Sequence: Synthetic oligonucleotide
cgauguccugaugccugua

SEQ ID NO: 2260943 - RNA, 19 nt, Artificial Sequence
  Description of Artificial Sequence: Synthetic oligonucleotide
  modified_base (1)..(1): a, c, u, g, unknown or other
ncccuuaccaacucugcuc

SEQ ID NO: 2260944 - RNA, 19 nt, Artificial Sequence
  Description of Artificial Sequence: Synthetic oligonucleotide
aaugacauaacaguugagc

SEQ ID NO: 2260945 - RNA, 19 nt, Artificial Sequence
  Description of Artificial Sequence: Synthetic oligonucleotide
ugagaaaccaaucaaaucu

SEQ ID NO: 2260946 - RNA, 19 nt, Artificial Sequence
  Description of Artificial Sequence: Synthetic oligonucleotide
ucaaucaaaguaauuaagg

SEQ ID NO: 2260947 - RNA, 19 nt, Artificial Sequence
  Description of Artificial Sequence: Synthetic oligonucleotide
aaaccaaucaaaucugaac

SEQ ID NO: 2260948 - RNA, 19 nt, Artificial Sequence
  Description of Artificial Sequence: Synthetic oligonucleotide
ucuuccucgaccaucaggg

SEQ ID NO: 2260949 - RNA, 19 nt, Artificial Sequence
  Description of Artificial Sequence: Synthetic oligonucleotide
aaccaaucaaaucugaacu

SEQ ID NO: 2260950 - RNA, 19 nt, Artificial Sequence
  Description of Artificial Sequence: Synthetic oligonucleotide
cauacaaaugagaaaacgg

SEQ ID NO: 2260951 - RNA, 19 nt, Artificial Sequence
  Description of Artificial Sequence: Synthetic oligonucleotide
aaaacgguccucuucuucg

SEQ ID NO: 2260952 - RNA, 19 nt, Artificial Sequence
  Description of Artificial Sequence: Synthetic oligonucleotide
aucaaaucugaacugaggg

SEQ ID NO: 2260953 - RNA, 19 nt, Artificial Sequence
  Description of Artificial Sequence: Synthetic oligonucleotide
uauucuuagcugaugaaag

SEQ ID NO: 2260954 - RNA, 19 nt, Artificial Sequence
  Description of Artificial Sequence: Synthetic oligonucleotide
guaauuaagguauugcacc

SEQ ID NO: 2260955 - RNA, 19 nt, Artificial Sequence
  Description of Artificial Sequence: Synthetic oligonucleotide
aauauacguucauaguuuc

SEQ ID NO: 2260956 - RNA, 19 nt, Artificial Sequence
  Description of Artificial Sequence: Synthetic oligonucleotide
aauacauugccguaacuca

SEQ ID NO: 2260957 - RNA, 19 nt, Artificial Sequence
  Description of Artificial Sequence: Synthetic oligonucleotide
aaaccccugugucagaagc

SEQ ID NO: 2260958 - RNA, 19 nt, Artificial Sequence
  Description of Artificial Sequence: Synthetic oligonucleotide
uaccauaugauauucuuag

SEQ ID NO: 2260959 - RNA, 19 nt, Artificial Sequence
  Description of Artificial Sequence: Synthetic oligonucleotide
uucucauuagcuuugauaa

SEQ ID NO: 2260960 - RNA, 19 nt, Artificial Sequence
  Description of Artificial Sequence: Synthetic oligonucleotide
auuaagguauugcaccucc

SEQ ID NO: 2260961 - RNA, 19 nt, Artificial Sequence
  Description of Artificial Sequence: Synthetic oligonucleotide
ugaaauacgcaucaacagc

SEQ ID NO: 2260962 - RNA, 19 nt, Artificial Sequence
  Description of Artificial Sequence: Synthetic oligonucleotide
cuuagguucacugacacgg

SEQ ID NO: 2260963 - RNA, 19 nt, Artificial Sequence
  Description of Artificial Sequence: Synthetic oligonucleotide
  modified_base (2)..(2): a, c, u, g, unknown or other
anacccguaauuaaagaac

SEQ ID NO: 2260964 - RNA, 19 nt, Artificial Sequence
  Description of Artificial Sequence: Synthetic oligonucleotide
acaaaugagaaaacggucc

SEQ ID NO: 2260965 - RNA, 19 nt, Artificial Sequence
  Description of Artificial Sequence: Synthetic oligonucleotide
aucaauuuuaaguuguucu

SEQ ID NO: 2260966 - RNA, 19 nt, Artificial Sequence
  Description of Artificial Sequence: Synthetic oligonucleotide
auaagaccaauauacguuc

SEQ ID NO: 2260967 - RNA, 19 nt, Artificial Sequence
  Description of Artificial Sequence: Synthetic oligonucleotide
  modified_base (5)..(5): a, c, u, g, unknown or other
ugaanacccguaauuaaag

SEQ ID NO: 2260968 - RNA, 19 nt, Artificial Sequence
  Description of Artificial Sequence: Synthetic oligonucleotide
uaaagaacuacuagcuuag

SEQ ID NO: 2260969 - RNA, 19 nt, Artificial Sequence
  Description of Artificial Sequence: Synthetic oligonucleotide
auuccaauuaguaaacccc

SEQ ID NO: 2260970 - RNA, 19 nt, Artificial Sequence
  Description of Artificial Sequence: Synthetic oligonucleotide
uacguuucuguguugaagg

SEQ ID NO: 2260971 - RNA, 19 nt, Artificial Sequence
  Description of Artificial Sequence: Synthetic oligonucleotide
aaucaaaguaauuaaggua

SEQ ID NO: 2260972 - RNA, 19 nt, Artificial Sequence
  Description of Artificial Sequence: Synthetic oligonucleotide
augaaagggagcuuuguac

SEQ ID NO: 2260973 - RNA, 19 nt, Artificial Sequence
  Description of Artificial Sequence: Synthetic oligonucleotide
agaacuacuagcuuaguga

SEQ ID NO: 2260974 - RNA, 19 nt, Artificial Sequence
  Description of Artificial Sequence: Synthetic oligonucleotide
ugaaugacauaacaguuga

SEQ ID NO: 2260975 - RNA, 19 nt, Artificial Sequence
  Description of Artificial Sequence: Synthetic oligonucleotide
aauuaguaaaccccugugu

SEQ ID NO: 2260976 - RNA, 19 nt, Artificial Sequence
  Description of Artificial Sequence: Synthetic oligonucleotide
aaauccaagcuugugcagc

SEQ ID NO: 2260977 - RNA, 19 nt, Artificial Sequence
  Description of Artificial Sequence: Synthetic oligonucleotide
uuauaagaccaauauacgu

SEQ ID NO: 2260978 - RNA, 19 nt, Artificial Sequence
  Description of Artificial Sequence: Synthetic oligonucleotide
aauaucaucacgaccccac

SEQ ID NO: 2260979 - RNA, 19 nt, Artificial Sequence
  Description of Artificial Sequence: Synthetic oligonucleotide
uguacagcacaucuuauga

SEQ ID NO: 2260980 - RNA, 19 nt, Artificial Sequence
  Description of Artificial Sequence: Synthetic oligonucleotide
uuaaagaacuacuagcuua

SEQ ID NO: 2260981 - RNA, 19 nt, Artificial Sequence
  Description of Artificial Sequence: Synthetic oligonucleotide
ucuagugcuuucuugauac

SEQ ID NO: 2260982 - RNA, 19 nt, Artificial Sequence
  Description of Artificial Sequence: Synthetic oligonucleotide
  modified_base (3)..(3): a, c, u, g, unknown or other
aanacccguaauuaaagaa

SEQ ID NO: 2260983 - RNA, 19 nt, Artificial Sequence
  Description of Artificial Sequence: Synthetic oligonucleotide
gaccaauauacguucauag

SEQ ID NO: 2260984 - RNA, 19 nt, Artificial Sequence
  Description of Artificial Sequence: Synthetic oligonucleotide
uguuaguaccauaugauau

SEQ ID NO: 2260985 - RNA, 19 nt, Artificial Sequence
  Description of Artificial Sequence: Synthetic oligonucleotide
uauaagaccaauauacguu

SEQ ID NO: 2260986 - RNA, 19 nt, Artificial Sequence
  Description of Artificial Sequence: Synthetic oligonucleotide
uucaucaauuuuaaguugu

SEQ ID NO: 2260987 - RNA, 19 nt, Artificial Sequence
  Description of Artificial Sequence: Synthetic oligonucleotide
aagaacuacuagcuuagug

SEQ ID NO: 2260988 - RNA, 19 nt, Artificial Sequence
  Description of Artificial Sequence: Synthetic oligonucleotide
uauacguucauaguuucag

SEQ ID NO: 2260989 - RNA, 19 nt, Artificial Sequence
  Description of Artificial Sequence: Synthetic oligonucleotide
ugaaagggagcuuuguacc

SEQ ID NO: 2260990 - RNA, 19 nt, Artificial Sequence
  Description of Artificial Sequence: Synthetic oligonucleotide
uuucaauaucaucacgacc

SEQ ID NO: 2260991 - RNA, 19 nt, Artificial Sequence
  Description of Artificial Sequence: Synthetic oligonucleotide
  modified_base (16)..(16): a, c, u, g, unknown or other
agcacaucuuaugaanacc

SEQ ID NO: 2260992 - RNA, 19 nt, Artificial Sequence
  Description of Artificial Sequence: Synthetic oligonucleotide
uuugaaugacauaacaguu

SEQ ID NO: 2260993 - RNA, 19 nt, Artificial Sequence
  Description of Artificial Sequence: Synthetic oligonucleotide
aaacugauuaaagucucuc

SEQ ID NO: 2260994 - RNA, 19 nt, Artificial Sequence
  Description of Artificial Sequence: Synthetic oligonucleotide
auaugauauucuuagcuga

SEQ ID NO: 2260995 - RNA, 19 nt, Artificial Sequence
  Description of Artificial Sequence: Synthetic oligonucleotide
cuuagugauuauaagacca

SEQ ID NO: 2260996 - RNA, 19 nt, Artificial Sequence
  Description of Artificial Sequence: Synthetic oligonucleotide
caaucuuuguaucuagugc

SEQ ID NO: 2260997 - RNA, 19 nt, Artificial Sequence
  Description of Artificial Sequence: Synthetic oligonucleotide
  modified_base (7)..(7): a, c, u, g, unknown or other
uaugaanacccguaauuaa

SEQ ID NO: 2260998 - RNA, 19 nt, Artificial Sequence
  Description of Artificial Sequence: Synthetic oligonucleotide
ugauacuuauucuucuuug

SEQ ID NO: 2260999 - RNA, 19 nt, Artificial Sequence
  Description of Artificial Sequence: Synthetic oligonucleotide
aguucuggacuugagaaac

SEQ ID NO: 2261000 - RNA, 19 nt, Artificial Sequence
  Description of Artificial Sequence: Synthetic oligonucleotide
uagcuuagugauuauaaga

SEQ ID NO: 2261001 - RNA, 19 nt, Artificial Sequence
  Description of Artificial Sequence: Synthetic oligonucleotide
uuccuugucaaauccaagc

SEQ ID NO: 2261002 - RNA, 19 nt, Artificial Sequence
  Description of Artificial Sequence: Synthetic oligonucleotide
aucaaaguaauuaagguau

SEQ ID NO: 2261003 - RNA, 19 nt, Artificial Sequence
  Description of Artificial Sequence: Synthetic oligonucleotide
uucuuagcugaugaaaggg

SEQ ID NO: 2261004 - RNA, 19 nt, Artificial Sequence
  Description of Artificial Sequence: Synthetic oligonucleotide
ucucucuuauuccaauuag

SEQ ID NO: 2261005 - RNA, 19 nt, Artificial Sequence
  Description of Artificial Sequence: Synthetic oligonucleotide
aaucaaaucugaacugagg

SEQ ID NO: 2261006 - RNA, 19 nt, Artificial Sequence
  Description of Artificial Sequence: Synthetic oligonucleotide
cugaaauacgcaucaacag

SEQ ID NO: 2261007 - RNA, 19 nt, Artificial Sequence
  Description of Artificial Sequence: Synthetic oligonucleotide
aaugagaaaacgguccucu

SEQ ID NO: 2261008 - RNA, 19 nt, Artificial Sequence
  Description of Artificial Sequence: Synthetic oligonucleotide
agcucauugcaucuuuccc

SEQ ID NO: 2261009 - RNA, 19 nt, Artificial Sequence
  Description of Artificial Sequence: Synthetic oligonucleotide
aacugauuaaagucucucu

SEQ ID NO: 2261010 - RNA, 19 nt, Artificial Sequence
  Description of Artificial Sequence: Synthetic oligonucleotide
aaugacuuccucuggaguu

SEQ ID NO: 2261011 - RNA, 19 nt, Artificial Sequence
  Description of Artificial Sequence: Synthetic oligonucleotide
ucaucauaaacguuuuccu

SEQ ID NO: 2261012 - RNA, 19 nt, Artificial Sequence
  Description of Artificial Sequence: Synthetic oligonucleotide
gggaguuucgaauacauug

SEQ ID NO: 2261013 - RNA, 19 nt, Artificial Sequence
  Description of Artificial Sequence: Synthetic oligonucleotide
  modified_base (10)..(10): a, c, u, g, unknown or other
ucuuaugaanacccguaau

SEQ ID NO: 2261014 - RNA, 19 nt, Artificial Sequence
  Description of Artificial Sequence: Synthetic oligonucleotide
auuuucaauaucaucacga

SEQ ID NO: 2261015 - RNA, 19 nt, Artificial Sequence
  Description of Artificial Sequence: Synthetic oligonucleotide
  modified_base (14)..(14): a, c, u, g, unknown or other
cacaucuuaugaanacccg

SEQ ID NO: 2261016 - RNA, 19 nt, Artificial Sequence
  Description of Artificial Sequence: Synthetic oligonucleotide
auacguucauaguuucagc

SEQ ID NO: 2261017 - RNA, 19 nt, Artificial Sequence
  Description of Artificial Sequence: Synthetic oligonucleotide
cuuagcugaugaaagggag

SEQ ID NO: 2261018 - RNA, 19 nt, Artificial Sequence
  Description of Artificial Sequence: Synthetic oligonucleotide
aucaucacgaccccacuuc

SEQ ID NO: 2261019 - RNA, 19 nt, Artificial Sequence
  Description of Artificial Sequence: Synthetic oligonucleotide
ugauuaaagucucucuuau

SEQ ID NO: 2261020 - RNA, 19 nt, Artificial Sequence
  Description of Artificial Sequence: Synthetic oligonucleotide
agcuuuguaccuuccaauc

SEQ ID NO: 2261021 - RNA, 19 nt, Artificial Sequence
  Description of Artificial Sequence: Synthetic oligonucleotide
ucuggcuauauuuucaaua

SEQ ID NO: 2261022 - RNA, 19 nt, Artificial Sequence
  Description of Artificial Sequence: Synthetic oligonucleotide
gaaauacgcaucaacagca

SEQ ID NO: 2261023 - RNA, 19 nt, Artificial Sequence
  Description of Artificial Sequence: Synthetic oligonucleotide
aucuuucccaaacacagcu

SEQ ID NO: 2261024 - RNA, 19 nt, Artificial Sequence
  Description of Artificial Sequence: Synthetic oligonucleotide
auaaacguuuuccuuguca

SEQ ID NO: 2261025 - RNA, 19 nt, Artificial Sequence
  Description of Artificial Sequence: Synthetic oligonucleotide
uucuaguuccauauuuucu

SEQ ID NO: 2261026 - RNA, 19 nt, Artificial Sequence
  Description of Artificial Sequence: Synthetic oligonucleotide
ugacauaacaguugagcac

SEQ ID NO: 2261027 - RNA, 19 nt, Artificial Sequence
  Description of Artificial Sequence: Synthetic oligonucleotide
aagguauugcaccuccucu

SEQ ID NO: 2261028 - RNA, 19 nt, Artificial Sequence
  Description of Artificial Sequence: Synthetic oligonucleotide
uuagcugaugaaagggagc

SEQ ID NO: 2261029 - RNA, 19 nt, Artificial Sequence
  Description of Artificial Sequence: Synthetic oligonucleotide
ugaacugaggggaguuucg

SEQ ID NO: 2261030 - RNA, 19 nt, Artificial Sequence
  Description of Artificial Sequence: Synthetic oligonucleotide
ugagccauaaucuucucua

SEQ ID NO: 2261031 - RNA, 19 nt, Artificial Sequence
  Description of Artificial Sequence: Synthetic oligonucleotide
auaaacugauuaaagucuc

SEQ ID NO: 2261032 - RNA, 19 nt, Artificial Sequence
  Description of Artificial Sequence: Synthetic oligonucleotide
uacguucauaguuucagcu

SEQ ID NO: 2261033 - RNA, 19 nt, Artificial Sequence
  Description of Artificial Sequence: Synthetic oligonucleotide
acugacacggagugcuucc

SEQ ID NO: 2261034 - RNA, 19 nt, Artificial Sequence
  Description of Artificial Sequence: Synthetic oligonucleotide
ugugcugugccuugggugc

SEQ ID NO: 2261035 - RNA, 19 nt, Artificial Sequence
  Description of Artificial Sequence: Synthetic oligonucleotide
cuuuguuaguaccauauga

SEQ ID NO: 2261036 - RNA, 19 nt, Artificial Sequence
  Description of Artificial Sequence: Synthetic oligonucleotide
agcacuguacagcacaucu

SEQ ID NO: 2261037 - RNA, 19 nt, Artificial Sequence
  Description of Artificial Sequence: Synthetic oligonucleotide
ucuugauacuuauucuucu

SEQ ID NO: 2261038 - RNA, 19 nt, Artificial Sequence
  Description of Artificial Sequence: Synthetic oligonucleotide
auacaaaugagaaaacggu

SEQ ID NO: 2261039 - RNA, 19 nt, Artificial Sequence
  Description of Artificial Sequence: Synthetic oligonucleotide
gaauacauugccguaacuc

SEQ ID NO: 2261040 - RNA, 19 nt, Artificial Sequence
  Description of Artificial Sequence: Synthetic oligonucleotide
cuagcuuagugauuauaag

SEQ ID NO: 2261041 - RNA, 19 nt, Artificial Sequence
  Description of Artificial Sequence: Synthetic oligonucleotide
cucauuagcuuugauaaac

SEQ ID NO: 2261042 - RNA, 19 nt, Artificial Sequence
  Description of Artificial Sequence: Synthetic oligonucleotide
gauacuuauucuucuuuga

SEQ ID NO: 2261043 - RNA, 19 nt, Artificial Sequence
  Description of Artificial Sequence: Synthetic oligonucleotide
uuucccuuuguuaguacca

SEQ ID NO: 2261044 - RNA, 19 nt, Artificial Sequence
  Description of Artificial Sequence: Synthetic oligonucleotide
uccuugucaaauccaagcu

SEQ ID NO: 2261045 - RNA, 19 nt, Artificial Sequence
  Description of Artificial Sequence: Synthetic oligonucleotide
  modified_base (8)..(8): a, c, u, g, unknown or other
uuaugaanacccguaauua

SEQ ID NO: 2261046 - RNA, 19 nt, Artificial Sequence
  Description of Artificial Sequence: Synthetic oligonucleotide
uucccugaaauacgcauca

SEQ ID NO: 2261047 - RNA, 19 nt, Artificial Sequence
  Description of Artificial Sequence: Synthetic oligonucleotide
ucauaaacguuuuccuugu

SEQ ID NO: 2261048 - RNA, 19 nt, Artificial Sequence
  Description of Artificial Sequence: Synthetic oligonucleotide
aaacgguccucuucuucgg

SEQ ID NO: 2261049 - RNA, 19 nt, Artificial Sequence
  Description of Artificial Sequence: Synthetic oligonucleotide
cuuugaaugacauaacagu

SEQ ID NO: 2261050 - RNA, 19 nt, Artificial Sequence
  Description of Artificial Sequence: Synthetic oligonucleotide
aauccaagcuugugcagca

SEQ ID NO: 2261051 - RNA, 19 nt, Artificial Sequence
  Description of Artificial Sequence: Synthetic oligonucleotide
aacguuuuccuugucaaau

SEQ ID NO: 2261052 - RNA, 19 nt, Artificial Sequence
  Description of Artificial Sequence: Synthetic oligonucleotide
cuucaucaauuuuaaguug

SEQ ID NO: 2261053 - RNA, 19 nt, Artificial Sequence
  Description of Artificial Sequence: Synthetic oligonucleotide
auaaucuucucuauguccu

SEQ ID NO: 2261054 - RNA, 19 nt, Artificial Sequence
  Description of Artificial Sequence: Synthetic oligonucleotide
auacgcaucaacagcauag

SEQ ID NO: 2261055 - RNA, 19 nt, Artificial Sequence
  Description of Artificial Sequence: Synthetic oligonucleotide
auugccguaacucaucaua

SEQ ID NO: 2261056 - RNA, 19 nt, Artificial Sequence
  Description of Artificial Sequence: Synthetic oligonucleotide
uuuccuugucaaauccaag

SEQ ID NO: 2261057 - RNA, 19 nt, Artificial Sequence
  Description of Artificial Sequence: Synthetic oligonucleotide
  modified_base (4)..(4): a, c, u, g, unknown or other
gaanacccguaauuaaaga

SEQ ID NO: 2261058 - RNA, 19 nt, Artificial Sequence
  Description of Artificial Sequence: Synthetic oligonucleotide
acugauuaaagucucucuu

SEQ ID NO: 2261059 - RNA, 19 nt, Artificial Sequence
  Description of Artificial Sequence: Synthetic oligonucleotide
aguaccauaugauauucuu

SEQ ID NO: 2261060 - RNA, 19 nt, Artificial Sequence
  Description of Artificial Sequence: Synthetic oligonucleotide
gaguuucgaauacauugcc

SEQ ID NO: 2261061 - RNA, 19 nt, Artificial Sequence
  Description of Artificial Sequence: Synthetic oligonucleotide
guaucuagugcuuucuuga

SEQ ID NO: 2261062 - RNA, 19 nt, Artificial Sequence
  Description of Artificial Sequence: Synthetic oligonucleotide
uaugauauucuuagcugau

SEQ ID NO: 2261063 - RNA, 19 nt, Artificial Sequence
  Description of Artificial Sequence: Synthetic oligonucleotide
uacuuauucuucuuugaau

SEQ ID NO: 2261064 - RNA, 19 nt, Artificial Sequence
  Description of Artificial Sequence: Synthetic oligonucleotide
acagcugaguauucaauga

SEQ ID NO: 2261065 - RNA, 19 nt, Artificial Sequence
  Description of Artificial Sequence: Synthetic oligonucleotide
acguuucuguguugaaggc

SEQ ID NO: 2261066 - RNA, 19 nt, Artificial Sequence
  Description of Artificial Sequence: Synthetic oligonucleotide
cauaguuucagcuucuucu

SEQ ID NO: 2261067 - RNA, 19 nt, Artificial Sequence
  Description of Artificial Sequence: Synthetic oligonucleotide
uuacguuucuguguugaag

SEQ ID NO: 2261068 - RNA, 19 nt, Artificial Sequence
  Description of Artificial Sequence: Synthetic oligonucleotide
aucauuaaggggcucugcu

SEQ ID NO: 2261069 - RNA, 19 nt, Artificial Sequence
  Description of Artificial Sequence: Synthetic oligonucleotide
uucuuugaauucuugccuc

SEQ ID NO: 2261070 - RNA, 19 nt, Artificial Sequence
  Description of Artificial Sequence: Synthetic oligonucleotide
accaauauacguucauagu

SEQ ID NO: 2261071 - RNA, 19 nt, Artificial Sequence
  Description of Artificial Sequence: Synthetic oligonucleotide
acuacuagcuuagugauua

SEQ ID NO: 2261072 - RNA, 19 nt, Artificial Sequence
  Description of Artificial Sequence: Synthetic oligonucleotide
uguaccuuccaaucuuugu

SEQ ID NO: 2261073 - RNA, 19 nt, Artificial Sequence
  Description of Artificial Sequence: Synthetic oligonucleotide
gagaaaccaaucaaaucug

SEQ ID NO: 2261074 - RNA, 19 nt, Artificial Sequence
  Description of Artificial Sequence: Synthetic oligonucleotide
ugcuuagguucacugacac

SEQ ID NO: 2261075 - RNA, 19 nt, Artificial Sequence
  Description of Artificial Sequence: Synthetic oligonucleotide
caauuaguaaaccccugug

SEQ ID NO: 2261076 - RNA, 19 nt, Artificial Sequence
  Description of Artificial Sequence: Synthetic oligonucleotide
ugcaguucuggacuugaga

SEQ ID NO: 2261077 - RNA, 19 nt, Artificial Sequence
  Description of Artificial Sequence: Synthetic oligonucleotide
uaagguauugcaccuccuc

SEQ ID NO: 2261078 - RNA, 19 nt, Artificial Sequence
  Description of Artificial Sequence: Synthetic oligonucleotide
uuguuaguaccauaugaua

SEQ ID NO: 2261079 - RNA, 19 nt, Artificial Sequence
  Description of Artificial Sequence: Synthetic oligonucleotide
cauuaaggggcucugcuuc

SEQ ID NO: 2261080 - RNA, 19 nt, Artificial Sequence
  Description of Artificial Sequence: Synthetic oligonucleotide
ucuucuaguuccauauuuu

SEQ ID NO: 2261081 - RNA, 19 nt, Artificial Sequence
  Description of Artificial Sequence: Synthetic oligonucleotide
uccaauuaguaaaccccug

SEQ ID NO: 2261082 - RNA, 19 nt, Artificial Sequence
  Description of Artificial Sequence: Synthetic oligonucleotide
auacuuauucuucuuugaa

SEQ ID NO: 2261083 - RNA, 19 nt, Artificial Sequence
  Description of Artificial Sequence: Synthetic oligonucleotide
auugcaucuuucccaaaca

SEQ ID NO: 2261084 - RNA, 19 nt, Artificial Sequence
  Description of Artificial Sequence: Synthetic oligonucleotide
uuccucgaccaucaggggc

SEQ ID NO: 2261085 - RNA, 19 nt, Artificial Sequence
  Description of Artificial Sequence: Synthetic oligonucleotide
ugugucagaagcuuuucuu

SEQ ID NO: 2261086 - RNA, 19 nt, Artificial Sequence
  Description of Artificial Sequence: Synthetic oligonucleotide
ucuucucuauguccuggag

SEQ ID NO: 2261087 - RNA, 19 nt, Artificial Sequence
  Description of Artificial Sequence: Synthetic oligonucleotide
ucguuaggugguucaaucc

SEQ ID NO: 2261088 - RNA, 19 nt, Artificial Sequence
  Description of Artificial Sequence: Synthetic oligonucleotide
acguuuuccuugucaaauc

SEQ ID NO: 2261089 - RNA, 19 nt, Artificial Sequence
  Description of Artificial Sequence: Synthetic oligonucleotide
ucgaauacauugccguaac

SEQ ID NO: 2261090 - RNA, 19 nt, Artificial Sequence
  Description of Artificial Sequence: Synthetic oligonucleotide
aagaccaauauacguucau

SEQ ID NO: 2261091 - RNA, 19 nt, Artificial Sequence
  Description of Artificial Sequence: Synthetic oligonucleotide
uuauuccaauuaguaaacc

SEQ ID NO: 2261092 - RNA, 19 nt, Artificial Sequence
  Description of Artificial Sequence: Synthetic oligonucleotide
uuuguaucuagugcuuucu

SEQ ID NO: 2261093 - RNA, 19 nt, Artificial Sequence
  Description of Artificial Sequence: Synthetic oligonucleotide
aguuucgaauacauugccg

SEQ ID NO: 2261094 - RNA, 19 nt, Artificial Sequence
  Description of Artificial Sequence: Synthetic oligonucleotide
uaagaccaauauacguuca

SEQ ID NO: 2261095 - RNA, 19 nt, Artificial Sequence
  Description of Artificial Sequence: Synthetic oligonucleotide
gagugcuucccugaaauac

SEQ ID NO: 2261096 - RNA, 19 nt, Artificial Sequence
  Description of Artificial Sequence: Synthetic oligonucleotide
uuucccaaacacagcugag

SEQ ID NO: 2261097 - RNA, 19 nt, Artificial Sequence
  Description of Artificial Sequence: Synthetic oligonucleotide
uagguucacugacacggag

SEQ ID NO: 2261098 - RNA, 19 nt, Artificial Sequence
  Description of Artificial Sequence: Synthetic oligonucleotide
ccguaacucaucauaaacg

SEQ ID NO: 2261099 - RNA, 19 nt, Artificial Sequence
  Description of Artificial Sequence: Synthetic oligonucleotide
agugcuucccugaaauacg

SEQ ID NO: 2261100 - RNA, 19 nt, Artificial Sequence
  Description of Artificial Sequence: Synthetic oligonucleotide
agguauugcaccuccucug

SEQ ID NO: 2261101 - RNA, 19 nt, Artificial Sequence
  Description of Artificial Sequence: Synthetic oligonucleotide
caauuuuaaguuguucuuc

SEQ ID NO: 2261102 - RNA, 19 nt, Artificial Sequence
  Description of Artificial Sequence: Synthetic oligonucleotide
guuucgaauacauugccgu

SEQ ID NO: 2261103 - RNA, 19 nt, Artificial Sequence
  Description of Artificial Sequence: Synthetic oligonucleotide
ucuuugaauucuugccucu

SEQ ID NO: 2261104 - RNA, 19 nt, Artificial Sequence
  Description of Artificial Sequence: Synthetic oligonucleotide
caaaguaauuaagguauug

SEQ ID NO: 2261105 - RNA, 19 nt, Artificial Sequence
  Description of Artificial Sequence: Synthetic oligonucleotide
ggcuauauuuucaauauca

SEQ ID NO: 2261106 - RNA, 19 nt, Artificial Sequence
  Description of Artificial Sequence: Synthetic oligonucleotide
aauacgcaucaacagcaua

SEQ ID NO: 2261107 - RNA, 19 nt, Artificial Sequence
  Description of Artificial Sequence: Synthetic oligonucleotide
uugccguaacucaucauaa

SEQ ID NO: 2261108 - RNA, 19 nt, Artificial Sequence
  Description of Artificial Sequence: Synthetic oligonucleotide
gagaaaacgguccucuucu

SEQ ID NO: 2261109 - RNA, 19 nt, Artificial Sequence
  Description of Artificial Sequence: Synthetic oligonucleotide
acuagcuuagugauuauaa

SEQ ID NO: 2261110 - RNA, 19 nt, Artificial Sequence
  Description of Artificial Sequence: Synthetic oligonucleotide
caaucaaaguaauuaaggu

SEQ ID NO: 2261111 - RNA, 19 nt, Artificial Sequence
  Description of Artificial Sequence: Synthetic oligonucleotide
ucauaguuucagcuucuuc

SEQ ID NO: 2261112 - RNA, 19 nt, Artificial Sequence
  Description of Artificial Sequence: Synthetic oligonucleotide
  modified_base (11)..(11): a, c, u, g, unknown or other
aucuuaugaanacccguaa

SEQ ID NO: 2261113 - RNA, 19 nt, Artificial Sequence
  Description of Artificial Sequence: Synthetic oligonucleotide
aaacguuuuccuugucaaa

SEQ ID NO: 2261114 - RNA, 19 nt, Artificial Sequence
  Description of Artificial Sequence: Synthetic oligonucleotide
acugaggggaguuucgaau

SEQ ID NO: 2261115 - RNA, 19 nt, Artificial Sequence
  Description of Artificial Sequence: Synthetic oligonucleotide
uucgaauacauugccguaa

SEQ ID NO: 2261116 - RNA, 19 nt, Artificial Sequence
  Description of Artificial Sequence: Synthetic oligonucleotide
cucguuaggugguucaauc

SEQ ID NO: 2261117 - RNA, 19 nt, Artificial Sequence
  Description of Artificial Sequence: Synthetic oligonucleotide
gacauaacaguugagcacu

SEQ ID NO: 2261118 - RNA, 19 nt, Artificial Sequence
  Description of Artificial Sequence: Synthetic oligonucleotide
accuuccaaucuuuguauc

SEQ ID NO: 2261119 - RNA, 19 nt, Artificial Sequence
  Description of Artificial Sequence: Synthetic oligonucleotide
gaaaacgguccucuucuuc

SEQ ID NO: 2261120 - RNA, 19 nt, Artificial Sequence
  Description of Artificial Sequence: Synthetic oligonucleotide
ugugccuugggugcuuagg

SEQ ID NO: 2261121 - RNA, 19 nt, Artificial Sequence
  Description of Artificial Sequence: Synthetic oligonucleotide
cuuucuuccucgaccauca

SEQ ID NO: 2261122 - RNA, 19 nt, Artificial Sequence
  Description of Artificial Sequence: Synthetic oligonucleotide
gguauugcaccuccucugg

SEQ ID NO: 2261123 - RNA, 19 nt, Artificial Sequence
  Description of Artificial Sequence: Synthetic oligonucleotide
ucuuucaaucaaaguaauu

SEQ ID NO: 2261124 - RNA, 19 nt, Artificial Sequence
  Description of Artificial Sequence: Synthetic oligonucleotide
uacauugccguaacucauc

SEQ ID NO: 2261125 - RNA, 19 nt, Artificial Sequence
  Description of Artificial Sequence: Synthetic oligonucleotide
uaccuuccaaucuuuguau

SEQ ID NO: 2261126 - RNA, 19 nt, Artificial Sequence
  Description of Artificial Sequence: Synthetic oligonucleotide
uucuggacuugagaaacca

SEQ ID NO: 2261127 - RNA, 19 nt, Artificial Sequence
  Description of Artificial Sequence: Synthetic oligonucleotide
cuccauugcaguucuggac

SEQ ID NO: 2261128 - RNA, 19 nt, Artificial Sequence
  Description of Artificial Sequence: Synthetic oligonucleotide
gguucacugacacggagug

SEQ ID NO: 2261129 - RNA, 19 nt, Artificial Sequence
  Description of Artificial Sequence: Synthetic oligonucleotide
ugggugcuuagguucacug

SEQ ID NO: 2261130 - RNA, 19 nt, Artificial Sequence
  Description of Artificial Sequence: Synthetic oligonucleotide
  modified_base (17)..(17): a, c, u, g, unknown or other
cagcacaucuuaugaanac

SEQ ID NO: 2261131 - RNA, 19 nt, Artificial Sequence
  Description of Artificial Sequence: Synthetic oligonucleotide
gaccccacuucucauuagc

SEQ ID NO: 2261132 - RNA, 19 nt, Artificial Sequence
  Description of Artificial Sequence: Synthetic oligonucleotide
uuguaccuuccaaucuuug

SEQ ID NO: 2261133 - RNA, 19 nt, Artificial Sequence
  Description of Artificial Sequence: Synthetic oligonucleotide
acuugagaaaccaaucaaa

SEQ ID NO: 2261134 - RNA, 19 nt, Artificial Sequence
  Description of Artificial Sequence: Synthetic oligonucleotide
uuaagguauugcaccuccu

SEQ ID NO: 2261135 - RNA, 19 nt, Artificial Sequence
  Description of Artificial Sequence: Synthetic oligonucleotide
cuucucauuagcuuugaua

SEQ ID NO: 2261136 - RNA, 19 nt, Artificial Sequence
  Description of Artificial Sequence: Synthetic oligonucleotide
  modified_base (13)..(13): a, c, u, g, unknown or other
acaucuuaugaanacccgu

SEQ ID NO: 2261137 - RNA, 19 nt, Artificial Sequence
  Description of Artificial Sequence: Synthetic oligonucleotide
uuuguaccuuccaaucuuu

SEQ ID NO: 2261138 - RNA, 19 nt, Artificial Sequence
  Description of Artificial Sequence: Synthetic oligonucleotide
aggugguucaauccacucu

SEQ ID NO: 2261139 - RNA, 19 nt, Artificial Sequence
  Description of Artificial Sequence: Synthetic oligonucleotide
uuagguucacugacacgga

SEQ ID NO: 2261140 - RNA, 19 nt, Artificial Sequence
  Description of Artificial Sequence: Synthetic oligonucleotide
uugucaaauccaagcuugu

SEQ ID NO: 2261141 - RNA, 19 nt, Artificial Sequence
  Description of Artificial Sequence: Synthetic oligonucleotide
ucaucacgaccccacuucu

SEQ ID NO: 2261142 - RNA, 19 nt, Artificial Sequence
  Description of Artificial Sequence: Synthetic oligonucleotide
caaauccaagcuugugcag

SEQ ID NO: 2261143 - RNA, 19 nt, Artificial Sequence
  Description of Artificial Sequence: Synthetic oligonucleotide
acauugccguaacucauca

SEQ ID NO: 2261144 - RNA, 19 nt, Artificial Sequence
  Description of Artificial Sequence: Synthetic oligonucleotide
  modified_base (6)..(6): a, c, u, g, unknown or other
augaanacccguaauuaaa

SEQ ID NO: 2261145 - RNA, 19 nt, Artificial Sequence
  Description of Artificial Sequence: Synthetic oligonucleotide
cugaguauucaaugacuuc

SEQ ID NO: 2261146 - RNA, 19 nt, Artificial Sequence
  Description of Artificial Sequence: Synthetic oligonucleotide
ggaguuucgaauacauugc

SEQ ID NO: 2261147 - RNA, 19 nt, Artificial Sequence
  Description of Artificial Sequence: Synthetic oligonucleotide
caguugagcacuguacagc

SEQ ID NO: 2261148 - RNA, 19 nt, Artificial Sequence
  Description of Artificial Sequence: Synthetic oligonucleotide
ucaucaauuuuaaguuguu

SEQ ID NO: 2261149 - RNA, 19 nt, Artificial Sequence
  Description of Artificial Sequence: Synthetic oligonucleotide
uuucgaauacauugccgua

SEQ ID NO: 2261150 - RNA, 19 nt, Artificial Sequence
  Description of Artificial Sequence: Synthetic oligonucleotide
aggggcaccauccauuuua

SEQ ID NO: 2261151 - RNA, 19 nt, Artificial Sequence
  Description of Artificial Sequence: Synthetic oligonucleotide
cuagcuccucaucauuaag

SEQ ID NO: 2261152 - RNA, 19 nt, Artificial Sequence
  Description of Artificial Sequence: Synthetic oligonucleotide
ccugaaauacgcaucaaca

SEQ ID NO: 2261153 - RNA, 19 nt, Artificial Sequence
  Description of Artificial Sequence: Synthetic oligonucleotide
  modified_base (12)..(12): a, c, u, g, unknown or other
caucuuaugaanacccgua

SEQ ID NO: 2261154 - RNA, 19 nt, Artificial Sequence
  Description of Artificial Sequence: Synthetic oligonucleotide
gacacggagugcuucccug

SEQ ID NO: 2261155 - RNA, 19 nt, Artificial Sequence
  Description of Artificial Sequence: Synthetic oligonucleotide
aacugaggggaguuucgaa

SEQ ID NO: 2261156 - RNA, 19 nt, Artificial Sequence
  Description of Artificial Sequence: Synthetic oligonucleotide
cagcugaguauucaaugac

SEQ ID NO: 2261157 - RNA, 19 nt, Artificial Sequence
  Description of Artificial Sequence: Synthetic oligonucleotide
uggcuauauuuucaauauc

SEQ ID NO: 2261158 - RNA, 19 nt, Artificial Sequence
  Description of Artificial Sequence: Synthetic oligonucleotide
ucgaccaucaggggcacca

SEQ ID NO: 2261159 - RNA, 19 nt, Artificial Sequence
  Description of Artificial Sequence: Synthetic oligonucleotide
gaacuacuagcuuagugau

SEQ ID NO: 2261160 - RNA, 19 nt, Artificial Sequence
  Description of Artificial Sequence: Synthetic oligonucleotide
ucucauuagcuuugauaaa

SEQ ID NO: 2261161 - RNA, 19 nt, Artificial Sequence
  Description of Artificial Sequence: Synthetic oligonucleotide
ucauuaaggggcucugcuu

SEQ ID NO: 2261162 - RNA, 19 nt, Artificial Sequence
  Description of Artificial Sequence: Synthetic oligonucleotide
guaccuuccaaucuuugua

SEQ ID NO: 2261163 - RNA, 19 nt, Artificial Sequence
  Description of Artificial Sequence: Synthetic oligonucleotide
ucaucauuaaggggcucug

SEQ ID NO: 2261164 - RNA, 19 nt, Artificial Sequence
  Description of Artificial Sequence: Synthetic oligonucleotide
uaucuagugcuuucuugau

SEQ ID NO: 2261165 - RNA, 19 nt, Artificial Sequence
  Description of Artificial Sequence: Synthetic oligonucleotide
caucaauuuuaaguuguuc

SEQ ID NO: 2261166 - RNA, 19 nt, Artificial Sequence
  Description of Artificial Sequence: Synthetic oligonucleotide
gaaugacauaacaguugag

SEQ ID NO: 2261167 - RNA, 19 nt, Artificial Sequence
  Description of Artificial Sequence: Synthetic oligonucleotide
uuuacguuucuguguugaa

SEQ ID NO: 2261168 - RNA, 19 nt, Artificial Sequence
  Description of Artificial Sequence: Synthetic oligonucleotide
ggacuugagaaaccaauca

SEQ ID NO: 2261169 - RNA, 19 nt, Artificial Sequence
  Description of Artificial Sequence: Synthetic oligonucleotide
guuccauauuuucucuuuc

SEQ ID NO: 2261170 - RNA, 19 nt, Artificial Sequence
  Description of Artificial Sequence: Synthetic oligonucleotide
agugauuauaagaccaaua

SEQ ID NO: 2261171 - RNA, 19 nt, Artificial Sequence
  Description of Artificial Sequence: Synthetic oligonucleotide
augauauucuuagcugaug

SEQ ID NO: 2261172 - RNA, 19 nt, Artificial Sequence
  Description of Artificial Sequence: Synthetic oligonucleotide
uucccaaacacagcugagu

SEQ ID NO: 2261173 - RNA, 19 nt, Artificial Sequence
  Description of Artificial Sequence: Synthetic oligonucleotide
ugaugaaagggagcuuugu

SEQ ID NO: 2261174 - RNA, 19 nt, Artificial Sequence
  Description of Artificial Sequence: Synthetic oligonucleotide
uaucaucacgaccccacuu

SEQ ID NO: 2261175 - RNA, 19 nt, Artificial Sequence
  Description of Artificial Sequence: Synthetic oligonucleotide
gaaaccaaucaaaucugaa

SEQ ID NO: 2261176 - RNA, 19 nt, Artificial Sequence
  Description of Artificial Sequence: Synthetic oligonucleotide
uccuggagcucauugcauc

SEQ ID NO: 2261177 - RNA, 19 nt, Artificial Sequence
  Description of Artificial Sequence: Synthetic oligonucleotide
uuccuucucguuagguggu

SEQ ID NO: 2261178 - RNA, 19 nt, Artificial Sequence
  Description of Artificial Sequence: Synthetic oligonucleotide
  modified_base (9)..(9): a, c, u, g, unknown or other
cuuaugaanacccguaauu

SEQ ID NO: 2261179 - RNA, 19 nt, Artificial Sequence
  Description of Artificial Sequence: Synthetic oligonucleotide
auaucaucacgaccccacu

SEQ ID NO: 2261180 - RNA, 19 nt, Artificial Sequence
  Description of Artificial Sequence: Synthetic oligonucleotide
  modified_base (15)..(15): a, c, u, g, unknown or other
gcacaucuuaugaanaccc

SEQ ID NO: 2261181 - RNA, 19 nt, Artificial Sequence
  Description of Artificial Sequence: Synthetic oligonucleotide
uccuucuacuucucuggcu

SEQ ID NO: 2261182 - RNA, 19 nt, Artificial Sequence
  Description of Artificial Sequence: Synthetic oligonucleotide
gccguaacucaucauaaac

SEQ ID NO: 2261183 - RNA, 19 nt, Artificial Sequence
  Description of Artificial Sequence: Synthetic oligonucleotide
cugaugaaagggagcuuug

SEQ ID NO: 2261184 - RNA, 19 nt, Artificial Sequence
  Description of Artificial Sequence: Synthetic oligonucleotide
agaaaccaaucaaaucuga

SEQ ID NO: 2261185 - RNA, 19 nt, Artificial Sequence
  Description of Artificial Sequence: Synthetic oligonucleotide
agcugaguauucaaugacu

SEQ ID NO: 2261186 - RNA, 19 nt, Artificial Sequence
  Description of Artificial Sequence: Synthetic oligonucleotide
gcaguucuggacuugagaa

SEQ ID NO: 2261187 - RNA, 19 nt, Artificial Sequence
  Description of Artificial Sequence: Synthetic oligonucleotide
acguucauaguuucagcuu

SEQ ID NO: 2261188 - RNA, 19 nt, Artificial Sequence
  Description of Artificial Sequence: Synthetic oligonucleotide
aaagaacuacuagcuuagu

SEQ ID NO: 2261189 - RNA, 19 nt, Artificial Sequence
  Description of Artificial Sequence: Synthetic oligonucleotide
uacgcaucaacagcauagu

SEQ ID NO: 2261190 - RNA, 19 nt, Artificial Sequence
  Description of Artificial Sequence: Synthetic oligonucleotide
aacgguccucuucuucggu

SEQ ID NO: 2261191 - RNA, 19 nt, Artificial Sequence
  Description of Artificial Sequence: Synthetic oligonucleotide
guuaguaccauaugauauu

SEQ ID NO: 2261192 - RNA, 19 nt, Artificial Sequence
  Description of Artificial Sequence: Synthetic oligonucleotide
cucauugcaucuuucccaa

SEQ ID NO: 2261193 - RNA, 19 nt, Artificial Sequence
  Description of Artificial Sequence: Synthetic oligonucleotide
uccaagcuugugcagcaua

SEQ ID NO: 2261194 - RNA, 19 nt, Artificial Sequence
  Description of Artificial Sequence: Synthetic oligonucleotide
gcucauugcaucuuuccca

SEQ ID NO: 2261195 - RNA, 19 nt, Artificial Sequence
  Description of Artificial Sequence: Synthetic oligonucleotide
uggagcugaugucuuugaa

SEQ ID NO: 2261196 - RNA, 19 nt, Artificial Sequence
  Description of Artificial Sequence: Synthetic oligonucleotide
aaauacgcaucaacagcau

SEQ ID NO: 2261197 - RNA, 19 nt, Artificial Sequence
  Description of Artificial Sequence: Synthetic oligonucleotide
caauauacguucauaguuu

SEQ ID NO: 2261198 - RNA, 19 nt, Artificial Sequence
  Description of Artificial Sequence: Synthetic oligonucleotide
cuggcuauauuuucaauau

SEQ ID NO: 2261199 - RNA, 19 nt, Artificial Sequence
  Description of Artificial Sequence: Synthetic oligonucleotide
aacucaucauaaacguuuu

SEQ ID NO: 2261200 - RNA, 19 nt, Artificial Sequence
  Description of Artificial Sequence: Synthetic oligonucleotide
gaugucuuugaaugacaua

SEQ ID NO: 2261201 - RNA, 19 nt, Artificial Sequence
  Description of Artificial Sequence: Synthetic oligonucleotide
uaguuggcuuccuucucgu

SEQ ID NO: 2261202 - RNA, 19 nt, Artificial Sequence
  Description of Artificial Sequence: Synthetic oligonucleotide
cgcaucaacagcauaguug

SEQ ID NO: 2261203 - RNA, 19 nt, Artificial Sequence
  Description of Artificial Sequence: Synthetic oligonucleotide
guuggcuuccuucucguua

SEQ ID NO: 2261204 - RNA, 19 nt, Artificial Sequence
  Description of Artificial Sequence: Synthetic oligonucleotide
aucuagugcuuucuugaua

SEQ ID NO: 2261205 - RNA, 19 nt, Artificial Sequence
  Description of Artificial Sequence: Synthetic oligonucleotide
cugaugucuuugaaugaca

SEQ ID NO: 2261206 - RNA, 19 nt, Artificial Sequence
  Description of Artificial Sequence: Synthetic oligonucleotide
aaagggagcuuuguaccuu

SEQ ID NO: 2261207 - RNA, 19 nt, Artificial Sequence
  Description of Artificial Sequence: Synthetic oligonucleotide
ugacacggagugcuucccu

SEQ ID NO: 2261208 - RNA, 19 nt, Artificial Sequence
  Description of Artificial Sequence: Synthetic oligonucleotide
ggcaccauccauuuuacgu

SEQ ID NO: 2261209 - RNA, 19 nt, Artificial Sequence
  Description of Artificial Sequence: Synthetic oligonucleotide
ugccguaacucaucauaaa

SEQ ID NO: 2261210 - RNA, 19 nt, Artificial Sequence
  Description of Artificial Sequence: Synthetic oligonucleotide
agucucucuuauuccaauu

SEQ ID NO: 2261211 - RNA, 19 nt, Artificial Sequence
  Description of Artificial Sequence: Synthetic oligonucleotide
caucauuaaggggcucugc

SEQ ID NO: 2261212 - RNA, 19 nt, Artificial Sequence
  Description of Artificial Sequence: Synthetic oligonucleotide
cugaacugaggggaguuuc

SEQ ID NO: 2261213 - RNA, 19 nt, Artificial Sequence
  Description of Artificial Sequence: Synthetic oligonucleotide
cccguaauuaaagaacuac

SEQ ID NO: 2261214 - RNA, 19 nt, Artificial Sequence
  Description of Artificial Sequence: Synthetic oligonucleotide
cuucucguuaggugguuca

SEQ ID NO: 2261215 - RNA, 19 nt, Artificial Sequence
  Description of Artificial Sequence: Synthetic oligonucleotide
agugcuuucuugauacuua

SEQ ID NO: 2261216 - RNA, 19 nt, Artificial Sequence
  Description of Artificial Sequence: Synthetic oligonucleotide
caaaugagaaaacgguccu

SEQ ID NO: 2261217 - RNA, 19 nt, Artificial Sequence
  Description of Artificial Sequence: Synthetic oligonucleotide
guacagcacaucuuaugaa

SEQ ID NO: 2261218 - RNA, 19 nt, Artificial Sequence
  Description of Artificial Sequence: Synthetic oligonucleotide
caucaacagcauaguuggc

SEQ ID NO: 2261219 - RNA, 19 nt, Artificial Sequence
  Description of Artificial Sequence: Synthetic oligonucleotide
uacuagcuuagugauuaua

SEQ ID NO: 2261220 - RNA, 19 nt, Artificial Sequence
  Description of Artificial Sequence: Synthetic oligonucleotide
auauacguucauaguuuca

SEQ ID NO: 2261221 - RNA, 19 nt, Artificial Sequence
  Description of Artificial Sequence: Synthetic oligonucleotide
auacauugccguaacucau

SEQ ID NO: 2261222 - RNA, 19 nt, Artificial Sequence
  Description of Artificial Sequence: Synthetic oligonucleotide
cauuuuacguuucuguguu

SEQ ID NO: 2261223 - RNA, 19 nt, Artificial Sequence
  Description of Artificial Sequence: Synthetic oligonucleotide
cugcuucaucaauuuuaag

SEQ ID NO: 2261224 - RNA, 19 nt, Artificial Sequence
  Description of Artificial Sequence: Synthetic oligonucleotide
gcuuagguucacugacacg

SEQ ID NO: 2261225 - RNA, 19 nt, Artificial Sequence
  Description of Artificial Sequence: Synthetic oligonucleotide
agaccaauauacguucaua

SEQ ID NO: 2261226 - RNA, 19 nt, Artificial Sequence
  Description of Artificial Sequence: Synthetic oligonucleotide
ccaagcuugugcagcauac

SEQ ID NO: 2261227 - RNA, 19 nt, Artificial Sequence
  Description of Artificial Sequence: Synthetic oligonucleotide
ugcuuucuugauacuuauu

SEQ ID NO: 2261228 - RNA, 19 nt, Artificial Sequence
  Description of Artificial Sequence: Synthetic oligonucleotide
aguaaaccccugugucaga

SEQ ID NO: 2261229 - RNA, 19 nt, Artificial Sequence
  Description of Artificial Sequence: Synthetic oligonucleotide
uucccuuuguuaguaccau

SEQ ID NO: 2261230 - RNA, 19 nt, Artificial Sequence
  Description of Artificial Sequence: Synthetic oligonucleotide
cguucauaguuucagcuuc

SEQ ID NO: 2261231 - RNA, 19 nt, Artificial Sequence
  Description of Artificial Sequence: Synthetic oligonucleotide
cuaguuccauauuuucucu

SEQ ID NO: 2261232 - RNA, 19 nt, Artificial Sequence
  Description of Artificial Sequence: Synthetic oligonucleotide
gagcuuuguaccuuccaau

SEQ ID NO: 2261233 - RNA, 19 nt, Artificial Sequence
  Description of Artificial Sequence: Synthetic oligonucleotide
uaaggggcucugcuucauc

SEQ ID NO: 2261234 - RNA, 19 nt, Artificial Sequence
  Description of Artificial Sequence: Synthetic oligonucleotide
guucuggacuugagaaacc

SEQ ID NO: 2261235 - RNA, 19 nt, Artificial Sequence
  Description of Artificial Sequence: Synthetic oligonucleotide
uugaaggcuuugguccucu

SEQ ID NO: 2261236 - RNA, 19 nt, Artificial Sequence
  Description of Artificial Sequence: Synthetic oligonucleotide
cauaaacguuuuccuuguc

SEQ ID NO: 2261237 - RNA, 19 nt, Artificial Sequence
  Description of Artificial Sequence: Synthetic oligonucleotide
ucucguuaggugguucaau

SEQ ID NO: 2261238 - RNA, 19 nt, Artificial Sequence
  Description of Artificial Sequence: Synthetic oligonucleotide
gaacugaggggaguuucga

SEQ ID NO: 2261239 - RNA, 19 nt, Artificial Sequence
  Description of Artificial Sequence: Synthetic oligonucleotide
guaccauaugauauucuua

SEQ ID NO: 2261240 - RNA, 19 nt, Artificial Sequence
  Description of Artificial Sequence: Synthetic oligonucleotide
uuccaaucugagccauaau

SEQ ID NO: 2261241 - RNA, 19 nt, Artificial Sequence
  Description of Artificial Sequence: Synthetic oligonucleotide
ugccucuccccuuuccaau

SEQ ID NO: 2261242 - RNA, 19 nt, Artificial Sequence
  Description of Artificial Sequence: Synthetic oligonucleotide
acgaccccacuucucauua

SEQ ID NO: 2261243 - RNA, 19 nt, Artificial Sequence
  Description of Artificial Sequence: Synthetic oligonucleotide
uguugccugugcugugccu

SEQ ID NO: 2261244 - RNA, 19 nt, Artificial Sequence
  Description of Artificial Sequence: Synthetic oligonucleotide
aggggaguuucgaauacau

SEQ ID NO: 2261245 - RNA, 19 nt, Artificial Sequence
  Description of Artificial Sequence: Synthetic oligonucleotide
aacuacuagcuuagugauu

SEQ ID NO: 2261246 - RNA, 19 nt, Artificial Sequence
  Description of Artificial Sequence: Synthetic oligonucleotide
cuuuguaccuuccaaucuu

SEQ ID NO: 2261247 - RNA, 19 nt, Artificial Sequence
  Description of Artificial Sequence: Synthetic oligonucleotide
agaaaacgguccucuucuu

SEQ ID NO: 2261248 - RNA, 19 nt, Artificial Sequence
  Description of Artificial Sequence: Synthetic oligonucleotide
accauccauuuuacguuuc

SEQ ID NO: 2261249 - RNA, 19 nt, Artificial Sequence
  Description of Artificial Sequence: Synthetic oligonucleotide
ccauaaucuucucuauguc

SEQ ID NO: 2261250 - RNA, 19 nt, Artificial Sequence
  Description of Artificial Sequence: Synthetic oligonucleotide
guaaaccccugugucagaa

SEQ ID NO: 2261251 - RNA, 19 nt, Artificial Sequence
  Description of Artificial Sequence: Synthetic oligonucleotide
cuuccaaucuuuguaucua

SEQ ID NO: 2261252 - RNA, 19 nt, Artificial Sequence
  Description of Artificial Sequence: Synthetic oligonucleotide
uucucguuaggugguucaa

SEQ ID NO: 2261253 - RNA, 19 nt, Artificial Sequence
  Description of Artificial Sequence: Synthetic oligonucleotide
caucacgaccccacuucuc

SEQ ID NO: 2261254 - RNA, 19 nt, Artificial Sequence
  Description of Artificial Sequence: Synthetic oligonucleotide
ugccuugggugcuuagguu

SEQ ID NO: 2261255 - RNA, 19 nt, Artificial Sequence
  Description of Artificial Sequence: Synthetic oligonucleotide
guauugcaccuccucugga

SEQ ID NO: 2261256 - RNA, 19 nt, Artificial Sequence
  Description of Artificial Sequence: Synthetic oligonucleotide
acgcaucaacagcauaguu

SEQ ID NO: 2261257 - RNA, 19 nt, Artificial Sequence
  Description of Artificial Sequence: Synthetic oligonucleotide
ccuuuguuaguaccauaug

SEQ ID NO: 2261258 - RNA, 19 nt, Artificial Sequence
  Description of Artificial Sequence: Synthetic oligonucleotide
acauaacaguugagcacug

SEQ ID NO: 2261259 - RNA, 19 nt, Artificial Sequence
  Description of Artificial Sequence: Synthetic oligonucleotide
augacuuccucuggaguuu

SEQ ID NO: 2261260 - RNA, 19 nt, Artificial Sequence
  Description of Artificial Sequence: Synthetic oligonucleotide
cuugauacuuauucuucuu

SEQ ID NO: 2261261 - RNA, 19 nt, Artificial Sequence
  Description of Artificial Sequence: Synthetic oligonucleotide
ccacuucucauuagcuuug

SEQ ID NO: 2261262 - RNA, 19 nt, Artificial Sequence
  Description of Artificial Sequence: Synthetic oligonucleotide
acuguacagcacaucuuau

SEQ ID NO: 2261263 - RNA, 19 nt, Artificial Sequence
  Description of Artificial Sequence: Synthetic oligonucleotide
guucacugacacggagugc

SEQ ID NO: 2261264 - RNA, 19 nt, Artificial Sequence
  Description of Artificial Sequence: Synthetic oligonucleotide
cauugcaguucuggacuug

SEQ ID NO: 2261265 - RNA, 19 nt, Artificial Sequence
  Description of Artificial Sequence: Synthetic oligonucleotide
uuaaggggcucugcuucau

SEQ ID NO: 2261266 - RNA, 19 nt, Artificial Sequence
  Description of Artificial Sequence: Synthetic oligonucleotide
uugggugcuuagguucacu

SEQ ID NO: 2261267 - RNA, 19 nt, Artificial Sequence
  Description of Artificial Sequence: Synthetic oligonucleotide
aggggcucugcuucaucaa

SEQ ID NO: 2261268 - RNA, 19 nt, Artificial Sequence
  Description of Artificial Sequence: Synthetic oligonucleotide
ccguaauuaaagaacuacu

SEQ ID NO: 2261269 - RNA, 19 nt, Artificial Sequence
  Description of Artificial Sequence: Synthetic oligonucleotide
gagccauaaucuucucuau

SEQ ID NO: 2261270 - RNA, 19 nt, Artificial Sequence
  Description of Artificial Sequence: Synthetic oligonucleotide
gcuuuguaccuuccaaucu

SEQ ID NO: 2261271 - RNA, 19 nt, Artificial Sequence
  Description of Artificial Sequence: Synthetic oligonucleotide
cacugacacggagugcuuc

SEQ ID NO: 2261272 - RNA, 19 nt, Artificial Sequence
  Description of Artificial Sequence: Synthetic oligonucleotide
cucaucauuaaggggcucu

SEQ ID NO: 2261273 - RNA, 19 nt, Artificial Sequence
  Description of Artificial Sequence: Synthetic oligonucleotide
gggugcuuagguucacuga

SEQ ID NO: 2261274 - RNA, 19 nt, Artificial Sequence
  Description of Artificial Sequence: Synthetic oligonucleotide
gaaggcuuugguccucuuu

SEQ ID NO: 2261275 - RNA, 19 nt, Artificial Sequence
  Description of Artificial Sequence: Synthetic oligonucleotide
ugcaccuccucuggagcuc

SEQ ID NO: 2261276 - RNA, 19 nt, Artificial Sequence
  Description of Artificial Sequence: Synthetic oligonucleotide
acggagugcuucccugaaa

SEQ ID NO: 2261277 - RNA, 19 nt, Artificial Sequence
  Description of Artificial Sequence: Synthetic oligonucleotide
gugcuuagguucacugaca

SEQ ID NO: 2261278 - RNA, 19 nt, Artificial Sequence
  Description of Artificial Sequence: Synthetic oligonucleotide
gggcaccauccauuuuacg

SEQ ID NO: 2261279 - RNA, 19 nt, Artificial Sequence
  Description of Artificial Sequence: Synthetic oligonucleotide
ccauuuuacguuucugugu

SEQ ID NO: 2261280 - RNA, 19 nt, Artificial Sequence
  Description of Artificial Sequence: Synthetic oligonucleotide
cugugccuugggugcuuag

SEQ ID NO: 2261281 - RNA, 19 nt, Artificial Sequence
  Description of Artificial Sequence: Synthetic oligonucleotide
gagcacuguacagcacauc

SEQ ID NO: 2261282 - RNA, 19 nt, Artificial Sequence
  Description of Artificial Sequence: Synthetic oligonucleotide
ucccugaaauacgcaucaa

SEQ ID NO: 2261283 - RNA, 19 nt, Artificial Sequence
  Description of Artificial Sequence: Synthetic oligonucleotide
guucauaguuucagcuucu

SEQ ID NO: 2261284 - RNA, 19 nt, Artificial Sequence
  Description of Artificial Sequence: Synthetic oligonucleotide
cugugucagaagcuuuucu

SEQ ID NO: 2261285 - RNA, 19 nt, Artificial Sequence
  Description of Artificial Sequence: Synthetic oligonucleotide
cuugggugcuuagguucac

SEQ ID NO: 2261286 - RNA, 19 nt, Artificial Sequence
  Description of Artificial Sequence: Synthetic oligonucleotide
gcuauauuuucaauaucau

SEQ ID NO: 2261287 - RNA, 19 nt, Artificial Sequence
  Description of Artificial Sequence: Synthetic oligonucleotide
ccaauuaguaaaccccugu

SEQ ID NO: 2261288 - RNA, 19 nt, Artificial Sequence
  Description of Artificial Sequence: Synthetic oligonucleotide
guaacucaucauaaacguu

SEQ ID NO: 2261289 - RNA, 19 nt, Artificial Sequence
  Description of Artificial Sequence: Synthetic oligonucleotide
gcaccauccauuuuacguu

SEQ ID NO: 2261290 - RNA, 19 nt, Artificial Sequence
  Description of Artificial Sequence: Synthetic oligonucleotide
acccguaauuaaagaacua

SEQ ID NO: 2261291 - RNA, 19 nt, Artificial Sequence
  Description of Artificial Sequence: Synthetic oligonucleotide
cuuuccaaucugagccaua

SEQ ID NO: 2261292 - RNA, 19 nt, Artificial Sequence
  Description of Artificial Sequence: Synthetic oligonucleotide
gccugugcugugccuuggg

SEQ ID NO: 2261293 - RNA, 19 nt, Artificial Sequence
  Description of Artificial Sequence: Synthetic oligonucleotide
ccuuccaaucuuuguaucu

SEQ ID NO: 2261294 - RNA, 19 nt, Artificial Sequence
  Description of Artificial Sequence: Synthetic oligonucleotide
cccuuuguuaguaccauau

SEQ ID NO: 2261295 - RNA, 19 nt, Artificial Sequence
  Description of Artificial Sequence: Synthetic oligonucleotide
gcugaguauucaaugacuu

SEQ ID NO: 2261296 - RNA, 19 nt, Artificial Sequence
  Description of Artificial Sequence: Synthetic oligonucleotide
ccauauuuucucuuucaau

SEQ ID NO: 2261297 - RNA, 19 nt, Artificial Sequence
  Description of Artificial Sequence: Synthetic oligonucleotide
caccauccauuuuacguuu

SEQ ID NO: 2261298 - RNA, 19 nt, Artificial Sequence
  Description of Artificial Sequence: Synthetic oligonucleotide
gccucuccccuuuccaauc

SEQ ID NO: 2261299 - RNA, 19 nt, Artificial Sequence
  Description of Artificial Sequence: Synthetic oligonucleotide
cuagugcuuucuugauacu

SEQ ID NO: 2261300 - RNA, 19 nt, Artificial Sequence
  Description of Artificial Sequence: Synthetic oligonucleotide
cauaacaguugagcacugu

SEQ ID NO: 2261301 - RNA, 19 nt, Artificial Sequence
  Description of Artificial Sequence: Synthetic oligonucleotide
uccuucucguuaggugguu

SEQ ID NO: 2261302 - RNA, 19 nt, Artificial Sequence
  Description of Artificial Sequence: Synthetic oligonucleotide
cacggagugcuucccugaa

SEQ ID NO: 2261303 - RNA, 19 nt, Artificial Sequence
  Description of Artificial Sequence: Synthetic oligonucleotide
ccaaacacagcugaguauu

SEQ ID NO: 2261304 - RNA, 19 nt, Artificial Sequence
  Description of Artificial Sequence: Synthetic oligonucleotide
ggagugcuucccugaaaua

SEQ ID NO: 2261305 - RNA, 19 nt, Artificial Sequence
  Description of Artificial Sequence: Synthetic oligonucleotide
guugccugugcugugccuu

SEQ ID NO: 2261306 - RNA, 19 nt, Artificial Sequence
  Description of Artificial Sequence: Synthetic oligonucleotide
auccaagcuugugcagcau

SEQ ID NO: 2261307 - RNA, 19 nt, Artificial Sequence
  Description of Artificial Sequence: Synthetic oligonucleotide
ccugugucagaagcuuuuc

SEQ ID NO: 2261308 - RNA, 19 nt, Artificial Sequence
  Description of Artificial Sequence: Synthetic oligonucleotide
cucgaccaucaggggcacc

SEQ ID NO: 2261309 - RNA, 19 nt, Artificial Sequence
  Description of Artificial Sequence: Synthetic oligonucleotide
cauugccguaacucaucau

SEQ ID NO: 2261310 - RNA, 19 nt, Artificial Sequence
  Description of Artificial Sequence: Synthetic oligonucleotide
gagcuccauugcaguucug

SEQ ID NO: 2261311 - RNA, 19 nt, Artificial Sequence
  Description of Artificial Sequence: Synthetic oligonucleotide
cuacuagcuuagugauuau

SEQ ID NO: 2261312 - RNA, 19 nt, Artificial Sequence
  Description of Artificial Sequence: Synthetic oligonucleotide
cuggagcuccauugcaguu

SEQ ID NO: 2261313 - RNA, 19 nt, Artificial Sequence
  Description of Artificial Sequence: Synthetic oligonucleotide
ccuucucguuaggugguuc

SEQ ID NO: 2261314 - RNA, 19 nt, Artificial Sequence
  Description of Artificial Sequence: Synthetic oligonucleotide
cacgaccccacuucucauu

SEQ ID NO: 2261315 - RNA, 19 nt, Artificial Sequence
  Description of Artificial Sequence: Synthetic oligonucleotide
guccuggagcucauugcau

SEQ ID NO: 2261316 - RNA, 19 nt, Artificial Sequence
  Description of Artificial Sequence: Synthetic oligonucleotide
cgaccccacuucucauuag

SEQ ID NO: 2261317 - RNA, 19 nt, Artificial Sequence
  Description of Artificial Sequence: Synthetic oligonucleotide
cggagugcuucccugaaau

SEQ ID NO: 2261318 - RNA, 19 nt, Artificial Sequence
  Description of Artificial Sequence: Synthetic oligonucleotide
cagcauaguuggcuuccuu

SEQ ID NO: 2261319 - RNA, 19 nt, Artificial Sequence
  Description of Artificial Sequence: Synthetic oligonucleotide
ggggaguuucgaauacauu

SEQ ID NO: 2261320 - RNA, 19 nt, Artificial Sequence
  Description of Artificial Sequence: Synthetic oligonucleotide
gugcugugccuugggugcu

SEQ ID NO: 2261321 - RNA, 19 nt, Artificial Sequence
  Description of Artificial Sequence: Synthetic oligonucleotide
ccucgaccaucaggggcac

SEQ ID NO: 2261322 - RNA, 19 nt, Artificial Sequence
  Description of Artificial Sequence: Synthetic oligonucleotide
cgaauacauugccguaacu

SEQ ID NO: 2261323 - RNA, 19 nt, Artificial Sequence
  Description of Artificial Sequence: Synthetic oligonucleotide
ccucuccccuuuccaaucu

SEQ ID NO: 2261324 - RNA, 19 nt, Artificial Sequence
  Description of Artificial Sequence: Synthetic oligonucleotide
gcugugccuugggugcuua

SEQ ID NO: 2261325 - RNA, 19 nt, Artificial Sequence
  Description of Artificial Sequence: Synthetic oligonucleotide
caggggcaccauccauuuu

SEQ ID NO: 2261326 - RNA, 19 nt, Artificial Sequence
  Description of Artificial Sequence: Synthetic oligonucleotide
ucagcuguaacuaagugcc

SEQ ID NO: 2261327 - RNA, 19 nt, Artificial Sequence
  Description of Artificial Sequence: Synthetic oligonucleotide
gaaacuaggagccugcuug

SEQ ID NO: 2261328 - RNA, 19 nt, Artificial Sequence
  Description of Artificial Sequence: Synthetic oligonucleotide
ucuccagaaacuaggagcc

SEQ ID NO: 2261329 - RNA, 19 nt, Artificial Sequence
  Description of Artificial Sequence: Synthetic oligonucleotide
cucuccagaaacuaggagc

SEQ ID NO: 2261330 - RNA, 19 nt, Artificial Sequence
  Description of Artificial Sequence: Synthetic oligonucleotide
caaaacuuaagcauugguc

SEQ ID NO: 2261331 - RNA, 19 nt, Artificial Sequence
  Description of Artificial Sequence: Synthetic oligonucleotide
cauggaacaucaaacaaug

SEQ ID NO: 2261332 - RNA, 19 nt, Artificial Sequence
  Description of Artificial Sequence: Synthetic oligonucleotide
aacauggaacaucaaacaa

SEQ ID NO: 2261333 - RNA, 19 nt, Artificial Sequence
  Description of Artificial Sequence: Synthetic oligonucleotide
cuaagugccagugucagag

SEQ ID NO: 2261334 - RNA, 19 nt, Artificial Sequence
  Description of Artificial Sequence: Synthetic oligonucleotide
uccaguagggaagucauag

SEQ ID NO: 2261335 - RNA, 19 nt, Artificial Sequence
  Description of Artificial Sequence: Synthetic oligonucleotide
guaacuaagugccaguguc

SEQ ID NO: 2261336 - RNA, 19 nt, Artificial Sequence
  Description of Artificial Sequence: Synthetic oligonucleotide
caacucuccagaaacuagg

SEQ ID NO: 2261337 - RNA, 19 nt, Artificial Sequence
  Description of Artificial Sequence: Synthetic oligonucleotide
gaacauggaacaucaaaca

SEQ ID NO: 2261338 - RNA, 19 nt, Artificial Sequence
  Description of Artificial Sequence: Synthetic oligonucleotide
aguaccaggggauggugac

SEQ ID NO: 2261339 - RNA, 19 nt, Artificial Sequence
  Description of Artificial Sequence: Synthetic oligonucleotide
aacuaagugccagugucag

SEQ ID NO: 2261340 - RNA, 19 nt, Artificial Sequence
  Description of Artificial Sequence: Synthetic oligonucleotide
uguaacuaagugccagugu

SEQ ID NO: 2261341 - RNA, 19 nt, Artificial Sequence
  Description of Artificial Sequence: Synthetic oligonucleotide
aagugccagugucagagcu

SEQ ID NO: 2261342 - RNA, 19 nt, Artificial Sequence
  Description of Artificial Sequence: Synthetic oligonucleotide
uaacuaagugccaguguca

SEQ ID NO: 2261343 - RNA, 19 nt, Artificial Sequence
  Description of Artificial Sequence: Synthetic oligonucleotide
agugggaacauggaacauc

SEQ ID NO: 2261344 - RNA, 19 nt, Artificial Sequence
  Description of Artificial Sequence: Synthetic oligonucleotide
ggaacauggaacaucaaac

SEQ ID NO: 2261345 - RNA, 19 nt, Artificial Sequence
  Description of Artificial Sequence: Synthetic oligonucleotide
uguccaguagggaagucau

SEQ ID NO: 2261346 - RNA, 19 nt, Artificial Sequence
  Description of Artificial Sequence: Synthetic oligonucleotide
acucuccagaaacuaggag

SEQ ID NO: 2261347 - RNA, 19 nt, Artificial Sequence
  Description of Artificial Sequence: Synthetic oligonucleotide
agcuguaacuaagugccag

SEQ ID NO: 2261348 - RNA, 19 nt, Artificial Sequence
  Description of Artificial Sequence: Synthetic oligonucleotide
ccagugucagagcugaugg

SEQ ID NO: 2261349 - RNA, 19 nt, Artificial Sequence
  Description of Artificial Sequence: Synthetic oligonucleotide
acauggaacaucaaacaau

SEQ ID NO: 2261350 - RNA, 19 nt, Artificial Sequence
  Description of Artificial Sequence: Synthetic oligonucleotide
uuguccaguagggaaguca

SEQ ID NO: 2261351 - RNA, 19 nt, Artificial Sequence
  Description of Artificial Sequence: Synthetic oligonucleotide
uuuuguccaguagggaagu

SEQ ID NO: 2261352 - RNA, 19 nt, Artificial Sequence
  Description of Artificial Sequence: Synthetic oligonucleotide
uaccaggggauggugacug

SEQ ID NO: 2261353 - RNA, 19 nt, Artificial Sequence
  Description of Artificial Sequence: Synthetic oligonucleotide
aacucuccagaaacuagga

SEQ ID NO: 2261354 - RNA, 19 nt, Artificial Sequence
  Description of Artificial Sequence: Synthetic oligonucleotide
cuguaacuaagugccagug

SEQ ID NO: 2261355 - RNA, 19 nt, Artificial Sequence
  Description of Artificial Sequence: Synthetic oligonucleotide
caucaguaccaggggaugg

SEQ ID NO: 2261356 - RNA, 19 nt, Artificial Sequence
  Description of Artificial Sequence: Synthetic oligonucleotide
gugggaacauggaacauca

SEQ ID NO: 2261357 - RNA, 19 nt, Artificial Sequence
  Description of Artificial Sequence: Synthetic oligonucleotide
uaagugccagugucagagc

SEQ ID NO: 2261358 - RNA, 19 nt, Artificial Sequence
  Description of Artificial Sequence: Synthetic oligonucleotide
gggaacauggaacaucaaa

SEQ ID NO: 2261359 - RNA, 19 nt, Artificial Sequence
  Description of Artificial Sequence: Synthetic oligonucleotide
agaaacuaggagccugcuu

SEQ ID NO: 2261360 - RNA, 19 nt, Artificial Sequence
  Description of Artificial Sequence: Synthetic oligonucleotide
ccaacucuccagaaacuag

SEQ ID NO: 2261361 - RNA, 19 nt, Artificial Sequence
  Description of Artificial Sequence: Synthetic oligonucleotide
acuaagugccagugucaga

SEQ ID NO: 2261362 - RNA, 19 nt, Artificial Sequence
  Description of Artificial Sequence: Synthetic oligonucleotide
aucaguaccaggggauggu

SEQ ID NO: 2261363 - RNA, 19 nt, Artificial Sequence
  Description of Artificial Sequence: Synthetic oligonucleotide
ccagaaacuaggagccugc

SEQ ID NO: 2261364 - RNA, 19 nt, Artificial Sequence
  Description of Artificial Sequence: Synthetic oligonucleotide
agugccagugucagagcug

SEQ ID NO: 2261365 - RNA, 19 nt, Artificial Sequence
  Description of Artificial Sequence: Synthetic oligonucleotide
ccaguagggaagucauagc

SEQ ID NO: 2261366 - RNA, 19 nt, Artificial Sequence
  Description of Artificial Sequence: Synthetic oligonucleotide
ugggaacauggaacaucaa

SEQ ID NO: 2261367 - RNA, 19 nt, Artificial Sequence
  Description of Artificial Sequence: Synthetic oligonucleotide
caguaccaggggaugguga

SEQ ID NO: 2261368 - RNA, 19 nt, Artificial Sequence
  Description of Artificial Sequence: Synthetic oligonucleotide
uuuguccaguagggaaguc

SEQ ID NO: 2261369 - RNA, 19 nt, Artificial Sequence
  Description of Artificial Sequence: Synthetic oligonucleotide
gccagugucagagcugaug

SEQ ID NO: 2261370 - RNA, 19 nt, Artificial Sequence
  Description of Artificial Sequence: Synthetic oligonucleotide
gcaucaguaccaggggaug

SEQ ID NO: 2261371 - RNA, 19 nt, Artificial Sequence
  Description of Artificial Sequence: Synthetic oligonucleotide
accaggggauggugacugu

SEQ ID NO: 2261372 - RNA, 19 nt, Artificial Sequence
  Description of Artificial Sequence: Synthetic oligonucleotide
gcuguaacuaagugccagu

SEQ ID NO: 2261373 - RNA, 19 nt, Artificial Sequence
  Description of Artificial Sequence: Synthetic oligonucleotide
cagcuguaacuaagugcca

SEQ ID NO: 2261374 - RNA, 19 nt, Artificial Sequence
  Description of Artificial Sequence: Synthetic oligonucleotide
caggggauggugacugugu

SEQ ID NO: 2261375 - RNA, 19 nt, Artificial Sequence
  Description of Artificial Sequence: Synthetic oligonucleotide
ccaaaacuuaagcauuggu

SEQ ID NO: 2261376 - RNA, 19 nt, Artificial Sequence
  Description of Artificial Sequence: Synthetic oligonucleotide
guaccaggggauggugacu

SEQ ID NO: 2261377 - RNA, 19 nt, Artificial Sequence
  Description of Artificial Sequence: Synthetic oligonucleotide
cagaaacuaggagccugcu

SEQ ID NO: 2261378 - RNA, 19 nt, Artificial Sequence
  Description of Artificial Sequence: Synthetic oligonucleotide
cccaacucuccagaaacua

SEQ ID NO: 2261379 - RNA, 19 nt, Artificial Sequence
  Description of Artificial Sequence: Synthetic oligonucleotide
guccaguagggaagucaua

SEQ ID NO: 2261380 - RNA, 19 nt, Artificial Sequence
  Description of Artificial Sequence: Synthetic oligonucleotide
cagugggaacauggaacau

SEQ ID NO: 2261381 - RNA, 19 nt, Artificial Sequence
  Description of Artificial Sequence: Synthetic oligonucleotide
gcccaacucuccagaaacu

SEQ ID NO: 2261382 - RNA, 19 nt, Artificial Sequence
  Description of Artificial Sequence: Synthetic oligonucleotide
aacacuacggucuaccggg

SEQ ID NO: 2261383 - RNA, 19 nt, Artificial Sequence
  Description of Artificial Sequence: Synthetic oligonucleotide
aaauagggcagauaagguc

SEQ ID NO: 2261384 - RNA, 19 nt, Artificial Sequence
  Description of Artificial Sequence: Synthetic oligonucleotide
caugucgucacccauaugc

SEQ ID NO: 2261385 - RNA, 19 nt, Artificial Sequence
  Description of Artificial Sequence: Synthetic oligonucleotide
ugcgcaaauaucaugacga

SEQ ID NO: 2261386 - RNA, 19 nt, Artificial Sequence
  Description of Artificial Sequence: Synthetic oligonucleotide
cuugauuacagccuggagc

SEQ ID NO: 2261387 - RNA, 19 nt, Artificial Sequence
  Description of Artificial Sequence: Synthetic oligonucleotide
uugauuacagccuggagca

SEQ ID NO: 2261388 - RNA, 19 nt, Artificial Sequence
  Description of Artificial Sequence: Synthetic oligonucleotide
uguggcaagacccuggggc

SEQ ID NO: 2261389 - RNA, 19 nt, Artificial Sequence
  Description of Artificial Sequence: Synthetic oligonucleotide
ugcaauugugauuuggcag

SEQ ID NO: 2261390 - RNA, 19 nt, Artificial Sequence
  Description of Artificial Sequence: Synthetic oligonucleotide
gaugucucgcuucuguucg

SEQ ID NO: 2261391 - RNA, 19 nt, Artificial Sequence
  Description of Artificial Sequence: Synthetic oligonucleotide
gaugcgcuuagccacauag

SEQ ID NO: 2261392 - RNA, 19 nt, Artificial Sequence
  Description of Artificial Sequence: Synthetic oligonucleotide
acgcauauaagccuucaac

SEQ ID NO: 2261393 - RNA, 19 nt, Artificial Sequence
  Description of Artificial Sequence: Synthetic oligonucleotide
ugauccgagguacugggcg

SEQ ID NO: 2261394 - RNA, 19 nt, Artificial Sequence
  Description of Artificial Sequence: Synthetic oligonucleotide
aaggcaugcucacagugag

SEQ ID NO: 2261395 - RNA, 19 nt, Artificial Sequence
  Description of Artificial Sequence: Synthetic oligonucleotide
cauauaagccuucaacagc

SEQ ID NO: 2261396 - RNA, 19 nt, Artificial Sequence
  Description of Artificial Sequence: Synthetic oligonucleotide
cauaguucucauaguagcg

SEQ ID NO: 2261397 - RNA, 19 nt, Artificial Sequence
  Description of Artificial Sequence: Synthetic oligonucleotide
aguuaugcugcucucuuag

SEQ ID NO: 2261398 - RNA, 19 nt, Artificial Sequence
  Description of Artificial Sequence: Synthetic oligonucleotide
ucuuagaucuccuccacac

SEQ ID NO: 2261399 - RNA, 19 nt, Artificial Sequence
  Description of Artificial Sequence: Synthetic oligonucleotide
ugacaauagaggcugggca

SEQ ID NO: 2261400 - RNA, 19 nt, Artificial Sequence
  Description of Artificial Sequence: Synthetic oligonucleotide
cucauagccaguuaugcug

SEQ ID NO: 2261401 - RNA, 19 nt, Artificial Sequence
  Description of Artificial Sequence: Synthetic oligonucleotide
acaacagccugcuugccgg

SEQ ID NO: 2261402 - RNA, 19 nt, Artificial Sequence
  Description of Artificial Sequence: Synthetic oligonucleotide
caaucuguagcuuugacaa

SEQ ID NO: 2261403 - RNA, 19 nt, Artificial Sequence
  Description of Artificial Sequence: Synthetic oligonucleotide
cucuaguguggcaagaccc

SEQ ID NO: 2261404 - RNA, 19 nt, Artificial Sequence
  Description of Artificial Sequence: Synthetic oligonucleotide
aucucauuguacucaauug

SEQ ID NO: 2261405 - RNA, 19 nt, Artificial Sequence
  Description of Artificial Sequence: Synthetic oligonucleotide
ucauuguacucaauugucu

SEQ ID NO: 2261406 - RNA, 19 nt, Artificial Sequence
  Description of Artificial Sequence: Synthetic oligonucleotide
auaagccuucaacagcugg

SEQ ID NO: 2261407 - RNA, 19 nt, Artificial Sequence
  Description of Artificial Sequence: Synthetic oligonucleotide
uaaugcaauugugauuugg

SEQ ID NO: 2261408 - RNA, 19 nt, Artificial Sequence
  Description of Artificial Sequence: Synthetic oligonucleotide
agguacugggcguaggugg

SEQ ID NO: 2261409 - RNA, 19 nt, Artificial Sequence
  Description of Artificial Sequence: Synthetic oligonucleotide
ugacacuucggaucgcacg

SEQ ID NO: 2261410 - RNA, 19 nt, Artificial Sequence
  Description of Artificial Sequence: Synthetic oligonucleotide
aauaucaugacgagcccug

SEQ ID NO: 2261411 - RNA, 19 nt, Artificial Sequence
  Description of Artificial Sequence: Synthetic oligonucleotide
aaccgugacaacacuacgg

SEQ ID NO: 2261412 - RNA, 19 nt, Artificial Sequence
  Description of Artificial Sequence: Synthetic oligonucleotide
caugauccgagguacuggg

SEQ ID NO: 2261413 - RNA, 19 nt, Artificial Sequence
  Description of Artificial Sequence: Synthetic oligonucleotide
uaagccuucaacagcugga

SEQ ID NO: 2261414 - RNA, 19 nt, Artificial Sequence
  Description of Artificial Sequence: Synthetic oligonucleotide
ucguugacaauagaggcug

SEQ ID NO: 2261415 - RNA, 19 nt, Artificial Sequence
  Description of Artificial Sequence: Synthetic oligonucleotide
ucaacagcuggaugucucg

SEQ ID NO: 2261416 - RNA, 19 nt, Artificial Sequence
  Description of Artificial Sequence: Synthetic oligonucleotide
gacacuucggaucgcacgc

SEQ ID NO: 2261417 - RNA, 19 nt, Artificial Sequence
  Description of Artificial Sequence: Synthetic oligonucleotide
augcgcaaauaucaugacg

SEQ ID NO: 2261418 - RNA, 19 nt, Artificial Sequence
  Description of Artificial Sequence: Synthetic oligonucleotide
ugcuuaaugcaauugugau

SEQ ID NO: 2261419 - RNA, 19 nt, Artificial Sequence
  Description of Artificial Sequence: Synthetic oligonucleotide
ugucaagccggacaacagc

SEQ ID NO: 2261420 - RNA, 19 nt, Artificial Sequence
  Description of Artificial Sequence: Synthetic oligonucleotide
auauaagccuucaacagcu

SEQ ID NO: 2261421 - RNA, 19 nt, Artificial Sequence
  Description of Artificial Sequence: Synthetic oligonucleotide
ugcaaauagggcagauaag

SEQ ID NO: 2261422 - RNA, 19 nt, Artificial Sequence
  Description of Artificial Sequence: Synthetic oligonucleotide
uugggguugacacuucgga

SEQ ID NO: 2261423 - RNA, 19 nt, Artificial Sequence
  Description of Artificial Sequence: Synthetic oligonucleotide
ugagagaaccacuggguga

SEQ ID NO: 2261424 - RNA, 19 nt, Artificial Sequence
  Description of Artificial Sequence: Synthetic oligonucleotide
uuaugcugcucucuuagau

SEQ ID NO: 2261425 - RNA, 19 nt, Artificial Sequence
  Description of Artificial Sequence: Synthetic oligonucleotide
cucauuguacucaauuguc

SEQ ID NO: 2261426 - RNA, 19 nt, Artificial Sequence
  Description of Artificial Sequence: Synthetic oligonucleotide
aacacagcguugucacagg

SEQ ID NO: 2261427 - RNA, 19 nt, Artificial Sequence
  Description of Artificial Sequence: Synthetic oligonucleotide
acuacggucuaccgggcac

SEQ ID NO: 2261428 - RNA, 19 nt, Artificial Sequence
  Description of Artificial Sequence: Synthetic oligonucleotide
uaguucucauaguagcgcc

SEQ ID NO: 2261429 - RNA, 19 nt, Artificial Sequence
  Description of Artificial Sequence: Synthetic oligonucleotide
gaucgcacgcauauaagcc

SEQ ID NO: 2261430 - RNA, 19 nt, Artificial Sequence
  Description of Artificial Sequence: Synthetic oligonucleotide
cauuguacucaauugucuc

SEQ ID NO: 2261431 - RNA, 19 nt, Artificial Sequence
  Description of Artificial Sequence: Synthetic oligonucleotide
agcucguugacaauagagg

SEQ ID NO: 2261432 - RNA, 19 nt, Artificial Sequence
  Description of Artificial Sequence: Synthetic oligonucleotide
agaaggcaugcucacagug

SEQ ID NO: 2261433 - RNA, 19 nt, Artificial Sequence
  Description of Artificial Sequence: Synthetic oligonucleotide
gacaacauguuccgcauga

SEQ ID NO: 2261434 - RNA, 19 nt, Artificial Sequence
  Description of Artificial Sequence: Synthetic oligonucleotide
aguucugcgauucgagucu

SEQ ID NO: 2261435 - RNA, 19 nt, Artificial Sequence
  Description of Artificial Sequence: Synthetic oligonucleotide
gcauauaagccuucaacag

SEQ ID NO: 2261436 - RNA, 19 nt, Artificial Sequence
  Description of Artificial Sequence: Synthetic oligonucleotide
gugauuuggcagcucaucc

SEQ ID NO: 2261437 - RNA, 19 nt, Artificial Sequence
  Description of Artificial Sequence: Synthetic oligonucleotide
uaugcugguucucgcaggc

SEQ ID NO: 2261438 - RNA, 19 nt, Artificial Sequence
  Description of Artificial Sequence: Synthetic oligonucleotide
acaacacuacggucuaccg

SEQ ID NO: 2261439 - RNA, 19 nt, Artificial Sequence
  Description of Artificial Sequence: Synthetic oligonucleotide
acaugagguugucaagccg

SEQ ID NO: 2261440 - RNA, 19 nt, Artificial Sequence
  Description of Artificial Sequence: Synthetic oligonucleotide
agggaguucacccacucga

SEQ ID NO: 2261441 - RNA, 19 nt, Artificial Sequence
  Description of Artificial Sequence: Synthetic oligonucleotide
gcaauugugauuuggcagc

SEQ ID NO: 2261442 - RNA, 19 nt, Artificial Sequence
  Description of Artificial Sequence: Synthetic oligonucleotide
ucuaguguggcaagacccu

SEQ ID NO: 2261443 - RNA, 19 nt, Artificial Sequence
  Description of Artificial Sequence: Synthetic oligonucleotide
gacaugagguugucaagcc

SEQ ID NO: 2261444 - RNA, 19 nt, Artificial Sequence
  Description of Artificial Sequence: Synthetic oligonucleotide
ucggaucgcacgcauauaa

SEQ ID NO: 2261445 - RNA, 19 nt, Artificial Sequence
  Description of Artificial Sequence: Synthetic oligonucleotide
cagcucguugacaauagag

SEQ ID NO: 2261446 - RNA, 19 nt, Artificial Sequence
  Description of Artificial Sequence: Synthetic oligonucleotide
uccucauagccaguuaugc

SEQ ID NO: 2261447 - RNA, 19 nt, Artificial Sequence
  Description of Artificial Sequence: Synthetic oligonucleotide
gauucgagucugcugcugc

SEQ ID NO: 2261448 - RNA, 19 nt, Artificial Sequence
  Description of Artificial Sequence: Synthetic oligonucleotide
ucggguugugcucacaguc

SEQ ID NO: 2261449 - RNA, 19 nt, Artificial Sequence
  Description of Artificial Sequence: Synthetic oligonucleotide
auaugcugguucucgcagg

SEQ ID NO: 2261450 - RNA, 19 nt, Artificial Sequence
  Description of Artificial Sequence: Synthetic oligonucleotide
ugauuuggcagcucauccu

SEQ ID NO: 2261451 - RNA, 19 nt, Artificial Sequence
  Description of Artificial Sequence: Synthetic oligonucleotide
ugcgcuuagccacauaguu

SEQ ID NO: 2261452 - RNA, 19 nt, Artificial Sequence
  Description of Artificial Sequence: Synthetic oligonucleotide
gacaacacuacggucuacc

SEQ ID NO: 2261453 - RNA, 19 nt, Artificial Sequence
  Description of Artificial Sequence: Synthetic oligonucleotide
cauaugcugguucucgcag

SEQ ID NO: 2261454 - RNA, 19 nt, Artificial Sequence
  Description of Artificial Sequence: Synthetic oligonucleotide
aggugcuuaaugcaauugu

SEQ ID NO: 2261455 - RNA, 19 nt, Artificial Sequence
  Description of Artificial Sequence: Synthetic oligonucleotide
agcguugucacaggcaauc

SEQ ID NO: 2261456 - RNA, 19 nt, Artificial Sequence
  Description of Artificial Sequence: Synthetic oligonucleotide
gucgucacccauaugcugg

SEQ ID NO: 2261457 - RNA, 19 nt, Artificial Sequence
  Description of Artificial Sequence: Synthetic oligonucleotide
augcaauugugauuuggca

SEQ ID NO: 2261458 - RNA, 19 nt, Artificial Sequence
  Description of Artificial Sequence: Synthetic oligonucleotide
gagcgcaggugcuuaaugc

SEQ ID NO: 2261459 - RNA, 19 nt, Artificial Sequence
  Description of Artificial Sequence: Synthetic oligonucleotide
ugcucacagucacugaggu

SEQ ID NO: 2261460 - RNA, 19 nt, Artificial Sequence
  Description of Artificial Sequence: Synthetic oligonucleotide
uugacaauagaggcugggc

SEQ ID NO: 2261461 - RNA, 19 nt, Artificial Sequence
  Description of Artificial Sequence: Synthetic oligonucleotide
caacacuacggucuaccgg

SEQ ID NO: 2261462 - RNA, 19 nt, Artificial Sequence
  Description of Artificial Sequence: Synthetic oligonucleotide
agugaggugccuguacugg

SEQ ID NO: 2261463 - RNA, 19 nt, Artificial Sequence
  Description of Artificial Sequence: Synthetic oligonucleotide
uucaacagcuggaugucuc

SEQ ID NO: 2261464 - RNA, 19 nt, Artificial Sequence
  Description of Artificial Sequence: Synthetic oligonucleotide
uguuccgcaugauccgagg

SEQ ID NO: 2261465 - RNA, 19 nt, Artificial Sequence
  Description of Artificial Sequence: Synthetic oligonucleotide
acaccaugcgcaaauauca

SEQ ID NO: 2261466 - RNA, 19 nt, Artificial Sequence
  Description of Artificial Sequence: Synthetic oligonucleotide
cuuaaugcaauugugauuu

SEQ ID NO: 2261467 - RNA, 19 nt, Artificial Sequence
  Description of Artificial Sequence: Synthetic oligonucleotide
ggucacaggucacaggccg

SEQ ID NO: 2261468 - RNA, 19 nt, Artificial Sequence
  Description of Artificial Sequence: Synthetic oligonucleotide
accgugacaacacuacggu

SEQ ID NO: 2261469 - RNA, 19 nt, Artificial Sequence
  Description of Artificial Sequence: Synthetic oligonucleotide
cugucuugucucuagugug

SEQ ID NO: 2261470 - RNA, 19 nt, Artificial Sequence
  Description of Artificial Sequence: Synthetic oligonucleotide
ucagcggacgucuucucca

SEQ ID NO: 2261471 - RNA, 19 nt, Artificial Sequence
  Description of Artificial Sequence: Synthetic oligonucleotide
aggagcgcuugauuacagc

SEQ ID NO: 2261472 - RNA, 19 nt, Artificial Sequence
  Description of Artificial Sequence: Synthetic oligonucleotide
uaucaugacgagcccuggc

SEQ ID NO: 2261473 - RNA, 19 nt, Artificial Sequence
  Description of Artificial Sequence: Synthetic oligonucleotide
gcucguugacaauagaggc

SEQ ID NO: 2261474 - RNA, 19 nt, Artificial Sequence
  Description of Artificial Sequence: Synthetic oligonucleotide
cacaccaugcgcaaauauc

SEQ ID NO: 2261475 - RNA, 19 nt, Artificial Sequence
  Description of Artificial Sequence: Synthetic oligonucleotide
ucauaguagcgccgguuca

SEQ ID NO: 2261476 - RNA, 19 nt, Artificial Sequence
  Description of Artificial Sequence: Synthetic oligonucleotide
ugggcaaccgugacaacac

SEQ ID NO: 2261477 - RNA, 19 nt, Artificial Sequence
  Description of Artificial Sequence: Synthetic oligonucleotide
aucgcacgcauauaagccu

SEQ ID NO: 2261478 - RNA, 19 nt, Artificial Sequence
  Description of Artificial Sequence: Synthetic oligonucleotide
accaaggagcgcuugauua

SEQ ID NO: 2261479 - RNA, 19 nt, Artificial Sequence
  Description of Artificial Sequence: Synthetic oligonucleotide
cuuagaucuccuccacacc

SEQ ID NO: 2261480 - RNA, 19 nt, Artificial Sequence
  Description of Artificial Sequence: Synthetic oligonucleotide
aucugucuugucucuagug

SEQ ID NO: 2261481 - RNA, 19 nt, Artificial Sequence
  Description of Artificial Sequence: Synthetic oligonucleotide
uguucggccagcuggugcu

SEQ ID NO: 2261482 - RNA, 19 nt, Artificial Sequence
  Description of Artificial Sequence: Synthetic oligonucleotide
agcgggucacucuugccgg

SEQ ID NO: 2261483 - RNA, 19 nt, Artificial Sequence
  Description of Artificial Sequence: Synthetic oligonucleotide
uucagcggacgucuucucc

SEQ ID NO: 2261484 - RNA, 19 nt, Artificial Sequence
  Description of Artificial Sequence: Synthetic oligonucleotide
guacucaauugucuccucc

SEQ ID NO: 2261485 - RNA, 19 nt, Artificial Sequence
  Description of Artificial Sequence: Synthetic oligonucleotide
ucacccauaugcugguucu

SEQ ID NO: 2261486 - RNA, 19 nt, Artificial Sequence
  Description of Artificial Sequence: Synthetic oligonucleotide
uggugcuuguguucagcgg

SEQ ID NO: 2261487 - RNA, 19 nt, Artificial Sequence
  Description of Artificial Sequence: Synthetic oligonucleotide
ggagcgcuugauuacagcc

SEQ ID NO: 2261488 - RNA, 19 nt, Artificial Sequence
  Description of Artificial Sequence: Synthetic oligonucleotide
caccacagagcgcaggugc

SEQ ID NO: 2261489 - RNA, 19 nt, Artificial Sequence
  Description of Artificial Sequence: Synthetic oligonucleotide
accaugcgcaaauaucaug

SEQ ID NO: 2261490 - RNA, 19 nt, Artificial Sequence
  Description of Artificial Sequence: Synthetic oligonucleotide
cugagagaaccacugggug

SEQ ID NO: 2261491 - RNA, 19 nt, Artificial Sequence
  Description of Artificial Sequence: Synthetic oligonucleotide
cagcgggucacucuugccg

SEQ ID NO: 2261492 - RNA, 19 nt, Artificial Sequence
  Description of Artificial Sequence: Synthetic oligonucleotide
ggguugacacuucggaucg

SEQ ID NO: 2261493 - RNA, 19 nt, Artificial Sequence
  Description of Artificial Sequence: Synthetic oligonucleotide
caugacgagcccuggcucc

SEQ ID NO: 2261494 - RNA, 19 nt, Artificial Sequence
  Description of Artificial Sequence: Synthetic oligonucleotide
ggaucgcacgcauauaagc

SEQ ID NO: 2261495 - RNA, 19 nt, Artificial Sequence
  Description of Artificial Sequence: Synthetic oligonucleotide
ugucgucacccauaugcug

SEQ ID NO: 2261496 - RNA, 19 nt, Artificial Sequence
  Description of Artificial Sequence: Synthetic oligonucleotide
uugacaacauguuccgcau

SEQ ID NO: 2261497 - RNA, 19 nt, Artificial Sequence
  Description of Artificial Sequence: Synthetic oligonucleotide
agauaagguccucgucaac

SEQ ID NO: 2261498 - RNA, 19 nt, Artificial Sequence
  Description of Artificial Sequence: Synthetic oligonucleotide
caguucugcgauucgaguc

SEQ ID NO: 2261499 - RNA, 19 nt, Artificial Sequence
  Description of Artificial Sequence: Synthetic oligonucleotide
ucgagucugcugcugcugc

SEQ ID NO: 2261500 - RNA, 19 nt, Artificial Sequence
  Description of Artificial Sequence: Synthetic oligonucleotide
uguucagcggacgucuucu

SEQ ID NO: 2261501 - RNA, 19 nt, Artificial Sequence
  Description of Artificial Sequence: Synthetic oligonucleotide
uuguguucagcggacgucu

SEQ ID NO: 2261502 - RNA, 19 nt, Artificial Sequence
  Description of Artificial Sequence: Synthetic oligonucleotide
acgucuucuccaguucugc

SEQ ID NO: 2261503 - RNA, 19 nt, Artificial Sequence
  Description of Artificial Sequence: Synthetic oligonucleotide
gaucaucccuccccagcgg

SEQ ID NO: 2261504 - RNA, 19 nt, Artificial Sequence
  Description of Artificial Sequence: Synthetic oligonucleotide
agcgcaggugcuuaaugca

SEQ ID NO: 2261505 - RNA, 19 nt, Artificial Sequence
  Description of Artificial Sequence: Synthetic oligonucleotide
ugugauuuggcagcucauc

SEQ ID NO: 2261506 - RNA, 19 nt, Artificial Sequence
  Description of Artificial Sequence: Synthetic oligonucleotide
uccgcaugauccgagguac

SEQ ID NO: 2261507 - RNA, 19 nt, Artificial Sequence
  Description of Artificial Sequence: Synthetic oligonucleotide
cuucggguugugcucacag

SEQ ID NO: 2261508 - RNA, 19 nt, Artificial Sequence
  Description of Artificial Sequence: Synthetic oligonucleotide
caaccgugacaacacuacg

SEQ ID NO: 2261509 - RNA, 19 nt, Artificial Sequence
  Description of Artificial Sequence: Synthetic oligonucleotide
ugcagccaaacacagcguu

SEQ ID NO: 2261510 - RNA, 19 nt, Artificial Sequence
  Description of Artificial Sequence: Synthetic oligonucleotide
ucaugacgagcccuggcuc

SEQ ID NO: 2261511 - RNA, 19 nt, Artificial Sequence
  Description of Artificial Sequence: Synthetic oligonucleotide
acccauaugcugguucucg

SEQ ID NO: 2261512 - RNA, 19 nt, Artificial Sequence
  Description of Artificial Sequence: Synthetic oligonucleotide
ugacaacauguuccgcaug

SEQ ID NO: 2261513 - RNA, 19 nt, Artificial Sequence
  Description of Artificial Sequence: Synthetic oligonucleotide
uucuguucggccagcuggu

SEQ ID NO: 2261514 - RNA, 19 nt, Artificial Sequence
  Description of Artificial Sequence: Synthetic oligonucleotide
gauuacagccuggagcaca

SEQ ID NO: 2261515 - RNA, 19 nt, Artificial Sequence
  Description of Artificial Sequence: Synthetic oligonucleotide
agagcgcaggugcuuaaug

SEQ ID NO: 2261516 - RNA, 19 nt, Artificial Sequence
  Description of Artificial Sequence: Synthetic oligonucleotide
uuaaugcaauugugauuug

SEQ ID NO: 2261517 - RNA, 19 nt, Artificial Sequence
  Description of Artificial Sequence: Synthetic oligonucleotide
gaucucauuguacucaauu

SEQ ID NO: 2261518 - RNA, 19 nt, Artificial Sequence
  Description of Artificial Sequence: Synthetic oligonucleotide
cucgaggaucucauuguac

SEQ ID NO: 2261519 - RNA, 19 nt, Artificial Sequence
  Description of Artificial Sequence: Synthetic oligonucleotide
guugucaagccggacaaca

SEQ ID NO: 2261520 - RNA, 19 nt, Artificial Sequence
  Description of Artificial Sequence: Synthetic oligonucleotide
aguucucauaguagcgccg

SEQ ID NO: 2261521 - RNA, 19 nt, Artificial Sequence
  Description of Artificial Sequence: Synthetic oligonucleotide
cucucuuagaucuccucca

SEQ ID NO: 2261522 - RNA, 19 nt, Artificial Sequence
  Description of Artificial Sequence: Synthetic oligonucleotide
caggcaaucuguagcuuug

SEQ ID NO: 2261523 - RNA, 19 nt, Artificial Sequence
  Description of Artificial Sequence: Synthetic oligonucleotide
agggcagauaagguccucg

SEQ ID NO: 2261524 - RNA, 19 nt, Artificial Sequence
  Description of Artificial Sequence: Synthetic oligonucleotide
uacguucaugugcauuuuc

SEQ ID NO: 2261525 - RNA, 19 nt, Artificial Sequence
  Description of Artificial Sequence: Synthetic oligonucleotide
ucaagccggacaacagcac

SEQ ID NO: 2261526 - RNA, 19 nt, Artificial Sequence
  Description of Artificial Sequence: Synthetic oligonucleotide
auuacagccuggagcacag

SEQ ID NO: 2261527 - RNA, 19 nt, Artificial Sequence
  Description of Artificial Sequence: Synthetic oligonucleotide
acgucugcugcugagagaa

SEQ ID NO: 2261528 - RNA, 19 nt, Artificial Sequence
  Description of Artificial Sequence: Synthetic oligonucleotide
gcucucuuagaucuccucc

SEQ ID NO: 2261529 - RNA, 19 nt, Artificial Sequence
  Description of Artificial Sequence: Synthetic oligonucleotide
caugcgcaaauaucaugac

SEQ ID NO: 2261530 - RNA, 19 nt, Artificial Sequence
  Description of Artificial Sequence: Synthetic oligonucleotide
uaggugggcaaccgugaca

SEQ ID NO: 2261531 - RNA, 19 nt, Artificial Sequence
  Description of Artificial Sequence: Synthetic oligonucleotide
aagccggacaacagcacug

SEQ ID NO: 2261532 - RNA, 19 nt, Artificial Sequence
  Description of Artificial Sequence: Synthetic oligonucleotide
agccggacaacagcacugc

SEQ ID NO: 2261533 - RNA, 19 nt, Artificial Sequence
  Description of Artificial Sequence: Synthetic oligonucleotide
ggugcuuaaugcaauugug

SEQ ID NO: 2261534 - RNA, 19 nt, Artificial Sequence
  Description of Artificial Sequence: Synthetic oligonucleotide
cacucuugccggcugcagg

SEQ ID NO: 2261535 - RNA, 19 nt, Artificial Sequence
  Description of Artificial Sequence: Synthetic oligonucleotide
uuccgcaugauccgaggua

SEQ ID NO: 2261536 - RNA, 19 nt, Artificial Sequence
  Description of Artificial Sequence: Synthetic oligonucleotide
uaccgggcacgucugcugc

SEQ ID NO: 2261537 - RNA, 19 nt, Artificial Sequence
  Description of Artificial Sequence: Synthetic oligonucleotide
ucugcgauucgagucugcu

SEQ ID NO: 2261538 - RNA, 19 nt, Artificial Sequence
  Description of Artificial Sequence: Synthetic oligonucleotide
gugcuuaaugcaauuguga

SEQ ID NO: 2261539 - RNA, 19 nt, Artificial Sequence
  Description of Artificial Sequence: Synthetic oligonucleotide
accaugucgucacccauau

SEQ ID NO: 2261540 - RNA, 19 nt, Artificial Sequence
  Description of Artificial Sequence: Synthetic oligonucleotide
ggaguucacccacucgagg

SEQ ID NO: 2261541 - RNA, 19 nt, Artificial Sequence
  Description of Artificial Sequence: Synthetic oligonucleotide
uugacacuucggaucgcac

SEQ ID NO: 2261542 - RNA, 19 nt, Artificial Sequence
  Description of Artificial Sequence: Synthetic oligonucleotide
auaguagcgccgguucauc

SEQ ID NO: 2261543 - RNA, 19 nt, Artificial Sequence
  Description of Artificial Sequence: Synthetic oligonucleotide
aagccuucaacagcuggau

SEQ ID NO: 2261544 - RNA, 19 nt, Artificial Sequence
  Description of Artificial Sequence: Synthetic oligonucleotide
caggucacaggccgcuucg

SEQ ID NO: 2261545 - RNA, 19 nt, Artificial Sequence
  Description of Artificial Sequence: Synthetic oligonucleotide
agcacagcgucaggggugg

SEQ ID NO: 2261546 - RNA, 19 nt, Artificial Sequence
  Description of Artificial Sequence: Synthetic oligonucleotide
gggguugacacuucggauc

SEQ ID NO: 2261547 - RNA, 19 nt, Artificial Sequence
  Description of Artificial Sequence: Synthetic oligonucleotide
ugggguugacacuucggau

SEQ ID NO: 2261548 - RNA, 19 nt, Artificial Sequence
  Description of Artificial Sequence: Synthetic oligonucleotide
aucagcucguugacaauag

SEQ ID NO: 2261549 - RNA, 19 nt, Artificial Sequence
  Description of Artificial Sequence: Synthetic oligonucleotide
ugcuuguguucagcggacg

SEQ ID NO: 2261550 - RNA, 19 nt, Artificial Sequence
  Description of Artificial Sequence: Synthetic oligonucleotide
auagccaguuaugcugcuc

SEQ ID NO: 2261551 - RNA, 19 nt, Artificial Sequence
  Description of Artificial Sequence: Synthetic oligonucleotide
auucgagucugcugcugcu

SEQ ID NO: 2261552 - RNA, 19 nt, Artificial Sequence
  Description of Artificial Sequence: Synthetic oligonucleotide
ccaugcgcaaauaucauga

SEQ ID NO: 2261553 - RNA, 19 nt, Artificial Sequence
  Description of Artificial Sequence: Synthetic oligonucleotide
gucaagccggacaacagca

SEQ ID NO: 2261554 - RNA, 19 nt, Artificial Sequence
  Description of Artificial Sequence: Synthetic oligonucleotide
ugccuguacuggcuccucc

SEQ ID NO: 2261555 - RNA, 19 nt, Artificial Sequence
  Description of Artificial Sequence: Synthetic oligonucleotide
gucacccauaugcugguuc

SEQ ID NO: 2261556 - RNA, 19 nt, Artificial Sequence
  Description of Artificial Sequence: Synthetic oligonucleotide
cuguucggccagcuggugc

SEQ ID NO: 2261557 - RNA, 19 nt, Artificial Sequence
  Description of Artificial Sequence: Synthetic oligonucleotide
gguugggguugacacuucg

SEQ ID NO: 2261558 - RNA, 19 nt, Artificial Sequence
  Description of Artificial Sequence: Synthetic oligonucleotide
cagggguggagaucauccc

SEQ ID NO: 2261559 - RNA, 19 nt, Artificial Sequence
  Description of Artificial Sequence: Synthetic oligonucleotide
ucgcacgcauauaagccuu

SEQ ID NO: 2261560 - RNA, 19 nt, Artificial Sequence
  Description of Artificial Sequence: Synthetic oligonucleotide
uucggguugugcucacagu

SEQ ID NO: 2261561 - RNA, 19 nt, Artificial Sequence
  Description of Artificial Sequence: Synthetic oligonucleotide
caaauagggcagauaaggu

SEQ ID NO: 2261562 - RNA, 19 nt, Artificial Sequence
  Description of Artificial Sequence: Synthetic oligonucleotide
cagggaguucacccacucg

SEQ ID NO: 2261563 - RNA, 19 nt, Artificial Sequence
  Description of Artificial Sequence: Synthetic oligonucleotide
cuacggucuaccgggcacg

SEQ ID NO: 2261564 - RNA, 19 nt, Artificial Sequence
  Description of Artificial Sequence: Synthetic oligonucleotide
cuuguguucagcggacguc

SEQ ID NO: 2261565 - RNA, 19 nt, Artificial Sequence
  Description of Artificial Sequence: Synthetic oligonucleotide
augauccgagguacugggc

SEQ ID NO: 2261566 - RNA, 19 nt, Artificial Sequence
  Description of Artificial Sequence: Synthetic oligonucleotide
augucucgcuucuguucgg

SEQ ID NO: 2261567 - RNA, 19 nt, Artificial Sequence
  Description of Artificial Sequence: Synthetic oligonucleotide
uucgagucugcugcugcug

SEQ ID NO: 2261568 - RNA, 19 nt, Artificial Sequence
  Description of Artificial Sequence: Synthetic oligonucleotide
ugucucuaguguggcaaga

SEQ ID NO: 2261569 - RNA, 19 nt, Artificial Sequence
  Description of Artificial Sequence: Synthetic oligonucleotide
cugcgauucgagucugcug

SEQ ID NO: 2261570 - RNA, 19 nt, Artificial Sequence
  Description of Artificial Sequence: Synthetic oligonucleotide
ugucucgcuucuguucggc

SEQ ID NO: 2261571 - RNA, 19 nt, Artificial Sequence
  Description of Artificial Sequence: Synthetic oligonucleotide
cagauaagguccucgucaa

SEQ ID NO: 2261572 - RNA, 19 nt, Artificial Sequence
  Description of Artificial Sequence: Synthetic oligonucleotide
cagccuggagcacagcguc

SEQ ID NO: 2261573 - RNA, 19 nt, Artificial Sequence
  Description of Artificial Sequence: Synthetic oligonucleotide
ucucauaguagcgccgguu

SEQ ID NO: 2261574 - RNA, 19 nt, Artificial Sequence
  Description of Artificial Sequence: Synthetic oligonucleotide
cgcauauaagccuucaaca

SEQ ID NO: 2261575 - RNA, 19 nt, Artificial Sequence
  Description of Artificial Sequence: Synthetic oligonucleotide
guuaugcugcucucuuaga

SEQ ID NO: 2261576 - RNA, 19 nt, Artificial Sequence
  Description of Artificial Sequence: Synthetic oligonucleotide
caggugcuuaaugcaauug

SEQ ID NO: 2261577 - RNA, 19 nt, Artificial Sequence
  Description of Artificial Sequence: Synthetic oligonucleotide
agccuucaacagcuggaug

SEQ ID NO: 2261578 - RNA, 19 nt, Artificial Sequence
  Description of Artificial Sequence: Synthetic oligonucleotide
ucuaccgggcacgucugcu

SEQ ID NO: 2261579 - RNA, 19 nt, Artificial Sequence
  Description of Artificial Sequence: Synthetic oligonucleotide
acucgaggaucucauugua

SEQ ID NO: 2261580 - RNA, 19 nt, Artificial Sequence
  Description of Artificial Sequence: Synthetic oligonucleotide
uucugcgauucgagucugc

SEQ ID NO: 2261581 - RNA, 19 nt, Artificial Sequence
  Description of Artificial Sequence: Synthetic oligonucleotide
guugacacuucggaucgca

SEQ ID NO: 2261582 - RNA, 19 nt, Artificial Sequence
  Description of Artificial Sequence: Synthetic oligonucleotide
caagacuccacugcaaaua

SEQ ID NO: 2261583 - RNA, 19 nt, Artificial Sequence
  Description of Artificial Sequence: Synthetic oligonucleotide
guaggugggcaaccgugac

SEQ ID NO: 2261584 - RNA, 19 nt, Artificial Sequence
  Description of Artificial Sequence: Synthetic oligonucleotide
guacuggcuccuccaagac

SEQ ID NO: 2261585 - RNA, 19 nt, Artificial Sequence
  Description of Artificial Sequence: Synthetic oligonucleotide
ucgucacccauaugcuggu

SEQ ID NO: 2261586 - RNA, 19 nt, Artificial Sequence
  Description of Artificial Sequence: Synthetic oligonucleotide
gguacugggcguagguggg

SEQ ID NO: 2261587 - RNA, 19 nt, Artificial Sequence
  Description of Artificial Sequence: Synthetic oligonucleotide
ccagcuacguucaugugca

SEQ ID NO: 2261588 - RNA, 19 nt, Artificial Sequence
  Description of Artificial Sequence: Synthetic oligonucleotide
cuaccgggcacgucugcug

SEQ ID NO: 2261589 - RNA, 19 nt, Artificial Sequence
  Description of Artificial Sequence: Synthetic oligonucleotide
uugccggggaugcgcuuag

SEQ ID NO: 2261590 - RNA, 19 nt, Artificial Sequence
  Description of Artificial Sequence: Synthetic oligonucleotide
ccacucgaggaucucauug

SEQ ID NO: 2261591 - RNA, 19 nt, Artificial Sequence
  Description of Artificial Sequence: Synthetic oligonucleotide
ccuggggccagcuacguuc

SEQ ID NO: 2261592 - RNA, 19 nt, Artificial Sequence
  Description of Artificial Sequence: Synthetic oligonucleotide
cucguugacaauagaggcu

SEQ ID NO: 2261593 - RNA, 19 nt, Artificial Sequence
  Description of Artificial Sequence: Synthetic oligonucleotide
gcaugauccgagguacugg

SEQ ID NO: 2261594 - RNA, 19 nt, Artificial Sequence
  Description of Artificial Sequence: Synthetic oligonucleotide
acagcgucagggguggaga

SEQ ID NO: 2261595 - RNA, 19 nt, Artificial Sequence
  Description of Artificial Sequence: Synthetic oligonucleotide
caacagcuggaugucucgc

SEQ ID NO: 2261596 - RNA, 19 nt, Artificial Sequence
  Description of Artificial Sequence: Synthetic oligonucleotide
ugcuugccggggaugcgcu

SEQ ID NO: 2261597 - RNA, 19 nt, Artificial Sequence
  Description of Artificial Sequence: Synthetic oligonucleotide
ucucgcaggccaucaccac

SEQ ID NO: 2261598 - RNA, 19 nt, Artificial Sequence
  Description of Artificial Sequence: Synthetic oligonucleotide
gacccuggggccagcuacg

SEQ ID NO: 2261599 - RNA, 19 nt, Artificial Sequence
  Description of Artificial Sequence: Synthetic oligonucleotide
gucucuaguguggcaagac

SEQ ID NO: 2261600 - RNA, 19 nt, Artificial Sequence
  Description of Artificial Sequence: Synthetic oligonucleotide
augcugguucucgcaggcc

SEQ ID NO: 2261601 - RNA, 19 nt, Artificial Sequence
  Description of Artificial Sequence: Synthetic oligonucleotide
gcaaccgugacaacacuac

SEQ ID NO: 2261602 - RNA, 19 nt, Artificial Sequence
  Description of Artificial Sequence: Synthetic oligonucleotide
gcacgucugcugcugagag

SEQ ID NO: 2261603 - RNA, 19 nt, Artificial Sequence
  Description of Artificial Sequence: Synthetic oligonucleotide
gcgcaaauaucaugacgag

SEQ ID NO: 2261604 - RNA, 19 nt, Artificial Sequence
  Description of Artificial Sequence: Synthetic oligonucleotide
augucgucacccauaugcu

SEQ ID NO: 2261605 - RNA, 19 nt, Artificial Sequence
  Description of Artificial Sequence: Synthetic oligonucleotide
ccggacaacagcacugcag

SEQ ID NO: 2261606 - RNA, 19 nt, Artificial Sequence
  Description of Artificial Sequence: Synthetic oligonucleotide
gagagaaccacugggugau

SEQ ID NO: 2261607 - RNA, 19 nt, Artificial Sequence
  Description of Artificial Sequence: Synthetic oligonucleotide
ccaaggagcgcuugauuac

SEQ ID NO: 2261608 - RNA, 19 nt, Artificial Sequence
  Description of Artificial Sequence: Synthetic oligonucleotide
uacugggcguaggugggca

SEQ ID NO: 2261609 - RNA, 19 nt, Artificial Sequence
  Description of Artificial Sequence: Synthetic oligonucleotide
acacuacggucuaccgggc

SEQ ID NO: 2261610 - RNA, 19 nt, Artificial Sequence
  Description of Artificial Sequence: Synthetic oligonucleotide
ugggcguaggugggcaacc

SEQ ID NO: 2261611 - RNA, 19 nt, Artificial Sequence
  Description of Artificial Sequence: Synthetic oligonucleotide
ugguucucgcaggccauca

SEQ ID NO: 2261612 - RNA, 19 nt, Artificial Sequence
  Description of Artificial Sequence: Synthetic oligonucleotide
ggguugugcucacagucac

SEQ ID NO: 2261613 - RNA, 19 nt, Artificial Sequence
  Description of Artificial Sequence: Synthetic oligonucleotide
cucuuagaucuccuccaca

SEQ ID NO: 2261614 - RNA, 19 nt, Artificial Sequence
  Description of Artificial Sequence: Synthetic oligonucleotide
cagcggacgucuucuccag

SEQ ID NO: 2261615 - RNA, 19 nt, Artificial Sequence
  Description of Artificial Sequence: Synthetic oligonucleotide
agcgucagggguggagauc

SEQ ID NO: 2261616 - RNA, 19 nt, Artificial Sequence
  Description of Artificial Sequence: Synthetic oligonucleotide
ugagguugucaagccggac

SEQ ID NO: 2261617 - RNA, 19 nt, Artificial Sequence
  Description of Artificial Sequence: Synthetic oligonucleotide
cugcuugccggggaugcgc

SEQ ID NO: 2261618 - RNA, 19 nt, Artificial Sequence
  Description of Artificial Sequence: Synthetic oligonucleotide
cuugggcaucuccaggcca

SEQ ID NO: 2261619 - RNA, 19 nt, Artificial Sequence
  Description of Artificial Sequence: Synthetic oligonucleotide
auagggcagauaagguccu

SEQ ID NO: 2261620 - RNA, 19 nt, Artificial Sequence
  Description of Artificial Sequence: Synthetic oligonucleotide
gauccgagguacugggcgu

SEQ ID NO: 2261621 - RNA, 19 nt, Artificial Sequence
  Description of Artificial Sequence: Synthetic oligonucleotide
gacgagcccuggcuccugc

SEQ ID NO: 2261622 - RNA, 19 nt, Artificial Sequence
  Description of Artificial Sequence: Synthetic oligonucleotide
caaggagcgcuugauuaca

SEQ ID NO: 2261623 - RNA, 19 nt, Artificial Sequence
  Description of Artificial Sequence: Synthetic oligonucleotide
cagucacugaggugggaca

SEQ ID NO: 2261624 - RNA, 19 nt, Artificial Sequence
  Description of Artificial Sequence: Synthetic oligonucleotide
auguuccgcaugauccgag

SEQ ID NO: 2261625 - RNA, 19 nt, Artificial Sequence
  Description of Artificial Sequence: Synthetic oligonucleotide
uguguucagcggacgucuu

SEQ ID NO: 2261626 - RNA, 19 nt, Artificial Sequence
  Description of Artificial Sequence: Synthetic oligonucleotide
ugauuacagccuggagcac

SEQ ID NO: 2261627 - RNA, 19 nt, Artificial Sequence
  Description of Artificial Sequence: Synthetic oligonucleotide
agcgccgguucaucugucu

SEQ ID NO: 2261628 - RNA, 19 nt, Artificial Sequence
  Description of Artificial Sequence: Synthetic oligonucleotide
ggcguugcagaaggcaugc

SEQ ID NO: 2261629 - RNA, 19 nt, Artificial Sequence
  Description of Artificial Sequence: Synthetic oligonucleotide
cacagcgucagggguggag

SEQ ID NO: 2261630 - RNA, 19 nt, Artificial Sequence
  Description of Artificial Sequence: Synthetic oligonucleotide
guguucagcggacgucuuc

SEQ ID NO: 2261631 - RNA, 19 nt, Artificial Sequence
  Description of Artificial Sequence: Synthetic oligonucleotide
cuucggaucgcacgcauau

SEQ ID NO: 2261632 - RNA, 19 nt, Artificial Sequence
  Description of Artificial Sequence: Synthetic oligonucleotide
guucugcgauucgagucug

SEQ ID NO: 2261633 - RNA, 19 nt, Artificial Sequence
  Description of Artificial Sequence: Synthetic oligonucleotide
cacucgaggaucucauugu

SEQ ID NO: 2261634 - RNA, 19 nt, Artificial Sequence
  Description of Artificial Sequence: Synthetic oligonucleotide
ugcugcucucuuagaucuc

SEQ ID NO: 2261635 - RNA, 19 nt, Artificial Sequence
  Description of Artificial Sequence: Synthetic oligonucleotide
cccauaugcugguucucgc

SEQ ID NO: 2261636 - RNA, 19 nt, Artificial Sequence
  Description of Artificial Sequence: Synthetic oligonucleotide
aggcguugcagaaggcaug

SEQ ID NO: 2261637 - RNA, 19 nt, Artificial Sequence
  Description of Artificial Sequence: Synthetic oligonucleotide
aggcaugcucacagugagg

SEQ ID NO: 2261638 - RNA, 19 nt, Artificial Sequence
  Description of Artificial Sequence: Synthetic oligonucleotide
ggcagauaagguccucguc

SEQ ID NO: 2261639 - RNA, 19 nt, Artificial Sequence
  Description of Artificial Sequence: Synthetic oligonucleotide
acaacauguuccgcaugau

SEQ ID NO: 2261640 - RNA, 19 nt, Artificial Sequence
  Description of Artificial Sequence: Synthetic oligonucleotide
agcuacguucaugugcauu

SEQ ID NO: 2261641 - RNA, 19 nt, Artificial Sequence
  Description of Artificial Sequence: Synthetic oligonucleotide
guagcgccgguucaucugu

SEQ ID NO: 2261642 - RNA, 19 nt, Artificial Sequence
  Description of Artificial Sequence: Synthetic oligonucleotide
cgugacaacacuacggucu

SEQ ID NO: 2261643 - RNA, 19 nt, Artificial Sequence
  Description of Artificial Sequence: Synthetic oligonucleotide
gcagccgcucuccaccaag

SEQ ID NO: 2261644 - RNA, 19 nt, Artificial Sequence
  Description of Artificial Sequence: Synthetic oligonucleotide
cauguuccgcaugauccga

SEQ ID NO: 2261645 - RNA, 19 nt, Artificial Sequence
  Description of Artificial Sequence: Synthetic oligonucleotide
ggcaugcucacagugaggu

SEQ ID NO: 2261646 - RNA, 19 nt, Artificial Sequence
  Description of Artificial Sequence: Synthetic oligonucleotide
gggaguucacccacucgag

SEQ ID NO: 2261647 - RNA, 19 nt, Artificial Sequence
  Description of Artificial Sequence: Synthetic oligonucleotide
gucacaggccgcuucgggu

SEQ ID NO: 2261648 - RNA, 19 nt, Artificial Sequence
  Description of Artificial Sequence: Synthetic oligonucleotide
ugacaacacuacggucuac

SEQ ID NO: 2261649 - RNA, 19 nt, Artificial Sequence
  Description of Artificial Sequence: Synthetic oligonucleotide
aggugggacaugagguugu

SEQ ID NO: 2261650 - RNA, 19 nt, Artificial Sequence
  Description of Artificial Sequence: Synthetic oligonucleotide
augcgcuuagccacauagu

SEQ ID NO: 2261651 - RNA, 19 nt, Artificial Sequence
  Description of Artificial Sequence: Synthetic oligonucleotide
aggcaaucuguagcuuuga

SEQ ID NO: 2261652 - RNA, 19 nt, Artificial Sequence
  Description of Artificial Sequence: Synthetic oligonucleotide
gugcuuguguucagcggac

SEQ ID NO: 2261653 - RNA, 19 nt, Artificial Sequence
  Description of Artificial Sequence: Synthetic oligonucleotide
caagccggacaacagcacu

SEQ ID NO: 2261654 - RNA, 19 nt, Artificial Sequence
  Description of Artificial Sequence: Synthetic oligonucleotide
gucuaccgggcacgucugc

SEQ ID NO: 2261655 - RNA, 19 nt, Artificial Sequence
  Description of Artificial Sequence: Synthetic oligonucleotide
guucagcggacgucuucuc

SEQ ID NO: 2261656 - RNA, 19 nt, Artificial Sequence
  Description of Artificial Sequence: Synthetic oligonucleotide
gcguaggugggcaaccgug

SEQ ID NO: 2261657 - RNA, 19 nt, Artificial Sequence
  Description of Artificial Sequence: Synthetic oligonucleotide
augacgagcccuggcuccu

SEQ ID NO: 2261658 - RNA, 19 nt, Artificial Sequence
  Description of Artificial Sequence: Synthetic oligonucleotide
cacgcauauaagccuucaa

SEQ ID NO: 2261659 - RNA, 19 nt, Artificial Sequence
  Description of Artificial Sequence: Synthetic oligonucleotide
agcccuggucacaggucac

SEQ ID NO: 2261660 - RNA, 19 nt, Artificial Sequence
  Description of Artificial Sequence: Synthetic oligonucleotide
guuccgcaugauccgaggu

SEQ ID NO: 2261661 - RNA, 19 nt, Artificial Sequence
  Description of Artificial Sequence: Synthetic oligonucleotide
gcuuaaugcaauugugauu

SEQ ID NO: 2261662 - RNA, 19 nt, Artificial Sequence
  Description of Artificial Sequence: Synthetic oligonucleotide
caccaugucgucacccaua

SEQ ID NO: 2261663 - RNA, 19 nt, Artificial Sequence
  Description of Artificial Sequence: Synthetic oligonucleotide
gcgucagggguggagauca

SEQ ID NO: 2261664 - RNA, 19 nt, Artificial Sequence
  Description of Artificial Sequence: Synthetic oligonucleotide
cugggcguaggugggcaac

SEQ ID NO: 2261665 - RNA, 19 nt, Artificial Sequence
  Description of Artificial Sequence: Synthetic oligonucleotide
acacuucggaucgcacgca

SEQ ID NO: 2261666 - RNA, 19 nt, Artificial Sequence
  Description of Artificial Sequence: Synthetic oligonucleotide
gcuucuguucggccagcug

SEQ ID NO: 2261667 - RNA, 19 nt, Artificial Sequence
  Description of Artificial Sequence: Synthetic oligonucleotide
agcggacgucuucuccagu

SEQ ID NO: 2261668 - RNA, 19 nt, Artificial Sequence
  Description of Artificial Sequence: Synthetic oligonucleotide
uucggaucgcacgcauaua

SEQ ID NO: 2261669 - RNA, 19 nt, Artificial Sequence
  Description of Artificial Sequence: Synthetic oligonucleotide
aggccgcuucggguugugc

SEQ ID NO: 2261670 - RNA, 19 nt, Artificial Sequence
  Description of Artificial Sequence: Synthetic oligonucleotide
cgcuuagccacauaguucu

SEQ ID NO: 2261671 - RNA, 19 nt, Artificial Sequence
  Description of Artificial Sequence: Synthetic oligonucleotide
caucccuccccagcggguc

SEQ ID NO: 2261672 - RNA, 19 nt, Artificial Sequence
  Description of Artificial Sequence: Synthetic oligonucleotide
acugggcguaggugggcaa

SEQ ID NO: 2261673 - RNA, 19 nt, Artificial Sequence
  Description of Artificial Sequence: Synthetic oligonucleotide
caguuaugcugcucucuua

SEQ ID NO: 2261674 - RNA, 19 nt, Artificial Sequence
  Description of Artificial Sequence: Synthetic oligonucleotide
gcaggccaucaccacaaca

SEQ ID NO: 2261675 - RNA, 19 nt, Artificial Sequence
  Description of Artificial Sequence: Synthetic oligonucleotide
ccauaugcugguucucgca

SEQ ID NO: 2261676 - RNA, 19 nt, Artificial Sequence
  Description of Artificial Sequence: Synthetic oligonucleotide
cugcugcaccacagagcgc

SEQ ID NO: 2261677 - RNA, 19 nt, Artificial Sequence
  Description of Artificial Sequence: Synthetic oligonucleotide
agguugggguugacacuuc

SEQ ID NO: 2261678 - RNA, 19 nt, Artificial Sequence
  Description of Artificial Sequence: Synthetic oligonucleotide
acccacucgaggaucucau

SEQ ID NO: 2261679 - RNA, 19 nt, Artificial Sequence
  Description of Artificial Sequence: Synthetic oligonucleotide
ccuucaacagcuggauguc

SEQ ID NO: 2261680 - RNA, 19 nt, Artificial Sequence
  Description of Artificial Sequence: Synthetic oligonucleotide
gcaugcucacagugaggug

SEQ ID NO: 2261681 - RNA, 19 nt, Artificial Sequence
  Description of Artificial Sequence: Synthetic oligonucleotide
uagcgccgguucaucuguc

SEQ ID NO: 2261682 - RNA, 19 nt, Artificial Sequence
  Description of Artificial Sequence: Synthetic oligonucleotide
acgagcccuggcuccugca

SEQ ID NO: 2261683 - RNA, 19 nt, Artificial Sequence
  Description of Artificial Sequence: Synthetic oligonucleotide
cacagcccuggucacaggu

SEQ ID NO: 2261684 - RNA, 19 nt, Artificial Sequence
  Description of Artificial Sequence: Synthetic oligonucleotide
cacuacggucuaccgggca

SEQ ID NO: 2261685 - RNA, 19 nt, Artificial Sequence
  Description of Artificial Sequence: Synthetic oligonucleotide
gcgcuuagccacauaguuc

SEQ ID NO: 2261686 - RNA, 19 nt, Artificial Sequence
  Description of Artificial Sequence: Synthetic oligonucleotide
ucaccacaacagccugcuu

SEQ ID NO: 2261687 - RNA, 19 nt, Artificial Sequence
  Description of Artificial Sequence: Synthetic oligonucleotide
gggcacgucugcugcugag

SEQ ID NO: 2261688 - RNA, 19 nt, Artificial Sequence
  Description of Artificial Sequence: Synthetic oligonucleotide
gcauuuucaaucagcucgu

SEQ ID NO: 2261689 - RNA, 19 nt, Artificial Sequence
  Description of Artificial Sequence: Synthetic oligonucleotide
gccgcuucggguugugcuc

SEQ ID NO: 2261690 - RNA, 19 nt, Artificial Sequence
  Description of Artificial Sequence: Synthetic oligonucleotide
cguugacaauagaggcugg

SEQ ID NO: 2261691 - RNA, 19 nt, Artificial Sequence
  Description of Artificial Sequence: Synthetic oligonucleotide
cccagcgggucacucuugc

SEQ ID NO: 2261692 - RNA, 19 nt, Artificial Sequence
  Description of Artificial Sequence: Synthetic oligonucleotide
caucugucuugucucuagu

SEQ ID NO: 2261693 - RNA, 19 nt, Artificial Sequence
  Description of Artificial Sequence: Synthetic oligonucleotide
cuccacaccaugcgcaaau

SEQ ID NO: 2261694 - RNA, 19 nt, Artificial Sequence
  Description of Artificial Sequence: Synthetic oligonucleotide
cggaucgcacgcauauaag

SEQ ID NO: 2261695 - RNA, 19 nt, Artificial Sequence
  Description of Artificial Sequence: Synthetic oligonucleotide
cacccauaugcugguucuc

SEQ ID NO: 2261696 - RNA, 19 nt, Artificial Sequence
  Description of Artificial Sequence: Synthetic oligonucleotide
gggucacucuugccggcug

SEQ ID NO: 2261697 - RNA, 19 nt, Artificial Sequence
  Description of Artificial Sequence: Synthetic oligonucleotide
gggcguaggugggcaaccg

SEQ ID NO: 2261698 - RNA, 19 nt, Artificial Sequence
  Description of Artificial Sequence: Synthetic oligonucleotide
cauaguagcgccgguucau

SEQ ID NO: 2261699 - RNA, 19 nt, Artificial Sequence
  Description of Artificial Sequence: Synthetic oligonucleotide
gccugcuugccggggaugc

SEQ ID NO: 2261700 - RNA, 19 nt, Artificial Sequence
  Description of Artificial Sequence: Synthetic oligonucleotide
gcuuguguucagcggacgu

SEQ ID NO: 2261701 - RNA, 19 nt, Artificial Sequence
  Description of Artificial Sequence: Synthetic oligonucleotide
acuucggaucgcacgcaua

SEQ ID NO: 2261702 - RNA, 19 nt, Artificial Sequence
  Description of Artificial Sequence: Synthetic oligonucleotide
cuugccggggaugcgcuua

SEQ ID NO: 2261703 - RNA, 19 nt, Artificial Sequence
  Description of Artificial Sequence: Synthetic oligonucleotide
caccaugcgcaaauaucau

SEQ ID NO: 2261704 - RNA, 19 nt, Artificial Sequence
  Description of Artificial Sequence: Synthetic oligonucleotide
ggcaaccgugacaacacua

SEQ ID NO: 2261705 - RNA, 19 nt, Artificial Sequence
  Description of Artificial Sequence: Synthetic oligonucleotide
ccagcgggucacucuugcc

SEQ ID NO: 2261706 - RNA, 19 nt, Artificial Sequence
  Description of Artificial Sequence: Synthetic oligonucleotide
ccggggaugcgcuuagcca

SEQ ID NO: 2261707 - RNA, 19 nt, Artificial Sequence
  Description of Artificial Sequence: Synthetic oligonucleotide
auccgagguacugggcgua

SEQ ID NO: 2261708 - RNA, 19 nt, Artificial Sequence
  Description of Artificial Sequence: Synthetic oligonucleotide
agccugcuugccggggaug

SEQ ID NO: 2261709 - RNA, 19 nt, Artificial Sequence
  Description of Artificial Sequence: Synthetic oligonucleotide
gcgcuugauuacagccugg

SEQ ID NO: 2261710 - RNA, 19 nt, Artificial Sequence
  Description of Artificial Sequence: Synthetic oligonucleotide
gguugucaagccggacaac

SEQ ID NO: 2261711 - RNA, 19 nt, Artificial Sequence
  Description of Artificial Sequence: Synthetic oligonucleotide
cacagagcgcaggugcuua

SEQ ID NO: 2261712 - RNA, 19 nt, Artificial Sequence
  Description of Artificial Sequence: Synthetic oligonucleotide
gggcagauaagguccucgu

SEQ ID NO: 2261713 - RNA, 19 nt, Artificial Sequence
  Description of Artificial Sequence: Synthetic oligonucleotide
cauagccaguuaugcugcu

SEQ ID NO: 2261714 - RNA, 19 nt, Artificial Sequence
  Description of Artificial Sequence: Synthetic oligonucleotide
ggccagcuacguucaugug

SEQ ID NO: 2261715 - RNA, 19 nt, Artificial Sequence
  Description of Artificial Sequence: Synthetic oligonucleotide
gguugacacuucggaucgc

SEQ ID NO: 2261716 - RNA, 19 nt, Artificial Sequence
  Description of Artificial Sequence: Synthetic oligonucleotide
ggcacgucugcugcugaga

SEQ ID NO: 2261717 - RNA, 19 nt, Artificial Sequence
  Description of Artificial Sequence: Synthetic oligonucleotide
gcacgcauauaagccuuca

SEQ ID NO: 2261718 - RNA, 19 nt, Artificial Sequence
  Description of Artificial Sequence: Synthetic oligonucleotide
cgcaugauccgagguacug

SEQ ID NO: 2261719 - RNA, 19 nt, Artificial Sequence
  Description of Artificial Sequence: Synthetic oligonucleotide
caauugucuccuccagguu

SEQ ID NO: 2261720 - RNA, 19 nt, Artificial Sequence
  Description of Artificial Sequence: Synthetic oligonucleotide
acccuggggccagcuacgu

SEQ ID NO: 2261721 - RNA, 19 nt, Artificial Sequence
  Description of Artificial Sequence: Synthetic oligonucleotide
uggggccagcuacguucau

SEQ ID NO: 2261722 - RNA, 19 nt, Artificial Sequence
  Description of Artificial Sequence: Synthetic oligonucleotide
gcgggucacucuugccggc

SEQ ID NO: 2261723 - RNA, 19 nt, Artificial Sequence
  Description of Artificial Sequence: Synthetic oligonucleotide
ggugggacaugagguuguc

SEQ ID NO: 2261724 - RNA, 19 nt, Artificial Sequence
  Description of Artificial Sequence: Synthetic oligonucleotide
ccacugggugaugcaggcg

SEQ ID NO: 2261725 - RNA, 19 nt, Artificial Sequence
  Description of Artificial Sequence: Synthetic oligonucleotide
gcgcaggugcuuaaugcaa

SEQ ID NO: 2261726 - RNA, 19 nt, Artificial Sequence
  Description of Artificial Sequence: Synthetic oligonucleotide
ccaguucugcgauucgagu

SEQ ID NO: 2261727 - RNA, 19 nt, Artificial Sequence
  Description of Artificial Sequence: Synthetic oligonucleotide
ggggaugcgcuuagccaca

SEQ ID NO: 2261728 - RNA, 19 nt, Artificial Sequence
  Description of Artificial Sequence: Synthetic oligonucleotide
ccugcuugccggggaugcg

SEQ ID NO: 2261729 - RNA, 19 nt, Artificial Sequence
  Description of Artificial Sequence: Synthetic oligonucleotide
ggugggcaaccgugacaac

SEQ ID NO: 2261730 - RNA, 19 nt, Artificial Sequence
  Description of Artificial Sequence: Synthetic oligonucleotide
cacuucggaucgcacgcau

SEQ ID NO: 2261731 - RNA, 19 nt, Artificial Sequence
  Description of Artificial Sequence: Synthetic oligonucleotide
gcaggugcuuaaugcaauu

SEQ ID NO: 2261732 - RNA, 19 nt, Artificial Sequence
  Description of Artificial Sequence: Synthetic oligonucleotide
gccggacaacagcacugca

SEQ ID NO: 2261733 - RNA, 19 nt, Artificial Sequence
  Description of Artificial Sequence: Synthetic oligonucleotide
gccgguucaucugucuugu

SEQ ID NO: 2261734 - RNA, 19 nt, Artificial Sequence
  Description of Artificial Sequence: Synthetic oligonucleotide
ccacaacagccugcuugcc

SEQ ID NO: 2261735 - RNA, 19 nt, Artificial Sequence
  Description of Artificial Sequence: Synthetic oligonucleotide
ggcguaggugggcaaccgu

SEQ ID NO: 2261736 - RNA, 19 nt, Artificial Sequence
  Description of Artificial Sequence: Synthetic oligonucleotide
ccaugucgucacccauaug

SEQ ID NO: 2261737 - RNA, 19 nt, Artificial Sequence
  Description of Artificial Sequence: Synthetic oligonucleotide
cgcacgcauauaagccuuc

SEQ ID NO: 2261738 - RNA, 19 nt, Artificial Sequence
  Description of Artificial Sequence: Synthetic oligonucleotide
cuacguucaugugcauuuu

SEQ ID NO: 2261739 - RNA, 19 nt, Artificial Sequence
  Description of Artificial Sequence: Synthetic oligonucleotide
cgauucgagucugcugcug

SEQ ID NO: 2261740 - RNA, 19 nt, Artificial Sequence
  Description of Artificial Sequence: Synthetic oligonucleotide
cgcuugauuacagccugga

SEQ ID NO: 2261741 - RNA, 19 nt, Artificial Sequence
  Description of Artificial Sequence: Synthetic oligonucleotide
cagcgucagggguggagau

SEQ ID NO: 2261742 - RNA, 19 nt, Artificial Sequence
  Description of Artificial Sequence: Synthetic oligonucleotide
gcgauucgagucugcugcu

SEQ ID NO: 2261743 - RNA, 19 nt, Artificial Sequence
  Description of Artificial Sequence: Synthetic oligonucleotide
caggccgcuucggguugug

SEQ ID NO: 2261744 - RNA, 19 nt, Artificial Sequence
  Description of Artificial Sequence: Synthetic oligonucleotide
gcaccaugucgucacccau

SEQ ID NO: 2261745 - RNA, 19 nt, Artificial Sequence
  Description of Artificial Sequence: Synthetic oligonucleotide
gggcaaccgugacaacacu

SEQ ID NO: 2261746 - RNA, 19 nt, Artificial Sequence
  Description of Artificial Sequence: Synthetic oligonucleotide
cagcguugucacaggcaau

SEQ ID NO: 2261747 - RNA, 19 nt, Artificial Sequence
  Description of Artificial Sequence: Synthetic oligonucleotide
caagacccuggggccagcu

SEQ ID NO: 2261748 - RNA, 19 nt, Artificial Sequence
  Description of Artificial Sequence: Synthetic oligonucleotide
ccacaccaugcgcaaauau

SEQ ID NO: 2261749 - RNA, 19 nt, Artificial Sequence
  Description of Artificial Sequence: Synthetic oligonucleotide
ggaugcgcuuagccacaua

SEQ ID NO: 2261750 - RNA, 19 nt, Artificial Sequence
  Description of Artificial Sequence: Synthetic oligonucleotide
ccgguucaucugucuuguc

SEQ ID NO: 2261751 - RNA, 19 nt, Artificial Sequence
  Description of Artificial Sequence: Synthetic oligonucleotide
ccccagcgggucacucuug

SEQ ID NO: 2261752 - RNA, 19 nt, Artificial Sequence
  Description of Artificial Sequence: Synthetic oligonucleotide
gcuucggguugugcucaca

SEQ ID NO: 2261753 - RNA, 19 nt, Artificial Sequence
  Description of Artificial Sequence: Synthetic oligonucleotide
gcaagacccuggggccagc

SEQ ID NO: 2261754 - RNA, 19 nt, Artificial Sequence
  Description of Artificial Sequence: Synthetic oligonucleotide
cacaggcaaucuguagcuu

SEQ ID NO: 2261755 - RNA, 19 nt, Artificial Sequence
  Description of Artificial Sequence: Synthetic oligonucleotide
cagagcgcaggugcuuaau

SEQ ID NO: 2261756 - RNA, 19 nt, Artificial Sequence
  Description of Artificial Sequence: Synthetic oligonucleotide
ccgcuucggguugugcuca

SEQ ID NO: 2261757 - RNA, 19 nt, Artificial Sequence
  Description of Artificial Sequence: Synthetic oligonucleotide
ccuccccagcgggucacuc

SEQ ID NO: 2261758 - RNA, 19 nt, Artificial Sequence
  Description of Artificial Sequence: Synthetic oligonucleotide
gcgccgguucaucugucuu

SEQ ID NO: 2261759 - RNA, 19 nt, Artificial Sequence
  Description of Artificial Sequence: Synthetic oligonucleotide
cagcuacguucaugugcau

SEQ ID NO: 2261760 - RNA, 19 nt, Artificial Sequence
  Description of Artificial Sequence: Synthetic oligonucleotide
ccgcaugauccgagguacu

SEQ ID NO: 2261761 - RNA, 19 nt, Artificial Sequence
  Description of Artificial Sequence: Synthetic oligonucleotide
ccuccacaccaugcgcaaa

SEQ ID NO: 2261762 - RNA, 19 nt, Artificial Sequence
  Description of Artificial Sequence: Synthetic oligonucleotide
gggaugcgcuuagccacau

SEQ ID NO: 2261763 - RNA, 19 nt, Artificial Sequence
  Description of Artificial Sequence: Synthetic oligonucleotide
gcguugcagaaggcaugcu

SEQ ID NO: 2261764 - RNA, 19 nt, Artificial Sequence
  Description of Artificial Sequence: Synthetic oligonucleotide
gcacagcgucaggggugga

SEQ ID NO: 2261765 - RNA, 19 nt, Artificial Sequence
  Description of Artificial Sequence: Synthetic oligonucleotide
ucaaagaauaccuugacug

SEQ ID NO: 2261766 - RNA, 19 nt, Artificial Sequence
  Description of Artificial Sequence: Synthetic oligonucleotide
uauugaucagcauugauag

SEQ ID NO: 2261767 - RNA, 19 nt, Artificial Sequence
  Description of Artificial Sequence: Synthetic oligonucleotide
aggaucugcacauacagcc

SEQ ID NO: 2261768 - RNA, 19 nt, Artificial Sequence
  Description of Artificial Sequence: Synthetic oligonucleotide
agcaccuucauauugcgcc

SEQ ID NO: 2261769 - RNA, 19 nt, Artificial Sequence
  Description of Artificial Sequence: Synthetic oligonucleotide
aagcgcucaccauaaaugc

SEQ ID NO: 2261770 - RNA, 19 nt, Artificial Sequence
  Description of Artificial Sequence: Synthetic oligonucleotide
aaaagcaccuucauauugc

SEQ ID NO: 2261771 - RNA, 19 nt, Artificial Sequence
  Description of Artificial Sequence: Synthetic oligonucleotide
guaguuaugaagaauuggg

SEQ ID NO: 2261772 - RNA, 19 nt, Artificial Sequence
  Description of Artificial Sequence: Synthetic oligonucleotide
uuaucguuggccacggagg

SEQ ID NO: 2261773 - RNA, 19 nt, Artificial Sequence
  Description of Artificial Sequence: Synthetic oligonucleotide
accgaaagcaaggagaagc

SEQ ID NO: 2261774 - RNA, 19 nt, Artificial Sequence
  Description of Artificial Sequence: Synthetic oligonucleotide
uguaguuaugaagaauugg

SEQ ID NO: 2261775 - RNA, 19 nt, Artificial Sequence
  Description of Artificial Sequence: Synthetic oligonucleotide
aaagcaccuucauauugcg

SEQ ID NO: 2261776 - RNA, 19 nt, Artificial Sequence
  Description of Artificial Sequence: Synthetic oligonucleotide
aaugugaagaucaaagaau

SEQ ID NO: 2261777 - RNA, 19 nt, Artificial Sequence
  Description of Artificial Sequence: Synthetic oligonucleotide
uccacuucgaucuugccac

SEQ ID NO: 2261778 - RNA, 19 nt, Artificial Sequence
  Description of Artificial Sequence: Synthetic oligonucleotide
uccaccgaaagcaaggaga

SEQ ID NO: 2261779 - RNA, 19 nt, Artificial Sequence
  Description of Artificial Sequence: Synthetic oligonucleotide
ucugccuacaggcucaucu

SEQ ID NO: 2261780 - RNA, 19 nt, Artificial Sequence
  Description of Artificial Sequence: Synthetic oligonucleotide
aguagcuaaggcuacaaaa

SEQ ID NO: 2261781 - RNA, 19 nt, Artificial Sequence
  Description of Artificial Sequence: Synthetic oligonucleotide
gaacagucuuuccaaagag

SEQ ID NO: 2261782 - RNA, 19 nt, Artificial Sequence
  Description of Artificial Sequence: Synthetic oligonucleotide
uaguuaugaagaauuggga

SEQ ID NO: 2261783 - RNA, 19 nt, Artificial Sequence
  Description of Artificial Sequence: Synthetic oligonucleotide
gucugcaaugaucacaucc

SEQ ID NO: 2261784 - RNA, 19 nt, Artificial Sequence
  Description of Artificial Sequence: Synthetic oligonucleotide
aucuucaccucugugaggg

SEQ ID NO: 2261785 - RNA, 19 nt, Artificial Sequence
  Description of Artificial Sequence: Synthetic oligonucleotide
gacacgauggaacuugcug

SEQ ID NO: 2261786 - RNA, 19 nt, Artificial Sequence
  Description of Artificial Sequence: Synthetic oligonucleotide
ugucuuagugcucuccacc

SEQ ID NO: 2261787 - RNA, 19 nt, Artificial Sequence
  Description of Artificial Sequence: Synthetic oligonucleotide
ucauauugcgccccgagau

SEQ ID NO: 2261788 - RNA, 19 nt, Artificial Sequence
  Description of Artificial Sequence: Synthetic oligonucleotide
cuaucuucaccucugugag

SEQ ID NO: 2261789 - RNA, 19 nt, Artificial Sequence
  Description of Artificial Sequence: Synthetic oligonucleotide
aguaacaggaucugcacau

SEQ ID NO: 2261790 - RNA, 19 nt, Artificial Sequence
  Description of Artificial Sequence: Synthetic oligonucleotide
ucgaucuugccacagucug

SEQ ID NO: 2261791 - RNA, 19 nt, Artificial Sequence
  Description of Artificial Sequence: Synthetic oligonucleotide
cuuaucguuggccacggag

SEQ ID NO: 2261792 - RNA, 19 nt, Artificial Sequence
  Description of Artificial Sequence: Synthetic oligonucleotide
gaugacacgauggaacuug

SEQ ID NO: 2261793 - RNA, 19 nt, Artificial Sequence
  Description of Artificial Sequence: Synthetic oligonucleotide
aagaguccaaaggucacuc

SEQ ID NO: 2261794 - RNA, 19 nt, Artificial Sequence
  Description of Artificial Sequence: Synthetic oligonucleotide
auauugcgccccgagaugc

SEQ ID NO: 2261795 - RNA, 19 nt, Artificial Sequence
  Description of Artificial Sequence: Synthetic oligonucleotide
ugaucagcauugauaggag

SEQ ID NO: 2261796 - RNA, 19 nt, Artificial Sequence
  Description of Artificial Sequence: Synthetic oligonucleotide
uucuucuuaucguuggcca

SEQ ID NO: 2261797 - RNA, 19 nt, Artificial Sequence
  Description of Artificial Sequence: Synthetic oligonucleotide
ugcucacccauccaggccc

SEQ ID NO: 2261798 - RNA, 19 nt, Artificial Sequence
  Description of Artificial Sequence: Synthetic oligonucleotide
uccaaagaguccaaagguc

SEQ ID NO: 2261799 - RNA, 19 nt, Artificial Sequence
  Description of Artificial Sequence: Synthetic oligonucleotide
agaauaccuugacugugac

SEQ ID NO: 2261800 - RNA, 19 nt, Artificial Sequence
  Description of Artificial Sequence: Synthetic oligonucleotide
uugaugacacgauggaacu

SEQ ID NO: 2261801 - RNA, 19 nt, Artificial Sequence
  Description of Artificial Sequence: Synthetic oligonucleotide
ucuggugaagucuccaccu

SEQ ID NO: 2261802 - RNA, 19 nt, Artificial Sequence
  Description of Artificial Sequence: Synthetic oligonucleotide
uggaacagucuuuccaaag

SEQ ID NO: 2261803 - RNA, 19 nt, Artificial Sequence
  Description of Artificial Sequence: Synthetic oligonucleotide
acacgauggaacuugcugu

SEQ ID NO: 2261804 - RNA, 19 nt, Artificial Sequence
  Description of Artificial Sequence: Synthetic oligonucleotide
agcaaggagaagcggucgc

SEQ ID NO: 2261805 - RNA, 19 nt, Artificial Sequence
  Description of Artificial Sequence: Synthetic oligonucleotide
cuugccacagucugcaaug

SEQ ID NO: 2261806 - RNA, 19 nt, Artificial Sequence
  Description of Artificial Sequence: Synthetic oligonucleotide
agucuuuccaaagagucca

SEQ ID NO: 2261807 - RNA, 19 nt, Artificial Sequence
  Description of Artificial Sequence: Synthetic oligonucleotide
cacggugugcgcuaguugc

SEQ ID NO: 2261808 - RNA, 19 nt, Artificial Sequence
  Description of Artificial Sequence: Synthetic oligonucleotide
aaugcucuuuccuccugug

SEQ ID NO: 2261809 - RNA, 19 nt, Artificial Sequence
  Description of Artificial Sequence: Synthetic oligonucleotide
ugaggguaguaacaggauc

SEQ ID NO: 2261810 - RNA, 19 nt, Artificial Sequence
  Description of Artificial Sequence: Synthetic oligonucleotide
cacggaaucaugugccugg

SEQ ID NO: 2261811 - RNA, 19 nt, Artificial Sequence
  Description of Artificial Sequence: Synthetic oligonucleotide
ugauaggaguuugauauaa

SEQ ID NO: 2261812 - RNA, 19 nt, Artificial Sequence
  Description of Artificial Sequence: Synthetic oligonucleotide
uucucaucugggaagcgcu

SEQ ID NO: 2261813 - RNA, 19 nt, Artificial Sequence
  Description of Artificial Sequence: Synthetic oligonucleotide
uaacaggaucugcacauac

SEQ ID NO: 2261814 - RNA, 19 nt, Artificial Sequence
  Description of Artificial Sequence: Synthetic oligonucleotide
uggcacggaaucaugugcc

SEQ ID NO: 2261815 - RNA, 19 nt, Artificial Sequence
  Description of Artificial Sequence: Synthetic oligonucleotide
acuguaguuaugaagaauu

SEQ ID NO: 2261816 - RNA, 19 nt, Artificial Sequence
  Description of Artificial Sequence: Synthetic oligonucleotide
aagacgacggagcccacga

SEQ ID NO: 2261817 - RNA, 19 nt, Artificial Sequence
  Description of Artificial Sequence: Synthetic oligonucleotide
aucuccaaugugaagauca

SEQ ID NO: 2261818 - RNA, 19 nt, Artificial Sequence
  Description of Artificial Sequence: Synthetic oligonucleotide
aguccaaaggucacucugc

SEQ ID NO: 2261819 - RNA, 19 nt, Artificial Sequence
  Description of Artificial Sequence: Synthetic oligonucleotide
uucaccucugugaggguag

SEQ ID NO: 2261820 - RNA, 19 nt, Artificial Sequence
  Description of Artificial Sequence: Synthetic oligonucleotide
caaugugaagaucaaagaa

SEQ ID NO: 2261821 - RNA, 19 nt, Artificial Sequence
  Description of Artificial Sequence: Synthetic oligonucleotide
uucauauugcgccccgaga

SEQ ID NO: 2261822 - RNA, 19 nt, Artificial Sequence
  Description of Artificial Sequence: Synthetic oligonucleotide
aaggucacucugccuacag

SEQ ID NO: 2261823 - RNA, 19 nt, Artificial Sequence
  Description of Artificial Sequence: Synthetic oligonucleotide
agggugugaacacacggug

SEQ ID NO: 2261824 - RNA, 19 nt, Artificial Sequence
  Description of Artificial Sequence: Synthetic oligonucleotide
ugucuuugccugcauuggc

SEQ ID NO: 2261825 - RNA, 19 nt, Artificial Sequence
  Description of Artificial Sequence: Synthetic oligonucleotide
cucaucuccaaugugaaga

SEQ ID NO: 2261826 - RNA, 19 nt, Artificial Sequence
  Description of Artificial Sequence: Synthetic oligonucleotide
gaugucuugacuguaguua

SEQ ID NO: 2261827 - RNA, 19 nt, Artificial Sequence
  Description of Artificial Sequence: Synthetic oligonucleotide
aagcaaggagaagcggucg

SEQ ID NO: 2261828 - RNA, 19 nt, Artificial Sequence
  Description of Artificial Sequence: Synthetic oligonucleotide
aagaauaccuugacuguga

SEQ ID NO: 2261829 - RNA, 19 nt, Artificial Sequence
  Description of Artificial Sequence: Synthetic oligonucleotide
aaucaugugccuggcuauc

SEQ ID NO: 2261830 - RNA, 19 nt, Artificial Sequence
  Description of Artificial Sequence: Synthetic oligonucleotide
acauccaugcccucuagaa

SEQ ID NO: 2261831 - RNA, 19 nt, Artificial Sequence
  Description of Artificial Sequence: Synthetic oligonucleotide
cuagccaagaugucuugac

SEQ ID NO: 2261832 - RNA, 19 nt, Artificial Sequence
  Description of Artificial Sequence: Synthetic oligonucleotide
cuucuuaucguuggccacg

SEQ ID NO: 2261833 - RNA, 19 nt, Artificial Sequence
  Description of Artificial Sequence: Synthetic oligonucleotide
cuguaguuaugaagaauug

SEQ ID NO: 2261834 - RNA, 19 nt, Artificial Sequence
  Description of Artificial Sequence: Synthetic oligonucleotide
uggugaagucuccaccuug

SEQ ID NO: 2261835 - RNA, 19 nt, Artificial Sequence
  Description of Artificial Sequence: Synthetic oligonucleotide
augcucacccauccaggcc

SEQ ID NO: 2261836 - RNA, 19 nt, Artificial Sequence
  Description of Artificial Sequence: Synthetic oligonucleotide
uucgaucuugccacagucu

SEQ ID NO: 2261837 - RNA, 19 nt, Artificial Sequence
  Description of Artificial Sequence: Synthetic oligonucleotide
uaucuucaccucugugagg

SEQ ID NO: 2261838 - RNA, 19 nt, Artificial Sequence
  Description of Artificial Sequence: Synthetic oligonucleotide
ucuacuccuuggcaauggc

SEQ ID NO: 2261839 - RNA, 19 nt, Artificial Sequence
  Description of Artificial Sequence: Synthetic oligonucleotide
caaagaguccaaaggucac

SEQ ID NO: 2261840 - RNA, 19 nt, Artificial Sequence
  Description of Artificial Sequence: Synthetic oligonucleotide
cuaguugccgaccgggcgc

SEQ ID NO: 2261841 - RNA, 19 nt, Artificial Sequence
  Description of Artificial Sequence: Synthetic oligonucleotide
uagcuaaggcuacaaaauu

SEQ ID NO: 2261842 - RNA, 19 nt, Artificial Sequence
  Description of Artificial Sequence: Synthetic oligonucleotide
ugccuacaggcucaucucc

SEQ ID NO: 2261843 - RNA, 19 nt, Artificial Sequence
  Description of Artificial Sequence: Synthetic oligonucleotide
cuucauauugcgccccgag

SEQ ID NO: 2261844 - RNA, 19 nt, Artificial Sequence
  Description of Artificial Sequence: Synthetic oligonucleotide
ugacugugacuuugggucc

SEQ ID NO: 2261845 - RNA, 19 nt, Artificial Sequence
  Description of Artificial Sequence: Synthetic oligonucleotide
caugcucacccauccaggc

SEQ ID NO: 2261846 - RNA, 19 nt, Artificial Sequence
  Description of Artificial Sequence: Synthetic oligonucleotide
aguggcacggaaucaugug

SEQ ID NO: 2261847 - RNA, 19 nt, Artificial Sequence
  Description of Artificial Sequence: Synthetic oligonucleotide
gacgacggagcccacgaug

SEQ ID NO: 2261848 - RNA, 19 nt, Artificial Sequence
  Description of Artificial Sequence: Synthetic oligonucleotide
uagccaagaugucuugacu

SEQ ID NO: 2261849 - RNA, 19 nt, Artificial Sequence
  Description of Artificial Sequence: Synthetic oligonucleotide
guggcacggaaucaugugc

SEQ ID NO: 2261850 - RNA, 19 nt, Artificial Sequence
  Description of Artificial Sequence: Synthetic oligonucleotide
uccaccuuccucacuacau

SEQ ID NO: 2261851 - RNA, 19 nt, Artificial Sequence
  Description of Artificial Sequence: Synthetic oligonucleotide
uucuuaucguuggccacgg

SEQ ID NO: 2261852 - RNA, 19 nt, Artificial Sequence
  Description of Artificial Sequence: Synthetic oligonucleotide
gaagagggugugaacacac

SEQ ID NO: 2261853 - RNA, 19 nt, Artificial Sequence
  Description of Artificial Sequence: Synthetic oligonucleotide
aggaagacgacggagccca

SEQ ID NO: 2261854 - RNA, 19 nt, Artificial Sequence
  Description of Artificial Sequence: Synthetic oligonucleotide
ugucuugacuguaguuaug

SEQ ID NO: 2261855 - RNA, 19 nt, Artificial Sequence
  Description of Artificial Sequence: Synthetic oligonucleotide
ucaucuccaaugugaagau

SEQ ID NO: 2261856 - RNA, 19 nt, Artificial Sequence
  Description of Artificial Sequence: Synthetic oligonucleotide
augugaagaucaaagaaua

SEQ ID NO: 2261857 - RNA, 19 nt, Artificial Sequence
  Description of Artificial Sequence: Synthetic oligonucleotide
cuggcuaucuucaccucug

SEQ ID NO: 2261858 - RNA, 19 nt, Artificial Sequence
  Description of Artificial Sequence: Synthetic oligonucleotide
uauugcgccccgagaugcg

SEQ ID NO: 2261859 - RNA, 19 nt, Artificial Sequence
  Description of Artificial Sequence: Synthetic oligonucleotide
ugaacacacggugugcgcu

SEQ ID NO: 2261860 - RNA, 19 nt, Artificial Sequence
  Description of Artificial Sequence: Synthetic oligonucleotide
uucucuacuccuuggcaau

SEQ ID NO: 2261861 - RNA, 19 nt, Artificial Sequence
  Description of Artificial Sequence: Synthetic oligonucleotide
gacggagcccacgaugagg

SEQ ID NO: 2261862 - RNA, 19 nt, Artificial Sequence
  Description of Artificial Sequence: Synthetic oligonucleotide
acggagcccacgaugaggg

SEQ ID NO: 2261863 - RNA, 19 nt, Artificial Sequence
  Description of Artificial Sequence: Synthetic oligonucleotide
cauauugcgccccgagaug

SEQ ID NO: 2261864 - RNA, 19 nt, Artificial Sequence
  Description of Artificial Sequence: Synthetic oligonucleotide
ucagcauugauaggaguuu

SEQ ID NO: 2261865 - RNA, 19 nt, Artificial Sequence
  Description of Artificial Sequence: Synthetic oligonucleotide
ucuagccaagaugucuuga

SEQ ID NO: 2261866 - RNA, 19 nt, Artificial Sequence
  Description of Artificial Sequence: Synthetic oligonucleotide
ugcgcuaguugccgaccgg

SEQ ID NO: 2261867 - RNA, 19 nt, Artificial Sequence
  Description of Artificial Sequence: Synthetic oligonucleotide
gaggguaguaacaggaucu

SEQ ID NO: 2261868 - RNA, 19 nt, Artificial Sequence
  Description of Artificial Sequence: Synthetic oligonucleotide
gaagacgacggagcccacg

SEQ ID NO: 2261869 - RNA, 19 nt, Artificial Sequence
  Description of Artificial Sequence: Synthetic oligonucleotide
cacccauccaggcccauag

SEQ ID NO: 2261870 - RNA, 19 nt, Artificial Sequence
  Description of Artificial Sequence: Synthetic oligonucleotide
accuucauauugcgccccg

SEQ ID NO: 2261871 - RNA, 19 nt, Artificial Sequence
  Description of Artificial Sequence: Synthetic oligonucleotide
auccaccgaaagcaaggag

SEQ ID NO: 2261872 - RNA, 19 nt, Artificial Sequence
  Description of Artificial Sequence: Synthetic oligonucleotide
gucuugacuguaguuauga

SEQ ID NO: 2261873 - RNA, 19 nt, Artificial Sequence
  Description of Artificial Sequence: Synthetic oligonucleotide
augacacgauggaacuugc

SEQ ID NO: 2261874 - RNA, 19 nt, Artificial Sequence
  Description of Artificial Sequence: Synthetic oligonucleotide
gucgcgggagcccggaccg

SEQ ID NO: 2261875 - RNA, 19 nt, Artificial Sequence
  Description of Artificial Sequence: Synthetic oligonucleotide
ucuugacuguaguuaugaa

SEQ ID NO: 2261876 - RNA, 19 nt, Artificial Sequence
  Description of Artificial Sequence: Synthetic oligonucleotide
acuacauccaugcccucua

SEQ ID NO: 2261877 - RNA, 19 nt, Artificial Sequence
  Description of Artificial Sequence: Synthetic oligonucleotide
caaggagaagcggucgcgg

SEQ ID NO: 2261878 - RNA, 19 nt, Artificial Sequence
  Description of Artificial Sequence: Synthetic oligonucleotide
auugcgccccgagaugcgc

SEQ ID NO: 2261879 - RNA, 19 nt, Artificial Sequence
  Description of Artificial Sequence: Synthetic oligonucleotide
uugauaggaguuugauaua

SEQ ID NO: 2261880 - RNA, 19 nt, Artificial Sequence
  Description of Artificial Sequence: Synthetic oligonucleotide
ccgaaagcaaggagaagcg

SEQ ID NO: 2261881 - RNA, 19 nt, Artificial Sequence
  Description of Artificial Sequence: Synthetic oligonucleotide
gagcccacgaugagggcgg

SEQ ID NO: 2261882 - RNA, 19 nt, Artificial Sequence
  Description of Artificial Sequence: Synthetic oligonucleotide
ucccggcagcaaaaggaag

SEQ ID NO: 2261883 - RNA, 19 nt, Artificial Sequence
  Description of Artificial Sequence: Synthetic oligonucleotide
aggcucaucuccaauguga

SEQ ID NO: 2261884 - RNA, 19 nt, Artificial Sequence
  Description of Artificial Sequence: Synthetic oligonucleotide
gcuaguugccgaccgggcg

SEQ ID NO: 2261885 - RNA, 19 nt, Artificial Sequence
  Description of Artificial Sequence: Synthetic oligonucleotide
caaagaauaccuugacugu

SEQ ID NO: 2261886 - RNA, 19 nt, Artificial Sequence
  Description of Artificial Sequence: Synthetic oligonucleotide
cauugauaggaguuugaua

SEQ ID NO: 2261887 - RNA, 19 nt, Artificial Sequence
  Description of Artificial Sequence: Synthetic oligonucleotide
gagaugcgcagcauccacc

SEQ ID NO: 2261888 - RNA, 19 nt, Artificial Sequence
  Description of Artificial Sequence: Synthetic oligonucleotide
acggaaucaugugccuggc

SEQ ID NO: 2261889 - RNA, 19 nt, Artificial Sequence
  Description of Artificial Sequence: Synthetic oligonucleotide
ugacacgauggaacuugcu

SEQ ID NO: 2261890 - RNA, 19 nt, Artificial Sequence
  Description of Artificial Sequence: Synthetic oligonucleotide
aacacacggugugcgcuag

SEQ ID NO: 2261891 - RNA, 19 nt, Artificial Sequence
  Description of Artificial Sequence: Synthetic oligonucleotide
gagggcggcggcgaaaagc

SEQ ID NO: 2261892 - RNA, 19 nt, Artificial Sequence
  Description of Artificial Sequence: Synthetic oligonucleotide
cuccacuucgaucuugcca

SEQ ID NO: 2261893 - RNA, 19 nt, Artificial Sequence
  Description of Artificial Sequence: Synthetic oligonucleotide
agaguccaaaggucacucu

SEQ ID NO: 2261894 - RNA, 19 nt, Artificial Sequence
  Description of Artificial Sequence: Synthetic oligonucleotide
ucguuggccacggaggguc

SEQ ID NO: 2261895 - RNA, 19 nt, Artificial Sequence
  Description of Artificial Sequence: Synthetic oligonucleotide
gccaugcucacccauccag

SEQ ID NO: 2261896 - RNA, 19 nt, Artificial Sequence
  Description of Artificial Sequence: Synthetic oligonucleotide
ccgacugucugucuuagug

SEQ ID NO: 2261897 - RNA, 19 nt, Artificial Sequence
  Description of Artificial Sequence: Synthetic oligonucleotide
gugcgcuaguugccgaccg

SEQ ID NO: 2261898 - RNA, 19 nt, Artificial Sequence
  Description of Artificial Sequence: Synthetic oligonucleotide
gugaacacacggugugcgc

SEQ ID NO: 2261899 - RNA, 19 nt, Artificial Sequence
  Description of Artificial Sequence: Synthetic oligonucleotide
ugugccuggcuaucuucac

SEQ ID NO: 2261900 - RNA, 19 nt, Artificial Sequence
  Description of Artificial Sequence: Synthetic oligonucleotide
ugucccgacugucugucuu

SEQ ID NO: 2261901 - RNA, 19 nt, Artificial Sequence
  Description of Artificial Sequence: Synthetic oligonucleotide
gucgcugagauucucuacu

SEQ ID NO: 2261902 - RNA, 19 nt, Artificial Sequence
  Description of Artificial Sequence: Synthetic oligonucleotide
ucgcugagauucucuacuc

SEQ ID NO: 2261903 - RNA, 19 nt, Artificial Sequence
  Description of Artificial Sequence: Synthetic oligonucleotide
aaaggucacucugccuaca

SEQ ID NO: 2261904 - RNA, 19 nt, Artificial Sequence
  Description of Artificial Sequence: Synthetic oligonucleotide
ggagcccacgaugagggcg

SEQ ID NO: 2261905 - RNA, 19 nt, Artificial Sequence
  Description of Artificial Sequence: Synthetic oligonucleotide
uugccgaccgggcgcgggg

SEQ ID NO: 2261906 - RNA, 19 nt, Artificial Sequence
  Description of Artificial Sequence: Synthetic oligonucleotide
ucuuagugcucuccaccuu

SEQ ID NO: 2261907 - RNA, 19 nt, Artificial Sequence
  Description of Artificial Sequence: Synthetic oligonucleotide
uaguugccgaccgggcgcg

SEQ ID NO: 2261908 - RNA, 19 nt, Artificial Sequence
  Description of Artificial Sequence: Synthetic oligonucleotide
acacggugugcgcuaguug

SEQ ID NO: 2261909 - RNA, 19 nt, Artificial Sequence
  Description of Artificial Sequence: Synthetic oligonucleotide
ucucuacuccuuggcaaug

SEQ ID NO: 2261910 - RNA, 19 nt, Artificial Sequence
  Description of Artificial Sequence: Synthetic oligonucleotide
aggguaguaacaggaucug

SEQ ID NO: 2261911 - RNA, 19 nt, Artificial Sequence
  Description of Artificial Sequence: Synthetic oligonucleotide
aagcggucgcgggagcccg

SEQ ID NO: 2261912 - RNA, 19 nt, Artificial Sequence
  Description of Artificial Sequence: Synthetic oligonucleotide
ugugcgcuaguugccgacc

SEQ ID NO: 2261913 - RNA, 19 nt, Artificial Sequence
  Description of Artificial Sequence: Synthetic oligonucleotide
uugggucccuucuucuuau

SEQ ID NO: 2261914 - RNA, 19 nt, Artificial Sequence
  Description of Artificial Sequence: Synthetic oligonucleotide
accucugugaggguaguaa

SEQ ID NO: 2261915 - RNA, 19 nt, Artificial Sequence
  Description of Artificial Sequence: Synthetic oligonucleotide
gaaucaugugccuggcuau

SEQ ID NO: 2261916 - RNA, 19 nt, Artificial Sequence
  Description of Artificial Sequence: Synthetic oligonucleotide
cuugacugugacuuugggu

SEQ ID NO: 2261917 - RNA, 19 nt, Artificial Sequence
  Description of Artificial Sequence: Synthetic oligonucleotide
acggugugcgcuaguugcc

SEQ ID NO: 2261918 - RNA, 19 nt, Artificial Sequence
  Description of Artificial Sequence: Synthetic oligonucleotide
cugccuacaggcucaucuc

SEQ ID NO: 2261919 - RNA, 19 nt, Artificial Sequence
  Description of Artificial Sequence: Synthetic oligonucleotide
ucaugugccuggcuaucuu

SEQ ID NO: 2261920 - RNA, 19 nt, Artificial Sequence
  Description of Artificial Sequence: Synthetic oligonucleotide
cagcauugauaggaguuug

SEQ ID NO: 2261921 - RNA, 19 nt, Artificial Sequence
  Description of Artificial Sequence: Synthetic oligonucleotide
agcauccaccgaaagcaag

SEQ ID NO: 2261922 - RNA, 19 nt, Artificial Sequence
  Description of Artificial Sequence: Synthetic oligonucleotide
ccaaugugaagaucaaaga

SEQ ID NO: 2261923 - RNA, 19 nt, Artificial Sequence
  Description of Artificial Sequence: Synthetic oligonucleotide
agucugcaaugaucacauc

SEQ ID NO: 2261924 - RNA, 19 nt, Artificial Sequence
  Description of Artificial Sequence: Synthetic oligonucleotide
gaucagcauugauaggagu

SEQ ID NO: 2261925 - RNA, 19 nt, Artificial Sequence
  Description of Artificial Sequence: Synthetic oligonucleotide
aagggcuucuccacuucga

SEQ ID NO: 2261926 - RNA, 19 nt, Artificial Sequence
  Description of Artificial Sequence: Synthetic oligonucleotide
cuugucccgacugucuguc

SEQ ID NO: 2261927 - RNA, 19 nt, Artificial Sequence
  Description of Artificial Sequence: Synthetic oligonucleotide
ucugcacauacagccacuu

SEQ ID NO: 2261928 - RNA, 19 nt, Artificial Sequence
  Description of Artificial Sequence: Synthetic oligonucleotide
acgacggagcccacgauga

SEQ ID NO: 2261929 - RNA, 19 nt, Artificial Sequence
  Description of Artificial Sequence: Synthetic oligonucleotide
cccgagaugcgcagcaucc

SEQ ID NO: 2261930 - RNA, 19 nt, Artificial Sequence
  Description of Artificial Sequence: Synthetic oligonucleotide
agcauugauaggaguuuga

SEQ ID NO: 2261931 - RNA, 19 nt, Artificial Sequence
  Description of Artificial Sequence: Synthetic oligonucleotide
cccucuagaacuuugccaa

SEQ ID NO: 2261932 - RNA, 19 nt, Artificial Sequence
  Description of Artificial Sequence: Synthetic oligonucleotide
uuggccacggagggucccg

SEQ ID NO: 2261933 - RNA, 19 nt, Artificial Sequence
  Description of Artificial Sequence: Synthetic oligonucleotide
ccaugcucacccauccagg

SEQ ID NO: 2261934 - RNA, 19 nt, Artificial Sequence
  Description of Artificial Sequence: Synthetic oligonucleotide
gaauaccuugacugugacu

SEQ ID NO: 2261935 - RNA, 19 nt, Artificial Sequence
  Description of Artificial Sequence: Synthetic oligonucleotide
gaagcggucgcgggagccc

SEQ ID NO: 2261936 - RNA, 19 nt, Artificial Sequence
  Description of Artificial Sequence: Synthetic oligonucleotide
cacgaugagggcggcggcg

SEQ ID NO: 2261937 - RNA, 19 nt, Artificial Sequence
  Description of Artificial Sequence: Synthetic oligonucleotide
ucccgacugucugucuuag

SEQ ID NO: 2261938 - RNA, 19 nt, Artificial Sequence
  Description of Artificial Sequence: Synthetic oligonucleotide
ggcugaguggcacggaauc

SEQ ID NO: 2261939 - RNA, 19 nt, Artificial Sequence
  Description of Artificial Sequence: Synthetic oligonucleotide
ugcgccccgagaugcgcag

SEQ ID NO: 2261940 - RNA, 19 nt, Artificial Sequence
  Description of Artificial Sequence: Synthetic oligonucleotide
gugugaacacacggugugc

SEQ ID NO: 2261941 - RNA, 19 nt, Artificial Sequence
  Description of Artificial Sequence: Synthetic oligonucleotide
aggucgcugagauucucua

SEQ ID NO: 2261942 - RNA, 19 nt, Artificial Sequence
  Description of Artificial Sequence: Synthetic oligonucleotide
ggucccggcagcaaaagga

SEQ ID NO: 2261943 - RNA, 19 nt, Artificial Sequence
  Description of Artificial Sequence: Synthetic oligonucleotide
uacagccacuuggaggggu

SEQ ID NO: 2261944 - RNA, 19 nt, Artificial Sequence
  Description of Artificial Sequence: Synthetic oligonucleotide
uccaugcccucuagaacuu

SEQ ID NO: 2261945 - RNA, 19 nt, Artificial Sequence
  Description of Artificial Sequence: Synthetic oligonucleotide
ccaaaggucacucugccua

SEQ ID NO: 2261946 - RNA, 19 nt, Artificial Sequence
  Description of Artificial Sequence: Synthetic oligonucleotide
ucuuaucguuggccacgga

SEQ ID NO: 2261947 - RNA, 19 nt, Artificial Sequence
  Description of Artificial Sequence: Synthetic oligonucleotide
uugcgccccgagaugcgca

SEQ ID NO: 2261948 - RNA, 19 nt, Artificial Sequence
  Description of Artificial Sequence: Synthetic oligonucleotide
gcaaggagaagcggucgcg

SEQ ID NO: 2261949 - RNA, 19 nt, Artificial Sequence
  Description of Artificial Sequence: Synthetic oligonucleotide
agcgcucaccauaaaugcu

SEQ ID NO: 2261950 - RNA, 19 nt, Artificial Sequence
  Description of Artificial Sequence: Synthetic oligonucleotide
gaacacacggugugcgcua

SEQ ID NO: 2261951 - RNA, 19 nt, Artificial Sequence
  Description of Artificial Sequence: Synthetic oligonucleotide
gcccucuagaacuuugcca

SEQ ID NO: 2261952 - RNA, 19 nt, Artificial Sequence
  Description of Artificial Sequence: Synthetic oligonucleotide
caccuucauauugcgcccc

SEQ ID NO: 2261953 - RNA, 19 nt, Artificial Sequence
  Description of Artificial Sequence: Synthetic oligonucleotide
cacuucgaucuugccacag

SEQ ID NO: 2261954 - RNA, 19 nt, Artificial Sequence
  Description of Artificial Sequence: Synthetic oligonucleotide
cucuagaacuuugccaaaa

SEQ ID NO: 2261955 - RNA, 19 nt, Artificial Sequence
  Description of Artificial Sequence: Synthetic oligonucleotide
cccauccaggcccauagug

SEQ ID NO: 2261956 - RNA, 19 nt, Artificial Sequence
  Description of Artificial Sequence: Synthetic oligonucleotide
cgacugucugucuuagugc

SEQ ID NO: 2261957 - RNA, 19 nt, Artificial Sequence
  Description of Artificial Sequence: Synthetic oligonucleotide
cuacaaaauuauccacugu

SEQ ID NO: 2261958 - RNA, 19 nt, Artificial Sequence
  Description of Artificial Sequence: Synthetic oligonucleotide
gagaagcggucgcgggagc

SEQ ID NO: 2261959 - RNA, 19 nt, Artificial Sequence
  Description of Artificial Sequence: Synthetic oligonucleotide
uucaggggcuugucccgac

SEQ ID NO: 2261960 - RNA, 19 nt, Artificial Sequence
  Description of Artificial Sequence: Synthetic oligonucleotide
gagggugugaacacacggu

SEQ ID NO: 2261961 - RNA, 19 nt, Artificial Sequence
  Description of Artificial Sequence: Synthetic oligonucleotide
ugagggcggcggcgaaaag

SEQ ID NO: 2261962 - RNA, 19 nt, Artificial Sequence
  Description of Artificial Sequence: Synthetic oligonucleotide
gugugcgcuaguugccgac

SEQ ID NO: 2261963 - RNA, 19 nt, Artificial Sequence
  Description of Artificial Sequence: Synthetic oligonucleotide
caucuagccaagaugucuu

SEQ ID NO: 2261964 - RNA, 19 nt, Artificial Sequence
  Description of Artificial Sequence: Synthetic oligonucleotide
ggucgcugagauucucuac

SEQ ID NO: 2261965 - RNA, 19 nt, Artificial Sequence
  Description of Artificial Sequence: Synthetic oligonucleotide
auacagccacuuggagggg

SEQ ID NO: 2261966 - RNA, 19 nt, Artificial Sequence
  Description of Artificial Sequence: Synthetic oligonucleotide
ugaggucgcugagauucuc

SEQ ID NO: 2261967 - RNA, 19 nt, Artificial Sequence
  Description of Artificial Sequence: Synthetic oligonucleotide
ggcggcgaaaagcaccuuc

SEQ ID NO: 2261968 - RNA, 19 nt, Artificial Sequence
  Description of Artificial Sequence: Synthetic oligonucleotide
cacggagggucccggcagc

SEQ ID NO: 2261969 - RNA, 19 nt, Artificial Sequence
  Description of Artificial Sequence: Synthetic oligonucleotide
cccacgaugagggcggcgg

SEQ ID NO: 2261970 - RNA, 19 nt, Artificial Sequence
  Description of Artificial Sequence: Synthetic oligonucleotide
ggguaguaacaggaucugc

SEQ ID NO: 2261971 - RNA, 19 nt, Artificial Sequence
  Description of Artificial Sequence: Synthetic oligonucleotide
ggucgcgggagcccggacc

SEQ ID NO: 2261972 - RNA, 19 nt, Artificial Sequence
  Description of Artificial Sequence: Synthetic oligonucleotide
cauccaccgaaagcaagga

SEQ ID NO: 2261973 - RNA, 19 nt, Artificial Sequence
  Description of Artificial Sequence: Synthetic oligonucleotide
augagggcggcggcgaaaa

SEQ ID NO: 2261974 - RNA, 19 nt, Artificial Sequence
  Description of Artificial Sequence: Synthetic oligonucleotide
guugccgaccgggcgcggg

SEQ ID NO: 2261975 - RNA, 19 nt, Artificial Sequence
  Description of Artificial Sequence: Synthetic oligonucleotide
gcuaaggcuacaaaauuau

SEQ ID NO: 2261976 - RNA, 19 nt, Artificial Sequence
  Description of Artificial Sequence: Synthetic oligonucleotide
gcgcucaccauaaaugcuc

SEQ ID NO: 2261977 - RNA, 19 nt, Artificial Sequence
  Description of Artificial Sequence: Synthetic oligonucleotide
ggcgaaaagcaccuucaua

SEQ ID NO: 2261978 - RNA, 19 nt, Artificial Sequence
  Description of Artificial Sequence: Synthetic oligonucleotide
gcagcaaaaggaagacgac

SEQ ID NO: 2261979 - RNA, 19 nt, Artificial Sequence
  Description of Artificial Sequence: Synthetic oligonucleotide
uugucccgacugucugucu

SEQ ID NO: 2261980 - RNA, 19 nt, Artificial Sequence
  Description of Artificial Sequence: Synthetic oligonucleotide
gcgcuaguugccgaccggg

SEQ ID NO: 2261981 - RNA, 19 nt, Artificial Sequence
  Description of Artificial Sequence: Synthetic oligonucleotide
gcacauacagccacuugga

SEQ ID NO: 2261982 - RNA, 19 nt, Artificial Sequence
  Description of Artificial Sequence: Synthetic oligonucleotide
aucaggccuguggaaugug

SEQ ID NO: 2261983 - RNA, 19 nt, Artificial Sequence
  Description of Artificial Sequence: Synthetic oligonucleotide
cccggcagcaaaaggaaga

SEQ ID NO: 2261984 - RNA, 19 nt, Artificial Sequence
  Description of Artificial Sequence: Synthetic oligonucleotide
caguagcuaaggcuacaaa

SEQ ID NO: 2261985 - RNA, 19 nt, Artificial Sequence
  Description of Artificial Sequence: Synthetic oligonucleotide
uggccacggagggucccgg

SEQ ID NO: 2261986 - RNA, 19 nt, Artificial Sequence
  Description of Artificial Sequence: Synthetic oligonucleotide
ccaccgaaagcaaggagaa

SEQ ID NO: 2261987 - RNA, 19 nt, Artificial Sequence
  Description of Artificial Sequence: Synthetic oligonucleotide
ggcccauagugcuucagcu

SEQ ID NO: 2261988 - RNA, 19 nt, Artificial Sequence
  Description of Artificial Sequence: Synthetic oligonucleotide
ggucccuucuucuuaucgu

SEQ ID NO: 2261989 - RNA, 19 nt, Artificial Sequence
  Description of Artificial Sequence: Synthetic oligonucleotide
gccaagaugucuugacugu

SEQ ID NO: 2261990 - RNA, 19 nt, Artificial Sequence
  Description of Artificial Sequence: Synthetic oligonucleotide
agacgacggagcccacgau

SEQ ID NO: 2261991 - RNA, 19 nt, Artificial Sequence
  Description of Artificial Sequence: Synthetic oligonucleotide
guaacaggaucugcacaua

SEQ ID NO: 2261992 - RNA, 19 nt, Artificial Sequence
  Description of Artificial Sequence: Synthetic oligonucleotide
guuggccacggaggguccc

SEQ ID NO: 2261993 - RNA, 19 nt, Artificial Sequence
  Description of Artificial Sequence: Synthetic oligonucleotide
cgcugagauucucuacucc

SEQ ID NO: 2261994 - RNA, 19 nt, Artificial Sequence
  Description of Artificial Sequence: Synthetic oligonucleotide
acgauggaacuugcuguuu

SEQ ID NO: 2261995 - RNA, 19 nt, Artificial Sequence
  Description of Artificial Sequence: Synthetic oligonucleotide
gaggucgcugagauucucu

SEQ ID NO: 2261996 - RNA, 19 nt, Artificial Sequence
  Description of Artificial Sequence: Synthetic oligonucleotide
gagggucccggcagcaaaa

SEQ ID NO: 2261997 - RNA, 19 nt, Artificial Sequence
  Description of Artificial Sequence: Synthetic oligonucleotide
cacgauggaacuugcuguu

SEQ ID NO: 2261998 - RNA, 19 nt, Artificial Sequence
  Description of Artificial Sequence: Synthetic oligonucleotide
ucacccauccaggcccaua

SEQ ID NO: 2261999 - RNA, 19 nt, Artificial Sequence
  Description of Artificial Sequence: Synthetic oligonucleotide
cagcauccaccgaaagcaa

SEQ ID NO: 2262000 - RNA, 19 nt, Artificial Sequence
  Description of Artificial Sequence: Synthetic oligonucleotide
gcggcgaaaagcaccuuca

SEQ ID NO: 2262001 - RNA, 19 nt, Artificial Sequence
  Description of Artificial Sequence: Synthetic oligonucleotide
ggagggucccggcagcaaa

SEQ ID NO: 2262002 - RNA, 19 nt, Artificial Sequence
  Description of Artificial Sequence: Synthetic oligonucleotide
ccggcagcaaaaggaagac

SEQ ID NO: 2262003 - RNA, 19 nt, Artificial Sequence
  Description of Artificial Sequence: Synthetic oligonucleotide
cgagaugcgcagcauccac

SEQ ID NO: 2262004 - RNA, 19 nt, Artificial Sequence
  Description of Artificial Sequence: Synthetic oligonucleotide
ggugugcgcuaguugccga

SEQ ID NO: 2262005 - RNA, 19 nt, Artificial Sequence
  Description of Artificial Sequence: Synthetic oligonucleotide
gcugaguggcacggaauca

SEQ ID NO: 2262006 - RNA, 19 nt, Artificial Sequence
  Description of Artificial Sequence: Synthetic oligonucleotide
cuucaggggcuugucccga

SEQ ID NO: 2262007 - RNA, 19 nt, Artificial Sequence
  Description of Artificial Sequence: Synthetic oligonucleotide
cugaguggcacggaaucau

SEQ ID NO: 2262008 - RNA, 19 nt, Artificial Sequence
  Description of Artificial Sequence: Synthetic oligonucleotide
gcauugauaggaguuugau

SEQ ID NO: 2262009 - RNA, 19 nt, Artificial Sequence
  Description of Artificial Sequence: Synthetic oligonucleotide
uggggcugaguggcacgga

SEQ ID NO: 2262010 - RNA, 19 nt, Artificial Sequence
  Description of Artificial Sequence: Synthetic oligonucleotide
ggggcugaguggcacggaa

SEQ ID NO: 2262011 - RNA, 19 nt, Artificial Sequence
  Description of Artificial Sequence: Synthetic oligonucleotide
ccaucuagccaagaugucu

SEQ ID NO: 2262012 - RNA, 19 nt, Artificial Sequence
  Description of Artificial Sequence: Synthetic oligonucleotide
cugcaaugaucacauccuu

SEQ ID NO: 2262013 - RNA, 19 nt, Artificial Sequence
  Description of Artificial Sequence: Synthetic oligonucleotide
aguugccgaccgggcgcgg

SEQ ID NO: 2262014 - RNA, 19 nt, Artificial Sequence
  Description of Artificial Sequence: Synthetic oligonucleotide
cgcuaguugccgaccgggc

SEQ ID NO: 2262015 - RNA, 19 nt, Artificial Sequence
  Description of Artificial Sequence: Synthetic oligonucleotide
ggcacggaaucaugugccu

SEQ ID NO: 2262016 - RNA, 19 nt, Artificial Sequence
  Description of Artificial Sequence: Synthetic oligonucleotide
ccacgaugagggcggcggc

SEQ ID NO: 2262017 - RNA, 19 nt, Artificial Sequence
  Description of Artificial Sequence: Synthetic oligonucleotide
ccccgagaugcgcagcauc

SEQ ID NO: 2262018 - RNA, 19 nt, Artificial Sequence
  Description of Artificial Sequence: Synthetic oligonucleotide
cccggaccggaagagggug

SEQ ID NO: 2262019 - RNA, 19 nt, Artificial Sequence
  Description of Artificial Sequence: Synthetic oligonucleotide
gggugugaacacacggugu

SEQ ID NO: 2262020 - RNA, 19 nt, Artificial Sequence
  Description of Artificial Sequence: Synthetic oligonucleotide
cggugugcgcuaguugccg

SEQ ID NO: 2262021 - RNA, 19 nt, Artificial Sequence
  Description of Artificial Sequence: Synthetic oligonucleotide
ccaguagcuaaggcuacaa

SEQ ID NO: 2262022 - RNA, 19 nt, Artificial Sequence
  Description of Artificial Sequence: Synthetic oligonucleotide
ccuggcuaucuucaccucu

SEQ ID NO: 2262023 - RNA, 19 nt, Artificial Sequence
  Description of Artificial Sequence: Synthetic oligonucleotide
agcggucgcgggagcccgg

SEQ ID NO: 2262024 - RNA, 19 nt, Artificial Sequence
  Description of Artificial Sequence: Synthetic oligonucleotide
gcuugucccgacugucugu

SEQ ID NO: 2262025 - RNA, 19 nt, Artificial Sequence
  Description of Artificial Sequence: Synthetic oligonucleotide
cuggugaagucuccaccuu

SEQ ID NO: 2262026 - RNA, 19 nt, Artificial Sequence
  Description of Artificial Sequence: Synthetic oligonucleotide
ggccacggagggucccggc

SEQ ID NO: 2262027 - RNA, 19 nt, Artificial Sequence
  Description of Artificial Sequence: Synthetic oligonucleotide
gccuggcuaucuucaccuc

SEQ ID NO: 2262028 - RNA, 19 nt, Artificial Sequence
  Description of Artificial Sequence: Synthetic oligonucleotide
ccaagaugucuugacugua

SEQ ID NO: 2262029 - RNA, 19 nt, Artificial Sequence
  Description of Artificial Sequence: Synthetic oligonucleotide
gugaggucgcugagauucu

SEQ ID NO: 2262030 - RNA, 19 nt, Artificial Sequence
  Description of Artificial Sequence: Synthetic oligonucleotide
cguuggccacggagggucc

SEQ ID NO: 2262031 - RNA, 19 nt, Artificial Sequence
  Description of Artificial Sequence: Synthetic oligonucleotide
gcccauagugcuucagcuu

SEQ ID NO: 2262032 - RNA, 19 nt, Artificial Sequence
  Description of Artificial Sequence: Synthetic oligonucleotide
cucugccuacaggcucauc

SEQ ID NO: 2262033 - RNA, 19 nt, Artificial Sequence
  Description of Artificial Sequence: Synthetic oligonucleotide
cacacggugugcgcuaguu

SEQ ID NO: 2262034 - RNA, 19 nt, Artificial Sequence
  Description of Artificial Sequence: Synthetic oligonucleotide
ggaagcacuggggcugagu

SEQ ID NO: 2262035 - RNA, 19 nt, Artificial Sequence
  Description of Artificial Sequence: Synthetic oligonucleotide
gggaagcgcucaccauaaa

SEQ ID NO: 2262036 - RNA, 19 nt, Artificial Sequence
  Description of Artificial Sequence: Synthetic oligonucleotide
gcccacgaugagggcggcg

SEQ ID NO: 2262037 - RNA, 19 nt, Artificial Sequence
  Description of Artificial Sequence: Synthetic oligonucleotide
ccacuuggaggggugaggu

SEQ ID NO: 2262038 - RNA, 19 nt, Artificial Sequence
  Description of Artificial Sequence: Synthetic oligonucleotide
cgacggagcccacgaugag

SEQ ID NO: 2262039 - RNA, 19 nt, Artificial Sequence
  Description of Artificial Sequence: Synthetic oligonucleotide
ccuucauauugcgccccga

SEQ ID NO: 2262040 - RNA, 19 nt, Artificial Sequence
  Description of Artificial Sequence: Synthetic oligonucleotide
ggaagacgacggagcccac

SEQ ID NO: 2262041 - RNA, 19 nt, Artificial Sequence
  Description of Artificial Sequence: Synthetic oligonucleotide
gggcuugucccgacugucu

SEQ ID NO: 2262042 - RNA, 19 nt, Artificial Sequence
  Description of Artificial Sequence: Synthetic oligonucleotide
cggaccggaagagggugug

SEQ ID NO: 2262043 - RNA, 19 nt, Artificial Sequence
  Description of Artificial Sequence: Synthetic oligonucleotide
ccgagaugcgcagcaucca

SEQ ID NO: 2262044 - RNA, 19 nt, Artificial Sequence
  Description of Artificial Sequence: Synthetic oligonucleotide
caccucugugaggguagua

SEQ ID NO: 2262045 - RNA, 19 nt, Artificial Sequence
  Description of Artificial Sequence: Synthetic oligonucleotide
ccccucagguggaagcacu

SEQ ID NO: 2262046 - RNA, 19 nt, Artificial Sequence
  Description of Artificial Sequence: Synthetic oligonucleotide
gggcugaguggcacggaau

SEQ ID NO: 2262047 - RNA, 19 nt, Artificial Sequence
  Description of Artificial Sequence: Synthetic oligonucleotide
gcgccccgagaugcgcagc

SEQ ID NO: 2262048 - RNA, 19 nt, Artificial Sequence
  Description of Artificial Sequence: Synthetic oligonucleotide
ccggaccggaagagggugu

SEQ ID NO: 2262049 - RNA, 19 nt, Artificial Sequence
  Description of Artificial Sequence: Synthetic oligonucleotide
gcggucgcgggagcccgga

SEQ ID NO: 2262050 - RNA, 19 nt, Artificial Sequence
  Description of Artificial Sequence: Synthetic oligonucleotide
gcccggaccggaagagggu

SEQ ID NO: 2262051 - RNA, 19 nt, Artificial Sequence
  Description of Artificial Sequence: Synthetic oligonucleotide
cugugacuuugggucccuu

SEQ ID NO: 2262052 - RNA, 19 nt, Artificial Sequence
  Description of Artificial Sequence: Synthetic oligonucleotide
cggaaucaugugccuggcu

SEQ ID NO: 2262053 - RNA, 19 nt, Artificial Sequence
  Description of Artificial Sequence: Synthetic oligonucleotide
cccgacugucugucuuagu

SEQ ID NO: 2262054 - RNA, 19 nt, Artificial Sequence
  Description of Artificial Sequence: Synthetic oligonucleotide
cggcgaaaagcaccuucau

SEQ ID NO: 2262055 - RNA, 19 nt, Artificial Sequence
  Description of Artificial Sequence: Synthetic oligonucleotide
cgaugagggcggcggcgaa

SEQ ID NO: 2262056 - RNA, 19 nt, Artificial Sequence
  Description of Artificial Sequence: Synthetic oligonucleotide
cggucgcgggagcccggac

SEQ ID NO: 2262057 - RNA, 19 nt, Artificial Sequence
  Description of Artificial Sequence: Synthetic oligonucleotide
gccccgagaugcgcagcau

SEQ ID NO: 2262058 - RNA, 19 nt, Artificial Sequence
  Description of Artificial Sequence: Synthetic oligonucleotide
cggcggcgaaaagcaccuu

SEQ ID NO: 2262059 - RNA, 19 nt, Artificial Sequence
  Description of Artificial Sequence: Synthetic oligonucleotide
caugauaucacaucgagcc

SEQ ID NO: 2262060 - RNA, 19 nt, Artificial Sequence
  Description of Artificial Sequence: Synthetic oligonucleotide
agaaacacaucauauaggg

SEQ ID NO: 2262061 - RNA, 19 nt, Artificial Sequence
  Description of Artificial Sequence: Synthetic oligonucleotide
ugugucauuguacugguag

SEQ ID NO: 2262062 - RNA, 19 nt, Artificial Sequence
  Description of Artificial Sequence: Synthetic oligonucleotide
agugcauuggcacugcagc

SEQ ID NO: 2262063 - RNA, 19 nt, Artificial Sequence
  Description of Artificial Sequence: Synthetic oligonucleotide
cuuggaaggauuuugcuag

SEQ ID NO: 2262064 - RNA, 19 nt, Artificial Sequence
  Description of Artificial Sequence: Synthetic oligonucleotide
uagauauacacauacuucu

SEQ ID NO: 2262065 - RNA, 19 nt, Artificial Sequence
  Description of Artificial Sequence: Synthetic oligonucleotide
uuuaaguucucgaagcaga

SEQ ID NO: 2262066 - RNA, 19 nt, Artificial Sequence
  Description of Artificial Sequence: Synthetic oligonucleotide
uaagguauccaucacuggc

SEQ ID NO: 2262067 - RNA, 19 nt, Artificial Sequence
  Description of Artificial Sequence: Synthetic oligonucleotide
auauauggcaucaggagcc

SEQ ID NO: 2262068 - RNA, 19 nt, Artificial Sequence
  Description of Artificial Sequence: Synthetic oligonucleotide
gaaggauuuugcuagggag

SEQ ID NO: 2262069 - RNA, 19 nt, Artificial Sequence
  Description of Artificial Sequence: Synthetic oligonucleotide
ugcacagucagcauugaag

SEQ ID NO: 2262070 - RNA, 19 nt, Artificial Sequence
  Description of Artificial Sequence: Synthetic oligonucleotide
cucaaugucagucuuuggg

SEQ ID NO: 2262071 - RNA, 19 nt, Artificial Sequence
  Description of Artificial Sequence: Synthetic oligonucleotide
uuuaggaagcuguaagucc

SEQ ID NO: 2262072 - RNA, 19 nt, Artificial Sequence
  Description of Artificial Sequence: Synthetic oligonucleotide
aaaggcuucagucccacca

SEQ ID NO: 2262073 - RNA, 19 nt, Artificial Sequence
  Description of Artificial Sequence: Synthetic oligonucleotide
aguaagcccaugcauggcc

SEQ ID NO: 2262074 - RNA, 19 nt, Artificial Sequence
  Description of Artificial Sequence: Synthetic oligonucleotide
ugucuugucagaccgguag

SEQ ID NO: 2262075 - RNA, 19 nt, Artificial Sequence
  Description of Artificial Sequence: Synthetic oligonucleotide
uguaguguggaguggaacc

SEQ ID NO: 2262076 - RNA, 19 nt, Artificial Sequence
  Description of Artificial Sequence: Synthetic oligonucleotide
uucucuacauccuugggug

SEQ ID NO: 2262077 - RNA, 19 nt, Artificial Sequence
  Description of Artificial Sequence: Synthetic oligonucleotide
uguacugguaggaauucag

SEQ ID NO: 2262078 - RNA, 19 nt, Artificial Sequence
  Description of Artificial Sequence: Synthetic oligonucleotide
gaacuuuaaguucucgaag

SEQ ID NO: 2262079 - RNA, 19 nt, Artificial Sequence
  Description of Artificial Sequence: Synthetic oligonucleotide
aguugaagggugcugcagc

SEQ ID NO: 2262080 - RNA, 19 nt, Artificial Sequence
  Description of Artificial Sequence: Synthetic oligonucleotide
aaaucacccaguggaagcc

SEQ ID NO: 2262081 - RNA, 19 nt, Artificial Sequence
  Description of Artificial Sequence: Synthetic oligonucleotide
aucacaauccgaucguagg

SEQ ID NO: 2262082 - RNA, 19 nt, Artificial Sequence
  Description of Artificial Sequence: Synthetic oligonucleotide
augcaucacaauccgaucg

SEQ ID NO: 2262083 - RNA, 19 nt, Artificial Sequence
  Description of Artificial Sequence: Synthetic oligonucleotide
uuuuagucagugaugcaca

SEQ ID NO: 2262084 - RNA, 19 nt, Artificial Sequence
  Description of Artificial Sequence: Synthetic oligonucleotide
uguaguguccuccccauca

SEQ ID NO: 2262085 - RNA, 19 nt, Artificial Sequence
  Description of Artificial Sequence: Synthetic oligonucleotide
agggagagcgaacugggcc

SEQ ID NO: 2262086 - RNA, 19 nt, Artificial Sequence
  Description of Artificial Sequence: Synthetic oligonucleotide
gaaccaguaccacacuugg

SEQ ID NO: 2262087 - RNA, 19 nt, Artificial Sequence
  Description of Artificial Sequence: Synthetic oligonucleotide
gaaaucacccaguggaagc

SEQ ID NO: 2262088 - RNA, 19 nt, Artificial Sequence
  Description of Artificial Sequence: Synthetic oligonucleotide
aacuugcucaaugucaguc

SEQ ID NO: 2262089 - RNA, 19 nt, Artificial Sequence
  Description of Artificial Sequence: Synthetic oligonucleotide
auaauggucacugaugcug

SEQ ID NO: 2262090 - RNA, 19 nt, Artificial Sequence
  Description of Artificial Sequence: Synthetic oligonucleotide
uagucagugaugcacaguc

SEQ ID NO: 2262091 - RNA, 19 nt, Artificial Sequence
  Description of Artificial Sequence: Synthetic oligonucleotide
aaaggaauccggguuguuc

SEQ ID NO: 2262092 - RNA, 19 nt, Artificial Sequence
  Description of Artificial Sequence: Synthetic oligonucleotide
agcaccaugauaucacauc

SEQ ID NO: 2262093 - RNA, 19 nt, Artificial Sequence
  Description of Artificial Sequence: Synthetic oligonucleotide
ugaagcaccaugauaucac

SEQ ID NO: 2262094 - RNA, 19 nt, Artificial Sequence
  Description of Artificial Sequence: Synthetic oligonucleotide
ugauaucacaucgagccag

SEQ ID NO: 2262095 - RNA, 19 nt, Artificial Sequence
  Description of Artificial Sequence: Synthetic oligonucleotide
accaugauaucacaucgag

SEQ ID NO: 2262096 - RNA, 19 nt, Artificial Sequence
  Description of Artificial Sequence: Synthetic oligonucleotide
auugaaggcacagauacga

SEQ ID NO: 2262097 - RNA, 19 nt, Artificial Sequence
  Description of Artificial Sequence: Synthetic oligonucleotide
aucauauagggcauucagc

SEQ ID NO: 2262098 - RNA, 19 nt, Artificial Sequence
  Description of Artificial Sequence: Synthetic oligonucleotide
caucauauagggcauucag

SEQ ID NO: 2262099 - RNA, 19 nt, Artificial Sequence
  Description of Artificial Sequence: Synthetic oligonucleotide
aaggucauuugugucauug

SEQ ID NO: 2262100 - RNA, 19 nt, Artificial Sequence
  Description of Artificial Sequence: Synthetic oligonucleotide
aggaagaugagcaggagag

SEQ ID NO: 2262101 - RNA, 19 nt, Artificial Sequence
  Description of Artificial Sequence: Synthetic oligonucleotide
acaauccgaucguagguac

SEQ ID NO: 2262102 - RNA, 19 nt, Artificial Sequence
  Description of Artificial Sequence: Synthetic oligonucleotide
uguuucuggcaucuuuucc

SEQ ID NO: 2262103 - RNA, 19 nt, Artificial Sequence
  Description of Artificial Sequence: Synthetic oligonucleotide
ugcccaugcaucacaaucc

SEQ ID NO: 2262104 - RNA, 19 nt, Artificial Sequence
  Description of Artificial Sequence: Synthetic oligonucleotide
cuguuuaggaagcuguaag

SEQ ID NO: 2262105 - RNA, 19 nt, Artificial Sequence
  Description of Artificial Sequence: Synthetic oligonucleotide
aauccgaucguagguacag

SEQ ID NO: 2262106 - RNA, 19 nt, Artificial Sequence
  Description of Artificial Sequence: Synthetic oligonucleotide
aucagaaaucacccagugg

SEQ ID NO: 2262107 - RNA, 19 nt, Artificial Sequence
  Description of Artificial Sequence: Synthetic oligonucleotide
cacauccucauuuugccag

SEQ ID NO: 2262108 - RNA, 19 nt, Artificial Sequence
  Description of Artificial Sequence: Synthetic oligonucleotide
uguucagagugcauuggca

SEQ ID NO: 2262109 - RNA, 19 nt, Artificial Sequence
  Description of Artificial Sequence: Synthetic oligonucleotide
aucacaucgagccaggauu

SEQ ID NO: 2262110 - RNA, 19 nt, Artificial Sequence
  Description of Artificial Sequence: Synthetic oligonucleotide
uggaacuuuaaguucucga

SEQ ID NO: 2262111 - RNA, 19 nt, Artificial Sequence
  Description of Artificial Sequence: Synthetic oligonucleotide
aguccuggaacuuuaaguu

SEQ ID NO: 2262112 - RNA, 19 nt, Artificial Sequence
  Description of Artificial Sequence: Synthetic oligonucleotide
gauuugaacuaagguaucc

SEQ ID NO: 2262113 - RNA, 19 nt, Artificial Sequence
  Description of Artificial Sequence: Synthetic oligonucleotide
uggaguggaaccaguacca

SEQ ID NO: 2262114 - RNA, 19 nt, Artificial Sequence
  Description of Artificial Sequence: Synthetic oligonucleotide
uuuagucagugaugcacag

SEQ ID NO: 2262115 - RNA, 19 nt, Artificial Sequence
  Description of Artificial Sequence: Synthetic oligonucleotide
gucagugaugcacagucag

SEQ ID NO: 2262116 - RNA, 19 nt, Artificial Sequence
  Description of Artificial Sequence: Synthetic oligonucleotide
accaguaccacacuuggaa

SEQ ID NO: 2262117 - RNA, 19 nt, Artificial Sequence
  Description of Artificial Sequence: Synthetic oligonucleotide
agccacaguaagcccaugc

SEQ ID NO: 2262118 - RNA, 19 nt, Artificial Sequence
  Description of Artificial Sequence: Synthetic oligonucleotide
acuaagguauccaucacug

SEQ ID NO: 2262119 - RNA, 19 nt, Artificial Sequence
  Description of Artificial Sequence: Synthetic oligonucleotide
cacaguaagcccaugcaug

SEQ ID NO: 2262120 - RNA, 19 nt, Artificial Sequence
  Description of Artificial Sequence: Synthetic oligonucleotide
uuggccaacuugcucaaug

SEQ ID NO: 2262121 - RNA, 19 nt, Artificial Sequence
  Description of Artificial Sequence: Synthetic oligonucleotide
uugaacuaagguauccauc

SEQ ID NO: 2262122 - RNA, 19 nt, Artificial Sequence
  Description of Artificial Sequence: Synthetic oligonucleotide
uuggguguaguguggagug

SEQ ID NO: 2262123 - RNA, 19 nt, Artificial Sequence
  Description of Artificial Sequence: Synthetic oligonucleotide
uuguucagagugcauuggc

SEQ ID NO: 2262124 - RNA, 19 nt, Artificial Sequence
  Description of Artificial Sequence: Synthetic oligonucleotide
gaauccggguuguucagag

SEQ ID NO: 2262125 - RNA, 19 nt, Artificial Sequence
  Description of Artificial Sequence: Synthetic oligonucleotide
gagacaguuuucugggaag

SEQ ID NO: 2262126 - RNA, 19 nt, Artificial Sequence
  Description of Artificial Sequence: Synthetic oligonucleotide
uccaucacuggcuccuugg

SEQ ID NO: 2262127 - RNA, 19 nt, Artificial Sequence
  Description of Artificial Sequence: Synthetic oligonucleotide
uugucagaccgguagauau

SEQ ID NO: 2262128 - RNA, 19 nt, Artificial Sequence
  Description of Artificial Sequence: Synthetic oligonucleotide
ucacaauccgaucguaggu

SEQ ID NO: 2262129 - RNA, 19 nt, Artificial Sequence
  Description of Artificial Sequence: Synthetic oligonucleotide
auuuugccagcguugggag

SEQ ID NO: 2262130 - RNA, 19 nt, Artificial Sequence
  Description of Artificial Sequence: Synthetic oligonucleotide
cagaccgguagauauacac

SEQ ID NO: 2262131 - RNA, 19 nt, Artificial Sequence
  Description of Artificial Sequence: Synthetic oligonucleotide
uaauggucacugaugcuga

SEQ ID NO: 2262132 - RNA, 19 nt, Artificial Sequence
  Description of Artificial Sequence: Synthetic oligonucleotide
uuaaguucucgaagcagaa

SEQ ID NO: 2262133 - RNA, 19 nt, Artificial Sequence
  Description of Artificial Sequence: Synthetic oligonucleotide
ucguagguacaguuggugc

SEQ ID NO: 2262134 - RNA, 19 nt, Artificial Sequence
  Description of Artificial Sequence: Synthetic oligonucleotide
uucagucccaccagccagg

SEQ ID NO: 2262135 - RNA, 19 nt, Artificial Sequence
  Description of Artificial Sequence: Synthetic oligonucleotide
aggcacagauacgaaaggc

SEQ ID NO: 2262136 - RNA, 19 nt, Artificial Sequence
  Description of Artificial Sequence: Synthetic oligonucleotide
cucgaagcagaagagagac

SEQ ID NO: 2262137 - RNA, 19 nt, Artificial Sequence
  Description of Artificial Sequence: Synthetic oligonucleotide
gaagagagacaguuuucug

SEQ ID NO: 2262138 - RNA, 19 nt, Artificial Sequence
  Description of Artificial Sequence: Synthetic oligonucleotide
uguggaguggaaccaguac

SEQ ID NO: 2262139 - RNA, 19 nt, Artificial Sequence
  Description of Artificial Sequence: Synthetic oligonucleotide
aaggauuuugcuagggaga

SEQ ID NO: 2262140 - RNA, 19 nt, Artificial Sequence
  Description of Artificial Sequence: Synthetic oligonucleotide
ucgagccaggauuugaacu

SEQ ID NO: 2262141 - RNA, 19 nt, Artificial Sequence
  Description of Artificial Sequence: Synthetic oligonucleotide
aaugucagucuuugggcau

SEQ ID NO: 2262142 - RNA, 19 nt, Artificial Sequence
  Description of Artificial Sequence: Synthetic oligonucleotide
gugucauuguacugguagg

SEQ ID NO: 2262143 - RNA, 19 nt, Artificial Sequence
  Description of Artificial Sequence: Synthetic oligonucleotide
agcguugggagacauccag

SEQ ID NO: 2262144 - RNA, 19 nt, Artificial Sequence
  Description of Artificial Sequence: Synthetic oligonucleotide
acacuuggaaggauuuugc

SEQ ID NO: 2262145 - RNA, 19 nt, Artificial Sequence
  Description of Artificial Sequence: Synthetic oligonucleotide
guucagagugcauuggcac

SEQ ID NO: 2262146 - RNA, 19 nt, Artificial Sequence
  Description of Artificial Sequence: Synthetic oligonucleotide
uguaaguccuggaacuuua

SEQ ID NO: 2262147 - RNA, 19 nt, Artificial Sequence
  Description of Artificial Sequence: Synthetic oligonucleotide
ucagugaugcacagucagc

SEQ ID NO: 2262148 - RNA, 19 nt, Artificial Sequence
  Description of Artificial Sequence: Synthetic oligonucleotide
uuugcuagggagagcgaac

SEQ ID NO: 2262149 - RNA, 19 nt, Artificial Sequence
  Description of Artificial Sequence: Synthetic oligonucleotide
cacaggauaauggucacug

SEQ ID NO: 2262150 - RNA, 19 nt, Artificial Sequence
  Description of Artificial Sequence: Synthetic oligonucleotide
uuggcacugcagcugaucu

SEQ ID NO: 2262151 - RNA, 19 nt, Artificial Sequence
  Description of Artificial Sequence: Synthetic oligonucleotide
ugggagacauccagaaaca

SEQ ID NO: 2262152 - RNA, 19 nt, Artificial Sequence
  Description of Artificial Sequence: Synthetic oligonucleotide
cauccuuggguguagugug

SEQ ID NO: 2262153 - RNA, 19 nt, Artificial Sequence
  Description of Artificial Sequence: Synthetic oligonucleotide
cuaauugguguucucccug

SEQ ID NO: 2262154 - RNA, 19 nt, Artificial Sequence
  Description of Artificial Sequence: Synthetic oligonucleotide
ugaagggugcugcagcccu

SEQ ID NO: 2262155 - RNA, 19 nt, Artificial Sequence
  Description of Artificial Sequence: Synthetic oligonucleotide
ugcaucacaauccgaucgu

SEQ ID NO: 2262156 - RNA, 19 nt, Artificial Sequence
  Description of Artificial Sequence: Synthetic oligonucleotide
ugucauuguacugguagga

SEQ ID NO: 2262157 - RNA, 19 nt, Artificial Sequence
  Description of Artificial Sequence: Synthetic oligonucleotide
uggcccugaauguuucugg

SEQ ID NO: 2262158 - RNA, 19 nt, Artificial Sequence
  Description of Artificial Sequence: Synthetic oligonucleotide
agaaaucacccaguggaag

SEQ ID NO: 2262159 - RNA, 19 nt, Artificial Sequence
  Description of Artificial Sequence: Synthetic oligonucleotide
uuugccagcguugggagac

SEQ ID NO: 2262160 - RNA, 19 nt, Artificial Sequence
  Description of Artificial Sequence: Synthetic oligonucleotide
cauugaaggcacagauacg

SEQ ID NO: 2262161 - RNA, 19 nt, Artificial Sequence
  Description of Artificial Sequence: Synthetic oligonucleotide
gauaucacaucgagccagg

SEQ ID NO: 2262162 - RNA, 19 nt, Artificial Sequence
  Description of Artificial Sequence: Synthetic oligonucleotide
aucgagccaggauuugaac

SEQ ID NO: 2262163 - RNA, 19 nt, Artificial Sequence
  Description of Artificial Sequence: Synthetic oligonucleotide
auuguacugguaggaauuc

SEQ ID NO: 2262164 - RNA, 19 nt, Artificial Sequence
  Description of Artificial Sequence: Synthetic oligonucleotide
caucacaauccgaucguag

SEQ ID NO: 2262165 - RNA, 19 nt, Artificial Sequence
  Description of Artificial Sequence: Synthetic oligonucleotide
agggcauucagcuccuucu

SEQ ID NO: 2262166 - RNA, 19 nt, Artificial Sequence
  Description of Artificial Sequence: Synthetic oligonucleotide
acuuggaaggauuuugcua

SEQ ID NO: 2262167 - RNA, 19 nt, Artificial Sequence
  Description of Artificial Sequence: Synthetic oligonucleotide
gaaacacaucauauagggc

SEQ ID NO: 2262168 - RNA, 19 nt, Artificial Sequence
  Description of Artificial Sequence: Synthetic oligonucleotide
cuagcagggagcuguuuag

SEQ ID NO: 2262169 - RNA, 19 nt, Artificial Sequence
  Description of Artificial Sequence: Synthetic oligonucleotide
cuucagucccaccagccag

SEQ ID NO: 2262170 - RNA, 19 nt, Artificial Sequence
  Description of Artificial Sequence: Synthetic oligonucleotide
agauacgaaaggcuucagu

SEQ ID NO: 2262171 - RNA, 19 nt, Artificial Sequence
  Description of Artificial Sequence: Synthetic oligonucleotide
ccauauauggcaucaggag

SEQ ID NO: 2262172 - RNA, 19 nt, Artificial Sequence
  Description of Artificial Sequence: Synthetic oligonucleotide
uucagagugcauuggcacu

SEQ ID NO: 2262173 - RNA, 19 nt, Artificial Sequence
  Description of Artificial Sequence: Synthetic oligonucleotide
ucagagugcauuggcacug

SEQ ID NO: 2262174 - RNA, 19 nt, Artificial Sequence
  Description of Artificial Sequence: Synthetic oligonucleotide
guuuaggaagcuguaaguc

SEQ ID NO: 2262175 - RNA, 19 nt, Artificial Sequence
  Description of Artificial Sequence: Synthetic oligonucleotide
gaaguccccaagcaggauc

SEQ ID NO: 2262176 - RNA, 19 nt, Artificial Sequence
  Description of Artificial Sequence: Synthetic oligonucleotide
gaaggagcaggcuguugag

SEQ ID NO: 2262177 - RNA, 19 nt, Artificial Sequence
  Description of Artificial Sequence: Synthetic oligonucleotide
caucagaaaucacccagug

SEQ ID NO: 2262178 - RNA, 19 nt, Artificial Sequence
  Description of Artificial Sequence: Synthetic oligonucleotide
uccccaagcaggaucacau

SEQ ID NO: 2262179 - RNA, 19 nt, Artificial Sequence
  Description of Artificial Sequence: Synthetic oligonucleotide
uggaaggauuuugcuaggg

SEQ ID NO: 2262180 - RNA, 19 nt, Artificial Sequence
  Description of Artificial Sequence: Synthetic oligonucleotide
uuuugcuagggagagcgaa

SEQ ID NO: 2262181 - RNA, 19 nt, Artificial Sequence
  Description of Artificial Sequence: Synthetic oligonucleotide
ugaucucggcuaauuggug

SEQ ID NO: 2262182 - RNA, 19 nt, Artificial Sequence
  Description of Artificial Sequence: Synthetic oligonucleotide
uaucacaucgagccaggau

SEQ ID NO: 2262183 - RNA, 19 nt, Artificial Sequence
  Description of Artificial Sequence: Synthetic oligonucleotide
uauggcaucaggagcccuc

SEQ ID NO: 2262184 - RNA, 19 nt, Artificial Sequence
  Description of Artificial Sequence: Synthetic oligonucleotide
aauugguguucucccugcu

SEQ ID NO: 2262185 - RNA, 19 nt, Artificial Sequence
  Description of Artificial Sequence: Synthetic oligonucleotide
cugcccaugcaucacaauc

SEQ ID NO: 2262186 - RNA, 19 nt, Artificial Sequence
  Description of Artificial Sequence: Synthetic oligonucleotide
cacacuuggaaggauuuug

SEQ ID NO: 2262187 - RNA, 19 nt, Artificial Sequence
  Description of Artificial Sequence: Synthetic oligonucleotide
uaugugcugcgcccuagca

SEQ ID NO: 2262188 - RNA, 19 nt, Artificial Sequence
  Description of Artificial Sequence: Synthetic oligonucleotide
uccucauuuugccagcguu

SEQ ID NO: 2262189 - RNA, 19 nt, Artificial Sequence
  Description of Artificial Sequence: Synthetic oligonucleotide
ggaacuuuaaguucucgaa

SEQ ID NO: 2262190 - RNA, 19 nt, Artificial Sequence
  Description of Artificial Sequence: Synthetic oligonucleotide
agcgaacugggccacaaaa

SEQ ID NO: 2262191 - RNA, 19 nt, Artificial Sequence
  Description of Artificial Sequence: Synthetic oligonucleotide
cauuugugucauuguacug

SEQ ID NO: 2262192 - RNA, 19 nt, Artificial Sequence
  Description of Artificial Sequence: Synthetic oligonucleotide
cacagauacgaaaggcuuc

SEQ ID NO: 2262193 - RNA, 19 nt, Artificial Sequence
  Description of Artificial Sequence: Synthetic oligonucleotide
ugcauuggcacugcagcug

SEQ ID NO: 2262194 - RNA, 19 nt, Artificial Sequence
  Description of Artificial Sequence: Synthetic oligonucleotide
ucuacauccuuggguguag

SEQ ID NO: 2262195 - RNA, 19 nt, Artificial Sequence
  Description of Artificial Sequence: Synthetic oligonucleotide
ggaagccugccucaguccg

SEQ ID NO: 2262196 - RNA, 19 nt, Artificial Sequence
  Description of Artificial Sequence: Synthetic oligonucleotide
augcauggccauauauggc

SEQ ID NO: 2262197 - RNA, 19 nt, Artificial Sequence
  Description of Artificial Sequence: Synthetic oligonucleotide
cucaguccgaaggagcagg

SEQ ID NO: 2262198 - RNA, 19 nt, Artificial Sequence
  Description of Artificial Sequence: Synthetic oligonucleotide
gaagcaccaugauaucaca

SEQ ID NO: 2262199 - RNA, 19 nt, Artificial Sequence
  Description of Artificial Sequence: Synthetic oligonucleotide
ggcacugcagcugaucucg

SEQ ID NO: 2262200 - RNA, 19 nt, Artificial Sequence
  Description of Artificial Sequence: Synthetic oligonucleotide
cacaaaagguucucgggca

SEQ ID NO: 2262201 - RNA, 19 nt, Artificial Sequence
  Description of Artificial Sequence: Synthetic oligonucleotide
augauaucacaucgagcca

SEQ ID NO: 2262202 - RNA, 19 nt, Artificial Sequence
  Description of Artificial Sequence: Synthetic oligonucleotide
uggggaaguugaagggugc

SEQ ID NO: 2262203 - RNA, 19 nt, Artificial Sequence
  Description of Artificial Sequence: Synthetic oligonucleotide
cauauagggcauucagcuc

SEQ ID NO: 2262204 - RNA, 19 nt, Artificial Sequence
  Description of Artificial Sequence: Synthetic oligonucleotide
aaaagguucucgggcaaaa

SEQ ID NO: 2262205 - RNA, 19 nt, Artificial Sequence
  Description of Artificial Sequence: Synthetic oligonucleotide
ggcuaauugguguucuccc

SEQ ID NO: 2262206 - RNA, 19 nt, Artificial Sequence
  Description of Artificial Sequence: Synthetic oligonucleotide
uauagggcauucagcuccu

SEQ ID NO: 2262207 - RNA, 19 nt, Artificial Sequence
  Description of Artificial Sequence: Synthetic oligonucleotide
aacugggccacaaaagguu

SEQ ID NO: 2262208 - RNA, 19 nt, Artificial Sequence
  Description of Artificial Sequence: Synthetic oligonucleotide
auggcaucaggagcccucc

SEQ ID NO: 2262209 - RNA, 19 nt, Artificial Sequence
  Description of Artificial Sequence: Synthetic oligonucleotide
ggccacaaaagguucucgg

SEQ ID NO: 2262210 - RNA, 19 nt, Artificial Sequence
  Description of Artificial Sequence: Synthetic oligonucleotide
aguaccacacuuggaagga

SEQ ID NO: 2262211 - RNA, 19 nt, Artificial Sequence
  Description of Artificial Sequence: Synthetic oligonucleotide
caugcaucacaauccgauc

SEQ ID NO: 2262212 - RNA, 19 nt, Artificial Sequence
  Description of Artificial Sequence: Synthetic oligonucleotide
ucacaucgagccaggauuu

SEQ ID NO: 2262213 - RNA, 19 nt, Artificial Sequence
  Description of Artificial Sequence: Synthetic oligonucleotide
accagccaggaagaugagc

SEQ ID NO: 2262214 - RNA, 19 nt, Artificial Sequence
  Description of Artificial Sequence: Synthetic oligonucleotide
cauuuugccagcguuggga

SEQ ID NO: 2262215 - RNA, 19 nt, Artificial Sequence
  Description of Artificial Sequence: Synthetic oligonucleotide
ccgguagauauacacauac

SEQ ID NO: 2262216 - RNA, 19 nt, Artificial Sequence
  Description of Artificial Sequence: Synthetic oligonucleotide
gaguggaaccaguaccaca

SEQ ID NO: 2262217 - RNA, 19 nt, Artificial Sequence
  Description of Artificial Sequence: Synthetic oligonucleotide
cauacuucuccuuguaugu

SEQ ID NO: 2262218 - RNA, 19 nt, Artificial Sequence
  Description of Artificial Sequence: Synthetic oligonucleotide
gaccgguagauauacacau

SEQ ID NO: 2262219 - RNA, 19 nt, Artificial Sequence
  Description of Artificial Sequence: Synthetic oligonucleotide
uccgaucguagguacaguu

SEQ ID NO: 2262220 - RNA, 19 nt, Artificial Sequence
  Description of Artificial Sequence: Synthetic oligonucleotide
aggucauuugugucauugu

SEQ ID NO: 2262221 - RNA, 19 nt, Artificial Sequence
  Description of Artificial Sequence: Synthetic oligonucleotide
auggccauauauggcauca

SEQ ID NO: 2262222 - RNA, 19 nt, Artificial Sequence
  Description of Artificial Sequence: Synthetic oligonucleotide
aauccggguuguucagagu

SEQ ID NO: 2262223 - RNA, 19 nt, Artificial Sequence
  Description of Artificial Sequence: Synthetic oligonucleotide
uggaagccugccucagucc

SEQ ID NO: 2262224 - RNA, 19 nt, Artificial Sequence
  Description of Artificial Sequence: Synthetic oligonucleotide
uagguacaguuggugcugg

SEQ ID NO: 2262225 - RNA, 19 nt, Artificial Sequence
  Description of Artificial Sequence: Synthetic oligonucleotide
gucagaccgguagauauac

SEQ ID NO: 2262226 - RNA, 19 nt, Artificial Sequence
  Description of Artificial Sequence: Synthetic oligonucleotide
aggaauccggguuguucag

SEQ ID NO: 2262227 - RNA, 19 nt, Artificial Sequence
  Description of Artificial Sequence: Synthetic oligonucleotide
guaguguccuccccaucag

SEQ ID NO: 2262228 - RNA, 19 nt, Artificial Sequence
  Description of Artificial Sequence: Synthetic oligonucleotide
uugcuagggagagcgaacu

SEQ ID NO: 2262229 - RNA, 19 nt, Artificial Sequence
  Description of Artificial Sequence: Synthetic oligonucleotide
acaaaagguucucgggcaa

SEQ ID NO: 2262230 - RNA, 19 nt, Artificial Sequence
  Description of Artificial Sequence: Synthetic oligonucleotide
uguaugugcugcgcccuag

SEQ ID NO: 2262231 - RNA, 19 nt, Artificial Sequence
  Description of Artificial Sequence: Synthetic oligonucleotide
cgaacugggccacaaaagg

SEQ ID NO: 2262232 - RNA, 19 nt, Artificial Sequence
  Description of Artificial Sequence: Synthetic oligonucleotide
guggaagccugccucaguc

SEQ ID NO: 2262233 - RNA, 19 nt, Artificial Sequence
  Description of Artificial Sequence: Synthetic oligonucleotide
ugucagaccgguagauaua

SEQ ID NO: 2262234 - RNA, 19 nt, Artificial Sequence
  Description of Artificial Sequence: Synthetic oligonucleotide
uaccacacuuggaaggauu

SEQ ID NO: 2262235 - RNA, 19 nt, Artificial Sequence
  Description of Artificial Sequence: Synthetic oligonucleotide
uagggagagcgaacugggc

SEQ ID NO: 2262236 - RNA, 19 nt, Artificial Sequence
  Description of Artificial Sequence: Synthetic oligonucleotide
acaguuuucugggaagaau

SEQ ID NO: 2262237 - RNA, 19 nt, Artificial Sequence
  Description of Artificial Sequence: Synthetic oligonucleotide
acuguaguguccuccccau

SEQ ID NO: 2262238 - RNA, 19 nt, Artificial Sequence
  Description of Artificial Sequence: Synthetic oligonucleotide
gcaggagagccacaguaag

SEQ ID NO: 2262239 - RNA, 19 nt, Artificial Sequence
  Description of Artificial Sequence: Synthetic oligonucleotide
ccaugcauggccauauaug

SEQ ID NO: 2262240 - RNA, 19 nt, Artificial Sequence
  Description of Artificial Sequence: Synthetic oligonucleotide
uagggcauucagcuccuuc

SEQ ID NO: 2262241 - RNA, 19 nt, Artificial Sequence
  Description of Artificial Sequence: Synthetic oligonucleotide
gaucucggcuaauuggugu

SEQ ID NO: 2262242 - RNA, 19 nt, Artificial Sequence
  Description of Artificial Sequence: Synthetic oligonucleotide
ucuugucagaccgguagau

SEQ ID NO: 2262243 - RNA, 19 nt, Artificial Sequence
  Description of Artificial Sequence: Synthetic oligonucleotide
cuggaacuuuaaguucucg

SEQ ID NO: 2262244 - RNA, 19 nt, Artificial Sequence
  Description of Artificial Sequence: Synthetic oligonucleotide
acaggauaauggucacuga

SEQ ID NO: 2262245 - RNA, 19 nt, Artificial Sequence
  Description of Artificial Sequence: Synthetic oligonucleotide
ucucuacauccuugggugu

SEQ ID NO: 2262246 - RNA, 19 nt, Artificial Sequence
  Description of Artificial Sequence: Synthetic oligonucleotide
uuagucagugaugcacagu

SEQ ID NO: 2262247 - RNA, 19 nt, Artificial Sequence
  Description of Artificial Sequence: Synthetic oligonucleotide
acaguuggugcuggcccgc

SEQ ID NO: 2262248 - RNA, 19 nt, Artificial Sequence
  Description of Artificial Sequence: Synthetic oligonucleotide
ugcagcugaucucggcuaa

SEQ ID NO: 2262249 - RNA, 19 nt, Artificial Sequence
  Description of Artificial Sequence: Synthetic oligonucleotide
gauaauggucacugaugcu

SEQ ID NO: 2262250 - RNA, 19 nt, Artificial Sequence
  Description of Artificial Sequence: Synthetic oligonucleotide
ucagaccgguagauauaca

SEQ ID NO: 2262251 - RNA, 19 nt, Artificial Sequence
  Description of Artificial Sequence: Synthetic oligonucleotide
agaccgguagauauacaca

SEQ ID NO: 2262252 - RNA, 19 nt, Artificial Sequence
  Description of Artificial Sequence: Synthetic oligonucleotide
gaaaggcuucagucccacc

SEQ ID NO: 2262253 - RNA, 19 nt, Artificial Sequence
  Description of Artificial Sequence: Synthetic oligonucleotide
ggcuccuuggccaacuugc

SEQ ID NO: 2262254 - RNA, 19 nt, Artificial Sequence
  Description of Artificial Sequence: Synthetic oligonucleotide
uugaagggugcugcagccc

SEQ ID NO: 2262255 - RNA, 19 nt, Artificial Sequence
  Description of Artificial Sequence: Synthetic oligonucleotide
acaucauauagggcauuca

SEQ ID NO: 2262256 - RNA, 19 nt, Artificial Sequence
  Description of Artificial Sequence: Synthetic oligonucleotide
ugaaagcuccuggggaagu

SEQ ID NO: 2262257 - RNA, 19 nt, Artificial Sequence
  Description of Artificial Sequence: Synthetic oligonucleotide
ugccugacucagcuccacc

SEQ ID NO: 2262258 - RNA, 19 nt, Artificial Sequence
  Description of Artificial Sequence: Synthetic oligonucleotide
augcugagagccucuuccu

SEQ ID NO: 2262259 - RNA, 19 nt, Artificial Sequence
  Description of Artificial Sequence: Synthetic oligonucleotide
cauccucauuuugccagcg

SEQ ID NO: 2262260 - RNA, 19 nt, Artificial Sequence
  Description of Artificial Sequence: Synthetic oligonucleotide
aucucggcuaauugguguu

SEQ ID NO: 2262261 - RNA, 19 nt, Artificial Sequence
  Description of Artificial Sequence: Synthetic oligonucleotide
guaugugcugcgcccuagc

SEQ ID NO: 2262262 - RNA, 19 nt, Artificial Sequence
  Description of Artificial Sequence: Synthetic oligonucleotide
agcccuccaaaggaauccg

SEQ ID NO: 2262263 - RNA, 19 nt, Artificial Sequence
  Description of Artificial Sequence: Synthetic oligonucleotide
uuugggcauugaaggcaca

SEQ ID NO: 2262264 - RNA, 19 nt, Artificial Sequence
  Description of Artificial Sequence: Synthetic oligonucleotide
guaguguggaguggaacca

SEQ ID NO: 2262265 - RNA, 19 nt, Artificial Sequence
  Description of Artificial Sequence: Synthetic oligonucleotide
ugcuggcccgcacuguagu

SEQ ID NO: 2262266 - RNA, 19 nt, Artificial Sequence
  Description of Artificial Sequence: Synthetic oligonucleotide
ggaaggauuuugcuaggga

SEQ ID NO: 2262267 - RNA, 19 nt, Artificial Sequence
  Description of Artificial Sequence: Synthetic oligonucleotide
ggucugacagcccugccca

SEQ ID NO: 2262268 - RNA, 19 nt, Artificial Sequence
  Description of Artificial Sequence: Synthetic oligonucleotide
aagcaccaugauaucacau

SEQ ID NO: 2262269 - RNA, 19 nt, Artificial Sequence
  Description of Artificial Sequence: Synthetic oligonucleotide
cauuguacugguaggaauu

SEQ ID NO: 2262270 - RNA, 19 nt, Artificial Sequence
  Description of Artificial Sequence: Synthetic oligonucleotide
gccaggauuugaacuaagg

SEQ ID NO: 2262271 - RNA, 19 nt, Artificial Sequence
  Description of Artificial Sequence: Synthetic oligonucleotide
cauggccauauauggcauc

SEQ ID NO: 2262272 - RNA, 19 nt, Artificial Sequence
  Description of Artificial Sequence: Synthetic oligonucleotide
acaucgagccaggauuuga

SEQ ID NO: 2262273 - RNA, 19 nt, Artificial Sequence
  Description of Artificial Sequence: Synthetic oligonucleotide
ccucauuuugccagcguug

SEQ ID NO: 2262274 - RNA, 19 nt, Artificial Sequence
  Description of Artificial Sequence: Synthetic oligonucleotide
ccaguaccacacuuggaag

SEQ ID NO: 2262275 - RNA, 19 nt, Artificial Sequence
  Description of Artificial Sequence: Synthetic oligonucleotide
ggagacauccagaaacaca

SEQ ID NO: 2262276 - RNA, 19 nt, Artificial Sequence
  Description of Artificial Sequence: Synthetic oligonucleotide
gccauauauggcaucagga

SEQ ID NO: 2262277 - RNA, 19 nt, Artificial Sequence
  Description of Artificial Sequence: Synthetic oligonucleotide
gccaacuugcucaauguca

SEQ ID NO: 2262278 - RNA, 19 nt, Artificial Sequence
  Description of Artificial Sequence: Synthetic oligonucleotide
caucgagccaggauuugaa

SEQ ID NO: 2262279 - RNA, 19 nt, Artificial Sequence
  Description of Artificial Sequence: Synthetic oligonucleotide
uggccauauauggcaucag

SEQ ID NO: 2262280 - RNA, 19 nt, Artificial Sequence
  Description of Artificial Sequence: Synthetic oligonucleotide
guguaguguggaguggaac

SEQ ID NO: 2262281 - RNA, 19 nt, Artificial Sequence
  Description of Artificial Sequence: Synthetic oligonucleotide
gaacugggccacaaaaggu

SEQ ID NO: 2262282 - RNA, 19 nt, Artificial Sequence
  Description of Artificial Sequence: Synthetic oligonucleotide
gggagagcgaacugggcca

SEQ ID NO: 2262283 - RNA, 19 nt, Artificial Sequence
  Description of Artificial Sequence: Synthetic oligonucleotide
auccuuggguguagugugg

SEQ ID NO: 2262284 - RNA, 19 nt, Artificial Sequence
  Description of Artificial Sequence: Synthetic oligonucleotide
ucuggcccugaauguuucu

SEQ ID NO: 2262285 - RNA, 19 nt, Artificial Sequence
  Description of Artificial Sequence: Synthetic oligonucleotide
cagaaaucacccaguggaa

SEQ ID NO: 2262286 - RNA, 19 nt, Artificial Sequence
  Description of Artificial Sequence: Synthetic oligonucleotide
ggcccugaauguuucuggc

SEQ ID NO: 2262287 - RNA, 19 nt, Artificial Sequence
  Description of Artificial Sequence: Synthetic oligonucleotide
auccucauuuugccagcgu

SEQ ID NO: 2262288 - RNA, 19 nt, Artificial Sequence
  Description of Artificial Sequence: Synthetic oligonucleotide
cuccuuguaugugcugcgc

SEQ ID NO: 2262289 - RNA, 19 nt, Artificial Sequence
  Description of Artificial Sequence: Synthetic oligonucleotide
agagugcauuggcacugca

SEQ ID NO: 2262290 - RNA, 19 nt, Artificial Sequence
  Description of Artificial Sequence: Synthetic oligonucleotide
guauccaucacuggcuccu

SEQ ID NO: 2262291 - RNA, 19 nt, Artificial Sequence
  Description of Artificial Sequence: Synthetic oligonucleotide
guaagcccaugcauggcca

SEQ ID NO: 2262292 - RNA, 19 nt, Artificial Sequence
  Description of Artificial Sequence: Synthetic oligonucleotide
ugcgcccuagcagggagcu

SEQ ID NO: 2262293 - RNA, 19 nt, Artificial Sequence
  Description of Artificial Sequence: Synthetic oligonucleotide
gcgaacugggccacaaaag

SEQ ID NO: 2262294 - RNA, 19 nt, Artificial Sequence
  Description of Artificial Sequence: Synthetic oligonucleotide
guugggagacauccagaaa

SEQ ID NO: 2262295 - RNA, 19 nt, Artificial Sequence
  Description of Artificial Sequence: Synthetic oligonucleotide
ucggcuaauugguguucuc

SEQ ID NO: 2262296 - RNA, 19 nt, Artificial Sequence
  Description of Artificial Sequence: Synthetic oligonucleotide
caggauaauggucacugau

SEQ ID NO: 2262297 - RNA, 19 nt, Artificial Sequence
  Description of Artificial Sequence: Synthetic oligonucleotide
gcagaagagagacaguuuu

SEQ ID NO: 2262298 - RNA, 19 nt, Artificial Sequence
  Description of Artificial Sequence: Synthetic oligonucleotide
uggcccgcacuguaguguc

SEQ ID NO: 2262299 - RNA, 19 nt, Artificial Sequence
  Description of Artificial Sequence: Synthetic oligonucleotide
aguguggaguggaaccagu

SEQ ID NO: 2262300 - RNA, 19 nt, Artificial Sequence
  Description of Artificial Sequence: Synthetic oligonucleotide
cacugaugcugagagccuc

SEQ ID NO: 2262301 - RNA, 19 nt, Artificial Sequence
  Description of Artificial Sequence: Synthetic oligonucleotide
uugugucauuguacuggua

SEQ ID NO: 2262302 - RNA, 19 nt, Artificial Sequence
  Description of Artificial Sequence: Synthetic oligonucleotide
caguaagcccaugcauggc

SEQ ID NO: 2262303 - RNA, 19 nt, Artificial Sequence
  Description of Artificial Sequence: Synthetic oligonucleotide
ucucggcuaauugguguuc

SEQ ID NO: 2262304 - RNA, 19 nt, Artificial Sequence
  Description of Artificial Sequence: Synthetic oligonucleotide
ucacuggcuccuuggccaa

SEQ ID NO: 2262305 - RNA, 19 nt, Artificial Sequence
  Description of Artificial Sequence: Synthetic oligonucleotide
caauccgaucguagguaca

SEQ ID NO: 2262306 - RNA, 19 nt, Artificial Sequence
  Description of Artificial Sequence: Synthetic oligonucleotide
ccgaucguagguacaguug

SEQ ID NO: 2262307 - RNA, 19 nt, Artificial Sequence
  Description of Artificial Sequence: Synthetic oligonucleotide
auaucacaucgagccagga

SEQ ID NO: 2262308 - RNA, 19 nt, Artificial Sequence
  Description of Artificial Sequence: Synthetic oligonucleotide
agucagugaugcacaguca

SEQ ID NO: 2262309 - RNA, 19 nt, Artificial Sequence
  Description of Artificial Sequence: Synthetic oligonucleotide
acccaguggaagccugccu

SEQ ID NO: 2262310 - RNA, 19 nt, Artificial Sequence
  Description of Artificial Sequence: Synthetic oligonucleotide
cugaauguuucuggcaucu

SEQ ID NO: 2262311 - RNA, 19 nt, Artificial Sequence
  Description of Artificial Sequence: Synthetic oligonucleotide
aucacccaguggaagccug

SEQ ID NO: 2262312 - RNA, 19 nt, Artificial Sequence
  Description of Artificial Sequence: Synthetic oligonucleotide
accacacuuggaaggauuu

SEQ ID NO: 2262313 - RNA, 19 nt, Artificial Sequence
  Description of Artificial Sequence: Synthetic oligonucleotide
agcagaagagagacaguuu

SEQ ID NO: 2262314 - RNA, 19 nt, Artificial Sequence
  Description of Artificial Sequence: Synthetic oligonucleotide
ggauuugaacuaagguauc

SEQ ID NO: 2262315 - RNA, 19 nt, Artificial Sequence
  Description of Artificial Sequence: Synthetic oligonucleotide
cagauacgaaaggcuucag

SEQ ID NO: 2262316 - RNA, 19 nt, Artificial Sequence
  Description of Artificial Sequence: Synthetic oligonucleotide
gggaaguugaagggugcug

SEQ ID NO: 2262317 - RNA, 19 nt, Artificial Sequence
  Description of Artificial Sequence: Synthetic oligonucleotide
gcugcgcccuagcagggag

SEQ ID NO: 2262318 - RNA, 19 nt, Artificial Sequence
  Description of Artificial Sequence: Synthetic oligonucleotide
agagccacaguaagcccau

SEQ ID NO: 2262319 - RNA, 19 nt, Artificial Sequence
  Description of Artificial Sequence: Synthetic oligonucleotide
ggcuucagucccaccagcc

SEQ ID NO: 2262320 - RNA, 19 nt, Artificial Sequence
  Description of Artificial Sequence: Synthetic oligonucleotide
cugcgcccuagcagggagc

SEQ ID NO: 2262321 - RNA, 19 nt, Artificial Sequence
  Description of Artificial Sequence: Synthetic oligonucleotide
auauggcaucaggagcccu

SEQ ID NO: 2262322 - RNA, 19 nt, Artificial Sequence
  Description of Artificial Sequence: Synthetic oligonucleotide
gagccaggauuugaacuaa

SEQ ID NO: 2262323 - RNA, 19 nt, Artificial Sequence
  Description of Artificial Sequence: Synthetic oligonucleotide
ggccaacuugcucaauguc

SEQ ID NO: 2262324 - RNA, 19 nt, Artificial Sequence
  Description of Artificial Sequence: Synthetic oligonucleotide
aguccccaagcaggaucac

SEQ ID NO: 2262325 - RNA, 19 nt, Artificial Sequence
  Description of Artificial Sequence: Synthetic oligonucleotide
auuuugcuagggagagcga

SEQ ID NO: 2262326 - RNA, 19 nt, Artificial Sequence
  Description of Artificial Sequence: Synthetic oligonucleotide
ggcacagauacgaaaggcu

SEQ ID NO: 2262327 - RNA, 19 nt, Artificial Sequence
  Description of Artificial Sequence: Synthetic oligonucleotide
ccugaauguuucuggcauc

SEQ ID NO: 2262328 - RNA, 19 nt, Artificial Sequence
  Description of Artificial Sequence: Synthetic oligonucleotide
gugcauuggcacugcagcu

SEQ ID NO: 2262329 - RNA, 19 nt, Artificial Sequence
  Description of Artificial Sequence: Synthetic oligonucleotide
gggccacaaaagguucucg

SEQ ID NO: 2262330 - RNA, 19 nt, Artificial Sequence
  Description of Artificial Sequence: Synthetic oligonucleotide
ccaggauuugaacuaaggu

SEQ ID NO: 2262331 - RNA, 19 nt, Artificial Sequence
  Description of Artificial Sequence: Synthetic oligonucleotide
cuccaaaggaauccggguu

SEQ ID NO: 2262332 - RNA, 19 nt, Artificial Sequence
  Description of Artificial Sequence: Synthetic oligonucleotide
gggcauugaaggcacagau

SEQ ID NO: 2262333 - RNA, 19 nt, Artificial Sequence
  Description of Artificial Sequence: Synthetic oligonucleotide
cacaucgagccaggauuug

SEQ ID NO: 2262334 - RNA, 19 nt, Artificial Sequence
  Description of Artificial Sequence: Synthetic oligonucleotide
guaaguccuggaacuuuaa

SEQ ID NO: 2262335 - RNA, 19 nt, Artificial Sequence
  Description of Artificial Sequence: Synthetic oligonucleotide
gaucguagguacaguuggu

SEQ ID NO: 2262336 - RNA, 19 nt, Artificial Sequence
  Description of Artificial Sequence: Synthetic oligonucleotide
gaagcagaagagagacagu

SEQ ID NO: 2262337 - RNA, 19 nt, Artificial Sequence
  Description of Artificial Sequence: Synthetic oligonucleotide
cgcacuguaguguccuccc

SEQ ID NO: 2262338 - RNA, 19 nt, Artificial Sequence
  Description of Artificial Sequence: Synthetic oligonucleotide
gggagacauccagaaacac

SEQ ID NO: 2262339 - RNA, 19 nt, Artificial Sequence
  Description of Artificial Sequence: Synthetic oligonucleotide
ggauuuugcuagggagagc

SEQ ID NO: 2262340 - RNA, 19 nt, Artificial Sequence
  Description of Artificial Sequence: Synthetic oligonucleotide
cgaaggagcaggcuguuga

SEQ ID NO: 2262341 - RNA, 19 nt, Artificial Sequence
  Description of Artificial Sequence: Synthetic oligonucleotide
ccaugcaucacaauccgau

SEQ ID NO: 2262342 - RNA, 19 nt, Artificial Sequence
  Description of Artificial Sequence: Synthetic oligonucleotide
gcuguuuaggaagcuguaa

SEQ ID NO: 2262343 - RNA, 19 nt, Artificial Sequence
  Description of Artificial Sequence: Synthetic oligonucleotide
auccgaucguagguacagu

SEQ ID NO: 2262344 - RNA, 19 nt, Artificial Sequence
  Description of Artificial Sequence: Synthetic oligonucleotide
caccagccaggaagaugag

SEQ ID NO: 2262345 - RNA, 19 nt, Artificial Sequence
  Description of Artificial Sequence: Synthetic oligonucleotide
caaaagguucucgggcaaa

SEQ ID NO: 2262346 - RNA, 19 nt, Artificial Sequence
  Description of Artificial Sequence: Synthetic oligonucleotide
gucccaccagccaggaaga

SEQ ID NO: 2262347 - RNA, 19 nt, Artificial Sequence
  Description of Artificial Sequence: Synthetic oligonucleotide
ggguguaguguggagugga

SEQ ID NO: 2262348 - RNA, 19 nt, Artificial Sequence
  Description of Artificial Sequence: Synthetic oligonucleotide
cuugucagaccgguagaua

SEQ ID NO: 2262349 - RNA, 19 nt, Artificial Sequence
  Description of Artificial Sequence: Synthetic oligonucleotide
gacagcccugcccaugcau

SEQ ID NO: 2262350 - RNA, 19 nt, Artificial Sequence
  Description of Artificial Sequence: Synthetic oligonucleotide
ggaguggaaccaguaccac

SEQ ID NO: 2262351 - RNA, 19 nt, Artificial Sequence
  Description of Artificial Sequence: Synthetic oligonucleotide
gguguucucccugcuucug

SEQ ID NO: 2262352 - RNA, 19 nt, Artificial Sequence
  Description of Artificial Sequence: Synthetic oligonucleotide
gcacuguaguguccucccc

SEQ ID NO: 2262353 - RNA, 19 nt, Artificial Sequence
  Description of Artificial Sequence: Synthetic oligonucleotide
gcccugaauguuucuggca

SEQ ID NO: 2262354 - RNA, 19 nt, Artificial Sequence
  Description of Artificial Sequence: Synthetic oligonucleotide
cggcuaauugguguucucc

SEQ ID NO: 2262355 - RNA, 19 nt, Artificial Sequence
  Description of Artificial Sequence: Synthetic oligonucleotide
accgguagauauacacaua

SEQ ID NO: 2262356 - RNA, 19 nt, Artificial Sequence
  Description of Artificial Sequence: Synthetic oligonucleotide
gagcgaacugggccacaaa

SEQ ID NO: 2262357 - RNA, 19 nt, Artificial Sequence
  Description of Artificial Sequence: Synthetic oligonucleotide
ggagcccuccaaaggaauc

SEQ ID NO: 2262358 - RNA, 19 nt, Artificial Sequence
  Description of Artificial Sequence: Synthetic oligonucleotide
uugccagcguugggagaca

SEQ ID NO: 2262359 - RNA, 19 nt, Artificial Sequence
  Description of Artificial Sequence: Synthetic oligonucleotide
ccuagcagggagcuguuua

SEQ ID NO: 2262360 - RNA, 19 nt, Artificial Sequence
  Description of Artificial Sequence: Synthetic oligonucleotide
cguugggagacauccagaa

SEQ ID NO: 2262361 - RNA, 19 nt, Artificial Sequence
  Description of Artificial Sequence: Synthetic oligonucleotide
guccgaaggagcaggcugu

SEQ ID NO: 2262362 - RNA, 19 nt, Artificial Sequence
  Description of Artificial Sequence: Synthetic oligonucleotide
guguggaguggaaccagua

SEQ ID NO: 2262363 - RNA, 19 nt, Artificial Sequence
  Description of Artificial Sequence: Synthetic oligonucleotide
gcuggcccgcacuguagug

SEQ ID NO: 2262364 - RNA, 19 nt, Artificial Sequence
  Description of Artificial Sequence: Synthetic oligonucleotide
cugggccacaaaagguucu

SEQ ID NO: 2262365 - RNA, 19 nt, Artificial Sequence
  Description of Artificial Sequence: Synthetic oligonucleotide
uccgaaggagcaggcuguu

SEQ ID NO: 2262366 - RNA, 19 nt, Artificial Sequence
  Description of Artificial Sequence: Synthetic oligonucleotide
gcccuccaaaggaauccgg

SEQ ID NO: 2262367 - RNA, 19 nt, Artificial Sequence
  Description of Artificial Sequence: Synthetic oligonucleotide
ugccagcguugggagacau

SEQ ID NO: 2262368 - RNA, 19 nt, Artificial Sequence
  Description of Artificial Sequence: Synthetic oligonucleotide
ggaauccggguuguucaga

SEQ ID NO: 2262369 - RNA, 19 nt, Artificial Sequence
  Description of Artificial Sequence: Synthetic oligonucleotide
agccugccucaguccgaag

SEQ ID NO: 2262370 - RNA, 19 nt, Artificial Sequence
  Description of Artificial Sequence: Synthetic oligonucleotide
cgagccaggauuugaacua

SEQ ID NO: 2262371 - RNA, 19 nt, Artificial Sequence
  Description of Artificial Sequence: Synthetic oligonucleotide
ggagagcgaacugggccac

SEQ ID NO: 2262372 - RNA, 19 nt, Artificial Sequence
  Description of Artificial Sequence: Synthetic oligonucleotide
ccaguggaagccugccuca

SEQ ID NO: 2262373 - RNA, 19 nt, Artificial Sequence
  Description of Artificial Sequence: Synthetic oligonucleotide
gcacagauacgaaaggcuu

SEQ ID NO: 2262374 - RNA, 19 nt, Artificial Sequence
  Description of Artificial Sequence: Synthetic oligonucleotide
guggaaccaguaccacacu

SEQ ID NO: 2262375 - RNA, 19 nt, Artificial Sequence
  Description of Artificial Sequence: Synthetic oligonucleotide
cguagguacaguuggugcu

SEQ ID NO: 2262376 - RNA, 19 nt, Artificial Sequence
  Description of Artificial Sequence: Synthetic oligonucleotide
cucggcuaauugguguucu

SEQ ID NO: 2262377 - RNA, 19 nt, Artificial Sequence
  Description of Artificial Sequence: Synthetic oligonucleotide
cccugaauguuucuggcau

SEQ ID NO: 2262378 - RNA, 19 nt, Artificial Sequence
  Description of Artificial Sequence: Synthetic oligonucleotide
ggguuguucagagugcauu

SEQ ID NO: 2262379 - RNA, 19 nt, Artificial Sequence
  Description of Artificial Sequence: Synthetic oligonucleotide
gguguaguguggaguggaa

SEQ ID NO: 2262380 - RNA, 19 nt, Artificial Sequence
  Description of Artificial Sequence: Synthetic oligonucleotide
gagagcgaacugggccaca

SEQ ID NO: 2262381 - RNA, 19 nt, Artificial Sequence
  Description of Artificial Sequence: Synthetic oligonucleotide
agcuccuggggaaguugaa

SEQ ID NO: 2262382 - RNA, 19 nt, Artificial Sequence
  Description of Artificial Sequence: Synthetic oligonucleotide
cuguaaguccuggaacuuu

SEQ ID NO: 2262383 - RNA, 19 nt, Artificial Sequence
  Description of Artificial Sequence: Synthetic oligonucleotide
cuuccucagucagcugaaa

SEQ ID NO: 2262384 - RNA, 19 nt, Artificial Sequence
  Description of Artificial Sequence: Synthetic oligonucleotide
cuggcccgcacuguagugu

SEQ ID NO: 2262385 - RNA, 19 nt, Artificial Sequence
  Description of Artificial Sequence: Synthetic oligonucleotide
gcguugggagacauccaga

SEQ ID NO: 2262386 - RNA, 19 nt, Artificial Sequence
  Description of Artificial Sequence: Synthetic oligonucleotide
ccacaguaagcccaugcau

SEQ ID NO: 2262387 - RNA, 19 nt, Artificial Sequence
  Description of Artificial Sequence: Synthetic oligonucleotide
gcaucacaauccgaucgua

SEQ ID NO: 2262388 - RNA, 19 nt, Artificial Sequence
  Description of Artificial Sequence: Synthetic oligonucleotide
gugucuugucagaccggua

SEQ ID NO: 2262389 - RNA, 19 nt, Artificial Sequence
  Description of Artificial Sequence: Synthetic oligonucleotide
ccggguuguucagagugca

SEQ ID NO: 2262390 - RNA, 19 nt, Artificial Sequence
  Description of Artificial Sequence: Synthetic oligonucleotide
guaccacacuuggaaggau

SEQ ID NO: 2262391 - RNA, 19 nt, Artificial Sequence
  Description of Artificial Sequence: Synthetic oligonucleotide
cccucagcagggucugaca

SEQ ID NO: 2262392 - RNA, 19 nt, Artificial Sequence
  Description of Artificial Sequence: Synthetic oligonucleotide
ggggaaguugaagggugcu

SEQ ID NO: 2262393 - RNA, 19 nt, Artificial Sequence
  Description of Artificial Sequence: Synthetic oligonucleotide
auagggcauucagcuccuu

SEQ ID NO: 2262394 - RNA, 19 nt, Artificial Sequence
  Description of Artificial Sequence: Synthetic oligonucleotide
ccgaaggagcaggcuguug

SEQ ID NO: 2262395 - RNA, 19 nt, Artificial Sequence
  Description of Artificial Sequence: Synthetic oligonucleotide
cgguagauauacacauacu

SEQ ID NO: 2262396 - RNA, 19 nt, Artificial Sequence
  Description of Artificial Sequence: Synthetic oligonucleotide
gcuguaaguccuggaacuu

SEQ ID NO: 2262397 - RNA, 19 nt, Artificial Sequence
  Description of Artificial Sequence: Synthetic oligonucleotide
ggcccgcacuguagugucc

SEQ ID NO: 2262398 - RNA, 19 nt, Artificial Sequence
  Description of Artificial Sequence: Synthetic oligonucleotide
caguccgaaggagcaggcu

SEQ ID NO: 2262399 - RNA, 19 nt, Artificial Sequence
  Description of Artificial Sequence: Synthetic oligonucleotide
agcccucagcagggucuga

SEQ ID NO: 2262400 - RNA, 19 nt, Artificial Sequence
  Description of Artificial Sequence: Synthetic oligonucleotide
cccugcccaugcaucacaa

SEQ ID NO: 2262401 - RNA, 19 nt, Artificial Sequence
  Description of Artificial Sequence: Synthetic oligonucleotide
cccgcacuguaguguccuc

SEQ ID NO: 2262402 - RNA, 19 nt, Artificial Sequence
  Description of Artificial Sequence: Synthetic oligonucleotide
gccagcguugggagacauc

SEQ ID NO: 2262403 - RNA, 19 nt, Artificial Sequence
  Description of Artificial Sequence: Synthetic oligonucleotide
gcccgcacuguaguguccu

SEQ ID NO: 2262404 - RNA, 19 nt, Artificial Sequence
  Description of Artificial Sequence: Synthetic oligonucleotide
cuuggccaacuugcucaau

SEQ ID NO: 2262405 - RNA, 19 nt, Artificial Sequence
  Description of Artificial Sequence: Synthetic oligonucleotide
gcgcccuagcagggagcug

SEQ ID NO: 2262406 - RNA, 19 nt, Artificial Sequence
  Description of Artificial Sequence: Synthetic oligonucleotide
cugcagcccucagcagggu

SEQ ID NO: 2262407 - RNA, 19 nt, Artificial Sequence
  Description of Artificial Sequence: Synthetic oligonucleotide
cccuagcagggagcuguuu

SEQ ID NO: 2262408 - RNA, 19 nt, Artificial Sequence
  Description of Artificial Sequence: Synthetic oligonucleotide
aguucuauaaucuuaaugg

SEQ ID NO: 2262409 - RNA, 19 nt, Artificial Sequence
  Description of Artificial Sequence: Synthetic oligonucleotide
aaaaugaugacccaucacg

SEQ ID NO: 2262410 - RNA, 19 nt, Artificial Sequence
  Description of Artificial Sequence: Synthetic oligonucleotide
acuaacuugaguuucaggc

SEQ ID NO: 2262411 - RNA, 19 nt, Artificial Sequence
  Description of Artificial Sequence: Synthetic oligonucleotide
aaguacugcaccuugaugg

SEQ ID NO: 2262412 - RNA, 19 nt, Artificial Sequence
  Description of Artificial Sequence: Synthetic oligonucleotide
ugcaacauaaucaagaugu

SEQ ID NO: 2262413 - RNA, 19 nt, Artificial Sequence
  Description of Artificial Sequence: Synthetic oligonucleotide
aaaacaucacaccaugaac

SEQ ID NO: 2262414 - RNA, 19 nt, Artificial Sequence
  Description of Artificial Sequence: Synthetic oligonucleotide
aaacaucacaccaugaacc

SEQ ID NO: 2262415 - RNA, 19 nt, Artificial Sequence
  Description of Artificial Sequence: Synthetic oligonucleotide
aacucuaucagucacccag

SEQ ID NO: 2262416 - RNA, 19 nt, Artificial Sequence
  Description of Artificial Sequence: Synthetic oligonucleotide
guagaugaaaacuugguag

SEQ ID NO: 2262417 - RNA, 19 nt, Artificial Sequence
  Description of Artificial Sequence: Synthetic oligonucleotide
uccaaaugcaacauaauca

SEQ ID NO: 2262418 - RNA, 19 nt, Artificial Sequence
  Description of Artificial Sequence: Synthetic oligonucleotide
auuuucuugaaacacaaca

SEQ ID NO: 2262419 - RNA, 19 nt, Artificial Sequence
  Description of Artificial Sequence: Synthetic oligonucleotide
aguaaugauauuccauacc

SEQ ID NO: 2262420 - RNA, 19 nt, Artificial Sequence
  Description of Artificial Sequence: Synthetic oligonucleotide
aagaaagucaaucuuagua

SEQ ID NO: 2262421 - RNA, 19 nt, Artificial Sequence
  Description of Artificial Sequence: Synthetic oligonucleotide
uguuugguccaucagaagc

SEQ ID NO: 2262422 - RNA, 19 nt, Artificial Sequence
  Description of Artificial Sequence: Synthetic oligonucleotide
cuucaacucaugaagaggg

SEQ ID NO: 2262423 - RNA, 19 nt, Artificial Sequence
  Description of Artificial Sequence: Synthetic oligonucleotide
ucuauaaucuuaauggcuc

SEQ ID NO: 2262424 - RNA, 19 nt, Artificial Sequence
  Description of Artificial Sequence: Synthetic oligonucleotide
agauauaguccucugauug

SEQ ID NO: 2262425 - RNA, 19 nt, Artificial Sequence
  Description of Artificial Sequence: Synthetic oligonucleotide
cuugagacauuccauaucc

SEQ ID NO: 2262426 - RNA, 19 nt, Artificial Sequence
  Description of Artificial Sequence: Synthetic oligonucleotide
ucuucuacugaaauuggag

SEQ ID NO: 2262427 - RNA, 19 nt, Artificial Sequence
  Description of Artificial Sequence: Synthetic oligonucleotide
acaacaacuaacuugaguu

SEQ ID NO: 2262428 - RNA, 19 nt, Artificial Sequence
  Description of Artificial Sequence: Synthetic oligonucleotide
uuauggaaucuucagaacu

SEQ ID NO: 2262429 - RNA, 19 nt, Artificial Sequence
  Description of Artificial Sequence: Synthetic oligonucleotide
uuaggcaacaacaacuaac

SEQ ID NO: 2262430 - RNA, 19 nt, Artificial Sequence
  Description of Artificial Sequence: Synthetic oligonucleotide
uugaguuucaggcagguaa

SEQ ID NO: 2262431 - RNA, 19 nt, Artificial Sequence
  Description of Artificial Sequence: Synthetic oligonucleotide
uauucuuccaguaaugaua

SEQ ID NO: 2262432 - RNA, 19 nt, Artificial Sequence
  Description of Artificial Sequence: Synthetic oligonucleotide
uauuguuugguccaucaga

SEQ ID NO: 2262433 - RNA, 19 nt, Artificial Sequence
  Description of Artificial Sequence: Synthetic oligonucleotide
uucuuggucucccagaccc

SEQ ID NO: 2262434 - RNA, 19 nt, Artificial Sequence
  Description of Artificial Sequence: Synthetic oligonucleotide
aacaacuaacuugaguuuc

SEQ ID NO: 2262435 - RNA, 19 nt, Artificial Sequence
  Description of Artificial Sequence: Synthetic oligonucleotide
agaacuggaaauaaguguc

SEQ ID NO: 2262436 - RNA, 19 nt, Artificial Sequence
  Description of Artificial Sequence: Synthetic oligonucleotide
aaugcaacauaaucaagau

SEQ ID NO: 2262437 - RNA, 19 nt, Artificial Sequence
  Description of Artificial Sequence: Synthetic oligonucleotide
uauggaaucuucagaacug

SEQ ID NO: 2262438 - RNA, 19 nt, Artificial Sequence
  Description of Artificial Sequence: Synthetic oligonucleotide
agaaauaucacaagaaagu

SEQ ID NO: 2262439 - RNA, 19 nt, Artificial Sequence
  Description of Artificial Sequence: Synthetic oligonucleotide
aaaugaugacccaucacgg

SEQ ID NO: 2262440 - RNA, 19 nt, Artificial Sequence
  Description of Artificial Sequence: Synthetic oligonucleotide
aguuguaggccucugaugu

SEQ ID NO: 2262441 - RNA, 19 nt, Artificial Sequence
  Description of Artificial Sequence: Synthetic oligonucleotide
aacaacaacuaacuugagu

SEQ ID NO: 2262442 - RNA, 19 nt, Artificial Sequence
  Description of Artificial Sequence: Synthetic oligonucleotide
ucaacugcaaggaccauca

SEQ ID NO: 2262443 - RNA, 19 nt, Artificial Sequence
  Description of Artificial Sequence: Synthetic oligonucleotide
uucauuuucuugaaacaca

SEQ ID NO: 2262444 - RNA, 19 nt, Artificial Sequence
  Description of Artificial Sequence: Synthetic oligonucleotide
aagaaaguacugcaccuug

SEQ ID NO: 2262445 - RNA, 19 nt, Artificial Sequence
  Description of Artificial Sequence: Synthetic oligonucleotide
uucuacugaaauuggagca

SEQ ID NO: 2262446 - RNA, 19 nt, Artificial Sequence
  Description of Artificial Sequence: Synthetic oligonucleotide
augaaaacuugguagcauc

SEQ ID NO: 2262447 - RNA, 19 nt, Artificial Sequence
  Description of Artificial Sequence: Synthetic oligonucleotide
cuucuacugaaauuggagc

SEQ ID NO: 2262448 - RNA, 19 nt, Artificial Sequence
  Description of Artificial Sequence: Synthetic oligonucleotide
cacaacaucuauuuccugc

SEQ ID NO: 2262449 - RNA, 19 nt, Artificial Sequence
  Description of Artificial Sequence: Synthetic oligonucleotide
augaccaagaaagucaauc

SEQ ID NO: 2262450 - RNA, 19 nt, Artificial Sequence
  Description of Artificial Sequence: Synthetic oligonucleotide
aauaagugucuccccauca

SEQ ID NO: 2262451 - RNA, 19 nt, Artificial Sequence
  Description of Artificial Sequence: Synthetic oligonucleotide
uuucccggcaauaaguugu

SEQ ID NO: 2262452 - RNA, 19 nt, Artificial Sequence
  Description of Artificial Sequence: Synthetic oligonucleotide
uaucagcagagguagauga

SEQ ID NO: 2262453 - RNA, 19 nt, Artificial Sequence
  Description of Artificial Sequence: Synthetic oligonucleotide
gagaaaacaucacaccaug

SEQ ID NO: 2262454 - RNA, 19 nt, Artificial Sequence
  Description of Artificial Sequence: Synthetic oligonucleotide
gaagcuggccacuugagac

SEQ ID NO: 2262455 - RNA, 19 nt, Artificial Sequence
  Description of Artificial Sequence: Synthetic oligonucleotide
agaguucuugcauaccuuc

SEQ ID NO: 2262456 - RNA, 19 nt, Artificial Sequence
  Description of Artificial Sequence: Synthetic oligonucleotide
ugagacauuccauauccug

SEQ ID NO: 2262457 - RNA, 19 nt, Artificial Sequence
  Description of Artificial Sequence: Synthetic oligonucleotide
uuucuauucuuccaguaau

SEQ ID NO: 2262458 - RNA, 19 nt, Artificial Sequence
  Description of Artificial Sequence: Synthetic oligonucleotide
caaaacuccagaucuuugc

SEQ ID NO: 2262459 - RNA, 19 nt, Artificial Sequence
  Description of Artificial Sequence: Synthetic oligonucleotide
caaaugaccaagaaaguca

SEQ ID NO: 2262460 - RNA, 19 nt, Artificial Sequence
  Description of Artificial Sequence: Synthetic oligonucleotide
gauauaguccucugauugc

SEQ ID NO: 2262461 - RNA, 19 nt, Artificial Sequence
  Description of Artificial Sequence: Synthetic oligonucleotide
aacuugguagcaucagaag

SEQ ID NO: 2262462 - RNA, 19 nt, Artificial Sequence
  Description of Artificial Sequence: Synthetic oligonucleotide
auauuccauaccuucacug

SEQ ID NO: 2262463 - RNA, 19 nt, Artificial Sequence
  Description of Artificial Sequence: Synthetic oligonucleotide
aguaugacccuucaacuca

SEQ ID NO: 2262464 - RNA, 19 nt, Artificial Sequence
  Description of Artificial Sequence: Synthetic oligonucleotide
uuuucuauucuuccaguaa

SEQ ID NO: 2262465 - RNA, 19 nt, Artificial Sequence
  Description of Artificial Sequence: Synthetic oligonucleotide
uuggagcacacaaaugaag

SEQ ID NO: 2262466 - RNA, 19 nt, Artificial Sequence
  Description of Artificial Sequence: Synthetic oligonucleotide
aaaguacugcaccuugaug

SEQ ID NO: 2262467 - RNA, 19 nt, Artificial Sequence
  Description of Artificial Sequence: Synthetic oligonucleotide
agcuuaaaauguccucugc

SEQ ID NO: 2262468 - RNA, 19 nt, Artificial Sequence
  Description of Artificial Sequence: Synthetic oligonucleotide
acuugguagcaucagaaga

SEQ ID NO: 2262469 - RNA, 19 nt, Artificial Sequence
  Description of Artificial Sequence: Synthetic oligonucleotide
gaugaacucuaucagucac

SEQ ID NO: 2262470 - RNA, 19 nt, Artificial Sequence
  Description of Artificial Sequence: Synthetic oligonucleotide
ugaacccagcuuaaaaugu

SEQ ID NO: 2262471 - RNA, 19 nt, Artificial Sequence
  Description of Artificial Sequence: Synthetic oligonucleotide
augaugacccaucacggag

SEQ ID NO: 2262472 - RNA, 19 nt, Artificial Sequence
  Description of Artificial Sequence: Synthetic oligonucleotide
ugaccaagaaagucaaucu

SEQ ID NO: 2262473 - RNA, 19 nt, Artificial Sequence
  Description of Artificial Sequence: Synthetic oligonucleotide
aacucuguuguuugggagu

SEQ ID NO: 2262474 - RNA, 19 nt, Artificial Sequence
  Description of Artificial Sequence: Synthetic oligonucleotide
uucacuguuccaucaaaug

SEQ ID NO: 2262475 - RNA, 19 nt, Artificial Sequence
  Description of Artificial Sequence: Synthetic oligonucleotide
ggcaacaacaacuaacuug

SEQ ID NO: 2262476 - RNA, 19 nt, Artificial Sequence
  Description of Artificial Sequence: Synthetic oligonucleotide
uuaacacuacagcagaguu

SEQ ID NO: 2262477 - RNA, 19 nt, Artificial Sequence
  Description of Artificial Sequence: Synthetic oligonucleotide
aaugaugacccaucacgga

SEQ ID NO: 2262478 - RNA, 19 nt, Artificial Sequence
  Description of Artificial Sequence: Synthetic oligonucleotide
aacugcaugugccguacag

SEQ ID NO: 2262479 - RNA, 19 nt, Artificial Sequence
  Description of Artificial Sequence: Synthetic oligonucleotide
uucuauucuuccaguaaug

SEQ ID NO: 2262480 - RNA, 19 nt, Artificial Sequence
  Description of Artificial Sequence: Synthetic oligonucleotide
ugaaauuggagcacacaaa

SEQ ID NO: 2262481 - RNA, 19 nt, Artificial Sequence
  Description of Artificial Sequence: Synthetic oligonucleotide
uuuuaggagccugaagucc

SEQ ID NO: 2262482 - RNA, 19 nt, Artificial Sequence
  Description of Artificial Sequence: Synthetic oligonucleotide
cugauugccaaguccauac

SEQ ID NO: 2262483 - RNA, 19 nt, Artificial Sequence
  Description of Artificial Sequence: Synthetic oligonucleotide
cacuguuccaucaaaugac

SEQ ID NO: 2262484 - RNA, 19 nt, Artificial Sequence
  Description of Artificial Sequence: Synthetic oligonucleotide
guccauaccugaauuaugg

SEQ ID NO: 2262485 - RNA, 19 nt, Artificial Sequence
  Description of Artificial Sequence: Synthetic oligonucleotide
cuauaaucuuaauggcucc

SEQ ID NO: 2262486 - RNA, 19 nt, Artificial Sequence
  Description of Artificial Sequence: Synthetic oligonucleotide
guaaugauauuccauaccu

SEQ ID NO: 2262487 - RNA, 19 nt, Artificial Sequence
  Description of Artificial Sequence: Synthetic oligonucleotide
cuggaaauaagugucuccc

SEQ ID NO: 2262488 - RNA, 19 nt, Artificial Sequence
  Description of Artificial Sequence: Synthetic oligonucleotide
acuugagacauuccauauc

SEQ ID NO: 2262489 - RNA, 19 nt, Artificial Sequence
  Description of Artificial Sequence: Synthetic oligonucleotide
uauuccauaccuucacugu

SEQ ID NO: 2262490 - RNA, 19 nt, Artificial Sequence
  Description of Artificial Sequence: Synthetic oligonucleotide
agcagagguagaugaaaac

SEQ ID NO: 2262491 - RNA, 19 nt, Artificial Sequence
  Description of Artificial Sequence: Synthetic oligonucleotide
ucacggagaaaacaucaca

SEQ ID NO: 2262492 - RNA, 19 nt, Artificial Sequence
  Description of Artificial Sequence: Synthetic oligonucleotide
aacacaacaucuauuuccu

SEQ ID NO: 2262493 - RNA, 19 nt, Artificial Sequence
  Description of Artificial Sequence: Synthetic oligonucleotide
guugucaacugcaaggacc

SEQ ID NO: 2262494 - RNA, 19 nt, Artificial Sequence
  Description of Artificial Sequence: Synthetic oligonucleotide
aggaugaacucuaucaguc

SEQ ID NO: 2262495 - RNA, 19 nt, Artificial Sequence
  Description of Artificial Sequence: Synthetic oligonucleotide
ugaacucuaucagucaccc

SEQ ID NO: 2262496 - RNA, 19 nt, Artificial Sequence
  Description of Artificial Sequence: Synthetic oligonucleotide
caucacaccaugaacccag

SEQ ID NO: 2262497 - RNA, 19 nt, Artificial Sequence
  Description of Artificial Sequence: Synthetic oligonucleotide
uuguuugggaguucuauaa

SEQ ID NO: 2262498 - RNA, 19 nt, Artificial Sequence
  Description of Artificial Sequence: Synthetic oligonucleotide
uaaguuguaggccucugau

SEQ ID NO: 2262499 - RNA, 19 nt, Artificial Sequence
  Description of Artificial Sequence: Synthetic oligonucleotide
uucaacucaugaagagggg

SEQ ID NO: 2262500 - RNA, 19 nt, Artificial Sequence
  Description of Artificial Sequence: Synthetic oligonucleotide
ucaaaacuccagaucuuug

SEQ ID NO: 2262501 - RNA, 19 nt, Artificial Sequence
  Description of Artificial Sequence: Synthetic oligonucleotide
ugcaaggaccaucauuuca

SEQ ID NO: 2262502 - RNA, 19 nt, Artificial Sequence
  Description of Artificial Sequence: Synthetic oligonucleotide
caacauaaucaagaugugg

SEQ ID NO: 2262503 - RNA, 19 nt, Artificial Sequence
  Description of Artificial Sequence: Synthetic oligonucleotide
aagucaaucuuaguaauuu

SEQ ID NO: 2262504 - RNA, 19 nt, Artificial Sequence
  Description of Artificial Sequence: Synthetic oligonucleotide
uccuagaacugaaaacucu

SEQ ID NO: 2262505 - RNA, 19 nt, Artificial Sequence
  Description of Artificial Sequence: Synthetic oligonucleotide
ucacuuguuuccugagugg

SEQ ID NO: 2262506 - RNA, 19 nt, Artificial Sequence
  Description of Artificial Sequence: Synthetic oligonucleotide
aaguuguaggccucugaug

SEQ ID NO: 2262507 - RNA, 19 nt, Artificial Sequence
  Description of Artificial Sequence: Synthetic oligonucleotide
ucuuaauggcuccaucuuc

SEQ ID NO: 2262508 - RNA, 19 nt, Artificial Sequence
  Description of Artificial Sequence: Synthetic oligonucleotide
auaagugucuccccaucag

SEQ ID NO: 2262509 - RNA, 19 nt, Artificial Sequence
  Description of Artificial Sequence: Synthetic oligonucleotide
aaucaagauguggacuuag

SEQ ID NO: 2262510 - RNA, 19 nt, Artificial Sequence
  Description of Artificial Sequence: Synthetic oligonucleotide
caucagaagaaauaucaca

SEQ ID NO: 2262511 - RNA, 19 nt, Artificial Sequence
  Description of Artificial Sequence: Synthetic oligonucleotide
uuuaacacuacagcagagu

SEQ ID NO: 2262512 - RNA, 19 nt, Artificial Sequence
  Description of Artificial Sequence: Synthetic oligonucleotide
accuugauggcaauuaaag

SEQ ID NO: 2262513 - RNA, 19 nt, Artificial Sequence
  Description of Artificial Sequence: Synthetic oligonucleotide
uggacuuaggcaacaacaa

SEQ ID NO: 2262514 - RNA, 19 nt, Artificial Sequence
  Description of Artificial Sequence: Synthetic oligonucleotide
uaagugucuccccaucagc

SEQ ID NO: 2262515 - RNA, 19 nt, Artificial Sequence
  Description of Artificial Sequence: Synthetic oligonucleotide
ucuauucuuccaguaauga

SEQ ID NO: 2262516 - RNA, 19 nt, Artificial Sequence
  Description of Artificial Sequence: Synthetic oligonucleotide
uguuccaucaaaugaccaa

SEQ ID NO: 2262517 - RNA, 19 nt, Artificial Sequence
  Description of Artificial Sequence: Synthetic oligonucleotide
ucaggcagguaaucgaucu

SEQ ID NO: 2262518 - RNA, 19 nt, Artificial Sequence
  Description of Artificial Sequence: Synthetic oligonucleotide
acuguuccaucaaaugacc

SEQ ID NO: 2262519 - RNA, 19 nt, Artificial Sequence
  Description of Artificial Sequence: Synthetic oligonucleotide
aguuucaggcagguaaucg

SEQ ID NO: 2262520 - RNA, 19 nt, Artificial Sequence
  Description of Artificial Sequence: Synthetic oligonucleotide
uucuucuacugaaauugga

SEQ ID NO: 2262521 - RNA, 19 nt, Artificial Sequence
  Description of Artificial Sequence: Synthetic oligonucleotide
gaucuggccuguuuucccg

SEQ ID NO: 2262522 - RNA, 19 nt, Artificial Sequence
  Description of Artificial Sequence: Synthetic oligonucleotide
aaucgaucuggccuguuuu

SEQ ID NO: 2262523 - RNA, 19 nt, Artificial Sequence
  Description of Artificial Sequence: Synthetic oligonucleotide
agaagaaauaucacaagaa

SEQ ID NO: 2262524 - RNA, 19 nt, Artificial Sequence
  Description of Artificial Sequence: Synthetic oligonucleotide
guuugggaguucuauaauc

SEQ ID NO: 2262525 - RNA, 19 nt, Artificial Sequence
  Description of Artificial Sequence: Synthetic oligonucleotide
auaccuucacuguuccauc

SEQ ID NO: 2262526 - RNA, 19 nt, Artificial Sequence
  Description of Artificial Sequence: Synthetic oligonucleotide
caguaaugauauuccauac

SEQ ID NO: 2262527 - RNA, 19 nt, Artificial Sequence
  Description of Artificial Sequence: Synthetic oligonucleotide
aagauauaguccucugauu

SEQ ID NO: 2262528 - RNA, 19 nt, Artificial Sequence
  Description of Artificial Sequence: Synthetic oligonucleotide
aacugcaaggaccaucauu

SEQ ID NO: 2262529 - RNA, 19 nt, Artificial Sequence
  Description of Artificial Sequence: Synthetic oligonucleotide
uccguugucaucuccaguu

SEQ ID NO: 2262530 - RNA, 19 nt, Artificial Sequence
  Description of Artificial Sequence: Synthetic oligonucleotide
uccauaccuucacuguucc

SEQ ID NO: 2262531 - RNA, 19 nt, Artificial Sequence
  Description of Artificial Sequence: Synthetic oligonucleotide
gaagaagcuggccacuuga

SEQ ID NO: 2262532 - RNA, 19 nt, Artificial Sequence
  Description of Artificial Sequence: Synthetic oligonucleotide
ugaugacccaucacggaga

SEQ ID NO: 2262533 - RNA, 19 nt, Artificial Sequence
  Description of Artificial Sequence: Synthetic oligonucleotide
acugcaaggaccaucauuu

SEQ ID NO: 2262534 - RNA, 19 nt, Artificial Sequence
  Description of Artificial Sequence: Synthetic oligonucleotide
cuuuaacacuacagcagag

SEQ ID NO: 2262535 - RNA, 19 nt, Artificial Sequence
  Description of Artificial Sequence: Synthetic oligonucleotide
ucuacugaaauuggagcac

SEQ ID NO: 2262536 - RNA, 19 nt, Artificial Sequence
  Description of Artificial Sequence: Synthetic oligonucleotide
gacccguauuguuuggucc

SEQ ID NO: 2262537 - RNA, 19 nt, Artificial Sequence
  Description of Artificial Sequence: Synthetic oligonucleotide
augaacucuaucagucacc

SEQ ID NO: 2262538 - RNA, 19 nt, Artificial Sequence
  Description of Artificial Sequence: Synthetic oligonucleotide
aaauuggagcacacaaaug

SEQ ID NO: 2262539 - RNA, 19 nt, Artificial Sequence
  Description of Artificial Sequence: Synthetic oligonucleotide
ucaacucaugaagagggga

SEQ ID NO: 2262540 - RNA, 19 nt, Artificial Sequence
  Description of Artificial Sequence: Synthetic oligonucleotide
agucacccagccuccaugg

SEQ ID NO: 2262541 - RNA, 19 nt, Artificial Sequence
  Description of Artificial Sequence: Synthetic oligonucleotide
ucuugcauaccuucuuggu

SEQ ID NO: 2262542 - RNA, 19 nt, Artificial Sequence
  Description of Artificial Sequence: Synthetic oligonucleotide
acauuccauauccugauuu

SEQ ID NO: 2262543 - RNA, 19 nt, Artificial Sequence
  Description of Artificial Sequence: Synthetic oligonucleotide
ugggaguucuauaaucuua

SEQ ID NO: 2262544 - RNA, 19 nt, Artificial Sequence
  Description of Artificial Sequence: Synthetic oligonucleotide
acaccaugaacccagcuua

SEQ ID NO: 2262545 - RNA, 19 nt, Artificial Sequence
  Description of Artificial Sequence: Synthetic oligonucleotide
ugucuuguguccaauccua

SEQ ID NO: 2262546 - RNA, 19 nt, Artificial Sequence
  Description of Artificial Sequence: Synthetic oligonucleotide
aaguccauaccugaauuau

SEQ ID NO: 2262547 - RNA, 19 nt, Artificial Sequence
  Description of Artificial Sequence: Synthetic oligonucleotide
uuucaggcagguaaucgau

SEQ ID NO: 2262548 - RNA, 19 nt, Artificial Sequence
  Description of Artificial Sequence: Synthetic oligonucleotide
aggaccaucauuucauuuu

SEQ ID NO: 2262549 - RNA, 19 nt, Artificial Sequence
  Description of Artificial Sequence: Synthetic oligonucleotide
cuugguagcaucagaagaa

SEQ ID NO: 2262550 - RNA, 19 nt, Artificial Sequence
  Description of Artificial Sequence: Synthetic oligonucleotide
cuaacuugaguuucaggca

SEQ ID NO: 2262551 - RNA, 19 nt, Artificial Sequence
  Description of Artificial Sequence: Synthetic oligonucleotide
acugcaugugccguacagc

SEQ ID NO: 2262552 - RNA, 19 nt, Artificial Sequence
  Description of Artificial Sequence: Synthetic oligonucleotide
augcaacauaaucaagaug

SEQ ID NO: 2262553 - RNA, 19 nt, Artificial Sequence
  Description of Artificial Sequence: Synthetic oligonucleotide
cuugcauaccuucuugguc

SEQ ID NO: 2262554 - RNA, 19 nt, Artificial Sequence
  Description of Artificial Sequence: Synthetic oligonucleotide
uguggacuuaggcaacaac

SEQ ID NO: 2262555 - RNA, 19 nt, Artificial Sequence
  Description of Artificial Sequence: Synthetic oligonucleotide
uuccaucaaaugaccaaga

SEQ ID NO: 2262556 - RNA, 19 nt, Artificial Sequence
  Description of Artificial Sequence: Synthetic oligonucleotide
uugcagucuuaucagcaga

SEQ ID NO: 2262557 - RNA, 19 nt, Artificial Sequence
  Description of Artificial Sequence: Synthetic oligonucleotide
uuccaguaaugauauucca

SEQ ID NO: 2262558 - RNA, 19 nt, Artificial Sequence
  Description of Artificial Sequence: Synthetic oligonucleotide
aauaaguuguaggccucug

SEQ ID NO: 2262559 - RNA, 19 nt, Artificial Sequence
  Description of Artificial Sequence: Synthetic oligonucleotide
uauccugauuucuccguug

SEQ ID NO: 2262560 - RNA, 19 nt, Artificial Sequence
  Description of Artificial Sequence: Synthetic oligonucleotide
agacccguauuguuugguc

SEQ ID NO: 2262561 - RNA, 19 nt, Artificial Sequence
  Description of Artificial Sequence: Synthetic oligonucleotide
gggaggaugaacucuauca

SEQ ID NO: 2262562 - RNA, 19 nt, Artificial Sequence
  Description of Artificial Sequence: Synthetic oligonucleotide
uuaucagcagagguagaug

SEQ ID NO: 2262563 - RNA, 19 nt, Artificial Sequence
  Description of Artificial Sequence: Synthetic oligonucleotide
auaaguuguaggccucuga

SEQ ID NO: 2262564 - RNA, 19 nt, Artificial Sequence
  Description of Artificial Sequence: Synthetic oligonucleotide
agacauuccauauccugau

SEQ ID NO: 2262565 - RNA, 19 nt, Artificial Sequence
  Description of Artificial Sequence: Synthetic oligonucleotide
uaaugauauuccauaccuu

SEQ ID NO: 2262566 - RNA, 19 nt, Artificial Sequence
  Description of Artificial Sequence: Synthetic oligonucleotide
ugaagaagcuggccacuug

SEQ ID NO: 2262567 - RNA, 19 nt, Artificial Sequence
  Description of Artificial Sequence: Synthetic oligonucleotide
ugauugccaaguccauacc

SEQ ID NO: 2262568 - RNA, 19 nt, Artificial Sequence
  Description of Artificial Sequence: Synthetic oligonucleotide
uccuucacuuguuuccuga

SEQ ID NO: 2262569 - RNA, 19 nt, Artificial Sequence
  Description of Artificial Sequence: Synthetic oligonucleotide
guauuguuugguccaucag

SEQ ID NO: 2262570 - RNA, 19 nt, Artificial Sequence
  Description of Artificial Sequence: Synthetic oligonucleotide
ugacccuucaacucaugaa

SEQ ID NO: 2262571 - RNA, 19 nt, Artificial Sequence
  Description of Artificial Sequence: Synthetic oligonucleotide
guuucaggcagguaaucga

SEQ ID NO: 2262572 - RNA, 19 nt, Artificial Sequence
  Description of Artificial Sequence: Synthetic oligonucleotide
uguuugggaguucuauaau

SEQ ID NO: 2262573 - RNA, 19 nt, Artificial Sequence
  Description of Artificial Sequence: Synthetic oligonucleotide
uguuguuugggaguucuau

SEQ ID NO: 2262574 - RNA, 19 nt, Artificial Sequence
  Description of Artificial Sequence: Synthetic oligonucleotide
ucuaucagucacccagccu

SEQ ID NO: 2262575 - RNA, 19 nt, Artificial Sequence
  Description of Artificial Sequence: Synthetic oligonucleotide
cacuuguuuccugaguggg

SEQ ID NO: 2262576 - RNA, 19 nt, Artificial Sequence
  Description of Artificial Sequence: Synthetic oligonucleotide
uugccaaguccauaccuga

SEQ ID NO: 2262577 - RNA, 19 nt, Artificial Sequence
  Description of Artificial Sequence: Synthetic oligonucleotide
uccugagugggcuugcaaa

SEQ ID NO: 2262578 - RNA, 19 nt, Artificial Sequence
  Description of Artificial Sequence: Synthetic oligonucleotide
ccaagaaagucaaucuuag

SEQ ID NO: 2262579 - RNA, 19 nt, Artificial Sequence
  Description of Artificial Sequence: Synthetic oligonucleotide
aagugucuccccaucagcu

SEQ ID NO: 2262580 - RNA, 19 nt, Artificial Sequence
  Description of Artificial Sequence: Synthetic oligonucleotide
agcggacacagccaguaug

SEQ ID NO: 2262581 - RNA, 19 nt, Artificial Sequence
  Description of Artificial Sequence: Synthetic oligonucleotide
uuguaggccucugauguug

SEQ ID NO: 2262582 - RNA, 19 nt, Artificial Sequence
  Description of Artificial Sequence: Synthetic oligonucleotide
gccaguaugacccuucaac

SEQ ID NO: 2262583 - RNA, 19 nt, Artificial Sequence
  Description of Artificial Sequence: Synthetic oligonucleotide
ccggcaauaaguuguaggc

SEQ ID NO: 2262584 - RNA, 19 nt, Artificial Sequence
  Description of Artificial Sequence: Synthetic oligonucleotide
acuuguuuccugagugggc

SEQ ID NO: 2262585 - RNA, 19 nt, Artificial Sequence
  Description of Artificial Sequence: Synthetic oligonucleotide
caguaugacccuucaacuc

SEQ ID NO: 2262586 - RNA, 19 nt, Artificial Sequence
  Description of Artificial Sequence: Synthetic oligonucleotide
ucuuggucucccagacccg

SEQ ID NO: 2262587 - RNA, 19 nt, Artificial Sequence
  Description of Artificial Sequence: Synthetic oligonucleotide
cuuguguccaauccuagaa

SEQ ID NO: 2262588 - RNA, 19 nt, Artificial Sequence
  Description of Artificial Sequence: Synthetic oligonucleotide
uuguuugguccaucagaag

SEQ ID NO: 2262589 - RNA, 19 nt, Artificial Sequence
  Description of Artificial Sequence: Synthetic oligonucleotide
caguucaaaacuccagauc

SEQ ID NO: 2262590 - RNA, 19 nt, Artificial Sequence
  Description of Artificial Sequence: Synthetic oligonucleotide
aucacggagaaaacaucac

SEQ ID NO: 2262591 - RNA, 19 nt, Artificial Sequence
  Description of Artificial Sequence: Synthetic oligonucleotide
uccauaccugaauuaugga

SEQ ID NO: 2262592 - RNA, 19 nt, Artificial Sequence
  Description of Artificial Sequence: Synthetic oligonucleotide
uucaaaacuccagaucuuu

SEQ ID NO: 2262593 - RNA, 19 nt, Artificial Sequence
  Description of Artificial Sequence: Synthetic oligonucleotide
cauaccugaauuauggaau

SEQ ID NO: 2262594 - RNA, 19 nt, Artificial Sequence
  Description of Artificial Sequence: Synthetic oligonucleotide
uuugguccaucagaagcug

SEQ ID NO: 2262595 - RNA, 19 nt, Artificial Sequence
  Description of Artificial Sequence: Synthetic oligonucleotide
augacccuucaacucauga

SEQ ID NO: 2262596 - RNA, 19 nt, Artificial Sequence
  Description of Artificial Sequence: Synthetic oligonucleotide
aaggcaguucaaaacucca

SEQ ID NO: 2262597 - RNA, 19 nt, Artificial Sequence
  Description of Artificial Sequence: Synthetic oligonucleotide
auccuagaacugaaaacuc

SEQ ID NO: 2262598 - RNA, 19 nt, Artificial Sequence
  Description of Artificial Sequence: Synthetic oligonucleotide
agaugaaaacuugguagca

SEQ ID NO: 2262599 - RNA, 19 nt, Artificial Sequence
  Description of Artificial Sequence: Synthetic oligonucleotide
agaagcuggccacuugaga

SEQ ID NO: 2262600 - RNA, 19 nt, Artificial Sequence
  Description of Artificial Sequence: Synthetic oligonucleotide
uuucuccguugucaucucc

SEQ ID NO: 2262601 - RNA, 19 nt, Artificial Sequence
  Description of Artificial Sequence: Synthetic oligonucleotide
ccuagaacugaaaacucug

SEQ ID NO: 2262602 - RNA, 19 nt, Artificial Sequence
  Description of Artificial Sequence: Synthetic oligonucleotide
agcugucuuguguccaauc

SEQ ID NO: 2262603 - RNA, 19 nt, Artificial Sequence
  Description of Artificial Sequence: Synthetic oligonucleotide
guugucaucuccaguugcc

SEQ ID NO: 2262604 - RNA, 19 nt, Artificial Sequence
  Description of Artificial Sequence: Synthetic oligonucleotide
uugagacauuccauauccu

SEQ ID NO: 2262605 - RNA, 19 nt, Artificial Sequence
  Description of Artificial Sequence: Synthetic oligonucleotide
uccaauccuagaacugaaa

SEQ ID NO: 2262606 - RNA, 19 nt, Artificial Sequence
  Description of Artificial Sequence: Synthetic oligonucleotide
gagcagcggacacagccag

SEQ ID NO: 2262607 - RNA, 19 nt, Artificial Sequence
  Description of Artificial Sequence: Synthetic oligonucleotide
aagaagcuggccacuugag

SEQ ID NO: 2262608 - RNA, 19 nt, Artificial Sequence
  Description of Artificial Sequence: Synthetic oligonucleotide
acccguauuguuuggucca

SEQ ID NO: 2262609 - RNA, 19 nt, Artificial Sequence
  Description of Artificial Sequence: Synthetic oligonucleotide
auccugauuucuccguugu

SEQ ID NO: 2262610 - RNA, 19 nt, Artificial Sequence
  Description of Artificial Sequence: Synthetic oligonucleotide
gauugccaaguccauaccu

SEQ ID NO: 2262611 - RNA, 19 nt, Artificial Sequence
  Description of Artificial Sequence: Synthetic oligonucleotide
auggcaauuaaagucuuuu

SEQ ID NO: 2262612 - RNA, 19 nt, Artificial Sequence
  Description of Artificial Sequence: Synthetic oligonucleotide
ugucaucuccaguugccaa

SEQ ID NO: 2262613 - RNA, 19 nt, Artificial Sequence
  Description of Artificial Sequence: Synthetic oligonucleotide
gcuuuaacacuacagcaga

SEQ ID NO: 2262614 - RNA, 19 nt, Artificial Sequence
  Description of Artificial Sequence: Synthetic oligonucleotide
ugaaguccuucacuuguuu

SEQ ID NO: 2262615 - RNA, 19 nt, Artificial Sequence
  Description of Artificial Sequence: Synthetic oligonucleotide
ugugaacugcaugugccgu

SEQ ID NO: 2262616 - RNA, 19 nt, Artificial Sequence
  Description of Artificial Sequence: Synthetic oligonucleotide
accaagaaagucaaucuua

SEQ ID NO: 2262617 - RNA, 19 nt, Artificial Sequence
  Description of Artificial Sequence: Synthetic oligonucleotide
auaguccucugauugccaa

SEQ ID NO: 2262618 - RNA, 19 nt, Artificial Sequence
  Description of Artificial Sequence: Synthetic oligonucleotide
uucaggcagguaaucgauc

SEQ ID NO: 2262619 - RNA, 19 nt, Artificial Sequence
  Description of Artificial Sequence: Synthetic oligonucleotide
gcuuaaaauguccucugca

SEQ ID NO: 2262620 - RNA, 19 nt, Artificial Sequence
  Description of Artificial Sequence: Synthetic oligonucleotide
ugguagcaucagaagaaau

SEQ ID NO: 2262621 - RNA, 19 nt, Artificial Sequence
  Description of Artificial Sequence: Synthetic oligonucleotide
uccuucuucuacugaaauu

SEQ ID NO: 2262622 - RNA, 19 nt, Artificial Sequence
  Description of Artificial Sequence: Synthetic oligonucleotide
acugaaauuggagcacaca

SEQ ID NO: 2262623 - RNA, 19 nt, Artificial Sequence
  Description of Artificial Sequence: Synthetic oligonucleotide
ccaaaugcaacauaaucaa

SEQ ID NO: 2262624 - RNA, 19 nt, Artificial Sequence
  Description of Artificial Sequence: Synthetic oligonucleotide
gauauuccauaccuucacu

SEQ ID NO: 2262625 - RNA, 19 nt, Artificial Sequence
  Description of Artificial Sequence: Synthetic oligonucleotide
auaucacaagaaaguacug

SEQ ID NO: 2262626 - RNA, 19 nt, Artificial Sequence
  Description of Artificial Sequence: Synthetic oligonucleotide
ugccguacagcugucuugu

SEQ ID NO: 2262627 - RNA, 19 nt, Artificial Sequence
  Description of Artificial Sequence: Synthetic oligonucleotide
gguagaugaaaacuuggua

SEQ ID NO: 2262628 - RNA, 19 nt, Artificial Sequence
  Description of Artificial Sequence: Synthetic oligonucleotide
ugauggcaauuaaagucuu

SEQ ID NO: 2262629 - RNA, 19 nt, Artificial Sequence
  Description of Artificial Sequence: Synthetic oligonucleotide
uugguagcaucagaagaaa

SEQ ID NO: 2262630 - RNA, 19 nt, Artificial Sequence
  Description of Artificial Sequence: Synthetic oligonucleotide
ugugccguacagcugucuu

SEQ ID NO: 2262631 - RNA, 19 nt, Artificial Sequence
  Description of Artificial Sequence: Synthetic oligonucleotide
acaacuaacuugaguuuca

SEQ ID NO: 2262632 - RNA, 19 nt, Artificial Sequence
  Description of Artificial Sequence: Synthetic oligonucleotide
gaacccagcuuaaaauguc

SEQ ID NO: 2262633 - RNA, 19 nt, Artificial Sequence
  Description of Artificial Sequence: Synthetic oligonucleotide
ggcaauaaguuguaggccu

SEQ ID NO: 2262634 - RNA, 19 nt, Artificial Sequence
  Description of Artificial Sequence: Synthetic oligonucleotide
uaugacccuucaacucaug

SEQ ID NO: 2262635 - RNA, 19 nt, Artificial Sequence
  Description of Artificial Sequence: Synthetic oligonucleotide
agucuuaucagcagaggua

SEQ ID NO: 2262636 - RNA, 19 nt, Artificial Sequence
  Description of Artificial Sequence: Synthetic oligonucleotide
auauccugauuucuccguu

SEQ ID NO: 2262637 - RNA, 19 nt, Artificial Sequence
  Description of Artificial Sequence: Synthetic oligonucleotide
agaaaacaucacaccauga

SEQ ID NO: 2262638 - RNA, 19 nt, Artificial Sequence
  Description of Artificial Sequence: Synthetic oligonucleotide
ccauauccugauuucuccg

SEQ ID NO: 2262639 - RNA, 19 nt, Artificial Sequence
  Description of Artificial Sequence: Synthetic oligonucleotide
cccggcaauaaguuguagg

SEQ ID NO: 2262640 - RNA, 19 nt, Artificial Sequence
  Description of Artificial Sequence: Synthetic oligonucleotide
ucccagacccguauuguuu

SEQ ID NO: 2262641 - RNA, 19 nt, Artificial Sequence
  Description of Artificial Sequence: Synthetic oligonucleotide
guacagcugucuugugucc

SEQ ID NO: 2262642 - RNA, 19 nt, Artificial Sequence
  Description of Artificial Sequence: Synthetic oligonucleotide
ccugaauuauggaaucuuc

SEQ ID NO: 2262643 - RNA, 19 nt, Artificial Sequence
  Description of Artificial Sequence: Synthetic oligonucleotide
guuguuugggaguucuaua

SEQ ID NO: 2262644 - RNA, 19 nt, Artificial Sequence
  Description of Artificial Sequence: Synthetic oligonucleotide
acacaacaucuauuuccug

SEQ ID NO: 2262645 - RNA, 19 nt, Artificial Sequence
  Description of Artificial Sequence: Synthetic oligonucleotide
aguccauaccugaauuaug

SEQ ID NO: 2262646 - RNA, 19 nt, Artificial Sequence
  Description of Artificial Sequence: Synthetic oligonucleotide
gaugacccaucacggagaa

SEQ ID NO: 2262647 - RNA, 19 nt, Artificial Sequence
  Description of Artificial Sequence: Synthetic oligonucleotide
acagccaguaugacccuuc

SEQ ID NO: 2262648 - RNA, 19 nt, Artificial Sequence
  Description of Artificial Sequence: Synthetic oligonucleotide
agaaggcagagcagcggac

SEQ ID NO: 2262649 - RNA, 19 nt, Artificial Sequence
  Description of Artificial Sequence: Synthetic oligonucleotide
agaaaguacugcaccuuga

SEQ ID NO: 2262650 - RNA, 19 nt, Artificial Sequence
  Description of Artificial Sequence: Synthetic oligonucleotide
ggacuuaggcaacaacaac

SEQ ID NO: 2262651 - RNA, 19 nt, Artificial Sequence
  Description of Artificial Sequence: Synthetic oligonucleotide
ucugauugccaaguccaua

SEQ ID NO: 2262652 - RNA, 19 nt, Artificial Sequence
  Description of Artificial Sequence: Synthetic oligonucleotide
ggaccaucauuucauuuuc

SEQ ID NO: 2262653 - RNA, 19 nt, Artificial Sequence
  Description of Artificial Sequence: Synthetic oligonucleotide
aggccucugauguugucaa

SEQ ID NO: 2262654 - RNA, 19 nt, Artificial Sequence
  Description of Artificial Sequence: Synthetic oligonucleotide
ugccaaguccauaccugaa

SEQ ID NO: 2262655 - RNA, 19 nt, Artificial Sequence
  Description of Artificial Sequence: Synthetic oligonucleotide
caacaacaacuaacuugag

SEQ ID NO: 2262656 - RNA, 19 nt, Artificial Sequence
  Description of Artificial Sequence: Synthetic oligonucleotide
cauaaucaagauguggacu

SEQ ID NO: 2262657 - RNA, 19 nt, Artificial Sequence
  Description of Artificial Sequence: Synthetic oligonucleotide
gauguggacuuaggcaaca

SEQ ID NO: 2262658 - RNA, 19 nt, Artificial Sequence
  Description of Artificial Sequence: Synthetic oligonucleotide
accugaauuauggaaucuu

SEQ ID NO: 2262659 - RNA, 19 nt, Artificial Sequence
  Description of Artificial Sequence: Synthetic oligonucleotide
gugccguacagcugucuug

SEQ ID NO: 2262660 - RNA, 19 nt, Artificial Sequence
  Description of Artificial Sequence: Synthetic oligonucleotide
cuagaacugaaaacucugu

SEQ ID NO: 2262661 - RNA, 19 nt, Artificial Sequence
  Description of Artificial Sequence: Synthetic oligonucleotide
uggucucccagacccguau

SEQ ID NO: 2262662 - RNA, 19 nt, Artificial Sequence
  Description of Artificial Sequence: Synthetic oligonucleotide
uaaucaagauguggacuua

SEQ ID NO: 2262663 - RNA, 19 nt, Artificial Sequence
  Description of Artificial Sequence: Synthetic oligonucleotide
gcagguaaucgaucuggcc

SEQ ID NO: 2262664 - RNA, 19 nt, Artificial Sequence
  Description of Artificial Sequence: Synthetic oligonucleotide
acccaucacggagaaaaca

SEQ ID NO: 2262665 - RNA, 19 nt, Artificial Sequence
  Description of Artificial Sequence: Synthetic oligonucleotide
gaccaagaaagucaaucuu

SEQ ID NO: 2262666 - RNA, 19 nt, Artificial Sequence
  Description of Artificial Sequence: Synthetic oligonucleotide
guuugguccaucagaagcu

SEQ ID NO: 2262667 - RNA, 19 nt, Artificial Sequence
  Description of Artificial Sequence: Synthetic oligonucleotide
ggccacuugagacauucca

SEQ ID NO: 2262668 - RNA, 19 nt, Artificial Sequence
  Description of Artificial Sequence: Synthetic oligonucleotide
cuacugaaauuggagcaca

SEQ ID NO: 2262669 - RNA, 19 nt, Artificial Sequence
  Description of Artificial Sequence: Synthetic oligonucleotide
ugcauaccuucuuggucuc

SEQ ID NO: 2262670 - RNA, 19 nt, Artificial Sequence
  Description of Artificial Sequence: Synthetic oligonucleotide
aaugaccaagaaagucaau

SEQ ID NO: 2262671 - RNA, 19 nt, Artificial Sequence
  Description of Artificial Sequence: Synthetic oligonucleotide
cagagguagaugaaaacuu

SEQ ID NO: 2262672 - RNA, 19 nt, Artificial Sequence
  Description of Artificial Sequence: Synthetic oligonucleotide
acccuucaacucaugaaga

SEQ ID NO: 2262673 - RNA, 19 nt, Artificial Sequence
  Description of Artificial Sequence: Synthetic oligonucleotide
cauaccuucacuguuccau

SEQ ID NO: 2262674 - RNA, 19 nt, Artificial Sequence
  Description of Artificial Sequence: Synthetic oligonucleotide
cauauccugauuucuccgu

SEQ ID NO: 2262675 - RNA, 19 nt, Artificial Sequence
  Description of Artificial Sequence: Synthetic oligonucleotide
uucccggcaauaaguugua

SEQ ID NO: 2262676 - RNA, 19 nt, Artificial Sequence
  Description of Artificial Sequence: Synthetic oligonucleotide
cuuaggcaacaacaacuaa

SEQ ID NO: 2262677 - RNA, 19 nt, Artificial Sequence
  Description of Artificial Sequence: Synthetic oligonucleotide
accuucacuguuccaucaa

SEQ ID NO: 2262678 - RNA, 19 nt, Artificial Sequence
  Description of Artificial Sequence: Synthetic oligonucleotide
gucacccagccuccauggg

SEQ ID NO: 2262679 - RNA, 19 nt, Artificial Sequence
  Description of Artificial Sequence: Synthetic oligonucleotide
cguacagcugucuuguguc

SEQ ID NO: 2262680 - RNA, 19 nt, Artificial Sequence
  Description of Artificial Sequence: Synthetic oligonucleotide
gaacuggaaauaagugucu

SEQ ID NO: 2262681 - RNA, 19 nt, Artificial Sequence
  Description of Artificial Sequence: Synthetic oligonucleotide
cuacagcagaguucuugca

SEQ ID NO: 2262682 - RNA, 19 nt, Artificial Sequence
  Description of Artificial Sequence: Synthetic oligonucleotide
gagccugaaguccuucacu

SEQ ID NO: 2262683 - RNA, 19 nt, Artificial Sequence
  Description of Artificial Sequence: Synthetic oligonucleotide
caggcagguaaucgaucug

SEQ ID NO: 2262684 - RNA, 19 nt, Artificial Sequence
  Description of Artificial Sequence: Synthetic oligonucleotide
caccuugauggcaauuaaa

SEQ ID NO: 2262685 - RNA, 19 nt, Artificial Sequence
  Description of Artificial Sequence: Synthetic oligonucleotide
gaacucuaucagucaccca

SEQ ID NO: 2262686 - RNA, 19 nt, Artificial Sequence
  Description of Artificial Sequence: Synthetic oligonucleotide
gggaguucuauaaucuuaa

SEQ ID NO: 2262687 - RNA, 19 nt, Artificial Sequence
  Description of Artificial Sequence: Synthetic oligonucleotide
acccagcuuaaaauguccu

SEQ ID NO: 2262688 - RNA, 19 nt, Artificial Sequence
  Description of Artificial Sequence: Synthetic oligonucleotide
ccaauccuagaacugaaaa

SEQ ID NO: 2262689 - RNA, 19 nt, Artificial Sequence
  Description of Artificial Sequence: Synthetic oligonucleotide
cuuaucagcagagguagau

SEQ ID NO: 2262690 - RNA, 19 nt, Artificial Sequence
  Description of Artificial Sequence: Synthetic oligonucleotide
uuuccugagugggcuugca

SEQ ID NO: 2262691 - RNA, 19 nt, Artificial Sequence
  Description of Artificial Sequence: Synthetic oligonucleotide
ucuccccaucagcugugaa

SEQ ID NO: 2262692 - RNA, 19 nt, Artificial Sequence
  Description of Artificial Sequence: Synthetic oligonucleotide
cugauuucuccguugucau

SEQ ID NO: 2262693 - RNA, 19 nt, Artificial Sequence
  Description of Artificial Sequence: Synthetic oligonucleotide
cugucuuguguccaauccu

SEQ ID NO: 2262694 - RNA, 19 nt, Artificial Sequence
  Description of Artificial Sequence: Synthetic oligonucleotide
ucccggcaauaaguuguag

SEQ ID NO: 2262695 - RNA, 19 nt, Artificial Sequence
  Description of Artificial Sequence: Synthetic oligonucleotide
cccagcuuaaaauguccuc

SEQ ID NO: 2262696 - RNA, 19 nt, Artificial Sequence
  Description of Artificial Sequence: Synthetic oligonucleotide
cacuugagacauuccauau

SEQ ID NO: 2262697 - RNA, 19 nt, Artificial Sequence
  Description of Artificial Sequence: Synthetic oligonucleotide
cccaucagcugugaacugc

SEQ ID NO: 2262698 - RNA, 19 nt, Artificial Sequence
  Description of Artificial Sequence: Synthetic oligonucleotide
acugcaccuugauggcaau

SEQ ID NO: 2262699 - RNA, 19 nt, Artificial Sequence
  Description of Artificial Sequence: Synthetic oligonucleotide
gugaacugcaugugccgua

SEQ ID NO: 2262700 - RNA, 19 nt, Artificial Sequence
  Description of Artificial Sequence: Synthetic oligonucleotide
uuggucucccagacccgua

SEQ ID NO: 2262701 - RNA, 19 nt, Artificial Sequence
  Description of Artificial Sequence: Synthetic oligonucleotide
cguauuguuugguccauca

SEQ ID NO: 2262702 - RNA, 19 nt, Artificial Sequence
  Description of Artificial Sequence: Synthetic oligonucleotide
agccaguaugacccuucaa

SEQ ID NO: 2262703 - RNA, 19 nt, Artificial Sequence
  Description of Artificial Sequence: Synthetic oligonucleotide
ggcagguaaucgaucuggc

SEQ ID NO: 2262704 - RNA, 19 nt, Artificial Sequence
  Description of Artificial Sequence: Synthetic oligonucleotide
cacaccaugaacccagcuu

SEQ ID NO: 2262705 - RNA, 19 nt, Artificial Sequence
  Description of Artificial Sequence: Synthetic oligonucleotide
uaggagccugaaguccuuc

SEQ ID NO: 2262706 - RNA, 19 nt, Artificial Sequence
  Description of Artificial Sequence: Synthetic oligonucleotide
caucuccaaaugcaacaua

SEQ ID NO: 2262707 - RNA, 19 nt, Artificial Sequence
  Description of Artificial Sequence: Synthetic oligonucleotide
gcggacacagccaguauga

SEQ ID NO: 2262708 - RNA, 19 nt, Artificial Sequence
  Description of Artificial Sequence: Synthetic oligonucleotide
cgaucuggccuguuuuccc

SEQ ID NO: 2262709 - RNA, 19 nt, Artificial Sequence
  Description of Artificial Sequence: Synthetic oligonucleotide
ccaucagcugugaacugca

SEQ ID NO: 2262710 - RNA, 19 nt, Artificial Sequence
  Description of Artificial Sequence: Synthetic oligonucleotide
gcaaggaccaucauuucau

SEQ ID NO: 2262711 - RNA, 19 nt, Artificial Sequence
  Description of Artificial Sequence: Synthetic oligonucleotide
auguggacuuaggcaacaa

SEQ ID NO: 2262712 - RNA, 19 nt, Artificial Sequence
  Description of Artificial Sequence: Synthetic oligonucleotide
cagccaguaugacccuuca

SEQ ID NO: 2262713 - RNA, 19 nt, Artificial Sequence
  Description of Artificial Sequence: Synthetic oligonucleotide
ccagcuuaaaauguccucu

SEQ ID NO: 2262714 - RNA, 19 nt, Artificial Sequence
  Description of Artificial Sequence: Synthetic oligonucleotide
caauaaguuguaggccucu

SEQ ID NO: 2262715 - RNA, 19 nt, Artificial Sequence
  Description of Artificial Sequence: Synthetic oligonucleotide
cggcaauaaguuguaggcc

SEQ ID NO: 2262716 - RNA, 19 nt, Artificial Sequence
  Description of Artificial Sequence: Synthetic oligonucleotide
augugccguacagcugucu

SEQ ID NO: 2262717 - RNA, 19 nt, Artificial Sequence
  Description of Artificial Sequence: Synthetic oligonucleotide
cagaucuuugcagucuuau

SEQ ID NO: 2262718 - RNA, 19 nt, Artificial Sequence
  Description of Artificial Sequence: Synthetic oligonucleotide
cccaucacggagaaaacau

SEQ ID NO: 2262719 - RNA, 19 nt, Artificial Sequence
  Description of Artificial Sequence: Synthetic oligonucleotide
ggaugccauccagagagaa

SEQ ID NO: 2262720 - RNA, 19 nt, Artificial Sequence
  Description of Artificial Sequence: Synthetic oligonucleotide
ccguugucaucuccaguug

SEQ ID NO: 2262721 - RNA, 19 nt, Artificial Sequence
  Description of Artificial Sequence: Synthetic oligonucleotide
guaugacccuucaacucau

SEQ ID NO: 2262722 - RNA, 19 nt, Artificial Sequence
  Description of Artificial Sequence: Synthetic oligonucleotide
cuuggucucccagacccgu

SEQ ID NO: 2262723 - RNA, 19 nt, Artificial Sequence
  Description of Artificial Sequence: Synthetic oligonucleotide
cuguuguuugggaguucua

SEQ ID NO: 2262724 - RNA, 19 nt, Artificial Sequence
  Description of Artificial Sequence: Synthetic oligonucleotide
cuugaguuucaggcaggua

SEQ ID NO: 2262725 - RNA, 19 nt, Artificial Sequence
  Description of Artificial Sequence: Synthetic oligonucleotide
ggaguucuauaaucuuaau

SEQ ID NO: 2262726 - RNA, 19 nt, Artificial Sequence
  Description of Artificial Sequence: Synthetic oligonucleotide
gcagcggacacagccagua

SEQ ID NO: 2262727 - RNA, 19 nt, Artificial Sequence
  Description of Artificial Sequence: Synthetic oligonucleotide
gcauaccuucuuggucucc

SEQ ID NO: 2262728 - RNA, 19 nt, Artificial Sequence
  Description of Artificial Sequence: Synthetic oligonucleotide
ggccucugauguugucaac

SEQ ID NO: 2262729 - RNA, 19 nt, Artificial Sequence
  Description of Artificial Sequence: Synthetic oligonucleotide
cuccguugucaucuccagu

SEQ ID NO: 2262730 - RNA, 19 nt, Artificial Sequence
  Description of Artificial Sequence: Synthetic oligonucleotide
ccaaguccauaccugaauu

SEQ ID NO: 2262731 - RNA, 19 nt, Artificial Sequence
  Description of Artificial Sequence: Synthetic oligonucleotide
gccacuugagacauuccau

SEQ ID NO: 2262732 - RNA, 19 nt, Artificial Sequence
  Description of Artificial Sequence: Synthetic oligonucleotide
gucuccccaucagcuguga

SEQ ID NO: 2262733 - RNA, 19 nt, Artificial Sequence
  Description of Artificial Sequence: Synthetic oligonucleotide
gccguacagcugucuugug

SEQ ID NO: 2262734 - RNA, 19 nt, Artificial Sequence
  Description of Artificial Sequence: Synthetic oligonucleotide
cagacccguauuguuuggu

SEQ ID NO: 2262735 - RNA, 19 nt, Artificial Sequence
  Description of Artificial Sequence: Synthetic oligonucleotide
ccguacagcugucuugugu

SEQ ID NO: 2262736 - RNA, 19 nt, Artificial Sequence
  Description of Artificial Sequence: Synthetic oligonucleotide
gguaaucgaucuggccugu

SEQ ID NO: 2262737 - RNA, 19 nt, Artificial Sequence
  Description of Artificial Sequence: Synthetic oligonucleotide
ccauaccuucacuguucca

SEQ ID NO: 2262738 - RNA, 19 nt, Artificial Sequence
  Description of Artificial Sequence: Synthetic oligonucleotide
gccuguuuucccggcaaua

SEQ ID NO: 2262739 - RNA, 19 nt, Artificial Sequence
  Description of Artificial Sequence: Synthetic oligonucleotide
ccguauuguuugguccauc

SEQ ID NO: 2262740 - RNA, 19 nt, Artificial Sequence
  Description of Artificial Sequence: Synthetic oligonucleotide
ggccuguuuucccggcaau

SEQ ID NO: 2262741 - RNA, 19 nt, Artificial Sequence
  Description of Artificial Sequence: Synthetic oligonucleotide
cagcggacacagccaguau

SEQ ID NO: 2262742 - RNA, 19 nt, Artificial Sequence
  Description of Artificial Sequence: Synthetic oligonucleotide
ggucucccagacccguauu

SEQ ID NO: 2262743 - RNA, 19 nt, Artificial Sequence
  Description of Artificial Sequence: Synthetic oligonucleotide
cugcaccuugauggcaauu

SEQ ID NO: 2262744 - RNA, 19 nt, Artificial Sequence
  Description of Artificial Sequence: Synthetic oligonucleotide
agauucaugacauagaaag

SEQ ID NO: 2262745 - RNA, 19 nt, Artificial Sequence
  Description of Artificial Sequence: Synthetic oligonucleotide
aaagcguggagcuuugucc

SEQ ID NO: 2262746 - RNA, 19 nt, Artificial Sequence
  Description of Artificial Sequence: Synthetic oligonucleotide
uucuguucaaaucucaugc

SEQ ID NO: 2262747 - RNA, 19 nt, Artificial Sequence
  Description of Artificial Sequence: Synthetic oligonucleotide
aaugugguuaaggaaaugg

SEQ ID NO: 2262748 - RNA, 19 nt, Artificial Sequence
  Description of Artificial Sequence: Synthetic oligonucleotide
accaaugugagcuucacuc

SEQ ID NO: 2262749 - RNA, 19 nt, Artificial Sequence
  Description of Artificial Sequence: Synthetic oligonucleotide
ucaucuaagaguaccaagc

SEQ ID NO: 2262750 - RNA, 19 nt, Artificial Sequence
  Description of Artificial Sequence: Synthetic oligonucleotide
aggacaacaaucuuguuag

SEQ ID NO: 2262751 - RNA, 19 nt, Artificial Sequence
  Description of Artificial Sequence: Synthetic oligonucleotide
ucuaagaguaccaagcgga

SEQ ID NO: 2262752 - RNA, 19 nt, Artificial Sequence
  Description of Artificial Sequence: Synthetic oligonucleotide
aacaaucuuguuaggaucc

SEQ ID NO: 2262753 - RNA, 19 nt, Artificial Sequence
  Description of Artificial Sequence: Synthetic oligonucleotide
auucaugacauagaaagcg

SEQ ID NO: 2262754 - RNA, 19 nt, Artificial Sequence
  Description of Artificial Sequence: Synthetic oligonucleotide
aagaguaccaagcggagug

SEQ ID NO: 2262755 - RNA, 19 nt, Artificial Sequence
  Description of Artificial Sequence: Synthetic oligonucleotide
aggauuuucaauaaagggg

SEQ ID NO: 2262756 - RNA, 19 nt, Artificial Sequence
  Description of Artificial Sequence: Synthetic oligonucleotide
agaaucuucauuaagcauc

SEQ ID NO: 2262757 - RNA, 19 nt, Artificial Sequence
  Description of Artificial Sequence: Synthetic oligonucleotide
uuguuuagaugcuuuaucc

SEQ ID NO: 2262758 - RNA, 19 nt, Artificial Sequence
  Description of Artificial Sequence: Synthetic oligonucleotide
aguggaagcaaguagguug

SEQ ID NO: 2262759 - RNA, 19 nt, Artificial Sequence
  Description of Artificial Sequence: Synthetic oligonucleotide
aaguagguuguuuccaagg

SEQ ID NO: 2262760 - RNA, 19 nt, Artificial Sequence
  Description of Artificial Sequence: Synthetic oligonucleotide
cugugguuuguuuagaugc

SEQ ID NO: 2262761 - RNA, 19 nt, Artificial Sequence
  Description of Artificial Sequence: Synthetic oligonucleotide
caggauuuucaauaaaggg

SEQ ID NO: 2262762 - RNA, 19 nt, Artificial Sequence
  Description of Artificial Sequence: Synthetic oligonucleotide
uugacucccaacauacugg

SEQ ID NO: 2262763 - RNA, 19 nt, Artificial Sequence
  Description of Artificial Sequence: Synthetic oligonucleotide
aaacucucaucuuugagau

SEQ ID NO: 2262764 - RNA, 19 nt, Artificial Sequence
  Description of Artificial Sequence: Synthetic oligonucleotide
ugcagaaccuucucgauag

SEQ ID NO: 2262765 - RNA, 19 nt, Artificial Sequence
  Description of Artificial Sequence: Synthetic oligonucleotide
aaggaaaugguagucacug

SEQ ID NO: 2262766 - RNA, 19 nt, Artificial Sequence
  Description of Artificial Sequence: Synthetic oligonucleotide
uaugaggagacccugcgca

SEQ ID NO: 2262767 - RNA, 19 nt, Artificial Sequence
  Description of Artificial Sequence: Synthetic oligonucleotide
ugagauucaugacauagaa

SEQ ID NO: 2262768 - RNA, 19 nt, Artificial Sequence
  Description of Artificial Sequence: Synthetic oligonucleotide
agaauaugagacuuugcug

SEQ ID NO: 2262769 - RNA, 19 nt, Artificial Sequence
  Description of Artificial Sequence: Synthetic oligonucleotide
aaaaugugauggcagcuca

SEQ ID NO: 2262770 - RNA, 19 nt, Artificial Sequence
  Description of Artificial Sequence: Synthetic oligonucleotide
agacccugcgcauucaccc

SEQ ID NO: 2262771 - RNA, 19 nt, Artificial Sequence
  Description of Artificial Sequence: Synthetic oligonucleotide
auacaugcaggcucugugc

SEQ ID NO: 2262772 - RNA, 19 nt, Artificial Sequence
  Description of Artificial Sequence: Synthetic oligonucleotide
gaauaugagacuuugcugu

SEQ ID NO: 2262773 - RNA, 19 nt, Artificial Sequence
  Description of Artificial Sequence: Synthetic oligonucleotide
guuaggauccacaugcugg

SEQ ID NO: 2262774 - RNA, 19 nt, Artificial Sequence
  Description of Artificial Sequence: Synthetic oligonucleotide
caugacauagaaagcgugg

SEQ ID NO: 2262775 - RNA, 19 nt, Artificial Sequence
  Description of Artificial Sequence: Synthetic oligonucleotide
ugcgcauucacccuguacu

SEQ ID NO: 2262776 - RNA, 19 nt, Artificial Sequence
  Description of Artificial Sequence: Synthetic oligonucleotide
uguucaaaucucaugccca

SEQ ID NO: 2262777 - RNA, 19 nt, Artificial Sequence
  Description of Artificial Sequence: Synthetic oligonucleotide
guagucacugcuuggaucc

SEQ ID NO: 2262778 - RNA, 19 nt, Artificial Sequence
  Description of Artificial Sequence: Synthetic oligonucleotide
caaaaugugguuaaggaaa

SEQ ID NO: 2262779 - RNA, 19 nt, Artificial Sequence
  Description of Artificial Sequence: Synthetic oligonucleotide
aaggccaggauuuucaaua

SEQ ID NO: 2262780 - RNA, 19 nt, Artificial Sequence
  Description of Artificial Sequence: Synthetic oligonucleotide
aauaugagacuuugcugug

SEQ ID NO: 2262781 - RNA, 19 nt, Artificial Sequence
  Description of Artificial Sequence: Synthetic oligonucleotide
aucuaagaguaccaagcgg

SEQ ID NO: 2262782 - RNA, 19 nt, Artificial Sequence
  Description of Artificial Sequence: Synthetic oligonucleotide
acgcccucaaagcagaaac

SEQ ID NO: 2262783 - RNA, 19 nt, Artificial Sequence
  Description of Artificial Sequence: Synthetic oligonucleotide
agcagaaaccaaugugagc

SEQ ID NO: 2262784 - RNA, 19 nt, Artificial Sequence
  Description of Artificial Sequence: Synthetic oligonucleotide
gacauagaaagcguggagc

SEQ ID NO: 2262785 - RNA, 19 nt, Artificial Sequence
  Description of Artificial Sequence: Synthetic oligonucleotide
ucaugacauagaaagcgug

SEQ ID NO: 2262786 - RNA, 19 nt, Artificial Sequence
  Description of Artificial Sequence: Synthetic oligonucleotide
ucgauagguguucagguac

SEQ ID NO: 2262787 - RNA, 19 nt, Artificial Sequence
  Description of Artificial Sequence: Synthetic oligonucleotide
gugguuaaggaaaugguag

SEQ ID NO: 2262788 - RNA, 19 nt, Artificial Sequence
  Description of Artificial Sequence: Synthetic oligonucleotide
aagaaucuucauuaagcau

SEQ ID NO: 2262789 - RNA, 19 nt, Artificial Sequence
  Description of Artificial Sequence: Synthetic oligonucleotide
gaaguagcucuucuggcag

SEQ ID NO: 2262790 - RNA, 19 nt, Artificial Sequence
  Description of Artificial Sequence: Synthetic oligonucleotide
caucuaagaguaccaagcg

SEQ ID NO: 2262791 - RNA, 19 nt, Artificial Sequence
  Description of Artificial Sequence: Synthetic oligonucleotide
ucaaaucucaugcccaaaa

SEQ ID NO: 2262792 - RNA, 19 nt, Artificial Sequence
  Description of Artificial Sequence: Synthetic oligonucleotide
aaucucaugcccaaaacau

SEQ ID NO: 2262793 - RNA, 19 nt, Artificial Sequence
  Description of Artificial Sequence: Synthetic oligonucleotide
cuucaaagaaucuucauua

SEQ ID NO: 2262794 - RNA, 19 nt, Artificial Sequence
  Description of Artificial Sequence: Synthetic oligonucleotide
acauagaaagcguggagcu

SEQ ID NO: 2262795 - RNA, 19 nt, Artificial Sequence
  Description of Artificial Sequence: Synthetic oligonucleotide
ugacauagaaagcguggag

SEQ ID NO: 2262796 - RNA, 19 nt, Artificial Sequence
  Description of Artificial Sequence: Synthetic oligonucleotide
cuuaugaggagacccugcg

SEQ ID NO: 2262797 - RNA, 19 nt, Artificial Sequence
  Description of Artificial Sequence: Synthetic oligonucleotide
gaaucuucauuaagcaucc

SEQ ID NO: 2262798 - RNA, 19 nt, Artificial Sequence
  Description of Artificial Sequence: Synthetic oligonucleotide
agaagaggucuugucaacc

SEQ ID NO: 2262799 - RNA, 19 nt, Artificial Sequence
  Description of Artificial Sequence: Synthetic oligonucleotide
acucucaucuuugagauga

SEQ ID NO: 2262800 - RNA, 19 nt, Artificial Sequence
  Description of Artificial Sequence: Synthetic oligonucleotide
uucaugacauagaaagcgu

SEQ ID NO: 2262801 - RNA, 19 nt, Artificial Sequence
  Description of Artificial Sequence: Synthetic oligonucleotide
ucauuugggcuuuguaaag

SEQ ID NO: 2262802 - RNA, 19 nt, Artificial Sequence
  Description of Artificial Sequence: Synthetic oligonucleotide
acaacaaucuuguuaggau

SEQ ID NO: 2262803 - RNA, 19 nt, Artificial Sequence
  Description of Artificial Sequence: Synthetic oligonucleotide
uucucgauagguguucagg

SEQ ID NO: 2262804 - RNA, 19 nt, Artificial Sequence
  Description of Artificial Sequence: Synthetic oligonucleotide
caucuuugagaugagauuc

SEQ ID NO: 2262805 - RNA, 19 nt, Artificial Sequence
  Description of Artificial Sequence: Synthetic oligonucleotide
cuguugacucccaacauac

SEQ ID NO: 2262806 - RNA, 19 nt, Artificial Sequence
  Description of Artificial Sequence: Synthetic oligonucleotide
cuguucaaaucucaugccc

SEQ ID NO: 2262807 - RNA, 19 nt, Artificial Sequence
  Description of Artificial Sequence: Synthetic oligonucleotide
uguuaggauccacaugcug

SEQ ID NO: 2262808 - RNA, 19 nt, Artificial Sequence
  Description of Artificial Sequence: Synthetic oligonucleotide
uuaggauccacaugcugga

SEQ ID NO: 2262809 - RNA, 19 nt, Artificial Sequence
  Description of Artificial Sequence: Synthetic oligonucleotide
uaugagacuuugcuguggu

SEQ ID NO: 2262810 - RNA, 19 nt, Artificial Sequence
  Description of Artificial Sequence: Synthetic oligonucleotide
cacaaaaugugguuaagga

SEQ ID NO: 2262811 - RNA, 19 nt, Artificial Sequence
  Description of Artificial Sequence: Synthetic oligonucleotide
uguaaagcucccuuguuuu

SEQ ID NO: 2262812 - RNA, 19 nt, Artificial Sequence
  Description of Artificial Sequence: Synthetic oligonucleotide
cucaucuaagaguaccaag

SEQ ID NO: 2262813 - RNA, 19 nt, Artificial Sequence
  Description of Artificial Sequence: Synthetic oligonucleotide
aagcguggagcuuugucca

SEQ ID NO: 2262814 - RNA, 19 nt, Artificial Sequence
  Description of Artificial Sequence: Synthetic oligonucleotide
ucucgauagguguucaggu

SEQ ID NO: 2262815 - RNA, 19 nt, Artificial Sequence
  Description of Artificial Sequence: Synthetic oligonucleotide
uuaagucugacaucaucuc

SEQ ID NO: 2262816 - RNA, 19 nt, Artificial Sequence
  Description of Artificial Sequence: Synthetic oligonucleotide
aaugugauggcagcucaug

SEQ ID NO: 2262817 - RNA, 19 nt, Artificial Sequence
  Description of Artificial Sequence: Synthetic oligonucleotide
uggagcuuuguccacgcca

SEQ ID NO: 2262818 - RNA, 19 nt, Artificial Sequence
  Description of Artificial Sequence: Synthetic oligonucleotide
caacaaucuuguuaggauc

SEQ ID NO: 2262819 - RNA, 19 nt, Artificial Sequence
  Description of Artificial Sequence: Synthetic oligonucleotide
uacccguccaccagugugg

SEQ ID NO: 2262820 - RNA, 19 nt, Artificial Sequence
  Description of Artificial Sequence: Synthetic oligonucleotide
cucugugccugcaagucgg

SEQ ID NO: 2262821 - RNA, 19 nt, Artificial Sequence
  Description of Artificial Sequence: Synthetic oligonucleotide
aagcuuucuggguucucag

SEQ ID NO: 2262822 - RNA, 19 nt, Artificial Sequence
  Description of Artificial Sequence: Synthetic oligonucleotide
guuuagaugcuuuauccaa

SEQ ID NO: 2262823 - RNA, 19 nt, Artificial Sequence
  Description of Artificial Sequence: Synthetic oligonucleotide
acucccaacauacugguuu

SEQ ID NO: 2262824 - RNA, 19 nt, Artificial Sequence
  Description of Artificial Sequence: Synthetic oligonucleotide
ugguuaaggaaaugguagu

SEQ ID NO: 2262825 - RNA, 19 nt, Artificial Sequence
  Description of Artificial Sequence: Synthetic oligonucleotide
ugugguuuguuuagaugcu

SEQ ID NO: 2262826 - RNA, 19 nt, Artificial Sequence
  Description of Artificial Sequence: Synthetic oligonucleotide
agugucuucauuugggcuu

SEQ ID NO: 2262827 - RNA, 19 nt, Artificial Sequence
  Description of Artificial Sequence: Synthetic oligonucleotide
uagguguucagguacccgu

SEQ ID NO: 2262828 - RNA, 19 nt, Artificial Sequence
  Description of Artificial Sequence: Synthetic oligonucleotide
ucaucuuugagaugagauu

SEQ ID NO: 2262829 - RNA, 19 nt, Artificial Sequence
  Description of Artificial Sequence: Synthetic oligonucleotide
uuguaaagcucccuuguuu

SEQ ID NO: 2262830 - RNA, 19 nt, Artificial Sequence
  Description of Artificial Sequence: Synthetic oligonucleotide
cuaagaguaccaagcggag

SEQ ID NO: 2262831 - RNA, 19 nt, Artificial Sequence
  Description of Artificial Sequence: Synthetic oligonucleotide
uccucagaauccucacugg

SEQ ID NO: 2262832 - RNA, 19 nt, Artificial Sequence
  Description of Artificial Sequence: Synthetic oligonucleotide
gugguuaagucugacauca

SEQ ID NO: 2262833 - RNA, 19 nt, Artificial Sequence
  Description of Artificial Sequence: Synthetic oligonucleotide
ccaggauuuucaauaaagg

SEQ ID NO: 2262834 - RNA, 19 nt, Artificial Sequence
  Description of Artificial Sequence: Synthetic oligonucleotide
uggagcacgcccucaaagc

SEQ ID NO: 2262835 - RNA, 19 nt, Artificial Sequence
  Description of Artificial Sequence: Synthetic oligonucleotide
agaaaccaaugugagcuuc

SEQ ID NO: 2262836 - RNA, 19 nt, Artificial Sequence
  Description of Artificial Sequence: Synthetic oligonucleotide
aaaaugugguuaaggaaau

SEQ ID NO: 2262837 - RNA, 19 nt, Artificial Sequence
  Description of Artificial Sequence: Synthetic oligonucleotide
uguacuccuuggcagcucu

SEQ ID NO: 2262838 - RNA, 19 nt, Artificial Sequence
  Description of Artificial Sequence: Synthetic oligonucleotide
ucaugcccaaaacauuuuc

SEQ ID NO: 2262839 - RNA, 19 nt, Artificial Sequence
  Description of Artificial Sequence: Synthetic oligonucleotide
gucucuauauucuucacgu

SEQ ID NO: 2262840 - RNA, 19 nt, Artificial Sequence
  Description of Artificial Sequence: Synthetic oligonucleotide
gacaacaaucuuguuagga

SEQ ID NO: 2262841 - RNA, 19 nt, Artificial Sequence
  Description of Artificial Sequence: Synthetic oligonucleotide
uugagaugagauucaugac

SEQ ID NO: 2262842 - RNA, 19 nt, Artificial Sequence
  Description of Artificial Sequence: Synthetic oligonucleotide
caagucggucugcagaacc

SEQ ID NO: 2262843 - RNA, 19 nt, Artificial Sequence
  Description of Artificial Sequence: Synthetic oligonucleotide
gauccaugcucuugacucc

SEQ ID NO: 2262844 - RNA, 19 nt, Artificial Sequence
  Description of Artificial Sequence: Synthetic oligonucleotide
gaagaggucuugucaacca

SEQ ID NO: 2262845 - RNA, 19 nt, Artificial Sequence
  Description of Artificial Sequence: Synthetic oligonucleotide
uuucacuccuggaacacuu

SEQ ID NO: 2262846 - RNA, 19 nt, Artificial Sequence
  Description of Artificial Sequence: Synthetic oligonucleotide
ugcccaaaacauuuucacu

SEQ ID NO: 2262847 - RNA, 19 nt, Artificial Sequence
  Description of Artificial Sequence: Synthetic oligonucleotide
agugugguuaagucugaca

SEQ ID NO: 2262848 - RNA, 19 nt, Artificial Sequence
  Description of Artificial Sequence: Synthetic oligonucleotide
uaccaagcggaguggaagc

SEQ ID NO: 2262849 - RNA, 19 nt, Artificial Sequence
  Description of Artificial Sequence: Synthetic oligonucleotide
guuaaggaaaugguaguca

SEQ ID NO: 2262850 - RNA, 19 nt, Artificial Sequence
  Description of Artificial Sequence: Synthetic oligonucleotide
auaugagacuuugcugugg

SEQ ID NO: 2262851 - RNA, 19 nt, Artificial Sequence
  Description of Artificial Sequence: Synthetic oligonucleotide
cuuugagaugagauucaug

SEQ ID NO: 2262852 - RNA, 19 nt, Artificial Sequence
  Description of Artificial Sequence: Synthetic oligonucleotide
aucuuguuaggauccacau

SEQ ID NO: 2262853 - RNA, 19 nt, Artificial Sequence
  Description of Artificial Sequence: Synthetic oligonucleotide
gguagaagaggucuuguca

SEQ ID NO: 2262854 - RNA, 19 nt, Artificial Sequence
  Description of Artificial Sequence: Synthetic oligonucleotide
acccuguacuccuuggcag

SEQ ID NO: 2262855 - RNA, 19 nt, Artificial Sequence
  Description of Artificial Sequence: Synthetic oligonucleotide
gcccaaaacauuuucacuc

SEQ ID NO: 2262856 - RNA, 19 nt, Artificial Sequence
  Description of Artificial Sequence: Synthetic oligonucleotide
gaaagcguggagcuuuguc

SEQ ID NO: 2262857 - RNA, 19 nt, Artificial Sequence
  Description of Artificial Sequence: Synthetic oligonucleotide
cauuugggcuuuguaaagc

SEQ ID NO: 2262858 - RNA, 19 nt, Artificial Sequence
  Description of Artificial Sequence: Synthetic oligonucleotide
cagaauaugagacuuugcu

SEQ ID NO: 2262859 - RNA, 19 nt, Artificial Sequence
  Description of Artificial Sequence: Synthetic oligonucleotide
cuuugggugcagcaagggc

SEQ ID NO: 2262860 - RNA, 19 nt, Artificial Sequence
  Description of Artificial Sequence: Synthetic oligonucleotide
ugacucccaacauacuggu

SEQ ID NO: 2262861 - RNA, 19 nt, Artificial Sequence
  Description of Artificial Sequence: Synthetic oligonucleotide
caaguagguuguuuccaag

SEQ ID NO: 2262862 - RNA, 19 nt, Artificial Sequence
  Description of Artificial Sequence: Synthetic oligonucleotide
aagaggucuugucaaccau

SEQ ID NO: 2262863 - RNA, 19 nt, Artificial Sequence
  Description of Artificial Sequence: Synthetic oligonucleotide
aaaugugguuaaggaaaug

SEQ ID NO: 2262864 - RNA, 19 nt, Artificial Sequence
  Description of Artificial Sequence: Synthetic oligonucleotide
guuaagucugacaucaucu

SEQ ID NO: 2262865 - RNA, 19 nt, Artificial Sequence
  Description of Artificial Sequence: Synthetic oligonucleotide
uucaugggaggcagaauau

SEQ ID NO: 2262866 - RNA, 19 nt, Artificial Sequence
  Description of Artificial Sequence: Synthetic oligonucleotide
auccacaugcuggagcacg

SEQ ID NO: 2262867 - RNA, 19 nt, Artificial Sequence
  Description of Artificial Sequence: Synthetic oligonucleotide
guaccaagcggaguggaag

SEQ ID NO: 2262868 - RNA, 19 nt, Artificial Sequence
  Description of Artificial Sequence: Synthetic oligonucleotide
cacgccagaaguuuuacaa

SEQ ID NO: 2262869 - RNA, 19 nt, Artificial Sequence
  Description of Artificial Sequence: Synthetic oligonucleotide
ugcugugcgagucccuggc

SEQ ID NO: 2262870 - RNA, 19 nt, Artificial Sequence
  Description of Artificial Sequence: Synthetic oligonucleotide
gaaccuucucgauaggugu

SEQ ID NO: 2262871 - RNA, 19 nt, Artificial Sequence
  Description of Artificial Sequence: Synthetic oligonucleotide
caagcggaguggaagcaag

SEQ ID NO: 2262872 - RNA, 19 nt, Artificial Sequence
  Description of Artificial Sequence: Synthetic oligonucleotide
agcucucucucgccgcugc

SEQ ID NO: 2262873 - RNA, 19 nt, Artificial Sequence
  Description of Artificial Sequence: Synthetic oligonucleotide
guacccguccaccagugug

SEQ ID NO: 2262874 - RNA, 19 nt, Artificial Sequence
  Description of Artificial Sequence: Synthetic oligonucleotide
cuuggauccaugcucuuga

SEQ ID NO: 2262875 - RNA, 19 nt, Artificial Sequence
  Description of Artificial Sequence: Synthetic oligonucleotide
acucuucuccacaaaaugu

SEQ ID NO: 2262876 - RNA, 19 nt, Artificial Sequence
  Description of Artificial Sequence: Synthetic oligonucleotide
uguucagguacccguccac

SEQ ID NO: 2262877 - RNA, 19 nt, Artificial Sequence
  Description of Artificial Sequence: Synthetic oligonucleotide
auagaaagcguggagcuuu

SEQ ID NO: 2262878 - RNA, 19 nt, Artificial Sequence
  Description of Artificial Sequence: Synthetic oligonucleotide
agcugaaguagcucuucug

SEQ ID NO: 2262879 - RNA, 19 nt, Artificial Sequence
  Description of Artificial Sequence: Synthetic oligonucleotide
cuucaugggaggcagaaua

SEQ ID NO: 2262880 - RNA, 19 nt, Artificial Sequence
  Description of Artificial Sequence: Synthetic oligonucleotide
aacucucaucuuugagaug

SEQ ID NO: 2262881 - RNA, 19 nt, Artificial Sequence
  Description of Artificial Sequence: Synthetic oligonucleotide
ucacugcuuggauccaugc

SEQ ID NO: 2262882 - RNA, 19 nt, Artificial Sequence
  Description of Artificial Sequence: Synthetic oligonucleotide
uggcagcucucucucgccg

SEQ ID NO: 2262883 - RNA, 19 nt, Artificial Sequence
  Description of Artificial Sequence: Synthetic oligonucleotide
uguuuucuaccaucagcaa

SEQ ID NO: 2262884 - RNA, 19 nt, Artificial Sequence
  Description of Artificial Sequence: Synthetic oligonucleotide
cuucuggcccuguugacuc

SEQ ID NO: 2262885 - RNA, 19 nt, Artificial Sequence
  Description of Artificial Sequence: Synthetic oligonucleotide
uccacaugcuggagcacgc

SEQ ID NO: 2262886 - RNA, 19 nt, Artificial Sequence
  Description of Artificial Sequence: Synthetic oligonucleotide
uaccaucagcaacugcucu

SEQ ID NO: 2262887 - RNA, 19 nt, Artificial Sequence
  Description of Artificial Sequence: Synthetic oligonucleotide
caugcccaaaacauuuuca

SEQ ID NO: 2262888 - RNA, 19 nt, Artificial Sequence
  Description of Artificial Sequence: Synthetic oligonucleotide
uccacaaaaugugguuaag

SEQ ID NO: 2262889 - RNA, 19 nt, Artificial Sequence
  Description of Artificial Sequence: Synthetic oligonucleotide
auagguguucagguacccg

SEQ ID NO: 2262890 - RNA, 19 nt, Artificial Sequence
  Description of Artificial Sequence: Synthetic oligonucleotide
ucuccacaaaaugugguua

SEQ ID NO: 2262891 - RNA, 19 nt, Artificial Sequence
  Description of Artificial Sequence: Synthetic oligonucleotide
ugggagucagggagcaagc

SEQ ID NO: 2262892 - RNA, 19 nt, Artificial Sequence
  Description of Artificial Sequence: Synthetic oligonucleotide
guuguuuccaaggccagga

SEQ ID NO: 2262893 - RNA, 19 nt, Artificial Sequence
  Description of Artificial Sequence: Synthetic oligonucleotide
cuggagcacgcccucaaag

SEQ ID NO: 2262894 - RNA, 19 nt, Artificial Sequence
  Description of Artificial Sequence: Synthetic oligonucleotide
gauagguguucagguaccc

SEQ ID NO: 2262895 - RNA, 19 nt, Artificial Sequence
  Description of Artificial Sequence: Synthetic oligonucleotide
uugacucgguccucuuucc

SEQ ID NO: 2262896 - RNA, 19 nt, Artificial Sequence
  Description of Artificial Sequence: Synthetic oligonucleotide
gugugguuaagucugacau

SEQ ID NO: 2262897 - RNA, 19 nt, Artificial Sequence
  Description of Artificial Sequence: Synthetic oligonucleotide
aaccauacuucuguucaaa

SEQ ID NO: 2262898 - RNA, 19 nt, Artificial Sequence
  Description of Artificial Sequence: Synthetic oligonucleotide
aaagcucccuuguuuucua

SEQ ID NO: 2262899 - RNA, 19 nt, Artificial Sequence
  Description of Artificial Sequence: Synthetic oligonucleotide
uagaaagcguggagcuuug

SEQ ID NO: 2262900 - RNA, 19 nt, Artificial Sequence
  Description of Artificial Sequence: Synthetic oligonucleotide
ucggucugcagaaccuucu

SEQ ID NO: 2262901 - RNA, 19 nt, Artificial Sequence
  Description of Artificial Sequence: Synthetic oligonucleotide
uguugacucccaacauacu

SEQ ID NO: 2262902 - RNA, 19 nt, Artificial Sequence
  Description of Artificial Sequence: Synthetic oligonucleotide
uaagaguaccaagcggagu

SEQ ID NO: 2262903 - RNA, 19 nt, Artificial Sequence
  Description of Artificial Sequence: Synthetic oligonucleotide
uuuguccacgccagaaguu

SEQ ID NO: 2262904 - RNA, 19 nt, Artificial Sequence
  Description of Artificial Sequence: Synthetic oligonucleotide
gguuaagucugacaucauc

SEQ ID NO: 2262905 - RNA, 19 nt, Artificial Sequence
  Description of Artificial Sequence: Synthetic oligonucleotide
ccaaagugucuucauuugg

SEQ ID NO: 2262906 - RNA, 19 nt, Artificial Sequence
  Description of Artificial Sequence: Synthetic oligonucleotide
ucucaucuaagaguaccaa

SEQ ID NO: 2262907 - RNA, 19 nt, Artificial Sequence
  Description of Artificial Sequence: Synthetic oligonucleotide
ugacucgguccucuuuccc

SEQ ID NO: 2262908 - RNA, 19 nt, Artificial Sequence
  Description of Artificial Sequence: Synthetic oligonucleotide
cugacaucaucucaucuaa

SEQ ID NO: 2262909 - RNA, 19 nt, Artificial Sequence
  Description of Artificial Sequence: Synthetic oligonucleotide
cccaaaacauuuucacucc

SEQ ID NO: 2262910 - RNA, 19 nt, Artificial Sequence
  Description of Artificial Sequence: Synthetic oligonucleotide
uccaccagugugguuaagu

SEQ ID NO: 2262911 - RNA, 19 nt, Artificial Sequence
  Description of Artificial Sequence: Synthetic oligonucleotide
cauacugguuuguccucag

SEQ ID NO: 2262912 - RNA, 19 nt, Artificial Sequence
  Description of Artificial Sequence: Synthetic oligonucleotide
gcuuuguaaagcucccuug

SEQ ID NO: 2262913 - RNA, 19 nt, Artificial Sequence
  Description of Artificial Sequence: Synthetic oligonucleotide
agcaaguagguuguuucca

SEQ ID NO: 2262914 - RNA, 19 nt, Artificial Sequence
  Description of Artificial Sequence: Synthetic oligonucleotide
augugagcuucacucuucu

SEQ ID NO: 2262915 - RNA, 19 nt, Artificial Sequence
  Description of Artificial Sequence: Synthetic oligonucleotide
ucaucucaucuaagaguac

SEQ ID NO: 2262916 - RNA, 19 nt, Artificial Sequence
  Description of Artificial Sequence: Synthetic oligonucleotide
augagauucaugacauaga

SEQ ID NO: 2262917 - RNA, 19 nt, Artificial Sequence
  Description of Artificial Sequence: Synthetic oligonucleotide
agacuucaaagaaucuuca

SEQ ID NO: 2262918 - RNA, 19 nt, Artificial Sequence
  Description of Artificial Sequence: Synthetic oligonucleotide
ggcagaauaugagacuuug

SEQ ID NO: 2262919 - RNA, 19 nt, Artificial Sequence
  Description of Artificial Sequence: Synthetic oligonucleotide
accuucucgauagguguuc

SEQ ID NO: 2262920 - RNA, 19 nt, Artificial Sequence
  Description of Artificial Sequence: Synthetic oligonucleotide
acaccaaagugucuucauu

SEQ ID NO: 2262921 - RNA, 19 nt, Artificial Sequence
  Description of Artificial Sequence: Synthetic oligonucleotide
guaaagcucccuuguuuuc

SEQ ID NO: 2262922 - RNA, 19 nt, Artificial Sequence
  Description of Artificial Sequence: Synthetic oligonucleotide
ugccuuccuucaugggagg

SEQ ID NO: 2262923 - RNA, 19 nt, Artificial Sequence
  Description of Artificial Sequence: Synthetic oligonucleotide
agcguggagcuuuguccac

SEQ ID NO: 2262924 - RNA, 19 nt, Artificial Sequence
  Description of Artificial Sequence: Synthetic oligonucleotide
gguagucacugcuuggauc

SEQ ID NO: 2262925 - RNA, 19 nt, Artificial Sequence
  Description of Artificial Sequence: Synthetic oligonucleotide
uuggcagcucucucucgcc

SEQ ID NO: 2262926 - RNA, 19 nt, Artificial Sequence
  Description of Artificial Sequence: Synthetic oligonucleotide
cuucucgauagguguucag

SEQ ID NO: 2262927 - RNA, 19 nt, Artificial Sequence
  Description of Artificial Sequence: Synthetic oligonucleotide
ccacaaaaugugguuaagg

SEQ ID NO: 2262928 - RNA, 19 nt, Artificial Sequence
  Description of Artificial Sequence: Synthetic oligonucleotide
gagcacgcccucaaagcag

SEQ ID NO: 2262929 - RNA, 19 nt, Artificial Sequence
  Description of Artificial Sequence: Synthetic oligonucleotide
caugcucuugacuccaaaa

SEQ ID NO: 2262930 - RNA, 19 nt, Artificial Sequence
  Description of Artificial Sequence: Synthetic oligonucleotide
uucccugcugugcgagucc

SEQ ID NO: 2262931 - RNA, 19 nt, Artificial Sequence
  Description of Artificial Sequence: Synthetic oligonucleotide
gugauggcagcucaugugu

SEQ ID NO: 2262932 - RNA, 19 nt, Artificial Sequence
  Description of Artificial Sequence: Synthetic oligonucleotide
ggagcuuuguccacgccag

SEQ ID NO: 2262933 - RNA, 19 nt, Artificial Sequence
  Description of Artificial Sequence: Synthetic oligonucleotide
acauacugguuuguccuca

SEQ ID NO: 2262934 - RNA, 19 nt, Artificial Sequence
  Description of Artificial Sequence: Synthetic oligonucleotide
ugguagucacugcuuggau

SEQ ID NO: 2262935 - RNA, 19 nt, Artificial Sequence
  Description of Artificial Sequence: Synthetic oligonucleotide
gcggaguggaagcaaguag

SEQ ID NO: 2262936 - RNA, 19 nt, Artificial Sequence
  Description of Artificial Sequence: Synthetic oligonucleotide
gaggagacccugcgcauuc

SEQ ID NO: 2262937 - RNA, 19 nt, Artificial Sequence
  Description of Artificial Sequence: Synthetic oligonucleotide
agggccuuaugaggagacc

SEQ ID NO: 2262938 - RNA, 19 nt, Artificial Sequence
  Description of Artificial Sequence: Synthetic oligonucleotide
acgccagaaguuuuacaaa

SEQ ID NO: 2262939 - RNA, 19 nt, Artificial Sequence
  Description of Artificial Sequence: Synthetic oligonucleotide
gcuuuguccacgccagaag

SEQ ID NO: 2262940 - RNA, 19 nt, Artificial Sequence
  Description of Artificial Sequence: Synthetic oligonucleotide
gagauucaugacauagaaa

SEQ ID NO: 2262941 - RNA, 19 nt, Artificial Sequence
  Description of Artificial Sequence: Synthetic oligonucleotide
uuucccugcugugcgaguc

SEQ ID NO: 2262942 - RNA, 19 nt, Artificial Sequence
  Description of Artificial Sequence: Synthetic oligonucleotide
cucuauauucuucacguuu

SEQ ID NO: 2262943 - RNA, 19 nt, Artificial Sequence
  Description of Artificial Sequence: Synthetic oligonucleotide
ugucaaccauacuucuguu

SEQ ID NO: 2262944 - RNA, 19 nt, Artificial Sequence
  Description of Artificial Sequence: Synthetic oligonucleotide
caaucuuguuaggauccac

SEQ ID NO: 2262945 - RNA, 19 nt, Artificial Sequence
  Description of Artificial Sequence: Synthetic oligonucleotide
agcaacugcucuaucuccu

SEQ ID NO: 2262946 - RNA, 19 nt, Artificial Sequence
  Description of Artificial Sequence: Synthetic oligonucleotide
aggccaggauuuucaauaa

SEQ ID NO: 2262947 - RNA, 19 nt, Artificial Sequence
  Description of Artificial Sequence: Synthetic oligonucleotide
uucaaaucucaugcccaaa

SEQ ID NO: 2262948 - RNA, 19 nt, Artificial Sequence
  Description of Artificial Sequence: Synthetic oligonucleotide
agguguucagguacccguc

SEQ ID NO: 2262949 - RNA, 19 nt, Artificial Sequence
  Description of Artificial Sequence: Synthetic oligonucleotide
ucuggcccuguugacuccc

SEQ ID NO: 2262950 - RNA, 19 nt, Artificial Sequence
  Description of Artificial Sequence: Synthetic oligonucleotide
gcucugugccugcaagucg

SEQ ID NO: 2262951 - RNA, 19 nt, Artificial Sequence
  Description of Artificial Sequence: Synthetic oligonucleotide
gggccuuaugaggagaccc

SEQ ID NO: 2262952 - RNA, 19 nt, Artificial Sequence
  Description of Artificial Sequence: Synthetic oligonucleotide
ccuuaugaggagacccugc

SEQ ID NO: 2262953 - RNA, 19 nt, Artificial Sequence
  Description of Artificial Sequence: Synthetic oligonucleotide
uguccacgccagaaguuuu

SEQ ID NO: 2262954 - RNA, 19 nt, Artificial Sequence
  Description of Artificial Sequence: Synthetic oligonucleotide
ggacaacaaucuuguuagg

SEQ ID NO: 2262955 - RNA, 19 nt, Artificial Sequence
  Description of Artificial Sequence: Synthetic oligonucleotide
ugcuggagcacgcccucaa

SEQ ID NO: 2262956 - RNA, 19 nt, Artificial Sequence
  Description of Artificial Sequence: Synthetic oligonucleotide
caagcuuucuggguucuca

SEQ ID NO: 2262957 - RNA, 19 nt, Artificial Sequence
  Description of Artificial Sequence: Synthetic oligonucleotide
gacuucaaagaaucuucau

SEQ ID NO: 2262958 - RNA, 19 nt, Artificial Sequence
  Description of Artificial Sequence: Synthetic oligonucleotide
cugcugugcgagucccugg

SEQ ID NO: 2262959 - RNA, 19 nt, Artificial Sequence
  Description of Artificial Sequence: Synthetic oligonucleotide
acuucggccugucucuaua

SEQ ID NO: 2262960 - RNA, 19 nt, Artificial Sequence
  Description of Artificial Sequence: Synthetic oligonucleotide
ggagcacgcccucaaagca

SEQ ID NO: 2262961 - RNA, 19 nt, Artificial Sequence
  Description of Artificial Sequence: Synthetic oligonucleotide
acccugcgcauucacccug

SEQ ID NO: 2262962 - RNA, 19 nt, Artificial Sequence
  Description of Artificial Sequence: Synthetic oligonucleotide
gaggcagaauaugagacuu

SEQ ID NO: 2262963 - RNA, 19 nt, Artificial Sequence
  Description of Artificial Sequence: Synthetic oligonucleotide
augaggagacccugcgcau

SEQ ID NO: 2262964 - RNA, 19 nt, Artificial Sequence
  Description of Artificial Sequence: Synthetic oligonucleotide
uccacgccagaaguuuuac

SEQ ID NO: 2262965 - RNA, 19 nt, Artificial Sequence
  Description of Artificial Sequence: Synthetic oligonucleotide
gacucgguccucuuucccu

SEQ ID NO: 2262966 - RNA, 19 nt, Artificial Sequence
  Description of Artificial Sequence: Synthetic oligonucleotide
ucugugccugcaagucggu

SEQ ID NO: 2262967 - RNA, 19 nt, Artificial Sequence
  Description of Artificial Sequence: Synthetic oligonucleotide
cacccuguacuccuuggca

SEQ ID NO: 2262968 - RNA, 19 nt, Artificial Sequence
  Description of Artificial Sequence: Synthetic oligonucleotide
auccaugcucuugacucca

SEQ ID NO: 2262969 - RNA, 19 nt, Artificial Sequence
  Description of Artificial Sequence: Synthetic oligonucleotide
ggcagcucaugugugggag

SEQ ID NO: 2262970 - RNA, 19 nt, Artificial Sequence
  Description of Artificial Sequence: Synthetic oligonucleotide
ugguuaagucugacaucau

SEQ ID NO: 2262971 - RNA, 19 nt, Artificial Sequence
  Description of Artificial Sequence: Synthetic oligonucleotide
gguuuguuuagaugcuuua

SEQ ID NO: 2262972 - RNA, 19 nt, Artificial Sequence
  Description of Artificial Sequence: Synthetic oligonucleotide
agaugagauucaugacaua

SEQ ID NO: 2262973 - RNA, 19 nt, Artificial Sequence
  Description of Artificial Sequence: Synthetic oligonucleotide
aagcggaguggaagcaagu

SEQ ID NO: 2262974 - RNA, 19 nt, Artificial Sequence
  Description of Artificial Sequence: Synthetic oligonucleotide
caugcuggagcacgcccuc

SEQ ID NO: 2262975 - RNA, 19 nt, Artificial Sequence
  Description of Artificial Sequence: Synthetic oligonucleotide
cugcgcauucacccuguac

SEQ ID NO: 2262976 - RNA, 19 nt, Artificial Sequence
  Description of Artificial Sequence: Synthetic oligonucleotide
cucgauagguguucaggua

SEQ ID NO: 2262977 - RNA, 19 nt, Artificial Sequence
  Description of Artificial Sequence: Synthetic oligonucleotide
agcagacuucaaagaaucu

SEQ ID NO: 2262978 - RNA, 19 nt, Artificial Sequence
  Description of Artificial Sequence: Synthetic oligonucleotide
cucgguccucuuucccugc

SEQ ID NO: 2262979 - RNA, 19 nt, Artificial Sequence
  Description of Artificial Sequence: Synthetic oligonucleotide
cagcucaugugugggaguc

SEQ ID NO: 2262980 - RNA, 19 nt, Artificial Sequence
  Description of Artificial Sequence: Synthetic oligonucleotide
gaguaccaagcggagugga

SEQ ID NO: 2262981 - RNA, 19 nt, Artificial Sequence
  Description of Artificial Sequence: Synthetic oligonucleotide
gacaccaaagugucuucau

SEQ ID NO: 2262982 - RNA, 19 nt, Artificial Sequence
  Description of Artificial Sequence: Synthetic oligonucleotide
uucuggguucucaggucuu

SEQ ID NO: 2262983 - RNA, 19 nt, Artificial Sequence
  Description of Artificial Sequence: Synthetic oligonucleotide
gaaaugguagucacugcuu

SEQ ID NO: 2262984 - RNA, 19 nt, Artificial Sequence
  Description of Artificial Sequence: Synthetic oligonucleotide
ucgguccucuuucccugcu

SEQ ID NO: 2262985 - RNA, 19 nt, Artificial Sequence
  Description of Artificial Sequence: Synthetic oligonucleotide
aucucaugcccaaaacauu

SEQ ID NO: 2262986 - RNA, 19 nt, Artificial Sequence
  Description of Artificial Sequence: Synthetic oligonucleotide
gcaaguagguuguuuccaa

SEQ ID NO: 2262987 - RNA, 19 nt, Artificial Sequence
  Description of Artificial Sequence: Synthetic oligonucleotide
agcacgcccucaaagcaga

SEQ ID NO: 2262988 - RNA, 19 nt, Artificial Sequence
  Description of Artificial Sequence: Synthetic oligonucleotide
ccagaaguuuuacaaaaua

SEQ ID NO: 2262989 - RNA, 19 nt, Artificial Sequence
  Description of Artificial Sequence: Synthetic oligonucleotide
ucaggacaacaaucuuguu

SEQ ID NO: 2262990 - RNA, 19 nt, Artificial Sequence
  Description of Artificial Sequence: Synthetic oligonucleotide
ucucgccgcugcuucugga

SEQ ID NO: 2262991 - RNA, 19 nt, Artificial Sequence
  Description of Artificial Sequence: Synthetic oligonucleotide
gagcugaaguagcucuucu

SEQ ID NO: 2262992 - RNA, 19 nt, Artificial Sequence
  Description of Artificial Sequence: Synthetic oligonucleotide
uccaugcucuugacuccaa

SEQ ID NO: 2262993 - RNA, 19 nt, Artificial Sequence
  Description of Artificial Sequence: Synthetic oligonucleotide
cccuguacuccuuggcagc

SEQ ID NO: 2262994 - RNA, 19 nt, Artificial Sequence
  Description of Artificial Sequence: Synthetic oligonucleotide
ugaggagacccugcgcauu

SEQ ID NO: 2262995 - RNA, 19 nt, Artificial Sequence
  Description of Artificial Sequence: Synthetic oligonucleotide
agcggaguggaagcaagua

SEQ ID NO: 2262996 - RNA, 19 nt, Artificial Sequence
  Description of Artificial Sequence: Synthetic oligonucleotide
cugcuuggauccaugcucu

SEQ ID NO: 2262997 - RNA, 19 nt, Artificial Sequence
  Description of Artificial Sequence: Synthetic oligonucleotide
aguaccaagcggaguggaa

SEQ ID NO: 2262998 - RNA, 19 nt, Artificial Sequence
  Description of Artificial Sequence: Synthetic oligonucleotide
gauccacaugcuggagcac

SEQ ID NO: 2262999 - RNA, 19 nt, Artificial Sequence
  Description of Artificial Sequence: Synthetic oligonucleotide
cugcagaaccuucucgaua

SEQ ID NO: 2263000 - RNA, 19 nt, Artificial Sequence
  Description of Artificial Sequence: Synthetic oligonucleotide
ggagcaagcuuucuggguu

SEQ ID NO: 2263001 - RNA, 19 nt, Artificial Sequence
  Description of Artificial Sequence: Synthetic oligonucleotide
guggagcuuuguccacgcc

SEQ ID NO: 2263002 - RNA, 19 nt, Artificial Sequence
  Description of Artificial Sequence: Synthetic oligonucleotide
cagugugguuaagucugac

SEQ ID NO: 2263003 - RNA, 19 nt, Artificial Sequence
  Description of Artificial Sequence: Synthetic oligonucleotide
uggaacacuucggccuguc

SEQ ID NO: 2263004 - RNA, 19 nt, Artificial Sequence
  Description of Artificial Sequence: Synthetic oligonucleotide
caucagcaacugcucuauc

SEQ ID NO: 2263005 - RNA, 19 nt, Artificial Sequence
  Description of Artificial Sequence: Synthetic oligonucleotide
uggcccuguugacucccaa

SEQ ID NO: 2263006 - RNA, 19 nt, Artificial Sequence
  Description of Artificial Sequence: Synthetic oligonucleotide
agguacccguccaccagug

SEQ ID NO: 2263007 - RNA, 19 nt, Artificial Sequence
  Description of Artificial Sequence: Synthetic oligonucleotide
cuccaaaagcagacuucaa

SEQ ID NO: 2263008 - RNA, 19 nt, Artificial Sequence
  Description of Artificial Sequence: Synthetic oligonucleotide
agucggucugcagaaccuu

SEQ ID NO: 2263009 - RNA, 19 nt, Artificial Sequence
  Description of Artificial Sequence: Synthetic oligonucleotide
ggagacccugcgcauucac

SEQ ID NO: 2263010 - RNA, 19 nt, Artificial Sequence
  Description of Artificial Sequence: Synthetic oligonucleotide
agaaagcguggagcuuugu

SEQ ID NO: 2263011 - RNA, 19 nt, Artificial Sequence
  Description of Artificial Sequence: Synthetic oligonucleotide
ggagacaccaaagugucuu

SEQ ID NO: 2263012 - RNA, 19 nt, Artificial Sequence
  Description of Artificial Sequence: Synthetic oligonucleotide
gcgcauucacccuguacuc

SEQ ID NO: 2263013 - RNA, 19 nt, Artificial Sequence
  Description of Artificial Sequence: Synthetic oligonucleotide
gagcuuuguccacgccaga

SEQ ID NO: 2263014 - RNA, 19 nt, Artificial Sequence
  Description of Artificial Sequence: Synthetic oligonucleotide
gccuuaugaggagacccug

SEQ ID NO: 2263015 - RNA, 19 nt, Artificial Sequence
  Description of Artificial Sequence: Synthetic oligonucleotide
ggcucugugccugcaaguc

SEQ ID NO: 2263016 - RNA, 19 nt, Artificial Sequence
  Description of Artificial Sequence: Synthetic oligonucleotide
gcguggagcuuuguccacg

SEQ ID NO: 2263017 - RNA, 19 nt, Artificial Sequence
  Description of Artificial Sequence: Synthetic oligonucleotide
agcucaugugugggaguca

SEQ ID NO: 2263018 - RNA, 19 nt, Artificial Sequence
  Description of Artificial Sequence: Synthetic oligonucleotide
gcauucacccuguacuccu

SEQ ID NO: 2263019 - RNA, 19 nt, Artificial Sequence
  Description of Artificial Sequence: Synthetic oligonucleotide
cucgccgcugcuucuggaa

SEQ ID NO: 2263020 - RNA, 19 nt, Artificial Sequence
  Description of Artificial Sequence: Synthetic oligonucleotide
ccuuggcagcucucucucg

SEQ ID NO: 2263021 - RNA, 19 nt, Artificial Sequence
  Description of Artificial Sequence: Synthetic oligonucleotide
gacccugcgcauucacccu

SEQ ID NO: 2263022 - RNA, 19 nt, Artificial Sequence
  Description of Artificial Sequence: Synthetic oligonucleotide
cguggagcuuuguccacgc

SEQ ID NO: 2263023 - RNA, 19 nt, Artificial Sequence
  Description of Artificial Sequence: Synthetic oligonucleotide
ccuguugacucccaacaua

SEQ ID NO: 2263024 - RNA, 19 nt, Artificial Sequence
  Description of Artificial Sequence: Synthetic oligonucleotide
cacugcuuggauccaugcu

SEQ ID NO: 2263025 - RNA, 19 nt, Artificial Sequence
  Description of Artificial Sequence: Synthetic oligonucleotide
cuguacuccuuggcagcuc

SEQ ID NO: 2263026 - RNA, 19 nt, Artificial Sequence
  Description of Artificial Sequence: Synthetic oligonucleotide
ggaguggaagcaaguaggu

SEQ ID NO: 2263027 - RNA, 19 nt, Artificial Sequence
  Description of Artificial Sequence: Synthetic oligonucleotide
gggagcaagcuuucugggu

SEQ ID NO: 2263028 - RNA, 19 nt, Artificial Sequence
  Description of Artificial Sequence: Synthetic oligonucleotide
cugugccugcaagucgguc

SEQ ID NO: 2263029 - RNA, 19 nt, Artificial Sequence
  Description of Artificial Sequence: Synthetic oligonucleotide
ggccaggauuuucaauaaa

SEQ ID NO: 2263030 - RNA, 19 nt, Artificial Sequence
  Description of Artificial Sequence: Synthetic oligonucleotide
gaguggaagcaaguagguu

SEQ ID NO: 2263031 - RNA, 19 nt, Artificial Sequence
  Description of Artificial Sequence: Synthetic oligonucleotide
ccaaugugagcuucacucu

SEQ ID NO: 2263032 - RNA, 19 nt, Artificial Sequence
  Description of Artificial Sequence: Synthetic oligonucleotide
aggagacccugcgcauuca

SEQ ID NO: 2263033 - RNA, 19 nt, Artificial Sequence
  Description of Artificial Sequence: Synthetic oligonucleotide
acccguccaccaguguggu

SEQ ID NO: 2263034 - RNA, 19 nt, Artificial Sequence
  Description of Artificial Sequence: Synthetic oligonucleotide
uggaagcaaguagguuguu

SEQ ID NO: 2263035 - RNA, 19 nt, Artificial Sequence
  Description of Artificial Sequence: Synthetic oligonucleotide
cucaugcccaaaacauuuu

SEQ ID NO: 2263036 - RNA, 19 nt, Artificial Sequence
  Description of Artificial Sequence: Synthetic oligonucleotide
guccacgccagaaguuuua

SEQ ID NO: 2263037 - RNA, 19 nt, Artificial Sequence
  Description of Artificial Sequence: Synthetic oligonucleotide
ccguccaccagugugguua

SEQ ID NO: 2263038 - RNA, 19 nt, Artificial Sequence
  Description of Artificial Sequence: Synthetic oligonucleotide
cgagucccuggcuucuuug

SEQ ID NO: 2263039 - RNA, 19 nt, Artificial Sequence
  Description of Artificial Sequence: Synthetic oligonucleotide
cagaaaccaaugugagcuu

SEQ ID NO: 2263040 - RNA, 19 nt, Artificial Sequence
  Description of Artificial Sequence: Synthetic oligonucleotide
cauugacucgguccucuuu

SEQ ID NO: 2263041 - RNA, 19 nt, Artificial Sequence
  Description of Artificial Sequence: Synthetic oligonucleotide
cauagaaagcguggagcuu

SEQ ID NO: 2263042 - RNA, 19 nt, Artificial Sequence
  Description of Artificial Sequence: Synthetic oligonucleotide
cacgcccucaaagcagaaa

SEQ ID NO: 2263043 - RNA, 19 nt, Artificial Sequence
  Description of Artificial Sequence: Synthetic oligonucleotide
ccacaugcuggagcacgcc

SEQ ID NO: 2263044 - RNA, 19 nt, Artificial Sequence
  Description of Artificial Sequence: Synthetic oligonucleotide
cugugcgagucccuggcuu

SEQ ID NO: 2263045 - RNA, 19 nt, Artificial Sequence
  Description of Artificial Sequence: Synthetic oligonucleotide
gcaagucggucugcagaac

SEQ ID NO: 2263046 - RNA, 19 nt, Artificial Sequence
  Description of Artificial Sequence: Synthetic oligonucleotide
cuggcccuguugacuccca

SEQ ID NO: 2263047 - RNA, 19 nt, Artificial Sequence
  Description of Artificial Sequence: Synthetic oligonucleotide
ugcgagucccuggcuucuu

SEQ ID NO: 2263048 - RNA, 19 nt, Artificial Sequence
  Description of Artificial Sequence: Synthetic oligonucleotide
ccagugugguuaagucuga

SEQ ID NO: 2263049 - RNA, 19 nt, Artificial Sequence
  Description of Artificial Sequence: Synthetic oligonucleotide
ccacgccagaaguuuuaca

SEQ ID NO: 2263050 - RNA, 19 nt, Artificial Sequence
  Description of Artificial Sequence: Synthetic oligonucleotide
cagaauccucacuggcuuu

SEQ ID NO: 2263051 - RNA, 19 nt, Artificial Sequence
  Description of Artificial Sequence: Synthetic oligonucleotide
cagcucucucucgccgcug

SEQ ID NO: 2263052 - RNA, 19 nt, Artificial Sequence
  Description of Artificial Sequence: Synthetic oligonucleotide
gggguagaagaggucuugu

SEQ ID NO: 2263053 - RNA, 19 nt, Artificial Sequence
  Description of Artificial Sequence: Synthetic oligonucleotide
ccuucucgauagguguuca

SEQ ID NO: 2263054 - RNA, 19 nt, Artificial Sequence
  Description of Artificial Sequence: Synthetic oligonucleotide
cauucacccuguacuccuu

SEQ ID NO: 2263055 - RNA, 19 nt, Artificial Sequence
  Description of Artificial Sequence: Synthetic oligonucleotide
gcaggcucugugccugcaa

SEQ ID NO: 2263056 - RNA, 19 nt, Artificial Sequence
  Description of Artificial Sequence: Synthetic oligonucleotide
ccaugcucuugacuccaaa

SEQ ID NO: 2263057 - RNA, 19 nt, Artificial Sequence
  Description of Artificial Sequence: Synthetic oligonucleotide
gggagucagggagcaagcu

SEQ ID NO: 2263058 - RNA, 19 nt, Artificial Sequence
  Description of Artificial Sequence: Synthetic oligonucleotide
ggugcagcaagggccuuau

SEQ ID NO: 2263059 - RNA, 19 nt, Artificial Sequence
  Description of Artificial Sequence: Synthetic oligonucleotide
gguacccguccaccagugu

SEQ ID NO: 2263060 - RNA, 19 nt, Artificial Sequence
  Description of Artificial Sequence: Synthetic oligonucleotide
gacucccaacauacugguu

SEQ ID NO: 2263061 - RNA, 19 nt, Artificial Sequence
  Description of Artificial Sequence: Synthetic oligonucleotide
gugcgagucccuggcuucu

SEQ ID NO: 2263062 - RNA, 19 nt, Artificial Sequence
  Description of Artificial Sequence: Synthetic oligonucleotide
ggccugucucuauauucuu

SEQ ID NO: 2263063 - RNA, 19 nt, Artificial Sequence
  Description of Artificial Sequence: Synthetic oligonucleotide
gcugugcgagucccuggcu

SEQ ID NO: 2263064 - RNA, 19 nt, Artificial Sequence
  Description of Artificial Sequence: Synthetic oligonucleotide
cgguccucuuucccugcug

SEQ ID NO: 2263065 - RNA, 19 nt, Artificial Sequence
  Description of Artificial Sequence: Synthetic oligonucleotide
gggugcagcaagggccuua

SEQ ID NO: 2263066 - RNA, 19 nt, Artificial Sequence
  Description of Artificial Sequence: Synthetic oligonucleotide
ccauacaugcaggcucugu

SEQ ID NO: 2263067 - RNA, 19 nt, Artificial Sequence
  Description of Artificial Sequence: Synthetic oligonucleotide
cccuguugacucccaacau

SEQ ID NO: 2263068 - RNA, 19 nt, Artificial Sequence
  Description of Artificial Sequence: Synthetic oligonucleotide
cguccaccagugugguuaa

SEQ ID NO: 2263069 - RNA, 19 nt, Artificial Sequence
  Description of Artificial Sequence: Synthetic oligonucleotide
gcgagucccuggcuucuuu

SEQ ID NO: 2263070 - RNA, 19 nt, Artificial Sequence
  Description of Artificial Sequence: Synthetic oligonucleotide
gcacgcccucaaagcagaa

SEQ ID NO: 2263071 - RNA, 19 nt, Artificial Sequence
  Description of Artificial Sequence: Synthetic oligonucleotide
cccugcgcauucacccugu

SEQ ID NO: 2263072 - RNA, 19 nt, Artificial Sequence
  Description of Artificial Sequence: Synthetic oligonucleotide
ccugcgcauucacccugua

SEQ ID NO: 2263073 - RNA, 19 nt, Artificial Sequence
  Description of Artificial Sequence: Synthetic oligonucleotide
aauucagagaugcacuacc

SEQ ID NO: 2263074 - RNA, 19 nt, Artificial Sequence
  Description of Artificial Sequence: Synthetic oligonucleotide
aaucugggugcucuaaucc

SEQ ID NO: 2263075 - RNA, 19 nt, Artificial Sequence
  Description of Artificial Sequence: Synthetic oligonucleotide
ucaaugguagaaaacaggc

SEQ ID NO: 2263076 - RNA, 19 nt, Artificial Sequence
  Description of Artificial Sequence: Synthetic oligonucleotide
cuuuaaacguucaucaggg

SEQ ID NO: 2263077 - RNA, 19 nt, Artificial Sequence
  Description of Artificial Sequence: Synthetic oligonucleotide
aguauagcgagugagaagg

SEQ ID NO: 2263078 - RNA, 19 nt, Artificial Sequence
  Description of Artificial Sequence: Synthetic oligonucleotide
uuacgaaagcccuugauag

SEQ ID NO: 2263079 - RNA, 19 nt, Artificial Sequence
  Description of Artificial Sequence: Synthetic oligonucleotide
acuguuacaugugugaggc

SEQ ID NO: 2263080 - RNA, 19 nt, Artificial Sequence
  Description of Artificial Sequence: Synthetic oligonucleotide
aaagcuaccuccaaucugg

SEQ ID NO: 2263081 - RNA, 19 nt, Artificial Sequence
  Description of Artificial Sequence: Synthetic oligonucleotide
uuaaacguucaucagggug

SEQ ID NO: 2263082 - RNA, 19 nt, Artificial Sequence
  Description of Artificial Sequence: Synthetic oligonucleotide
uuauguaggagccaguccu

SEQ ID NO: 2263083 - RNA, 19 nt, Artificial Sequence
  Description of Artificial Sequence: Synthetic oligonucleotide
auccucacggcauugauac

SEQ ID NO: 2263084 - RNA, 19 nt, Artificial Sequence
  Description of Artificial Sequence: Synthetic oligonucleotide
aguugggauaaccuggggc

SEQ ID NO: 2263085 - RNA, 19 nt, Artificial Sequence
  Description of Artificial Sequence: Synthetic oligonucleotide
cucuuuagggguuagcugg

SEQ ID NO: 2263086 - RNA, 19 nt, Artificial Sequence
  Description of Artificial Sequence: Synthetic oligonucleotide
aaugagauacuguuacaug

SEQ ID NO: 2263087 - RNA, 19 nt, Artificial Sequence
  Description of Artificial Sequence: Synthetic oligonucleotide
uggaaugagauacuguuac

SEQ ID NO: 2263088 - RNA, 19 nt, Artificial Sequence
  Description of Artificial Sequence: Synthetic oligonucleotide
ugcauugcggaacugcugg

SEQ ID NO: 2263089 - RNA, 19 nt, Artificial Sequence
  Description of Artificial Sequence: Synthetic oligonucleotide
ucaucagggugccacaugg

SEQ ID NO: 2263090 - RNA, 19 nt, Artificial Sequence
  Description of Artificial Sequence: Synthetic oligonucleotide
caaucauccacaauucgcc

SEQ ID NO: 2263091 - RNA, 19 nt, Artificial Sequence
  Description of Artificial Sequence: Synthetic oligonucleotide
cauagugaaggcuccaccg

SEQ ID NO: 2263092 - RNA, 19 nt, Artificial Sequence
  Description of Artificial Sequence: Synthetic oligonucleotide
uggcuuuaaacguucauca

SEQ ID NO: 2263093 - RNA, 19 nt, Artificial Sequence
  Description of Artificial Sequence: Synthetic oligonucleotide
agaacaagggaguagaaua

SEQ ID NO: 2263094 - RNA, 19 nt, Artificial Sequence
  Description of Artificial Sequence: Synthetic oligonucleotide
gauacuguuacauguguga

SEQ ID NO: 2263095 - RNA, 19 nt, Artificial Sequence
  Description of Artificial Sequence: Synthetic oligonucleotide
gauacugccucugaagcgg

SEQ ID NO: 2263096 - RNA, 19 nt, Artificial Sequence
  Description of Artificial Sequence: Synthetic oligonucleotide
agguagaucauccgggagg

SEQ ID NO: 2263097 - RNA, 19 nt, Artificial Sequence
  Description of Artificial Sequence: Synthetic oligonucleotide
uuagggguuagcugguugg

SEQ ID NO: 2263098 - RNA, 19 nt, Artificial Sequence
  Description of Artificial Sequence: Synthetic oligonucleotide
auagugaaggcuccaccgc

SEQ ID NO: 2263099 - RNA, 19 nt, Artificial Sequence
  Description of Artificial Sequence: Synthetic oligonucleotide
ucagagaugcacuaccucu

SEQ ID NO: 2263100 - RNA, 19 nt, Artificial Sequence
  Description of Artificial Sequence: Synthetic oligonucleotide
ucuggaaugagauacuguu

SEQ ID NO: 2263101 - RNA, 19 nt, Artificial Sequence
  Description of Artificial Sequence: Synthetic oligonucleotide
uguuacaugugugaggcug

SEQ ID NO: 2263102 - RNA, 19 nt, Artificial Sequence
  Description of Artificial Sequence: Synthetic oligonucleotide
acgaaagcccuugauagcc

SEQ ID NO: 2263103 - RNA, 19 nt, Artificial Sequence
  Description of Artificial Sequence: Synthetic oligonucleotide
acggcauugauacugccuc

SEQ ID NO: 2263104 - RNA, 19 nt, Artificial Sequence
  Description of Artificial Sequence: Synthetic oligonucleotide
aaauucagagaugcacuac

SEQ ID NO: 2263105 - RNA, 19 nt, Artificial Sequence
  Description of Artificial Sequence: Synthetic oligonucleotide
uggagcucccucuuuaggg

SEQ ID NO: 2263106 - RNA, 19 nt, Artificial Sequence
  Description of Artificial Sequence: Synthetic oligonucleotide
accgcaaucauccacaauu

SEQ ID NO: 2263107 - RNA, 19 nt, Artificial Sequence
  Description of Artificial Sequence: Synthetic oligonucleotide
uggccuguaacucacuaug

SEQ ID NO: 2263108 - RNA, 19 nt, Artificial Sequence
  Description of Artificial Sequence: Synthetic oligonucleotide
ugauacugccucugaagcg

SEQ ID NO: 2263109 - RNA, 19 nt, Artificial Sequence
  Description of Artificial Sequence: Synthetic oligonucleotide
uacuguuacaugugugagg

SEQ ID NO: 2263110 - RNA, 19 nt, Artificial Sequence
  Description of Artificial Sequence: Synthetic oligonucleotide
caagggaguagaauagagg

SEQ ID NO: 2263111 - RNA, 19 nt, Artificial Sequence
  Description of Artificial Sequence: Synthetic oligonucleotide
augacacccauagugaagg

SEQ ID NO: 2263112 - RNA, 19 nt, Artificial Sequence
  Description of Artificial Sequence: Synthetic oligonucleotide
ugcgccacauuucaaaacu

SEQ ID NO: 2263113 - RNA, 19 nt, Artificial Sequence
  Description of Artificial Sequence: Synthetic oligonucleotide
ggugcucuaauccucacgg

SEQ ID NO: 2263114 - RNA, 19 nt, Artificial Sequence
  Description of Artificial Sequence: Synthetic oligonucleotide
uugauagccuggaagacuc

SEQ ID NO: 2263115 - RNA, 19 nt, Artificial Sequence
  Description of Artificial Sequence: Synthetic oligonucleotide
ugcucuaauccucacggca

SEQ ID NO: 2263116 - RNA, 19 nt, Artificial Sequence
  Description of Artificial Sequence: Synthetic oligonucleotide
uacaaggccacagucaaug

SEQ ID NO: 2263117 - RNA, 19 nt, Artificial Sequence
  Description of Artificial Sequence: Synthetic oligonucleotide
ucgaagucuuacaaggcca

SEQ ID NO: 2263118 - RNA, 19 nt, Artificial Sequence
  Description of Artificial Sequence: Synthetic oligonucleotide
aguuucaggguuauguagg

SEQ ID NO: 2263119 - RNA, 19 nt, Artificial Sequence
  Description of Artificial Sequence: Synthetic oligonucleotide
agagaugcacuaccucugc

SEQ ID NO: 2263120 - RNA, 19 nt, Artificial Sequence
  Description of Artificial Sequence: Synthetic oligonucleotide
aagucuuacaaggccacag

SEQ ID NO: 2263121 - RNA, 19 nt, Artificial Sequence
  Description of Artificial Sequence: Synthetic oligonucleotide
agcggugucguauuccaac

SEQ ID NO: 2263122 - RNA, 19 nt, Artificial Sequence
  Description of Artificial Sequence: Synthetic oligonucleotide
aaacguucaucagggugcc

SEQ ID NO: 2263123 - RNA, 19 nt, Artificial Sequence
  Description of Artificial Sequence: Synthetic oligonucleotide
auuacgaaagcccuugaua

SEQ ID NO: 2263124 - RNA, 19 nt, Artificial Sequence
  Description of Artificial Sequence: Synthetic oligonucleotide
gauaaccuggggcuggagc

SEQ ID NO: 2263125 - RNA, 19 nt, Artificial Sequence
  Description of Artificial Sequence: Synthetic oligonucleotide
ugcaaagcuaccuccaauc

SEQ ID NO: 2263126 - RNA, 19 nt, Artificial Sequence
  Description of Artificial Sequence: Synthetic oligonucleotide
cucgaagucuuacaaggcc

SEQ ID NO: 2263127 - RNA, 19 nt, Artificial Sequence
  Description of Artificial Sequence: Synthetic oligonucleotide
caaugguagaaaacaggcc

SEQ ID NO: 2263128 - RNA, 19 nt, Artificial Sequence
  Description of Artificial Sequence: Synthetic oligonucleotide
uagaauagaggcccucucu

SEQ ID NO: 2263129 - RNA, 19 nt, Artificial Sequence
  Description of Artificial Sequence: Synthetic oligonucleotide
cugaggaguagcuccacgg

SEQ ID NO: 2263130 - RNA, 19 nt, Artificial Sequence
  Description of Artificial Sequence: Synthetic oligonucleotide
uuuagggguuagcugguug

SEQ ID NO: 2263131 - RNA, 19 nt, Artificial Sequence
  Description of Artificial Sequence: Synthetic oligonucleotide
uccaccgcaaucauccaca

SEQ ID NO: 2263132 - RNA, 19 nt, Artificial Sequence
  Description of Artificial Sequence: Synthetic oligonucleotide
aacgcuccacuggugaugg

SEQ ID NO: 2263133 - RNA, 19 nt, Artificial Sequence
  Description of Artificial Sequence: Synthetic oligonucleotide
uggaggaucuggaaugaga

SEQ ID NO: 2263134 - RNA, 19 nt, Artificial Sequence
  Description of Artificial Sequence: Synthetic oligonucleotide
gcuuguuucuuugagacag

SEQ ID NO: 2263135 - RNA, 19 nt, Artificial Sequence
  Description of Artificial Sequence: Synthetic oligonucleotide
aaggggaccaagugacaag

SEQ ID NO: 2263136 - RNA, 19 nt, Artificial Sequence
  Description of Artificial Sequence: Synthetic oligonucleotide
acugcgugcagccagcacu

SEQ ID NO: 2263137 - RNA, 19 nt, Artificial Sequence
  Description of Artificial Sequence: Synthetic oligonucleotide
gaugcacuaccucugccug

SEQ ID NO: 2263138 - RNA, 19 nt, Artificial Sequence
  Description of Artificial Sequence: Synthetic oligonucleotide
guagaaaacaggccucccc

SEQ ID NO: 2263139 - RNA, 19 nt, Artificial Sequence
  Description of Artificial Sequence: Synthetic oligonucleotide
cucgaugagggccaacagg

SEQ ID NO: 2263140 - RNA, 19 nt, Artificial Sequence
  Description of Artificial Sequence: Synthetic oligonucleotide
aaacuggcuuuaaacguuc

SEQ ID NO: 2263141 - RNA, 19 nt, Artificial Sequence
  Description of Artificial Sequence: Synthetic oligonucleotide
cucccuuggagguagauca

SEQ ID NO: 2263142 - RNA, 19 nt, Artificial Sequence
  Description of Artificial Sequence: Synthetic oligonucleotide
aagacuccaccaccaauga

SEQ ID NO: 2263143 - RNA, 19 nt, Artificial Sequence
  Description of Artificial Sequence: Synthetic oligonucleotide
ucauccgggaggaaacuga

SEQ ID NO: 2263144 - RNA, 19 nt, Artificial Sequence
  Description of Artificial Sequence: Synthetic oligonucleotide
gcuaccuccaaucugggug

SEQ ID NO: 2263145 - RNA, 19 nt, Artificial Sequence
  Description of Artificial Sequence: Synthetic oligonucleotide
augccaacacccucgauga

SEQ ID NO: 2263146 - RNA, 19 nt, Artificial Sequence
  Description of Artificial Sequence: Synthetic oligonucleotide
acacccauagugaaggcuc

SEQ ID NO: 2263147 - RNA, 19 nt, Artificial Sequence
  Description of Artificial Sequence: Synthetic oligonucleotide
guuauguaggagccagucc

SEQ ID NO: 2263148 - RNA, 19 nt, Artificial Sequence
  Description of Artificial Sequence: Synthetic oligonucleotide
agggccaacaggaugcccc

SEQ ID NO: 2263149 - RNA, 19 nt, Artificial Sequence
  Description of Artificial Sequence: Synthetic oligonucleotide
agaugcacuaccucugccu

SEQ ID NO: 2263150 - RNA, 19 nt, Artificial Sequence
  Description of Artificial Sequence: Synthetic oligonucleotide
cuaccuccaaucugggugc

SEQ ID NO: 2263151 - RNA, 19 nt, Artificial Sequence
  Description of Artificial Sequence: Synthetic oligonucleotide
agaucauccgggaggaaac

SEQ ID NO: 2263152 - RNA, 19 nt, Artificial Sequence
  Description of Artificial Sequence: Synthetic oligonucleotide
uaccacagaacaagggagu

SEQ ID NO: 2263153 - RNA, 19 nt, Artificial Sequence
  Description of Artificial Sequence: Synthetic oligonucleotide
acguucaucagggugccac

SEQ ID NO: 2263154 - RNA, 19 nt, Artificial Sequence
  Description of Artificial Sequence: Synthetic oligonucleotide
ucuuccuugccucgaaguc

SEQ ID NO: 2263155 - RNA, 19 nt, Artificial Sequence
  Description of Artificial Sequence: Synthetic oligonucleotide
uggccagcggaccacugcg

SEQ ID NO: 2263156 - RNA, 19 nt, Artificial Sequence
  Description of Artificial Sequence: Synthetic oligonucleotide
ugccacauggaggaucugg

SEQ ID NO: 2263157 - RNA, 19 nt, Artificial Sequence
  Description of Artificial Sequence: Synthetic oligonucleotide
aaaacuggcuuuaaacguu

SEQ ID NO: 2263158 - RNA, 19 nt, Artificial Sequence
  Description of Artificial Sequence: Synthetic oligonucleotide
agcacugcuccagucaacg

SEQ ID NO: 2263159 - RNA, 19 nt, Artificial Sequence
  Description of Artificial Sequence: Synthetic oligonucleotide
agucaaugguagaaaacag

SEQ ID NO: 2263160 - RNA, 19 nt, Artificial Sequence
  Description of Artificial Sequence: Synthetic oligonucleotide
uagccuggaagacuccacc

SEQ ID NO: 2263161 - RNA, 19 nt, Artificial Sequence
  Description of Artificial Sequence: Synthetic oligonucleotide
caagacaggguucucugug

SEQ ID NO: 2263162 - RNA, 19 nt, Artificial Sequence
  Description of Artificial Sequence: Synthetic oligonucleotide
gggaguagaauagaggccc

SEQ ID NO: 2263163 - RNA, 19 nt, Artificial Sequence
  Description of Artificial Sequence: Synthetic oligonucleotide
cauugcagagcccaccaug

SEQ ID NO: 2263164 - RNA, 19 nt, Artificial Sequence
  Description of Artificial Sequence: Synthetic oligonucleotide
gaccaagugacaaggcugc

SEQ ID NO: 2263165 - RNA, 19 nt, Artificial Sequence
  Description of Artificial Sequence: Synthetic oligonucleotide
aucauugcagagcccacca

SEQ ID NO: 2263166 - RNA, 19 nt, Artificial Sequence
  Description of Artificial Sequence: Synthetic oligonucleotide
aacaagggaguagaauaga

SEQ ID NO: 2263167 - RNA, 19 nt, Artificial Sequence
  Description of Artificial Sequence: Synthetic oligonucleotide
gaggaguagcuccacggug

SEQ ID NO: 2263168 - RNA, 19 nt, Artificial Sequence
  Description of Artificial Sequence: Synthetic oligonucleotide
ggugucguauuccaacggg

SEQ ID NO: 2263169 - RNA, 19 nt, Artificial Sequence
  Description of Artificial Sequence: Synthetic oligonucleotide
aggguuauguaggagccag

SEQ ID NO: 2263170 - RNA, 19 nt, Artificial Sequence
  Description of Artificial Sequence: Synthetic oligonucleotide
uucagagaugcacuaccuc

SEQ ID NO: 2263171 - RNA, 19 nt, Artificial Sequence
  Description of Artificial Sequence: Synthetic oligonucleotide
gaucuggaaugagauacug

SEQ ID NO: 2263172 - RNA, 19 nt, Artificial Sequence
  Description of Artificial Sequence: Synthetic oligonucleotide
aggaguagcuccacggugg

SEQ ID NO: 2263173 - RNA, 19 nt, Artificial Sequence
  Description of Artificial Sequence: Synthetic oligonucleotide
cuuacaaggccacagucaa

SEQ ID NO: 2263174 - RNA, 19 nt, Artificial Sequence
  Description of Artificial Sequence: Synthetic oligonucleotide
acuaccucugccugcugag

SEQ ID NO: 2263175 - RNA, 19 nt, Artificial Sequence
  Description of Artificial Sequence: Synthetic oligonucleotide
accccuaccacagaacaag

SEQ ID NO: 2263176 - RNA, 19 nt, Artificial Sequence
  Description of Artificial Sequence: Synthetic oligonucleotide
guuacaugugugaggcugg

SEQ ID NO: 2263177 - RNA, 19 nt, Artificial Sequence
  Description of Artificial Sequence: Synthetic oligonucleotide
gugagaaggaugccaacac

SEQ ID NO: 2263178 - RNA, 19 nt, Artificial Sequence
  Description of Artificial Sequence: Synthetic oligonucleotide
uugccucgaagucuuacaa

SEQ ID NO: 2263179 - RNA, 19 nt, Artificial Sequence
  Description of Artificial Sequence: Synthetic oligonucleotide
gaagcggugucguauucca

SEQ ID NO: 2263180 - RNA, 19 nt, Artificial Sequence
  Description of Artificial Sequence: Synthetic oligonucleotide
gaaggcuccaccgcaauca

SEQ ID NO: 2263181 - RNA, 19 nt, Artificial Sequence
  Description of Artificial Sequence: Synthetic oligonucleotide
auagcgagugagaaggaug

SEQ ID NO: 2263182 - RNA, 19 nt, Artificial Sequence
  Description of Artificial Sequence: Synthetic oligonucleotide
guugggauaaccuggggcu

SEQ ID NO: 2263183 - RNA, 19 nt, Artificial Sequence
  Description of Artificial Sequence: Synthetic oligonucleotide
uuuaaacguucaucagggu

SEQ ID NO: 2263184 - RNA, 19 nt, Artificial Sequence
  Description of Artificial Sequence: Synthetic oligonucleotide
ugccucgaagucuuacaag

SEQ ID NO: 2263185 - RNA, 19 nt, Artificial Sequence
  Description of Artificial Sequence: Synthetic oligonucleotide
augcacuaccucugccugc

SEQ ID NO: 2263186 - RNA, 19 nt, Artificial Sequence
  Description of Artificial Sequence: Synthetic oligonucleotide
agucuuacaaggccacagu

SEQ ID NO: 2263187 - RNA, 19 nt, Artificial Sequence
  Description of Artificial Sequence: Synthetic oligonucleotide
auugcggaacugcugggca

SEQ ID NO: 2263188 - RNA, 19 nt, Artificial Sequence
  Description of Artificial Sequence: Synthetic oligonucleotide
uaccucugccugcugagca

SEQ ID NO: 2263189 - RNA, 19 nt, Artificial Sequence
  Description of Artificial Sequence: Synthetic oligonucleotide
caaaacuggcuuuaaacgu

SEQ ID NO: 2263190 - RNA, 19 nt, Artificial Sequence
  Description of Artificial Sequence: Synthetic oligonucleotide
cuggcuuuaaacguucauc

SEQ ID NO: 2263191 - RNA, 19 nt, Artificial Sequence
  Description of Artificial Sequence: Synthetic oligonucleotide
ucuuuagggguuagcuggu

SEQ ID NO: 2263192 - RNA, 19 nt, Artificial Sequence
  Description of Artificial Sequence: Synthetic oligonucleotide
caguauagcgagugagaag

SEQ ID NO: 2263193 - RNA, 19 nt, Artificial Sequence
  Description of Artificial Sequence: Synthetic oligonucleotide
ugugcgccacauuucaaaa

SEQ ID NO: 2263194 - RNA, 19 nt, Artificial Sequence
  Description of Artificial Sequence: Synthetic oligonucleotide
augguagaaaacaggccuc

SEQ ID NO: 2263195 - RNA, 19 nt, Artificial Sequence
  Description of Artificial Sequence: Synthetic oligonucleotide
agacuccaccaccaaugac

SEQ ID NO: 2263196 - RNA, 19 nt, Artificial Sequence
  Description of Artificial Sequence: Synthetic oligonucleotide
gaccacugcgugcagccag

SEQ ID NO: 2263197 - RNA, 19 nt, Artificial Sequence
  Description of Artificial Sequence: Synthetic oligonucleotide
aucugggugcucuaauccu

SEQ ID NO: 2263198 - RNA, 19 nt, Artificial Sequence
  Description of Artificial Sequence: Synthetic oligonucleotide
aaggccacagucaauggua

SEQ ID NO: 2263199 - RNA, 19 nt, Artificial Sequence
  Description of Artificial Sequence: Synthetic oligonucleotide
gcaaucauccacaauucgc

SEQ ID NO: 2263200 - RNA, 19 nt, Artificial Sequence
  Description of Artificial Sequence: Synthetic oligonucleotide
gugucguauuccaacgggg

SEQ ID NO: 2263201 - RNA, 19 nt, Artificial Sequence
  Description of Artificial Sequence: Synthetic oligonucleotide
cucacggcauugauacugc

SEQ ID NO: 2263202 - RNA, 19 nt, Artificial Sequence
  Description of Artificial Sequence: Synthetic oligonucleotide
caaucugggugcucuaauc

SEQ ID NO: 2263203 - RNA, 19 nt, Artificial Sequence
  Description of Artificial Sequence: Synthetic oligonucleotide
ugggauaaccuggggcugg

SEQ ID NO: 2263204 - RNA, 19 nt, Artificial Sequence
  Description of Artificial Sequence: Synthetic oligonucleotide
gccucaaauucagagaugc

SEQ ID NO: 2263205 - RNA, 19 nt, Artificial Sequence
  Description of Artificial Sequence: Synthetic oligonucleotide
uauguaggagccaguccuc

SEQ ID NO: 2263206 - RNA, 19 nt, Artificial Sequence
  Description of Artificial Sequence: Synthetic oligonucleotide
ugggguccuccaagaaugg

SEQ ID NO: 2263207 - RNA, 19 nt, Artificial Sequence
  Description of Artificial Sequence: Synthetic oligonucleotide
uguaggagccaguccuccc

SEQ ID NO: 2263208 - RNA, 19 nt, Artificial Sequence
  Description of Artificial Sequence: Synthetic oligonucleotide
uaauccucacggcauugau

SEQ ID NO: 2263209 - RNA, 19 nt, Artificial Sequence
  Description of Artificial Sequence: Synthetic oligonucleotide
ugaagcggugucguauucc

SEQ ID NO: 2263210 - RNA, 19 nt, Artificial Sequence
  Description of Artificial Sequence: Synthetic oligonucleotide
ucaagacaggguucucugu

SEQ ID NO: 2263211 - RNA, 19 nt, Artificial Sequence
  Description of Artificial Sequence: Synthetic oligonucleotide
gucuuacaaggccacaguc

SEQ ID NO: 2263212 - RNA, 19 nt, Artificial Sequence
  Description of Artificial Sequence: Synthetic oligonucleotide
ucuaauccucacggcauug

SEQ ID NO: 2263213 - RNA, 19 nt, Artificial Sequence
  Description of Artificial Sequence: Synthetic oligonucleotide
aaacugaggaguagcucca

SEQ ID NO: 2263214 - RNA, 19 nt, Artificial Sequence
  Description of Artificial Sequence: Synthetic oligonucleotide
gagcccaccauggccagcg

SEQ ID NO: 2263215 - RNA, 19 nt, Artificial Sequence
  Description of Artificial Sequence: Synthetic oligonucleotide
cauccgggaggaaacugag

SEQ ID NO: 2263216 - RNA, 19 nt, Artificial Sequence
  Description of Artificial Sequence: Synthetic oligonucleotide
aggugugcgccacauuuca

SEQ ID NO: 2263217 - RNA, 19 nt, Artificial Sequence
  Description of Artificial Sequence: Synthetic oligonucleotide
agauacuguuacaugugug

SEQ ID NO: 2263218 - RNA, 19 nt, Artificial Sequence
  Description of Artificial Sequence: Synthetic oligonucleotide
cagggugccacauggagga

SEQ ID NO: 2263219 - RNA, 19 nt, Artificial Sequence
  Description of Artificial Sequence: Synthetic oligonucleotide
gagaugcacuaccucugcc

SEQ ID NO: 2263220 - RNA, 19 nt, Artificial Sequence
  Description of Artificial Sequence: Synthetic oligonucleotide
agccaguccucccuuggag

SEQ ID NO: 2263221 - RNA, 19 nt, Artificial Sequence
  Description of Artificial Sequence: Synthetic oligonucleotide
uccagucaacgcuccacug

SEQ ID NO: 2263222 - RNA, 19 nt, Artificial Sequence
  Description of Artificial Sequence: Synthetic oligonucleotide
gaacugcugggcaguauag

SEQ ID NO: 2263223 - RNA, 19 nt, Artificial Sequence
  Description of Artificial Sequence: Synthetic oligonucleotide
uauagcgagugagaaggau

SEQ ID NO: 2263224 - RNA, 19 nt, Artificial Sequence
  Description of Artificial Sequence: Synthetic oligonucleotide
ucuguguaacagcucuuuu

SEQ ID NO: 2263225 - RNA, 19 nt, Artificial Sequence
  Description of Artificial Sequence: Synthetic oligonucleotide
uagggguuagcugguuggg

SEQ ID NO: 2263226 - RNA, 19 nt, Artificial Sequence
  Description of Artificial Sequence: Synthetic oligonucleotide
guagaauagaggcccucuc

SEQ ID NO: 2263227 - RNA, 19 nt, Artificial Sequence
  Description of Artificial Sequence: Synthetic oligonucleotide
caucauugcagagcccacc

SEQ ID NO: 2263228 - RNA, 19 nt, Artificial Sequence
  Description of Artificial Sequence: Synthetic oligonucleotide
ggcuuuaaacguucaucag

SEQ ID NO: 2263229 - RNA, 19 nt, Artificial Sequence
  Description of Artificial Sequence: Synthetic oligonucleotide
gucaacgcuccacugguga

SEQ ID NO: 2263230 - RNA, 19 nt, Artificial Sequence
  Description of Artificial Sequence: Synthetic oligonucleotide
ucugaagcggugucguauu

SEQ ID NO: 2263231 - RNA, 19 nt, Artificial Sequence
  Description of Artificial Sequence: Synthetic oligonucleotide
ugauagccuggaagacucc

SEQ ID NO: 2263232 - RNA, 19 nt, Artificial Sequence
  Description of Artificial Sequence: Synthetic oligonucleotide
ugcacuaccucugccugcu

SEQ ID NO: 2263233 - RNA, 19 nt, Artificial Sequence
  Description of Artificial Sequence: Synthetic oligonucleotide
gauagccuggaagacucca

SEQ ID NO: 2263234 - RNA, 19 nt, Artificial Sequence
  Description of Artificial Sequence: Synthetic oligonucleotide
acuggcuuuaaacguucau

SEQ ID NO: 2263235 - RNA, 19 nt, Artificial Sequence
  Description of Artificial Sequence: Synthetic oligonucleotide
cacccauagugaaggcucc

SEQ ID NO: 2263236 - RNA, 19 nt, Artificial Sequence
  Description of Artificial Sequence: Synthetic oligonucleotide
uacaugugugaggcugggg

SEQ ID NO: 2263237 - RNA, 19 nt, Artificial Sequence
  Description of Artificial Sequence: Synthetic oligonucleotide
auucagagaugcacuaccu

SEQ ID NO: 2263238 - RNA, 19 nt, Artificial Sequence
  Description of Artificial Sequence: Synthetic oligonucleotide
cuugccucgaagucuuaca

SEQ ID NO: 2263239 - RNA, 19 nt, Artificial Sequence
  Description of Artificial Sequence: Synthetic oligonucleotide
cauugcggaacugcugggc

SEQ ID NO: 2263240 - RNA, 19 nt, Artificial Sequence
  Description of Artificial Sequence: Synthetic oligonucleotide
cugggcaguauagcgagug

SEQ ID NO: 2263241 - RNA, 19 nt, Artificial Sequence
  Description of Artificial Sequence: Synthetic oligonucleotide
ugggcaguauagcgaguga

SEQ ID NO: 2263242 - RNA, 19 nt, Artificial Sequence
  Description of Artificial Sequence: Synthetic oligonucleotide
aaaaggggaccaagugaca

SEQ ID NO: 2263243 - RNA, 19 nt, Artificial Sequence
  Description of Artificial Sequence: Synthetic oligonucleotide
gcccuugauagccuggaag

SEQ ID NO: 2263244 - RNA, 19 nt, Artificial Sequence
  Description of Artificial Sequence: Synthetic oligonucleotide
ggcauuacgaaagcccuug

SEQ ID NO: 2263245 - RNA, 19 nt, Artificial Sequence
  Description of Artificial Sequence: Synthetic oligonucleotide
uugggauaaccuggggcug

SEQ ID NO: 2263246 - RNA, 19 nt, Artificial Sequence
  Description of Artificial Sequence: Synthetic oligonucleotide
aggggucuuccuugccucg

SEQ ID NO: 2263247 - RNA, 19 nt, Artificial Sequence
  Description of Artificial Sequence: Synthetic oligonucleotide
agcgagugagaaggaugcc

SEQ ID NO: 2263248 - RNA, 19 nt, Artificial Sequence
  Description of Artificial Sequence: Synthetic oligonucleotide
aaggcuccaccgcaaucau

SEQ ID NO: 2263249 - RNA, 19 nt, Artificial Sequence
  Description of Artificial Sequence: Synthetic oligonucleotide
aauccucacggcauugaua

SEQ ID NO: 2263250 - RNA, 19 nt, Artificial Sequence
  Description of Artificial Sequence: Synthetic oligonucleotide
gcggugucguauuccaacg

SEQ ID NO: 2263251 - RNA, 19 nt, Artificial Sequence
  Description of Artificial Sequence: Synthetic oligonucleotide
gccaacacccucgaugagg

SEQ ID NO: 2263252 - RNA, 19 nt, Artificial Sequence
  Description of Artificial Sequence: Synthetic oligonucleotide
ucacggcauugauacugcc

SEQ ID NO: 2263253 - RNA, 19 nt, Artificial Sequence
  Description of Artificial Sequence: Synthetic oligonucleotide
ccagucaacgcuccacugg

SEQ ID NO: 2263254 - RNA, 19 nt, Artificial Sequence
  Description of Artificial Sequence: Synthetic oligonucleotide
ugacacccauagugaaggc

SEQ ID NO: 2263255 - RNA, 19 nt, Artificial Sequence
  Description of Artificial Sequence: Synthetic oligonucleotide
cugcgugcagccagcacug

SEQ ID NO: 2263256 - RNA, 19 nt, Artificial Sequence
  Description of Artificial Sequence: Synthetic oligonucleotide
gguuauguaggagccaguc

SEQ ID NO: 2263257 - RNA, 19 nt, Artificial Sequence
  Description of Artificial Sequence: Synthetic oligonucleotide
uuacaaggccacagucaau

SEQ ID NO: 2263258 - RNA, 19 nt, Artificial Sequence
  Description of Artificial Sequence: Synthetic oligonucleotide
aucauccgggaggaaacug

SEQ ID NO: 2263259 - RNA, 19 nt, Artificial Sequence
  Description of Artificial Sequence: Synthetic oligonucleotide
cauugauacugccucugaa

SEQ ID NO: 2263260 - RNA, 19 nt, Artificial Sequence
  Description of Artificial Sequence: Synthetic oligonucleotide
gugugcgccacauuucaaa

SEQ ID NO: 2263261 - RNA, 19 nt, Artificial Sequence
  Description of Artificial Sequence: Synthetic oligonucleotide
ccuaccacagaacaaggga

SEQ ID NO: 2263262 - RNA, 19 nt, Artificial Sequence
  Description of Artificial Sequence: Synthetic oligonucleotide
gggugcucuaauccucacg

SEQ ID NO: 2263263 - RNA, 19 nt, Artificial Sequence
  Description of Artificial Sequence: Synthetic oligonucleotide
aucuggaaugagauacugu

SEQ ID NO: 2263264 - RNA, 19 nt, Artificial Sequence
  Description of Artificial Sequence: Synthetic oligonucleotide
gugcgccacauuucaaaac

SEQ ID NO: 2263265 - RNA, 19 nt, Artificial Sequence
  Description of Artificial Sequence: Synthetic oligonucleotide
cuccaccgcaaucauccac

SEQ ID NO: 2263266 - RNA, 19 nt, Artificial Sequence
  Description of Artificial Sequence: Synthetic oligonucleotide
gcugguaguugggauaacc

SEQ ID NO: 2263267 - RNA, 19 nt, Artificial Sequence
  Description of Artificial Sequence: Synthetic oligonucleotide
caggggucuuccuugccuc

SEQ ID NO: 2263268 - RNA, 19 nt, Artificial Sequence
  Description of Artificial Sequence: Synthetic oligonucleotide
ggaaugagauacuguuaca

SEQ ID NO: 2263269 - RNA, 19 nt, Artificial Sequence
  Description of Artificial Sequence: Synthetic oligonucleotide
gugcucuaauccucacggc

SEQ ID NO: 2263270 - RNA, 19 nt, Artificial Sequence
  Description of Artificial Sequence: Synthetic oligonucleotide
gggcaguauagcgagugag

SEQ ID NO: 2263271 - RNA, 19 nt, Artificial Sequence
  Description of Artificial Sequence: Synthetic oligonucleotide
ugccaacacccucgaugag

SEQ ID NO: 2263272 - RNA, 19 nt, Artificial Sequence
  Description of Artificial Sequence: Synthetic oligonucleotide
cugguaguugggauaaccu

SEQ ID NO: 2263273 - RNA, 19 nt, Artificial Sequence
  Description of Artificial Sequence: Synthetic oligonucleotide
gguagaucauccgggagga

SEQ ID NO: 2263274 - RNA, 19 nt, Artificial Sequence
  Description of Artificial Sequence: Synthetic oligonucleotide
cgccacauuucaaaacugg

SEQ ID NO: 2263275 - RNA, 19 nt, Artificial Sequence
  Description of Artificial Sequence: Synthetic oligonucleotide
cccuaccacagaacaaggg

SEQ ID NO: 2263276 - RNA, 19 nt, Artificial Sequence
  Description of Artificial Sequence: Synthetic oligonucleotide
aggaugccaacacccucga

SEQ ID NO: 2263277 - RNA, 19 nt, Artificial Sequence
  Description of Artificial Sequence: Synthetic oligonucleotide
ccucgaagucuuacaaggc

SEQ ID NO: 2263278 - RNA, 19 nt, Artificial Sequence
  Description of Artificial Sequence: Synthetic oligonucleotide
ugcggaacugcugggcagu

SEQ ID NO: 2263279 - RNA, 19 nt, Artificial Sequence
  Description of Artificial Sequence: Synthetic oligonucleotide
gaagucuuacaaggccaca

SEQ ID NO: 2263280 - RNA, 19 nt, Artificial Sequence
  Description of Artificial Sequence: Synthetic oligonucleotide
caggugugcgccacauuuc

SEQ ID NO: 2263281 - RNA, 19 nt, Artificial Sequence
  Description of Artificial Sequence: Synthetic oligonucleotide
ccucuuuagggguuagcug

SEQ ID NO: 2263282 - RNA, 19 nt, Artificial Sequence
  Description of Artificial Sequence: Synthetic oligonucleotide
agcuaccuccaaucugggu

SEQ ID NO: 2263283 - RNA, 19 nt, Artificial Sequence
  Description of Artificial Sequence: Synthetic oligonucleotide
uacugccucugaagcggug

SEQ ID NO: 2263284 - RNA, 19 nt, Artificial Sequence
  Description of Artificial Sequence: Synthetic oligonucleotide
ccucacggcauugauacug

SEQ ID NO: 2263285 - RNA, 19 nt, Artificial Sequence
  Description of Artificial Sequence: Synthetic oligonucleotide
gaguagaauagaggcccuc

SEQ ID NO: 2263286 - RNA, 19 nt, Artificial Sequence
  Description of Artificial Sequence: Synthetic oligonucleotide
agcuccacgguggcagggg

SEQ ID NO: 2263287 - RNA, 19 nt, Artificial Sequence
  Description of Artificial Sequence: Synthetic oligonucleotide
ugcuccagucaacgcucca

SEQ ID NO: 2263288 - RNA, 19 nt, Artificial Sequence
  Description of Artificial Sequence: Synthetic oligonucleotide
caacgcuccacuggugaug

SEQ ID NO: 2263289 - RNA, 19 nt, Artificial Sequence
  Description of Artificial Sequence: Synthetic oligonucleotide
uggagaguuucaggguuau

SEQ ID NO: 2263290 - RNA, 19 nt, Artificial Sequence
  Description of Artificial Sequence: Synthetic oligonucleotide
ggcauugauacugccucug

SEQ ID NO: 2263291 - RNA, 19 nt, Artificial Sequence
  Description of Artificial Sequence: Synthetic oligonucleotide
cuugauagccuggaagacu

SEQ ID NO: 2263292 - RNA, 19 nt, Artificial Sequence
  Description of Artificial Sequence: Synthetic oligonucleotide
gguuagcugguuggggucc

SEQ ID NO: 2263293 - RNA, 19 nt, Artificial Sequence
  Description of Artificial Sequence: Synthetic oligonucleotide
gcggcuuccucaaugguac

SEQ ID NO: 2263294 - RNA, 19 nt, Artificial Sequence
  Description of Artificial Sequence: Synthetic oligonucleotide
ggaaacugaggaguagcuc

SEQ ID NO: 2263295 - RNA, 19 nt, Artificial Sequence
  Description of Artificial Sequence: Synthetic oligonucleotide
cuaccucugccugcugagc

SEQ ID NO: 2263296 - RNA, 19 nt, Artificial Sequence
  Description of Artificial Sequence: Synthetic oligonucleotide
gguagaaaacaggccuccc

SEQ ID NO: 2263297 - RNA, 19 nt, Artificial Sequence
  Description of Artificial Sequence: Synthetic oligonucleotide
guaacucacuauguagacu

SEQ ID NO: 2263298 - RNA, 19 nt, Artificial Sequence
  Description of Artificial Sequence: Synthetic oligonucleotide
gucuuccuugccucgaagu

SEQ ID NO: 2263299 - RNA, 19 nt, Artificial Sequence
  Description of Artificial Sequence: Synthetic oligonucleotide
cacuaccucugccugcuga

SEQ ID NO: 2263300 - RNA, 19 nt, Artificial Sequence
  Description of Artificial Sequence: Synthetic oligonucleotide
ucccuuggagguagaucau

SEQ ID NO: 2263301 - RNA, 19 nt, Artificial Sequence
  Description of Artificial Sequence: Synthetic oligonucleotide
gacacccauagugaaggcu

SEQ ID NO: 2263302 - RNA, 19 nt, Artificial Sequence
  Description of Artificial Sequence: Synthetic oligonucleotide
cugaagcggugucguauuc

SEQ ID NO: 2263303 - RNA, 19 nt, Artificial Sequence
  Description of Artificial Sequence: Synthetic oligonucleotide
gugcauugcggaacugcug

SEQ ID NO: 2263304 - RNA, 19 nt, Artificial Sequence
  Description of Artificial Sequence: Synthetic oligonucleotide
cgcaaucauccacaauucg

SEQ ID NO: 2263305 - RNA, 19 nt, Artificial Sequence
  Description of Artificial Sequence: Synthetic oligonucleotide
gcaguauagcgagugagaa

SEQ ID NO: 2263306 - RNA, 19 nt, Artificial Sequence
  Description of Artificial Sequence: Synthetic oligonucleotide
ugggugcucuaauccucac

SEQ ID NO: 2263307 - RNA, 19 nt, Artificial Sequence
  Description of Artificial Sequence: Synthetic oligonucleotide
ggugcccugagagacaaaa

SEQ ID NO: 2263308 - RNA, 19 nt, Artificial Sequence
  Description of Artificial Sequence: Synthetic oligonucleotide
cacgguggcaggggcaggc

SEQ ID NO: 2263309 - RNA, 19 nt, Artificial Sequence
  Description of Artificial Sequence: Synthetic oligonucleotide
caggguucucuguguaaca

SEQ ID NO: 2263310 - RNA, 19 nt, Artificial Sequence
  Description of Artificial Sequence: Synthetic oligonucleotide
acacccucgaugagggcca

SEQ ID NO: 2263311 - RNA, 19 nt, Artificial Sequence
  Description of Artificial Sequence: Synthetic oligonucleotide
ucccucuuuagggguuagc

SEQ ID NO: 2263312 - RNA, 19 nt, Artificial Sequence
  Description of Artificial Sequence: Synthetic oligonucleotide
cccaccauggccagcggac

SEQ ID NO: 2263313 - RNA, 19 nt, Artificial Sequence
  Description of Artificial Sequence: Synthetic oligonucleotide
ggcaguauagcgagugaga

SEQ ID NO: 2263314 - RNA, 19 nt, Artificial Sequence
  Description of Artificial Sequence: Synthetic oligonucleotide
cugcugagcacugggauua

SEQ ID NO: 2263315 - RNA, 19 nt, Artificial Sequence
  Description of Artificial Sequence: Synthetic oligonucleotide
cucaaugguacugcuggua

SEQ ID NO: 2263316 - RNA, 19 nt, Artificial Sequence
  Description of Artificial Sequence: Synthetic oligonucleotide
uccucacggcauugauacu

SEQ ID NO: 2263317 - RNA, 19 nt, Artificial Sequence
  Description of Artificial Sequence: Synthetic oligonucleotide
ccgcaaucauccacaauuc

SEQ ID NO: 2263318 - RNA, 19 nt, Artificial Sequence
  Description of Artificial Sequence: Synthetic oligonucleotide
cagucaacgcuccacuggu

SEQ ID NO: 2263319 - RNA, 19 nt, Artificial Sequence
  Description of Artificial Sequence: Synthetic oligonucleotide
ccccuaccacagaacaagg

SEQ ID NO: 2263320 - RNA, 19 nt, Artificial Sequence
  Description of Artificial Sequence: Synthetic oligonucleotide
cuggagaguuucaggguua

SEQ ID NO: 2263321 - RNA, 19 nt, Artificial Sequence
  Description of Artificial Sequence: Synthetic oligonucleotide
cauuacgaaagcccuugau

SEQ ID NO: 2263322 - RNA, 19 nt, Artificial Sequence
  Description of Artificial Sequence: Synthetic oligonucleotide
cacggcauugauacugccu

SEQ ID NO: 2263323 - RNA, 19 nt, Artificial Sequence
  Description of Artificial Sequence: Synthetic oligonucleotide
gcauugauacugccucuga

SEQ ID NO: 2263324 - RNA, 19 nt, Artificial Sequence
  Description of Artificial Sequence: Synthetic oligonucleotide
gcgagugagaaggaugcca

SEQ ID NO: 2263325 - RNA, 19 nt, Artificial Sequence
  Description of Artificial Sequence: Synthetic oligonucleotide
caucagggugccacaugga

SEQ ID NO: 2263326 - RNA, 19 nt, Artificial Sequence
  Description of Artificial Sequence: Synthetic oligonucleotide
cugcugguaguugggauaa

SEQ ID NO: 2263327 - RNA, 19 nt, Artificial Sequence
  Description of Artificial Sequence: Synthetic oligonucleotide
cagcacugcuccagucaac

SEQ ID NO: 2263328 - RNA, 19 nt, Artificial Sequence
  Description of Artificial Sequence: Synthetic oligonucleotide
guauagcgagugagaagga

SEQ ID NO: 2263329 - RNA, 19 nt, Artificial Sequence
  Description of Artificial Sequence: Synthetic oligonucleotide
agucaacgcuccacuggug

SEQ ID NO: 2263330 - RNA, 19 nt, Artificial Sequence
  Description of Artificial Sequence: Synthetic oligonucleotide
accuccaaucugggugcuc

SEQ ID NO: 2263331 - RNA, 19 nt, Artificial Sequence
  Description of Artificial Sequence: Synthetic oligonucleotide
gggguccuccaagaauggg

SEQ ID NO: 2263332 - RNA, 19 nt, Artificial Sequence
  Description of Artificial Sequence: Synthetic oligonucleotide
gggguuagcugguuggggu

SEQ ID NO: 2263333 - RNA, 19 nt, Artificial Sequence
  Description of Artificial Sequence: Synthetic oligonucleotide
gaucauccgggaggaaacu

SEQ ID NO: 2263334 - RNA, 19 nt, Artificial Sequence
  Description of Artificial Sequence: Synthetic oligonucleotide
acccauagugaaggcucca

SEQ ID NO: 2263335 - RNA, 19 nt, Artificial Sequence
  Description of Artificial Sequence: Synthetic oligonucleotide
auacugccucugaagcggu

SEQ ID NO: 2263336 - RNA, 19 nt, Artificial Sequence
  Description of Artificial Sequence: Synthetic oligonucleotide
cacugcgugcagccagcac

SEQ ID NO: 2263337 - RNA, 19 nt, Artificial Sequence
  Description of Artificial Sequence: Synthetic oligonucleotide
gccagcggaccacugcgug

SEQ ID NO: 2263338 - RNA, 19 nt, Artificial Sequence
  Description of Artificial Sequence: Synthetic oligonucleotide
cuccagucaacgcuccacu

SEQ ID NO: 2263339 - RNA, 19 nt, Artificial Sequence
  Description of Artificial Sequence: Synthetic oligonucleotide
caccauggccagcggacca

SEQ ID NO: 2263340 - RNA, 19 nt, Artificial Sequence
  Description of Artificial Sequence: Synthetic oligonucleotide
aagcggugucguauuccaa

SEQ ID NO: 2263341 - RNA, 19 nt, Artificial Sequence
  Description of Artificial Sequence: Synthetic oligonucleotide
cagaacaagggaguagaau

SEQ ID NO: 2263342 - RNA, 19 nt, Artificial Sequence
  Description of Artificial Sequence: Synthetic oligonucleotide
ccaucauugcagagcccac

SEQ ID NO: 2263343 - RNA, 19 nt, Artificial Sequence
  Description of Artificial Sequence: Synthetic oligonucleotide
gcuccagucaacgcuccac

SEQ ID NO: 2263344 - RNA, 19 nt, Artificial Sequence
  Description of Artificial Sequence: Synthetic oligonucleotide
caccccuaccacagaacaa

SEQ ID NO: 2263345 - RNA, 19 nt, Artificial Sequence
  Description of Artificial Sequence: Synthetic oligonucleotide
gccacauggaggaucugga

SEQ ID NO: 2263346 - RNA, 19 nt, Artificial Sequence
  Description of Artificial Sequence: Synthetic oligonucleotide
agcggaccacugcgugcag

SEQ ID NO: 2263347 - RNA, 19 nt, Artificial Sequence
  Description of Artificial Sequence: Synthetic oligonucleotide
ugcugagcacugggauuac

SEQ ID NO: 2263348 - RNA, 19 nt, Artificial Sequence
  Description of Artificial Sequence: Synthetic oligonucleotide
ggggcauuacgaaagcccu

SEQ ID NO: 2263349 - RNA, 19 nt, Artificial Sequence
  Description of Artificial Sequence: Synthetic oligonucleotide
uccucccuuggagguagau

SEQ ID NO: 2263350 - RNA, 19 nt, Artificial Sequence
  Description of Artificial Sequence: Synthetic oligonucleotide
uaccuccaaucugggugcu

SEQ ID NO: 2263351 - RNA, 19 nt, Artificial Sequence
  Description of Artificial Sequence: Synthetic oligonucleotide
ggugccacauggaggaucu

SEQ ID NO: 2263352 - RNA, 19 nt, Artificial Sequence
  Description of Artificial Sequence: Synthetic oligonucleotide
gcauuacgaaagcccuuga

SEQ ID NO: 2263353 - RNA, 19 nt, Artificial Sequence
  Description of Artificial Sequence: Synthetic oligonucleotide
ugcgugcagccagcacugc

SEQ ID NO: 2263354 - RNA, 19 nt, Artificial Sequence
  Description of Artificial Sequence: Synthetic oligonucleotide
cggugucguauuccaacgg

SEQ ID NO: 2263355 - RNA, 19 nt, Artificial Sequence
  Description of Artificial Sequence: Synthetic oligonucleotide
cucugaagcggugucguau

SEQ ID NO: 2263356 - RNA, 19 nt, Artificial Sequence
  Description of Artificial Sequence: Synthetic oligonucleotide
caaggcugcuggggugccc

SEQ ID NO: 2263357 - RNA, 19 nt, Artificial Sequence
  Description of Artificial Sequence: Synthetic oligonucleotide
ugcugguaguugggauaac

SEQ ID NO: 2263358 - RNA, 19 nt, Artificial Sequence
  Description of Artificial Sequence: Synthetic oligonucleotide
cucccucuuuagggguuag

SEQ ID NO: 2263359 - RNA, 19 nt, Artificial Sequence
  Description of Artificial Sequence: Synthetic oligonucleotide
caggguuauguaggagcca

SEQ ID NO: 2263360 - RNA, 19 nt, Artificial Sequence
  Description of Artificial Sequence: Synthetic oligonucleotide
cccauagugaaggcuccac

SEQ ID NO: 2263361 - RNA, 19 nt, Artificial Sequence
  Description of Artificial Sequence: Synthetic oligonucleotide
ccucaaauucagagaugca

SEQ ID NO: 2263362 - RNA, 19 nt, Artificial Sequence
  Description of Artificial Sequence: Synthetic oligonucleotide
ccuugccucgaagucuuac

SEQ ID NO: 2263363 - RNA, 19 nt, Artificial Sequence
  Description of Artificial Sequence: Synthetic oligonucleotide
ggagaguuucaggguuaug

SEQ ID NO: 2263364 - RNA, 19 nt, Artificial Sequence
  Description of Artificial Sequence: Synthetic oligonucleotide
ggcuggagcucccucuuua

SEQ ID NO: 2263365 - RNA, 19 nt, Artificial Sequence
  Description of Artificial Sequence: Synthetic oligonucleotide
ggauaaccuggggcuggag

SEQ ID NO: 2263366 - RNA, 19 nt, Artificial Sequence
  Description of Artificial Sequence: Synthetic oligonucleotide
acccucgaugagggccaac

SEQ ID NO: 2263367 - RNA, 19 nt, Artificial Sequence
  Description of Artificial Sequence: Synthetic oligonucleotide
uccuugccucgaagucuua

SEQ ID NO: 2263368 - RNA, 19 nt, Artificial Sequence
  Description of Artificial Sequence: Synthetic oligonucleotide
gggugccacauggaggauc

SEQ ID NO: 2263369 - RNA, 19 nt, Artificial Sequence
  Description of Artificial Sequence: Synthetic oligonucleotide
cucuaauccucacggcauu

SEQ ID NO: 2263370 - RNA, 19 nt, Artificial Sequence
  Description of Artificial Sequence: Synthetic oligonucleotide
guaacccuggcuggccugu

SEQ ID NO: 2263371 - RNA, 19 nt, Artificial Sequence
  Description of Artificial Sequence: Synthetic oligonucleotide
ccucccuuggagguagauc

SEQ ID NO: 2263372 - RNA, 19 nt, Artificial Sequence
  Description of Artificial Sequence: Synthetic oligonucleotide
ccaccauggccagcggacc

SEQ ID NO: 2263373 - RNA, 19 nt, Artificial Sequence
  Description of Artificial Sequence: Synthetic oligonucleotide
gcucuaauccucacggcau

SEQ ID NO: 2263374 - RNA, 19 nt, Artificial Sequence
  Description of Artificial Sequence: Synthetic oligonucleotide
cccucgaugagggccaaca

SEQ ID NO: 2263375 - RNA, 19 nt, Artificial Sequence
  Description of Artificial Sequence: Synthetic oligonucleotide
cccuuggagguagaucauc

SEQ ID NO: 2263376 - RNA, 19 nt, Artificial Sequence
  Description of Artificial Sequence: Synthetic oligonucleotide
acgguggcaggggcaggca

SEQ ID NO: 2263377 - RNA, 19 nt, Artificial Sequence
  Description of Artificial Sequence: Synthetic oligonucleotide
ccacauggaggaucuggaa

SEQ ID NO: 2263378 - RNA, 19 nt, Artificial Sequence
  Description of Artificial Sequence: Synthetic oligonucleotide
cuguuacaugugugaggcu

SEQ ID NO: 2263379 - RNA, 19 nt, Artificial Sequence
  Description of Artificial Sequence: Synthetic oligonucleotide
guagaucauccgggaggaa

SEQ ID NO: 2263380 - RNA, 19 nt, Artificial Sequence
  Description of Artificial Sequence: Synthetic oligonucleotide
ggggugcccugagagacaa

SEQ ID NO: 2263381 - RNA, 19 nt, Artificial Sequence
  Description of Artificial Sequence: Synthetic oligonucleotide
ggaguagaauagaggcccu

SEQ ID NO: 2263382 - RNA, 19 nt, Artificial Sequence
  Description of Artificial Sequence: Synthetic oligonucleotide
gcccaccauggccagcgga

SEQ ID NO: 2263383 - RNA, 19 nt, Artificial Sequence
  Description of Artificial Sequence: Synthetic oligonucleotide
gggauaaccuggggcugga

SEQ ID NO: 2263384 - RNA, 19 nt, Artificial Sequence
  Description of Artificial Sequence: Synthetic oligonucleotide
acgcuccacuggugaugga

SEQ ID NO: 2263385 - RNA, 19 nt, Artificial Sequence
  Description of Artificial Sequence: Synthetic oligonucleotide
gcggaccacugcgugcagc

SEQ ID NO: 2263386 - RNA, 19 nt, Artificial Sequence
  Description of Artificial Sequence: Synthetic oligonucleotide
ggggucuuccuugccucga

SEQ ID NO: 2263387 - RNA, 19 nt, Artificial Sequence
  Description of Artificial Sequence: Synthetic oligonucleotide
ggugugcgccacauuucaa

SEQ ID NO: 2263388 - RNA, 19 nt, Artificial Sequence
  Description of Artificial Sequence: Synthetic oligonucleotide
gugccacauggaggaucug

SEQ ID NO: 2263389 - RNA, 19 nt, Artificial Sequence
  Description of Artificial Sequence: Synthetic oligonucleotide
gaggcccucucuggagagu

SEQ ID NO: 2263390 - RNA, 19 nt, Artificial Sequence
  Description of Artificial Sequence: Synthetic oligonucleotide
agggugccacauggaggau

SEQ ID NO: 2263391 - RNA, 19 nt, Artificial Sequence
  Description of Artificial Sequence: Synthetic oligonucleotide
aggccuccccacacugcaa

SEQ ID NO: 2263392 - RNA, 19 nt, Artificial Sequence
  Description of Artificial Sequence: Synthetic oligonucleotide
cgguggcaggggcaggcag

SEQ ID NO: 2263393 - RNA, 19 nt, Artificial Sequence
  Description of Artificial Sequence: Synthetic oligonucleotide
cuuuagggguuagcugguu

SEQ ID NO: 2263394 - RNA, 19 nt, Artificial Sequence
  Description of Artificial Sequence: Synthetic oligonucleotide
ggggugcauugcggaacug

SEQ ID NO: 2263395 - RNA, 19 nt, Artificial Sequence
  Description of Artificial Sequence: Synthetic oligonucleotide
ccaccgcaaucauccacaa

SEQ ID NO: 2263396 - RNA, 19 nt, Artificial Sequence
  Description of Artificial Sequence: Synthetic oligonucleotide
ccucaaugguacugcuggu

SEQ ID NO: 2263397 - RNA, 19 nt, Artificial Sequence
  Description of Artificial Sequence: Synthetic oligonucleotide
caccgcaaucauccacaau

SEQ ID NO: 2263398 - RNA, 19 nt, Artificial Sequence
  Description of Artificial Sequence: Synthetic oligonucleotide
ggguuauguaggagccagu

SEQ ID NO: 2263399 - RNA, 19 nt, Artificial Sequence
  Description of Artificial Sequence: Synthetic oligonucleotide
guccucccuuggagguaga

SEQ ID NO: 2263400 - RNA, 19 nt, Artificial Sequence
  Description of Artificial Sequence: Synthetic oligonucleotide
ccucugaagcggugucgua

SEQ ID NO: 2263401 - RNA, 19 nt, Artificial Sequence
  Description of Artificial Sequence: Synthetic oligonucleotide
gggcauuacgaaagcccuu

SEQ ID NO: 2263402 - RNA, 19 nt, Artificial Sequence
  Description of Artificial Sequence: Synthetic oligonucleotide
cacccucgaugagggccaa

SEQ ID NO: 2263403 - RNA, 19 nt, Artificial Sequence
  Description of Artificial Sequence: Synthetic oligonucleotide
gcugggcaguauagcgagu

SEQ ID NO: 2263404 - RNA, 19 nt, Artificial Sequence
  Description of Artificial Sequence: Synthetic oligonucleotide
ccacugcgugcagccagca

SEQ ID NO: 2263405 - RNA, 19 nt, Artificial Sequence
  Description of Artificial Sequence: Synthetic oligonucleotide
gcggaacugcugggcagua

SEQ ID NO: 2263406 - RNA, 19 nt, Artificial Sequence
  Description of Artificial Sequence: Synthetic oligonucleotide
ccauggccagcggaccacu

SEQ ID NO: 2263407 - RNA, 19 nt, Artificial Sequence
  Description of Artificial Sequence: Synthetic oligonucleotide
aaaaccaugacacagauca

SEQ ID NO: 2263408 - RNA, 19 nt, Artificial Sequence
  Description of Artificial Sequence: Synthetic oligonucleotide
agaucaaacacacacacac

SEQ ID NO: 2263409 - RNA, 19 nt, Artificial Sequence
  Description of Artificial Sequence: Synthetic oligonucleotide
aacacacacacacacacac

SEQ ID NO: 2263410 - RNA, 19 nt, Artificial Sequence
  Description of Artificial Sequence: Synthetic oligonucleotide
acacagaucaaacacacac

SEQ ID NO: 2263411 - RNA, 19 nt, Artificial Sequence
  Description of Artificial Sequence: Synthetic oligonucleotide
ucucauguuacuuauauac

SEQ ID NO: 2263412 - RNA, 19 nt, Artificial Sequence
  Description of Artificial Sequence: Synthetic oligonucleotide
ugaacauucaaauuuacaa

SEQ ID NO: 2263413 - RNA, 19 nt, Artificial Sequence
  Description of Artificial Sequence: Synthetic oligonucleotide
aauaguggagaagacaagg

SEQ ID NO: 2263414 - RNA, 19 nt, Artificial Sequence
  Description of Artificial Sequence: Synthetic oligonucleotide
aaugucaccgacgaaggcc

SEQ ID NO: 2263415 - RNA, 19 nt, Artificial Sequence
  Description of Artificial Sequence: Synthetic oligonucleotide
aucaaacacacacacacac

SEQ ID NO: 2263416 - RNA, 19 nt, Artificial Sequence
  Description of Artificial Sequence: Synthetic oligonucleotide
auuuugaacauucaaauuu

SEQ ID NO: 2263417 - RNA, 19 nt, Artificial Sequence
  Description of Artificial Sequence: Synthetic oligonucleotide
uuauuuugaacauucaaau

SEQ ID NO: 2263418 - RNA, 19 nt, Artificial Sequence
  Description of Artificial Sequence: Synthetic oligonucleotide
uacaaaauaguggagaaga

SEQ ID NO: 2263419 - RNA, 19 nt, Artificial Sequence
  Description of Artificial Sequence: Synthetic oligonucleotide
uugaguuucaugucugugg

SEQ ID NO: 2263420 - RNA, 19 nt, Artificial Sequence
  Description of Artificial Sequence: Synthetic oligonucleotide
gaagacaaggcacagucag

SEQ ID NO: 2263421 - RNA, 19 nt, Artificial Sequence
  Description of Artificial Sequence: Synthetic oligonucleotide
aaugguaacaaaaccauga

SEQ ID NO: 2263422 - RNA, 19 nt, Artificial Sequence
  Description of Artificial Sequence: Synthetic oligonucleotide
aaaauaguggagaagacaa

SEQ ID NO: 2263423 - RNA, 19 nt, Artificial Sequence
  Description of Artificial Sequence: Synthetic oligonucleotide
aguauccuguucuuggccc

SEQ ID NO: 2263424 - RNA, 19 nt, Artificial Sequence
  Description of Artificial Sequence: Synthetic oligonucleotide
aauaucucauguuacuuau

SEQ ID NO: 2263425 - RNA, 19 nt, Artificial Sequence
  Description of Artificial Sequence: Synthetic oligonucleotide
uauauacaaaauaguggag

SEQ ID NO: 2263426 - RNA, 19 nt, Artificial Sequence
  Description of Artificial Sequence: Synthetic oligonucleotide
aaggauaccauguggcuug

SEQ ID NO: 2263427 - RNA, 19 nt, Artificial Sequence
  Description of Artificial Sequence: Synthetic oligonucleotide
ugguaugcagaccacagcc

SEQ ID NO: 2263428 - RNA, 19 nt, Artificial Sequence
  Description of Artificial Sequence: Synthetic oligonucleotide
auaccauguggcuugauag

SEQ ID NO: 2263429 - RNA, 19 nt, Artificial Sequence
  Description of Artificial Sequence: Synthetic oligonucleotide
uucuuugcaccuccgaagg

SEQ ID NO: 2263430 - RNA, 19 nt, Artificial Sequence
  Description of Artificial Sequence: Synthetic oligonucleotide
uuuucgaaguaaaccauug

SEQ ID NO: 2263431 - RNA, 19 nt, Artificial Sequence
  Description of Artificial Sequence: Synthetic oligonucleotide
ugugcaaugucaccgacga

SEQ ID NO: 2263432 - RNA, 19 nt, Artificial Sequence
  Description of Artificial Sequence: Synthetic oligonucleotide
aaaucucucucucucucuc

SEQ ID NO: 2263433 - RNA, 19 nt, Artificial Sequence
  Description of Artificial Sequence: Synthetic oligonucleotide
gauaaggauaccauguggc

SEQ ID NO: 2263434 - RNA, 19 nt, Artificial Sequence
  Description of Artificial Sequence: Synthetic oligonucleotide
acaagguggcuccucaugc

SEQ ID NO: 2263435 - RNA, 19 nt, Artificial Sequence
  Description of Artificial Sequence: Synthetic oligonucleotide
ucaguacaggcugagaagg

SEQ ID NO: 2263436 - RNA, 19 nt, Artificial Sequence
  Description of Artificial Sequence: Synthetic oligonucleotide
ucauguuacuuauauacaa

SEQ ID NO: 2263437 - RNA, 19 nt, Artificial Sequence
  Description of Artificial Sequence: Synthetic oligonucleotide
gguaacaaaaccaugacac

SEQ ID NO: 2263438 - RNA, 19 nt, Artificial Sequence
  Description of Artificial Sequence: Synthetic oligonucleotide
uucaagguccccaaaguga

SEQ ID NO: 2263439 - RNA, 19 nt, Artificial Sequence
  Description of Artificial Sequence: Synthetic oligonucleotide
aaaaugguaacaaaaccau

SEQ ID NO: 2263440 - RNA, 19 nt, Artificial Sequence
  Description of Artificial Sequence: Synthetic oligonucleotide
aaauaucucauguuacuua

SEQ ID NO: 2263441 - RNA, 19 nt, Artificial Sequence
  Description of Artificial Sequence: Synthetic oligonucleotide
uccccauucauguauaacu

SEQ ID NO: 2263442 - RNA, 19 nt, Artificial Sequence
  Description of Artificial Sequence: Synthetic oligonucleotide
augguaacaaaaccaugac

SEQ ID NO: 2263443 - RNA, 19 nt, Artificial Sequence
  Description of Artificial Sequence: Synthetic oligonucleotide
caaacacacacacacacac

SEQ ID NO: 2263444 - RNA, 19 nt, Artificial Sequence
  Description of Artificial Sequence: Synthetic oligonucleotide
auauacaaaauaguggaga

SEQ ID NO: 2263445 - RNA, 19 nt, Artificial Sequence
  Description of Artificial Sequence: Synthetic oligonucleotide
gaacugugcaaugucaccg

SEQ ID NO: 2263446 - RNA, 19 nt, Artificial Sequence
  Description of Artificial Sequence: Synthetic oligonucleotide
cacacaacaaaauaucuca

SEQ ID NO: 2263447 - RNA, 19 nt, Artificial Sequence
  Description of Artificial Sequence: Synthetic oligonucleotide
ugacacagaucaaacacac

SEQ ID NO: 2263448 - RNA, 19 nt, Artificial Sequence
  Description of Artificial Sequence: Synthetic oligonucleotide
gacaaugcagauguggugc

SEQ ID NO: 2263449 - RNA, 19 nt, Artificial Sequence
  Description of Artificial Sequence: Synthetic oligonucleotide
agaguauccuguucuuggc

SEQ ID NO: 2263450 - RNA, 19 nt, Artificial Sequence
  Description of Artificial Sequence: Synthetic oligonucleotide
acaaggcacagucagagga

SEQ ID NO: 2263451 - RNA, 19 nt, Artificial Sequence
  Description of Artificial Sequence: Synthetic oligonucleotide
ugaguuucaugucuguggu

SEQ ID NO: 2263452 - RNA, 19 nt, Artificial Sequence
  Description of Artificial Sequence: Synthetic oligonucleotide
cagaguauccuguucuugg

SEQ ID NO: 2263453 - RNA, 19 nt, Artificial Sequence
  Description of Artificial Sequence: Synthetic oligonucleotide
aagccaaggguugaguuuc

SEQ ID NO: 2263454 - RNA, 19 nt, Artificial Sequence
  Description of Artificial Sequence: Synthetic oligonucleotide
uguuacuuauauacaaaau

SEQ ID NO: 2263455 - RNA, 19 nt, Artificial Sequence
  Description of Artificial Sequence: Synthetic oligonucleotide
cauucauguauaacugggg

SEQ ID NO: 2263456 - RNA, 19 nt, Artificial Sequence
  Description of Artificial Sequence: Synthetic oligonucleotide
ugguaacaaaaccaugaca

SEQ ID NO: 2263457 - RNA, 19 nt, Artificial Sequence
  Description of Artificial Sequence: Synthetic oligonucleotide
ucgaaguaaaccauuguuu

SEQ ID NO: 2263458 - RNA, 19 nt, Artificial Sequence
  Description of Artificial Sequence: Synthetic oligonucleotide
ucaagguccccaaagugac

SEQ ID NO: 2263459 - RNA, 19 nt, Artificial Sequence
  Description of Artificial Sequence: Synthetic oligonucleotide
auaguggagaagacaaggc

SEQ ID NO: 2263460 - RNA, 19 nt, Artificial Sequence
  Description of Artificial Sequence: Synthetic oligonucleotide
auguuacuuauauacaaaa

SEQ ID NO: 2263461 - RNA, 19 nt, Artificial Sequence
  Description of Artificial Sequence: Synthetic oligonucleotide
uucugaacaagguggcucc

SEQ ID NO: 2263462 - RNA, 19 nt, Artificial Sequence
  Description of Artificial Sequence: Synthetic oligonucleotide
acaaugcagauguggugcc

SEQ ID NO: 2263463 - RNA, 19 nt, Artificial Sequence
  Description of Artificial Sequence: Synthetic oligonucleotide
aacaagguggcuccucaug

SEQ ID NO: 2263464 - RNA, 19 nt, Artificial Sequence
  Description of Artificial Sequence: Synthetic oligonucleotide
caaagguggacuucuuugc

SEQ ID NO: 2263465 - RNA, 19 nt, Artificial Sequence
  Description of Artificial Sequence: Synthetic oligonucleotide
ugguaguccagacaaugca

SEQ ID NO: 2263466 - RNA, 19 nt, Artificial Sequence
  Description of Artificial Sequence: Synthetic oligonucleotide
aaagguggacuucuuugca

SEQ ID NO: 2263467 - RNA, 19 nt, Artificial Sequence
  Description of Artificial Sequence: Synthetic oligonucleotide
aaggcacagucagaggagc

SEQ ID NO: 2263468 - RNA, 19 nt, Artificial Sequence
  Description of Artificial Sequence: Synthetic oligonucleotide
aaaauaucucauguuacuu

SEQ ID NO: 2263469 - RNA, 19 nt, Artificial Sequence
  Description of Artificial Sequence: Synthetic oligonucleotide
agugguccagugcaguugg

SEQ ID NO: 2263470 - RNA, 19 nt, Artificial Sequence
  Description of Artificial Sequence: Synthetic oligonucleotide
cuggguggcaucaaaucgg

SEQ ID NO: 2263471 - RNA, 19 nt, Artificial Sequence
  Description of Artificial Sequence: Synthetic oligonucleotide
cuucuuugcaccuccgaag

SEQ ID NO: 2263472 - RNA, 19 nt, Artificial Sequence
  Description of Artificial Sequence: Synthetic oligonucleotide
ucaaacacacacacacaca

SEQ ID NO: 2263473 - RNA, 19 nt, Artificial Sequence
  Description of Artificial Sequence: Synthetic oligonucleotide
cacacacacacacacacac

SEQ ID NO: 2263474 - RNA, 19 nt, Artificial Sequence
  Description of Artificial Sequence: Synthetic oligonucleotide
accuccgaagguuuccacc

SEQ ID NO: 2263475 - RNA, 19 nt, Artificial Sequence
  Description of Artificial Sequence: Synthetic oligonucleotide
uuggccaugccuaggaccu

SEQ ID NO: 2263476 - RNA, 19 nt, Artificial Sequence
  Description of Artificial Sequence: Synthetic oligonucleotide
uauuuugaacauucaaauu

SEQ ID NO: 2263477 - RNA, 19 nt, Artificial Sequence
  Description of Artificial Sequence: Synthetic oligonucleotide
gacguggucccacagguug

SEQ ID NO: 2263478 - RNA, 19 nt, Artificial Sequence
  Description of Artificial Sequence: Synthetic oligonucleotide
ugaacaagguggcuccuca

SEQ ID NO: 2263479 - RNA, 19 nt, Artificial Sequence
  Description of Artificial Sequence: Synthetic oligonucleotide
ggucauuugagcucccugg

SEQ ID NO: 2263480 - RNA, 19 nt, Artificial Sequence
  Description of Artificial Sequence: Synthetic oligonucleotide
auaaggauaccauguggcu

SEQ ID NO: 2263481 - RNA, 19 nt, Artificial Sequence
  Description of Artificial Sequence: Synthetic oligonucleotide
ucuaaaucucucucucucu

SEQ ID NO: 2263482 - RNA, 19 nt, Artificial Sequence
  Description of Artificial Sequence: Synthetic oligonucleotide
acacacaacaaaauaucuc

SEQ ID NO: 2263483 - RNA, 19 nt, Artificial Sequence
  Description of Artificial Sequence: Synthetic oligonucleotide
uuucgaaguaaaccauugu

SEQ ID NO: 2263484 - RNA, 19 nt, Artificial Sequence
  Description of Artificial Sequence: Synthetic oligonucleotide
ggauaaggauaccaugugg

SEQ ID NO: 2263485 - RNA, 19 nt, Artificial Sequence
  Description of Artificial Sequence: Synthetic oligonucleotide
ucccugguaguccagacaa

SEQ ID NO: 2263486 - RNA, 19 nt, Artificial Sequence
  Description of Artificial Sequence: Synthetic oligonucleotide
agcuuccccaucugcaagc

SEQ ID NO: 2263487 - RNA, 19 nt, Artificial Sequence
  Description of Artificial Sequence: Synthetic oligonucleotide
aacaaaaccaugacacaga

SEQ ID NO: 2263488 - RNA, 19 nt, Artificial Sequence
  Description of Artificial Sequence: Synthetic oligonucleotide
gaagguuuccaccagcuua

SEQ ID NO: 2263489 - RNA, 19 nt, Artificial Sequence
  Description of Artificial Sequence: Synthetic oligonucleotide
agacaaggcacagucagag

SEQ ID NO: 2263490 - RNA, 19 nt, Artificial Sequence
  Description of Artificial Sequence: Synthetic oligonucleotide
aaaugguaacaaaaccaug

SEQ ID NO: 2263491 - RNA, 19 nt, Artificial Sequence
  Description of Artificial Sequence: Synthetic oligonucleotide
agugcaguuggccaugccu

SEQ ID NO: 2263492 - RNA, 19 nt, Artificial Sequence
  Description of Artificial Sequence: Synthetic oligonucleotide
ucucucucucaguacaggc

SEQ ID NO: 2263493 - RNA, 19 nt, Artificial Sequence
  Description of Artificial Sequence: Synthetic oligonucleotide
uagggugccaggcugccag

SEQ ID NO: 2263494 - RNA, 19 nt, Artificial Sequence
  Description of Artificial Sequence: Synthetic oligonucleotide
uccucuaaaucucucucuc

SEQ ID NO: 2263495 - RNA, 19 nt, Artificial Sequence
  Description of Artificial Sequence: Synthetic oligonucleotide
aaauaguggagaagacaag

SEQ ID NO: 2263496 - RNA, 19 nt, Artificial Sequence
  Description of Artificial Sequence: Synthetic oligonucleotide
acaaaauaguggagaagac

SEQ ID NO: 2263497 - RNA, 19 nt, Artificial Sequence
  Description of Artificial Sequence: Synthetic oligonucleotide
cucuaaaucucucucucuc

SEQ ID NO: 2263498 - RNA, 19 nt, Artificial Sequence
  Description of Artificial Sequence: Synthetic oligonucleotide
aggguugaguuucaugucu

SEQ ID NO: 2263499 - RNA, 19 nt, Artificial Sequence
  Description of Artificial Sequence: Synthetic oligonucleotide
accaugacacagaucaaac

SEQ ID NO: 2263500 - RNA, 19 nt, Artificial Sequence
  Description of Artificial Sequence: Synthetic oligonucleotide
ccauucauguauaacuggg

SEQ ID NO: 2263501 - RNA, 19 nt, Artificial Sequence
  Description of Artificial Sequence: Synthetic oligonucleotide
agcuuaucuucccagggga

SEQ ID NO: 2263502 - RNA, 19 nt, Artificial Sequence
  Description of Artificial Sequence: Synthetic oligonucleotide
acaaaaccaugacacagau

SEQ ID NO: 2263503 - RNA, 19 nt, Artificial Sequence
  Description of Artificial Sequence: Synthetic oligonucleotide
accauguggcuugauaggg

SEQ ID NO: 2263504 - RNA, 19 nt, Artificial Sequence
  Description of Artificial Sequence: Synthetic oligonucleotide
ccgaaguucaccauccugg

SEQ ID NO: 2263505 - RNA, 19 nt, Artificial Sequence
  Description of Artificial Sequence: Synthetic oligonucleotide
aggacauugcccaucagug

SEQ ID NO: 2263506 - RNA, 19 nt, Artificial Sequence
  Description of Artificial Sequence: Synthetic oligonucleotide
accagcuuaucuucccagg

SEQ ID NO: 2263507 - RNA, 19 nt, Artificial Sequence
  Description of Artificial Sequence: Synthetic oligonucleotide
cuuaucuucccaggggagg

SEQ ID NO: 2263508 - RNA, 19 nt, Artificial Sequence
  Description of Artificial Sequence: Synthetic oligonucleotide
cuaaaucucucucucucuc

SEQ ID NO: 2263509 - RNA, 19 nt, Artificial Sequence
  Description of Artificial Sequence: Synthetic oligonucleotide
cuucaagguccccaaagug

SEQ ID NO: 2263510 - RNA, 19 nt, Artificial Sequence
  Description of Artificial Sequence: Synthetic oligonucleotide
uuccccaucugcaagccaa

SEQ ID NO: 2263511 - RNA, 19 nt, Artificial Sequence
  Description of Artificial Sequence: Synthetic oligonucleotide
uaaaucucucucucucucu

SEQ ID NO: 2263512 - RNA, 19 nt, Artificial Sequence
  Description of Artificial Sequence: Synthetic oligonucleotide
agacaaugcagauguggug

SEQ ID NO: 2263513 - RNA, 19 nt, Artificial Sequence
  Description of Artificial Sequence: Synthetic oligonucleotide
guuggccaugccuaggacc

SEQ ID NO: 2263514 - RNA, 19 nt, Artificial Sequence
  Description of Artificial Sequence: Synthetic oligonucleotide
gaguauccuguucuuggcc

SEQ ID NO: 2263515 - RNA, 19 nt, Artificial Sequence
  Description of Artificial Sequence: Synthetic oligonucleotide
caaggguugaguuucaugu

SEQ ID NO: 2263516 - RNA, 19 nt, Artificial Sequence
  Description of Artificial Sequence: Synthetic oligonucleotide
aucucucucucucucucuc

SEQ ID NO: 2263517 - RNA, 19 nt, Artificial Sequence
  Description of Artificial Sequence: Synthetic oligonucleotide
cugguaguccagacaaugc

SEQ ID NO: 2263518 - RNA, 19 nt, Artificial Sequence
  Description of Artificial Sequence: Synthetic oligonucleotide
cugggcaggugucaggacg

SEQ ID NO: 2263519 - RNA, 19 nt, Artificial Sequence
  Description of Artificial Sequence: Synthetic oligonucleotide
cacacacacacacacaaca

SEQ ID NO: 2263520 - RNA, 19 nt, Artificial Sequence
  Description of Artificial Sequence: Synthetic oligonucleotide
acugugcaaugucaccgac

SEQ ID NO: 2263521 - RNA, 19 nt, Artificial Sequence
  Description of Artificial Sequence: Synthetic oligonucleotide
caaagugacaggcaaggga

SEQ ID NO: 2263522 - RNA, 19 nt, Artificial Sequence
  Description of Artificial Sequence: Synthetic oligonucleotide
agggguucugaacaaggug

SEQ ID NO: 2263523 - RNA, 19 nt, Artificial Sequence
  Description of Artificial Sequence: Synthetic oligonucleotide
aaucucucucucucucucu

SEQ ID NO: 2263524 - RNA, 19 nt, Artificial Sequence
  Description of Artificial Sequence: Synthetic oligonucleotide
agguucucaccagagcccc

SEQ ID NO: 2263525 - RNA, 19 nt, Artificial Sequence
  Description of Artificial Sequence: Synthetic oligonucleotide
aggugucaggacguggucc

SEQ ID NO: 2263526 - RNA, 19 nt, Artificial Sequence
  Description of Artificial Sequence: Synthetic oligonucleotide
ucucucucucucaguacag

SEQ ID NO: 2263527 - RNA, 19 nt, Artificial Sequence
  Description of Artificial Sequence: Synthetic oligonucleotide
guaacaaaaccaugacaca

SEQ ID NO: 2263528 - RNA, 19 nt, Artificial Sequence
  Description of Artificial Sequence: Synthetic oligonucleotide
uuagcuuccccaucugcaa

SEQ ID NO: 2263529 - RNA, 19 nt, Artificial Sequence
  Description of Artificial Sequence: Synthetic oligonucleotide
cuuagcuuccccaucugca

SEQ ID NO: 2263530 - RNA, 19 nt, Artificial Sequence
  Description of Artificial Sequence: Synthetic oligonucleotide
cauccugguaugcagacca

SEQ ID NO: 2263531 - RNA, 19 nt, Artificial Sequence
  Description of Artificial Sequence: Synthetic oligonucleotide
caaaauaguggagaagaca

SEQ ID NO: 2263532 - RNA, 19 nt, Artificial Sequence
  Description of Artificial Sequence: Synthetic oligonucleotide
aggacguggucccacaggu

SEQ ID NO: 2263533 - RNA, 19 nt, Artificial Sequence
  Description of Artificial Sequence: Synthetic oligonucleotide
uggguggcaucaaaucggc

SEQ ID NO: 2263534 - RNA, 19 nt, Artificial Sequence
  Description of Artificial Sequence: Synthetic oligonucleotide
uuaucuucccaggggagga

SEQ ID NO: 2263535 - RNA, 19 nt, Artificial Sequence
  Description of Artificial Sequence: Synthetic oligonucleotide
agagccccgaaguucacca

SEQ ID NO: 2263536 - RNA, 19 nt, Artificial Sequence
  Description of Artificial Sequence: Synthetic oligonucleotide
cugugcaaugucaccgacg

SEQ ID NO: 2263537 - RNA, 19 nt, Artificial Sequence
  Description of Artificial Sequence: Synthetic oligonucleotide
cagcuuaucuucccagggg

SEQ ID NO: 2263538 - RNA, 19 nt, Artificial Sequence
  Description of Artificial Sequence: Synthetic oligonucleotide
caaggcacagucagaggag

SEQ ID NO: 2263539 - RNA, 19 nt, Artificial Sequence
  Description of Artificial Sequence: Synthetic oligonucleotide
gauaccauguggcuugaua

SEQ ID NO: 2263540 - RNA, 19 nt, Artificial Sequence
  Description of Artificial Sequence: Synthetic oligonucleotide
agccucaagggucauuuga

SEQ ID NO: 2263541 - RNA, 19 nt, Artificial Sequence
  Description of Artificial Sequence: Synthetic oligonucleotide
uccgaagguuuccaccagc

SEQ ID NO: 2263542 - RNA, 19 nt, Artificial Sequence
  Description of Artificial Sequence: Synthetic oligonucleotide
cauguuacuuauauacaaa

SEQ ID NO: 2263543 - RNA, 19 nt, Artificial Sequence
  Description of Artificial Sequence: Synthetic oligonucleotide
cagguucucaccagagccc

SEQ ID NO: 2263544 - RNA, 19 nt, Artificial Sequence
  Description of Artificial Sequence: Synthetic oligonucleotide
gacauugcccaucaguggu

SEQ ID NO: 2263545 - RNA, 19 nt, Artificial Sequence
  Description of Artificial Sequence: Synthetic oligonucleotide
accgacgaaggccugggug

SEQ ID NO: 2263546 - RNA, 19 nt, Artificial Sequence
  Description of Artificial Sequence: Synthetic oligonucleotide
ugccagguucucaccagag

SEQ ID NO: 2263547 - RNA, 19 nt, Artificial Sequence
  Description of Artificial Sequence: Synthetic oligonucleotide
caugccuaggaccugggca

SEQ ID NO: 2263548 - RNA, 19 nt, Artificial Sequence
  Description of Artificial Sequence: Synthetic oligonucleotide
uucaccauccugguaugca

SEQ ID NO: 2263549 - RNA, 19 nt, Artificial Sequence
  Description of Artificial Sequence: Synthetic oligonucleotide
uuugcaccuccgaagguuu

SEQ ID NO: 2263550 - RNA, 19 nt, Artificial Sequence
  Description of Artificial Sequence: Synthetic oligonucleotide
ucucaccagagccccgaag

SEQ ID NO: 2263551 - RNA, 19 nt, Artificial Sequence
  Description of Artificial Sequence: Synthetic oligonucleotide
cacacacacacacacacaa

SEQ ID NO: 2263552 - RNA, 19 nt, Artificial Sequence
  Description of Artificial Sequence: Synthetic oligonucleotide
caguacaggcugagaaggg

SEQ ID NO: 2263553 - RNA, 19 nt, Artificial Sequence
  Description of Artificial Sequence: Synthetic oligonucleotide
uaaggauaccauguggcuu

SEQ ID NO: 2263554 - RNA, 19 nt, Artificial Sequence
  Description of Artificial Sequence: Synthetic oligonucleotide
guugaacugugcaauguca

SEQ ID NO: 2263555 - RNA, 19 nt, Artificial Sequence
  Description of Artificial Sequence: Synthetic oligonucleotide
uggagaagacaaggcacag

SEQ ID NO: 2263556 - RNA, 19 nt, Artificial Sequence
  Description of Artificial Sequence: Synthetic oligonucleotide
ggacauugcccaucagugg

SEQ ID NO: 2263557 - RNA, 19 nt, Artificial Sequence
  Description of Artificial Sequence: Synthetic oligonucleotide
ugacaggcaagggaggggu

SEQ ID NO: 2263558 - RNA, 19 nt, Artificial Sequence
  Description of Artificial Sequence: Synthetic oligonucleotide
guugaguuucaugucugug

SEQ ID NO: 2263559 - RNA, 19 nt, Artificial Sequence
  Description of Artificial Sequence: Synthetic oligonucleotide
caagguggcuccucaugcc

SEQ ID NO: 2263560 - RNA, 19 nt, Artificial Sequence
  Description of Artificial Sequence: Synthetic oligonucleotide
acacacacacacaacaaaa

SEQ ID NO: 2263561 - RNA, 19 nt, Artificial Sequence
  Description of Artificial Sequence: Synthetic oligonucleotide
gaggacauugcccaucagu

SEQ ID NO: 2263562 - RNA, 19 nt, Artificial Sequence
  Description of Artificial Sequence: Synthetic oligonucleotide
cugguaugcagaccacagc

SEQ ID NO: 2263563 - RNA, 19 nt, Artificial Sequence
  Description of Artificial Sequence: Synthetic oligonucleotide
uuucaugucuguggucccc

SEQ ID NO: 2263564 - RNA, 19 nt, Artificial Sequence
  Description of Artificial Sequence: Synthetic oligonucleotide
caggauaaggauaccaugu

SEQ ID NO: 2263565 - RNA, 19 nt, Artificial Sequence
  Description of Artificial Sequence: Synthetic oligonucleotide
aaacacacacacacacaca

SEQ ID NO: 2263566 - RNA, 19 nt, Artificial Sequence
  Description of Artificial Sequence: Synthetic oligonucleotide
uucccaggggaggacauug

SEQ ID NO: 2263567 - RNA, 19 nt, Artificial Sequence
  Description of Artificial Sequence: Synthetic oligonucleotide
cucucucucucucucucag

SEQ ID NO: 2263568 - RNA, 19 nt, Artificial Sequence
  Description of Artificial Sequence: Synthetic oligonucleotide
aguucaccauccugguaug

SEQ ID NO: 2263569 - RNA, 19 nt, Artificial Sequence
  Description of Artificial Sequence: Synthetic oligonucleotide
gguaguccagacaaugcag

SEQ ID NO: 2263570 - RNA, 19 nt, Artificial Sequence
  Description of Artificial Sequence: Synthetic oligonucleotide
ugggcaggugucaggacgu

SEQ ID NO: 2263571 - RNA, 19 nt, Artificial Sequence
  Description of Artificial Sequence: Synthetic oligonucleotide
ugcagaccacagcccaucc

SEQ ID NO: 2263572 - RNA, 19 nt, Artificial Sequence
  Description of Artificial Sequence: Synthetic oligonucleotide
ucugcaagccaaggguuga

SEQ ID NO: 2263573 - RNA, 19 nt, Artificial Sequence
  Description of Artificial Sequence: Synthetic oligonucleotide
aguccagacaaugcagaug

SEQ ID NO: 2263574 - RNA, 19 nt, Artificial Sequence
  Description of Artificial Sequence: Synthetic oligonucleotide
caggggaggacauugccca

SEQ ID NO: 2263575 - RNA, 19 nt, Artificial Sequence
  Description of Artificial Sequence: Synthetic oligonucleotide
uuggcccuccccuugcaga

SEQ ID NO: 2263576 - RNA, 19 nt, Artificial Sequence
  Description of Artificial Sequence: Synthetic oligonucleotide
gaucaaacacacacacaca

SEQ ID NO: 2263577 - RNA, 19 nt, Artificial Sequence
  Description of Artificial Sequence: Synthetic oligonucleotide
ggugucaggacgugguccc

SEQ ID NO: 2263578 - RNA, 19 nt, Artificial Sequence
  Description of Artificial Sequence: Synthetic oligonucleotide
ucaccgacgaaggccuggg

SEQ ID NO: 2263579 - RNA, 19 nt, Artificial Sequence
  Description of Artificial Sequence: Synthetic oligonucleotide
cucucucucucucaguaca

SEQ ID NO: 2263580 - RNA, 19 nt, Artificial Sequence
  Description of Artificial Sequence: Synthetic oligonucleotide
cccauucauguauaacugg

SEQ ID NO: 2263581 - RNA, 19 nt, Artificial Sequence
  Description of Artificial Sequence: Synthetic oligonucleotide
uugcccaucagugguccag

SEQ ID NO: 2263582 - RNA, 19 nt, Artificial Sequence
  Description of Artificial Sequence: Synthetic oligonucleotide
ucuuugcaccuccgaaggu

SEQ ID NO: 2263583 - RNA, 19 nt, Artificial Sequence
  Description of Artificial Sequence: Synthetic oligonucleotide
ucucucucucucucaguac

SEQ ID NO: 2263584 - RNA, 19 nt, Artificial Sequence
  Description of Artificial Sequence: Synthetic oligonucleotide
caccagcuuaucuucccag

SEQ ID NO: 2263585 - RNA, 19 nt, Artificial Sequence
  Description of Artificial Sequence: Synthetic oligonucleotide
ugguccagugcaguuggcc

SEQ ID NO: 2263586 - RNA, 19 nt, Artificial Sequence
  Description of Artificial Sequence: Synthetic oligonucleotide
uaguccagacaaugcagau

SEQ ID NO: 2263587 - RNA, 19 nt, Artificial Sequence
  Description of Artificial Sequence: Synthetic oligonucleotide
uggcuugauagggugccag

SEQ ID NO: 2263588 - RNA, 19 nt, Artificial Sequence
  Description of Artificial Sequence: Synthetic oligonucleotide
ucucucaguacaggcugag

SEQ ID NO: 2263589 - RNA, 19 nt, Artificial Sequence
  Description of Artificial Sequence: Synthetic oligonucleotide
agcccaucccugguagucc

SEQ ID NO: 2263590 - RNA, 19 nt, Artificial Sequence
  Description of Artificial Sequence: Synthetic oligonucleotide
ucucucucucucucucuca

SEQ ID NO: 2263591 - RNA, 19 nt, Artificial Sequence
  Description of Artificial Sequence: Synthetic oligonucleotide
cacagcccaucccugguag

SEQ ID NO: 2263592 - RNA, 19 nt, Artificial Sequence
  Description of Artificial Sequence: Synthetic oligonucleotide
uccuguucuuggcccagga

SEQ ID NO: 2263593 - RNA, 19 nt, Artificial Sequence
  Description of Artificial Sequence: Synthetic oligonucleotide
aagacaaggcacagucaga

SEQ ID NO: 2263594 - RNA, 19 nt, Artificial Sequence
  Description of Artificial Sequence: Synthetic oligonucleotide
caaaaccaugacacagauc

SEQ ID NO: 2263595 - RNA, 19 nt, Artificial Sequence
  Description of Artificial Sequence: Synthetic oligonucleotide
caaugucaccgacgaaggc

SEQ ID NO: 2263596 - RNA, 19 nt, Artificial Sequence
  Description of Artificial Sequence: Synthetic oligonucleotide
ggagggguucugaacaagg

SEQ ID NO: 2263597 - RNA, 19 nt, Artificial Sequence
  Description of Artificial Sequence: Synthetic oligonucleotide
uuugagcucccuggccagg

SEQ ID NO: 2263598 - RNA, 19 nt, Artificial Sequence
  Description of Artificial Sequence: Synthetic oligonucleotide
cauugcccaucaguggucc

SEQ ID NO: 2263599 - RNA, 19 nt, Artificial Sequence
  Description of Artificial Sequence: Synthetic oligonucleotide
gggcagugccccuucaagg

SEQ ID NO: 2263600 - RNA, 19 nt, Artificial Sequence
  Description of Artificial Sequence: Synthetic oligonucleotide
guaguccagacaaugcaga

SEQ ID NO: 2263601 - RNA, 19 nt, Artificial Sequence
  Description of Artificial Sequence: Synthetic oligonucleotide
acacacacacacacacaac

SEQ ID NO: 2263602 - RNA, 19 nt, Artificial Sequence
  Description of Artificial Sequence: Synthetic oligonucleotide
uccccaucugcaagccaag

SEQ ID NO: 2263603 - RNA, 19 nt, Artificial Sequence
  Description of Artificial Sequence: Synthetic oligonucleotide
ccugguaugcagaccacag

SEQ ID NO: 2263604 - RNA, 19 nt, Artificial Sequence
  Description of Artificial Sequence: Synthetic oligonucleotide
caggacguggucccacagg

SEQ ID NO: 2263605 - RNA, 19 nt, Artificial Sequence
  Description of Artificial Sequence: Synthetic oligonucleotide
cacacacaacaaaauaucu

SEQ ID NO: 2263606 - RNA, 19 nt, Artificial Sequence
  Description of Artificial Sequence: Synthetic oligonucleotide
augcagaccacagcccauc

SEQ ID NO: 2263607 - RNA, 19 nt, Artificial Sequence
  Description of Artificial Sequence: Synthetic oligonucleotide
aucucauguuacuuauaua

SEQ ID NO: 2263608 - RNA, 19 nt, Artificial Sequence
  Description of Artificial Sequence: Synthetic oligonucleotide
ccgacgaaggccugggugg

SEQ ID NO: 2263609 - RNA, 19 nt, Artificial Sequence
  Description of Artificial Sequence: Synthetic oligonucleotide
augucaccgacgaaggccu

SEQ ID NO: 2263610 - RNA, 19 nt, Artificial Sequence
  Description of Artificial Sequence: Synthetic oligonucleotide
ucucucucucucucucucu

SEQ ID NO: 2263611 - RNA, 19 nt, Artificial Sequence
  Description of Artificial Sequence: Synthetic oligonucleotide
aggcugagaagggcagugc

SEQ ID NO: 2263612 - RNA, 19 nt, Artificial Sequence
  Description of Artificial Sequence: Synthetic oligonucleotide
ccagcuuaucuucccaggg

SEQ ID NO: 2263613 - RNA, 19 nt, Artificial Sequence
  Description of Artificial Sequence: Synthetic oligonucleotide
caucagugguccagugcag

SEQ ID NO: 2263614 - RNA, 19 nt, Artificial Sequence
  Description of Artificial Sequence: Synthetic oligonucleotide
ugcaccuccgaagguuucc

SEQ ID NO: 2263615 - RNA, 19 nt, Artificial Sequence
  Description of Artificial Sequence: Synthetic oligonucleotide
uccugguaugcagaccaca

SEQ ID NO: 2263616 - RNA, 19 nt, Artificial Sequence
  Description of Artificial Sequence: Synthetic oligonucleotide
aggccuuagcuuccccauc

SEQ ID NO: 2263617 - RNA, 19 nt, Artificial Sequence
  Description of Artificial Sequence: Synthetic oligonucleotide
gauagggugccaggcugcc

SEQ ID NO: 2263618 - RNA, 19 nt, Artificial Sequence
  Description of Artificial Sequence: Synthetic oligonucleotide
uauccuguucuuggcccag

SEQ ID NO: 2263619 - RNA, 19 nt, Artificial Sequence
  Description of Artificial Sequence: Synthetic oligonucleotide
aucccugguaguccagaca

SEQ ID NO: 2263620 - RNA, 19 nt, Artificial Sequence
  Description of Artificial Sequence: Synthetic oligonucleotide
cagacaaugcagauguggu

SEQ ID NO: 2263621 - RNA, 19 nt, Artificial Sequence
  Description of Artificial Sequence: Synthetic oligonucleotide
cacacacacacacaacaaa

SEQ ID NO: 2263622 - RNA, 19 nt, Artificial Sequence
  Description of Artificial Sequence: Synthetic oligonucleotide
ccccuugcagacaucaaag

SEQ ID NO: 2263623 - RNA, 19 nt, Artificial Sequence
  Description of Artificial Sequence: Synthetic oligonucleotide
cucucucucucucucucuc

SEQ ID NO: 2263624 - RNA, 19 nt, Artificial Sequence
  Description of Artificial Sequence: Synthetic oligonucleotide
ggcugagaagggcagugcc

SEQ ID NO: 2263625 - RNA, 19 nt, Artificial Sequence
  Description of Artificial Sequence: Synthetic oligonucleotide
ucuucccaggggaggacau

SEQ ID NO: 2263626 - RNA, 19 nt, Artificial Sequence
  Description of Artificial Sequence: Synthetic oligonucleotide
aucugcaagccaaggguug

SEQ ID NO: 2263627 - RNA, 19 nt, Artificial Sequence
  Description of Artificial Sequence: Synthetic oligonucleotide
acauugcccaucagugguc

SEQ ID NO: 2263628 - RNA, 19 nt, Artificial Sequence
  Description of Artificial Sequence: Synthetic oligonucleotide
ccccauucauguauaacug

SEQ ID NO: 2263629 - RNA, 19 nt, Artificial Sequence
  Description of Artificial Sequence: Synthetic oligonucleotide
ucaccagagccccgaaguu

SEQ ID NO: 2263630 - RNA, 19 nt, Artificial Sequence
  Description of Artificial Sequence: Synthetic oligonucleotide
ggcuugauagggugccagg

SEQ ID NO: 2263631 - RNA, 19 nt, Artificial Sequence
  Description of Artificial Sequence: Synthetic oligonucleotide
ucccaggggaggacauugc

SEQ ID NO: 2263632 - RNA, 19 nt, Artificial Sequence
  Description of Artificial Sequence: Synthetic oligonucleotide
gaguuucaugucugugguc

SEQ ID NO: 2263633 - RNA, 19 nt, Artificial Sequence
  Description of Artificial Sequence: Synthetic oligonucleotide
gcuccucaugccuuggccc

SEQ ID NO: 2263634 - RNA, 19 nt, Artificial Sequence
  Description of Artificial Sequence: Synthetic oligonucleotide
ucucucucucucucucagu

SEQ ID NO: 2263635 - RNA, 19 nt, Artificial Sequence
  Description of Artificial Sequence: Synthetic oligonucleotide
ugccccuucaaggucccca

SEQ ID NO: 2263636 - RNA, 19 nt, Artificial Sequence
  Description of Artificial Sequence: Synthetic oligonucleotide
guauccuguucuuggccca

SEQ ID NO: 2263637 - RNA, 19 nt, Artificial Sequence
  Description of Artificial Sequence: Synthetic oligonucleotide
aagggucauuugagcuccc

SEQ ID NO: 2263638 - RNA, 19 nt, Artificial Sequence
  Description of Artificial Sequence: Synthetic oligonucleotide
ccucaagggucauuugagc

SEQ ID NO: 2263639 - RNA, 19 nt, Artificial Sequence
  Description of Artificial Sequence: Synthetic oligonucleotide
uggcccuccccuugcagac

SEQ ID NO: 2263640 - RNA, 19 nt, Artificial Sequence
  Description of Artificial Sequence: Synthetic oligonucleotide
ugcaagccaaggguugagu

SEQ ID NO: 2263641 - RNA, 19 nt, Artificial Sequence
  Description of Artificial Sequence: Synthetic oligonucleotide
ccaucagugguccagugca

SEQ ID NO: 2263642 - RNA, 19 nt, Artificial Sequence
  Description of Artificial Sequence: Synthetic oligonucleotide
aucagugguccagugcagu

SEQ ID NO: 2263643 - RNA, 19 nt, Artificial Sequence
  Description of Artificial Sequence: Synthetic oligonucleotide
cucucucucucucucagua

SEQ ID NO: 2263644 - RNA, 19 nt, Artificial Sequence
  Description of Artificial Sequence: Synthetic oligonucleotide
cucaccagagccccgaagu

SEQ ID NO: 2263645 - RNA, 19 nt, Artificial Sequence
  Description of Artificial Sequence: Synthetic oligonucleotide
accacagcccaucccuggu

SEQ ID NO: 2263646 - RNA, 19 nt, Artificial Sequence
  Description of Artificial Sequence: Synthetic oligonucleotide
gucaccgacgaaggccugg

SEQ ID NO: 2263647 - RNA, 19 nt, Artificial Sequence
  Description of Artificial Sequence: Synthetic oligonucleotide
gugccaggcugccagguuc

SEQ ID NO: 2263648 - RNA, 19 nt, Artificial Sequence
  Description of Artificial Sequence: Synthetic oligonucleotide
gguccagugcaguuggcca

SEQ ID NO: 2263649 - RNA, 19 nt, Artificial Sequence
  Description of Artificial Sequence: Synthetic oligonucleotide
ccaggggaggacauugccc

SEQ ID NO: 2263650 - RNA, 19 nt, Artificial Sequence
  Description of Artificial Sequence: Synthetic oligonucleotide
caggcugagaagggcagug

SEQ ID NO: 2263651 - RNA, 19 nt, Artificial Sequence
  Description of Artificial Sequence: Synthetic oligonucleotide
agugccccuucaagguccc

SEQ ID NO: 2263652 - RNA, 19 nt, Artificial Sequence
  Description of Artificial Sequence: Synthetic oligonucleotide
gcuugauagggugccaggc

SEQ ID NO: 2263653 - RNA, 19 nt, Artificial Sequence
  Description of Artificial Sequence: Synthetic oligonucleotide
ugguccccauucauguaua

SEQ ID NO: 2263654 - RNA, 19 nt, Artificial Sequence
  Description of Artificial Sequence: Synthetic oligonucleotide
acacacacacacacaacaa

SEQ ID NO: 2263655 - RNA, 19 nt, Artificial Sequence
  Description of Artificial Sequence: Synthetic oligonucleotide
cuuggcccuccccuugcag

SEQ ID NO: 2263656 - RNA, 19 nt, Artificial Sequence
  Description of Artificial Sequence: Synthetic oligonucleotide
uggcuccucaugccuuggc

SEQ ID NO: 2263657 - RNA, 19 nt, Artificial Sequence
  Description of Artificial Sequence: Synthetic oligonucleotide
gccucaagggucauuugag

SEQ ID NO: 2263658 - RNA, 19 nt, Artificial Sequence
  Description of Artificial Sequence: Synthetic oligonucleotide
ccugguaguccagacaaug

SEQ ID NO: 2263659 - RNA, 19 nt, Artificial Sequence
  Description of Artificial Sequence: Synthetic oligonucleotide
gacacagaucaaacacaca

SEQ ID NO: 2263660 - RNA, 19 nt, Artificial Sequence
  Description of Artificial Sequence: Synthetic oligonucleotide
ugugguccccauucaugua

SEQ ID NO: 2263661 - RNA, 19 nt, Artificial Sequence
  Description of Artificial Sequence: Synthetic oligonucleotide
cagucagaggagccucaag

SEQ ID NO: 2263662 - RNA, 19 nt, Artificial Sequence
  Description of Artificial Sequence: Synthetic oligonucleotide
gagccucaagggucauuug

SEQ ID NO: 2263663 - RNA, 19 nt, Artificial Sequence
  Description of Artificial Sequence: Synthetic oligonucleotide
cagugguccagugcaguug

SEQ ID NO: 2263664 - RNA, 19 nt, Artificial Sequence
  Description of Artificial Sequence: Synthetic oligonucleotide
cagacaucaaagguggacu

SEQ ID NO: 2263665 - RNA, 19 nt, Artificial Sequence
  Description of Artificial Sequence: Synthetic oligonucleotide
ugucaggacguggucccac

SEQ ID NO: 2263666 - RNA, 19 nt, Artificial Sequence
  Description of Artificial Sequence: Synthetic oligonucleotide
ggcuccucaugccuuggcc

SEQ ID NO: 2263667 - RNA, 19 nt, Artificial Sequence
  Description of Artificial Sequence: Synthetic oligonucleotide
cuccgaagguuuccaccag

SEQ ID NO: 2263668 - RNA, 19 nt, Artificial Sequence
  Description of Artificial Sequence: Synthetic oligonucleotide
ucugaacaagguggcuccu

SEQ ID NO: 2263669 - RNA, 19 nt, Artificial Sequence
  Description of Artificial Sequence: Synthetic oligonucleotide
ugccuaggaccugggcagg

SEQ ID NO: 2263670 - RNA, 19 nt, Artificial Sequence
  Description of Artificial Sequence: Synthetic oligonucleotide
caguuggccaugccuagga

SEQ ID NO: 2263671 - RNA, 19 nt, Artificial Sequence
  Description of Artificial Sequence: Synthetic oligonucleotide
caacaaaauaucucauguu

SEQ ID NO: 2263672 - RNA, 19 nt, Artificial Sequence
  Description of Artificial Sequence: Synthetic oligonucleotide
ccaaggguugaguuucaug

SEQ ID NO: 2263673 - RNA, 19 nt, Artificial Sequence
  Description of Artificial Sequence: Synthetic oligonucleotide
cuugauagggugccaggcu

SEQ ID NO: 2263674 - RNA, 19 nt, Artificial Sequence
  Description of Artificial Sequence: Synthetic oligonucleotide
ccuuagcuuccccaucugc

SEQ ID NO: 2263675 - RNA, 19 nt, Artificial Sequence
  Description of Artificial Sequence: Synthetic oligonucleotide
cacacacacacaacaaaau

SEQ ID NO: 2263676 - RNA, 19 nt, Artificial Sequence
  Description of Artificial Sequence: Synthetic oligonucleotide
agggagggguucugaacaa

SEQ ID NO: 2263677 - RNA, 19 nt, Artificial Sequence
  Description of Artificial Sequence: Synthetic oligonucleotide
uaucuucccaggggaggac

SEQ ID NO: 2263678 - RNA, 19 nt, Artificial Sequence
  Description of Artificial Sequence: Synthetic oligonucleotide
ugucaccgacgaaggccug

SEQ ID NO: 2263679 - RNA, 19 nt, Artificial Sequence
  Description of Artificial Sequence: Synthetic oligonucleotide
gcugccagguucucaccag

SEQ ID NO: 2263680 - RNA, 19 nt, Artificial Sequence
  Description of Artificial Sequence: Synthetic oligonucleotide
caccauccugguaugcaga

SEQ ID NO: 2263681 - RNA, 19 nt, Artificial Sequence
  Description of Artificial Sequence: Synthetic oligonucleotide
uugcaccuccgaagguuuc

SEQ ID NO: 2263682 - RNA, 19 nt, Artificial Sequence
  Description of Artificial Sequence: Synthetic oligonucleotide
ccuccucuaaaucucucuc

SEQ ID NO: 2263683 - RNA, 19 nt, Artificial Sequence
  Description of Artificial Sequence: Synthetic oligonucleotide
acacacacacacacacaca

SEQ ID NO: 2263684 - RNA, 19 nt, Artificial Sequence
  Description of Artificial Sequence: Synthetic oligonucleotide
aucuucccaggggaggaca

SEQ ID NO: 2263685 - RNA, 19 nt, Artificial Sequence
  Description of Artificial Sequence: Synthetic oligonucleotide
gguggcuccucaugccuug

SEQ ID NO: 2263686 - RNA, 19 nt, Artificial Sequence
  Description of Artificial Sequence: Synthetic oligonucleotide
auccugguaugcagaccac

SEQ ID NO: 2263687 - RNA, 19 nt, Artificial Sequence
  Description of Artificial Sequence: Synthetic oligonucleotide
cuccucuaaaucucucucu

SEQ ID NO: 2263688 - RNA, 19 nt, Artificial Sequence
  Description of Artificial Sequence: Synthetic oligonucleotide
uucucaccagagccccgaa

SEQ ID NO: 2263689 - RNA, 19 nt, Artificial Sequence
  Description of Artificial Sequence: Synthetic oligonucleotide
ggguugaguuucaugucug

SEQ ID NO: 2263690 - RNA, 19 nt, Artificial Sequence
  Description of Artificial Sequence: Synthetic oligonucleotide
cugaacaagguggcuccuc

SEQ ID NO: 2263691 - RNA, 19 nt, Artificial Sequence
  Description of Artificial Sequence: Synthetic oligonucleotide
gccagguucucaccagagc

SEQ ID NO: 2263692 - RNA, 19 nt, Artificial Sequence
  Description of Artificial Sequence: Synthetic oligonucleotide
auccuguucuuggcccagg

SEQ ID NO: 2263693 - RNA, 19 nt, Artificial Sequence
  Description of Artificial Sequence: Synthetic oligonucleotide
cucucucaguacaggcuga

SEQ ID NO: 2263694 - RNA, 19 nt, Artificial Sequence
  Description of Artificial Sequence: Synthetic oligonucleotide
gggaggacauugcccauca

SEQ ID NO: 2263695 - RNA, 19 nt, Artificial Sequence
  Description of Artificial Sequence: Synthetic oligonucleotide
cagagccccgaaguucacc

SEQ ID NO: 2263696 - RNA, 19 nt, Artificial Sequence
  Description of Artificial Sequence: Synthetic oligonucleotide
ccaugacacagaucaaaca

SEQ ID NO: 2263697 - RNA, 19 nt, Artificial Sequence
  Description of Artificial Sequence: Synthetic oligonucleotide
ccuccgaagguuuccacca

SEQ ID NO: 2263698 - RNA, 19 nt, Artificial Sequence
  Description of Artificial Sequence: Synthetic oligonucleotide
ccaaagugacaggcaaggg

SEQ ID NO: 2263699 - RNA, 19 nt, Artificial Sequence
  Description of Artificial Sequence: Synthetic oligonucleotide
cccaucagugguccagugc

SEQ ID NO: 2263700 - RNA, 19 nt, Artificial Sequence
  Description of Artificial Sequence: Synthetic oligonucleotide
gugcaguuggccaugccua

SEQ ID NO: 2263701 - RNA, 19 nt, Artificial Sequence
  Description of Artificial Sequence: Synthetic oligonucleotide
cugcaagccaaggguugag

SEQ ID NO: 2263702 - RNA, 19 nt, Artificial Sequence
  Description of Artificial Sequence: Synthetic oligonucleotide
gucaggacguggucccaca

SEQ ID NO: 2263703 - RNA, 19 nt, Artificial Sequence
  Description of Artificial Sequence: Synthetic oligonucleotide
caccuccgaagguuuccac

SEQ ID NO: 2263704 - RNA, 19 nt, Artificial Sequence
  Description of Artificial Sequence: Synthetic oligonucleotide
gagggguucugaacaaggu

SEQ ID NO: 2263705 - RNA, 19 nt, Artificial Sequence
  Description of Artificial Sequence: Synthetic oligonucleotide
auaucucauguuacuuaua

SEQ ID NO: 2263706 - RNA, 19 nt, Artificial Sequence
  Description of Artificial Sequence: Synthetic oligonucleotide
acaggcugagaagggcagu

SEQ ID NO: 2263707 - RNA, 19 nt, Artificial Sequence
  Description of Artificial Sequence: Synthetic oligonucleotide
cccgaaguucaccauccug

SEQ ID NO: 2263708 - RNA, 19 nt, Artificial Sequence
  Description of Artificial Sequence: Synthetic oligonucleotide
ggcaggugucaggacgugg

SEQ ID NO: 2263709 - RNA, 19 nt, Artificial Sequence
  Description of Artificial Sequence: Synthetic oligonucleotide
caagguccccaaagugaca

SEQ ID NO: 2263710 - RNA, 19 nt, Artificial Sequence
  Description of Artificial Sequence: Synthetic oligonucleotide
cccaggggaggacauugcc

SEQ ID NO: 2263711 - RNA, 19 nt, Artificial Sequence
  Description of Artificial Sequence: Synthetic oligonucleotide
caagccaaggguugaguuu

SEQ ID NO: 2263712 - RNA, 19 nt, Artificial Sequence
  Description of Artificial Sequence: Synthetic oligonucleotide
ccccaaagugacaggcaag

SEQ ID NO: 2263713 - RNA, 19 nt, Artificial Sequence
  Description of Artificial Sequence: Synthetic oligonucleotide
acagucagaggagccucaa

SEQ ID NO: 2263714 - RNA, 19 nt, Artificial Sequence
  Description of Artificial Sequence: Synthetic oligonucleotide
cagugcaguuggccaugcc

SEQ ID NO: 2263715 - RNA, 19 nt, Artificial Sequence
  Description of Artificial Sequence: Synthetic oligonucleotide
agggucauuugagcucccu

SEQ ID NO: 2263716 - RNA, 19 nt, Artificial Sequence
  Description of Artificial Sequence: Synthetic oligonucleotide
guggacuucuuugcaccuc

SEQ ID NO: 2263717 - RNA, 19 nt, Artificial Sequence
  Description of Artificial Sequence: Synthetic oligonucleotide
caucugcaagccaaggguu

SEQ ID NO: 2263718 - RNA, 19 nt, Artificial Sequence
  Description of Artificial Sequence: Synthetic oligonucleotide
gcaguuggccaugccuagg

SEQ ID NO: 2263719 - RNA, 19 nt, Artificial Sequence
  Description of Artificial Sequence: Synthetic oligonucleotide
cuaggaccugggcaggugu

SEQ ID NO: 2263720 - RNA, 19 nt, Artificial Sequence
  Description of Artificial Sequence: Synthetic oligonucleotide
acgaaggccuggguggcau

SEQ ID NO: 2263721 - RNA, 19 nt, Artificial Sequence
  Description of Artificial Sequence: Synthetic oligonucleotide
ccagaguauccuguucuug

SEQ ID NO: 2263722 - RNA, 19 nt, Artificial Sequence
  Description of Artificial Sequence: Synthetic oligonucleotide
cuuggcccaggauaaggau

SEQ ID NO: 2263723 - RNA, 19 nt, Artificial Sequence
  Description of Artificial Sequence: Synthetic oligonucleotide
gaacaagguggcuccucau

SEQ ID NO: 2263724 - RNA, 19 nt, Artificial Sequence
  Description of Artificial Sequence: Synthetic oligonucleotide
ccacagguugaacugugca

SEQ ID NO: 2263725 - RNA, 19 nt, Artificial Sequence
  Description of Artificial Sequence: Synthetic oligonucleotide
aggggaggacauugcccau

SEQ ID NO: 2263726 - RNA, 19 nt, Artificial Sequence
  Description of Artificial Sequence: Synthetic oligonucleotide
gggagggguucugaacaag

SEQ ID NO: 2263727 - RNA, 19 nt, Artificial Sequence
  Description of Artificial Sequence: Synthetic oligonucleotide
cuuugcaccuccgaagguu

SEQ ID NO: 2263728 - RNA, 19 nt, Artificial Sequence
  Description of Artificial Sequence: Synthetic oligonucleotide
aggccuccucuaaaucucu

SEQ ID NO: 2263729 - RNA, 19 nt, Artificial Sequence
  Description of Artificial Sequence: Synthetic oligonucleotide
acguggucccacagguuga

SEQ ID NO: 2263730 - RNA, 19 nt, Artificial Sequence
  Description of Artificial Sequence: Synthetic oligonucleotide
caaugcagauguggugcca

SEQ ID NO: 2263731 - RNA, 19 nt, Artificial Sequence
  Description of Artificial Sequence: Synthetic oligonucleotide
gcagugccccuucaagguc

SEQ ID NO: 2263732 - RNA, 19 nt, Artificial Sequence
  Description of Artificial Sequence: Synthetic oligonucleotide
cgaaguaaaccauuguuuu

SEQ ID NO: 2263733 - RNA, 19 nt, Artificial Sequence
  Description of Artificial Sequence: Synthetic oligonucleotide
ggaggacauugcccaucag

SEQ ID NO: 2263734 - RNA, 19 nt, Artificial Sequence
  Description of Artificial Sequence: Synthetic oligonucleotide
gguucucaccagagccccg

SEQ ID NO: 2263735 - RNA, 19 nt, Artificial Sequence
  Description of Artificial Sequence: Synthetic oligonucleotide
cuuccccaucugcaagcca

SEQ ID NO: 2263736 - RNA, 19 nt, Artificial Sequence
  Description of Artificial Sequence: Synthetic oligonucleotide
cucaugccuuggcccuccc

SEQ ID NO: 2263737 - RNA, 19 nt, Artificial Sequence
  Description of Artificial Sequence: Synthetic oligonucleotide
gcacagucagaggagccuc

SEQ ID NO: 2263738 - RNA, 19 nt, Artificial Sequence
  Description of Artificial Sequence: Synthetic oligonucleotide
gucugugguccccauucau

SEQ ID NO: 2263739 - RNA, 19 nt, Artificial Sequence
  Description of Artificial Sequence: Synthetic oligonucleotide
gccuuagcuuccccaucug

SEQ ID NO: 2263740 - RNA, 19 nt, Artificial Sequence
  Description of Artificial Sequence: Synthetic oligonucleotide
caggccuuagcuuccccau

SEQ ID NO: 2263741 - RNA, 19 nt, Artificial Sequence
  Description of Artificial Sequence: Synthetic oligonucleotide
ggagccucaagggucauuu

SEQ ID NO: 2263742 - RNA, 19 nt, Artificial Sequence
  Description of Artificial Sequence: Synthetic oligonucleotide
ccauccugguaugcagacc

SEQ ID NO: 2263743 - RNA, 19 nt, Artificial Sequence
  Description of Artificial Sequence: Synthetic oligonucleotide
aggcaagggagggguucug

SEQ ID NO: 2263744 - RNA, 19 nt, Artificial Sequence
  Description of Artificial Sequence: Synthetic oligonucleotide
ccaggccuuagcuucccca

SEQ ID NO: 2263745 - RNA, 19 nt, Artificial Sequence
  Description of Artificial Sequence: Synthetic oligonucleotide
gcaagccaaggguugaguu

SEQ ID NO: 2263746 - RNA, 19 nt, Artificial Sequence
  Description of Artificial Sequence: Synthetic oligonucleotide
gcccaucagugguccagug

SEQ ID NO: 2263747 - RNA, 19 nt, Artificial Sequence
  Description of Artificial Sequence: Synthetic oligonucleotide
ggggaggacauugcccauc

SEQ ID NO: 2263748 - RNA, 19 nt, Artificial Sequence
  Description of Artificial Sequence: Synthetic oligonucleotide
guggcuugauagggugcca

SEQ ID NO: 2263749 - RNA, 19 nt, Artificial Sequence
  Description of Artificial Sequence: Synthetic oligonucleotide
agccaaggguugaguuuca

SEQ ID NO: 2263750 - RNA, 19 nt, Artificial Sequence
  Description of Artificial Sequence: Synthetic oligonucleotide
ccuccccuugcagacauca

SEQ ID NO: 2263751 - RNA, 19 nt, Artificial Sequence
  Description of Artificial Sequence: Synthetic oligonucleotide
ggcacagucagaggagccu

SEQ ID NO: 2263752 - RNA, 19 nt, Artificial Sequence
  Description of Artificial Sequence: Synthetic oligonucleotide
guggucccacagguugaac

SEQ ID NO: 2263753 - RNA, 19 nt, Artificial Sequence
  Description of Artificial Sequence: Synthetic oligonucleotide
ggcaagggagggguucuga

SEQ ID NO: 2263754 - RNA, 19 nt, Artificial Sequence
  Description of Artificial Sequence: Synthetic oligonucleotide
gccaugccuaggaccuggg

SEQ ID NO: 2263755 - RNA, 19 nt, Artificial Sequence
  Description of Artificial Sequence: Synthetic oligonucleotide
ccccagaguauccuguucu

SEQ ID NO: 2263756 - RNA, 19 nt, Artificial Sequence
  Description of Artificial Sequence: Synthetic oligonucleotide
ccaccagcuuaucuuccca

SEQ ID NO: 2263757 - RNA, 19 nt, Artificial Sequence
  Description of Artificial Sequence: Synthetic oligonucleotide
ccucuaaaucucucucucu

SEQ ID NO: 2263758 - RNA, 19 nt, Artificial Sequence
  Description of Artificial Sequence: Synthetic oligonucleotide
ccgaagguuuccaccagcu

SEQ ID NO: 2263759 - RNA, 19 nt, Artificial Sequence
  Description of Artificial Sequence: Synthetic oligonucleotide
ccuaggaccugggcaggug

SEQ ID NO: 2263760 - RNA, 19 nt, Artificial Sequence
  Description of Artificial Sequence: Synthetic oligonucleotide
gguucugaacaagguggcu

SEQ ID NO: 2263761 - RNA, 19 nt, Artificial Sequence
  Description of Artificial Sequence: Synthetic oligonucleotide
gccccuucaagguccccaa

SEQ ID NO: 2263762 - RNA, 19 nt, Artificial Sequence
  Description of Artificial Sequence: Synthetic oligonucleotide
ccagugcaguuggccaugc

SEQ ID NO: 2263763 - RNA, 19 nt, Artificial Sequence
  Description of Artificial Sequence: Synthetic oligonucleotide
aggagccucaagggucauu

SEQ ID NO: 2263764 - RNA, 19 nt, Artificial Sequence
  Description of Artificial Sequence: Synthetic oligonucleotide
gcaccuccgaagguuucca

SEQ ID NO: 2263765 - RNA, 19 nt, Artificial Sequence
  Description of Artificial Sequence: Synthetic oligonucleotide
gugucaggacgugguccca

SEQ ID NO: 2263766 - RNA, 19 nt, Artificial Sequence
  Description of Artificial Sequence: Synthetic oligonucleotide
caggcaagggagggguucu

SEQ ID NO: 2263767 - RNA, 19 nt, Artificial Sequence
  Description of Artificial Sequence: Synthetic oligonucleotide
gagccccgaaguucaccau

SEQ ID NO: 2263768 - RNA, 19 nt, Artificial Sequence
  Description of Artificial Sequence: Synthetic oligonucleotide
caugucugugguccccauu

SEQ ID NO: 2263769 - RNA, 19 nt, Artificial Sequence
  Description of Artificial Sequence: Synthetic oligonucleotide
ccauguggcuugauagggu

SEQ ID NO: 2263770 - RNA, 19 nt, Artificial Sequence
  Description of Artificial Sequence: Synthetic oligonucleotide
ggccuccucuaaaucucuc

SEQ ID NO: 2263771 - RNA, 19 nt, Artificial Sequence
  Description of Artificial Sequence: Synthetic oligonucleotide
ggcccaggauaaggauacc

SEQ ID NO: 2263772 - RNA, 19 nt, Artificial Sequence
  Description of Artificial Sequence: Synthetic oligonucleotide
ccagagccccgaaguucac

SEQ ID NO: 2263773 - RNA, 19 nt, Artificial Sequence
  Description of Artificial Sequence: Synthetic oligonucleotide
cgacgaaggccuggguggc

SEQ ID NO: 2263774 - RNA, 19 nt, Artificial Sequence
  Description of Artificial Sequence: Synthetic oligonucleotide
gggcaggugucaggacgug

SEQ ID NO: 2263775 - RNA, 19 nt, Artificial Sequence
  Description of Artificial Sequence: Synthetic oligonucleotide
ccaucccugguaguccaga

SEQ ID NO: 2263776 - RNA, 19 nt, Artificial Sequence
  Description of Artificial Sequence: Synthetic oligonucleotide
gugccccuucaaggucccc

SEQ ID NO: 2263777 - RNA, 19 nt, Artificial Sequence
  Description of Artificial Sequence: Synthetic oligonucleotide
gacaggcaagggagggguu

SEQ ID NO: 2263778 - RNA, 19 nt, Artificial Sequence
  Description of Artificial Sequence: Synthetic oligonucleotide
ggccuggguggcaucaaau

SEQ ID NO: 2263779 - RNA, 19 nt, Artificial Sequence
  Description of Artificial Sequence: Synthetic oligonucleotide
caccgacgaaggccugggu

SEQ ID NO: 2263780 - RNA, 19 nt, Artificial Sequence
  Description of Artificial Sequence: Synthetic oligonucleotide
cuucccaggggaggacauu

SEQ ID NO: 2263781 - RNA, 19 nt, Artificial Sequence
  Description of Artificial Sequence: Synthetic oligonucleotide
gaggagccucaagggucau

SEQ ID NO: 2263782 - RNA, 19 nt, Artificial Sequence
  Description of Artificial Sequence: Synthetic oligonucleotide
cccuccccuugcagacauc

SEQ ID NO: 2263783 - RNA, 19 nt, Artificial Sequence
  Description of Artificial Sequence: Synthetic oligonucleotide
gccaaggguugaguuucau

SEQ ID NO: 2263784 - RNA, 19 nt, Artificial Sequence
  Description of Artificial Sequence: Synthetic oligonucleotide
gccuaggaccugggcaggu

SEQ ID NO: 2263785 - RNA, 19 nt, Artificial Sequence
  Description of Artificial Sequence: Synthetic oligonucleotide
cguggucccacagguugaa

SEQ ID NO: 2263786 - RNA, 19 nt, Artificial Sequence
  Description of Artificial Sequence: Synthetic oligonucleotide
ggauaccauguggcuugau

SEQ ID NO: 2263787 - RNA, 19 nt, Artificial Sequence
  Description of Artificial Sequence: Synthetic oligonucleotide
ggacguggucccacagguu

SEQ ID NO: 2263788 - RNA, 19 nt, Artificial Sequence
  Description of Artificial Sequence: Synthetic oligonucleotide
cgaagguuuccaccagcuu

SEQ ID NO: 2263789 - RNA, 19 nt, Artificial Sequence
  Description of Artificial Sequence: Synthetic oligonucleotide
cccugguaguccagacaau

SEQ ID NO: 2263790 - RNA, 19 nt, Artificial Sequence
  Description of Artificial Sequence: Synthetic oligonucleotide
ccccgaaguucaccauccu

SEQ ID NO: 2263791 - RNA, 19 nt, Artificial Sequence
  Description of Artificial Sequence: Synthetic oligonucleotide
aagaauuggacaauggggc

SEQ ID NO: 2263792 - RNA, 19 nt, Artificial Sequence
  Description of Artificial Sequence: Synthetic oligonucleotide
aauugcaccauccacagau

SEQ ID NO: 2263793 - RNA, 19 nt, Artificial Sequence
  Description of Artificial Sequence: Synthetic oligonucleotide
uauugaaauaucaaaugca

SEQ ID NO: 2263794 - RNA, 19 nt, Artificial Sequence
  Description of Artificial Sequence: Synthetic oligonucleotide
ucuauugaaauaucaaaug

SEQ ID NO: 2263795 - RNA, 19 nt, Artificial Sequence
  Description of Artificial Sequence: Synthetic oligonucleotide
ugaugauuauguuuugucg

SEQ ID NO: 2263796 - RNA, 19 nt, Artificial Sequence
  Description of Artificial Sequence: Synthetic oligonucleotide
gaugauuauguuuugucgc

SEQ ID NO: 2263797 - RNA, 19 nt, Artificial Sequence
  Description of Artificial Sequence: Synthetic oligonucleotide
gaagaauuggacaaugggg

SEQ ID NO: 2263798 - RNA, 19 nt, Artificial Sequence
  Description of Artificial Sequence: Synthetic oligonucleotide
cuauugaaauaucaaaugc

SEQ ID NO: 2263799 - RNA, 19 nt, Artificial Sequence
  Description of Artificial Sequence: Synthetic oligonucleotide
uguauugucacagugucag

SEQ ID NO: 2263800 - RNA, 19 nt, Artificial Sequence
  Description of Artificial Sequence: Synthetic oligonucleotide
  modified_base (6)..(6): a, c, u, g, unknown or other
aaaggngcuccauuucgcc

SEQ ID NO: 2263801 - RNA, 19 nt, Artificial Sequence
  Description of Artificial Sequence: Synthetic oligonucleotide
uggacaauggggcagacgc

SEQ ID NO: 2263802 - RNA, 19 nt, Artificial Sequence
  Description of Artificial Sequence: Synthetic oligonucleotide
uuuacaaaauuuacucugc

SEQ ID NO: 2263803 - RNA, 19 nt, Artificial Sequence
  Description of Artificial Sequence: Synthetic oligonucleotide
augauuauguuuugucgcc

SEQ ID NO: 2263804 - RNA, 19 nt, Artificial Sequence
  Description of Artificial Sequence: Synthetic oligonucleotide
caaaauacgaacuucguca

SEQ ID NO: 2263805 - RNA, 19 nt, Artificial Sequence
  Description of Artificial Sequence: Synthetic oligonucleotide
aacugaacagcagauacuc

SEQ ID NO: 2263806 - RNA, 19 nt, Artificial Sequence
  Description of Artificial Sequence: Synthetic oligonucleotide
auauuugauuaaaaguucc

SEQ ID NO: 2263807 - RNA, 19 nt, Artificial Sequence
  Description of Artificial Sequence: Synthetic oligonucleotide
uguuucaucuguuagguuc

SEQ ID NO: 2263808 - RNA, 19 nt, Artificial Sequence
  Description of Artificial Sequence: Synthetic oligonucleotide
uguuuugucgcccaaugca

SEQ ID NO: 2263809 - RNA, 19 nt, Artificial Sequence
  Description of Artificial Sequence: Synthetic oligonucleotide
aauacugacguagaggagu

SEQ ID NO: 2263810 - RNA, 19 nt, Artificial Sequence
  Description of Artificial Sequence: Synthetic oligonucleotide
uuuaacauauccuuugcau

SEQ ID NO: 2263811 - RNA, 19 nt, Artificial Sequence
  Description of Artificial Sequence: Synthetic oligonucleotide
uaaaaguuccaccaccucu

SEQ ID NO: 2263812 - RNA, 19 nt, Artificial Sequence
  Description of Artificial Sequence: Synthetic oligonucleotide
ugagcuaacuacuugcuga

SEQ ID NO: 2263813 - RNA, 19 nt, Artificial Sequence
  Description of Artificial Sequence: Synthetic oligonucleotide
aguggagaaguucccagcc

SEQ ID NO: 2263814 - RNA, 19 nt, Artificial Sequence
  Description of Artificial Sequence: Synthetic oligonucleotide
accaugcuuaagcaaaacc

SEQ ID NO: 2263815 - RNA, 19 nt, Artificial Sequence
  Description of Artificial Sequence: Synthetic oligonucleotide
uucgccauacaaaauacga

SEQ ID NO: 2263816 - RNA, 19 nt, Artificial Sequence
  Description of Artificial Sequence: Synthetic oligonucleotide
aauguagcuaauacugacg

SEQ ID NO: 2263817 - RNA, 19 nt, Artificial Sequence
  Description of Artificial Sequence: Synthetic oligonucleotide
guagcuaauacugacguag

SEQ ID NO: 2263818 - RNA, 19 nt, Artificial Sequence
  Description of Artificial Sequence: Synthetic oligonucleotide
uuaagcaaaaccucuacua

SEQ ID NO: 2263819 - RNA, 19 nt, Artificial Sequence
  Description of Artificial Sequence: Synthetic oligonucleotide
cuaauacugacguagagga

SEQ ID NO: 2263820 - RNA, 19 nt, Artificial Sequence
  Description of Artificial Sequence: Synthetic oligonucleotide
aaugcaguuuuacaaaauu

SEQ ID NO: 2263821 - RNA, 19 nt, Artificial Sequence
  Description of Artificial Sequence: Synthetic oligonucleotide
caaacugaacagcagauac

SEQ ID NO: 2263822 - RNA, 19 nt, Artificial Sequence
  Description of Artificial Sequence: Synthetic oligonucleotide
ugugguagaguaaugccca

SEQ ID NO: 2263823 - RNA, 19 nt, Artificial Sequence
  Description of Artificial Sequence: Synthetic oligonucleotide
ugucuauugaaauaucaaa

SEQ ID NO: 2263824 - RNA, 19 nt, Artificial Sequence
  Description of Artificial Sequence: Synthetic oligonucleotide
uguguauugucacaguguc

SEQ ID NO: 2263825 - RNA, 19 nt, Artificial Sequence
  Description of Artificial Sequence: Synthetic oligonucleotide
uauuugauuaaaaguucca

SEQ ID NO: 2263826 - RNA, 19 nt, Artificial Sequence
  Description of Artificial Sequence: Synthetic oligonucleotide
  modified_base (8)..(8): a, c, u, g, unknown or other
guaaaggngcuccauuucg

SEQ ID NO: 2263827 - RNA, 19 nt, Artificial Sequence
  Description of Artificial Sequence: Synthetic oligonucleotide
ugaauugcaccauccacag

SEQ ID NO: 2263828 - RNA, 19 nt, Artificial Sequence
  Description of Artificial Sequence: Synthetic oligonucleotide
  modified_base (17)..(17): a, c, u, g, unknown or other
cagucugucguaaaggngc

SEQ ID NO: 2263829 - RNA, 19 nt, Artificial Sequence
  Description of Artificial Sequence: Synthetic oligonucleotide
cauauuugauuaaaaguuc

SEQ ID NO: 2263830 - RNA, 19 nt, Artificial Sequence
  Description of Artificial Sequence: Synthetic oligonucleotide
ucuguuagguucaccaccc

SEQ ID NO: 2263831 - RNA, 19 nt, Artificial Sequence
  Description of Artificial Sequence: Synthetic oligonucleotide
aucgugaugacuugcugac

SEQ ID NO: 2263832 - RNA, 19 nt, Artificial Sequence
  Description of Artificial Sequence: Synthetic oligonucleotide
uauguuuugucgcccaaug

SEQ ID NO: 2263833 - RNA, 19 nt, Artificial Sequence
  Description of Artificial Sequence: Synthetic oligonucleotide
uugguauugauuugguucu

SEQ ID NO: 2263834 - RNA, 19 nt, Artificial Sequence
  Description of Artificial Sequence: Synthetic oligonucleotide
aaaauuuacucugcgugug

SEQ ID NO: 2263835 - RNA, 19 nt, Artificial Sequence
  Description of Artificial Sequence: Synthetic oligonucleotide
ugcuaaaucuucauuucca

SEQ ID NO: 2263836 - RNA, 19 nt, Artificial Sequence
  Description of Artificial Sequence: Synthetic oligonucleotide
acuuacaccggcucggagg

SEQ ID NO: 2263837 - RNA, 19 nt, Artificial Sequence
  Description of Artificial Sequence: Synthetic oligonucleotide
ucgguaacuaucgugauga

SEQ ID NO: 2263838 - RNA, 19 nt, Artificial Sequence
  Description of Artificial Sequence: Synthetic oligonucleotide
  modified_base (7)..(7): a, c, u, g, unknown or other
uaaaggngcuccauuucgc

SEQ ID NO: 2263839 - RNA, 19 nt, Artificial Sequence
  Description of Artificial Sequence: Synthetic oligonucleotide
uaauguagcuaauacugac

SEQ ID NO: 2263840 - RNA, 19 nt, Artificial Sequence
  Description of Artificial Sequence: Synthetic oligonucleotide
uugauuugguucugcauag

SEQ ID NO: 2263841 - RNA, 19 nt, Artificial Sequence
  Description of Artificial Sequence: Synthetic oligonucleotide
acugacguagaggaguucc

SEQ ID NO: 2263842 - RNA, 19 nt, Artificial Sequence
  Description of Artificial Sequence: Synthetic oligonucleotide
agauucugcaguaaccacc

SEQ ID NO: 2263843 - RNA, 19 nt, Artificial Sequence
  Description of Artificial Sequence: Synthetic oligonucleotide
ucaaaugcaguuuuacaaa

SEQ ID NO: 2263844 - RNA, 19 nt, Artificial Sequence
  Description of Artificial Sequence: Synthetic oligonucleotide
uccaagcuggauuccaucg

SEQ ID NO: 2263845 - RNA, 19 nt, Artificial Sequence
  Description of Artificial Sequence: Synthetic oligonucleotide
  modified_base (14)..(14): a, c, u, g, unknown or other
ucugucguaaaggngcucc

SEQ ID NO: 2263846 - RNA, 19 nt, Artificial Sequence
  Description of Artificial Sequence: Synthetic oligonucleotide
auugauuugguucugcaua

SEQ ID NO: 2263847 - RNA, 19 nt, Artificial Sequence
  Description of Artificial Sequence: Synthetic oligonucleotide
aaaauacgaacuucgucau

SEQ ID NO: 2263848 - RNA, 19 nt, Artificial Sequence
  Description of Artificial Sequence: Synthetic oligonucleotide
guaaugcccauacugugcg

SEQ ID NO: 2263849 - RNA, 19 nt, Artificial Sequence
  Description of Artificial Sequence: Synthetic oligonucleotide
uuucgccauacaaaauacg

SEQ ID NO: 2263850 - RNA, 19 nt, Artificial Sequence
  Description of Artificial Sequence: Synthetic oligonucleotide
uacuaugcuggcauggccc

SEQ ID NO: 2263851 - RNA, 19 nt, Artificial Sequence
  Description of Artificial Sequence: Synthetic oligonucleotide
caccauauuugauuaaaag

SEQ ID NO: 2263852 - RNA, 19 nt, Artificial Sequence
  Description of Artificial Sequence: Synthetic oligonucleotide
gacgcuucagcuaaggcag

SEQ ID NO: 2263853 - RNA, 19 nt, Artificial Sequence
  Description of Artificial Sequence: Synthetic oligonucleotide
acuaguuggaauggagugc

SEQ ID NO: 2263854 - RNA, 19 nt, Artificial Sequence
  Description of Artificial Sequence: Synthetic oligonucleotide
uuugcauugacgucagcac

SEQ ID NO: 2263855 - RNA, 19 nt, Artificial Sequence
  Description of Artificial Sequence: Synthetic oligonucleotide
ucugugguagaguaaugcc

SEQ ID NO: 2263856 - RNA, 19 nt, Artificial Sequence
  Description of Artificial Sequence: Synthetic oligonucleotide
gaaguucccagccagucug

SEQ ID NO: 2263857 - RNA, 19 nt, Artificial Sequence
  Description of Artificial Sequence: Synthetic oligonucleotide
aacuaucgugaugacuugc

SEQ ID NO: 2263858 - RNA, 19 nt, Artificial Sequence
  Description of Artificial Sequence: Synthetic oligonucleotide
gcuaauguagcuaauacug

SEQ ID NO: 2263859 - RNA, 19 nt, Artificial Sequence
  Description of Artificial Sequence: Synthetic oligonucleotide
uaagcaaaaccucuacuau

SEQ ID NO: 2263860 - RNA, 19 nt, Artificial Sequence
  Description of Artificial Sequence: Synthetic oligonucleotide
aguaaugcccauacugugc

SEQ ID NO: 2263861 - RNA, 19 nt, Artificial Sequence
  Description of Artificial Sequence: Synthetic oligonucleotide
aguguguauugucacagug

SEQ ID NO: 2263862 - RNA, 19 nt, Artificial Sequence
  Description of Artificial Sequence: Synthetic oligonucleotide
aaaccucuacuaugcuggc

SEQ ID NO: 2263863 - RNA, 19 nt, Artificial Sequence
  Description of Artificial Sequence: Synthetic oligonucleotide
auguuuugucgcccaaugc

SEQ ID NO: 2263864 - RNA, 19 nt, Artificial Sequence
  Description of Artificial Sequence: Synthetic oligonucleotide
uaucgugaugacuugcuga

SEQ ID NO: 2263865 - RNA, 19 nt, Artificial Sequence
  Description of Artificial Sequence: Synthetic oligonucleotide
cugugguagaguaaugccc

SEQ ID NO: 2263866 - RNA, 19 nt, Artificial Sequence
  Description of Artificial Sequence: Synthetic oligonucleotide
uuaacauauccuuugcauu

SEQ ID NO: 2263867 - RNA, 19 nt, Artificial Sequence
  Description of Artificial Sequence: Synthetic oligonucleotide
aaauacgaacuucgucauc

SEQ ID NO: 2263868 - RNA, 19 nt, Artificial Sequence
  Description of Artificial Sequence: Synthetic oligonucleotide
acuacuggaguuucugaag

SEQ ID NO: 2263869 - RNA, 19 nt, Artificial Sequence
  Description of Artificial Sequence: Synthetic oligonucleotide
caugcuuaagcaaaaccuc

SEQ ID NO: 2263870 - RNA, 19 nt, Artificial Sequence
  Description of Artificial Sequence: Synthetic oligonucleotide
aguuucugaagaauuggac

SEQ ID NO: 2263871 - RNA, 19 nt, Artificial Sequence
  Description of Artificial Sequence: Synthetic oligonucleotide
auuuacucugcguguguac

SEQ ID NO: 2263872 - RNA, 19 nt, Artificial Sequence
  Description of Artificial Sequence: Synthetic oligonucleotide
agacgcuucagcuaaggca

SEQ ID NO: 2263873 - RNA, 19 nt, Artificial Sequence
  Description of Artificial Sequence: Synthetic oligonucleotide
ugcaguaaccaccuccucu

SEQ ID NO: 2263874 - RNA, 19 nt, Artificial Sequence
  Description of Artificial Sequence: Synthetic oligonucleotide
uacaaaauacgaacuucgu

SEQ ID NO: 2263875 - RNA, 19 nt, Artificial Sequence
  Description of Artificial Sequence: Synthetic oligonucleotide
auuucgccauacaaaauac

SEQ ID NO: 2263876 - RNA, 19 nt, Artificial Sequence
  Description of Artificial Sequence: Synthetic oligonucleotide
agcuaauguagcuaauacu

SEQ ID NO: 2263877 - RNA, 19 nt, Artificial Sequence
  Description of Artificial Sequence: Synthetic oligonucleotide
gauuccaucgguaacuauc

SEQ ID NO: 2263878 - RNA, 19 nt, Artificial Sequence
  Description of Artificial Sequence: Synthetic oligonucleotide
ucccaaacugaacagcaga

SEQ ID NO: 2263879 - RNA, 19 nt, Artificial Sequence
  Description of Artificial Sequence: Synthetic oligonucleotide
cugaagaauuggacaaugg

SEQ ID NO: 2263880 - RNA, 19 nt, Artificial Sequence
  Description of Artificial Sequence: Synthetic oligonucleotide
ucagcuaaggcagcuaaug

SEQ ID NO: 2263881 - RNA, 19 nt, Artificial Sequence
  Description of Artificial Sequence: Synthetic oligonucleotide
auuccaucgguaacuaucg

SEQ ID NO: 2263882 - RNA, 19 nt, Artificial Sequence
  Description of Artificial Sequence: Synthetic oligonucleotide
caucccacuaguuggaaug

SEQ ID NO: 2263883 - RNA, 19 nt, Artificial Sequence
  Description of Artificial Sequence: Synthetic oligonucleotide
uccaucgguaacuaucgug

SEQ ID NO: 2263884 - RNA, 19 nt, Artificial Sequence
  Description of Artificial Sequence: Synthetic oligonucleotide
cucagaagcugccaugugc

SEQ ID NO: 2263885 - RNA, 19 nt, Artificial Sequence
  Description of Artificial Sequence: Synthetic oligonucleotide
ucuccauuaucuccguaca

SEQ ID NO: 2263886 - RNA, 19 nt, Artificial Sequence
  Description of Artificial Sequence: Synthetic oligonucleotide
aggaguaccucugugguag

SEQ ID NO: 2263887 - RNA, 19 nt, Artificial Sequence
  Description of Artificial Sequence: Synthetic oligonucleotide
gaguaaugcccauacugug

SEQ ID NO: 2263888 - RNA, 19 nt, Artificial Sequence
  Description of Artificial Sequence: Synthetic oligonucleotide
uuugucgcccaaugcagag

SEQ ID NO: 2263889 - RNA, 19 nt, Artificial Sequence
  Description of Artificial Sequence: Synthetic oligonucleotide
cacuaguuggaauggagug

SEQ ID NO: 2263890 - RNA, 19 nt, Artificial Sequence
  Description of Artificial Sequence: Synthetic oligonucleotide
acaaugaucggcuggccca

SEQ ID NO: 2263891 - RNA, 19 nt, Artificial Sequence
  Description of Artificial Sequence: Synthetic oligonucleotide
acuacuugcugaauugcac

SEQ ID NO: 2263892 - RNA, 19 nt, Artificial Sequence
  Description of Artificial Sequence: Synthetic oligonucleotide
ugugcggccagaugaagug

SEQ ID NO: 2263893 - RNA, 19 nt, Artificial Sequence
  Description of Artificial Sequence: Synthetic oligonucleotide
uuagguucaccaccccucc

SEQ ID NO: 2263894 - RNA, 19 nt, Artificial Sequence
  Description of Artificial Sequence: Synthetic oligonucleotide
ggcaucccuacuuacaccg

SEQ ID NO: 2263895 - RNA, 19 nt, Artificial Sequence
  Description of Artificial Sequence: Synthetic oligonucleotide
  modified_base (10)..(10): a, c, u, g, unknown or other
ucguaaaggngcuccauuu

SEQ ID NO: 2263896 - RNA, 19 nt, Artificial Sequence
  Description of Artificial Sequence: Synthetic oligonucleotide
uccggguugguauugauuu

SEQ ID NO: 2263897 - RNA, 19 nt, Artificial Sequence
  Description of Artificial Sequence: Synthetic oligonucleotide
auugucuauugaaauauca

SEQ ID NO: 2263898 - RNA, 19 nt, Artificial Sequence
  Description of Artificial Sequence: Synthetic oligonucleotide
acaucagcaccauauuuga

SEQ ID NO: 2263899 - RNA, 19 nt, Artificial Sequence
  Description of Artificial Sequence: Synthetic oligonucleotide
ucugcguguguacaucagc

SEQ ID NO: 2263900 - RNA, 19 nt, Artificial Sequence
  Description of Artificial Sequence: Synthetic oligonucleotide
ugcauagcaaucuguaaua

SEQ ID NO: 2263901 - RNA, 19 nt, Artificial Sequence
  Description of Artificial Sequence: Synthetic oligonucleotide
uaauacugacguagaggag

SEQ ID NO: 2263902 - RNA, 19 nt, Artificial Sequence
  Description of Artificial Sequence: Synthetic oligonucleotide
uguuagguucaccaccccu

SEQ ID NO: 2263903 - RNA, 19 nt, Artificial Sequence
  Description of Artificial Sequence: Synthetic oligonucleotide
uccauuaucuccguacacu

SEQ ID NO: 2263904 - RNA, 19 nt, Artificial Sequence
  Description of Artificial Sequence: Synthetic oligonucleotide
ucagcaccaugcuuaagca

SEQ ID NO: 2263905 - RNA, 19 nt, Artificial Sequence
  Description of Artificial Sequence: Synthetic oligonucleotide
auuaaaaguuccaccaccu

SEQ ID NO: 2263906 - RNA, 19 nt, Artificial Sequence
  Description of Artificial Sequence: Synthetic oligonucleotide
gaauuggacaauggggcag

SEQ ID NO: 2263907 - RNA, 19 nt, Artificial Sequence
  Description of Artificial Sequence: Synthetic oligonucleotide
cugcuaaaucuucauuucc

SEQ ID NO: 2263908 - RNA, 19 nt, Artificial Sequence
  Description of Artificial Sequence: Synthetic oligonucleotide
uuuacucugcguguguaca

SEQ ID NO: 2263909 - RNA, 19 nt, Artificial Sequence
  Description of Artificial Sequence: Synthetic oligonucleotide
uacuugcugaauugcacca

SEQ ID NO: 2263910 - RNA, 19 nt, Artificial Sequence
  Description of Artificial Sequence: Synthetic oligonucleotide
uugcugaauugcaccaucc

SEQ ID NO: 2263911 - RNA, 19 nt, Artificial Sequence
  Description of Artificial Sequence: Synthetic oligonucleotide
agcuaauacugacguagag

SEQ ID NO: 2263912 - RNA, 19 nt, Artificial Sequence
  Description of Artificial Sequence: Synthetic oligonucleotide
gcuaauacugacguagagg

SEQ ID NO: 2263913 - RNA, 19 nt, Artificial Sequence
  Description of Artificial Sequence: Synthetic oligonucleotide
  modified_base (5)..(5): a, c, u, g, unknown or other
aaggngcuccauuucgcca

SEQ ID NO: 2263914 - RNA, 19 nt, Artificial Sequence
  Description of Artificial Sequence: Synthetic oligonucleotide
uuuugucgcccaaugcaga

SEQ ID NO: 2263915 - RNA, 19 nt, Artificial Sequence
  Description of Artificial Sequence: Synthetic oligonucleotide
cagcuaauguagcuaauac

SEQ ID NO: 2263916 - RNA, 19 nt, Artificial Sequence
  Description of Artificial Sequence: Synthetic oligonucleotide
augaucggcuggcccaucc

SEQ ID NO: 2263917 - RNA, 19 nt, Artificial Sequence
  Description of Artificial Sequence: Synthetic oligonucleotide
gguagaguaaugcccauac

SEQ ID NO: 2263918 - RNA, 19 nt, Artificial Sequence
  Description of Artificial Sequence: Synthetic oligonucleotide
gauacuccuguuucaucug

SEQ ID NO: 2263919 - RNA, 19 nt, Artificial Sequence
  Description of Artificial Sequence: Synthetic oligonucleotide
uacgaacuucgucaucuug

SEQ ID NO: 2263920 - RNA, 19 nt, Artificial Sequence
  Description of Artificial Sequence: Synthetic oligonucleotide
aaaaguuccaccaccucuu

SEQ ID NO: 2263921 - RNA, 19 nt, Artificial Sequence
  Description of Artificial Sequence: Synthetic oligonucleotide
uucccaaacugaacagcag

SEQ ID NO: 2263922 - RNA, 19 nt, Artificial Sequence
  Description of Artificial Sequence: Synthetic oligonucleotide
agaguaaugcccauacugu

SEQ ID NO: 2263923 - RNA, 19 nt, Artificial Sequence
  Description of Artificial Sequence: Synthetic oligonucleotide
ucgccauacaaaauacgaa

SEQ ID NO: 2263924 - RNA, 19 nt, Artificial Sequence
  Description of Artificial Sequence: Synthetic oligonucleotide
uaacuacuugcugaauugc

SEQ ID NO: 2263925 - RNA, 19 nt, Artificial Sequence
  Description of Artificial Sequence: Synthetic oligonucleotide
cauagcaaucuguaauauc

SEQ ID NO: 2263926 - RNA, 19 nt, Artificial Sequence
  Description of Artificial Sequence: Synthetic oligonucleotide
cauuaucuccguacacugc

SEQ ID NO: 2263927 - RNA, 19 nt, Artificial Sequence
  Description of Artificial Sequence: Synthetic oligonucleotide
ugcugaauugcaccaucca

SEQ ID NO: 2263928 - RNA, 19 nt, Artificial Sequence
  Description of Artificial Sequence: Synthetic oligonucleotide
uggcccaucccacuaguug

SEQ ID NO: 2263929 - RNA, 19 nt, Artificial Sequence
  Description of Artificial Sequence: Synthetic oligonucleotide
accucuacuaugcuggcau

SEQ ID NO: 2263930 - RNA, 19 nt, Artificial Sequence
  Description of Artificial Sequence: Synthetic oligonucleotide
ucuugaugauuauguuuug

SEQ ID NO: 2263931 - RNA, 19 nt, Artificial Sequence
  Description of Artificial Sequence: Synthetic oligonucleotide
ugauuauguuuugucgccc

SEQ ID NO: 2263932 - RNA, 19 nt, Artificial Sequence
  Description of Artificial Sequence: Synthetic oligonucleotide
cauggucacaaugaucggc

SEQ ID NO: 2263933 - RNA, 19 nt, Artificial Sequence
  Description of Artificial Sequence: Synthetic oligonucleotide
aauuggacaauggggcaga

SEQ ID NO: 2263934 - RNA, 19 nt, Artificial Sequence
  Description of Artificial Sequence: Synthetic oligonucleotide
ggaguucccaaacugaaca

SEQ ID NO: 2263935 - RNA, 19 nt, Artificial Sequence
  Description of Artificial Sequence: Synthetic oligonucleotide
ucuacuaugcuggcauggc

SEQ ID NO: 2263936 - RNA, 19 nt, Artificial Sequence
  Description of Artificial Sequence: Synthetic oligonucleotide
aaacugaacagcagauacu

SEQ ID NO: 2263937 - RNA, 19 nt, Artificial Sequence
  Description of Artificial Sequence: Synthetic oligonucleotide
cauuucgccauacaaaaua

SEQ ID NO: 2263938 - RNA, 19 nt, Artificial Sequence
  Description of Artificial Sequence: Synthetic oligonucleotide
aacauauccuuugcauuga

SEQ ID NO: 2263939 - RNA, 19 nt, Artificial Sequence
  Description of Artificial Sequence: Synthetic oligonucleotide
aguuggaauggagugcaag

SEQ ID NO: 2263940 - RNA, 19 nt, Artificial Sequence
  Description of Artificial Sequence: Synthetic oligonucleotide
uagcuaauacugacguaga

SEQ ID NO: 2263941 - RNA, 19 nt, Artificial Sequence
  Description of Artificial Sequence: Synthetic oligonucleotide
guaacuaucgugaugacuu

SEQ ID NO: 2263942 - RNA, 19 nt, Artificial Sequence
  Description of Artificial Sequence: Synthetic oligonucleotide
aucgguaacuaucgugaug

SEQ ID NO: 2263943 - RNA, 19 nt, Artificial Sequence
  Description of Artificial Sequence: Synthetic oligonucleotide
cacaaugaucggcuggccc

SEQ ID NO: 2263944 - RNA, 19 nt, Artificial Sequence
  Description of Artificial Sequence: Synthetic oligonucleotide
cuggcaucccuacuuacac

SEQ ID NO: 2263945 - RNA, 19 nt, Artificial Sequence
  Description of Artificial Sequence: Synthetic oligonucleotide
ugcuuaagcaaaaccucua

SEQ ID NO: 2263946 - RNA, 19 nt, Artificial Sequence
  Description of Artificial Sequence: Synthetic oligonucleotide
agcuaaggcagcuaaugua

SEQ ID NO: 2263947 - RNA, 19 nt, Artificial Sequence
  Description of Artificial Sequence: Synthetic oligonucleotide
uaacuaucgugaugacuug

SEQ ID NO: 2263948 - RNA, 19 nt, Artificial Sequence
  Description of Artificial Sequence: Synthetic oligonucleotide
gucacaaugaucggcuggc

SEQ ID NO: 2263949 - RNA, 19 nt, Artificial Sequence
  Description of Artificial Sequence: Synthetic oligonucleotide
cucuacuaugcuggcaugg

SEQ ID NO: 2263950 - RNA, 19 nt, Artificial Sequence
  Description of Artificial Sequence: Synthetic oligonucleotide
uguggcaguguguauuguc

SEQ ID NO: 2263951 - RNA, 19 nt, Artificial Sequence
  Description of Artificial Sequence: Synthetic oligonucleotide
acugaacagcagauacucc

SEQ ID NO: 2263952 - RNA, 19 nt, Artificial Sequence
  Description of Artificial Sequence: Synthetic oligonucleotide
augaugaacuguggugugg

SEQ ID NO: 2263953 - RNA, 19 nt, Artificial Sequence
  Description of Artificial Sequence: Synthetic oligonucleotide
gguccaaugaugaacugug

SEQ ID NO: 2263954 - RNA, 19 nt, Artificial Sequence
  Description of Artificial Sequence: Synthetic oligonucleotide
ggcccaucccacuaguugg

SEQ ID NO: 2263955 - RNA, 19 nt, Artificial Sequence
  Description of Artificial Sequence: Synthetic oligonucleotide
guauugauuugguucugca

SEQ ID NO: 2263956 - RNA, 19 nt, Artificial Sequence
  Description of Artificial Sequence: Synthetic oligonucleotide
ugguguccgguccacuuug

SEQ ID NO: 2263957 - RNA, 19 nt, Artificial Sequence
  Description of Artificial Sequence: Synthetic oligonucleotide
agaaguucccagccagucu

SEQ ID NO: 2263958 - RNA, 19 nt, Artificial Sequence
  Description of Artificial Sequence: Synthetic oligonucleotide
caucccuacuuacaccggc

SEQ ID NO: 2263959 - RNA, 19 nt, Artificial Sequence
  Description of Artificial Sequence: Synthetic oligonucleotide
aguaaccaccuccucugug

SEQ ID NO: 2263960 - RNA, 19 nt, Artificial Sequence
  Description of Artificial Sequence: Synthetic oligonucleotide
ggucacaaugaucggcugg

SEQ ID NO: 2263961 - RNA, 19 nt, Artificial Sequence
  Description of Artificial Sequence: Synthetic oligonucleotide
ugucaacacuugcugucca

SEQ ID NO: 2263962 - RNA, 19 nt, Artificial Sequence
  Description of Artificial Sequence: Synthetic oligonucleotide
agcagauacuccuguuuca

SEQ ID NO: 2263963 - RNA, 19 nt, Artificial Sequence
  Description of Artificial Sequence: Synthetic oligonucleotide
uccguacacugccucuuag

SEQ ID NO: 2263964 - RNA, 19 nt, Artificial Sequence
  Description of Artificial Sequence: Synthetic oligonucleotide
cauugucuauugaaauauc

SEQ ID NO: 2263965 - RNA, 19 nt, Artificial Sequence
  Description of Artificial Sequence: Synthetic oligonucleotide
  modified_base (4)..(4): a, c, u, g, unknown or other
aggngcuccauuucgccau

SEQ ID NO: 2263966 - RNA, 19 nt, Artificial Sequence
  Description of Artificial Sequence: Synthetic oligonucleotide
uuaucuccguacacugccu

SEQ ID NO: 2263967 - RNA, 19 nt, Artificial Sequence
  Description of Artificial Sequence: Synthetic oligonucleotide
aauuuacucugcgugugua

SEQ ID NO: 2263968 - RNA, 19 nt, Artificial Sequence
  Description of Artificial Sequence: Synthetic oligonucleotide
agccagucugucguaaagg

SEQ ID NO: 2263969 - RNA, 19 nt, Artificial Sequence
  Description of Artificial Sequence: Synthetic oligonucleotide
ugcaaguuuccaagcugga

SEQ ID NO: 2263970 - RNA, 19 nt, Artificial Sequence
  Description of Artificial Sequence: Synthetic oligonucleotide
cuacuggaguuucugaaga

SEQ ID NO: 2263971 - RNA, 19 nt, Artificial Sequence
  Description of Artificial Sequence: Synthetic oligonucleotide
ugcggccagaugaagugga

SEQ ID NO: 2263972 - RNA, 19 nt, Artificial Sequence
  Description of Artificial Sequence: Synthetic oligonucleotide
uaaugcccauacugugcgg

SEQ ID NO: 2263973 - RNA, 19 nt, Artificial Sequence
  Description of Artificial Sequence: Synthetic oligonucleotide
guucccagccagucugucg

SEQ ID NO: 2263974 - RNA, 19 nt, Artificial Sequence
  Description of Artificial Sequence: Synthetic oligonucleotide
cagcagauacuccuguuuc

SEQ ID NO: 2263975 - RNA, 19 nt, Artificial Sequence
  Description of Artificial Sequence: Synthetic oligonucleotide
uguccgguccacuuugguc

SEQ ID NO: 2263976 - RNA, 19 nt, Artificial Sequence
  Description of Artificial Sequence: Synthetic oligonucleotide
cuaguuggaauggagugca

SEQ ID NO: 2263977 - RNA, 19 nt, Artificial Sequence
  Description of Artificial Sequence: Synthetic oligonucleotide
aacagcagauacuccuguu

SEQ ID NO: 2263978 - RNA, 19 nt, Artificial Sequence
  Description of Artificial Sequence: Synthetic oligonucleotide
cugacguagaggaguuccc

SEQ ID NO: 2263979 - RNA, 19 nt, Artificial Sequence
  Description of Artificial Sequence: Synthetic oligonucleotide
ugugcagugguguccgguc

SEQ ID NO: 2263980 - RNA, 19 nt, Artificial Sequence
  Description of Artificial Sequence: Synthetic oligonucleotide
ucggaggaguaccucugug

SEQ ID NO: 2263981 - RNA, 19 nt, Artificial Sequence
  Description of Artificial Sequence: Synthetic oligonucleotide
accggcucggaggaguacc

SEQ ID NO: 2263982 - RNA, 19 nt, Artificial Sequence
  Description of Artificial Sequence: Synthetic oligonucleotide
cuaucgugaugacuugcug

SEQ ID NO: 2263983 - RNA, 19 nt, Artificial Sequence
  Description of Artificial Sequence: Synthetic oligonucleotide
guuagguucaccaccccuc

SEQ ID NO: 2263984 - RNA, 19 nt, Artificial Sequence
  Description of Artificial Sequence: Synthetic oligonucleotide
cagauucugcaguaaccac

SEQ ID NO: 2263985 - RNA, 19 nt, Artificial Sequence
  Description of Artificial Sequence: Synthetic oligonucleotide
caaaauuuacucugcgugu

SEQ ID NO: 2263986 - RNA, 19 nt, Artificial Sequence
  Description of Artificial Sequence: Synthetic oligonucleotide
gucuauugaaauaucaaau

SEQ ID NO: 2263987 - RNA, 19 nt, Artificial Sequence
  Description of Artificial Sequence: Synthetic oligonucleotide
augcuuaagcaaaaccucu

SEQ ID NO: 2263988 - RNA, 19 nt, Artificial Sequence
  Description of Artificial Sequence: Synthetic oligonucleotide
uacuuacaccggcucggag

SEQ ID NO: 2263989 - RNA, 19 nt, Artificial Sequence
  Description of Artificial Sequence: Synthetic oligonucleotide
uaucuccguacacugccuc

SEQ ID NO: 2263990 - RNA, 19 nt, Artificial Sequence
  Description of Artificial Sequence: Synthetic oligonucleotide
guucccaaacugaacagca

SEQ ID NO: 2263991 - RNA, 19 nt, Artificial Sequence
  Description of Artificial Sequence: Synthetic oligonucleotide
cugaacagcagauacuccu

SEQ ID NO: 2263992 - RNA, 19 nt, Artificial Sequence
  Description of Artificial Sequence: Synthetic oligonucleotide
caaugucuguugcuggcac

SEQ ID NO: 2263993 - RNA, 19 nt, Artificial Sequence
  Description of Artificial Sequence: Synthetic oligonucleotide
ugcguguguacaucagcac

SEQ ID NO: 2263994 - RNA, 19 nt, Artificial Sequence
  Description of Artificial Sequence: Synthetic oligonucleotide
cugagcuaacuacuugcug

SEQ ID NO: 2263995 - RNA, 19 nt, Artificial Sequence
  Description of Artificial Sequence: Synthetic oligonucleotide
cuuacaccggcucggagga

SEQ ID NO: 2263996 - RNA, 19 nt, Artificial Sequence
  Description of Artificial Sequence: Synthetic oligonucleotide
gcugaauugcaccauccac

SEQ ID NO: 2263997 - RNA, 19 nt, Artificial Sequence
  Description of Artificial Sequence: Synthetic oligonucleotide
guuggaauggagugcaagu

SEQ ID NO: 2263998 - RNA, 19 nt, Artificial Sequence
  Description of Artificial Sequence: Synthetic oligonucleotide
ugacguagaggaguuccca

SEQ ID NO: 2263999 - RNA, 19 nt, Artificial Sequence
  Description of Artificial Sequence: Synthetic oligonucleotide
auuauguuuugucgcccaa

SEQ ID NO: 2264000 - RNA, 19 nt, Artificial Sequence
  Description of Artificial Sequence: Synthetic oligonucleotide
ucaggacucuccggguugg

SEQ ID NO: 2264001 - RNA, 19 nt, Artificial Sequence
  Description of Artificial Sequence: Synthetic oligonucleotide
uggcaguguguauugucac

SEQ ID NO: 2264002 - RNA, 19 nt, Artificial Sequence
  Description of Artificial Sequence: Synthetic oligonucleotide
ccauauuugauuaaaaguu

SEQ ID NO: 2264003 - RNA, 19 nt, Artificial Sequence
  Description of Artificial Sequence: Synthetic oligonucleotide
cugcguguguacaucagca

SEQ ID NO: 2264004 - RNA, 19 nt, Artificial Sequence
  Description of Artificial Sequence: Synthetic oligonucleotide
agcuggauuccaucgguaa

SEQ ID NO: 2264005 - RNA, 19 nt, Artificial Sequence
  Description of Artificial Sequence: Synthetic oligonucleotide
uguagcuaauacugacgua

SEQ ID NO: 2264006 - RNA, 19 nt, Artificial Sequence
  Description of Artificial Sequence: Synthetic oligonucleotide
acucugcguguguacauca

SEQ ID NO: 2264007 - RNA, 19 nt, Artificial Sequence
  Description of Artificial Sequence: Synthetic oligonucleotide
ugcagugguguccggucca

SEQ ID NO: 2264008 - RNA, 19 nt, Artificial Sequence
  Description of Artificial Sequence: Synthetic oligonucleotide
gagaaguucccagccaguc

SEQ ID NO: 2264009 - RNA, 19 nt, Artificial Sequence
  Description of Artificial Sequence: Synthetic oligonucleotide
acuaucgugaugacuugcu

SEQ ID NO: 2264010 - RNA, 19 nt, Artificial Sequence
  Description of Artificial Sequence: Synthetic oligonucleotide
ugaucggcuggcccauccc

SEQ ID NO: 2264011 - RNA, 19 nt, Artificial Sequence
  Description of Artificial Sequence: Synthetic oligonucleotide
uuauguuuugucgcccaau

SEQ ID NO: 2264012 - RNA, 19 nt, Artificial Sequence
  Description of Artificial Sequence: Synthetic oligonucleotide
gagcuaacuacuugcugaa

SEQ ID NO: 2264013 - RNA, 19 nt, Artificial Sequence
  Description of Artificial Sequence: Synthetic oligonucleotide
gcuuaagcaaaaccucuac

SEQ ID NO: 2264014 - RNA, 19 nt, Artificial Sequence
  Description of Artificial Sequence: Synthetic oligonucleotide
gcaguguguauugucacag

SEQ ID NO: 2264015 - RNA, 19 nt, Artificial Sequence
  Description of Artificial Sequence: Synthetic oligonucleotide
ccauuaucuccguacacug

SEQ ID NO: 2264016 - RNA, 19 nt, Artificial Sequence
  Description of Artificial Sequence: Synthetic oligonucleotide
gcguguguacaucagcacc

SEQ ID NO: 2264017 - RNA, 19 nt, Artificial Sequence
  Description of Artificial Sequence: Synthetic oligonucleotide
cgccauacaaaauacgaac

SEQ ID NO: 2264018 - RNA, 19 nt, Artificial Sequence
  Description of Artificial Sequence: Synthetic oligonucleotide
accucugugguagaguaau

SEQ ID NO: 2264019 - RNA, 19 nt, Artificial Sequence
  Description of Artificial Sequence: Synthetic oligonucleotide
uucagcuaaggcagcuaau

SEQ ID NO: 2264020 - RNA, 19 nt, Artificial Sequence
  Description of Artificial Sequence: Synthetic oligonucleotide
cccugagcuaacuacuugc

SEQ ID NO: 2264021 - RNA, 19 nt, Artificial Sequence
  Description of Artificial Sequence: Synthetic oligonucleotide
cgugaugacuugcugaccc

SEQ ID NO: 2264022 - RNA, 19 nt, Artificial Sequence
  Description of Artificial Sequence: Synthetic oligonucleotide
ugauuugguucugcauagc

SEQ ID NO: 2264023 - RNA, 19 nt, Artificial Sequence
  Description of Artificial Sequence: Synthetic oligonucleotide
ucgcccaaugcagagcugu

SEQ ID NO: 2264024 - RNA, 19 nt, Artificial Sequence
  Description of Artificial Sequence: Synthetic oligonucleotide
guaccucugugguagagua

SEQ ID NO: 2264025 - RNA, 19 nt, Artificial Sequence
  Description of Artificial Sequence: Synthetic oligonucleotide
cuccauuaucuccguacac

SEQ ID NO: 2264026 - RNA, 19 nt, Artificial Sequence
  Description of Artificial Sequence: Synthetic oligonucleotide
gucaggacucuccggguug

SEQ ID NO: 2264027 - RNA, 19 nt, Artificial Sequence
  Description of Artificial Sequence: Synthetic oligonucleotide
acguagaggaguucccaaa

SEQ ID NO: 2264028 - RNA, 19 nt, Artificial Sequence
  Description of Artificial Sequence: Synthetic oligonucleotide
ccaucgguaacuaucguga

SEQ ID NO: 2264029 - RNA, 19 nt, Artificial Sequence
  Description of Artificial Sequence: Synthetic oligonucleotide
cagacgcuucagcuaaggc

SEQ ID NO: 2264030 - RNA, 19 nt, Artificial Sequence
  Description of Artificial Sequence: Synthetic oligonucleotide
uucaucuguuagguucacc

SEQ ID NO: 2264031 - RNA, 19 nt, Artificial Sequence
  Description of Artificial Sequence: Synthetic oligonucleotide
caccucuugaugauuaugu

SEQ ID NO: 2264032 - RNA, 19 nt, Artificial Sequence
  Description of Artificial Sequence: Synthetic oligonucleotide
ucccuacuuacaccggcuc

SEQ ID NO: 2264033 - RNA, 19 nt, Artificial Sequence
  Description of Artificial Sequence: Synthetic oligonucleotide
gugaugacuugcugacccc

SEQ ID NO: 2264034 - RNA, 19 nt, Artificial Sequence
  Description of Artificial Sequence: Synthetic oligonucleotide
uggucacaaugaucggcug

SEQ ID NO: 2264035 - RNA, 19 nt, Artificial Sequence
  Description of Artificial Sequence: Synthetic oligonucleotide
aguaccucugugguagagu

SEQ ID NO: 2264036 - RNA, 19 nt, Artificial Sequence
  Description of Artificial Sequence: Synthetic oligonucleotide
ugucaggacucuccggguu

SEQ ID NO: 2264037 - RNA, 19 nt, Artificial Sequence
  Description of Artificial Sequence: Synthetic oligonucleotide
gucaucuuuaacauauccu

SEQ ID NO: 2264038 - RNA, 19 nt, Artificial Sequence
  Description of Artificial Sequence: Synthetic oligonucleotide
gguguggcaguguguauug

SEQ ID NO: 2264039 - RNA, 19 nt, Artificial Sequence
  Description of Artificial Sequence: Synthetic oligonucleotide
gaggaguucccaaacugaa

SEQ ID NO: 2264040 - RNA, 19 nt, Artificial Sequence
  Description of Artificial Sequence: Synthetic oligonucleotide
gacguagaggaguucccaa

SEQ ID NO: 2264041 - RNA, 19 nt, Artificial Sequence
  Description of Artificial Sequence: Synthetic oligonucleotide
cagccagucugucguaaag

SEQ ID NO: 2264042 - RNA, 19 nt, Artificial Sequence
  Description of Artificial Sequence: Synthetic oligonucleotide
guccaaugaugaacugugg

SEQ ID NO: 2264043 - RNA, 19 nt, Artificial Sequence
  Description of Artificial Sequence: Synthetic oligonucleotide
aucuccguacacugccucu

SEQ ID NO: 2264044 - RNA, 19 nt, Artificial Sequence
  Description of Artificial Sequence: Synthetic oligonucleotide
cuucagcuaaggcagcuaa

SEQ ID NO: 2264045 - RNA, 19 nt, Artificial Sequence
  Description of Artificial Sequence: Synthetic oligonucleotide
gaucggcuggcccauccca

SEQ ID NO: 2264046 - RNA, 19 nt, Artificial Sequence
  Description of Artificial Sequence: Synthetic oligonucleotide
caccccuccagguccaaug

SEQ ID NO: 2264047 - RNA, 19 nt, Artificial Sequence
  Description of Artificial Sequence: Synthetic oligonucleotide
cagugucaggacucuccgg

SEQ ID NO: 2264048 - RNA, 19 nt, Artificial Sequence
  Description of Artificial Sequence: Synthetic oligonucleotide
uugguccuggcaucccuac

SEQ ID NO: 2264049 - RNA, 19 nt, Artificial Sequence
  Description of Artificial Sequence: Synthetic oligonucleotide
cagauacuccuguuucauc

SEQ ID NO: 2264050 - RNA, 19 nt, Artificial Sequence
  Description of Artificial Sequence: Synthetic oligonucleotide
guguacaucagcaccauau

SEQ ID NO: 2264051 - RNA, 19 nt, Artificial Sequence
  Description of Artificial Sequence: Synthetic oligonucleotide
gguauugauuugguucugc

SEQ ID NO: 2264052 - RNA, 19 nt, Artificial Sequence
  Description of Artificial Sequence: Synthetic oligonucleotide
uacaccggcucggaggagu

SEQ ID NO: 2264053 - RNA, 19 nt, Artificial Sequence
  Description of Artificial Sequence: Synthetic oligonucleotide
ccuacuuacaccggcucgg

SEQ ID NO: 2264054 - RNA, 19 nt, Artificial Sequence
  Description of Artificial Sequence: Synthetic oligonucleotide
cucugcguguguacaucag

SEQ ID NO: 2264055 - RNA, 19 nt, Artificial Sequence
  Description of Artificial Sequence: Synthetic oligonucleotide
uguugcuggcacugucaac

SEQ ID NO: 2264056 - RNA, 19 nt, Artificial Sequence
  Description of Artificial Sequence: Synthetic oligonucleotide
ugcagacuccacccggcuc

SEQ ID NO: 2264057 - RNA, 19 nt, Artificial Sequence
  Description of Artificial Sequence: Synthetic oligonucleotide
uuccaucgguaacuaucgu

SEQ ID NO: 2264058 - RNA, 19 nt, Artificial Sequence
  Description of Artificial Sequence: Synthetic oligonucleotide
auuggacaauggggcagac

SEQ ID NO: 2264059 - RNA, 19 nt, Artificial Sequence
  Description of Artificial Sequence: Synthetic oligonucleotide
aaugaucggcuggcccauc

SEQ ID NO: 2264060 - RNA, 19 nt, Artificial Sequence
  Description of Artificial Sequence: Synthetic oligonucleotide
uguguacaucagcaccaua

SEQ ID NO: 2264061 - RNA, 19 nt, Artificial Sequence
  Description of Artificial Sequence: Synthetic oligonucleotide
aaccucuacuaugcuggca

SEQ ID NO: 2264062 - RNA, 19 nt, Artificial Sequence
  Description of Artificial Sequence: Synthetic oligonucleotide
ccaugcuuaagcaaaaccu

SEQ ID NO: 2264063 - RNA, 19 nt, Artificial Sequence
  Description of Artificial Sequence: Synthetic oligonucleotide
ugguguggcaguguguauu

SEQ ID NO: 2264064 - RNA, 19 nt, Artificial Sequence
  Description of Artificial Sequence: Synthetic oligonucleotide
ugguauugauuugguucug

SEQ ID NO: 2264065 - RNA, 19 nt, Artificial Sequence
  Description of Artificial Sequence: Synthetic oligonucleotide
ucacaaugaucggcuggcc

SEQ ID NO: 2264066 - RNA, 19 nt, Artificial Sequence
  Description of Artificial Sequence: Synthetic oligonucleotide
caaugcagagcugucaucu

SEQ ID NO: 2264067 - RNA, 19 nt, Artificial Sequence
  Description of Artificial Sequence: Synthetic oligonucleotide
  modified_base (12)..(12): a, c, u, g, unknown or other
ugucguaaaggngcuccau

SEQ ID NO: 2264068 - RNA, 19 nt, Artificial Sequence
  Description of Artificial Sequence: Synthetic oligonucleotide
cccacuaguuggaauggag

SEQ ID NO: 2264069 - RNA, 19 nt, Artificial Sequence
  Description of Artificial Sequence: Synthetic oligonucleotide
acaauggggcagacgcuuc

SEQ ID NO: 2264070 - RNA, 19 nt, Artificial Sequence
  Description of Artificial Sequence: Synthetic oligonucleotide
  modified_base (18)..(18): a, c, u, g, unknown or other
ccagucugucguaaaggng

SEQ ID NO: 2264071 - RNA, 19 nt, Artificial Sequence
  Description of Artificial Sequence: Synthetic oligonucleotide
ugguggcucuucacugaug

SEQ ID NO: 2264072 - RNA, 19 nt, Artificial Sequence
  Description of Artificial Sequence: Synthetic oligonucleotide
uugucgcccaaugcagagc

SEQ ID NO: 2264073 - RNA, 19 nt, Artificial Sequence
  Description of Artificial Sequence: Synthetic oligonucleotide
uccacagauucugcaguaa

SEQ ID NO: 2264074 - RNA, 19 nt, Artificial Sequence
  Description of Artificial Sequence: Synthetic oligonucleotide
  modified_base (19)..(19): a, c, u, g, unknown or other
gccagucugucguaaaggn

SEQ ID NO: 2264075 - RNA, 19 nt, Artificial Sequence
  Description of Artificial Sequence: Synthetic oligonucleotide
uaccucugugguagaguaa

SEQ ID NO: 2264076 - RNA, 19 nt, Artificial Sequence
  Description of Artificial Sequence: Synthetic oligonucleotide
ucgugaugacuugcugacc

SEQ ID NO: 2264077 - RNA, 19 nt, Artificial Sequence
  Description of Artificial Sequence: Synthetic oligonucleotide
guagaggaguucccaaacu

SEQ ID NO: 2264078 - RNA, 19 nt, Artificial Sequence
  Description of Artificial Sequence: Synthetic oligonucleotide
accccuccagguccaauga

SEQ ID NO: 2264079 - RNA, 19 nt, Artificial Sequence
  Description of Artificial Sequence: Synthetic oligonucleotide
cuguuagguucaccacccc

SEQ ID NO: 2264080 - RNA, 19 nt, Artificial Sequence
  Description of Artificial Sequence: Synthetic oligonucleotide
gcuggauuccaucgguaac

SEQ ID NO: 2264081 - RNA, 19 nt, Artificial Sequence
  Description of Artificial Sequence: Synthetic oligonucleotide
gaauugcaccauccacaga

SEQ ID NO: 2264082 - RNA, 19 nt, Artificial Sequence
  Description of Artificial Sequence: Synthetic oligonucleotide
gucuguugcuggcacuguc

SEQ ID NO: 2264083 - RNA, 19 nt, Artificial Sequence
  Description of Artificial Sequence: Synthetic oligonucleotide
ugguccuggcaucccuacu

SEQ ID NO: 2264084 - RNA, 19 nt, Artificial Sequence
  Description of Artificial Sequence: Synthetic oligonucleotide
ucccacuaguuggaaugga

SEQ ID NO: 2264085 - RNA, 19 nt, Artificial Sequence
  Description of Artificial Sequence: Synthetic oligonucleotide
gugcggccagaugaagugg

SEQ ID NO: 2264086 - RNA, 19 nt, Artificial Sequence
  Description of Artificial Sequence: Synthetic oligonucleotide
ugguagaguaaugcccaua

SEQ ID NO: 2264087 - RNA, 19 nt, Artificial Sequence
  Description of Artificial Sequence: Synthetic oligonucleotide
cccuacuuacaccggcucg

SEQ ID NO: 2264088 - RNA, 19 nt, Artificial Sequence
  Description of Artificial Sequence: Synthetic oligonucleotide
ucggcuggcccaucccacu

SEQ ID NO: 2264089 - RNA, 19 nt, Artificial Sequence
  Description of Artificial Sequence: Synthetic oligonucleotide
uaguuggaauggagugcaa

SEQ ID NO: 2264090 - RNA, 19 nt, Artificial Sequence
  Description of Artificial Sequence: Synthetic oligonucleotide
guguguauugucacagugu

SEQ ID NO: 2264091 - RNA, 19 nt, Artificial Sequence
  Description of Artificial Sequence: Synthetic oligonucleotide
ucuccguacacugccucuu

SEQ ID NO: 2264092 - RNA, 19 nt, Artificial Sequence
  Description of Artificial Sequence: Synthetic oligonucleotide
  modified_base (13)..(13): a, c, u, g, unknown or other
cugucguaaaggngcucca

SEQ ID NO: 2264093 - RNA, 19 nt, Artificial Sequence
  Description of Artificial Sequence: Synthetic oligonucleotide
auacugacguagaggaguu

SEQ ID NO: 2264094 - RNA, 19 nt, Artificial Sequence
  Description of Artificial Sequence: Synthetic oligonucleotide
caugugcagugguguccgg

SEQ ID NO: 2264095 - RNA, 19 nt, Artificial Sequence
  Description of Artificial Sequence: Synthetic oligonucleotide
ucuccggguugguauugau

SEQ ID NO: 2264096 - RNA, 19 nt, Artificial Sequence
  Description of Artificial Sequence: Synthetic oligonucleotide
accaccucuugaugauuau

SEQ ID NO: 2264097 - RNA, 19 nt, Artificial Sequence
  Description of Artificial Sequence: Synthetic oligonucleotide
gaggaguaccucuguggua

SEQ ID NO: 2264098 - RNA, 19 nt, Artificial Sequence
  Description of Artificial Sequence: Synthetic oligonucleotide
ggaggaguaccucuguggu

SEQ ID NO: 2264099 - RNA, 19 nt, Artificial Sequence
  Description of Artificial Sequence: Synthetic oligonucleotide
aaguucccagccagucugu

SEQ ID NO: 2264100 - RNA, 19 nt, Artificial Sequence
  Description of Artificial Sequence: Synthetic oligonucleotide
acgucagcaccaugcuuaa

SEQ ID NO: 2264101 - RNA, 19 nt, Artificial Sequence
  Description of Artificial Sequence: Synthetic oligonucleotide
gccacuacuggaguuucug

SEQ ID NO: 2264102 - RNA, 19 nt, Artificial Sequence
  Description of Artificial Sequence: Synthetic oligonucleotide
gcuaacuacuugcugaauu

SEQ ID NO: 2264103 - RNA, 19 nt, Artificial Sequence
  Description of Artificial Sequence: Synthetic oligonucleotide
uccacccggcucuccauua

SEQ ID NO: 2264104 - RNA, 19 nt, Artificial Sequence
  Description of Artificial Sequence: Synthetic oligonucleotide
guguauugucacaguguca

SEQ ID NO: 2264105 - RNA, 19 nt, Artificial Sequence
  Description of Artificial Sequence: Synthetic oligonucleotide
gcagacgcuucagcuaagg

SEQ ID NO: 2264106 - RNA, 19 nt, Artificial Sequence
  Description of Artificial Sequence: Synthetic oligonucleotide
guagaguaaugcccauacu

SEQ ID NO: 2264107 - RNA, 19 nt, Artificial Sequence
  Description of Artificial Sequence: Synthetic oligonucleotide
ccguacacugccucuuagc

SEQ ID NO: 2264108 - RNA, 19 nt, Artificial Sequence
  Description of Artificial Sequence: Synthetic oligonucleotide
caauggggcagacgcuuca

SEQ ID NO: 2264109 - RNA, 19 nt, Artificial Sequence
  Description of Artificial Sequence: Synthetic oligonucleotide
caccaccucuugaugauua

SEQ ID NO: 2264110 - RNA, 19 nt, Artificial Sequence
  Description of Artificial Sequence: Synthetic oligonucleotide
aagcuggauuccaucggua

SEQ ID NO: 2264111 - RNA, 19 nt, Artificial Sequence
  Description of Artificial Sequence: Synthetic oligonucleotide
cuguaauaucucugcuaaa

SEQ ID NO: 2264112 - RNA, 19 nt, Artificial Sequence
  Description of Artificial Sequence: Synthetic oligonucleotide
  modified_base (9)..(9): a, c, u, g, unknown or other
cguaaaggngcuccauuuc

SEQ ID NO: 2264113 - RNA, 19 nt, Artificial Sequence
  Description of Artificial Sequence: Synthetic oligonucleotide
uggccacuacuggaguuuc

SEQ ID NO: 2264114 - RNA, 19 nt, Artificial Sequence
  Description of Artificial Sequence: Synthetic oligonucleotide
acucuccggguugguauug

SEQ ID NO: 2264115 - RNA, 19 nt, Artificial Sequence
  Description of Artificial Sequence: Synthetic oligonucleotide
gccauacaaaauacgaacu

SEQ ID NO: 2264116 - RNA, 19 nt, Artificial Sequence
  Description of Artificial Sequence: Synthetic oligonucleotide
gguaacuaucgugaugacu

SEQ ID NO: 2264117 - RNA, 19 nt, Artificial Sequence
  Description of Artificial Sequence: Synthetic oligonucleotide
  modified_base (11)..(11): a, c, u, g, unknown or other
gucguaaaggngcuccauu

SEQ ID NO: 2264118 - RNA, 19 nt, Artificial Sequence
  Description of Artificial Sequence: Synthetic oligonucleotide
agacuccacccggcucucc

SEQ ID NO: 2264119 - RNA, 19 nt, Artificial Sequence
  Description of Artificial Sequence: Synthetic oligonucleotide
cacugucaacacuugcugu

SEQ ID NO: 2264120 - RNA, 19 nt, Artificial Sequence
  Description of Artificial Sequence: Synthetic oligonucleotide
gccaugugcaguggugucc

SEQ ID NO: 2264121 - RNA, 19 nt, Artificial Sequence
  Description of Artificial Sequence: Synthetic oligonucleotide
uuacaccggcucggaggag

SEQ ID NO: 2264122 - RNA, 19 nt, Artificial Sequence
  Description of Artificial Sequence: Synthetic oligonucleotide
agcuaacuacuugcugaau

SEQ ID NO: 2264123 - RNA, 19 nt, Artificial Sequence
  Description of Artificial Sequence: Synthetic oligonucleotide
ccuggcaucccuacuuaca

SEQ ID NO: 2264124 - RNA, 19 nt, Artificial Sequence
  Description of Artificial Sequence: Synthetic oligonucleotide
cugugcggccagaugaagu

SEQ ID NO: 2264125 - RNA, 19 nt, Artificial Sequence
  Description of Artificial Sequence: Synthetic oligonucleotide
  modified_base (2)..(2): a, c, u, g, unknown or other
gngcuccauuucgccauac

SEQ ID NO: 2264126 - RNA, 19 nt, Artificial Sequence
  Description of Artificial Sequence: Synthetic oligonucleotide
auugcaccauccacagauu

SEQ ID NO: 2264127 - RNA, 19 nt, Artificial Sequence
  Description of Artificial Sequence: Synthetic oligonucleotide
ccagaugaaguggagaagu

SEQ ID NO: 2264128 - RNA, 19 nt, Artificial Sequence
  Description of Artificial Sequence: Synthetic oligonucleotide
ggcuggcccaucccacuag

SEQ ID NO: 2264129 - RNA, 19 nt, Artificial Sequence
  Description of Artificial Sequence: Synthetic oligonucleotide
cuacuuacaccggcucgga

SEQ ID NO: 2264130 - RNA, 19 nt, Artificial Sequence
  Description of Artificial Sequence: Synthetic oligonucleotide
ccauugucuauugaaauau

SEQ ID NO: 2264131 - RNA, 19 nt, Artificial Sequence
  Description of Artificial Sequence: Synthetic oligonucleotide
gguguccgguccacuuugg

SEQ ID NO: 2264132 - RNA, 19 nt, Artificial Sequence
  Description of Artificial Sequence: Synthetic oligonucleotide
gcccucagaagcugccaug

SEQ ID NO: 2264133 - RNA, 19 nt, Artificial Sequence
  Description of Artificial Sequence: Synthetic oligonucleotide
ccaaugcagagcugucauc

SEQ ID NO: 2264134 - RNA, 19 nt, Artificial Sequence
  Description of Artificial Sequence: Synthetic oligonucleotide
gcaucccuacuuacaccgg

SEQ ID NO: 2264135 - RNA, 19 nt, Artificial Sequence
  Description of Artificial Sequence: Synthetic oligonucleotide
guccuggcaucccuacuua

SEQ ID NO: 2264136 - RNA, 19 nt, Artificial Sequence
  Description of Artificial Sequence: Synthetic oligonucleotide
gcaccauauuugauuaaaa

SEQ ID NO: 2264137 - RNA, 19 nt, Artificial Sequence
  Description of Artificial Sequence: Synthetic oligonucleotide
gcucggaggaguaccucug

SEQ ID NO: 2264138 - RNA, 19 nt, Artificial Sequence
  Description of Artificial Sequence: Synthetic oligonucleotide
ccucuacuaugcuggcaug

SEQ ID NO: 2264139 - RNA, 19 nt, Artificial Sequence
  Description of Artificial Sequence: Synthetic oligonucleotide
cagcaccauauuugauuaa

SEQ ID NO: 2264140 - RNA, 19 nt, Artificial Sequence
  Description of Artificial Sequence: Synthetic oligonucleotide
ccacuaguuggaauggagu

SEQ ID NO: 2264141 - RNA, 19 nt, Artificial Sequence
  Description of Artificial Sequence: Synthetic oligonucleotide
ccggguugguauugauuug

SEQ ID NO: 2264142 - RNA, 19 nt, Artificial Sequence
  Description of Artificial Sequence: Synthetic oligonucleotide
ccauacaaaauacgaacuu

SEQ ID NO: 2264143 - RNA, 19 nt, Artificial Sequence
  Description of Artificial Sequence: Synthetic oligonucleotide
caggcauggucacaaugau

SEQ ID NO: 2264144 - RNA, 19 nt, Artificial Sequence
  Description of Artificial Sequence: Synthetic oligonucleotide
aggacucuccggguuggua

SEQ ID NO: 2264145 - RNA, 19 nt, Artificial Sequence
  Description of Artificial Sequence: Synthetic oligonucleotide
caucgguaacuaucgugau

SEQ ID NO: 2264146 - RNA, 19 nt, Artificial Sequence
  Description of Artificial Sequence: Synthetic oligonucleotide
caguguguauugucacagu

SEQ ID NO: 2264147 - RNA, 19 nt, Artificial Sequence
  Description of Artificial Sequence: Synthetic oligonucleotide
gguugguauugauuugguu

SEQ ID NO: 2264148 - RNA, 19 nt, Artificial Sequence
  Description of Artificial Sequence: Synthetic oligonucleotide
cguacacugccucuuagcu

SEQ ID NO: 2264149 - RNA, 19 nt, Artificial Sequence
  Description of Artificial Sequence: Synthetic oligonucleotide
cuccucuguggccacuacu

SEQ ID NO: 2264150 - RNA, 19 nt, Artificial Sequence
  Description of Artificial Sequence: Synthetic oligonucleotide
ggaguaccucugugguaga

SEQ ID NO: 2264151 - RNA, 19 nt, Artificial Sequence
  Description of Artificial Sequence: Synthetic oligonucleotide
gugguagaguaaugcccau

SEQ ID NO: 2264152 - RNA, 19 nt, Artificial Sequence
  Description of Artificial Sequence: Synthetic oligonucleotide
gucgcccaaugcagagcug

SEQ ID NO: 2264153 - RNA, 19 nt, Artificial Sequence
  Description of Artificial Sequence: Synthetic oligonucleotide
cucggaggaguaccucugu

SEQ ID NO: 2264154 - RNA, 19 nt, Artificial Sequence
  Description of Artificial Sequence: Synthetic oligonucleotide
gcauagcaaucuguaauau

SEQ ID NO: 2264155 - RNA, 19 nt, Artificial Sequence
  Description of Artificial Sequence: Synthetic oligonucleotide
gcggccagaugaaguggag

SEQ ID NO: 2264156 - RNA, 19 nt, Artificial Sequence
  Description of Artificial Sequence: Synthetic oligonucleotide
cuccggguugguauugauu

SEQ ID NO: 2264157 - RNA, 19 nt, Artificial Sequence
  Description of Artificial Sequence: Synthetic oligonucleotide
guggccacuacuggaguuu

SEQ ID NO: 2264158 - RNA, 19 nt, Artificial Sequence
  Description of Artificial Sequence: Synthetic oligonucleotide
gcaccaugcuuaagcaaaa

SEQ ID NO: 2264159 - RNA, 19 nt, Artificial Sequence
  Description of Artificial Sequence: Synthetic oligonucleotide
cagacuccacccggcucuc

SEQ ID NO: 2264160 - RNA, 19 nt, Artificial Sequence
  Description of Artificial Sequence: Synthetic oligonucleotide
ggcagacgcuucagcuaag

SEQ ID NO: 2264161 - RNA, 19 nt, Artificial Sequence
  Description of Artificial Sequence: Synthetic oligonucleotide
ggagaaguucccagccagu

SEQ ID NO: 2264162 - RNA, 19 nt, Artificial Sequence
  Description of Artificial Sequence: Synthetic oligonucleotide
cugcagacuccacccggcu

SEQ ID NO: 2264163 - RNA, 19 nt, Artificial Sequence
  Description of Artificial Sequence: Synthetic oligonucleotide
caccggcucggaggaguac

SEQ ID NO: 2264164 - RNA, 19 nt, Artificial Sequence
  Description of Artificial Sequence: Synthetic oligonucleotide
  modified_base (3)..(3): a, c, u, g, unknown or other
ggngcuccauuucgccaua

SEQ ID NO: 2264165 - RNA, 19 nt, Artificial Sequence
  Description of Artificial Sequence: Synthetic oligonucleotide
cccaaugcagagcugucau

SEQ ID NO: 2264166 - RNA, 19 nt, Artificial Sequence
  Description of Artificial Sequence: Synthetic oligonucleotide
caaugaucggcuggcccau

SEQ ID NO: 2264167 - RNA, 19 nt, Artificial Sequence
  Description of Artificial Sequence: Synthetic oligonucleotide
gugguguggcaguguguau

SEQ ID NO: 2264168 - RNA, 19 nt, Artificial Sequence
  Description of Artificial Sequence: Synthetic oligonucleotide
gcuucagcuaaggcagcua

SEQ ID NO: 2264169 - RNA, 19 nt, Artificial Sequence
  Description of Artificial Sequence: Synthetic oligonucleotide
gcccaucccacuaguugga

SEQ ID NO: 2264170 - RNA, 19 nt, Artificial Sequence
  Description of Artificial Sequence: Synthetic oligonucleotide
caucaggcauggucacaau

SEQ ID NO: 2264171 - RNA, 19 nt, Artificial Sequence
  Description of Artificial Sequence: Synthetic oligonucleotide
cgguaacuaucgugaugac

SEQ ID NO: 2264172 - RNA, 19 nt, Artificial Sequence
  Description of Artificial Sequence: Synthetic oligonucleotide
ccucuuagcugguggcucu

SEQ ID NO: 2264173 - RNA, 19 nt, Artificial Sequence
  Description of Artificial Sequence: Synthetic oligonucleotide
ggcccucagaagcugccau

SEQ ID NO: 2264174 - RNA, 19 nt, Artificial Sequence
  Description of Artificial Sequence: Synthetic oligonucleotide
ccagccagucugucguaaa

SEQ ID NO: 2264175 - RNA, 19 nt, Artificial Sequence
  Description of Artificial Sequence: Synthetic oligonucleotide
ggacaauggggcagacgcu

SEQ ID NO: 2264176 - RNA, 19 nt, Artificial Sequence
  Description of Artificial Sequence: Synthetic oligonucleotide
cccucagaagcugccaugu

SEQ ID NO: 2264177 - RNA, 19 nt, Artificial Sequence
  Description of Artificial Sequence: Synthetic oligonucleotide
cuggcccaucccacuaguu

SEQ ID NO: 2264178 - RNA, 19 nt, Artificial Sequence
  Description of Artificial Sequence: Synthetic oligonucleotide
ggcagcuaauguagcuaau

SEQ ID NO: 2264179 - RNA, 19 nt, Artificial Sequence
  Description of Artificial Sequence: Synthetic oligonucleotide
gcauugacgucagcaccau

SEQ ID NO: 2264180 - RNA, 19 nt, Artificial Sequence
  Description of Artificial Sequence: Synthetic oligonucleotide
cucuuagcugguggcucuu

SEQ ID NO: 2264181 - RNA, 19 nt, Artificial Sequence
  Description of Artificial Sequence: Synthetic oligonucleotide
cccagccagucugucguaa

SEQ ID NO: 2264182 - RNA, 19 nt, Artificial Sequence
  Description of Artificial Sequence: Synthetic oligonucleotide
cagugguguccgguccacu

SEQ ID NO: 2264183 - RNA, 19 nt, Artificial Sequence
  Description of Artificial Sequence: Synthetic oligonucleotide
ccggcucggaggaguaccu

SEQ ID NO: 2264184 - RNA, 19 nt, Artificial Sequence
  Description of Artificial Sequence: Synthetic oligonucleotide
ccauacugugcggccagau

SEQ ID NO: 2264185 - RNA, 19 nt, Artificial Sequence
  Description of Artificial Sequence: Synthetic oligonucleotide
cggcucggaggaguaccuc

SEQ ID NO: 2264186 - RNA, 19 nt, Artificial Sequence
  Description of Artificial Sequence: Synthetic oligonucleotide
ccccuccagguccaaugau

SEQ ID NO: 2264187 - RNA, 19 nt, Artificial Sequence
  Description of Artificial Sequence: Synthetic oligonucleotide
auagcaagccaauauaagc

SEQ ID NO: 2264188 - RNA, 19 nt, Artificial Sequence
  Description of Artificial Sequence: Synthetic oligonucleotide
agauguaccaccugaaacc

SEQ ID NO: 2264189 - RNA, 19 nt, Artificial Sequence
  Description of Artificial Sequence: Synthetic oligonucleotide
aaugagaaagguccuaggg

SEQ ID NO: 2264190 - RNA, 19 nt, Artificial Sequence
  Description of Artificial Sequence: Synthetic oligonucleotide
agaauugagauguaccacc

SEQ ID NO: 2264191 - RNA, 19 nt, Artificial Sequence
  Description of Artificial Sequence: Synthetic oligonucleotide
augcaaauaucuuagcacc

SEQ ID NO: 2264192 - RNA, 19 nt, Artificial Sequence
  Description of Artificial Sequence: Synthetic oligonucleotide
ugaguuuacaaacauauua

SEQ ID NO: 2264193 - RNA, 19 nt, Artificial Sequence
  Description of Artificial Sequence: Synthetic oligonucleotide
ugaggaauacaacaaauga

SEQ ID NO: 2264194 - RNA, 19 nt, Artificial Sequence
  Description of Artificial Sequence: Synthetic oligonucleotide
uauuugaaguuucuaaccc

SEQ ID NO: 2264195 - RNA, 19 nt, Artificial Sequence
  Description of Artificial Sequence: Synthetic oligonucleotide
uguacaugaguuuacaaac

SEQ ID NO: 2264196 - RNA, 19 nt, Artificial Sequence
  Description of Artificial Sequence: Synthetic oligonucleotide
gaaaccuugaaccugcagc

SEQ ID NO: 2264197 - RNA, 19 nt, Artificial Sequence
  Description of Artificial Sequence: Synthetic oligonucleotide
ucaaucaccguacaaggag

SEQ ID NO: 2264198 - RNA, 19 nt, Artificial Sequence
  Description of Artificial Sequence: Synthetic oligonucleotide
aacauauaaauaaugagaa

SEQ ID NO: 2264199 - RNA, 19 nt, Artificial Sequence
  Description of Artificial Sequence: Synthetic oligonucleotide
acaguaucgagcuaccugg

SEQ ID NO: 2264200 - RNA, 19 nt, Artificial Sequence
  Description of Artificial Sequence: Synthetic oligonucleotide
uaugcaaauaucuuagcac

SEQ ID NO: 2264201 - RNA, 19 nt, Artificial Sequence
  Description of Artificial Sequence: Synthetic oligonucleotide
uuccauucgagccucaaag

SEQ ID NO: 2264202 - RNA, 19 nt, Artificial Sequence
  Description of Artificial Sequence: Synthetic oligonucleotide
uaucuuagcaccauuucca

SEQ ID NO: 2264203 - RNA, 19 nt, Artificial Sequence
  Description of Artificial Sequence: Synthetic oligonucleotide
ucuucuauaggguccgugg

SEQ ID NO: 2264204 - RNA, 19 nt, Artificial Sequence
  Description of Artificial Sequence: Synthetic oligonucleotide
cuauuugaaguuucuaacc

SEQ ID NO: 2264205 - RNA, 19 nt, Artificial Sequence
  Description of Artificial Sequence: Synthetic oligonucleotide
auaaauaaugagaaagguc

SEQ ID NO: 2264206 - RNA, 19 nt, Artificial Sequence
  Description of Artificial Sequence: Synthetic oligonucleotide
uuuugucgaaggcauaugc

SEQ ID NO: 2264207 - RNA, 19 nt, Artificial Sequence
  Description of Artificial Sequence: Synthetic oligonucleotide
augucguucccauagcagc

SEQ ID NO: 2264208 - RNA, 19 nt, Artificial Sequence
  Description of Artificial Sequence: Synthetic oligonucleotide
aaaccuugaaccugcagca

SEQ ID NO: 2264209 - RNA, 19 nt, Artificial Sequence
  Description of Artificial Sequence: Synthetic oligonucleotide
uccccuaugucucugcugg

SEQ ID NO: 2264210 - RNA, 19 nt, Artificial Sequence
  Description of Artificial Sequence: Synthetic oligonucleotide
cucaugaugagcuggaaac

SEQ ID NO: 2264211 - RNA, 19 nt, Artificial Sequence
  Description of Artificial Sequence: Synthetic oligonucleotide
uaaugacacucauaguagg

SEQ ID NO: 2264212 - RNA, 19 nt, Artificial Sequence
  Description of Artificial Sequence: Synthetic oligonucleotide
uccauuggcauuauaguac

SEQ ID NO: 2264213 - RNA, 19 nt, Artificial Sequence
  Description of Artificial Sequence: Synthetic oligonucleotide
auaguaccgggucacauuc

SEQ ID NO: 2264214 - RNA, 19 nt, Artificial Sequence
  Description of Artificial Sequence: Synthetic oligonucleotide
acuguuugccauuugagga

SEQ ID NO: 2264215 - RNA, 19 nt, Artificial Sequence
  Description of Artificial Sequence: Synthetic oligonucleotide
uagcaagccaauauaagcu

SEQ ID NO: 2264216 - RNA, 19 nt, Artificial Sequence
  Description of Artificial Sequence: Synthetic oligonucleotide
uucucaaucaccguacaag

SEQ ID NO: 2264217 - RNA, 19 nt, Artificial Sequence
  Description of Artificial Sequence: Synthetic oligonucleotide
acagaauugagauguacca

SEQ ID NO: 2264218 - RNA, 19 nt, Artificial Sequence
  Description of Artificial Sequence: Synthetic oligonucleotide
ucuaacccucccuuuaccg

SEQ ID NO: 2264219 - RNA, 19 nt, Artificial Sequence
  Description of Artificial Sequence: Synthetic oligonucleotide
cuuagcaccauuuccauca

SEQ ID NO: 2264220 - RNA, 19 nt, Artificial Sequence
  Description of Artificial Sequence: Synthetic oligonucleotide
uuggcauuauaguaccggg

SEQ ID NO: 2264221 - RNA, 19 nt, Artificial Sequence
  Description of Artificial Sequence: Synthetic oligonucleotide
aaggcauaugcaaauaucu

SEQ ID NO: 2264222 - RNA, 19 nt, Artificial Sequence
  Description of Artificial Sequence: Synthetic oligonucleotide
aaggaggguaaugacacuc

SEQ ID NO: 2264223 - RNA, 19 nt, Artificial Sequence
  Description of Artificial Sequence: Synthetic oligonucleotide
uuugaaguuucuaacccuc

SEQ ID NO: 2264224 - RNA, 19 nt, Artificial Sequence
  Description of Artificial Sequence: Synthetic oligonucleotide
cacagaauugagauguacc

SEQ ID NO: 2264225 - RNA, 19 nt, Artificial Sequence
  Description of Artificial Sequence: Synthetic oligonucleotide
uacaaggaggguaaugaca

SEQ ID NO: 2264226 - RNA, 19 nt, Artificial Sequence
  Description of Artificial Sequence: Synthetic oligonucleotide
aaacccgggagccacaccu

SEQ ID NO: 2264227 - RNA, 19 nt, Artificial Sequence
  Description of Artificial Sequence: Synthetic oligonucleotide
ucauaguagguacaggaau

SEQ ID NO: 2264228 - RNA, 19 nt, Artificial Sequence
  Description of Artificial Sequence: Synthetic oligonucleotide
gagauguaccaccugaaac

SEQ ID NO: 2264229 - RNA, 19 nt, Artificial Sequence
  Description of Artificial Sequence: Synthetic oligonucleotide
ucacauucaggacagggaa

SEQ ID NO: 2264230 - RNA, 19 nt, Artificial Sequence
  Description of Artificial Sequence: Synthetic oligonucleotide
ccaauauaagcuuugcucc

SEQ ID NO: 2264231 - RNA, 19 nt, Artificial Sequence
  Description of Artificial Sequence: Synthetic oligonucleotide
ugaaguuucuaacccuccc

SEQ ID NO: 2264232 - RNA, 19 nt, Artificial Sequence
  Description of Artificial Sequence: Synthetic oligonucleotide
uuguucuucuauagggucc

SEQ ID NO: 2264233 - RNA, 19 nt, Artificial Sequence
  Description of Artificial Sequence: Synthetic oligonucleotide
uuugucgaaggcauaugca

SEQ ID NO: 2264234 - RNA, 19 nt, Artificial Sequence
  Description of Artificial Sequence: Synthetic oligonucleotide
guagccacucuucagcccg

SEQ ID NO: 2264235 - RNA, 19 nt, Artificial Sequence
  Description of Artificial Sequence: Synthetic oligonucleotide
gauagcaagccaauauaag

SEQ ID NO: 2264236 - RNA, 19 nt, Artificial Sequence
  Description of Artificial Sequence: Synthetic oligonucleotide
guaaugacacucauaguag

SEQ ID NO: 2264237 - RNA, 19 nt, Artificial Sequence
  Description of Artificial Sequence: Synthetic oligonucleotide
agcuguuucucaaucaccg

SEQ ID NO: 2264238 - RNA, 19 nt, Artificial Sequence
  Description of Artificial Sequence: Synthetic oligonucleotide
auaaugagaaagguccuag

SEQ ID NO: 2264239 - RNA, 19 nt, Artificial Sequence
  Description of Artificial Sequence: Synthetic oligonucleotide
caauauaagcuuugcuccc

SEQ ID NO: 2264240 - RNA, 19 nt, Artificial Sequence
  Description of Artificial Sequence: Synthetic oligonucleotide
auuugaaguuucuaacccu

SEQ ID NO: 2264241 - RNA, 19 nt, Artificial Sequence
  Description of Artificial Sequence: Synthetic oligonucleotide
agguacaggaauucucuuc

SEQ ID NO: 2264242 - RNA, 19 nt, Artificial Sequence
  Description of Artificial Sequence: Synthetic oligonucleotide
caaucaccguacaaggagg

SEQ ID NO: 2264243 - RNA, 19 nt, Artificial Sequence
  Description of Artificial Sequence: Synthetic oligonucleotide
uaccgggucacauucagga

SEQ ID NO: 2264244 - RNA, 19 nt, Artificial Sequence
  Description of Artificial Sequence: Synthetic oligonucleotide
ugcaaauaucuuagcacca

SEQ ID NO: 2264245 - RNA, 19 nt, Artificial Sequence
  Description of Artificial Sequence: Synthetic oligonucleotide
uguugaauucccgaagcug

SEQ ID NO: 2264246 - RNA, 19 nt, Artificial Sequence
  Description of Artificial Sequence: Synthetic oligonucleotide
ugggucgccagccccaugg

SEQ ID NO: 2264247 - RNA, 19 nt, Artificial Sequence
  Description of Artificial Sequence: Synthetic oligonucleotide
aucgcucuggcucaagcuc

SEQ ID NO: 2264248 - RNA, 19 nt, Artificial Sequence
  Description of Artificial Sequence: Synthetic oligonucleotide
gguacaggaauucucuucc

SEQ ID NO: 2264249 - RNA, 19 nt, Artificial Sequence
  Description of Artificial Sequence: Synthetic oligonucleotide
acaggaauucucuuccucu

SEQ ID NO: 2264250 - RNA, 19 nt, Artificial Sequence
  Description of Artificial Sequence: Synthetic oligonucleotide
aauugagauguaccaccug

SEQ ID NO: 2264251 - RNA, 19 nt, Artificial Sequence
  Description of Artificial Sequence: Synthetic oligonucleotide
ugauucuauuugaaguuuc

SEQ ID NO: 2264252 - RNA, 19 nt, Artificial Sequence
  Description of Artificial Sequence: Synthetic oligonucleotide
cuggaaaccuugaaccugc

SEQ ID NO: 2264253 - RNA, 19 nt, Artificial Sequence
  Description of Artificial Sequence: Synthetic oligonucleotide
auaagcuuugcucccuuug

SEQ ID NO: 2264254 - RNA, 19 nt, Artificial Sequence
  Description of Artificial Sequence: Synthetic oligonucleotide
uaagcuuugcucccuuugu

SEQ ID NO: 2264255 - RNA, 19 nt, Artificial Sequence
  Description of Artificial Sequence: Synthetic oligonucleotide
uugaaguuucuaacccucc

SEQ ID NO: 2264256 - RNA, 19 nt, Artificial Sequence
  Description of Artificial Sequence: Synthetic oligonucleotide
gucucuucagcuuuggguc

SEQ ID NO: 2264257 - RNA, 19 nt, Artificial Sequence
  Description of Artificial Sequence: Synthetic oligonucleotide
caaacauauuaacauauaa

SEQ ID NO: 2264258 - RNA, 19 nt, Artificial Sequence
  Description of Artificial Sequence: Synthetic oligonucleotide
aauauaagcuuugcucccu

SEQ ID NO: 2264259 - RNA, 19 nt, Artificial Sequence
  Description of Artificial Sequence: Synthetic oligonucleotide
uggauagcaagccaauaua

SEQ ID NO: 2264260 - RNA, 19 nt, Artificial Sequence
  Description of Artificial Sequence: Synthetic oligonucleotide
aaucaccguacaaggaggg

SEQ ID NO: 2264261 - RNA, 19 nt, Artificial Sequence
  Description of Artificial Sequence: Synthetic oligonucleotide
gccaauauaagcuuugcuc

SEQ ID NO: 2264262 - RNA, 19 nt, Artificial Sequence
  Description of Artificial Sequence: Synthetic oligonucleotide
gauguaccaccugaaaccc

SEQ ID NO: 2264263 - RNA, 19 nt, Artificial Sequence
  Description of Artificial Sequence: Synthetic oligonucleotide
aggaauacaacaaaugauu

SEQ ID NO: 2264264 - RNA, 19 nt, Artificial Sequence
  Description of Artificial Sequence: Synthetic oligonucleotide
aaauaucuuagcaccauuu

SEQ ID NO: 2264265 - RNA, 19 nt, Artificial Sequence
  Description of Artificial Sequence: Synthetic oligonucleotide
uaacccucccuuuaccgcc

SEQ ID NO: 2264266 - RNA, 19 nt, Artificial Sequence
  Description of Artificial Sequence: Synthetic oligonucleotide
aaugacacucauaguaggu

SEQ ID NO: 2264267 - RNA, 19 nt, Artificial Sequence
  Description of Artificial Sequence: Synthetic oligonucleotide
aaagguccuagggagccuc

SEQ ID NO: 2264268 - RNA, 19 nt, Artificial Sequence
  Description of Artificial Sequence: Synthetic oligonucleotide
uucuauaggguccguggga

SEQ ID NO: 2264269 - RNA, 19 nt, Artificial Sequence
  Description of Artificial Sequence: Synthetic oligonucleotide
ucauguugcugugaggucu

SEQ ID NO: 2264270 - RNA, 19 nt, Artificial Sequence
  Description of Artificial Sequence: Synthetic oligonucleotide
agccacaguaucgagcuac

SEQ ID NO: 2264271 - RNA, 19 nt, Artificial Sequence
  Description of Artificial Sequence: Synthetic oligonucleotide
aagggacgcuuccucuccc

SEQ ID NO: 2264272 - RNA, 19 nt, Artificial Sequence
  Description of Artificial Sequence: Synthetic oligonucleotide
ucuucagcccgucaucgcu

SEQ ID NO: 2264273 - RNA, 19 nt, Artificial Sequence
  Description of Artificial Sequence: Synthetic oligonucleotide
acauauaaauaaugagaaa

SEQ ID NO: 2264274 - RNA, 19 nt, Artificial Sequence
  Description of Artificial Sequence: Synthetic oligonucleotide
aggccaguccuucugcugg

SEQ ID NO: 2264275 - RNA, 19 nt, Artificial Sequence
  Description of Artificial Sequence: Synthetic oligonucleotide
aguagcucuccaccagugg

SEQ ID NO: 2264276 - RNA, 19 nt, Artificial Sequence
  Description of Artificial Sequence: Synthetic oligonucleotide
agguucaacugccagucug

SEQ ID NO: 2264277 - RNA, 19 nt, Artificial Sequence
  Description of Artificial Sequence: Synthetic oligonucleotide
uauaggguccgugggaagc

SEQ ID NO: 2264278 - RNA, 19 nt, Artificial Sequence
  Description of Artificial Sequence: Synthetic oligonucleotide
ugucgaaggcauaugcaaa

SEQ ID NO: 2264279 - RNA, 19 nt, Artificial Sequence
  Description of Artificial Sequence: Synthetic oligonucleotide
ucccuuuguuugcuggagg

SEQ ID NO: 2264280 - RNA, 19 nt, Artificial Sequence
  Description of Artificial Sequence: Synthetic oligonucleotide
guugcugugaggucuuaug

SEQ ID NO: 2264281 - RNA, 19 nt, Artificial Sequence
  Description of Artificial Sequence: Synthetic oligonucleotide
ugagauguaccaccugaaa

SEQ ID NO: 2264282 - RNA, 19 nt, Artificial Sequence
  Description of Artificial Sequence: Synthetic oligonucleotide
cuaacccucccuuuaccgc

SEQ ID NO: 2264283 - RNA, 19 nt, Artificial Sequence
  Description of Artificial Sequence: Synthetic oligonucleotide
caagccaauauaagcuuug

SEQ ID NO: 2264284 - RNA, 19 nt, Artificial Sequence
  Description of Artificial Sequence: Synthetic oligonucleotide
gcauaugcaaauaucuuag

SEQ ID NO: 2264285 - RNA, 19 nt, Artificial Sequence
  Description of Artificial Sequence: Synthetic oligonucleotide
acugagagccacaguaucg

SEQ ID NO: 2264286 - RNA, 19 nt, Artificial Sequence
  Description of Artificial Sequence: Synthetic oligonucleotide
gugggaagcugcuggauag

SEQ ID NO: 2264287 - RNA, 19 nt, Artificial Sequence
  Description of Artificial Sequence: Synthetic oligonucleotide
cacaguaucgagcuaccug

SEQ ID NO: 2264288 - RNA, 19 nt, Artificial Sequence
  Description of Artificial Sequence: Synthetic oligonucleotide
ucuuccaccacaucuccau

SEQ ID NO: 2264289 - RNA, 19 nt, Artificial Sequence
  Description of Artificial Sequence: Synthetic oligonucleotide
caggcgauuguccacaguc

SEQ ID NO: 2264290 - RNA, 19 nt, Artificial Sequence
  Description of Artificial Sequence: Synthetic oligonucleotide
ugucguucccauagcagcu

SEQ ID NO: 2264291 - RNA, 19 nt, Artificial Sequence
  Description of Artificial Sequence: Synthetic oligonucleotide
uacaacaaaugauucuauu

SEQ ID NO: 2264292 - RNA, 19 nt, Artificial Sequence
  Description of Artificial Sequence: Synthetic oligonucleotide
cuguacaugaguuuacaaa

SEQ ID NO: 2264293 - RNA, 19 nt, Artificial Sequence
  Description of Artificial Sequence: Synthetic oligonucleotide
ucccauagcagcucaugca

SEQ ID NO: 2264294 - RNA, 19 nt, Artificial Sequence
  Description of Artificial Sequence: Synthetic oligonucleotide
acauauuaacauauaaaua

SEQ ID NO: 2264295 - RNA, 19 nt, Artificial Sequence
  Description of Artificial Sequence: Synthetic oligonucleotide
aacugccagucugucuucc

SEQ ID NO: 2264296 - RNA, 19 nt, Artificial Sequence
  Description of Artificial Sequence: Synthetic oligonucleotide
auugcagguuguccaggcg

SEQ ID NO: 2264297 - RNA, 19 nt, Artificial Sequence
  Description of Artificial Sequence: Synthetic oligonucleotide
agcugcuggauagcaagcc

SEQ ID NO: 2264298 - RNA, 19 nt, Artificial Sequence
  Description of Artificial Sequence: Synthetic oligonucleotide
cauuauaguaccgggucac

SEQ ID NO: 2264299 - RNA, 19 nt, Artificial Sequence
  Description of Artificial Sequence: Synthetic oligonucleotide
uacaggaauucucuuccuc

SEQ ID NO: 2264300 - RNA, 19 nt, Artificial Sequence
  Description of Artificial Sequence: Synthetic oligonucleotide
agccccaugguaccaauug

SEQ ID NO: 2264301 - RNA, 19 nt, Artificial Sequence
  Description of Artificial Sequence: Synthetic oligonucleotide
uggcauuauaguaccgggu

SEQ ID NO: 2264302 - RNA, 19 nt, Artificial Sequence
  Description of Artificial Sequence: Synthetic oligonucleotide
ucaucgcucuggcucaagc

SEQ ID NO: 2264303 - RNA, 19 nt, Artificial Sequence
  Description of Artificial Sequence: Synthetic oligonucleotide
agcaucuacuuccauucga

SEQ ID NO: 2264304 - RNA, 19 nt, Artificial Sequence
  Description of Artificial Sequence: Synthetic oligonucleotide
uugagauguaccaccugaa

SEQ ID NO: 2264305 - RNA, 19 nt, Artificial Sequence
  Description of Artificial Sequence: Synthetic oligonucleotide
acugugcucaugaugagcu

SEQ ID NO: 2264306 - RNA, 19 nt, Artificial Sequence
  Description of Artificial Sequence: Synthetic oligonucleotide
uaucgagcuaccuggcaac

SEQ ID NO: 2264307 - RNA, 19 nt, Artificial Sequence
  Description of Artificial Sequence: Synthetic oligonucleotide
aagcugcuggauagcaagc

SEQ ID NO: 2264308 - RNA, 19 nt, Artificial Sequence
  Description of Artificial Sequence: Synthetic oligonucleotide
uuucucaaucaccguacaa

SEQ ID NO: 2264309 - RNA, 19 nt, Artificial Sequence
  Description of Artificial Sequence: Synthetic oligonucleotide
gaagggacgcuuccucucc

SEQ ID NO: 2264310 - RNA, 19 nt, Artificial Sequence
  Description of Artificial Sequence: Synthetic oligonucleotide
caugguaccaauugcaggu

SEQ ID NO: 2264311 - RNA, 19 nt, Artificial Sequence
  Description of Artificial Sequence: Synthetic oligonucleotide
cuuauggcagcugcucugg

SEQ ID NO: 2264312 - RNA, 19 nt, Artificial Sequence
  Description of Artificial Sequence: Synthetic oligonucleotide
ugguaccaauugcagguug

SEQ ID NO: 2264313 - RNA, 19 nt, Artificial Sequence
  Description of Artificial Sequence: Synthetic oligonucleotide
uuagcaccauuuccaucag

SEQ ID NO: 2264314 - RNA, 19 nt, Artificial Sequence
  Description of Artificial Sequence: Synthetic oligonucleotide
ggaauucucuuccucuucc

SEQ ID NO: 2264315 - RNA, 19 nt, Artificial Sequence
  Description of Artificial Sequence: Synthetic oligonucleotide
uauaguaccgggucacauu

SEQ ID NO: 2264316 - RNA, 19 nt, Artificial Sequence
  Description of Artificial Sequence: Synthetic oligonucleotide
cuuugcucccuuuguuugc

SEQ ID NO: 2264317 - RNA, 19 nt, Artificial Sequence
  Description of Artificial Sequence: Synthetic oligonucleotide
uucaggacagggaauuguu

SEQ ID NO: 2264318 - RNA, 19 nt, Artificial Sequence
  Description of Artificial Sequence: Synthetic oligonucleotide
uggcaacgcccacagaugu

SEQ ID NO: 2264319 - RNA, 19 nt, Artificial Sequence
  Description of Artificial Sequence: Synthetic oligonucleotide
caucuacuuccauucgagc

SEQ ID NO: 2264320 - RNA, 19 nt, Artificial Sequence
  Description of Artificial Sequence: Synthetic oligonucleotide
acacucauaguagguacag

SEQ ID NO: 2264321 - RNA, 19 nt, Artificial Sequence
  Description of Artificial Sequence: Synthetic oligonucleotide
auguugaauucccgaagcu

SEQ ID NO: 2264322 - RNA, 19 nt, Artificial Sequence
  Description of Artificial Sequence: Synthetic oligonucleotide
accuccccuaugucguucc

SEQ ID NO: 2264323 - RNA, 19 nt, Artificial Sequence
  Description of Artificial Sequence: Synthetic oligonucleotide
ggcauuauaguaccggguc

SEQ ID NO: 2264324 - RNA, 19 nt, Artificial Sequence
  Description of Artificial Sequence: Synthetic oligonucleotide
agcuggaaaccuugaaccu

SEQ ID NO: 2264325 - RNA, 19 nt, Artificial Sequence
  Description of Artificial Sequence: Synthetic oligonucleotide
uaccaauugcagguugucc

SEQ ID NO: 2264326 - RNA, 19 nt, Artificial Sequence
  Description of Artificial Sequence: Synthetic oligonucleotide
cauuggcauuauaguaccg

SEQ ID NO: 2264327 - RNA, 19 nt, Artificial Sequence
  Description of Artificial Sequence: Synthetic oligonucleotide
agcaagccaauauaagcuu

SEQ ID NO: 2264328 - RNA, 19 nt, Artificial Sequence
  Description of Artificial Sequence: Synthetic oligonucleotide
ucgcucuggcucaagcuca

SEQ ID NO: 2264329 - RNA, 19 nt, Artificial Sequence
  Description of Artificial Sequence: Synthetic oligonucleotide
ugcagcaguagccacucuu

SEQ ID NO: 2264330 - RNA, 19 nt, Artificial Sequence
  Description of Artificial Sequence: Synthetic oligonucleotide
cagaauugagauguaccac

SEQ ID NO: 2264331 - RNA, 19 nt, Artificial Sequence
  Description of Artificial Sequence: Synthetic oligonucleotide
ccauuugaggaauacaaca

SEQ ID NO: 2264332 - RNA, 19 nt, Artificial Sequence
  Description of Artificial Sequence: Synthetic oligonucleotide
gagagccacaguaucgagc

SEQ ID NO: 2264333 - RNA, 19 nt, Artificial Sequence
  Description of Artificial Sequence: Synthetic oligonucleotide
guacaaggaggguaaugac

SEQ ID NO: 2264334 - RNA, 19 nt, Artificial Sequence
  Description of Artificial Sequence: Synthetic oligonucleotide
agcuuugggucgccagccc

SEQ ID NO: 2264335 - RNA, 19 nt, Artificial Sequence
  Description of Artificial Sequence: Synthetic oligonucleotide
ucugucuuccacugugcuc

SEQ ID NO: 2264336 - RNA, 19 nt, Artificial Sequence
  Description of Artificial Sequence: Synthetic oligonucleotide
aguaucgagcuaccuggca

SEQ ID NO: 2264337 - RNA, 19 nt, Artificial Sequence
  Description of Artificial Sequence: Synthetic oligonucleotide
cuugugggcaggccagucc

SEQ ID NO: 2264338 - RNA, 19 nt, Artificial Sequence
  Description of Artificial Sequence: Synthetic oligonucleotide
accgggucacauucaggac

SEQ ID NO: 2264339 - RNA, 19 nt, Artificial Sequence
  Description of Artificial Sequence: Synthetic oligonucleotide
ugcuggaagggacgcuucc

SEQ ID NO: 2264340 - RNA, 19 nt, Artificial Sequence
  Description of Artificial Sequence: Synthetic oligonucleotide
auucgagccucaaaggagu

SEQ ID NO: 2264341 - RNA, 19 nt, Artificial Sequence
  Description of Artificial Sequence: Synthetic oligonucleotide
uuauaguaccgggucacau

SEQ ID NO: 2264342 - RNA, 19 nt, Artificial Sequence
  Description of Artificial Sequence: Synthetic oligonucleotide
ggaauacaacaaaugauuc

SEQ ID NO: 2264343 - RNA, 19 nt, Artificial Sequence
  Description of Artificial Sequence: Synthetic oligonucleotide
gaaguuucuaacccucccu

SEQ ID NO: 2264344 - RNA, 19 nt, Artificial Sequence
  Description of Artificial Sequence: Synthetic oligonucleotide
ccauuggcauuauaguacc

SEQ ID NO: 2264345 - RNA, 19 nt, Artificial Sequence
  Description of Artificial Sequence: Synthetic oligonucleotide
auucaggacagggaauugu

SEQ ID NO: 2264346 - RNA, 19 nt, Artificial Sequence
  Description of Artificial Sequence: Synthetic oligonucleotide
ucuuagcaccauuuccauc

SEQ ID NO: 2264347 - RNA, 19 nt, Artificial Sequence
  Description of Artificial Sequence: Synthetic oligonucleotide
gaggaauacaacaaaugau

SEQ ID NO: 2264348 - RNA, 19 nt, Artificial Sequence
  Description of Artificial Sequence: Synthetic oligonucleotide
uggaagggacgcuuccucu

SEQ ID NO: 2264349 - RNA, 19 nt, Artificial Sequence
  Description of Artificial Sequence: Synthetic oligonucleotide
guugaauucccgaagcugu

SEQ ID NO: 2264350 - RNA, 19 nt, Artificial Sequence
  Description of Artificial Sequence: Synthetic oligonucleotide
agccacaccuccccuaugu

SEQ ID NO: 2264351 - RNA, 19 nt, Artificial Sequence
  Description of Artificial Sequence: Synthetic oligonucleotide
guaucgagcuaccuggcaa

SEQ ID NO: 2264352 - RNA, 19 nt, Artificial Sequence
  Description of Artificial Sequence: Synthetic oligonucleotide
uucuucuauaggguccgug

SEQ ID NO: 2264353 - RNA, 19 nt, Artificial Sequence
  Description of Artificial Sequence: Synthetic oligonucleotide
agcccgucaucgcucuggc

SEQ ID NO: 2264354 - RNA, 19 nt, Artificial Sequence
  Description of Artificial Sequence: Synthetic oligonucleotide
uuugcucccuuuguuugcu

SEQ ID NO: 2264355 - RNA, 19 nt, Artificial Sequence
  Description of Artificial Sequence: Synthetic oligonucleotide
cuccauuggcauuauagua

SEQ ID NO: 2264356 - RNA, 19 nt, Artificial Sequence
  Description of Artificial Sequence: Synthetic oligonucleotide
guacaugaguuuacaaaca

SEQ ID NO: 2264357 - RNA, 19 nt, Artificial Sequence
  Description of Artificial Sequence: Synthetic oligonucleotide
cuucauguugcugugaggu

SEQ ID NO: 2264358 - RNA, 19 nt, Artificial Sequence
  Description of Artificial Sequence: Synthetic oligonucleotide
uaguagguacaggaauucu

SEQ ID NO: 2264359 - RNA, 19 nt, Artificial Sequence
  Description of Artificial Sequence: Synthetic oligonucleotide
uucauguugcugugagguc

SEQ ID NO: 2264360 - RNA, 19 nt, Artificial Sequence
  Description of Artificial Sequence: Synthetic oligonucleotide
ccaugguaccaauugcagg

SEQ ID NO: 2264361 - RNA, 19 nt, Artificial Sequence
  Description of Artificial Sequence: Synthetic oligonucleotide
cacugagagccacaguauc

SEQ ID NO: 2264362 - RNA, 19 nt, Artificial Sequence
  Description of Artificial Sequence: Synthetic oligonucleotide
ucguucccauagcagcuca

SEQ ID NO: 2264363 - RNA, 19 nt, Artificial Sequence
  Description of Artificial Sequence: Synthetic oligonucleotide
cuaugucguucccauagca

SEQ ID NO: 2264364 - RNA, 19 nt, Artificial Sequence
  Description of Artificial Sequence: Synthetic oligonucleotide
cucaaaggaguagcucucc

SEQ ID NO: 2264365 - RNA, 19 nt, Artificial Sequence
  Description of Artificial Sequence: Synthetic oligonucleotide
cuggcaacgcccacagaug

SEQ ID NO: 2264366 - RNA, 19 nt, Artificial Sequence
  Description of Artificial Sequence: Synthetic oligonucleotide
cagucacagaauugagaug

SEQ ID NO: 2264367 - RNA, 19 nt, Artificial Sequence
  Description of Artificial Sequence: Synthetic oligonucleotide
agccucaaaggaguagcuc

SEQ ID NO: 2264368 - RNA, 19 nt, Artificial Sequence
  Description of Artificial Sequence: Synthetic oligonucleotide
ugcagguuguccaggcgau

SEQ ID NO: 2264369 - RNA, 19 nt, Artificial Sequence
  Description of Artificial Sequence: Synthetic oligonucleotide
uaccaccugaaacccggga

SEQ ID NO: 2264370 - RNA, 19 nt, Artificial Sequence
  Description of Artificial Sequence: Synthetic oligonucleotide
uccccuaugucguucccau

SEQ ID NO: 2264371 - RNA, 19 nt, Artificial Sequence
  Description of Artificial Sequence: Synthetic oligonucleotide
gaaccugcagcaguagcca

SEQ ID NO: 2264372 - RNA, 19 nt, Artificial Sequence
  Description of Artificial Sequence: Synthetic oligonucleotide
gacgcuuccucucccgaca

SEQ ID NO: 2264373 - RNA, 19 nt, Artificial Sequence
  Description of Artificial Sequence: Synthetic oligonucleotide
augauucuauuugaaguuu

SEQ ID NO: 2264374 - RNA, 19 nt, Artificial Sequence
  Description of Artificial Sequence: Synthetic oligonucleotide
aguuucuaacccucccuuu

SEQ ID NO: 2264375 - RNA, 19 nt, Artificial Sequence
  Description of Artificial Sequence: Synthetic oligonucleotide
cucaaucaccguacaagga

SEQ ID NO: 2264376 - RNA, 19 nt, Artificial Sequence
  Description of Artificial Sequence: Synthetic oligonucleotide
gauucuauuugaaguuucu

SEQ ID NO: 2264377 - RNA, 19 nt, Artificial Sequence
  Description of Artificial Sequence: Synthetic oligonucleotide
ccgacagugcuucuugugg

SEQ ID NO: 2264378 - RNA, 19 nt, Artificial Sequence
  Description of Artificial Sequence: Synthetic oligonucleotide
gucacauucaggacaggga

SEQ ID NO: 2264379 - RNA, 19 nt, Artificial Sequence
  Description of Artificial Sequence: Synthetic oligonucleotide
gcaucuacuuccauucgag

SEQ ID NO: 2264380 - RNA, 19 nt, Artificial Sequence
  Description of Artificial Sequence: Synthetic oligonucleotide
cucaugcuggaagggacgc

SEQ ID NO: 2264381 - RNA, 19 nt, Artificial Sequence
  Description of Artificial Sequence: Synthetic oligonucleotide
guagguacaggaauucucu

SEQ ID NO: 2264382 - RNA, 19 nt, Artificial Sequence
  Description of Artificial Sequence: Synthetic oligonucleotide
gacacucauaguagguaca

SEQ ID NO: 2264383 - RNA, 19 nt, Artificial Sequence
  Description of Artificial Sequence: Synthetic oligonucleotide
ucgagccucaaaggaguag

SEQ ID NO: 2264384 - RNA, 19 nt, Artificial Sequence
  Description of Artificial Sequence: Synthetic oligonucleotide
caguaucgagcuaccuggc

SEQ ID NO: 2264385 - RNA, 19 nt, Artificial Sequence
  Description of Artificial Sequence: Synthetic oligonucleotide
cagcaucuacuuccauucg

SEQ ID NO: 2264386 - RNA, 19 nt, Artificial Sequence
  Description of Artificial Sequence: Synthetic oligonucleotide
cuguuugccauuugaggaa

SEQ ID NO: 2264387 - RNA, 19 nt, Artificial Sequence
  Description of Artificial Sequence: Synthetic oligonucleotide
cacugugcucaugaugagc

SEQ ID NO: 2264388 - RNA, 19 nt, Artificial Sequence
  Description of Artificial Sequence: Synthetic oligonucleotide
cacucauaguagguacagg

SEQ ID NO: 2264389 - RNA, 19 nt, Artificial Sequence
  Description of Artificial Sequence: Synthetic oligonucleotide
agggacgcuuccucucccg

SEQ ID NO: 2264390 - RNA, 19 nt, Artificial Sequence
  Description of Artificial Sequence: Synthetic oligonucleotide
gaguagcucuccaccagug

SEQ ID NO: 2264391 - RNA, 19 nt, Artificial Sequence
  Description of Artificial Sequence: Synthetic oligonucleotide
aucgagcuaccuggcaacg

SEQ ID NO: 2264392 - RNA, 19 nt, Artificial Sequence
  Description of Artificial Sequence: Synthetic oligonucleotide
aacgcccacagauguugaa

SEQ ID NO: 2264393 - RNA, 19 nt, Artificial Sequence
  Description of Artificial Sequence: Synthetic oligonucleotide
cagugcuucuugugggcag

SEQ ID NO: 2264394 - RNA, 19 nt, Artificial Sequence
  Description of Artificial Sequence: Synthetic oligonucleotide
gucgccagccccaugguac

SEQ ID NO: 2264395 - RNA, 19 nt, Artificial Sequence
  Description of Artificial Sequence: Synthetic oligonucleotide
acaaacauauuaacauaua

SEQ ID NO: 2264396 - RNA, 19 nt, Artificial Sequence
  Description of Artificial Sequence: Synthetic oligonucleotide
auuauaguaccgggucaca

SEQ ID NO: 2264397 - RNA, 19 nt, Artificial Sequence
  Description of Artificial Sequence: Synthetic oligonucleotide
gaauugagauguaccaccu

SEQ ID NO: 2264398 - RNA, 19 nt, Artificial Sequence
  Description of Artificial Sequence: Synthetic oligonucleotide
uuauggcagcugcucugga

SEQ ID NO: 2264399 - RNA, 19 nt, Artificial Sequence
  Description of Artificial Sequence: Synthetic oligonucleotide
ucuuuggcaccuccagguu

SEQ ID NO: 2264400 - RNA, 19 nt, Artificial Sequence
  Description of Artificial Sequence: Synthetic oligonucleotide
uucagcccgucaucgcucu

SEQ ID NO: 2264401 - RNA, 19 nt, Artificial Sequence
  Description of Artificial Sequence: Synthetic oligonucleotide
caccugaaacccgggagcc

SEQ ID NO: 2264402 - RNA, 19 nt, Artificial Sequence
  Description of Artificial Sequence: Synthetic oligonucleotide
aacccucccuuuaccgccg

SEQ ID NO: 2264403 - RNA, 19 nt, Artificial Sequence
  Description of Artificial Sequence: Synthetic oligonucleotide
cuugaaccugcagcaguag

SEQ ID NO: 2264404 - RNA, 19 nt, Artificial Sequence
  Description of Artificial Sequence: Synthetic oligonucleotide
cuucagcccgucaucgcuc

SEQ ID NO: 2264405 - RNA, 19 nt, Artificial Sequence
  Description of Artificial Sequence: Synthetic oligonucleotide
caggacagggaauuguucu

SEQ ID NO: 2264406 - RNA, 19 nt, Artificial Sequence
  Description of Artificial Sequence: Synthetic oligonucleotide
cucccgacagugcuucuug

SEQ ID NO: 2264407 - RNA, 19 nt, Artificial Sequence
  Description of Artificial Sequence: Synthetic oligonucleotide
aacacuggaggggcacugu

SEQ ID NO: 2264408 - RNA, 19 nt, Artificial Sequence
  Description of Artificial Sequence: Synthetic oligonucleotide
uggaaaccuugaaccugca

SEQ ID NO: 2264409 - RNA, 19 nt, Artificial Sequence
  Description of Artificial Sequence: Synthetic oligonucleotide
ugaaacccgggagccacac

SEQ ID NO: 2264410 - RNA, 19 nt, Artificial Sequence
  Description of Artificial Sequence: Synthetic oligonucleotide
ggcgauuguccacagucac

SEQ ID NO: 2264411 - RNA, 19 nt, Artificial Sequence
  Description of Artificial Sequence: Synthetic oligonucleotide
uccgugggaagcugcugga

SEQ ID NO: 2264412 - RNA, 19 nt, Artificial Sequence
  Description of Artificial Sequence: Synthetic oligonucleotide
agguccuagggagccuccc

SEQ ID NO: 2264413 - RNA, 19 nt, Artificial Sequence
  Description of Artificial Sequence: Synthetic oligonucleotide
ggauagcaagccaauauaa

SEQ ID NO: 2264414 - RNA, 19 nt, Artificial Sequence
  Description of Artificial Sequence: Synthetic oligonucleotide
ucgccagccccaugguacc

SEQ ID NO: 2264415 - RNA, 19 nt, Artificial Sequence
  Description of Artificial Sequence: Synthetic oligonucleotide
cucccuuuguuugcuggag

SEQ ID NO: 2264416 - RNA, 19 nt, Artificial Sequence
  Description of Artificial Sequence: Synthetic oligonucleotide
cccaugguaccaauugcag

SEQ ID NO: 2264417 - RNA, 19 nt, Artificial Sequence
  Description of Artificial Sequence: Synthetic oligonucleotide
gaaacccgggagccacacc

SEQ ID NO: 2264418 - RNA, 19 nt, Artificial Sequence
  Description of Artificial Sequence: Synthetic oligonucleotide
uccaggcgauuguccacag

SEQ ID NO: 2264419 - RNA, 19 nt, Artificial Sequence
  Description of Artificial Sequence: Synthetic oligonucleotide
ugaacacuggaggggcacu

SEQ ID NO: 2264420 - RNA, 19 nt, Artificial Sequence
  Description of Artificial Sequence: Synthetic oligonucleotide
gcauuauaguaccggguca

SEQ ID NO: 2264421 - RNA, 19 nt, Artificial Sequence
  Description of Artificial Sequence: Synthetic oligonucleotide
cugagagccacaguaucga

SEQ ID NO: 2264422 - RNA, 19 nt, Artificial Sequence
  Description of Artificial Sequence: Synthetic oligonucleotide
acaugaguuuacaaacaua

SEQ ID NO: 2264423 - RNA, 19 nt, Artificial Sequence
  Description of Artificial Sequence: Synthetic oligonucleotide
cuggauagcaagccaauau

SEQ ID NO: 2264424 - RNA, 19 nt, Artificial Sequence
  Description of Artificial Sequence: Synthetic oligonucleotide
cacucuucagcccgucauc

SEQ ID NO: 2264425 - RNA, 19 nt, Artificial Sequence
  Description of Artificial Sequence: Synthetic oligonucleotide
ucgaaggcauaugcaaaua

SEQ ID NO: 2264426 - RNA, 19 nt, Artificial Sequence
  Description of Artificial Sequence: Synthetic oligonucleotide
acgcuuccucucccgacag

SEQ ID NO: 2264427 - RNA, 19 nt, Artificial Sequence
  Description of Artificial Sequence: Synthetic oligonucleotide
ucgagcuaccuggcaacgc

SEQ ID NO: 2264428 - RNA, 19 nt, Artificial Sequence
  Description of Artificial Sequence: Synthetic oligonucleotide
uucgagccucaaaggagua

SEQ ID NO: 2264429 - RNA, 19 nt, Artificial Sequence
  Description of Artificial Sequence: Synthetic oligonucleotide
gcuucuugugggcaggcca

SEQ ID NO: 2264430 - RNA, 19 nt, Artificial Sequence
  Description of Artificial Sequence: Synthetic oligonucleotide
gagcuaccuggcaacgccc

SEQ ID NO: 2264431 - RNA, 19 nt, Artificial Sequence
  Description of Artificial Sequence: Synthetic oligonucleotide
cauucaggacagggaauug

SEQ ID NO: 2264432 - RNA, 19 nt, Artificial Sequence
  Description of Artificial Sequence: Synthetic oligonucleotide
acagugcuucuugugggca

SEQ ID NO: 2264433 - RNA, 19 nt, Artificial Sequence
  Description of Artificial Sequence: Synthetic oligonucleotide
gcaacgcccacagauguug

SEQ ID NO: 2264434 - RNA, 19 nt, Artificial Sequence
  Description of Artificial Sequence: Synthetic oligonucleotide
cccgucaucgcucuggcuc

SEQ ID NO: 2264435 - RNA, 19 nt, Artificial Sequence
  Description of Artificial Sequence: Synthetic oligonucleotide
cucuucagcuuugggucgc

SEQ ID NO: 2264436 - RNA, 19 nt, Artificial Sequence
  Description of Artificial Sequence: Synthetic oligonucleotide
cuuugggucgccagcccca

SEQ ID NO: 2264437 - RNA, 19 nt, Artificial Sequence
  Description of Artificial Sequence: Synthetic oligonucleotide
aggaggguaaugacacuca

SEQ ID NO: 2264438 - RNA, 19 nt, Artificial Sequence
  Description of Artificial Sequence: Synthetic oligonucleotide
cuccccuaugucucugcug

SEQ ID NO: 2264439 - RNA, 19 nt, Artificial Sequence
  Description of Artificial Sequence: Synthetic oligonucleotide
auaggguccgugggaagcu

SEQ ID NO: 2264440 - RNA, 19 nt, Artificial Sequence
  Description of Artificial Sequence: Synthetic oligonucleotide
cuacuuccauucgagccuc

SEQ ID NO: 2264441 - RNA, 19 nt, Artificial Sequence
  Description of Artificial Sequence: Synthetic oligonucleotide
guaccgggucacauucagg

SEQ ID NO: 2264442 - RNA, 19 nt, Artificial Sequence
  Description of Artificial Sequence: Synthetic oligonucleotide
caccguacaaggaggguaa

SEQ ID NO: 2264443 - RNA, 19 nt, Artificial Sequence
  Description of Artificial Sequence: Synthetic oligonucleotide
cagcccgucaucgcucugg

SEQ ID NO: 2264444 - RNA, 19 nt, Artificial Sequence
  Description of Artificial Sequence: Synthetic oligonucleotide
cccacagauguugaauucc

SEQ ID NO: 2264445 - RNA, 19 nt, Artificial Sequence
  Description of Artificial Sequence: Synthetic oligonucleotide
gucgaaggcauaugcaaau

SEQ ID NO: 2264446 - RNA, 19 nt, Artificial Sequence
  Description of Artificial Sequence: Synthetic oligonucleotide
aggcauaugcaaauaucuu

SEQ ID NO: 2264447 - RNA, 19 nt, Artificial Sequence
  Description of Artificial Sequence: Synthetic oligonucleotide
gugaacacuggaggggcac

SEQ ID NO: 2264448 - RNA, 19 nt, Artificial Sequence
  Description of Artificial Sequence: Synthetic oligonucleotide
guaccaauugcagguuguc

SEQ ID NO: 2264449 - RNA, 19 nt, Artificial Sequence
  Description of Artificial Sequence: Synthetic oligonucleotide
gcucaugcuggaagggacg

SEQ ID NO: 2264450 - RNA, 19 nt, Artificial Sequence
  Description of Artificial Sequence: Synthetic oligonucleotide
uguugcugugaggucuuau

SEQ ID NO: 2264451 - RNA, 19 nt, Artificial Sequence
  Description of Artificial Sequence: Synthetic oligonucleotide
gggugaacacuggaggggc

SEQ ID NO: 2264452 - RNA, 19 nt, Artificial Sequence
  Description of Artificial Sequence: Synthetic oligonucleotide
ccagguucaacugccaguc

SEQ ID NO: 2264453 - RNA, 19 nt, Artificial Sequence
  Description of Artificial Sequence: Synthetic oligonucleotide
ggaagggacgcuuccucuc

SEQ ID NO: 2264454 - RNA, 19 nt, Artificial Sequence
  Description of Artificial Sequence: Synthetic oligonucleotide
ccacagucacagaauugag

SEQ ID NO: 2264455 - RNA, 19 nt, Artificial Sequence
  Description of Artificial Sequence: Synthetic oligonucleotide
ggucuuauggcagcugcuc

SEQ ID NO: 2264456 - RNA, 19 nt, Artificial Sequence
  Description of Artificial Sequence: Synthetic oligonucleotide
ccuaugucguucccauagc

SEQ ID NO: 2264457 - RNA, 19 nt, Artificial Sequence
  Description of Artificial Sequence: Synthetic oligonucleotide
augcagaagccugcccgag

SEQ ID NO: 2264458 - RNA, 19 nt, Artificial Sequence
  Description of Artificial Sequence: Synthetic oligonucleotide
uggauccauugcuggcuuc

SEQ ID NO: 2264459 - RNA, 19 nt, Artificial Sequence
  Description of Artificial Sequence: Synthetic oligonucleotide
gaggguaaugacacucaua

SEQ ID NO: 2264460 - RNA, 19 nt, Artificial Sequence
  Description of Artificial Sequence: Synthetic oligonucleotide
gucuuauggcagcugcucu

SEQ ID NO: 2264461 - RNA, 19 nt, Artificial Sequence
  Description of Artificial Sequence: Synthetic oligonucleotide
cuuccauucgagccucaaa

SEQ ID NO: 2264462 - RNA, 19 nt, Artificial Sequence
  Description of Artificial Sequence: Synthetic oligonucleotide
guaccaccugaaacccggg

SEQ ID NO: 2264463 - RNA, 19 nt, Artificial Sequence
  Description of Artificial Sequence: Synthetic oligonucleotide
cagaagccugcccgagccc

SEQ ID NO: 2264464 - RNA, 19 nt, Artificial Sequence
  Description of Artificial Sequence: Synthetic oligonucleotide
gguccuagggagccucccc

SEQ ID NO: 2264465 - RNA, 19 nt, Artificial Sequence
  Description of Artificial Sequence: Synthetic oligonucleotide
cgagcuaccuggcaacgcc

SEQ ID NO: 2264466 - RNA, 19 nt, Artificial Sequence
  Description of Artificial Sequence: Synthetic oligonucleotide
aucaccguacaaggagggu

SEQ ID NO: 2264467 - RNA, 19 nt, Artificial Sequence
  Description of Artificial Sequence: Synthetic oligonucleotide
cguacaaggaggguaauga

SEQ ID NO: 2264468 - RNA, 19 nt, Artificial Sequence
  Description of Artificial Sequence: Synthetic oligonucleotide
augcuggaagggacgcuuc

SEQ ID NO: 2264469 - RNA, 19 nt, Artificial Sequence
  Description of Artificial Sequence: Synthetic oligonucleotide
aggcgauuguccacaguca

SEQ ID NO: 2264470 - RNA, 19 nt, Artificial Sequence
  Description of Artificial Sequence: Synthetic oligonucleotide
uccuagggagccuccccua

SEQ ID NO: 2264471 - RNA, 19 nt, Artificial Sequence
  Description of Artificial Sequence: Synthetic oligonucleotide
gccccaugguaccaauugc

SEQ ID NO: 2264472 - RNA, 19 nt, Artificial Sequence
  Description of Artificial Sequence: Synthetic oligonucleotide
ggagccuccccuaugucuc

SEQ ID NO: 2264473 - RNA, 19 nt, Artificial Sequence
  Description of Artificial Sequence: Synthetic oligonucleotide
guucaacugccagucuguc

SEQ ID NO: 2264474 - RNA, 19 nt, Artificial Sequence
  Description of Artificial Sequence: Synthetic oligonucleotide
ggcaggccaguccuucugc

SEQ ID NO: 2264475 - RNA, 19 nt, Artificial Sequence
  Description of Artificial Sequence: Synthetic oligonucleotide
uucuugugggcaggccagu

SEQ ID NO: 2264476 - RNA, 19 nt, Artificial Sequence
  Description of Artificial Sequence: Synthetic oligonucleotide
cacuguccccacaggcuuc

SEQ ID NO: 2264477 - RNA, 19 nt, Artificial Sequence
  Description of Artificial Sequence: Synthetic oligonucleotide
cccuaugucucugcugggg

SEQ ID NO: 2264478 - RNA, 19 nt, Artificial Sequence
  Description of Artificial Sequence: Synthetic oligonucleotide
agcuaccuggcaacgccca

SEQ ID NO: 2264479 - RNA, 19 nt, Artificial Sequence
  Description of Artificial Sequence: Synthetic oligonucleotide
ccgggucacauucaggaca

SEQ ID NO: 2264480 - RNA, 19 nt, Artificial Sequence
  Description of Artificial Sequence: Synthetic oligonucleotide
caucgcucuggcucaagcu

SEQ ID NO: 2264481 - RNA, 19 nt, Artificial Sequence
  Description of Artificial Sequence: Synthetic oligonucleotide
guacaggaauucucuuccu

SEQ ID NO: 2264482 - RNA, 19 nt, Artificial Sequence
  Description of Artificial Sequence: Synthetic oligonucleotide
cuaccuggcaacgcccaca

SEQ ID NO: 2264483 - RNA, 19 nt, Artificial Sequence
  Description of Artificial Sequence: Synthetic oligonucleotide
uuugggucgccagccccau

SEQ ID NO: 2264484 - RNA, 19 nt, Artificial Sequence
  Description of Artificial Sequence: Synthetic oligonucleotide
gagccacaccuccccuaug

SEQ ID NO: 2264485 - RNA, 19 nt, Artificial Sequence
  Description of Artificial Sequence: Synthetic oligonucleotide
augguaccaauugcagguu

SEQ ID NO: 2264486 - RNA, 19 nt, Artificial Sequence
  Description of Artificial Sequence: Synthetic oligonucleotide
gucguucccauagcagcuc

SEQ ID NO: 2264487 - RNA, 19 nt, Artificial Sequence
  Description of Artificial Sequence: Synthetic oligonucleotide
uugggucgccagccccaug

SEQ ID NO: 2264488 - RNA, 19 nt, Artificial Sequence
  Description of Artificial Sequence: Synthetic oligonucleotide
caacgcccacagauguuga

SEQ ID NO: 2264489 - RNA, 19 nt, Artificial Sequence
  Description of Artificial Sequence: Synthetic oligonucleotide
ggacgcuuccucucccgac

SEQ ID NO: 2264490 - RNA, 19 nt, Artificial Sequence
  Description of Artificial Sequence: Synthetic oligonucleotide
ggcucaagcucaugcugga

SEQ ID NO: 2264491 - RNA, 19 nt, Artificial Sequence
  Description of Artificial Sequence: Synthetic oligonucleotide
gguuguccaggcgauuguc

SEQ ID NO: 2264492 - RNA, 19 nt, Artificial Sequence
  Description of Artificial Sequence: Synthetic oligonucleotide
guccuagggagccuccccu

SEQ ID NO: 2264493 - RNA, 19 nt, Artificial Sequence
  Description of Artificial Sequence: Synthetic oligonucleotide
cccgacagugcuucuugug

SEQ ID NO: 2264494 - RNA, 19 nt, Artificial Sequence
  Description of Artificial Sequence: Synthetic oligonucleotide
cacauucaggacagggaau

SEQ ID NO: 2264495 - RNA, 19 nt, Artificial Sequence
  Description of Artificial Sequence: Synthetic oligonucleotide
agccugcccgagccccuuc

SEQ ID NO: 2264496 - RNA, 19 nt, Artificial Sequence
  Description of Artificial Sequence: Synthetic oligonucleotide
ccuggcaacgcccacagau

SEQ ID NO: 2264497 - RNA, 19 nt, Artificial Sequence
  Description of Artificial Sequence: Synthetic oligonucleotide
ggaguagcucuccaccagu

SEQ ID NO: 2264498 - RNA, 19 nt, Artificial Sequence
  Description of Artificial Sequence: Synthetic oligonucleotide
cugaaacccgggagccaca

SEQ ID NO: 2264499 - RNA, 19 nt, Artificial Sequence
  Description of Artificial Sequence: Synthetic oligonucleotide
aggcuucauguugcuguga

SEQ ID NO: 2264500 - RNA, 19 nt, Artificial Sequence
  Description of Artificial Sequence: Synthetic oligonucleotide
gggagccuccccuaugucu

SEQ ID NO: 2264501 - RNA, 19 nt, Artificial Sequence
  Description of Artificial Sequence: Synthetic oligonucleotide
caguccuucugcuggcacu

SEQ ID NO: 2264502 - RNA, 19 nt, Artificial Sequence
  Description of Artificial Sequence: Synthetic oligonucleotide
cgaagcuguuucucaauca

SEQ ID NO: 2264503 - RNA, 19 nt, Artificial Sequence
  Description of Artificial Sequence: Synthetic oligonucleotide
gagccucaaaggaguagcu

SEQ ID NO: 2264504 - RNA, 19 nt, Artificial Sequence
  Description of Artificial Sequence: Synthetic oligonucleotide
gucaucgcucuggcucaag

SEQ ID NO: 2264505 - RNA, 19 nt, Artificial Sequence
  Description of Artificial Sequence: Synthetic oligonucleotide
gguucaacugccagucugu

SEQ ID NO: 2264506 - RNA, 19 nt, Artificial Sequence
  Description of Artificial Sequence: Synthetic oligonucleotide
gccacaguaucgagcuacc

SEQ ID NO: 2264507 - RNA, 19 nt, Artificial Sequence
  Description of Artificial Sequence: Synthetic oligonucleotide
gaaagguccuagggagccu

SEQ ID NO: 2264508 - RNA, 19 nt, Artificial Sequence
  Description of Artificial Sequence: Synthetic oligonucleotide
gcccgagccccuuccucgg

SEQ ID NO: 2264509 - RNA, 19 nt, Artificial Sequence
  Description of Artificial Sequence: Synthetic oligonucleotide
caaggaggguaaugacacu

SEQ ID NO: 2264510 - RNA, 19 nt, Artificial Sequence
  Description of Artificial Sequence: Synthetic oligonucleotide
gcuaccuggcaacgcccac

SEQ ID NO: 2264511 - RNA, 19 nt, Artificial Sequence
  Description of Artificial Sequence: Synthetic oligonucleotide
caugcuggaagggacgcuu

SEQ ID NO: 2264512 - RNA, 19 nt, Artificial Sequence
  Description of Artificial Sequence: Synthetic oligonucleotide
ggauccauugcuggcuucu

SEQ ID NO: 2264513 - RNA, 19 nt, Artificial Sequence
  Description of Artificial Sequence: Synthetic oligonucleotide
cauguugcugugaggucuu

SEQ ID NO: 2264514 - RNA, 19 nt, Artificial Sequence
  Description of Artificial Sequence: Synthetic oligonucleotide
gcgauuguccacagucaca

SEQ ID NO: 2264515 - RNA, 19 nt, Artificial Sequence
  Description of Artificial Sequence: Synthetic oligonucleotide
ccguacaaggaggguaaug

SEQ ID NO: 2264516 - RNA, 19 nt, Artificial Sequence
  Description of Artificial Sequence: Synthetic oligonucleotide
ggaggguaaugacacucau

SEQ ID NO: 2264517 - RNA, 19 nt, Artificial Sequence
  Description of Artificial Sequence: Synthetic oligonucleotide
cuggcuucuuuggcaccuc

SEQ ID NO: 2264518 - RNA, 19 nt, Artificial Sequence
  Description of Artificial Sequence: Synthetic oligonucleotide
accguacaaggaggguaau

SEQ ID NO: 2264519 - RNA, 19 nt, Artificial Sequence
  Description of Artificial Sequence: Synthetic oligonucleotide
gccuccccuaugucucugc

SEQ ID NO: 2264520 - RNA, 19 nt, Artificial Sequence
  Description of Artificial Sequence: Synthetic oligonucleotide
accuggcaacgcccacaga

SEQ ID NO: 2264521 - RNA, 19 nt, Artificial Sequence
  Description of Artificial Sequence: Synthetic oligonucleotide
gggacgcuuccucucccga

SEQ ID NO: 2264522 - RNA, 19 nt, Artificial Sequence
  Description of Artificial Sequence: Synthetic oligonucleotide
ccucucccgacagugcuuc

SEQ ID NO: 2264523 - RNA, 19 nt, Artificial Sequence
  Description of Artificial Sequence: Synthetic oligonucleotide
ccccuaugucucugcuggg

SEQ ID NO: 2264524 - RNA, 19 nt, Artificial Sequence
  Description of Artificial Sequence: Synthetic oligonucleotide
ggugaacacuggaggggca

SEQ ID NO: 2264525 - RNA, 19 nt, Artificial Sequence
  Description of Artificial Sequence: Synthetic oligonucleotide
cccuuuguuugcuggaggu

SEQ ID NO: 2264526 - RNA, 19 nt, Artificial Sequence
  Description of Artificial Sequence: Synthetic oligonucleotide
ggcacuguccccacaggcu

SEQ ID NO: 2264527 - RNA, 19 nt, Artificial Sequence
  Description of Artificial Sequence: Synthetic oligonucleotide
ccgucaucgcucuggcuca

SEQ ID NO: 2264528 - RNA, 19 nt, Artificial Sequence
  Description of Artificial Sequence: Synthetic oligonucleotide
gcuggauagcaagccaaua

SEQ ID NO: 2264529 - RNA, 19 nt, Artificial Sequence
  Description of Artificial Sequence: Synthetic oligonucleotide
cccgggagccacaccuccc

SEQ ID NO: 2264530 - RNA, 19 nt, Artificial Sequence
  Description of Artificial Sequence: Synthetic oligonucleotide
ggagccacaccuccccuau

SEQ ID NO: 2264531 - RNA, 19 nt, Artificial Sequence
  Description of Artificial Sequence: Synthetic oligonucleotide
cugcuggcacugagagcca

SEQ ID NO: 2264532 - RNA, 19 nt, Artificial Sequence
  Description of Artificial Sequence: Synthetic oligonucleotide
gccacucuucagcccguca

SEQ ID NO: 2264533 - RNA, 19 nt, Artificial Sequence
  Description of Artificial Sequence: Synthetic oligonucleotide
gauccauugcuggcuucuu

SEQ ID NO: 2264534 - RNA, 19 nt, Artificial Sequence
  Description of Artificial Sequence: Synthetic oligonucleotide
gcaagccaauauaagcuuu

SEQ ID NO: 2264535 - RNA, 19 nt, Artificial Sequence
  Description of Artificial Sequence: Synthetic oligonucleotide
gcaccauuuccaucagcau

SEQ ID NO: 2264536 - RNA, 19 nt, Artificial Sequence
  Description of Artificial Sequence: Synthetic oligonucleotide
ccuccccuaugucguuccc

SEQ ID NO: 2264537 - RNA, 19 nt, Artificial Sequence
  Description of Artificial Sequence: Synthetic oligonucleotide
ggucgccagccccauggua

SEQ ID NO: 2264538 - RNA, 19 nt, Artificial Sequence
  Description of Artificial Sequence: Synthetic oligonucleotide
auguugcugugaggucuua

SEQ ID NO: 2264539 - RNA, 19 nt, Artificial Sequence
  Description of Artificial Sequence: Synthetic oligonucleotide
gcuggaagggacgcuuccu

SEQ ID NO: 2264540 - RNA, 19 nt, Artificial Sequence
  Description of Artificial Sequence: Synthetic oligonucleotide
cgugggaagcugcuggaua

SEQ ID NO: 2264541 - RNA, 19 nt, Artificial Sequence
  Description of Artificial Sequence: Synthetic oligonucleotide
guucuucuauaggguccgu

SEQ ID NO: 2264542 - RNA, 19 nt, Artificial Sequence
  Description of Artificial Sequence: Synthetic oligonucleotide
cagccccaugguaccaauu

SEQ ID NO: 2264543 - RNA, 19 nt, Artificial Sequence
  Description of Artificial Sequence: Synthetic oligonucleotide
ccuagggagccuccccuau

SEQ ID NO: 2264544 - RNA, 19 nt, Artificial Sequence
  Description of Artificial Sequence: Synthetic oligonucleotide
ccacaucuccauuggcauu

SEQ ID NO: 2264545 - RNA, 19 nt, Artificial Sequence
  Description of Artificial Sequence: Synthetic oligonucleotide
ccuccccuaugucucugcu

SEQ ID NO: 2264546 - RNA, 19 nt, Artificial Sequence
  Description of Artificial Sequence: Synthetic oligonucleotide
gggucgccagccccauggu

SEQ ID NO: 2264547 - RNA, 19 nt, Artificial Sequence
  Description of Artificial Sequence: Synthetic oligonucleotide
cagcugcucuggauccauu

SEQ ID NO: 2264548 - RNA, 19 nt, Artificial Sequence
  Description of Artificial Sequence: Synthetic oligonucleotide
ccacaguaucgagcuaccu

SEQ ID NO: 2264549 - RNA, 19 nt, Artificial Sequence
  Description of Artificial Sequence: Synthetic oligonucleotide
ggcaacgcccacagauguu

SEQ ID NO: 2264550 - RNA, 19 nt, Artificial Sequence
  Description of Artificial Sequence: Synthetic oligonucleotide
ccccuaugucguucccaua

SEQ ID NO: 2264551 - RNA, 19 nt, Artificial Sequence
  Description of Artificial Sequence: Synthetic oligonucleotide
ccagccccaugguaccaau

SEQ ID NO: 2264552 - RNA, 19 nt, Artificial Sequence
  Description of Artificial Sequence: Synthetic oligonucleotide
gcccgucaucgcucuggcu

SEQ ID NO: 2264553 - RNA, 19 nt, Artificial Sequence
  Description of Artificial Sequence: Synthetic oligonucleotide
cgagccccuuccucgguuu

SEQ ID NO: 2264554 - RNA, 19 nt, Artificial Sequence
  Description of Artificial Sequence: Synthetic oligonucleotide
ccgagccccuuccucgguu

SEQ ID NO: 2264555 - RNA, 19 nt, Artificial Sequence
  Description of Artificial Sequence: Synthetic oligonucleotide
cgucaucgcucuggcucaa

SEQ ID NO: 2264556 - RNA, 19 nt, Artificial Sequence
  Description of Artificial Sequence: Synthetic oligonucleotide
agugcuaacauauuuauag

SEQ ID NO: 2264557 - RNA, 19 nt, Artificial Sequence
  Description of Artificial Sequence: Synthetic oligonucleotide
cuuaauuacaucuuuaaug

SEQ ID NO: 2264558 - RNA, 19 nt, Artificial Sequence
  Description of Artificial Sequence: Synthetic oligonucleotide
uccuaaauuacucacagcc

SEQ ID NO: 2264559 - RNA, 19 nt, Artificial Sequence
  Description of Artificial Sequence: Synthetic oligonucleotide
augaucgaaagacagaagc

SEQ ID NO: 2264560 - RNA, 19 nt, Artificial Sequence
  Description of Artificial Sequence: Synthetic oligonucleotide
uaaaauaaaauaaaauaaa

SEQ ID NO: 2264561 - RNA, 19 nt, Artificial Sequence
  Description of Artificial Sequence: Synthetic oligonucleotide
aaacaucuuaauuacaucu

SEQ ID NO: 2264562 - RNA, 19 nt, Artificial Sequence
  Description of Artificial Sequence: Synthetic oligonucleotide
auauuuauagcaucuagag

SEQ ID NO: 2264563 - RNA, 19 nt, Artificial Sequence
  Description of Artificial Sequence: Synthetic oligonucleotide
aaagacagaagcaugguac

SEQ ID NO: 2264564 - RNA, 19 nt, Artificial Sequence
  Description of Artificial Sequence: Synthetic oligonucleotide
ugcgaguuaaauuacagcc

SEQ ID NO: 2264565 - RNA, 19 nt, Artificial Sequence
  Description of Artificial Sequence: Synthetic oligonucleotide
aauuacaucuuuaaugcuc

SEQ ID NO: 2264566 - RNA, 19 nt, Artificial Sequence
  Description of Artificial Sequence: Synthetic oligonucleotide
aauuaauucagggccagcg

SEQ ID NO: 2264567 - RNA, 19 nt, Artificial Sequence
  Description of Artificial Sequence: Synthetic oligonucleotide
ugugaugaucgaaagacag

SEQ ID NO: 2264568 - RNA, 19 nt, Artificial Sequence
  Description of Artificial Sequence: Synthetic oligonucleotide
acugugaugaucgaaagac

SEQ ID NO: 2264569 - RNA, 19 nt, Artificial Sequence
  Description of Artificial Sequence: Synthetic oligonucleotide
uauuuauagcaucuagagg

SEQ ID NO: 2264570 - RNA, 19 nt, Artificial Sequence
  Description of Artificial Sequence: Synthetic oligonucleotide
aagacagaagcaugguacc

SEQ ID NO: 2264571 - RNA, 19 nt, Artificial Sequence
  Description of Artificial Sequence: Synthetic oligonucleotide
uuguacauaggcaugagcu

SEQ ID NO: 2264572 - RNA, 19 nt, Artificial Sequence
  Description of Artificial Sequence: Synthetic oligonucleotide
aaauaaaauaaaauaaaau

SEQ ID NO: 2264573 - RNA, 19 nt, Artificial Sequence
  Description of Artificial Sequence: Synthetic oligonucleotide
aaaauaaaauaaaauaaaa

SEQ ID NO: 2264574 - RNA, 19 nt, Artificial Sequence
  Description of Artificial Sequence: Synthetic oligonucleotide
cuaaauuacucacagcccc

SEQ ID NO: 2264575 - RNA, 19 nt, Artificial Sequence
  Description of Artificial Sequence: Synthetic oligonucleotide
ucgaaagacagaagcaugg

SEQ ID NO: 2264576 - RNA, 19 nt, Artificial Sequence
  Description of Artificial Sequence: Synthetic oligonucleotide
uuaaugcucucacacgugg

SEQ ID NO: 2264577 - RNA, 19 nt, Artificial Sequence
  Description of Artificial Sequence: Synthetic oligonucleotide
ugauguauaaaaccauggc

SEQ ID NO: 2264578 - RNA, 19 nt, Artificial Sequence
  Description of Artificial Sequence: Synthetic oligonucleotide
cagggauaaaaccagagcc

SEQ ID NO: 2264579 - RNA, 19 nt, Artificial Sequence
  Description of Artificial Sequence: Synthetic oligonucleotide
aagcuugugguuucugggc

SEQ ID NO: 2264580 - RNA, 19 nt, Artificial Sequence
  Description of Artificial Sequence: Synthetic oligonucleotide
uaaaauuaauucagggcca

SEQ ID NO: 2264581 - RNA, 19 nt, Artificial Sequence
  Description of Artificial Sequence: Synthetic oligonucleotide
agaagcaugguacccacac

SEQ ID NO: 2264582 - RNA, 19 nt, Artificial Sequence
  Description of Artificial Sequence: Synthetic oligonucleotide
auaggcaugagcugauggc

SEQ ID NO: 2264583 - RNA, 19 nt, Artificial Sequence
  Description of Artificial Sequence: Synthetic oligonucleotide
acaucaguaaacaccagcc

SEQ ID NO: 2264584 - RNA, 19 nt, Artificial Sequence
  Description of Artificial Sequence: Synthetic oligonucleotide
auuacagcccugugcaucc

SEQ ID NO: 2264585 - RNA, 19 nt, Artificial Sequence
  Description of Artificial Sequence: Synthetic oligonucleotide
cuuccugauguauaaaacc

SEQ ID NO: 2264586 - RNA, 19 nt, Artificial Sequence
  Description of Artificial Sequence: Synthetic oligonucleotide
cucucuucaagccugagag

SEQ ID NO: 2264587 - RNA, 19 nt, Artificial Sequence
  Description of Artificial Sequence: Synthetic oligonucleotide
gaugcugcgaguuaaauua

SEQ ID NO: 2264588 - RNA, 19 nt, Artificial Sequence
  Description of Artificial Sequence: Synthetic oligonucleotide
aauuacucacagccccucc

SEQ ID NO: 2264589 - RNA, 19 nt, Artificial Sequence
  Description of Artificial Sequence: Synthetic oligonucleotide
acauauuuauagcaucuag

SEQ ID NO: 2264590 - RNA, 19 nt, Artificial Sequence
  Description of Artificial Sequence: Synthetic oligonucleotide
ucaguaaacaccagccugc

SEQ ID NO: 2264591 - RNA, 19 nt, Artificial Sequence
  Description of Artificial Sequence: Synthetic oligonucleotide
ugcuaacauauuuauagca

SEQ ID NO: 2264592 - RNA, 19 nt, Artificial Sequence
  Description of Artificial Sequence: Synthetic oligonucleotide
uaaaaccauggccacagcc

SEQ ID NO: 2264593 - RNA, 19 nt, Artificial Sequence
  Description of Artificial Sequence: Synthetic oligonucleotide
uacaucaguaaacaccagc

SEQ ID NO: 2264594 - RNA, 19 nt, Artificial Sequence
  Description of Artificial Sequence: Synthetic oligonucleotide
aauuacagcccugugcauc

SEQ ID NO: 2264595 - RNA, 19 nt, Artificial Sequence
  Description of Artificial Sequence: Synthetic oligonucleotide
uaaaaccagagccaucccc

SEQ ID NO: 2264596 - RNA, 19 nt, Artificial Sequence
  Description of Artificial Sequence: Synthetic oligonucleotide
auuaauucagggccagcgg

SEQ ID NO: 2264597 - RNA, 19 nt, Artificial Sequence
  Description of Artificial Sequence: Synthetic oligonucleotide
uagcccauaagguggaagg

SEQ ID NO: 2264598 - RNA, 19 nt, Artificial Sequence
  Description of Artificial Sequence: Synthetic oligonucleotide
ucaggaagugggcagcacg

SEQ ID NO: 2264599 - RNA, 19 nt, Artificial Sequence
  Description of Artificial Sequence: Synthetic oligonucleotide
auguauaaaaccauggcca

SEQ ID NO: 2264600 - RNA, 19 nt, Artificial Sequence
  Description of Artificial Sequence: Synthetic oligonucleotide
aaaauuaauucagggccag

SEQ ID NO: 2264601 - RNA, 19 nt, Artificial Sequence
  Description of Artificial Sequence: Synthetic oligonucleotide
ugaucgaaagacagaagca

SEQ ID NO: 2264602 - RNA, 19 nt, Artificial Sequence
  Description of Artificial Sequence: Synthetic oligonucleotide
uuaauucagggccagcggu

SEQ ID NO: 2264603 - RNA, 19 nt, Artificial Sequence
  Description of Artificial Sequence: Synthetic oligonucleotide
cauccuaaauuacucacag

SEQ ID NO: 2264604 - RNA, 19 nt, Artificial Sequence
  Description of Artificial Sequence: Synthetic oligonucleotide
guggcgauggcucaggucc

SEQ ID NO: 2264605 - RNA, 19 nt, Artificial Sequence
  Description of Artificial Sequence: Synthetic oligonucleotide
uguauaaaaccauggccac

SEQ ID NO: 2264606 - RNA, 19 nt, Artificial Sequence
  Description of Artificial Sequence: Synthetic oligonucleotide
ugaugaucgaaagacagaa

SEQ ID NO: 2264607 - RNA, 19 nt, Artificial Sequence
  Description of Artificial Sequence: Synthetic oligonucleotide
aaauuaauucagggccagc

SEQ ID NO: 2264608 - RNA, 19 nt, Artificial Sequence
  Description of Artificial Sequence: Synthetic oligonucleotide
agggagagugcucuugccc

SEQ ID NO: 2264609 - RNA, 19 nt, Artificial Sequence
  Description of Artificial Sequence: Synthetic oligonucleotide
cauauuuauagcaucuaga

SEQ ID NO: 2264610 - RNA, 19 nt, Artificial Sequence
  Description of Artificial Sequence: Synthetic oligonucleotide
auuggcuacaucaguaaac

SEQ ID NO: 2264611 - RNA, 19 nt, Artificial Sequence
  Description of Artificial Sequence: Synthetic oligonucleotide
aagggagagugcucuugcc

SEQ ID NO: 2264612 - RNA, 19 nt, Artificial Sequence
  Description of Artificial Sequence: Synthetic oligonucleotide
uugucagagguccaggccu

SEQ ID NO: 2264613 - RNA, 19 nt, Artificial Sequence
  Description of Artificial Sequence: Synthetic oligonucleotide
ccaaucacugugaugaucg

SEQ ID NO: 2264614 - RNA, 19 nt, Artificial Sequence
  Description of Artificial Sequence: Synthetic oligonucleotide
ugucuugugguggcgaugg

SEQ ID NO: 2264615 - RNA, 19 nt, Artificial Sequence
  Description of Artificial Sequence: Synthetic oligonucleotide
uuuaaugcucucacacgug

SEQ ID NO: 2264616 - RNA, 19 nt, Artificial Sequence
  Description of Artificial Sequence: Synthetic oligonucleotide
cuccuagcccauaaggugg

SEQ ID NO: 2264617 - RNA, 19 nt, Artificial Sequence
  Description of Artificial Sequence: Synthetic oligonucleotide
ugcauccuaaauuacucac

SEQ ID NO: 2264618 - RNA, 19 nt, Artificial Sequence
  Description of Artificial Sequence: Synthetic oligonucleotide
ucuguugcagcccuuuccu

SEQ ID NO: 2264619 - RNA, 19 nt, Artificial Sequence
  Description of Artificial Sequence: Synthetic oligonucleotide
uaggucuugacagucagga

SEQ ID NO: 2264620 - RNA, 19 nt, Artificial Sequence
  Description of Artificial Sequence: Synthetic oligonucleotide
uaggcaugagcugauggcg

SEQ ID NO: 2264621 - RNA, 19 nt, Artificial Sequence
  Description of Artificial Sequence: Synthetic oligonucleotide
aguaggucuugacagucag

SEQ ID NO: 2264622 - RNA, 19 nt, Artificial Sequence
  Description of Artificial Sequence: Synthetic oligonucleotide
gaggcggcagccuggaugg

SEQ ID NO: 2264623 - RNA, 19 nt, Artificial Sequence
  Description of Artificial Sequence: Synthetic oligonucleotide
ucucaggccacucacgcgu

SEQ ID NO: 2264624 - RNA, 19 nt, Artificial Sequence
  Description of Artificial Sequence: Synthetic oligonucleotide
uagaggcagggauaaaacc

SEQ ID NO: 2264625 - RNA, 19 nt, Artificial Sequence
  Description of Artificial Sequence: Synthetic oligonucleotide
uuggcuacaucaguaaaca

SEQ ID NO: 2264626 - RNA, 19 nt, Artificial Sequence
  Description of Artificial Sequence: Synthetic oligonucleotide
aaauuacucacagccccuc

SEQ ID NO: 2264627 - RNA, 19 nt, Artificial Sequence
  Description of Artificial Sequence: Synthetic oligonucleotide
auccuaaauuacucacagc

SEQ ID NO: 2264628 - RNA, 19 nt, Artificial Sequence
  Description of Artificial Sequence: Synthetic oligonucleotide
uguucucaggccacucacg

SEQ ID NO: 2264629 - RNA, 19 nt, Artificial Sequence
  Description of Artificial Sequence: Synthetic oligonucleotide
gauucuggugccauugaag

SEQ ID NO: 2264630 - RNA, 19 nt, Artificial Sequence
  Description of Artificial Sequence: Synthetic oligonucleotide
aaaguuguacauaggcaug

SEQ ID NO: 2264631 - RNA, 19 nt, Artificial Sequence
  Description of Artificial Sequence: Synthetic oligonucleotide
ucuucuuccugauguauaa

SEQ ID NO: 2264632 - RNA, 19 nt, Artificial Sequence
  Description of Artificial Sequence: Synthetic oligonucleotide
gggucaaaguuguacauag

SEQ ID NO: 2264633 - RNA, 19 nt, Artificial Sequence
  Description of Artificial Sequence: Synthetic oligonucleotide
cuagaggcagggauaaaac

SEQ ID NO: 2264634 - RNA, 19 nt, Artificial Sequence
  Description of Artificial Sequence: Synthetic oligonucleotide
caugggauccuccuagccc

SEQ ID NO: 2264635 - RNA, 19 nt, Artificial Sequence
  Description of Artificial Sequence: Synthetic oligonucleotide
aauucagggccagcgguuc

SEQ ID NO: 2264636 - RNA, 19 nt, Artificial Sequence
  Description of Artificial Sequence: Synthetic oligonucleotide
aguuaaauuacagcccugu

SEQ ID NO: 2264637 - RNA, 19 nt, Artificial Sequence
  Description of Artificial Sequence: Synthetic oligonucleotide
uaauuacaucuuuaaugcu

SEQ ID NO: 2264638 - RNA, 19 nt, Artificial Sequence
  Description of Artificial Sequence: Synthetic oligonucleotide
aaguuguacauaggcauga

SEQ ID NO: 2264639 - RNA, 19 nt, Artificial Sequence
  Description of Artificial Sequence: Synthetic oligonucleotide
ucuagaggcagggauaaaa

SEQ ID NO: 2264640 - RNA, 19 nt, Artificial Sequence
  Description of Artificial Sequence: Synthetic oligonucleotide
agugcucuugcccugugug

SEQ ID NO: 2264641 - RNA, 19 nt, Artificial Sequence
  Description of Artificial Sequence: Synthetic oligonucleotide
ucgcccauguuccagcagc

SEQ ID NO: 2264642 - RNA, 19 nt, Artificial Sequence
  Description of Artificial Sequence: Synthetic oligonucleotide
gaagggagagugcucuugc

SEQ ID NO: 2264643 - RNA, 19 nt, Artificial Sequence
  Description of Artificial Sequence: Synthetic oligonucleotide
uguugcagcccuuuccugu

SEQ ID NO: 2264644 - RNA, 19 nt, Artificial Sequence
  Description of Artificial Sequence: Synthetic oligonucleotide
agacagaagcaugguaccc

SEQ ID NO: 2264645 - RNA, 19 nt, Artificial Sequence
  Description of Artificial Sequence: Synthetic oligonucleotide
cugcgaguuaaauuacagc

SEQ ID NO: 2264646 - RNA, 19 nt, Artificial Sequence
  Description of Artificial Sequence: Synthetic oligonucleotide
aaccagacuggguuucuca

SEQ ID NO: 2264647 - RNA, 19 nt, Artificial Sequence
  Description of Artificial Sequence: Synthetic oligonucleotide
agaguaggucuugacaguc

SEQ ID NO: 2264648 - RNA, 19 nt, Artificial Sequence
  Description of Artificial Sequence: Synthetic oligonucleotide
auaaaaccauggccacagc

SEQ ID NO: 2264649 - RNA, 19 nt, Artificial Sequence
  Description of Artificial Sequence: Synthetic oligonucleotide
aucucgcccauguuccagc

SEQ ID NO: 2264650 - RNA, 19 nt, Artificial Sequence
  Description of Artificial Sequence: Synthetic oligonucleotide
guuguacauaggcaugagc

SEQ ID NO: 2264651 - RNA, 19 nt, Artificial Sequence
  Description of Artificial Sequence: Synthetic oligonucleotide
acaucuuaauuacaucuuu

SEQ ID NO: 2264652 - RNA, 19 nt, Artificial Sequence
  Description of Artificial Sequence: Synthetic oligonucleotide
ggcuacaucaguaaacacc

SEQ ID NO: 2264653 - RNA, 19 nt, Artificial Sequence
  Description of Artificial Sequence: Synthetic oligonucleotide
gaggcagggauaaaaccag

SEQ ID NO: 2264654 - RNA, 19 nt, Artificial Sequence
  Description of Artificial Sequence: Synthetic oligonucleotide
cucuucaagccugagaguc

SEQ ID NO: 2264655 - RNA, 19 nt, Artificial Sequence
  Description of Artificial Sequence: Synthetic oligonucleotide
guucucaggccacucacgc

SEQ ID NO: 2264656 - RNA, 19 nt, Artificial Sequence
  Description of Artificial Sequence: Synthetic oligonucleotide
aaccgcaccaccugccaug

SEQ ID NO: 2264657 - RNA, 19 nt, Artificial Sequence
  Description of Artificial Sequence: Synthetic oligonucleotide
uccugauguauaaaaccau

SEQ ID NO: 2264658 - RNA, 19 nt, Artificial Sequence
  Description of Artificial Sequence: Synthetic oligonucleotide
caugucagggauucuggug

SEQ ID NO: 2264659 - RNA, 19 nt, Artificial Sequence
  Description of Artificial Sequence: Synthetic oligonucleotide
auuacucacagccccucca

SEQ ID NO: 2264660 - RNA, 19 nt, Artificial Sequence
  Description of Artificial Sequence: Synthetic oligonucleotide
gauggcgcagcuucuccag

SEQ ID NO: 2264661 - RNA, 19 nt, Artificial Sequence
  Description of Artificial Sequence: Synthetic oligonucleotide
caaaguuguacauaggcau

SEQ ID NO: 2264662 - RNA, 19 nt, Artificial Sequence
  Description of Artificial Sequence: Synthetic oligonucleotide
accagacuggguuucucag

SEQ ID NO: 2264663 - RNA, 19 nt, Artificial Sequence
  Description of Artificial Sequence: Synthetic oligonucleotide
gaugaucgaaagacagaag

SEQ ID NO: 2264664 - RNA, 19 nt, Artificial Sequence
  Description of Artificial Sequence: Synthetic oligonucleotide
agagucggugggugggacc

SEQ ID NO: 2264665 - RNA, 19 nt, Artificial Sequence
  Description of Artificial Sequence: Synthetic oligonucleotide
uucucaggucuuuuccuca

SEQ ID NO: 2264666 - RNA, 19 nt, Artificial Sequence
  Description of Artificial Sequence: Synthetic oligonucleotide
uucucaggccacucacgcg

SEQ ID NO: 2264667 - RNA, 19 nt, Artificial Sequence
  Description of Artificial Sequence: Synthetic oligonucleotide
uaaugcucucacacgugga

SEQ ID NO: 2264668 - RNA, 19 nt, Artificial Sequence
  Description of Artificial Sequence: Synthetic oligonucleotide
ugcugcgaguuaaauuaca

SEQ ID NO: 2264669 - RNA, 19 nt, Artificial Sequence
  Description of Artificial Sequence: Synthetic oligonucleotide
ccuaaauuacucacagccc

SEQ ID NO: 2264670 - RNA, 19 nt, Artificial Sequence
  Description of Artificial Sequence: Synthetic oligonucleotide
ugacagucaggaagugggc

SEQ ID NO: 2264671 - RNA, 19 nt, Artificial Sequence
  Description of Artificial Sequence: Synthetic oligonucleotide
aguugcucaagugcuaaca

SEQ ID NO: 2264672 - RNA, 19 nt, Artificial Sequence
  Description of Artificial Sequence: Synthetic oligonucleotide
gcuacaucaguaaacacca

SEQ ID NO: 2264673 - RNA, 19 nt, Artificial Sequence
  Description of Artificial Sequence: Synthetic oligonucleotide
ugucuugucagagguccag

SEQ ID NO: 2264674 - RNA, 19 nt, Artificial Sequence
  Description of Artificial Sequence: Synthetic oligonucleotide
gugggugggaccucggcag

SEQ ID NO: 2264675 - RNA, 19 nt, Artificial Sequence
  Description of Artificial Sequence: Synthetic oligonucleotide
gucuguugcagcccuuucc

SEQ ID NO: 2264676 - RNA, 19 nt, Artificial Sequence
  Description of Artificial Sequence: Synthetic oligonucleotide
aucgaaagacagaagcaug

SEQ ID NO: 2264677 - RNA, 19 nt, Artificial Sequence
  Description of Artificial Sequence: Synthetic oligonucleotide
agggauaaaaccagagcca

SEQ ID NO: 2264678 - RNA, 19 nt, Artificial Sequence
  Description of Artificial Sequence: Synthetic oligonucleotide
acggcuggcacuguggcag

SEQ ID NO: 2264679 - RNA, 19 nt, Artificial Sequence
  Description of Artificial Sequence: Synthetic oligonucleotide
agaugcugcgaguuaaauu

SEQ ID NO: 2264680 - RNA, 19 nt, Artificial Sequence
  Description of Artificial Sequence: Synthetic oligonucleotide
guacauaggcaugagcuga

SEQ ID NO: 2264681 - RNA, 19 nt, Artificial Sequence
  Description of Artificial Sequence: Synthetic oligonucleotide
ccugauguauaaaaccaug

SEQ ID NO: 2264682 - RNA, 19 nt, Artificial Sequence
  Description of Artificial Sequence: Synthetic oligonucleotide
cuccguggggucaaaguug

SEQ ID NO: 2264683 - RNA, 19 nt, Artificial Sequence
  Description of Artificial Sequence: Synthetic oligonucleotide
ugcucucacacguggagau

SEQ ID NO: 2264684 - RNA, 19 nt, Artificial Sequence
  Description of Artificial Sequence: Synthetic oligonucleotide
gauccuccuagcccauaag

SEQ ID NO: 2264685 - RNA, 19 nt, Artificial Sequence
  Description of Artificial Sequence: Synthetic oligonucleotide
uggcauuggcuacaucagu

SEQ ID NO: 2264686 - RNA, 19 nt, Artificial Sequence
  Description of Artificial Sequence: Synthetic oligonucleotide
aaccagagccauccccaug

SEQ ID NO: 2264687 - RNA, 19 nt, Artificial Sequence
  Description of Artificial Sequence: Synthetic oligonucleotide
cuguucucaggccacucac

SEQ ID NO: 2264688 - RNA, 19 nt, Artificial Sequence
  Description of Artificial Sequence: Synthetic oligonucleotide
acaccaaccgcaccaccug

SEQ ID NO: 2264689 - RNA, 19 nt, Artificial Sequence
  Description of Artificial Sequence: Synthetic oligonucleotide
aaaccagagccauccccau

SEQ ID NO: 2264690 - RNA, 19 nt, Artificial Sequence
  Description of Artificial Sequence: Synthetic oligonucleotide
uacauaggcaugagcugau

SEQ ID NO: 2264691 - RNA, 19 nt, Artificial Sequence
  Description of Artificial Sequence: Synthetic oligonucleotide
caagccaaucacugugaug

SEQ ID NO: 2264692 - RNA, 19 nt, Artificial Sequence
  Description of Artificial Sequence: Synthetic oligonucleotide
uugcucaagugcuaacaua

SEQ ID NO: 2264693 - RNA, 19 nt, Artificial Sequence
  Description of Artificial Sequence: Synthetic oligonucleotide
gugcucuugcccugugugg

SEQ ID NO: 2264694 - RNA, 19 nt, Artificial Sequence
  Description of Artificial Sequence: Synthetic oligonucleotide
uccuagcccauaaggugga

SEQ ID NO: 2264695 - RNA, 19 nt, Artificial Sequence
  Description of Artificial Sequence: Synthetic oligonucleotide
agcgguucaggagaaguca

SEQ ID NO: 2264696 - RNA, 19 nt, Artificial Sequence
  Description of Artificial Sequence: Synthetic oligonucleotide
uggagaugcugcgaguuaa

SEQ ID NO: 2264697 - RNA, 19 nt, Artificial Sequence
  Description of Artificial Sequence: Synthetic oligonucleotide
gaucgaaagacagaagcau

SEQ ID NO: 2264698 - RNA, 19 nt, Artificial Sequence
  Description of Artificial Sequence: Synthetic oligonucleotide
cugagagucgguggguggg

SEQ ID NO: 2264699 - RNA, 19 nt, Artificial Sequence
  Description of Artificial Sequence: Synthetic oligonucleotide
agcccauaagguggaaggg

SEQ ID NO: 2264700 - RNA, 19 nt, Artificial Sequence
  Description of Artificial Sequence: Synthetic oligonucleotide
ucucuucaagccugagagu

SEQ ID NO: 2264701 - RNA, 19 nt, Artificial Sequence
  Description of Artificial Sequence: Synthetic oligonucleotide
acgcguggauggcauuggc

SEQ ID NO: 2264702 - RNA, 19 nt, Artificial Sequence
  Description of Artificial Sequence: Synthetic oligonucleotide
ugcuaggccucugcagugg

SEQ ID NO: 2264703 - RNA, 19 nt, Artificial Sequence
  Description of Artificial Sequence: Synthetic oligonucleotide
ucacgcguggauggcauug

SEQ ID NO: 2264704 - RNA, 19 nt, Artificial Sequence
  Description of Artificial Sequence: Synthetic oligonucleotide
gggaccucggcagagcugg

SEQ ID NO: 2264705 - RNA, 19 nt, Artificial Sequence
  Description of Artificial Sequence: Synthetic oligonucleotide
gccacucacgcguggaugg

SEQ ID NO: 2264706 - RNA, 19 nt, Artificial Sequence
  Description of Artificial Sequence: Synthetic oligonucleotide
cagauggcuagccuaguca

SEQ ID NO: 2264707 - RNA, 19 nt, Artificial Sequence
  Description of Artificial Sequence: Synthetic oligonucleotide
cugauggcgcagcuucucc

SEQ ID NO: 2264708 - RNA, 19 nt, Artificial Sequence
  Description of Artificial Sequence: Synthetic oligonucleotide
cauaagguggaagggaaaa

SEQ ID NO: 2264709 - RNA, 19 nt, Artificial Sequence
  Description of Artificial Sequence: Synthetic oligonucleotide
gugcauccuaaauuacuca

SEQ ID NO: 2264710 - RNA, 19 nt, Artificial Sequence
  Description of Artificial Sequence: Synthetic oligonucleotide
cuagcccauaagguggaag

SEQ ID NO: 2264711 - RNA, 19 nt, Artificial Sequence
  Description of Artificial Sequence: Synthetic oligonucleotide
accaaccgcaccaccugcc

SEQ ID NO: 2264712 - RNA, 19 nt, Artificial Sequence
  Description of Artificial Sequence: Synthetic oligonucleotide
uggcuacaucaguaaacac

SEQ ID NO: 2264713 - RNA, 19 nt, Artificial Sequence
  Description of Artificial Sequence: Synthetic oligonucleotide
gcgaguuaaauuacagccc

SEQ ID NO: 2264714 - RNA, 19 nt, Artificial Sequence
  Description of Artificial Sequence: Synthetic oligonucleotide
gcugcgaguuaaauuacag

SEQ ID NO: 2264715 - RNA, 19 nt, Artificial Sequence
  Description of Artificial Sequence: Synthetic oligonucleotide
cugugaugaucgaaagaca

SEQ ID NO: 2264716 - RNA, 19 nt, Artificial Sequence
  Description of Artificial Sequence: Synthetic oligonucleotide
caagugcuaacauauuuau

SEQ ID NO: 2264717 - RNA, 19 nt, Artificial Sequence
  Description of Artificial Sequence: Synthetic oligonucleotide
guaggucuugacagucagg

SEQ ID NO: 2264718 - RNA, 19 nt, Artificial Sequence
  Description of Artificial Sequence: Synthetic oligonucleotide
ugugguggcgauggcucag

SEQ ID NO: 2264719 - RNA, 19 nt, Artificial Sequence
  Description of Artificial Sequence: Synthetic oligonucleotide
uggccagauggcuagccua

SEQ ID NO: 2264720 - RNA, 19 nt, Artificial Sequence
  Description of Artificial Sequence: Synthetic oligonucleotide
augcugcgaguuaaauuac

SEQ ID NO: 2264721 - RNA, 19 nt, Artificial Sequence
  Description of Artificial Sequence: Synthetic oligonucleotide
ccuccuagcccauaaggug

SEQ ID NO: 2264722 - RNA, 19 nt, Artificial Sequence
  Description of Artificial Sequence: Synthetic oligonucleotide
uggaggccgcaucucgccc

SEQ ID NO: 2264723 - RNA, 19 nt, Artificial Sequence
  Description of Artificial Sequence: Synthetic oligonucleotide
accucggcagagcuggggu

SEQ ID NO: 2264724 - RNA, 19 nt, Artificial Sequence
  Description of Artificial Sequence: Synthetic oligonucleotide
agcccugugcauccuaaau

SEQ ID NO: 2264725 - RNA, 19 nt, Artificial Sequence
  Description of Artificial Sequence: Synthetic oligonucleotide
acuguggcaggugucuugu

SEQ ID NO: 2264726 - RNA, 19 nt, Artificial Sequence
  Description of Artificial Sequence: Synthetic oligonucleotide
cuggugccauugaagcuug

SEQ ID NO: 2264727 - RNA, 19 nt, Artificial Sequence
  Description of Artificial Sequence: Synthetic oligonucleotide
uugaagcuugugguuucug

SEQ ID NO: 2264728 - RNA, 19 nt, Artificial Sequence
  Description of Artificial Sequence: Synthetic oligonucleotide
gugaugaucgaaagacaga

SEQ ID NO: 2264729 - RNA, 19 nt, Artificial Sequence
  Description of Artificial Sequence: Synthetic oligonucleotide
cagcgguucaggagaaguc

SEQ ID NO: 2264730 - RNA, 19 nt, Artificial Sequence
  Description of Artificial Sequence: Synthetic oligonucleotide
uacccacaccaaccgcacc

SEQ ID NO: 2264731 - RNA, 19 nt, Artificial Sequence
  Description of Artificial Sequence: Synthetic oligonucleotide
ugggaccucggcagagcug

SEQ ID NO: 2264732 - RNA, 19 nt, Artificial Sequence
  Description of Artificial Sequence: Synthetic oligonucleotide
cugugcauccuaaauuacu

SEQ ID NO: 2264733 - RNA, 19 nt, Artificial Sequence
  Description of Artificial Sequence: Synthetic oligonucleotide
ucagggauucuggugccau

SEQ ID NO: 2264734 - RNA, 19 nt, Artificial Sequence
  Description of Artificial Sequence: Synthetic oligonucleotide
cuaggccucugcagugggc

SEQ ID NO: 2264735 - RNA, 19 nt, Artificial Sequence
  Description of Artificial Sequence: Synthetic oligonucleotide
cauccccaugggauccucc

SEQ ID NO: 2264736 - RNA, 19 nt, Artificial Sequence
  Description of Artificial Sequence: Synthetic oligonucleotide
cagagguccaggccuguuc

SEQ ID NO: 2264737 - RNA, 19 nt, Artificial Sequence
  Description of Artificial Sequence: Synthetic oligonucleotide
gaccucggcagagcugggg

SEQ ID NO: 2264738 - RNA, 19 nt, Artificial Sequence
  Description of Artificial Sequence: Synthetic oligonucleotide
cuguugcagcccuuuccug

SEQ ID NO: 2264739 - RNA, 19 nt, Artificial Sequence
  Description of Artificial Sequence: Synthetic oligonucleotide
agccuagucagagcucucu

SEQ ID NO: 2264740 - RNA, 19 nt, Artificial Sequence
  Description of Artificial Sequence: Synthetic oligonucleotide
caucuagaggcagggauaa

SEQ ID NO: 2264741 - RNA, 19 nt, Artificial Sequence
  Description of Artificial Sequence: Synthetic oligonucleotide
guugcucaagugcuaacau

SEQ ID NO: 2264742 - RNA, 19 nt, Artificial Sequence
  Description of Artificial Sequence: Synthetic oligonucleotide
caguugcucaagugcuaac

SEQ ID NO: 2264743 - RNA, 19 nt, Artificial Sequence
  Description of Artificial Sequence: Synthetic oligonucleotide
ugagagucgguggguggga

SEQ ID NO: 2264744 - RNA, 19 nt, Artificial Sequence
  Description of Artificial Sequence: Synthetic oligonucleotide
cgcaucucgcccauguucc

SEQ ID NO: 2264745 - RNA, 19 nt, Artificial Sequence
  Description of Artificial Sequence: Synthetic oligonucleotide
caucucgcccauguuccag

SEQ ID NO: 2264746 - RNA, 19 nt, Artificial Sequence
  Description of Artificial Sequence: Synthetic oligonucleotide
ucggugggugggaccucgg

SEQ ID NO: 2264747 - RNA, 19 nt, Artificial Sequence
  Description of Artificial Sequence: Synthetic oligonucleotide
augcucucacacguggaga

SEQ ID NO: 2264748 - RNA, 19 nt, Artificial Sequence
  Description of Artificial Sequence: Synthetic oligonucleotide
ugggugggaccucggcaga

SEQ ID NO: 2264749 - RNA, 19 nt, Artificial Sequence
  Description of Artificial Sequence: Synthetic oligonucleotide
ucucugugguagacccuuc

SEQ ID NO: 2264750 - RNA, 19 nt, Artificial Sequence
  Description of Artificial Sequence: Synthetic oligonucleotide
gucggugggugggaccucg

SEQ ID NO: 2264751 - RNA, 19 nt, Artificial Sequence
  Description of Artificial Sequence: Synthetic oligonucleotide
cagacuggguuucucaggu

SEQ ID NO: 2264752 - RNA, 19 nt, Artificial Sequence
  Description of Artificial Sequence: Synthetic oligonucleotide
caucaguaaacaccagccu

SEQ ID NO: 2264753 - RNA, 19 nt, Artificial Sequence
  Description of Artificial Sequence: Synthetic oligonucleotide
acauaggcaugagcugaug

SEQ ID NO: 2264754 - RNA, 19 nt, Artificial Sequence
  Description of Artificial Sequence: Synthetic oligonucleotide
cacgcguggauggcauugg

SEQ ID NO: 2264755 - RNA, 19 nt, Artificial Sequence
  Description of Artificial Sequence: Synthetic oligonucleotide
agagugcucuugcccugug

SEQ ID NO: 2264756 - RNA, 19 nt, Artificial Sequence
  Description of Artificial Sequence: Synthetic oligonucleotide
cagccugcuaggccucugc

SEQ ID NO: 2264757 - RNA, 19 nt, Artificial Sequence
  Description of Artificial Sequence: Synthetic oligonucleotide
aggccuguucucaggccac

SEQ ID NO: 2264758 - RNA, 19 nt, Artificial Sequence
  Description of Artificial Sequence: Synthetic oligonucleotide
ggcuagccuagucagagcu

SEQ ID NO: 2264759 - RNA, 19 nt, Artificial Sequence
  Description of Artificial Sequence: Synthetic oligonucleotide
uggcgauggcucagguccu

SEQ ID NO: 2264760 - RNA, 19 nt, Artificial Sequence
  Description of Artificial Sequence: Synthetic oligonucleotide
gcuaacauauuuauagcau

SEQ ID NO: 2264761 - RNA, 19 nt, Artificial Sequence
  Description of Artificial Sequence: Synthetic oligonucleotide
ccugagagucggugggugg

SEQ ID NO: 2264762 - RNA, 19 nt, Artificial Sequence
  Description of Artificial Sequence: Synthetic oligonucleotide
acguggagaugcugcgagu

SEQ ID NO: 2264763 - RNA, 19 nt, Artificial Sequence
  Description of Artificial Sequence: Synthetic oligonucleotide
ggagagugcucuugcccug

SEQ ID NO: 2264764 - RNA, 19 nt, Artificial Sequence
  Description of Artificial Sequence: Synthetic oligonucleotide
cacaccaaccgcaccaccu

SEQ ID NO: 2264765 - RNA, 19 nt, Artificial Sequence
  Description of Artificial Sequence: Synthetic oligonucleotide
ugguggucucugugguaga

SEQ ID NO: 2264766 - RNA, 19 nt, Artificial Sequence
  Description of Artificial Sequence: Synthetic oligonucleotide
ccccaugggauccuccuag

SEQ ID NO: 2264767 - RNA, 19 nt, Artificial Sequence
  Description of Artificial Sequence: Synthetic oligonucleotide
agccccuccaguugcucaa

SEQ ID NO: 2264768 - RNA, 19 nt, Artificial Sequence
  Description of Artificial Sequence: Synthetic oligonucleotide
gcauuggcuacaucaguaa

SEQ ID NO: 2264769 - RNA, 19 nt, Artificial Sequence
  Description of Artificial Sequence: Synthetic oligonucleotide
gcguggauggcauuggcua

SEQ ID NO: 2264770 - RNA, 19 nt, Artificial Sequence
  Description of Artificial Sequence: Synthetic oligonucleotide
cuugugguuucugggcuga

SEQ ID NO: 2264771 - RNA, 19 nt, Artificial Sequence
  Description of Artificial Sequence: Synthetic oligonucleotide
cagguccugagaguagguc

SEQ ID NO: 2264772 - RNA, 19 nt, Artificial Sequence
  Description of Artificial Sequence: Synthetic oligonucleotide
ccugugcauccuaaauuac

SEQ ID NO: 2264773 - RNA, 19 nt, Artificial Sequence
  Description of Artificial Sequence: Synthetic oligonucleotide
cucaggccacucacgcgug

SEQ ID NO: 2264774 - RNA, 19 nt, Artificial Sequence
  Description of Artificial Sequence: Synthetic oligonucleotide
uagcaucuagaggcaggga

SEQ ID NO: 2264775 - RNA, 19 nt, Artificial Sequence
  Description of Artificial Sequence: Synthetic oligonucleotide
ccaugggauccuccuagcc

SEQ ID NO: 2264776 - RNA, 19 nt, Artificial Sequence
  Description of Artificial Sequence: Synthetic oligonucleotide
cucgcccauguuccagcag

SEQ ID NO: 2264777 - RNA, 19 nt, Artificial Sequence
  Description of Artificial Sequence: Synthetic oligonucleotide
gagagucggugggugggac

SEQ ID NO: 2264778 - RNA, 19 nt, Artificial Sequence
  Description of Artificial Sequence: Synthetic oligonucleotide
cuagucagagcucucucuu

SEQ ID NO: 2264779 - RNA, 19 nt, Artificial Sequence
  Description of Artificial Sequence: Synthetic oligonucleotide
cccugugcauccuaaauua

SEQ ID NO: 2264780 - RNA, 19 nt, Artificial Sequence
  Description of Artificial Sequence: Synthetic oligonucleotide
gagucggugggugggaccu

SEQ ID NO: 2264781 - RNA, 19 nt, Artificial Sequence
  Description of Artificial Sequence: Synthetic oligonucleotide
gcgguucaggagaagucag

SEQ ID NO: 2264782 - RNA, 19 nt, Artificial Sequence
  Description of Artificial Sequence: Synthetic oligonucleotide
ggauccuccuagcccauaa

SEQ ID NO: 2264783 - RNA, 19 nt, Artificial Sequence
  Description of Artificial Sequence: Synthetic oligonucleotide
cacagccaagccaaucacu

SEQ ID NO: 2264784 - RNA, 19 nt, Artificial Sequence
  Description of Artificial Sequence: Synthetic oligonucleotide
gcggcagccuggauggagg

SEQ ID NO: 2264785 - RNA, 19 nt, Artificial Sequence
  Description of Artificial Sequence: Synthetic oligonucleotide
cugcagggaggcggcagcc

SEQ ID NO: 2264786 - RNA, 19 nt, Artificial Sequence
  Description of Artificial Sequence: Synthetic oligonucleotide
acucacgcguggauggcau

SEQ ID NO: 2264787 - RNA, 19 nt, Artificial Sequence
  Description of Artificial Sequence: Synthetic oligonucleotide
cagaagcaugguacccaca

SEQ ID NO: 2264788 - RNA, 19 nt, Artificial Sequence
  Description of Artificial Sequence: Synthetic oligonucleotide
ccgcaucucgcccauguuc

SEQ ID NO: 2264789 - RNA, 19 nt, Artificial Sequence
  Description of Artificial Sequence: Synthetic oligonucleotide
gucaguggccagauggcua

SEQ ID NO: 2264790 - RNA, 19 nt, Artificial Sequence
  Description of Artificial Sequence: Synthetic oligonucleotide
cagagccauccccauggga

SEQ ID NO: 2264791 - RNA, 19 nt, Artificial Sequence
  Description of Artificial Sequence: Synthetic oligonucleotide
gguggcgauggcucagguc

SEQ ID NO: 2264792 - RNA, 19 nt, Artificial Sequence
  Description of Artificial Sequence: Synthetic oligonucleotide
cgaguuaaauuacagcccu

SEQ ID NO: 2264793 - RNA, 19 nt, Artificial Sequence
  Description of Artificial Sequence: Synthetic oligonucleotide
ccagauggcuagccuaguc

SEQ ID NO: 2264794 - RNA, 19 nt, Artificial Sequence
  Description of Artificial Sequence: Synthetic oligonucleotide
gagaugcugcgaguuaaau

SEQ ID NO: 2264795 - RNA, 19 nt, Artificial Sequence
  Description of Artificial Sequence: Synthetic oligonucleotide
ucggcagagcuggggucug

SEQ ID NO: 2264796 - RNA, 19 nt, Artificial Sequence
  Description of Artificial Sequence: Synthetic oligonucleotide
ggaagugggcagcacggcu

SEQ ID NO: 2264797 - RNA, 19 nt, Artificial Sequence
  Description of Artificial Sequence: Synthetic oligonucleotide
gccuagucagagcucucuc

SEQ ID NO: 2264798 - RNA, 19 nt, Artificial Sequence
  Description of Artificial Sequence: Synthetic oligonucleotide
ucagagguccaggccuguu

SEQ ID NO: 2264799 - RNA, 19 nt, Artificial Sequence
  Description of Artificial Sequence: Synthetic oligonucleotide
cuggcacuguggcaggugu

SEQ ID NO: 2264800 - RNA, 19 nt, Artificial Sequence
  Description of Artificial Sequence: Synthetic oligonucleotide
ggccacucacgcguggaug

SEQ ID NO: 2264801 - RNA, 19 nt, Artificial Sequence
  Description of Artificial Sequence: Synthetic oligonucleotide
ggucuguugcagcccuuuc

SEQ ID NO: 2264802 - RNA, 19 nt, Artificial Sequence
  Description of Artificial Sequence: Synthetic oligonucleotide
ggcggcagccuggauggag

SEQ ID NO: 2264803 - RNA, 19 nt, Artificial Sequence
  Description of Artificial Sequence: Synthetic oligonucleotide
agucggugggugggaccuc

SEQ ID NO: 2264804 - RNA, 19 nt, Artificial Sequence
  Description of Artificial Sequence: Synthetic oligonucleotide
ggugggaccucggcagagc

SEQ ID NO: 2264805 - RNA, 19 nt, Artificial Sequence
  Description of Artificial Sequence: Synthetic oligonucleotide
gucucugugguagacccuu

SEQ ID NO: 2264806 - RNA, 19 nt, Artificial Sequence
  Description of Artificial Sequence: Synthetic oligonucleotide
guggccagauggcuagccu

SEQ ID NO: 2264807 - RNA, 19 nt, Artificial Sequence
  Description of Artificial Sequence: Synthetic oligonucleotide
cacggcuggcacuguggca

SEQ ID NO: 2264808 - RNA, 19 nt, Artificial Sequence
  Description of Artificial Sequence: Synthetic oligonucleotide
ccuguucucaggccacuca

SEQ ID NO: 2264809 - RNA, 19 nt, Artificial Sequence
  Description of Artificial Sequence: Synthetic oligonucleotide
gagagugcucuugcccugu

SEQ ID NO: 2264810 - RNA, 19 nt, Artificial Sequence
  Description of Artificial Sequence: Synthetic oligonucleotide
cacucacgcguggauggca

SEQ ID NO: 2264811 - RNA, 19 nt, Artificial Sequence
  Description of Artificial Sequence: Synthetic oligonucleotide
aucuagaggcagggauaaa

SEQ ID NO: 2264812 - RNA, 19 nt, Artificial Sequence
  Description of Artificial Sequence: Synthetic oligonucleotide
ccuagucagagcucucucu

SEQ ID NO: 2264813 - RNA, 19 nt, Artificial Sequence
  Description of Artificial Sequence: Synthetic oligonucleotide
ccauaagguggaagggaaa

SEQ ID NO: 2264814 - RNA, 19 nt, Artificial Sequence
  Description of Artificial Sequence: Synthetic oligonucleotide
gccauugaagcuugugguu

SEQ ID NO: 2264815 - RNA, 19 nt, Artificial Sequence
  Description of Artificial Sequence: Synthetic oligonucleotide
caguaaacaccagccugcu

SEQ ID NO: 2264816 - RNA, 19 nt, Artificial Sequence
  Description of Artificial Sequence: Synthetic oligonucleotide
gcucucacacguggagaug

SEQ ID NO: 2264817 - RNA, 19 nt, Artificial Sequence
  Description of Artificial Sequence: Synthetic oligonucleotide
cucggcagagcuggggucu

SEQ ID NO: 2264818 - RNA, 19 nt, Artificial Sequence
  Description of Artificial Sequence: Synthetic oligonucleotide
ggcacuguggcaggugucu

SEQ ID NO: 2264819 - RNA, 19 nt, Artificial Sequence
  Description of Artificial Sequence: Synthetic oligonucleotide
gcuagccuagucagagcuc

SEQ ID NO: 2264820 - RNA, 19 nt, Artificial Sequence
  Description of Artificial Sequence: Synthetic oligonucleotide
ggagaugcugcgaguuaaa

SEQ ID NO: 2264821 - RNA, 19 nt, Artificial Sequence
  Description of Artificial Sequence: Synthetic oligonucleotide
gcccugugcauccuaaauu

SEQ ID NO: 2264822 - RNA, 19 nt, Artificial Sequence
  Description of Artificial Sequence: Synthetic oligonucleotide
cagcccugugcauccuaaa

SEQ ID NO: 2264823 - RNA, 19 nt, Artificial Sequence
  Description of Artificial Sequence: Synthetic oligonucleotide
ccucggcagagcugggguc

SEQ ID NO: 2264824 - RNA, 19 nt, Artificial Sequence
  Description of Artificial Sequence: Synthetic oligonucleotide
ggccgcaucucgcccaugu

SEQ ID NO: 2264825 - RNA, 19 nt, Artificial Sequence
  Description of Artificial Sequence: Synthetic oligonucleotide
ggcgauggcucagguccug

SEQ ID NO: 2264826 - RNA, 19 nt, Artificial Sequence
  Description of Artificial Sequence: Synthetic oligonucleotide
cccacaccaaccgcaccac

SEQ ID NO: 2264827 - RNA, 19 nt, Artificial Sequence
  Description of Artificial Sequence: Synthetic oligonucleotide
ccacucacgcguggauggc

SEQ ID NO: 2264828 - RNA, 19 nt, Artificial Sequence
  Description of Artificial Sequence: Synthetic oligonucleotide
ccauugaagcuugugguuu

SEQ ID NO: 2264829 - RNA, 19 nt, Artificial Sequence
  Description of Artificial Sequence: Synthetic oligonucleotide
ggaccucggcagagcuggg

SEQ ID NO: 2264830 - RNA, 19 nt, Artificial Sequence
  Description of Artificial Sequence: Synthetic oligonucleotide
ccagcgguucaggagaagu

SEQ ID NO: 2264831 - RNA, 19 nt, Artificial Sequence
  Description of Artificial Sequence: Synthetic oligonucleotide
caaccgcaccaccugccau

SEQ ID NO: 2264832 - RNA, 19 nt, Artificial Sequence
  Description of Artificial Sequence: Synthetic oligonucleotide
gccuguucucaggccacuc

SEQ ID NO: 2264833 - RNA, 19 nt, Artificial Sequence
  Description of Artificial Sequence: Synthetic oligonucleotide
ccuccguggggucaaaguu

SEQ ID NO: 2264834 - RNA, 19 nt, Artificial Sequence
  Description of Artificial Sequence: Synthetic oligonucleotide
cagggauucuggugccauu

SEQ ID NO: 2264835 - RNA, 19 nt, Artificial Sequence
  Description of Artificial Sequence: Synthetic oligonucleotide
ccaagccaaucacugugau

SEQ ID NO: 2264836 - RNA, 19 nt, Artificial Sequence
  Description of Artificial Sequence: Synthetic oligonucleotide
aggccgcaucucgcccaug

SEQ ID NO: 2264837 - RNA, 19 nt, Artificial Sequence
  Description of Artificial Sequence: Synthetic oligonucleotide
ccugucuugugguggcgau

SEQ ID NO: 2264838 - RNA, 19 nt, Artificial Sequence
  Description of Artificial Sequence: Synthetic oligonucleotide
cucacgcguggauggcauu

SEQ ID NO: 2264839 - RNA, 19 nt, Artificial Sequence
  Description of Artificial Sequence: Synthetic oligonucleotide
ggccagcgguucaggagaa

SEQ ID NO: 2264840 - RNA, 19 nt, Artificial Sequence
  Description of Artificial Sequence: Synthetic oligonucleotide
aggcggcagccuggaugga

SEQ ID NO: 2264841 - RNA, 19 nt, Artificial Sequence
  Description of Artificial Sequence: Synthetic oligonucleotide
ccucugcagugggccuugg

SEQ ID NO: 2264842 - RNA, 19 nt, Artificial Sequence
  Description of Artificial Sequence: Synthetic oligonucleotide
gggucuguugcagcccuuu

SEQ ID NO: 2264843 - RNA, 19 nt, Artificial Sequence
  Description of Artificial Sequence: Synthetic oligonucleotide
cgcguggauggcauuggcu

SEQ ID NO: 2264844 - RNA, 19 nt, Artificial Sequence
  Description of Artificial Sequence: Synthetic oligonucleotide
gggauccuccuagcccaua

SEQ ID NO: 2264845 - RNA, 19 nt, Artificial Sequence
  Description of Artificial Sequence: Synthetic oligonucleotide
ggccuguucucaggccacu

SEQ ID NO: 2264846 - RNA, 19 nt, Artificial Sequence
  Description of Artificial Sequence: Synthetic oligonucleotide
ccuagcccauaagguggaa

SEQ ID NO: 2264847 - RNA, 19 nt, Artificial Sequence
  Description of Artificial Sequence: Synthetic oligonucleotide
ggccugcagggaggcggca

SEQ ID NO: 2264848 - RNA, 19 nt, Artificial Sequence
  Description of Artificial Sequence: Synthetic oligonucleotide
ggggucuguugcagcccuu

SEQ ID NO: 2264849 - RNA, 19 nt, Artificial Sequence
  Description of Artificial Sequence: Synthetic oligonucleotide
aauaacguuauccagcccc

SEQ ID NO: 2264850 - RNA, 19 nt, Artificial Sequence
  Description of Artificial Sequence: Synthetic oligonucleotide
agaaguaauaacguuaucc

SEQ ID NO: 2264851 - RNA, 19 nt, Artificial Sequence
  Description of Artificial Sequence: Synthetic oligonucleotide
uuuauuuucgcaucuauac

SEQ ID NO: 2264852 - RNA, 19 nt, Artificial Sequence
  Description of Artificial Sequence: Synthetic oligonucleotide
ucugguagcucauagaggc

SEQ ID NO: 2264853 - RNA, 19 nt, Artificial Sequence
  Description of Artificial Sequence: Synthetic oligonucleotide
aguaauaacguuauccagc

SEQ ID NO: 2264854 - RNA, 19 nt, Artificial Sequence
  Description of Artificial Sequence: Synthetic oligonucleotide
uauuuucgcaucuauaccc

SEQ ID NO: 2264855 - RNA, 19 nt, Artificial Sequence
  Description of Artificial Sequence: Synthetic oligonucleotide
uuucuucaaguuuuaaccg

SEQ ID NO: 2264856 - RNA, 19 nt, Artificial Sequence
  Description of Artificial Sequence: Synthetic oligonucleotide
ucuuuguuucuucggaugg

SEQ ID NO: 2264857 - RNA, 19 nt, Artificial Sequence
  Description of Artificial Sequence: Synthetic oligonucleotide
aaguaauaacguuauccag

SEQ ID NO: 2264858 - RNA, 19 nt, Artificial Sequence
  Description of Artificial Sequence: Synthetic oligonucleotide
uaguucacggccauguugg

SEQ ID NO: 2264859 - RNA, 19 nt, Artificial Sequence
  Description of Artificial Sequence: Synthetic oligonucleotide
aaugaugucucacuauccu

SEQ ID NO: 2264860 - RNA, 19 nt, Artificial Sequence
  Description of Artificial Sequence: Synthetic oligonucleotide
uucacggccauguuggugg

SEQ ID NO: 2264861 - RNA, 19 nt, Artificial Sequence
  Description of Artificial Sequence: Synthetic oligonucleotide
uuaaguucugcaccucucg

SEQ ID NO: 2264862 - RNA, 19 nt, Artificial Sequence
  Description of Artificial Sequence: Synthetic oligonucleotide
agugguagucaucuguggc

SEQ ID NO: 2264863 - RNA, 19 nt, Artificial Sequence
  Description of Artificial Sequence: Synthetic oligonucleotide
uuauuuucgcaucuauacc

SEQ ID NO: 2264864 - RNA, 19 nt, Artificial Sequence
  Description of Artificial Sequence: Synthetic oligonucleotide
aaaugaugucucacuaucc

SEQ ID NO: 2264865 - RNA, 19 nt, Artificial Sequence
  Description of Artificial Sequence: Synthetic oligonucleotide
guaauaacguuauccagcc

SEQ ID NO: 2264866 - RNA, 19 nt, Artificial Sequence
  Description of Artificial Sequence: Synthetic oligonucleotide
ugcuguacauaguucacgg

SEQ ID NO: 2264867 - RNA, 19 nt, Artificial Sequence
  Description of Artificial Sequence: Synthetic oligonucleotide
agcuccucgugauaaaagc

SEQ ID NO: 2264868 - RNA, 19 nt, Artificial Sequence
  Description of Artificial Sequence: Synthetic oligonucleotide
ucugucucaauguauuuca

SEQ ID NO: 2264869 - RNA, 19 nt, Artificial Sequence
  Description of Artificial Sequence: Synthetic oligonucleotide
aacguuauccagccccuac

SEQ ID NO: 2264870 - RNA, 19 nt, Artificial Sequence
  Description of Artificial Sequence: Synthetic oligonucleotide
gauaaaagcgguugugcug

SEQ ID NO: 2264871 - RNA, 19 nt, Artificial Sequence
  Description of Artificial Sequence: Synthetic oligonucleotide
cuguacauaguucacggcc

SEQ ID NO: 2264872 - RNA, 19 nt, Artificial Sequence
  Description of Artificial Sequence: Synthetic oligonucleotide
aaguucugcaccucucggg

SEQ ID NO: 2264873 - RNA, 19 nt, Artificial Sequence
  Description of Artificial Sequence: Synthetic oligonucleotide
uuuuaaccgaaccuccucu

SEQ ID NO: 2264874 - RNA, 19 nt, Artificial Sequence
  Description of Artificial Sequence: Synthetic oligonucleotide
uguauuucaucaugucugc

SEQ ID NO: 2264875 - RNA, 19 nt, Artificial Sequence
  Description of Artificial Sequence: Synthetic oligonucleotide
ugaaccuucucucccacca

SEQ ID NO: 2264876 - RNA, 19 nt, Artificial Sequence
  Description of Artificial Sequence: Synthetic oligonucleotide
aaagaaguaauaacguuau

SEQ ID NO: 2264877 - RNA, 19 nt, Artificial Sequence
  Description of Artificial Sequence: Synthetic oligonucleotide
uguuucuucggaugggugc

SEQ ID NO: 2264878 - RNA, 19 nt, Artificial Sequence
  Description of Artificial Sequence: Synthetic oligonucleotide
auuggcaggacgcuugcgg

SEQ ID NO: 2264879 - RNA, 19 nt, Artificial Sequence
  Description of Artificial Sequence: Synthetic oligonucleotide
uucccagugauccgcauag

SEQ ID NO: 2264880 - RNA, 19 nt, Artificial Sequence
  Description of Artificial Sequence: Synthetic oligonucleotide
cuuagcagaggagacacgg

SEQ ID NO: 2264881 - RNA, 19 nt, Artificial Sequence
  Description of Artificial Sequence: Synthetic oligonucleotide
uaaguucugcaccucucgg

SEQ ID NO: 2264882 - RNA, 19 nt, Artificial Sequence
  Description of Artificial Sequence: Synthetic oligonucleotide
ugauaaaagcgguugugcu

SEQ ID NO: 2264883 - RNA, 19 nt, Artificial Sequence
  Description of Artificial Sequence: Synthetic oligonucleotide
gaugggugcauugagcucc

SEQ ID NO: 2264884 - RNA, 19 nt, Artificial Sequence
  Description of Artificial Sequence: Synthetic oligonucleotide
uuucgcaucuauacccagg

SEQ ID NO: 2264885 - RNA, 19 nt, Artificial Sequence
  Description of Artificial Sequence: Synthetic oligonucleotide
ugaugucucacuauccuuc

SEQ ID NO: 2264886 - RNA, 19 nt, Artificial Sequence
  Description of Artificial Sequence: Synthetic oligonucleotide
gaaagggucauccaccaga

SEQ ID NO: 2264887 - RNA, 19 nt, Artificial Sequence
  Description of Artificial Sequence: Synthetic oligonucleotide
agaccguucaggcucuggc

SEQ ID NO: 2264888 - RNA, 19 nt, Artificial Sequence
  Description of Artificial Sequence: Synthetic oligonucleotide
aagaaguaauaacguuauc

SEQ ID NO: 2264889 - RNA, 19 nt, Artificial Sequence
  Description of Artificial Sequence: Synthetic oligonucleotide
cucacuauccuucuucuug

SEQ ID NO: 2264890 - RNA, 19 nt, Artificial Sequence
  Description of Artificial Sequence: Synthetic oligonucleotide
cuccucgugauaaaagcgg

SEQ ID NO: 2264891 - RNA, 19 nt, Artificial Sequence
  Description of Artificial Sequence: Synthetic oligonucleotide
caaaugaugucucacuauc

SEQ ID NO: 2264892 - RNA, 19 nt, Artificial Sequence
  Description of Artificial Sequence: Synthetic oligonucleotide
guuucugcagaaaaggaug

SEQ ID NO: 2264893 - RNA, 19 nt, Artificial Sequence
  Description of Artificial Sequence: Synthetic oligonucleotide
uccuccguggaaaugauau

SEQ ID NO: 2264894 - RNA, 19 nt, Artificial Sequence
  Description of Artificial Sequence: Synthetic oligonucleotide
uauuucaucaugucugcau

SEQ ID NO: 2264895 - RNA, 19 nt, Artificial Sequence
  Description of Artificial Sequence: Synthetic oligonucleotide
ucgucauuuggaaaggguc

SEQ ID NO: 2264896 - RNA, 19 nt, Artificial Sequence
  Description of Artificial Sequence: Synthetic oligonucleotide
auaguucacggccauguug

SEQ ID NO: 2264897 - RNA, 19 nt, Artificial Sequence
  Description of Artificial Sequence: Synthetic oligonucleotide
ucuucuuagcagaggagac

SEQ ID NO: 2264898 - RNA, 19 nt, Artificial Sequence
  Description of Artificial Sequence: Synthetic oligonucleotide
acguuauccagccccuacc

SEQ ID NO: 2264899 - RNA, 19 nt, Artificial Sequence
  Description of Artificial Sequence: Synthetic oligonucleotide
cagugauccgcauagcggc

SEQ ID NO: 2264900 - RNA, 19 nt, Artificial Sequence
  Description of Artificial Sequence: Synthetic oligonucleotide
uucgcaucuauacccaggu

SEQ ID NO: 2264901 - RNA, 19 nt, Artificial Sequence
  Description of Artificial Sequence: Synthetic oligonucleotide
cauuuggaaagggucaucc

SEQ ID NO: 2264902 - RNA, 19 nt, Artificial Sequence
  Description of Artificial Sequence: Synthetic oligonucleotide
auaaaagcgguugugcugu

SEQ ID NO: 2264903 - RNA, 19 nt, Artificial Sequence
  Description of Artificial Sequence: Synthetic oligonucleotide
ugucucacuauccuucuuc

SEQ ID NO: 2264904 - RNA, 19 nt, Artificial Sequence
  Description of Artificial Sequence: Synthetic oligonucleotide
ugcauugagcuccucguga

SEQ ID NO: 2264905 - RNA, 19 nt, Artificial Sequence
  Description of Artificial Sequence: Synthetic oligonucleotide
aggcuuggccuucuguucc

SEQ ID NO: 2264906 - RNA, 19 nt, Artificial Sequence
  Description of Artificial Sequence: Synthetic oligonucleotide
gacgcuugcgguugggagg

SEQ ID NO: 2264907 - RNA, 19 nt, Artificial Sequence
  Description of Artificial Sequence: Synthetic oligonucleotide
cugcagaaaaggauguccc

SEQ ID NO: 2264908 - RNA, 19 nt, Artificial Sequence
  Description of Artificial Sequence: Synthetic oligonucleotide
ucauccaccagaguagucu

SEQ ID NO: 2264909 - RNA, 19 nt, Artificial Sequence
  Description of Artificial Sequence: Synthetic oligonucleotide
ucaggcucuggcuucuccg

SEQ ID NO: 2264910 - RNA, 19 nt, Artificial Sequence
  Description of Artificial Sequence: Synthetic oligonucleotide
accgaaccuccucugauuc

SEQ ID NO: 2264911 - RNA, 19 nt, Artificial Sequence
  Description of Artificial Sequence: Synthetic oligonucleotide
uucuuagcagaggagacac

SEQ ID NO: 2264912 - RNA, 19 nt, Artificial Sequence
  Description of Artificial Sequence: Synthetic oligonucleotide
uuuaaccgaaccuccucug

SEQ ID NO: 2264913 - RNA, 19 nt, Artificial Sequence
  Description of Artificial Sequence: Synthetic oligonucleotide
ucggguuucuucaaguuuu

SEQ ID NO: 2264914 - RNA, 19 nt, Artificial Sequence
  Description of Artificial Sequence: Synthetic oligonucleotide
aucuauacccagguccacc

SEQ ID NO: 2264915 - RNA, 19 nt, Artificial Sequence
  Description of Artificial Sequence: Synthetic oligonucleotide
uccgguuaguuucugcaga

SEQ ID NO: 2264916 - RNA, 19 nt, Artificial Sequence
  Description of Artificial Sequence: Synthetic oligonucleotide
uucggaugggugcauugag

SEQ ID NO: 2264917 - RNA, 19 nt, Artificial Sequence
  Description of Artificial Sequence: Synthetic oligonucleotide
agggucauccaccagagua

SEQ ID NO: 2264918 - RNA, 19 nt, Artificial Sequence
  Description of Artificial Sequence: Synthetic oligonucleotide
ugauuccugcucaucuucc

SEQ ID NO: 2264919 - RNA, 19 nt, Artificial Sequence
  Description of Artificial Sequence: Synthetic oligonucleotide
uuccucuugcuccacaauc

SEQ ID NO: 2264920 - RNA, 19 nt, Artificial Sequence
  Description of Artificial Sequence: Synthetic oligonucleotide
uauccagccccuaccacug

SEQ ID NO: 2264921 - RNA, 19 nt, Artificial Sequence
  Description of Artificial Sequence: Synthetic oligonucleotide
uagugguagucaucugugg

SEQ ID NO: 2264922 - RNA, 19 nt, Artificial Sequence
  Description of Artificial Sequence: Synthetic oligonucleotide
uuaaccgaaccuccucuga

SEQ ID NO: 2264923 - RNA, 19 nt, Artificial Sequence
  Description of Artificial Sequence: Synthetic oligonucleotide
agucuucccagugauccgc

SEQ ID NO: 2264924 - RNA, 19 nt, Artificial Sequence
  Description of Artificial Sequence: Synthetic oligonucleotide
ugguagcucauagaggcag

SEQ ID NO: 2264925 - RNA, 19 nt, Artificial Sequence
  Description of Artificial Sequence: Synthetic oligonucleotide
ucacuauccuucuucuugu

SEQ ID NO: 2264926 - RNA, 19 nt, Artificial Sequence
  Description of Artificial Sequence: Synthetic oligonucleotide
ugcagaaaaggaugucccc

SEQ ID NO: 2264927 - RNA, 19 nt, Artificial Sequence
  Description of Artificial Sequence: Synthetic oligonucleotide
gugauaaaagcgguugugc

SEQ ID NO: 2264928 - RNA, 19 nt, Artificial Sequence
  Description of Artificial Sequence: Synthetic oligonucleotide
aguucugcaccucucgggu

SEQ ID NO: 2264929 - RNA, 19 nt, Artificial Sequence
  Description of Artificial Sequence: Synthetic oligonucleotide
ugugcuguacauaguucac

SEQ ID NO: 2264930 - RNA, 19 nt, Artificial Sequence
  Description of Artificial Sequence: Synthetic oligonucleotide
gguuucuucaaguuuuaac

SEQ ID NO: 2264931 - RNA, 19 nt, Artificial Sequence
  Description of Artificial Sequence: Synthetic oligonucleotide
uuuucgcaucuauacccag

SEQ ID NO: 2264932 - RNA, 19 nt, Artificial Sequence
  Description of Artificial Sequence: Synthetic oligonucleotide
ugucucaauguauuucauc

SEQ ID NO: 2264933 - RNA, 19 nt, Artificial Sequence
  Description of Artificial Sequence: Synthetic oligonucleotide
ccugucgucauuuggaaag

SEQ ID NO: 2264934 - RNA, 19 nt, Artificial Sequence
  Description of Artificial Sequence: Synthetic oligonucleotide
cauagaggcaguccucagc

SEQ ID NO: 2264935 - RNA, 19 nt, Artificial Sequence
  Description of Artificial Sequence: Synthetic oligonucleotide
cucgugauaaaagcgguug

SEQ ID NO: 2264936 - RNA, 19 nt, Artificial Sequence
  Description of Artificial Sequence: Synthetic oligonucleotide
uuaggcuuggccuucuguu

SEQ ID NO: 2264937 - RNA, 19 nt, Artificial Sequence
  Description of Artificial Sequence: Synthetic oligonucleotide
ucuuagcagaggagacacg

SEQ ID NO: 2264938 - RNA, 19 nt, Artificial Sequence
  Description of Artificial Sequence: Synthetic oligonucleotide
cucugguagcucauagagg

SEQ ID NO: 2264939 - RNA, 19 nt, Artificial Sequence
  Description of Artificial Sequence: Synthetic oligonucleotide
aaaagcgguugugcuguac

SEQ ID NO: 2264940 - RNA, 19 nt, Artificial Sequence
  Description of Artificial Sequence: Synthetic oligonucleotide
ugguuggacagcaucuccu

SEQ ID NO: 2264941 - RNA, 19 nt, Artificial Sequence
  Description of Artificial Sequence: Synthetic oligonucleotide
acauaguucacggccaugu

SEQ ID NO: 2264942 - RNA, 19 nt, Artificial Sequence
  Description of Artificial Sequence: Synthetic oligonucleotide
guucucugguagcucauag

SEQ ID NO: 2264943 - RNA, 19 nt, Artificial Sequence
  Description of Artificial Sequence: Synthetic oligonucleotide
ucggaugggugcauugagc

SEQ ID NO: 2264944 - RNA, 19 nt, Artificial Sequence
  Description of Artificial Sequence: Synthetic oligonucleotide
uccucgugauaaaagcggu

SEQ ID NO: 2264945 - RNA, 19 nt, Artificial Sequence
  Description of Artificial Sequence: Synthetic oligonucleotide
uaccacugucucaguagcg

SEQ ID NO: 2264946 - RNA, 19 nt, Artificial Sequence
  Description of Artificial Sequence: Synthetic oligonucleotide
ucggggaugccgcucagca

SEQ ID NO: 2264947 - RNA, 19 nt, Artificial Sequence
  Description of Artificial Sequence: Synthetic oligonucleotide
ucgugauaaaagcgguugu

SEQ ID NO: 2264948 - RNA, 19 nt, Artificial Sequence
  Description of Artificial Sequence: Synthetic oligonucleotide
cuguucaucuucuugaacu

SEQ ID NO: 2264949 - RNA, 19 nt, Artificial Sequence
  Description of Artificial Sequence: Synthetic oligonucleotide
uccaccucggggaugccgc

SEQ ID NO: 2264950 - RNA, 19 nt, Artificial Sequence
  Description of Artificial Sequence: Synthetic oligonucleotide
uuagcagaggagacacgga

SEQ ID NO: 2264951 - RNA, 19 nt, Artificial Sequence
  Description of Artificial Sequence: Synthetic oligonucleotide
uaauaacguuauccagccc

SEQ ID NO: 2264952 - RNA, 19 nt, Artificial Sequence
  Description of Artificial Sequence: Synthetic oligonucleotide
ucuucggaugggugcauug

SEQ ID NO: 2264953 - RNA, 19 nt, Artificial Sequence
  Description of Artificial Sequence: Synthetic oligonucleotide
cacggauguucucugguag

SEQ ID NO: 2264954 - RNA, 19 nt, Artificial Sequence
  Description of Artificial Sequence: Synthetic oligonucleotide
guaagggccgggcuuuggg

SEQ ID NO: 2264955 - RNA, 19 nt, Artificial Sequence
  Description of Artificial Sequence: Synthetic oligonucleotide
uccucaucucuccgguuag

SEQ ID NO: 2264956 - RNA, 19 nt, Artificial Sequence
  Description of Artificial Sequence: Synthetic oligonucleotide
uucucugguagcucauaga

SEQ ID NO: 2264957 - RNA, 19 nt, Artificial Sequence
  Description of Artificial Sequence: Synthetic oligonucleotide
uugggcucuucuuuguuuc

SEQ ID NO: 2264958 - RNA, 19 nt, Artificial Sequence
  Description of Artificial Sequence: Synthetic oligonucleotide
auuuggaaagggucaucca

SEQ ID NO: 2264959 - RNA, 19 nt, Artificial Sequence
  Description of Artificial Sequence: Synthetic oligonucleotide
guuuuaaccgaaccuccuc

SEQ ID NO: 2264960 - RNA, 19 nt, Artificial Sequence
  Description of Artificial Sequence: Synthetic oligonucleotide
guagugguagucaucugug

SEQ ID NO: 2264961 - RNA, 19 nt, Artificial Sequence
  Description of Artificial Sequence: Synthetic oligonucleotide
cuugcgguugggaggagac

SEQ ID NO: 2264962 - RNA, 19 nt, Artificial Sequence
  Description of Artificial Sequence: Synthetic oligonucleotide
uccugcucaucuuccuccg

SEQ ID NO: 2264963 - RNA, 19 nt, Artificial Sequence
  Description of Artificial Sequence: Synthetic oligonucleotide
aagggccgggcuuugggcu

SEQ ID NO: 2264964 - RNA, 19 nt, Artificial Sequence
  Description of Artificial Sequence: Synthetic oligonucleotide
ugucgucauuuggaaaggg

SEQ ID NO: 2264965 - RNA, 19 nt, Artificial Sequence
  Description of Artificial Sequence: Synthetic oligonucleotide
gaguagucuccucuugaac

SEQ ID NO: 2264966 - RNA, 19 nt, Artificial Sequence
  Description of Artificial Sequence: Synthetic oligonucleotide
gagacacggauguucucug

SEQ ID NO: 2264967 - RNA, 19 nt, Artificial Sequence
  Description of Artificial Sequence: Synthetic oligonucleotide
gcgguugugcuguacauag

SEQ ID NO: 2264968 - RNA, 19 nt, Artificial Sequence
  Description of Artificial Sequence: Synthetic oligonucleotide
uaaccgaaccuccucugau

SEQ ID NO: 2264969 - RNA, 19 nt, Artificial Sequence
  Description of Artificial Sequence: Synthetic oligonucleotide
auugagcuccucgugauaa

SEQ ID NO: 2264970 - RNA, 19 nt, Artificial Sequence
  Description of Artificial Sequence: Synthetic oligonucleotide
agaguagucuccucuugaa

SEQ ID NO: 2264971 - RNA, 19 nt, Artificial Sequence
  Description of Artificial Sequence: Synthetic oligonucleotide
gucuucuuagcagaggaga

SEQ ID NO: 2264972 - RNA, 19 nt, Artificial Sequence
  Description of Artificial Sequence: Synthetic oligonucleotide
gugcuguacauaguucacg

SEQ ID NO: 2264973 - RNA, 19 nt, Artificial Sequence
  Description of Artificial Sequence: Synthetic oligonucleotide
cucuugcuccacaaucccc

SEQ ID NO: 2264974 - RNA, 19 nt, Artificial Sequence
  Description of Artificial Sequence: Synthetic oligonucleotide
ugggcacaaaugaugucuc

SEQ ID NO: 2264975 - RNA, 19 nt, Artificial Sequence
  Description of Artificial Sequence: Synthetic oligonucleotide
uucucguagugguagucau

SEQ ID NO: 2264976 - RNA, 19 nt, Artificial Sequence
  Description of Artificial Sequence: Synthetic oligonucleotide
cgcaucuauacccaggucc

SEQ ID NO: 2264977 - RNA, 19 nt, Artificial Sequence
  Description of Artificial Sequence: Synthetic oligonucleotide
uucuccgugucacccacuc

SEQ ID NO: 2264978 - RNA, 19 nt, Artificial Sequence
  Description of Artificial Sequence: Synthetic oligonucleotide
uccguggaaaugauauuuu

SEQ ID NO: 2264979 - RNA, 19 nt, Artificial Sequence
  Description of Artificial Sequence: Synthetic oligonucleotide
agcacucaccccguuuggc

SEQ ID NO: 2264980 - RNA, 19 nt, Artificial Sequence
  Description of Artificial Sequence: Synthetic oligonucleotide
ccagugauccgcauagcgg

SEQ ID NO: 2264981 - RNA, 19 nt, Artificial Sequence
  Description of Artificial Sequence: Synthetic oligonucleotide
ucaucaugucugcauccuc

SEQ ID NO: 2264982 - RNA, 19 nt, Artificial Sequence
  Description of Artificial Sequence: Synthetic oligonucleotide
uuggcaggacgcuugcggu

SEQ ID NO: 2264983 - RNA, 19 nt, Artificial Sequence
  Description of Artificial Sequence: Synthetic oligonucleotide
uccuccgacuccgagucag

SEQ ID NO: 2264984 - RNA, 19 nt, Artificial Sequence
  Description of Artificial Sequence: Synthetic oligonucleotide
uccgucuucuuagcagagg

SEQ ID NO: 2264985 - RNA, 19 nt, Artificial Sequence
  Description of Artificial Sequence: Synthetic oligonucleotide
cuccgguuaguuucugcag

SEQ ID NO: 2264986 - RNA, 19 nt, Artificial Sequence
  Description of Artificial Sequence: Synthetic oligonucleotide
aaccgaaccuccucugauu

SEQ ID NO: 2264987 - RNA, 19 nt, Artificial Sequence
  Description of Artificial Sequence: Synthetic oligonucleotide
acuucucguagugguaguc

SEQ ID NO: 2264988 - RNA, 19 nt, Artificial Sequence
  Description of Artificial Sequence: Synthetic oligonucleotide
acaauccccuuccucuucu

SEQ ID NO: 2264989 - RNA, 19 nt, Artificial Sequence
  Description of Artificial Sequence: Synthetic oligonucleotide
auuuucgcaucuauaccca

SEQ ID NO: 2264990 - RNA, 19 nt, Artificial Sequence
  Description of Artificial Sequence: Synthetic oligonucleotide
uaggcuuggccuucuguuc

SEQ ID NO: 2264991 - RNA, 19 nt, Artificial Sequence
  Description of Artificial Sequence: Synthetic oligonucleotide
auucuuaggcuuggccuuc

SEQ ID NO: 2264992 - RNA, 19 nt, Artificial Sequence
  Description of Artificial Sequence: Synthetic oligonucleotide
uugggaggagaccguucag

SEQ ID NO: 2264993 - RNA, 19 nt, Artificial Sequence
  Description of Artificial Sequence: Synthetic oligonucleotide
uccgacuccgagucagccc

SEQ ID NO: 2264994 - RNA, 19 nt, Artificial Sequence
  Description of Artificial Sequence: Synthetic oligonucleotide
uccgcauagcggcaccaga

SEQ ID NO: 2264995 - RNA, 19 nt, Artificial Sequence
  Description of Artificial Sequence: Synthetic oligonucleotide
uucugcaccucucggguuu

SEQ ID NO: 2264996 - RNA, 19 nt, Artificial Sequence
  Description of Artificial Sequence: Synthetic oligonucleotide
ugauccgcauagcggcacc

SEQ ID NO: 2264997 - RNA, 19 nt, Artificial Sequence
  Description of Artificial Sequence: Synthetic oligonucleotide
cucugucucaauguauuuc

SEQ ID NO: 2264998 - RNA, 19 nt, Artificial Sequence
  Description of Artificial Sequence: Synthetic oligonucleotide
augaugucucacuauccuu

SEQ ID NO: 2264999 - RNA, 19 nt, Artificial Sequence
  Description of Artificial Sequence: Synthetic oligonucleotide
acuauccuucuucuuguuu

SEQ ID NO: 2265000 - RNA, 19 nt, Artificial Sequence
  Description of Artificial Sequence: Synthetic oligonucleotide
agaggcaguccucagcauu

SEQ ID NO: 2265001 - RNA, 19 nt, Artificial Sequence
  Description of Artificial Sequence: Synthetic oligonucleotide
aguuuuaaccgaaccuccu

SEQ ID NO: 2265002 - RNA, 19 nt, Artificial Sequence
  Description of Artificial Sequence: Synthetic oligonucleotide
gagcuccucgugauaaaag

SEQ ID NO: 2265003 - RNA, 19 nt, Artificial Sequence
  Description of Artificial Sequence: Synthetic oligonucleotide
ccuaccacugucucaguag

SEQ ID NO: 2265004 - RNA, 19 nt, Artificial Sequence
  Description of Artificial Sequence: Synthetic oligonucleotide
uagcucauagaggcagucc

SEQ ID NO: 2265005 - RNA, 19 nt, Artificial Sequence
  Description of Artificial Sequence: Synthetic oligonucleotide
uccgagucagcccgccgcc

SEQ ID NO: 2265006 - RNA, 19 nt, Artificial Sequence
  Description of Artificial Sequence: Synthetic oligonucleotide
ugaccuuaucuuugccccu

SEQ ID NO: 2265007 - RNA, 19 nt, Artificial Sequence
  Description of Artificial Sequence: Synthetic oligonucleotide
cuccgagucagcccgccgc

SEQ ID NO: 2265008 - RNA, 19 nt, Artificial Sequence
  Description of Artificial Sequence: Synthetic oligonucleotide
cacaaaugaugucucacua

SEQ ID NO: 2265009 - RNA, 19 nt, Artificial Sequence
  Description of Artificial Sequence: Synthetic oligonucleotide
cugucgucauuuggaaagg

SEQ ID NO: 2265010 - RNA, 19 nt, Artificial Sequence
  Description of Artificial Sequence: Synthetic oligonucleotide
cacccacucguaagggccg

SEQ ID NO: 2265011 - RNA, 19 nt, Artificial Sequence
  Description of Artificial Sequence: Synthetic oligonucleotide
auaacguuauccagccccu

SEQ ID NO: 2265012 - RNA, 19 nt, Artificial Sequence
  Description of Artificial Sequence: Synthetic oligonucleotide
gcuccucgugauaaaagcg

SEQ ID NO: 2265013 - RNA, 19 nt, Artificial Sequence
  Description of Artificial Sequence: Synthetic oligonucleotide
guuucuucggaugggugca

SEQ ID NO: 2265014 - RNA, 19 nt, Artificial Sequence
  Description of Artificial Sequence: Synthetic oligonucleotide
ccgacuccgagucagcccg

SEQ ID NO: 2265015 - RNA, 19 nt, Artificial Sequence
  Description of Artificial Sequence: Synthetic oligonucleotide
ucaguagcgccuguucauc

SEQ ID NO: 2265016 - RNA, 19 nt, Artificial Sequence
  Description of Artificial Sequence: Synthetic oligonucleotide
cucuccgguuaguuucugc

SEQ ID NO: 2265017 - RNA, 19 nt, Artificial Sequence
  Description of Artificial Sequence: Synthetic oligonucleotide
caccaugccaccugucguc

SEQ ID NO: 2265018 - RNA, 19 nt, Artificial Sequence
  Description of Artificial Sequence: Synthetic oligonucleotide
gugcauugagcuccucgug

SEQ ID NO: 2265019 - RNA, 19 nt, Artificial Sequence
  Description of Artificial Sequence: Synthetic oligonucleotide
guagucuccucuugaaccu

SEQ ID NO: 2265020 - RNA, 19 nt, Artificial Sequence
  Description of Artificial Sequence: Synthetic oligonucleotide
uacauaguucacggccaug

SEQ ID NO: 2265021 - RNA, 19 nt, Artificial Sequence
  Description of Artificial Sequence: Synthetic oligonucleotide
acucguaagggccgggcuu

SEQ ID NO: 2265022 - RNA, 19 nt, Artificial Sequence
  Description of Artificial Sequence: Synthetic oligonucleotide
aagggucauccaccagagu

SEQ ID NO: 2265023 - RNA, 19 nt, Artificial Sequence
  Description of Artificial Sequence: Synthetic oligonucleotide
gggucauccaccagaguag

SEQ ID NO: 2265024 - RNA, 19 nt, Artificial Sequence
  Description of Artificial Sequence: Synthetic oligonucleotide
guagcgccuguucaucuuc

SEQ ID NO: 2265025 - RNA, 19 nt, Artificial Sequence
  Description of Artificial Sequence: Synthetic oligonucleotide
ggacgcuugcgguugggag

SEQ ID NO: 2265026 - RNA, 19 nt, Artificial Sequence
  Description of Artificial Sequence: Synthetic oligonucleotide
cugcauccucaucucuccg

SEQ ID NO: 2265027 - RNA, 19 nt, Artificial Sequence
  Description of Artificial Sequence: Synthetic oligonucleotide
agcucugucucaauguauu

SEQ ID NO: 2265028 - RNA, 19 nt, Artificial Sequence
  Description of Artificial Sequence: Synthetic oligonucleotide
uagcgccuguucaucuucu

SEQ ID NO: 2265029 - RNA, 19 nt, Artificial Sequence
  Description of Artificial Sequence: Synthetic oligonucleotide
cuucuuagcagaggagaca

SEQ ID NO: 2265030 - RNA, 19 nt, Artificial Sequence
  Description of Artificial Sequence: Synthetic oligonucleotide
auacccagguccaccucgg

SEQ ID NO: 2265031 - RNA, 19 nt, Artificial Sequence
  Description of Artificial Sequence: Synthetic oligonucleotide
acacggauguucucuggua

SEQ ID NO: 2265032 - RNA, 19 nt, Artificial Sequence
  Description of Artificial Sequence: Synthetic oligonucleotide
uucugcagaaaaggauguc

SEQ ID NO: 2265033 - RNA, 19 nt, Artificial Sequence
  Description of Artificial Sequence: Synthetic oligonucleotide
ggcacaaaugaugucucac

SEQ ID NO: 2265034 - RNA, 19 nt, Artificial Sequence
  Description of Artificial Sequence: Synthetic oligonucleotide
cucugauuccugcucaucu

SEQ ID NO: 2265035 - RNA, 19 nt, Artificial Sequence
  Description of Artificial Sequence: Synthetic oligonucleotide
acuccgagucagcccgccg

SEQ ID NO: 2265036 - RNA, 19 nt, Artificial Sequence
  Description of Artificial Sequence: Synthetic oligonucleotide
gagaccguucaggcucugg

SEQ ID NO: 2265037 - RNA, 19 nt, Artificial Sequence
  Description of Artificial Sequence: Synthetic oligonucleotide
caccucucggguuucuuca

SEQ ID NO: 2265038 - RNA, 19 nt, Artificial Sequence
  Description of Artificial Sequence: Synthetic oligonucleotide
uccagccccuaccacuguc

SEQ ID NO: 2265039 - RNA, 19 nt, Artificial Sequence
  Description of Artificial Sequence: Synthetic oligonucleotide
gaccuuaucuuugccccuc

SEQ ID NO: 2265040 - RNA, 19 nt, Artificial Sequence
  Description of Artificial Sequence: Synthetic oligonucleotide
ccuucucauuggcaggacg

SEQ ID NO: 2265041 - RNA, 19 nt, Artificial Sequence
  Description of Artificial Sequence: Synthetic oligonucleotide
accugucgucauuuggaaa

SEQ ID NO: 2265042 - RNA, 19 nt, Artificial Sequence
  Description of Artificial Sequence: Synthetic oligonucleotide
gcacucaccccguuuggcc

SEQ ID NO: 2265043 - RNA, 19 nt, Artificial Sequence
  Description of Artificial Sequence: Synthetic oligonucleotide
ucgcaucuauacccagguc

SEQ ID NO: 2265044 - RNA, 19 nt, Artificial Sequence
  Description of Artificial Sequence: Synthetic oligonucleotide
cuucucguagugguaguca

SEQ ID NO: 2265045 - RNA, 19 nt, Artificial Sequence
  Description of Artificial Sequence: Synthetic oligonucleotide
ccgcucagcaucugguugg

SEQ ID NO: 2265046 - RNA, 19 nt, Artificial Sequence
  Description of Artificial Sequence: Synthetic oligonucleotide
gccccuaccacugucucag

SEQ ID NO: 2265047 - RNA, 19 nt, Artificial Sequence
  Description of Artificial Sequence: Synthetic oligonucleotide
accuuaucuuugccccucu

SEQ ID NO: 2265048 - RNA, 19 nt, Artificial Sequence
  Description of Artificial Sequence: Synthetic oligonucleotide
gauguccccaggugcaggu

SEQ ID NO: 2265049 - RNA, 19 nt, Artificial Sequence
  Description of Artificial Sequence: Synthetic oligonucleotide
gucucacuauccuucuucu

SEQ ID NO: 2265050 - RNA, 19 nt, Artificial Sequence
  Description of Artificial Sequence: Synthetic oligonucleotide
uccucugauuccugcucau

SEQ ID NO: 2265051 - RNA, 19 nt, Artificial Sequence
  Description of Artificial Sequence: Synthetic oligonucleotide
ggugcauugagcuccucgu

SEQ ID NO: 2265052 - RNA, 19 nt, Artificial Sequence
  Description of Artificial Sequence: Synthetic oligonucleotide
ucucauuggcaggacgcuu

SEQ ID NO: 2265053 - RNA, 19 nt, Artificial Sequence
  Description of Artificial Sequence: Synthetic oligonucleotide
aguucacggccauguuggu

SEQ ID NO: 2265054 - RNA, 19 nt, Artificial Sequence
  Description of Artificial Sequence: Synthetic oligonucleotide
gcggaaagucuucccagug

SEQ ID NO: 2265055 - RNA, 19 nt, Artificial Sequence
  Description of Artificial Sequence: Synthetic oligonucleotide
cuccgugucacccacucgu

SEQ ID NO: 2265056 - RNA, 19 nt, Artificial Sequence
  Description of Artificial Sequence: Synthetic oligonucleotide
acgcuugcgguugggagga

SEQ ID NO: 2265057 - RNA, 19 nt, Artificial Sequence
  Description of Artificial Sequence: Synthetic oligonucleotide
uguucucugguagcucaua

SEQ ID NO: 2265058 - RNA, 19 nt, Artificial Sequence
  Description of Artificial Sequence: Synthetic oligonucleotide
cauucuuaggcuuggccuu

SEQ ID NO: 2265059 - RNA, 19 nt, Artificial Sequence
  Description of Artificial Sequence: Synthetic oligonucleotide
uccgugucacccacucgua

SEQ ID NO: 2265060 - RNA, 19 nt, Artificial Sequence
  Description of Artificial Sequence: Synthetic oligonucleotide
uugcgguugggaggagacc

SEQ ID NO: 2265061 - RNA, 19 nt, Artificial Sequence
  Description of Artificial Sequence: Synthetic oligonucleotide
guccaccucggggaugccg

SEQ ID NO: 2265062 - RNA, 19 nt, Artificial Sequence
  Description of Artificial Sequence: Synthetic oligonucleotide
agccccuaccacugucuca

SEQ ID NO: 2265063 - RNA, 19 nt, Artificial Sequence
  Description of Artificial Sequence: Synthetic oligonucleotide
uccuuaaguucugcaccuc

SEQ ID NO: 2265064 - RNA, 19 nt, Artificial Sequence
  Description of Artificial Sequence: Synthetic oligonucleotide
gaccguucaggcucuggcu

SEQ ID NO: 2265065 - RNA, 19 nt, Artificial Sequence
  Description of Artificial Sequence: Synthetic oligonucleotide
ugccaccugucgucauuug

SEQ ID NO: 2265066 - RNA, 19 nt, Artificial Sequence
  Description of Artificial Sequence: Synthetic oligonucleotide
cgugucacccacucguaag

SEQ ID NO: 2265067 - RNA, 19 nt, Artificial Sequence
  Description of Artificial Sequence: Synthetic oligonucleotide
gcacaaaugaugucucacu

SEQ ID NO: 2265068 - RNA, 19 nt, Artificial Sequence
  Description of Artificial Sequence: Synthetic oligonucleotide
cuucggaugggugcauuga

SEQ ID NO: 2265069 - RNA, 19 nt, Artificial Sequence
  Description of Artificial Sequence: Synthetic oligonucleotide
caucuauacccagguccac

SEQ ID NO: 2265070 - RNA, 19 nt, Artificial Sequence
  Description of Artificial Sequence: Synthetic oligonucleotide
cgucauuuggaaaggguca

SEQ ID NO: 2265071 - RNA, 19 nt, Artificial Sequence
  Description of Artificial Sequence: Synthetic oligonucleotide
auccgcauagcggcaccag

SEQ ID NO: 2265072 - RNA, 19 nt, Artificial Sequence
  Description of Artificial Sequence: Synthetic oligonucleotide
agugauccgcauagcggca

SEQ ID NO: 2265073 - RNA, 19 nt, Artificial Sequence
  Description of Artificial Sequence: Synthetic oligonucleotide
agucagcccgccgccggcg

SEQ ID NO: 2265074 - RNA, 19 nt, Artificial Sequence
  Description of Artificial Sequence: Synthetic oligonucleotide
caccugucgucauuuggaa

SEQ ID NO: 2265075 - RNA, 19 nt, Artificial Sequence
  Description of Artificial Sequence: Synthetic oligonucleotide
uaaaagcgguugugcugua

SEQ ID NO: 2265076 - RNA, 19 nt, Artificial Sequence
  Description of Artificial Sequence: Synthetic oligonucleotide
gacuccgagucagcccgcc

SEQ ID NO: 2265077 - RNA, 19 nt, Artificial Sequence
  Description of Artificial Sequence: Synthetic oligonucleotide
ugucucaguagcgccuguu

SEQ ID NO: 2265078 - RNA, 19 nt, Artificial Sequence
  Description of Artificial Sequence: Synthetic oligonucleotide
ccuguucaucuucuugaac

SEQ ID NO: 2265079 - RNA, 19 nt, Artificial Sequence
  Description of Artificial Sequence: Synthetic oligonucleotide
cgugauaaaagcgguugug

SEQ ID NO: 2265080 - RNA, 19 nt, Artificial Sequence
  Description of Artificial Sequence: Synthetic oligonucleotide
gauccgcauagcggcacca

SEQ ID NO: 2265081 - RNA, 19 nt, Artificial Sequence
  Description of Artificial Sequence: Synthetic oligonucleotide
uggcaggacgcuugcgguu

SEQ ID NO: 2265082 - RNA, 19 nt, Artificial Sequence
  Description of Artificial Sequence: Synthetic oligonucleotide
gcgccuguucaucuucuug

SEQ ID NO: 2265083 - RNA, 19 nt, Artificial Sequence
  Description of Artificial Sequence: Synthetic oligonucleotide
gugauccgcauagcggcac

SEQ ID NO: 2265084 - RNA, 19 nt, Artificial Sequence
  Description of Artificial Sequence: Synthetic oligonucleotide
gcuucuccgugucacccac

SEQ ID NO: 2265085 - RNA, 19 nt, Artificial Sequence
  Description of Artificial Sequence: Synthetic oligonucleotide
ccgucuucuuagcagagga

SEQ ID NO: 2265086 - RNA, 19 nt, Artificial Sequence
  Description of Artificial Sequence: Synthetic oligonucleotide
cuuaggcuuggccuucugu

SEQ ID NO: 2265087 - RNA, 19 nt, Artificial Sequence
  Description of Artificial Sequence: Synthetic oligonucleotide
ccagaguagucuccucuug

SEQ ID NO: 2265088 - RNA, 19 nt, Artificial Sequence
  Description of Artificial Sequence: Synthetic oligonucleotide
ggauguccccaggugcagg

SEQ ID NO: 2265089 - RNA, 19 nt, Artificial Sequence
  Description of Artificial Sequence: Synthetic oligonucleotide
ucucuccgguuaguuucug

SEQ ID NO: 2265090 - RNA, 19 nt, Artificial Sequence
  Description of Artificial Sequence: Synthetic oligonucleotide
augucucacuauccuucuu

SEQ ID NO: 2265091 - RNA, 19 nt, Artificial Sequence
  Description of Artificial Sequence: Synthetic oligonucleotide
ggcaggacgcuugcgguug

SEQ ID NO: 2265092 - RNA, 19 nt, Artificial Sequence
  Description of Artificial Sequence: Synthetic oligonucleotide
gucgucauuuggaaagggu

SEQ ID NO: 2265093 - RNA, 19 nt, Artificial Sequence
  Description of Artificial Sequence: Synthetic oligonucleotide
ucccagugauccgcauagc

SEQ ID NO: 2265094 - RNA, 19 nt, Artificial Sequence
  Description of Artificial Sequence: Synthetic oligonucleotide
cuccguggaaaugauauuu

SEQ ID NO: 2265095 - RNA, 19 nt, Artificial Sequence
  Description of Artificial Sequence: Synthetic oligonucleotide
uuucuucggaugggugcau

SEQ ID NO: 2265096 - RNA, 19 nt, Artificial Sequence
  Description of Artificial Sequence: Synthetic oligonucleotide
gucagcccgccgccggcgg

SEQ ID NO: 2265097 - RNA, 19 nt, Artificial Sequence
  Description of Artificial Sequence: Synthetic oligonucleotide
cucaguagcgccuguucau

SEQ ID NO: 2265098 - RNA, 19 nt, Artificial Sequence
  Description of Artificial Sequence: Synthetic oligonucleotide
agcgguugugcuguacaua

SEQ ID NO: 2265099 - RNA, 19 nt, Artificial Sequence
  Description of Artificial Sequence: Synthetic oligonucleotide
uaacguuauccagccccua

SEQ ID NO: 2265100 - RNA, 19 nt, Artificial Sequence
  Description of Artificial Sequence: Synthetic oligonucleotide
ggugggcacaaaugauguc

SEQ ID NO: 2265101 - RNA, 19 nt, Artificial Sequence
  Description of Artificial Sequence: Synthetic oligonucleotide
guacauaguucacggccau

SEQ ID NO: 2265102 - RNA, 19 nt, Artificial Sequence
  Description of Artificial Sequence: Synthetic oligonucleotide
cagccccuaccacugucuc

SEQ ID NO: 2265103 - RNA, 19 nt, Artificial Sequence
  Description of Artificial Sequence: Synthetic oligonucleotide
uucuucggaugggugcauu

SEQ ID NO: 2265104 - RNA, 19 nt, Artificial Sequence
  Description of Artificial Sequence: Synthetic oligonucleotide
gcaccucucggguuucuuc

SEQ ID NO: 2265105 - RNA, 19 nt, Artificial Sequence
  Description of Artificial Sequence: Synthetic oligonucleotide
augccaccugucgucauuu

SEQ ID NO: 2265106 - RNA, 19 nt, Artificial Sequence
  Description of Artificial Sequence: Synthetic oligonucleotide
cacugucucaguagcgccu

SEQ ID NO: 2265107 - RNA, 19 nt, Artificial Sequence
  Description of Artificial Sequence: Synthetic oligonucleotide
ucguaagggccgggcuuug

SEQ ID NO: 2265108 - RNA, 19 nt, Artificial Sequence
  Description of Artificial Sequence: Synthetic oligonucleotide
cacucaccccguuuggccu

SEQ ID NO: 2265109 - RNA, 19 nt, Artificial Sequence
  Description of Artificial Sequence: Synthetic oligonucleotide
ccgaaccuccucugauucc

SEQ ID NO: 2265110 - RNA, 19 nt, Artificial Sequence
  Description of Artificial Sequence: Synthetic oligonucleotide
aggagaccguucaggcucu

SEQ ID NO: 2265111 - RNA, 19 nt, Artificial Sequence
  Description of Artificial Sequence: Synthetic oligonucleotide
cucggggaugccgcucagc

SEQ ID NO: 2265112 - RNA, 19 nt, Artificial Sequence
  Description of Artificial Sequence: Synthetic oligonucleotide
gggcacaaaugaugucuca

SEQ ID NO: 2265113 - RNA, 19 nt, Artificial Sequence
  Description of Artificial Sequence: Synthetic oligonucleotide
cucggguuucuucaaguuu

SEQ ID NO: 2265114 - RNA, 19 nt, Artificial Sequence
  Description of Artificial Sequence: Synthetic oligonucleotide
cauugagcuccucgugaua

SEQ ID NO: 2265115 - RNA, 19 nt, Artificial Sequence
  Description of Artificial Sequence: Synthetic oligonucleotide
ggauguucucugguagcuc

SEQ ID NO: 2265116 - RNA, 19 nt, Artificial Sequence
  Description of Artificial Sequence: Synthetic oligonucleotide
caggacgcuugcgguuggg

SEQ ID NO: 2265117 - RNA, 19 nt, Artificial Sequence
  Description of Artificial Sequence: Synthetic oligonucleotide
cggcggaaagucuucccag

SEQ ID NO: 2265118 - RNA, 19 nt, Artificial Sequence
  Description of Artificial Sequence: Synthetic oligonucleotide
gccggcggaaagucuuccc

SEQ ID NO: 2265119 - RNA, 19 nt, Artificial Sequence
  Description of Artificial Sequence: Synthetic oligonucleotide
gcucauagaggcaguccuc

SEQ ID NO: 2265120 - RNA, 19 nt, Artificial Sequence
  Description of Artificial Sequence: Synthetic oligonucleotide
cugucucaauguauuucau

SEQ ID NO: 2265121 - RNA, 19 nt, Artificial Sequence
  Description of Artificial Sequence: Synthetic oligonucleotide
ugcaccucucggguuucuu

SEQ ID NO: 2265122 - RNA, 19 nt, Artificial Sequence
  Description of Artificial Sequence: Synthetic oligonucleotide
ggaggagaccguucaggcu

SEQ ID NO: 2265123 - RNA, 19 nt, Artificial Sequence
  Description of Artificial Sequence: Synthetic oligonucleotide
cguuauccagccccuacca

SEQ ID NO: 2265124 - RNA, 19 nt, Artificial Sequence
  Description of Artificial Sequence: Synthetic oligonucleotide
ggcggaaagucuucccagu

SEQ ID NO: 2265125 - RNA, 19 nt, Artificial Sequence
  Description of Artificial Sequence: Synthetic oligonucleotide
gguugggaggagaccguuc

SEQ ID NO: 2265126 - RNA, 19 nt, Artificial Sequence
  Description of Artificial Sequence: Synthetic oligonucleotide
gcauugagcuccucgugau

SEQ ID NO: 2265127 - RNA, 19 nt, Artificial Sequence
  Description of Artificial Sequence: Synthetic oligonucleotide
ccuuaaguucugcaccucu

SEQ ID NO: 2265128 - RNA, 19 nt, Artificial Sequence
  Description of Artificial Sequence: Synthetic oligonucleotide
cacucguaagggccgggcu

SEQ ID NO: 2265129 - RNA, 19 nt, Artificial Sequence
  Description of Artificial Sequence: Synthetic oligonucleotide
ccgguuaguuucugcagaa

SEQ ID NO: 2265130 - RNA, 19 nt, Artificial Sequence
  Description of Artificial Sequence: Synthetic oligonucleotide
cagcagccgggccuuggca

SEQ ID NO: 2265131 - RNA, 19 nt, Artificial Sequence
  Description of Artificial Sequence: Synthetic oligonucleotide
cacggccauguuggugggc

SEQ ID NO: 2265132 - RNA, 19 nt, Artificial Sequence
  Description of Artificial Sequence: Synthetic oligonucleotide
ccggcggaaagucuuccca

SEQ ID NO: 2265133 - RNA, 19 nt, Artificial Sequence
  Description of Artificial Sequence: Synthetic oligonucleotide
ccacucguaagggccgggc

SEQ ID NO: 2265134 - RNA, 19 nt, Artificial Sequence
  Description of Artificial Sequence: Synthetic oligonucleotide
cggaaagucuucccaguga

SEQ ID NO: 2265135 - RNA, 19 nt, Artificial Sequence
  Description of Artificial Sequence: Synthetic oligonucleotide
cgagucagcccgccgccgg

SEQ ID NO: 2265136 - RNA, 19 nt, Artificial Sequence
  Description of Artificial Sequence: Synthetic oligonucleotide
caccccguuuggccucuuc

SEQ ID NO: 2265137 - RNA, 19 nt, Artificial Sequence
  Description of Artificial Sequence: Synthetic oligonucleotide
cagguccaccucggggaug

SEQ ID NO: 2265138 - RNA, 19 nt, Artificial Sequence
  Description of Artificial Sequence: Synthetic oligonucleotide
cauccuccguggaaaugau

SEQ ID NO: 2265139 - RNA, 19 nt, Artificial Sequence
  Description of Artificial Sequence: Synthetic oligonucleotide
cggaugggugcauugagcu

SEQ ID NO: 2265140 - RNA, 19 nt, Artificial Sequence
  Description of Artificial Sequence: Synthetic oligonucleotide
caugccaccugucgucauu

SEQ ID NO: 2265141 - RNA, 19 nt, Artificial Sequence
  Description of Artificial Sequence: Synthetic oligonucleotide
gguagcucauagaggcagu

SEQ ID NO: 2265142 - RNA, 19 nt, Artificial Sequence
  Description of Artificial Sequence: Synthetic oligonucleotide
cucguaagggccgggcuuu

SEQ ID NO: 2265143 - RNA, 19 nt, Artificial Sequence
  Description of Artificial Sequence: Synthetic oligonucleotide
cacuauccuucuucuuguu

SEQ ID NO: 2265144 - RNA, 19 nt, Artificial Sequence
  Description of Artificial Sequence: Synthetic oligonucleotide
cguuuggccucuuccuuaa

SEQ ID NO: 2265145 - RNA, 19 nt, Artificial Sequence
  Description of Artificial Sequence: Synthetic oligonucleotide
cuucuccgugucacccacu

SEQ ID NO: 2265146 - RNA, 19 nt, Artificial Sequence
  Description of Artificial Sequence: Synthetic oligonucleotide
cguaagggccgggcuuugg

SEQ ID NO: 2265147 - RNA, 19 nt, Artificial Sequence
  Description of Artificial Sequence: Synthetic oligonucleotide
ccgagucagcccgccgccg

SEQ ID NO: 2265148 - RNA, 19 nt, Artificial Sequence
  Description of Artificial Sequence: Synthetic oligonucleotide
cccuaccacugucucagua

SEQ ID NO: 2265149 - RNA, 19 nt, Artificial Sequence
  Description of Artificial Sequence: Synthetic oligonucleotide
ccagccccuaccacugucu

SEQ ID NO: 2265150 - RNA, 19 nt, Artificial Sequence
  Description of Artificial Sequence: Synthetic oligonucleotide
ccgugucacccacucguaa

SEQ ID NO: 2265151 - RNA, 19 nt, Artificial Sequence
  Description of Artificial Sequence: Synthetic oligonucleotide
cgaaccuccucugauuccu

SEQ ID NO: 2265152 - RNA, 19 nt, Artificial Sequence
  Description of Artificial Sequence: Synthetic oligonucleotide
caauccccuuccucuucuu

SEQ ID NO: 2265153 - RNA, 19 nt, Artificial Sequence
  Description of Artificial Sequence: Synthetic oligonucleotide
ggagaccguucaggcucug

SEQ ID NO: 2265154 - RNA, 19 nt, Artificial Sequence
  Description of Artificial Sequence: Synthetic oligonucleotide
ccgccggcggaaagucuuc

SEQ ID NO: 2265155 - RNA, 19 nt, Artificial Sequence
  Description of Artificial Sequence: Synthetic oligonucleotide
ccucgugauaaaagcgguu

SEQ ID NO: 2265156 - RNA, 19 nt, Artificial Sequence
  Description of Artificial Sequence: Synthetic oligonucleotide
cgacuccgagucagcccgc

SEQ ID NO: 2265157 - RNA, 19 nt, Artificial Sequence
  Description of Artificial Sequence: Synthetic oligonucleotide
cggguuucuucaaguuuua

SEQ ID NO: 2265158 - RNA, 19 nt, Artificial Sequence
  Description of Artificial Sequence: Synthetic oligonucleotide
cggauguucucugguagcu

SEQ ID NO: 2265159 - RNA, 19 nt, Artificial Sequence
  Description of Artificial Sequence: Synthetic oligonucleotide
cgccggcggaaagucuucc

SEQ ID NO: 2265160 - RNA, 19 nt, Artificial Sequence
  Description of Artificial Sequence: Synthetic oligonucleotide
gcccgccgccggcggaaag

SEQ ID NO: 2265161 - RNA, 19 nt, Artificial Sequence
  Description of Artificial Sequence: Synthetic oligonucleotide
cucaccccguuuggccucu

SEQ ID NO: 2265162 - RNA, 19 nt, Artificial Sequence
  Description of Artificial Sequence: Synthetic oligonucleotide
ccuccguggaaaugauauu

SEQ ID NO: 2265163 - RNA, 19 nt, Artificial Sequence
  Description of Artificial Sequence: Synthetic oligonucleotide
ccgccgccggcggaaaguc

SEQ ID NO: 2265164 - RNA, 19 nt, Artificial Sequence
  Description of Artificial Sequence: Synthetic oligonucleotide
cagcccgccgccggcggaa

SEQ ID NO: 2265165 - RNA, 19 nt, Artificial Sequence
  Description of Artificial Sequence: Synthetic oligonucleotide
cagaggagacacggauguu

SEQ ID NO: 2265166 - RNA, 19 nt, Artificial Sequence
  Description of Artificial Sequence: Synthetic oligonucleotide
ucaccccguuuggccucuu

SEQ ID NO: 2265167 - RNA, 19 nt, Artificial Sequence
  Description of Artificial Sequence: Synthetic oligonucleotide
ccucaucucuccgguuagu

SEQ ID NO: 2265168 - RNA, 19 nt, Artificial Sequence
  Description of Artificial Sequence: Synthetic oligonucleotide
cgguugugcuguacauagu

SEQ ID NO: 2265169 - RNA, 19 nt, Artificial Sequence
  Description of Artificial Sequence: Synthetic oligonucleotide
cagcagcacucaccccguu

SEQ ID NO: 2265170 - RNA, 19 nt, Artificial Sequence
  Description of Artificial Sequence: Synthetic oligonucleotide
gggccgggcuuugggcucu

SEQ ID NO: 2265171 - RNA, 19 nt, Artificial Sequence
  Description of Artificial Sequence: Synthetic oligonucleotide
ccaccucggggaugccgcu

SEQ ID NO: 2265172 - RNA, 19 nt, Artificial Sequence
  Description of Artificial Sequence: Synthetic oligonucleotide
ccaugccaccugucgucau

SEQ ID NO: 2265173 - RNA, 19 nt, Artificial Sequence
  Description of Artificial Sequence: Synthetic oligonucleotide
gccgggcuuugggcucuuc

SEQ ID NO: 2265174 - RNA, 19 nt, Artificial Sequence
  Description of Artificial Sequence: Synthetic oligonucleotide
cccgccgccggcggaaagu

SEQ ID NO: 2265175 - RNA, 19 nt, Artificial Sequence
  Description of Artificial Sequence: Synthetic oligonucleotide
cgcuugcgguugggaggag

SEQ ID NO: 2265176 - RNA, 19 nt, Artificial Sequence
  Description of Artificial Sequence: Synthetic oligonucleotide
ccccuaccacugucucagu

SEQ ID NO: 2265177 - RNA, 19 nt, Artificial Sequence
  Description of Artificial Sequence: Synthetic oligonucleotide
ggccgggcuuugggcucuu

SEQ ID NO: 2265178 - RNA, 19 nt, Artificial Sequence
  Description of Artificial Sequence: Synthetic oligonucleotide
uaaacaucaguccugaugc

SEQ ID NO: 2265179 - RNA, 19 nt, Artificial Sequence
  Description of Artificial Sequence: Synthetic oligonucleotide
uuaaacaucaguccugaug

SEQ ID NO: 2265180 - RNA, 19 nt, Artificial Sequence
  Description of Artificial Sequence: Synthetic oligonucleotide
ucuuguuuagauuccauug

SEQ ID NO: 2265181 - RNA, 19 nt, Artificial Sequence
  Description of Artificial Sequence: Synthetic oligonucleotide
uccaccuuauuaaacauca

SEQ ID NO: 2265182 - RNA, 19 nt, Artificial Sequence
  Description of Artificial Sequence: Synthetic oligonucleotide
uuguacagcaaguuggucc

SEQ ID NO: 2265183 - RNA, 19 nt, Artificial Sequence
  Description of Artificial Sequence: Synthetic oligonucleotide
uuauuaaacaucaguccug

SEQ ID NO: 2265184 - RNA, 19 nt, Artificial Sequence
  Description of Artificial Sequence: Synthetic oligonucleotide
auuccauugguuucuuggc

SEQ ID NO: 2265185 - RNA, 19 nt, Artificial Sequence
  Description of Artificial Sequence: Synthetic oligonucleotide
accuuauuaaacaucaguc

SEQ ID NO: 2265186 - RNA, 19 nt, Artificial Sequence
  Description of Artificial Sequence: Synthetic oligonucleotide
ugucuuuucucuagcgugg

SEQ ID NO: 2265187 - RNA, 19 nt, Artificial Sequence
  Description of Artificial Sequence: Synthetic oligonucleotide
uucacuaggggcuuagucu

SEQ ID NO: 2265188 - RNA, 19 nt, Artificial Sequence
  Description of Artificial Sequence: Synthetic oligonucleotide
aaacaucaguccugaugcc

SEQ ID NO: 2265189 - RNA, 19 nt, Artificial Sequence
  Description of Artificial Sequence: Synthetic oligonucleotide
agugcaaagacagaaucag

SEQ ID NO: 2265190 - RNA, 19 nt, Artificial Sequence
  Description of Artificial Sequence: Synthetic oligonucleotide
uguacagcaaguuggucca

SEQ ID NO: 2265191 - RNA, 19 nt, Artificial Sequence
  Description of Artificial Sequence: Synthetic oligonucleotide
uuuagauuccauugguuuc

SEQ ID NO: 2265192 - RNA, 19 nt, Artificial Sequence
  Description of Artificial Sequence: Synthetic oligonucleotide
acuuccaccuuauuaaaca

SEQ ID NO: 2265193 - RNA, 19 nt, Artificial Sequence
  Description of Artificial Sequence: Synthetic oligonucleotide
cugagauuuccuuuugugc

SEQ ID NO: 2265194 - RNA, 19 nt, Artificial Sequence
  Description of Artificial Sequence: Synthetic oligonucleotide
acugccuguaauuccugcc

SEQ ID NO: 2265195 - RNA, 19 nt, Artificial Sequence
  Description of Artificial Sequence: Synthetic oligonucleotide
uauuaaacaucaguccuga

SEQ ID NO: 2265196 - RNA, 19 nt, Artificial Sequence
  Description of Artificial Sequence: Synthetic oligonucleotide
aaagacagaaucaggugcu

SEQ ID NO: 2265197 - RNA, 19 nt, Artificial Sequence
  Description of Artificial Sequence: Synthetic oligonucleotide
cugucuuuucucuagcgug

SEQ ID NO: 2265198 - RNA, 19 nt, Artificial Sequence
  Description of Artificial Sequence: Synthetic oligonucleotide
gacagaaucaggugcugug

SEQ ID NO: 2265199 - RNA, 19 nt, Artificial Sequence
  Description of Artificial Sequence: Synthetic oligonucleotide
uuucgcuucuccuugcgcu

SEQ ID NO: 2265200 - RNA, 19 nt, Artificial Sequence
  Description of Artificial Sequence: Synthetic oligonucleotide
agccgucuucacuaggggc

SEQ ID NO: 2265201 - RNA, 19 nt, Artificial Sequence
  Description of Artificial Sequence: Synthetic oligonucleotide
uugucacggaucuucacac

SEQ ID NO: 2265202 - RNA, 19 nt, Artificial Sequence
  Description of Artificial Sequence: Synthetic oligonucleotide
ucucaugaagccgcugucg

SEQ ID NO: 2265203 - RNA, 19 nt, Artificial Sequence
  Description of Artificial Sequence: Synthetic oligonucleotide
auuccugccugucaggggu

SEQ ID NO: 2265204 - RNA, 19 nt, Artificial Sequence
  Description of Artificial Sequence: Synthetic oligonucleotide
cuuuucucuagcguggcag

SEQ ID NO: 2265205 - RNA, 19 nt, Artificial Sequence
  Description of Artificial Sequence: Synthetic oligonucleotide
agacgcuccagcaacugcc

SEQ ID NO: 2265206 - RNA, 19 nt, Artificial Sequence
  Description of Artificial Sequence: Synthetic oligonucleotide
uuuucucuagcguggcagc

SEQ ID NO: 2265207 - RNA, 19 nt, Artificial Sequence
  Description of Artificial Sequence: Synthetic oligonucleotide
uugguccacuucaucuucg

SEQ ID NO: 2265208 - RNA, 19 nt, Artificial Sequence
  Description of Artificial Sequence: Synthetic oligonucleotide
caggaaauccagugcaaag

SEQ ID NO: 2265209 - RNA, 19 nt, Artificial Sequence
  Description of Artificial Sequence: Synthetic oligonucleotide
cuagcguggcagcagacag

SEQ ID NO: 2265210 - RNA, 19 nt, Artificial Sequence
  Description of Artificial Sequence: Synthetic oligonucleotide
gucacggaucuucacaccc

SEQ ID NO: 2265211 - RNA, 19 nt, Artificial Sequence
  Description of Artificial Sequence: Synthetic oligonucleotide
agucacuuccaccuuauua

SEQ ID NO: 2265212 - RNA, 19 nt, Artificial Sequence
  Description of Artificial Sequence: Synthetic oligonucleotide
aacaucaguccugaugccu

SEQ ID NO: 2265213 - RNA, 19 nt, Artificial Sequence
  Description of Artificial Sequence: Synthetic oligonucleotide
ucccuuucaccuucugccg

SEQ ID NO: 2265214 - RNA, 19 nt, Artificial Sequence
  Description of Artificial Sequence: Synthetic oligonucleotide
agucuugugcucuguagcu

SEQ ID NO: 2265215 - RNA, 19 nt, Artificial Sequence
  Description of Artificial Sequence: Synthetic oligonucleotide
uaggggcuuagucuugugc

SEQ ID NO: 2265216 - RNA, 19 nt, Artificial Sequence
  Description of Artificial Sequence: Synthetic oligonucleotide
aggggcuuagucuugugcu

SEQ ID NO: 2265217 - RNA, 19 nt, Artificial Sequence
  Description of Artificial Sequence: Synthetic oligonucleotide
uagaguucuucucuuguuu

SEQ ID NO: 2265218 - RNA, 19 nt, Artificial Sequence
  Description of Artificial Sequence: Synthetic oligonucleotide
guugucacggaucuucaca

SEQ ID NO: 2265219 - RNA, 19 nt, Artificial Sequence
  Description of Artificial Sequence: Synthetic oligonucleotide
aggaaauccagugcaaaga

SEQ ID NO: 2265220 - RNA, 19 nt, Artificial Sequence
  Description of Artificial Sequence: Synthetic oligonucleotide
cucaugaagccgcugucgc

SEQ ID NO: 2265221 - RNA, 19 nt, Artificial Sequence
  Description of Artificial Sequence: Synthetic oligonucleotide
uggcccuagaagagggagg

SEQ ID NO: 2265222 - RNA, 19 nt, Artificial Sequence
  Description of Artificial Sequence: Synthetic oligonucleotide
agagggaggagccgucuuc

SEQ ID NO: 2265223 - RNA, 19 nt, Artificial Sequence
  Description of Artificial Sequence: Synthetic oligonucleotide
ggaaauccagugcaaagac

SEQ ID NO: 2265224 - RNA, 19 nt, Artificial Sequence
  Description of Artificial Sequence: Synthetic oligonucleotide
cuguagacgcuccagcaac

SEQ ID NO: 2265225 - RNA, 19 nt, Artificial Sequence
  Description of Artificial Sequence: Synthetic oligonucleotide
ugcucgaagcuccuuccgc

SEQ ID NO: 2265226 - RNA, 19 nt, Artificial Sequence
  Description of Artificial Sequence: Synthetic oligonucleotide
uugcucgaagcuccuuccg

SEQ ID NO: 2265227 - RNA, 19 nt, Artificial Sequence
  Description of Artificial Sequence: Synthetic oligonucleotide
gccuuguacagcaaguugg

SEQ ID NO: 2265228 - RNA, 19 nt, Artificial Sequence
  Description of Artificial Sequence: Synthetic oligonucleotide
ucacuaggggcuuagucuu

SEQ ID NO: 2265229 - RNA, 19 nt, Artificial Sequence
  Description of Artificial Sequence: Synthetic oligonucleotide
agguacaagcugcucagga

SEQ ID NO: 2265230 - RNA, 19 nt, Artificial Sequence
  Description of Artificial Sequence: Synthetic oligonucleotide
ucucuagcguggcagcaga

SEQ ID NO: 2265231 - RNA, 19 nt, Artificial Sequence
  Description of Artificial Sequence: Synthetic oligonucleotide
uuggcccuagaagagggag

SEQ ID NO: 2265232 - RNA, 19 nt, Artificial Sequence
  Description of Artificial Sequence: Synthetic oligonucleotide
uccaccacaugcuccgagc

SEQ ID NO: 2265233 - RNA, 19 nt, Artificial Sequence
  Description of Artificial Sequence: Synthetic oligonucleotide
cuuugcucgaagcuccuuc

SEQ ID NO: 2265234 - RNA, 19 nt, Artificial Sequence
  Description of Artificial Sequence: Synthetic oligonucleotide
ugccuguaauuccugccug

SEQ ID NO: 2265235 - RNA, 19 nt, Artificial Sequence
  Description of Artificial Sequence: Synthetic oligonucleotide
agaaucaggugcugugacu

SEQ ID NO: 2265236 - RNA, 19 nt, Artificial Sequence
  Description of Artificial Sequence: Synthetic oligonucleotide
ucuugugcucuguagcuuu

SEQ ID NO: 2265237 - RNA, 19 nt, Artificial Sequence
  Description of Artificial Sequence: Synthetic oligonucleotide
aguuggaucuucucaugaa

SEQ ID NO: 2265238 - RNA, 19 nt, Artificial Sequence
  Description of Artificial Sequence: Synthetic oligonucleotide
cucguugucacggaucuuc

SEQ ID NO: 2265239 - RNA, 19 nt, Artificial Sequence
  Description of Artificial Sequence: Synthetic oligonucleotide
ggaucuucucaugaagccg

SEQ ID NO: 2265240 - RNA, 19 nt, Artificial Sequence
  Description of Artificial Sequence: Synthetic oligonucleotide
uccgccuuguacagcaagu

SEQ ID NO: 2265241 - RNA, 19 nt, Artificial Sequence
  Description of Artificial Sequence: Synthetic oligonucleotide
ugcggcuccuugcagggca

SEQ ID NO: 2265242 - RNA, 19 nt, Artificial Sequence
  Description of Artificial Sequence: Synthetic oligonucleotide
ccuagaagagggaggagcc

SEQ ID NO: 2265243 - RNA, 19 nt, Artificial Sequence
  Description of Artificial Sequence: Synthetic oligonucleotide
ucuuuucucuagcguggca

SEQ ID NO: 2265244 - RNA, 19 nt, Artificial Sequence
  Description of Artificial Sequence: Synthetic oligonucleotide
ucucuuguuuagauuccau

SEQ ID NO: 2265245 - RNA, 19 nt, Artificial Sequence
  Description of Artificial Sequence: Synthetic oligonucleotide
uucucuuguuuagauucca

SEQ ID NO: 2265246 - RNA, 19 nt, Artificial Sequence
  Description of Artificial Sequence: Synthetic oligonucleotide
aguugguccacuucaucuu

SEQ ID NO: 2265247 - RNA, 19 nt, Artificial Sequence
  Description of Artificial Sequence: Synthetic oligonucleotide
ucacggaucuucacacccu

SEQ ID NO: 2265248 - RNA, 19 nt, Artificial Sequence
  Description of Artificial Sequence: Synthetic oligonucleotide
ucaugaagccgcugucgca

SEQ ID NO: 2265249 - RNA, 19 nt, Artificial Sequence
  Description of Artificial Sequence: Synthetic oligonucleotide
ugucacggaucuucacacc

SEQ ID NO: 2265250 - RNA, 19 nt, Artificial Sequence
  Description of Artificial Sequence: Synthetic oligonucleotide
aagacagaaucaggugcug

SEQ ID NO: 2265251 - RNA, 19 nt, Artificial Sequence
  Description of Artificial Sequence: Synthetic oligonucleotide
cagugcaaagacagaauca

SEQ ID NO: 2265252 - RNA, 19 nt, Artificial Sequence
  Description of Artificial Sequence: Synthetic oligonucleotide
ucuagcguggcagcagaca

SEQ ID NO: 2265253 - RNA, 19 nt, Artificial Sequence
  Description of Artificial Sequence: Synthetic oligonucleotide
cagaaucaggugcugugac

SEQ ID NO: 2265254 - RNA, 19 nt, Artificial Sequence
  Description of Artificial Sequence: Synthetic oligonucleotide
aggagaggcccgcacgcuc

SEQ ID NO: 2265255 - RNA, 19 nt, Artificial Sequence
  Description of Artificial Sequence: Synthetic oligonucleotide
ugccgcuucuccuuccuac

SEQ ID NO: 2265256 - RNA, 19 nt, Artificial Sequence
  Description of Artificial Sequence: Synthetic oligonucleotide
uucuugcgcagguucuggc

SEQ ID NO: 2265257 - RNA, 19 nt, Artificial Sequence
  Description of Artificial Sequence: Synthetic oligonucleotide
uuucuguuccugagauuuc

SEQ ID NO: 2265258 - RNA, 19 nt, Artificial Sequence
  Description of Artificial Sequence: Synthetic oligonucleotide
ccugagauuuccuuuugug

SEQ ID NO: 2265259 - RNA, 19 nt, Artificial Sequence
  Description of Artificial Sequence: Synthetic oligonucleotide
acagaaucaggugcuguga

SEQ ID NO: 2265260 - RNA, 19 nt, Artificial Sequence
  Description of Artificial Sequence: Synthetic oligonucleotide
cugugacuuggcuaucuuc

SEQ ID NO: 2265261 - RNA, 19 nt, Artificial Sequence
  Description of Artificial Sequence: Synthetic oligonucleotide
ugguccacuucaucuucgc

SEQ ID NO: 2265262 - RNA, 19 nt, Artificial Sequence
  Description of Artificial Sequence: Synthetic oligonucleotide
guugguccacuucaucuuc

SEQ ID NO: 2265263 - RNA, 19 nt, Artificial Sequence
  Description of Artificial Sequence: Synthetic oligonucleotide
acaucaguccugaugccug

SEQ ID NO: 2265264 - RNA, 19 nt, Artificial Sequence
  Description of Artificial Sequence: Synthetic oligonucleotide
ucucccaccggcgcugccg

SEQ ID NO: 2265265 - RNA, 19 nt, Artificial Sequence
  Description of Artificial Sequence: Synthetic oligonucleotide
aguccugaugccugcggcu

SEQ ID NO: 2265266 - RNA, 19 nt, Artificial Sequence
  Description of Artificial Sequence: Synthetic oligonucleotide
uccagggagcuagaguucu

SEQ ID NO: 2265267 - RNA, 19 nt, Artificial Sequence
  Description of Artificial Sequence: Synthetic oligonucleotide
ucuggcgccgcuuguccug

SEQ ID NO: 2265268 - RNA, 19 nt, Artificial Sequence
  Description of Artificial Sequence: Synthetic oligonucleotide
caucaguccugaugccugc

SEQ ID NO: 2265269 - RNA, 19 nt, Artificial Sequence
  Description of Artificial Sequence: Synthetic oligonucleotide
agcguggcagcagacagcu

SEQ ID NO: 2265270 - RNA, 19 nt, Artificial Sequence
  Description of Artificial Sequence: Synthetic oligonucleotide
uucuugcgggccuucugca

SEQ ID NO: 2265271 - RNA, 19 nt, Artificial Sequence
  Description of Artificial Sequence: Synthetic oligonucleotide
uuucucuagcguggcagca

SEQ ID NO: 2265272 - RNA, 19 nt, Artificial Sequence
  Description of Artificial Sequence: Synthetic oligonucleotide
augcuccgagcgcuucucc

SEQ ID NO: 2265273 - RNA, 19 nt, Artificial Sequence
  Description of Artificial Sequence: Synthetic oligonucleotide
cuucuugcgcagguucugg

SEQ ID NO: 2265274 - RNA, 19 nt, Artificial Sequence
  Description of Artificial Sequence: Synthetic oligonucleotide
uagcguggcagcagacagc

SEQ ID NO: 2265275 - RNA, 19 nt, Artificial Sequence
  Description of Artificial Sequence: Synthetic oligonucleotide
agggagcuagaguucuucu

SEQ ID NO: 2265276 - RNA, 19 nt, Artificial Sequence
  Description of Artificial Sequence: Synthetic oligonucleotide
agauuccauugguuucuug

SEQ ID NO: 2265277 - RNA, 19 nt, Artificial Sequence
  Description of Artificial Sequence: Synthetic oligonucleotide
uucucagucuuugcagccu

SEQ ID NO: 2265278 - RNA, 19 nt, Artificial Sequence
  Description of Artificial Sequence: Synthetic oligonucleotide
caguccugaugccugcggc

SEQ ID NO: 2265279 - RNA, 19 nt, Artificial Sequence
  Description of Artificial Sequence: Synthetic oligonucleotide
ccagugcaaagacagaauc

SEQ ID NO: 2265280 - RNA, 19 nt, Artificial Sequence
  Description of Artificial Sequence: Synthetic oligonucleotide
cuugcccgcauccugaucu

SEQ ID NO: 2265281 - RNA, 19 nt, Artificial Sequence
  Description of Artificial Sequence: Synthetic oligonucleotide
caggcgcucguugucacgg

SEQ ID NO: 2265282 - RNA, 19 nt, Artificial Sequence
  Description of Artificial Sequence: Synthetic oligonucleotide
caaguugguccacuucauc

SEQ ID NO: 2265283 - RNA, 19 nt, Artificial Sequence
  Description of Artificial Sequence: Synthetic oligonucleotide
ggcagguacaagcugcuca

SEQ ID NO: 2265284 - RNA, 19 nt, Artificial Sequence
  Description of Artificial Sequence: Synthetic oligonucleotide
cuugcagggcacuucugga

SEQ ID NO: 2265285 - RNA, 19 nt, Artificial Sequence
  Description of Artificial Sequence: Synthetic oligonucleotide
gaggagccgucuucacuag

SEQ ID NO: 2265286 - RNA, 19 nt, Artificial Sequence
  Description of Artificial Sequence: Synthetic oligonucleotide
ugaugccugcggcuccuug

SEQ ID NO: 2265287 - RNA, 19 nt, Artificial Sequence
  Description of Artificial Sequence: Synthetic oligonucleotide
cacgcuccagguccugugg

SEQ ID NO: 2265288 - RNA, 19 nt, Artificial Sequence
  Description of Artificial Sequence: Synthetic oligonucleotide
agggaggagccgucuucac

SEQ ID NO: 2265289 - RNA, 19 nt, Artificial Sequence
  Description of Artificial Sequence: Synthetic oligonucleotide
cuaucuucaggggacucca

SEQ ID NO: 2265290 - RNA, 19 nt, Artificial Sequence
  Description of Artificial Sequence: Synthetic oligonucleotide
acagcaaguugguccacuu

SEQ ID NO: 2265291 - RNA, 19 nt, Artificial Sequence
  Description of Artificial Sequence: Synthetic oligonucleotide
cacacccuccgccuuguac

SEQ ID NO: 2265292 - RNA, 19 nt, Artificial Sequence
  Description of Artificial Sequence: Synthetic oligonucleotide
cuccgccuuguacagcaag

SEQ ID NO: 2265293 - RNA, 19 nt, Artificial Sequence
  Description of Artificial Sequence: Synthetic oligonucleotide
caccacaugcuccgagcgc

SEQ ID NO: 2265294 - RNA, 19 nt, Artificial Sequence
  Description of Artificial Sequence: Synthetic oligonucleotide
ggaucuucacacccuccgc

SEQ ID NO: 2265295 - RNA, 19 nt, Artificial Sequence
  Description of Artificial Sequence: Synthetic oligonucleotide
cuucucaugaagccgcugu

SEQ ID NO: 2265296 - RNA, 19 nt, Artificial Sequence
  Description of Artificial Sequence: Synthetic oligonucleotide
cccuagaagagggaggagc

SEQ ID NO: 2265297 - RNA, 19 nt, Artificial Sequence
  Description of Artificial Sequence: Synthetic oligonucleotide
cacggaucuucacacccuc

SEQ ID NO: 2265298 - RNA, 19 nt, Artificial Sequence
  Description of Artificial Sequence: Synthetic oligonucleotide
agcgcuucucccaccggcg

SEQ ID NO: 2265299 - RNA, 19 nt, Artificial Sequence
  Description of Artificial Sequence: Synthetic oligonucleotide
ggaggagccgucuucacua

SEQ ID NO: 2265300 - RNA, 19 nt, Artificial Sequence
  Description of Artificial Sequence: Synthetic oligonucleotide
ucuucacacccuccgccuu

SEQ ID NO: 2265301 - RNA, 19 nt, Artificial Sequence
  Description of Artificial Sequence: Synthetic oligonucleotide
cugccgcgccuguagacgc

SEQ ID NO: 2265302 - RNA, 19 nt, Artificial Sequence
  Description of Artificial Sequence: Synthetic oligonucleotide
ugccugucaggggugucag

SEQ ID NO: 2265303 - RNA, 19 nt, Artificial Sequence
  Description of Artificial Sequence: Synthetic oligonucleotide
augccugcggcuccuugca

SEQ ID NO: 2265304 - RNA, 19 nt, Artificial Sequence
  Description of Artificial Sequence: Synthetic oligonucleotide
ugccgcugugccuuucgcu

SEQ ID NO: 2265305 - RNA, 19 nt, Artificial Sequence
  Description of Artificial Sequence: Synthetic oligonucleotide
gucuuuucucuagcguggc

SEQ ID NO: 2265306 - RNA, 19 nt, Artificial Sequence
  Description of Artificial Sequence: Synthetic oligonucleotide
uucgcuucuccuugcgcuu

SEQ ID NO: 2265307 - RNA, 19 nt, Artificial Sequence
  Description of Artificial Sequence: Synthetic oligonucleotide
cacccggcccuucuugcgg

SEQ ID NO: 2265308 - RNA, 19 nt, Artificial Sequence
  Description of Artificial Sequence: Synthetic oligonucleotide
acuaggggcuuagucuugu

SEQ ID NO: 2265309 - RNA, 19 nt, Artificial Sequence
  Description of Artificial Sequence: Synthetic oligonucleotide
acccggcccuucuugcggg

SEQ ID NO: 2265310 - RNA, 19 nt, Artificial Sequence
  Description of Artificial Sequence: Synthetic oligonucleotide
cagcaacugccuguaauuc

SEQ ID NO: 2265311 - RNA, 19 nt, Artificial Sequence
  Description of Artificial Sequence: Synthetic oligonucleotide
guagacgcuccagcaacug

SEQ ID NO: 2265312 - RNA, 19 nt, Artificial Sequence
  Description of Artificial Sequence: Synthetic oligonucleotide
uuccugccugucaggggug

SEQ ID NO: 2265313 - RNA, 19 nt, Artificial Sequence
  Description of Artificial Sequence: Synthetic oligonucleotide
uccuugcagggcacuucug

SEQ ID NO: 2265314 - RNA, 19 nt, Artificial Sequence
  Description of Artificial Sequence: Synthetic oligonucleotide
uuccuccgcugucuuuucu

SEQ ID NO: 2265315 - RNA, 19 nt, Artificial Sequence
  Description of Artificial Sequence: Synthetic oligonucleotide
guccuguggcagcacccgg

SEQ ID NO: 2265316 - RNA, 19 nt, Artificial Sequence
  Description of Artificial Sequence: Synthetic oligonucleotide
uucuggcgccgcuuguccu

SEQ ID NO: 2265317 - RNA, 19 nt, Artificial Sequence
  Description of Artificial Sequence: Synthetic oligonucleotide
ggccaguuggaucuucuca

SEQ ID NO: 2265318 - RNA, 19 nt, Artificial Sequence
  Description of Artificial Sequence: Synthetic oligonucleotide
uccuuccuacgcugggccu

SEQ ID NO: 2265319 - RNA, 19 nt, Artificial Sequence
  Description of Artificial Sequence: Synthetic oligonucleotide
cacccuccgccuuguacag

SEQ ID NO: 2265320 - RNA, 19 nt, Artificial Sequence
  Description of Artificial Sequence: Synthetic oligonucleotide
gccgcuucuccuuccuacg

SEQ ID NO: 2265321 - RNA, 19 nt, Artificial Sequence
  Description of Artificial Sequence: Synthetic oligonucleotide
cagcaaguugguccacuuc

SEQ ID NO: 2265322 - RNA, 19 nt, Artificial Sequence
  Description of Artificial Sequence: Synthetic oligonucleotide
ccaccacaugcuccgagcg

SEQ ID NO: 2265323 - RNA, 19 nt, Artificial Sequence
  Description of Artificial Sequence: Synthetic oligonucleotide
accggcgcugccgcugugc

SEQ ID NO: 2265324 - RNA, 19 nt, Artificial Sequence
  Description of Artificial Sequence: Synthetic oligonucleotide
gggagcuagaguucuucuc

SEQ ID NO: 2265325 - RNA, 19 nt, Artificial Sequence
  Description of Artificial Sequence: Synthetic oligonucleotide
cagggagcuagaguucuuc

SEQ ID NO: 2265326 - RNA, 19 nt, Artificial Sequence
  Description of Artificial Sequence: Synthetic oligonucleotide
cacuaggggcuuagucuug

SEQ ID NO: 2265327 - RNA, 19 nt, Artificial Sequence
  Description of Artificial Sequence: Synthetic oligonucleotide
cuaggggcuuagucuugug

SEQ ID NO: 2265328 - RNA, 19 nt, Artificial Sequence
  Description of Artificial Sequence: Synthetic oligonucleotide
cucagucuuugcagccuuc

SEQ ID NO: 2265329 - RNA, 19 nt, Artificial Sequence
  Description of Artificial Sequence: Synthetic oligonucleotide
gcccgcacgcuccaggucc

SEQ ID NO: 2265330 - RNA, 19 nt, Artificial Sequence
  Description of Artificial Sequence: Synthetic oligonucleotide
ugccugcggcuccuugcag

SEQ ID NO: 2265331 - RNA, 19 nt, Artificial Sequence
  Description of Artificial Sequence: Synthetic oligonucleotide
cagucuuugcagccuucuc

SEQ ID NO: 2265332 - RNA, 19 nt, Artificial Sequence
  Description of Artificial Sequence: Synthetic oligonucleotide
cucuagcguggcagcagac

SEQ ID NO: 2265333 - RNA, 19 nt, Artificial Sequence
  Description of Artificial Sequence: Synthetic oligonucleotide
ucuucacuaggggcuuagu

SEQ ID NO: 2265334 - RNA, 19 nt, Artificial Sequence
  Description of Artificial Sequence: Synthetic oligonucleotide
uccuacgcugggccuugcu

SEQ ID NO: 2265335 - RNA, 19 nt, Artificial Sequence
  Description of Artificial Sequence: Synthetic oligonucleotide
ugcagccgccucucagccc

SEQ ID NO: 2265336 - RNA, 19 nt, Artificial Sequence
  Description of Artificial Sequence: Synthetic oligonucleotide
uguccuggcgcugcugcau

SEQ ID NO: 2265337 - RNA, 19 nt, Artificial Sequence
  Description of Artificial Sequence: Synthetic oligonucleotide
cuccgagcgcuucucccac

SEQ ID NO: 2265338 - RNA, 19 nt, Artificial Sequence
  Description of Artificial Sequence: Synthetic oligonucleotide
cuccuugcgcuucagggcu

SEQ ID NO: 2265339 - RNA, 19 nt, Artificial Sequence
  Description of Artificial Sequence: Synthetic oligonucleotide
uggcuaucuucaggggacu

SEQ ID NO: 2265340 - RNA, 19 nt, Artificial Sequence
  Description of Artificial Sequence: Synthetic oligonucleotide
cucccaccggcgcugccgc

SEQ ID NO: 2265341 - RNA, 19 nt, Artificial Sequence
  Description of Artificial Sequence: Synthetic oligonucleotide
ccaguuggaucuucucaug

SEQ ID NO: 2265342 - RNA, 19 nt, Artificial Sequence
  Description of Artificial Sequence: Synthetic oligonucleotide
gugcucuguagcuuucugu

SEQ ID NO: 2265343 - RNA, 19 nt, Artificial Sequence
  Description of Artificial Sequence: Synthetic oligonucleotide
cugccuguaauuccugccu

SEQ ID NO: 2265344 - RNA, 19 nt, Artificial Sequence
  Description of Artificial Sequence: Synthetic oligonucleotide
gccuguagacgcuccagca

SEQ ID NO: 2265345 - RNA, 19 nt, Artificial Sequence
  Description of Artificial Sequence: Synthetic oligonucleotide
cuguagcuuucuguuccug

SEQ ID NO: 2265346 - RNA, 19 nt, Artificial Sequence
  Description of Artificial Sequence: Synthetic oligonucleotide
ccaccuuauuaaacaucag

SEQ ID NO: 2265347 - RNA, 19 nt, Artificial Sequence
  Description of Artificial Sequence: Synthetic oligonucleotide
cuuccuacgcugggccuug

SEQ ID NO: 2265348 - RNA, 19 nt, Artificial Sequence
  Description of Artificial Sequence: Synthetic oligonucleotide
gcugccgcugugccuuucg

SEQ ID NO: 2265349 - RNA, 19 nt, Artificial Sequence
  Description of Artificial Sequence: Synthetic oligonucleotide
caugcuccgagcgcuucuc

SEQ ID NO: 2265350 - RNA, 19 nt, Artificial Sequence
  Description of Artificial Sequence: Synthetic oligonucleotide
acgcuccagcaacugccug

SEQ ID NO: 2265351 - RNA, 19 nt, Artificial Sequence
  Description of Artificial Sequence: Synthetic oligonucleotide
ggcccuagaagagggagga

SEQ ID NO: 2265352 - RNA, 19 nt, Artificial Sequence
  Description of Artificial Sequence: Synthetic oligonucleotide
cuuggcccuagaagaggga

SEQ ID NO: 2265353 - RNA, 19 nt, Artificial Sequence
  Description of Artificial Sequence: Synthetic oligonucleotide
cccuuucaccuucugccgc

SEQ ID NO: 2265354 - RNA, 19 nt, Artificial Sequence
  Description of Artificial Sequence: Synthetic oligonucleotide
gcugucuuuucucuagcgu

SEQ ID NO: 2265355 - RNA, 19 nt, Artificial Sequence
  Description of Artificial Sequence: Synthetic oligonucleotide
ggagaggcccgcacgcucc

SEQ ID NO: 2265356 - RNA, 19 nt, Artificial Sequence
  Description of Artificial Sequence: Synthetic oligonucleotide
gaggugccucagcuggcuc

SEQ ID NO: 2265357 - RNA, 19 nt, Artificial Sequence
  Description of Artificial Sequence: Synthetic oligonucleotide
agguucuggcgccgcuugu

SEQ ID NO: 2265358 - RNA, 19 nt, Artificial Sequence
  Description of Artificial Sequence: Synthetic oligonucleotide
acccuccgccuuguacagc

SEQ ID NO: 2265359 - RNA, 19 nt, Artificial Sequence
  Description of Artificial Sequence: Synthetic oligonucleotide
cuggcgccgcuuguccugg

SEQ ID NO: 2265360 - RNA, 19 nt, Artificial Sequence
  Description of Artificial Sequence: Synthetic oligonucleotide
ugcucaggagaggcccgca

SEQ ID NO: 2265361 - RNA, 19 nt, Artificial Sequence
  Description of Artificial Sequence: Synthetic oligonucleotide
gcacccggcccuucuugcg

SEQ ID NO: 2265362 - RNA, 19 nt, Artificial Sequence
  Description of Artificial Sequence: Synthetic oligonucleotide
gaagccgcugucgcaggaa

SEQ ID NO: 2265363 - RNA, 19 nt, Artificial Sequence
  Description of Artificial Sequence: Synthetic oligonucleotide
gcaacugccuguaauuccu

SEQ ID NO: 2265364 - RNA, 19 nt, Artificial Sequence
  Description of Artificial Sequence: Synthetic oligonucleotide
ccugccgcgccuguagacg

SEQ ID NO: 2265365 - RNA, 19 nt, Artificial Sequence
  Description of Artificial Sequence: Synthetic oligonucleotide
ccgagcgcuucucccaccg

SEQ ID NO: 2265366 - RNA, 19 nt, Artificial Sequence
  Description of Artificial Sequence: Synthetic oligonucleotide
ugccgcgccuguagacgcu

SEQ ID NO: 2265367 - RNA, 19 nt, Artificial Sequence
  Description of Artificial Sequence: Synthetic oligonucleotide
gcaggcgcucguugucacg

SEQ ID NO: 2265368 - RNA, 19 nt, Artificial Sequence
  Description of Artificial Sequence: Synthetic oligonucleotide
uccugccugucaggggugu

SEQ ID NO: 2265369 - RNA, 19 nt, Artificial Sequence
  Description of Artificial Sequence: Synthetic oligonucleotide
cagccgguccugccgcgcc

SEQ ID NO: 2265370 - RNA, 19 nt, Artificial Sequence
  Description of Artificial Sequence: Synthetic oligonucleotide
gcugcucaggagaggcccg

SEQ ID NO: 2265371 - RNA, 19 nt, Artificial Sequence
  Description of Artificial Sequence: Synthetic oligonucleotide
ggcgccgcuuguccuggcg

SEQ ID NO: 2265372 - RNA, 19 nt, Artificial Sequence
  Description of Artificial Sequence: Synthetic oligonucleotide
ccuguaauuccugccuguc

SEQ ID NO: 2265373 - RNA, 19 nt, Artificial Sequence
  Description of Artificial Sequence: Synthetic oligonucleotide
cugccugucagggguguca

SEQ ID NO: 2265374 - RNA, 19 nt, Artificial Sequence
  Description of Artificial Sequence: Synthetic oligonucleotide
cgccuuguacagcaaguug

SEQ ID NO: 2265375 - RNA, 19 nt, Artificial Sequence
  Description of Artificial Sequence: Synthetic oligonucleotide
cccuccgccuuguacagca

SEQ ID NO: 2265376 - RNA, 19 nt, Artificial Sequence
  Description of Artificial Sequence: Synthetic oligonucleotide
aggcgcucguugucacgga

SEQ ID NO: 2265377 - RNA, 19 nt, Artificial Sequence
  Description of Artificial Sequence: Synthetic oligonucleotide
ccgcuucuccuuccuacgc

SEQ ID NO: 2265378 - RNA, 19 nt, Artificial Sequence
  Description of Artificial Sequence: Synthetic oligonucleotide
ccgcugucgcaggaaaucc

SEQ ID NO: 2265379 - RNA, 19 nt, Artificial Sequence
  Description of Artificial Sequence: Synthetic oligonucleotide
gguucuggcgccgcuuguc

SEQ ID NO: 2265380 - RNA, 19 nt, Artificial Sequence
  Description of Artificial Sequence: Synthetic oligonucleotide
guacagcaaguugguccac

SEQ ID NO: 2265381 - RNA, 19 nt, Artificial Sequence
  Description of Artificial Sequence: Synthetic oligonucleotide
ccgcauccugaucucgaag

SEQ ID NO: 2265382 - RNA, 19 nt, Artificial Sequence
  Description of Artificial Sequence: Synthetic oligonucleotide
ccuguagacgcuccagcaa

SEQ ID NO: 2265383 - RNA, 19 nt, Artificial Sequence
  Description of Artificial Sequence: Synthetic oligonucleotide
cagcagacagcuccuuggu

SEQ ID NO: 2265384 - RNA, 19 nt, Artificial Sequence
  Description of Artificial Sequence: Synthetic oligonucleotide
gcgccgcuuguccuggcgc

SEQ ID NO: 2265385 - RNA, 19 nt, Artificial Sequence
  Description of Artificial Sequence: Synthetic oligonucleotide
guccugccgcgccuguaga

SEQ ID NO: 2265386 - RNA, 19 nt, Artificial Sequence
  Description of Artificial Sequence: Synthetic oligonucleotide
cugucgcaggaaauccagu

SEQ ID NO: 2265387 - RNA, 19 nt, Artificial Sequence
  Description of Artificial Sequence: Synthetic oligonucleotide
gcgcuucucccaccggcgc

SEQ ID NO: 2265388 - RNA, 19 nt, Artificial Sequence
  Description of Artificial Sequence: Synthetic oligonucleotide
agaggcccgcacgcuccag

SEQ ID NO: 2265389 - RNA, 19 nt, Artificial Sequence
  Description of Artificial Sequence: Synthetic oligonucleotide
uuccuacgcugggccuugc

SEQ ID NO: 2265390 - RNA, 19 nt, Artificial Sequence
  Description of Artificial Sequence: Synthetic oligonucleotide
ucacacccuccgccuugua

SEQ ID NO: 2265391 - RNA, 19 nt, Artificial Sequence
  Description of Artificial Sequence: Synthetic oligonucleotide
cuccgcugucuuuucucua

SEQ ID NO: 2265392 - RNA, 19 nt, Artificial Sequence
  Description of Artificial Sequence: Synthetic oligonucleotide
gcgccuguagacgcuccag

SEQ ID NO: 2265393 - RNA, 19 nt, Artificial Sequence
  Description of Artificial Sequence: Synthetic oligonucleotide
gccuguaauuccugccugu

SEQ ID NO: 2265394 - RNA, 19 nt, Artificial Sequence
  Description of Artificial Sequence: Synthetic oligonucleotide
ggcuaucuucaggggacuc

SEQ ID NO: 2265395 - RNA, 19 nt, Artificial Sequence
  Description of Artificial Sequence: Synthetic oligonucleotide
cucagcuggcuccucuuuu

SEQ ID NO: 2265396 - RNA, 19 nt, Artificial Sequence
  Description of Artificial Sequence: Synthetic oligonucleotide
agccgcugucgcaggaaau

SEQ ID NO: 2265397 - RNA, 19 nt, Artificial Sequence
  Description of Artificial Sequence: Synthetic oligonucleotide
cagccgccucucagcccgg

SEQ ID NO: 2265398 - RNA, 19 nt, Artificial Sequence
  Description of Artificial Sequence: Synthetic oligonucleotide
cuucagucacuuccaccuu

SEQ ID NO: 2265399 - RNA, 19 nt, Artificial Sequence
  Description of Artificial Sequence: Synthetic oligonucleotide
ucccaccggcgcugccgcu

SEQ ID NO: 2265400 - RNA, 19 nt, Artificial Sequence
  Description of Artificial Sequence: Synthetic oligonucleotide
gcccuagaagagggaggag

SEQ ID NO: 2265401 - RNA, 19 nt, Artificial Sequence
  Description of Artificial Sequence: Synthetic oligonucleotide
ccuuucaccuucugccgcu

SEQ ID NO: 2265402 - RNA, 19 nt, Artificial Sequence
  Description of Artificial Sequence: Synthetic oligonucleotide
gcgcucguugucacggauc

SEQ ID NO: 2265403 - RNA, 19 nt, Artificial Sequence
  Description of Artificial Sequence: Synthetic oligonucleotide
gccccgggccaguuggauc

SEQ ID NO: 2265404 - RNA, 19 nt, Artificial Sequence
  Description of Artificial Sequence: Synthetic oligonucleotide
ccccgggccaguuggaucu

SEQ ID NO: 2265405 - RNA, 19 nt, Artificial Sequence
  Description of Artificial Sequence: Synthetic oligonucleotide
ccguucccucuccugcuuc

SEQ ID NO: 2265406 - RNA, 19 nt, Artificial Sequence
  Description of Artificial Sequence: Synthetic oligonucleotide
gcccgcauccugaucucga

SEQ ID NO: 2265407 - RNA, 19 nt, Artificial Sequence
  Description of Artificial Sequence: Synthetic oligonucleotide
cgcugucgcaggaaaucca

SEQ ID NO: 2265408 - RNA, 19 nt, Artificial Sequence
  Description of Artificial Sequence: Synthetic oligonucleotide
ccuccgcugucuuuucucu

SEQ ID NO: 2265409 - RNA, 19 nt, Artificial Sequence
  Description of Artificial Sequence: Synthetic oligonucleotide
ccuugcccgcauccugauc

SEQ ID NO: 2265410 - RNA, 19 nt, Artificial Sequence
  Description of Artificial Sequence: Synthetic oligonucleotide
gcugugacuuggcuaucuu

SEQ ID NO: 2265411 - RNA, 19 nt, Artificial Sequence
  Description of Artificial Sequence: Synthetic oligonucleotide
cgagcgcuucucccaccgg

SEQ ID NO: 2265412 - RNA, 19 nt, Artificial Sequence
  Description of Artificial Sequence: Synthetic oligonucleotide
ggcccgcacgcuccagguc

SEQ ID NO: 2265413 - RNA, 19 nt, Artificial Sequence
  Description of Artificial Sequence: Synthetic oligonucleotide
cccgcauccugaucucgaa

SEQ ID NO: 2265414 - RNA, 19 nt, Artificial Sequence
  Description of Artificial Sequence: Synthetic oligonucleotide
ccuggccccgggccaguug

SEQ ID NO: 2265415 - RNA, 19 nt, Artificial Sequence
  Description of Artificial Sequence: Synthetic oligonucleotide
cccaccggcgcugccgcug

SEQ ID NO: 2265416 - RNA, 19 nt, Artificial Sequence
  Description of Artificial Sequence: Synthetic oligonucleotide
cccggcccuucuugcgggc

SEQ ID NO: 2265417 - RNA, 19 nt, Artificial Sequence
  Description of Artificial Sequence: Synthetic oligonucleotide
ggcgcucguugucacggau

SEQ ID NO: 2265418 - RNA, 19 nt, Artificial Sequence
  Description of Artificial Sequence: Synthetic oligonucleotide
caggagaggcccgcacgcu

SEQ ID NO: 2265419 - RNA, 19 nt, Artificial Sequence
  Description of Artificial Sequence: Synthetic oligonucleotide
ccggcccuucuugcgggcc

SEQ ID NO: 2265420 - RNA, 19 nt, Artificial Sequence
  Description of Artificial Sequence: Synthetic oligonucleotide
gccgcgccuguagacgcuc

SEQ ID NO: 2265421 - RNA, 19 nt, Artificial Sequence
  Description of Artificial Sequence: Synthetic oligonucleotide
gcgcagguucuggcgccgc

SEQ ID NO: 2265422 - RNA, 19 nt, Artificial Sequence
  Description of Artificial Sequence: Synthetic oligonucleotide
gccuugcccgcauccugau

SEQ ID NO: 2265423 - RNA, 19 nt, Artificial Sequence
  Description of Artificial Sequence: Synthetic oligonucleotide
cgcgccuguagacgcucca

SEQ ID NO: 2265424 - RNA, 19 nt, Artificial Sequence
  Description of Artificial Sequence: Synthetic oligonucleotide
ccuuccuacgcugggccuu

SEQ ID NO: 2265425 - RNA, 19 nt, Artificial Sequence
  Description of Artificial Sequence: Synthetic oligonucleotide
ccgccuuguacagcaaguu

SEQ ID NO: 2265426 - RNA, 19 nt, Artificial Sequence
  Description of Artificial Sequence: Synthetic oligonucleotide
cgccgcuuguccuggcgcu

SEQ ID NO: 2265427 - RNA, 19 nt, Artificial Sequence
  Description of Artificial Sequence: Synthetic oligonucleotide
ccacaugcuccgagcgcuu

SEQ ID NO: 2265428 - RNA, 19 nt, Artificial Sequence
  Description of Artificial Sequence: Synthetic oligonucleotide
ccgucuucacuaggggcuu

SEQ ID NO: 2265429 - RNA, 19 nt, Artificial Sequence
  Description of Artificial Sequence: Synthetic oligonucleotide
gcucguugucacggaucuu

SEQ ID NO: 2265430 - RNA, 19 nt, Artificial Sequence
  Description of Artificial Sequence: Synthetic oligonucleotide
cggcuccuugcagggcacu

SEQ ID NO: 2265431 - RNA, 19 nt, Artificial Sequence
  Description of Artificial Sequence: Synthetic oligonucleotide
ucuuaaaggauccagccgg

SEQ ID NO: 2265432 - RNA, 19 nt, Artificial Sequence
  Description of Artificial Sequence: Synthetic oligonucleotide
aauaaugggcacauuaggc

SEQ ID NO: 2265433 - RNA, 19 nt, Artificial Sequence
  Description of Artificial Sequence: Synthetic oligonucleotide
aaaggcucugcccugacac

SEQ ID NO: 2265434 - RNA, 19 nt, Artificial Sequence
  Description of Artificial Sequence: Synthetic oligonucleotide
aaagcgaccagccugccug

SEQ ID NO: 2265435 - RNA, 19 nt, Artificial Sequence
  Description of Artificial Sequence: Synthetic oligonucleotide
aagucuugagcccuuaugu

SEQ ID NO: 2265436 - RNA, 19 nt, Artificial Sequence
  Description of Artificial Sequence: Synthetic oligonucleotide
gaucuuaaaggauccagcc

SEQ ID NO: 2265437 - RNA, 19 nt, Artificial Sequence
  Description of Artificial Sequence: Synthetic oligonucleotide
uauacagcagccagggcgg

SEQ ID NO: 2265438 - RNA, 19 nt, Artificial Sequence
  Description of Artificial Sequence: Synthetic oligonucleotide
ucuugagcccuuauguugg

SEQ ID NO: 2265439 - RNA, 19 nt, Artificial Sequence
  Description of Artificial Sequence: Synthetic oligonucleotide
uccaauaagggcgugaccc

SEQ ID NO: 2265440 - RNA, 19 nt, Artificial Sequence
  Description of Artificial Sequence: Synthetic oligonucleotide
ggugauaucuggcaaagcg

SEQ ID NO: 2265441 - RNA, 19 nt, Artificial Sequence
  Description of Artificial Sequence: Synthetic oligonucleotide
gagacauucacccagccca

SEQ ID NO: 2265442 - RNA, 19 nt, Artificial Sequence
  Description of Artificial Sequence: Synthetic oligonucleotide
auauuugaggaagacgggc

SEQ ID NO: 2265443 - RNA, 19 nt, Artificial Sequence
  Description of Artificial Sequence: Synthetic oligonucleotide
ugauaucuggcaaagcgac

SEQ ID NO: 2265444 - RNA, 19 nt, Artificial Sequence
  Description of Artificial Sequence: Synthetic oligonucleotide
ugaguauacagcagccagg

SEQ ID NO: 2265445 - RNA, 19 nt, Artificial Sequence
  Description of Artificial Sequence: Synthetic oligonucleotide
cuucggguggccaugaagg

SEQ ID NO: 2265446 - RNA, 19 nt, Artificial Sequence
  Description of Artificial Sequence: Synthetic oligonucleotide
ugacagaaauguccgaugc

SEQ ID NO: 2265447 - RNA, 19 nt, Artificial Sequence
  Description of Artificial Sequence: Synthetic oligonucleotide
gagaacgaugguaacaggg

SEQ ID NO: 2265448 - RNA, 19 nt, Artificial Sequence
  Description of Artificial Sequence: Synthetic oligonucleotide
cuuauguuggcuucauccc

SEQ ID NO: 2265449 - RNA, 19 nt, Artificial Sequence
  Description of Artificial Sequence: Synthetic oligonucleotide
cagcucuccaauaagggcg

SEQ ID NO: 2265450 - RNA, 19 nt, Artificial Sequence
  Description of Artificial Sequence: Synthetic oligonucleotide
aucuuaaaggauccagccg

SEQ ID NO: 2265451 - RNA, 19 nt, Artificial Sequence
  Description of Artificial Sequence: Synthetic oligonucleotide
gaugccugaguauacagca

SEQ ID NO: 2265452 - RNA, 19 nt, Artificial Sequence
  Description of Artificial Sequence: Synthetic oligonucleotide
guugccaccacacacgaug

SEQ ID NO: 2265453 - RNA, 19 nt, Artificial Sequence
  Description of Artificial Sequence: Synthetic oligonucleotide
aaauggggagacauucacc

SEQ ID NO: 2265454 - RNA, 19 nt, Artificial Sequence
  Description of Artificial Sequence: Synthetic oligonucleotide
acaccagaugccugcaucc

SEQ ID NO: 2265455 - RNA, 19 nt, Artificial Sequence
  Description of Artificial Sequence: Synthetic oligonucleotide
ucugggagaacgaugguaa

SEQ ID NO: 2265456 - RNA, 19 nt, Artificial Sequence
  Description of Artificial Sequence: Synthetic oligonucleotide
gaguauacagcagccaggg

SEQ ID NO: 2265457 - RNA, 19 nt, Artificial Sequence
  Description of Artificial Sequence: Synthetic oligonucleotide
accgucuuggcucccaggc

SEQ ID NO: 2265458 - RNA, 19 nt, Artificial Sequence
  Description of Artificial Sequence: Synthetic oligonucleotide
uuauguuggcuucauccca

SEQ ID NO: 2265459 - RNA, 19 nt, Artificial Sequence
  Description of Artificial Sequence: Synthetic oligonucleotide
aagggcgugacccugugga

SEQ ID NO: 2265460 - RNA, 19 nt, Artificial Sequence
  Description of Artificial Sequence: Synthetic oligonucleotide
uggggagacauucacccag

SEQ ID NO: 2265461 - RNA, 19 nt, Artificial Sequence
  Description of Artificial Sequence: Synthetic oligonucleotide
uucgcacacuccaaggucc

SEQ ID NO: 2265462 - RNA, 19 nt, Artificial Sequence
  Description of Artificial Sequence: Synthetic oligonucleotide
acauuaggcuggcauggcc

SEQ ID NO: 2265463 - RNA, 19 nt, Artificial Sequence
  Description of Artificial Sequence: Synthetic oligonucleotide
agaaauguccgaugccccg

SEQ ID NO: 2265464 - RNA, 19 nt, Artificial Sequence
  Description of Artificial Sequence: Synthetic oligonucleotide
ucuggcaaagcgaccagcc

SEQ ID NO: 2265465 - RNA, 19 nt, Artificial Sequence
  Description of Artificial Sequence: Synthetic oligonucleotide
aguaccucacacuccuucg

SEQ ID NO: 2265466 - RNA, 19 nt, Artificial Sequence
  Description of Artificial Sequence: Synthetic oligonucleotide
cugaguauacagcagccag

SEQ ID NO: 2265467 - RNA, 19 nt, Artificial Sequence
  Description of Artificial Sequence: Synthetic oligonucleotide
cauauuugaggaagacggg

SEQ ID NO: 2265468 - RNA, 19 nt, Artificial Sequence
  Description of Artificial Sequence: Synthetic oligonucleotide
ccuuauguuggcuucaucc

SEQ ID NO: 2265469 - RNA, 19 nt, Artificial Sequence
  Description of Artificial Sequence: Synthetic oligonucleotide
caggggauggucaaauggg

SEQ ID NO: 2265470 - RNA, 19 nt, Artificial Sequence
  Description of Artificial Sequence: Synthetic oligonucleotide
uaaaggauccagccggcug

SEQ ID NO: 2265471 - RNA, 19 nt, Artificial Sequence
  Description of Artificial Sequence: Synthetic oligonucleotide
gaugccccggaucuuaaag

SEQ ID NO: 2265472 - RNA, 19 nt, Artificial Sequence
  Description of Artificial Sequence: Synthetic oligonucleotide
uaugcggcugcaaugccug

SEQ ID NO: 2265473 - RNA, 19 nt, Artificial Sequence
  Description of Artificial Sequence: Synthetic oligonucleotide
uguccgaugccccggaucu

SEQ ID NO: 2265474 - RNA, 19 nt, Artificial Sequence
  Description of Artificial Sequence: Synthetic oligonucleotide
cucugcacagcucucacag

SEQ ID NO: 2265475 - RNA, 19 nt, Artificial Sequence
  Description of Artificial Sequence: Synthetic oligonucleotide
guuguugccaccacacacg

SEQ ID NO: 2265476 - RNA, 19 nt, Artificial Sequence
  Description of Artificial Sequence: Synthetic oligonucleotide
ucaaauggggagacauuca

SEQ ID NO: 2265477 - RNA, 19 nt, Artificial Sequence
  Description of Artificial Sequence: Synthetic oligonucleotide
acacacgaugaccacaaug

SEQ ID NO: 2265478 - RNA, 19 nt, Artificial Sequence
  Description of Artificial Sequence: Synthetic oligonucleotide
guuggcuucaucccagacc

SEQ ID NO: 2265479 - RNA, 19 nt, Artificial Sequence
  Description of Artificial Sequence: Synthetic oligonucleotide
agcuguuggcuacugaugu

SEQ ID NO: 2265480 - RNA, 19 nt, Artificial Sequence
  Description of Artificial Sequence: Synthetic oligonucleotide
uggaacugaggccccuucg

SEQ ID NO: 2265481 - RNA, 19 nt, Artificial Sequence
  Description of Artificial Sequence: Synthetic oligonucleotide
auaucuggcaaagcgacca

SEQ ID NO: 2265482 - RNA, 19 nt, Artificial Sequence
  Description of Artificial Sequence: Synthetic oligonucleotide
uuccgagccgaguaugcgg

SEQ ID NO: 2265483 - RNA, 19 nt, Artificial Sequence
  Description of Artificial Sequence: Synthetic oligonucleotide
accagaugccugcaucccc

SEQ ID NO: 2265484 - RNA, 19 nt, Artificial Sequence
  Description of Artificial Sequence: Synthetic oligonucleotide
cuugggagcccucagcuac

SEQ ID NO: 2265485 - RNA, 19 nt, Artificial Sequence
  Description of Artificial Sequence: Synthetic oligonucleotide
caaauggggagacauucac

SEQ ID NO: 2265486 - RNA, 19 nt, Artificial Sequence
  Description of Artificial Sequence: Synthetic oligonucleotide
cagagaguaccucacacuc

SEQ ID NO: 2265487 - RNA, 19 nt, Artificial Sequence
  Description of Artificial Sequence: Synthetic oligonucleotide
ugauguuguugccaccaca

SEQ ID NO: 2265488 - RNA, 19 nt, Artificial Sequence
  Description of Artificial Sequence: Synthetic oligonucleotide
gaagcugugugccccucgg

SEQ ID NO: 2265489 - RNA, 19 nt, Artificial Sequence
  Description of Artificial Sequence: Synthetic oligonucleotide
auuaggcuggcauggccuc

SEQ ID NO: 2265490 - RNA, 19 nt, Artificial Sequence
  Description of Artificial Sequence: Synthetic oligonucleotide
uccuucgcacacuccaagg

SEQ ID NO: 2265491 - RNA, 19 nt, Artificial Sequence
  Description of Artificial Sequence: Synthetic oligonucleotide
aguaugcggcugcaaugcc

SEQ ID NO: 2265492 - RNA, 19 nt, Artificial Sequence
  Description of Artificial Sequence: Synthetic oligonucleotide
aguauacagcagccagggc

SEQ ID NO: 2265493 - RNA, 19 nt, Artificial Sequence
  Description of Artificial Sequence: Synthetic oligonucleotide
gaguaugcggcugcaaugc

SEQ ID NO: 2265494 - RNA, 19 nt, Artificial Sequence
  Description of Artificial Sequence: Synthetic oligonucleotide
cuuaaaggauccagccggc

SEQ ID NO: 2265495 - RNA, 19 nt, Artificial Sequence
  Description of Artificial Sequence: Synthetic oligonucleotide
gaaauguccgaugccccgg

SEQ ID NO: 2265496 - RNA, 19 nt, Artificial Sequence
  Description of Artificial Sequence: Synthetic oligonucleotide
aacugaggccccuucgggu

SEQ ID NO: 2265497 - RNA, 19 nt, Artificial Sequence
  Description of Artificial Sequence: Synthetic oligonucleotide
ugaagcugugugccccucg

SEQ ID NO: 2265498 - RNA, 19 nt, Artificial Sequence
  Description of Artificial Sequence: Synthetic oligonucleotide
uccgagccgaguaugcggc

SEQ ID NO: 2265499 - RNA, 19 nt, Artificial Sequence
  Description of Artificial Sequence: Synthetic oligonucleotide
agagaguaccucacacucc

SEQ ID NO: 2265500 - RNA, 19 nt, Artificial Sequence
  Description of Artificial Sequence: Synthetic oligonucleotide
cauggccucccauaucagg

SEQ ID NO: 2265501 - RNA, 19 nt, Artificial Sequence
  Description of Artificial Sequence: Synthetic oligonucleotide
cagaaauguccgaugcccc

SEQ ID NO: 2265502 - RNA, 19 nt, Artificial Sequence
  Description of Artificial Sequence: Synthetic oligonucleotide
gaugcccagcuuccgagcc

SEQ ID NO: 2265503 - RNA, 19 nt, Artificial Sequence
  Description of Artificial Sequence: Synthetic oligonucleotide
aagcgaccagccugccugc

SEQ ID NO: 2265504 - RNA, 19 nt, Artificial Sequence
  Description of Artificial Sequence: Synthetic oligonucleotide
gucaaauggggagacauuc

SEQ ID NO: 2265505 - RNA, 19 nt, Artificial Sequence
  Description of Artificial Sequence: Synthetic oligonucleotide
cuuguggccaagucuugag

SEQ ID NO: 2265506 - RNA, 19 nt, Artificial Sequence
  Description of Artificial Sequence: Synthetic oligonucleotide
ugcauggaaguguucucug

SEQ ID NO: 2265507 - RNA, 19 nt, Artificial Sequence
  Description of Artificial Sequence: Synthetic oligonucleotide
ugcccugacacgcuccacc

SEQ ID NO: 2265508 - RNA, 19 nt, Artificial Sequence
  Description of Artificial Sequence: Synthetic oligonucleotide
ucccuuguggccaagucuu

SEQ ID NO: 2265509 - RNA, 19 nt, Artificial Sequence
  Description of Artificial Sequence: Synthetic oligonucleotide
augaccacaauggaagcca

SEQ ID NO: 2265510 - RNA, 19 nt, Artificial Sequence
  Description of Artificial Sequence: Synthetic oligonucleotide
accucacacuccuucgcac

SEQ ID NO: 2265511 - RNA, 19 nt, Artificial Sequence
  Description of Artificial Sequence: Synthetic oligonucleotide
acacuggugauaucuggca

SEQ ID NO: 2265512 - RNA, 19 nt, Artificial Sequence
  Description of Artificial Sequence: Synthetic oligonucleotide
uggagccuccccaggaugc

SEQ ID NO: 2265513 - RNA, 19 nt, Artificial Sequence
  Description of Artificial Sequence: Synthetic oligonucleotide
ucuccaauaagggcgugac

SEQ ID NO: 2265514 - RNA, 19 nt, Artificial Sequence
  Description of Artificial Sequence: Synthetic oligonucleotide
ugccccggaucuuaaagga

SEQ ID NO: 2265515 - RNA, 19 nt, Artificial Sequence
  Description of Artificial Sequence: Synthetic oligonucleotide
aagggguccgaggagccuc

SEQ ID NO: 2265516 - RNA, 19 nt, Artificial Sequence
  Description of Artificial Sequence: Synthetic oligonucleotide
ugccacccgagacagugcc

SEQ ID NO: 2265517 - RNA, 19 nt, Artificial Sequence
  Description of Artificial Sequence: Synthetic oligonucleotide
uggucaaauggggagacau

SEQ ID NO: 2265518 - RNA, 19 nt, Artificial Sequence
  Description of Artificial Sequence: Synthetic oligonucleotide
gaguaccucacacuccuuc

SEQ ID NO: 2265519 - RNA, 19 nt, Artificial Sequence
  Description of Artificial Sequence: Synthetic oligonucleotide
ugacccuguggaaaggcuc

SEQ ID NO: 2265520 - RNA, 19 nt, Artificial Sequence
  Description of Artificial Sequence: Synthetic oligonucleotide
uaucuggcaaagcgaccag

SEQ ID NO: 2265521 - RNA, 19 nt, Artificial Sequence
  Description of Artificial Sequence: Synthetic oligonucleotide
uguuggcuacugauguugu

SEQ ID NO: 2265522 - RNA, 19 nt, Artificial Sequence
  Description of Artificial Sequence: Synthetic oligonucleotide
aaauguccgaugccccgga

SEQ ID NO: 2265523 - RNA, 19 nt, Artificial Sequence
  Description of Artificial Sequence: Synthetic oligonucleotide
acagggaugcccagcuucc

SEQ ID NO: 2265524 - RNA, 19 nt, Artificial Sequence
  Description of Artificial Sequence: Synthetic oligonucleotide
aucccagaccuucccaguc

SEQ ID NO: 2265525 - RNA, 19 nt, Artificial Sequence
  Description of Artificial Sequence: Synthetic oligonucleotide
aucccuuguggccaagucu

SEQ ID NO: 2265526 - RNA, 19 nt, Artificial Sequence
  Description of Artificial Sequence: Synthetic oligonucleotide
auuugaggaagacgggcau

SEQ ID NO: 2265527 - RNA, 19 nt, Artificial Sequence
  Description of Artificial Sequence: Synthetic oligonucleotide
aagacgggcaugccugcca

SEQ ID NO: 2265528 - RNA, 19 nt, Artificial Sequence
  Description of Artificial Sequence: Synthetic oligonucleotide
agaacgaugguaacaggga

SEQ ID NO: 2265529 - RNA, 19 nt, Artificial Sequence
  Description of Artificial Sequence: Synthetic oligonucleotide
gcaauaaugggcacauuag

SEQ ID NO: 2265530 - RNA, 19 nt, Artificial Sequence
  Description of Artificial Sequence: Synthetic oligonucleotide
cuggguuuucagcuccugg

SEQ ID NO: 2265531 - RNA, 19 nt, Artificial Sequence
  Description of Artificial Sequence: Synthetic oligonucleotide
ggaacugaggccccuucgg

SEQ ID NO: 2265532 - RNA, 19 nt, Artificial Sequence
  Description of Artificial Sequence: Synthetic oligonucleotide
gauggucaaauggggagac

SEQ ID NO: 2265533 - RNA, 19 nt, Artificial Sequence
  Description of Artificial Sequence: Synthetic oligonucleotide
aucuggcaaagcgaccagc

SEQ ID NO: 2265534 - RNA, 19 nt, Artificial Sequence
  Description of Artificial Sequence: Synthetic oligonucleotide
auguccgaugccccggauc

SEQ ID NO: 2265535 - RNA, 19 nt, Artificial Sequence
  Description of Artificial Sequence: Synthetic oligonucleotide
aagcugugugccccucggg

SEQ ID NO: 2265536 - RNA, 19 nt, Artificial Sequence
  Description of Artificial Sequence: Synthetic oligonucleotide
ucgcacacuccaagguccg

SEQ ID NO: 2265537 - RNA, 19 nt, Artificial Sequence
  Description of Artificial Sequence: Synthetic oligonucleotide
ugacacgcuccaccaaggc

SEQ ID NO: 2265538 - RNA, 19 nt, Artificial Sequence
  Description of Artificial Sequence: Synthetic oligonucleotide
gauaucuggcaaagcgacc

SEQ ID NO: 2265539 - RNA, 19 nt, Artificial Sequence
  Description of Artificial Sequence: Synthetic oligonucleotide
agacgggcaugccugccac

SEQ ID NO: 2265540 - RNA, 19 nt, Artificial Sequence
  Description of Artificial Sequence: Synthetic oligonucleotide
cugacacgcuccaccaagg

SEQ ID NO: 2265541 - RNA, 19 nt, Artificial Sequence
  Description of Artificial Sequence: Synthetic oligonucleotide
acgggcaugccugccaccc

SEQ ID NO: 2265542 - RNA, 19 nt, Artificial Sequence
  Description of Artificial Sequence: Synthetic oligonucleotide
uaagggcgugacccugugg

SEQ ID NO: 2265543 - RNA, 19 nt, Artificial Sequence
  Description of Artificial Sequence: Synthetic oligonucleotide
aauggaagccagggccggg

SEQ ID NO: 2265544 - RNA, 19 nt, Artificial Sequence
  Description of Artificial Sequence: Synthetic oligonucleotide
cacacuccaagguccgugc

SEQ ID NO: 2265545 - RNA, 19 nt, Artificial Sequence
  Description of Artificial Sequence: Synthetic oligonucleotide
ggaucuuaaaggauccagc

SEQ ID NO: 2265546 - RNA, 19 nt, Artificial Sequence
  Description of Artificial Sequence: Synthetic oligonucleotide
accugcauggaaguguucu

SEQ ID NO: 2265547 - RNA, 19 nt, Artificial Sequence
  Description of Artificial Sequence: Synthetic oligonucleotide
cuucccagucagcuggacc

SEQ ID NO: 2265548 - RNA, 19 nt, Artificial Sequence
  Description of Artificial Sequence: Synthetic oligonucleotide
ugcagcgaccgucuuggcu

SEQ ID NO: 2265549 - RNA, 19 nt, Artificial Sequence
  Description of Artificial Sequence: Synthetic oligonucleotide
cuggugauaucuggcaaag

SEQ ID NO: 2265550 - RNA, 19 nt, Artificial Sequence
  Description of Artificial Sequence: Synthetic oligonucleotide
cuucgcacacuccaagguc

SEQ ID NO: 2265551 - RNA, 19 nt, Artificial Sequence
  Description of Artificial Sequence: Synthetic oligonucleotide
aauaagggcgugacccugu

SEQ ID NO: 2265552 - RNA, 19 nt, Artificial Sequence
  Description of Artificial Sequence: Synthetic oligonucleotide
ggcaauaaugggcacauua

SEQ ID NO: 2265553 - RNA, 19 nt, Artificial Sequence
  Description of Artificial Sequence: Synthetic oligonucleotide
ugagcccuuauguuggcuu

SEQ ID NO: 2265554 - RNA, 19 nt, Artificial Sequence
  Description of Artificial Sequence: Synthetic oligonucleotide
uguuggcuucaucccagac

SEQ ID NO: 2265555 - RNA, 19 nt, Artificial Sequence
  Description of Artificial Sequence: Synthetic oligonucleotide
agggcggccccacaggcag

SEQ ID NO: 2265556 - RNA, 19 nt, Artificial Sequence
  Description of Artificial Sequence: Synthetic oligonucleotide
cauucacccagcccauccc

SEQ ID NO: 2265557 - RNA, 19 nt, Artificial Sequence
  Description of Artificial Sequence: Synthetic oligonucleotide
aagguccgugcagcgaccg

SEQ ID NO: 2265558 - RNA, 19 nt, Artificial Sequence
  Description of Artificial Sequence: Synthetic oligonucleotide
auucacccagcccaucccu

SEQ ID NO: 2265559 - RNA, 19 nt, Artificial Sequence
  Description of Artificial Sequence: Synthetic oligonucleotide
gguuuucagcuccuggagc

SEQ ID NO: 2265560 - RNA, 19 nt, Artificial Sequence
  Description of Artificial Sequence: Synthetic oligonucleotide
uaucaggggauggucaaau

SEQ ID NO: 2265561 - RNA, 19 nt, Artificial Sequence
  Description of Artificial Sequence: Synthetic oligonucleotide
accucagagaguaccucac

SEQ ID NO: 2265562 - RNA, 19 nt, Artificial Sequence
  Description of Artificial Sequence: Synthetic oligonucleotide
gugauaucuggcaaagcga

SEQ ID NO: 2265563 - RNA, 19 nt, Artificial Sequence
  Description of Artificial Sequence: Synthetic oligonucleotide
ggcacauuaggcuggcaug

SEQ ID NO: 2265564 - RNA, 19 nt, Artificial Sequence
  Description of Artificial Sequence: Synthetic oligonucleotide
agucuugagcccuuauguu

SEQ ID NO: 2265565 - RNA, 19 nt, Artificial Sequence
  Description of Artificial Sequence: Synthetic oligonucleotide
gcacauuaggcuggcaugg

SEQ ID NO: 2265566 - RNA, 19 nt, Artificial Sequence
  Description of Artificial Sequence: Synthetic oligonucleotide
guggccaagucuugagccc

SEQ ID NO: 2265567 - RNA, 19 nt, Artificial Sequence
  Description of Artificial Sequence: Synthetic oligonucleotide
ggcauggccucccauauca

SEQ ID NO: 2265568 - RNA, 19 nt, Artificial Sequence
  Description of Artificial Sequence: Synthetic oligonucleotide
accaccugcauggaagugu

SEQ ID NO: 2265569 - RNA, 19 nt, Artificial Sequence
  Description of Artificial Sequence: Synthetic oligonucleotide
ggguuuucagcuccuggag

SEQ ID NO: 2265570 - RNA, 19 nt, Artificial Sequence
  Description of Artificial Sequence: Synthetic oligonucleotide
caccaccucagagaguacc

SEQ ID NO: 2265571 - RNA, 19 nt, Artificial Sequence
  Description of Artificial Sequence: Synthetic oligonucleotide
agaccuucccagucagcug

SEQ ID NO: 2265572 - RNA, 19 nt, Artificial Sequence
  Description of Artificial Sequence: Synthetic oligonucleotide
aaggccgcguugaagcugu

SEQ ID NO: 2265573 - RNA, 19 nt, Artificial Sequence
  Description of Artificial Sequence: Synthetic oligonucleotide
ggagacauucacccagccc

SEQ ID NO: 2265574 - RNA, 19 nt, Artificial Sequence
  Description of Artificial Sequence: Synthetic oligonucleotide
cucacacuccuucgcacac

SEQ ID NO: 2265575 - RNA, 19 nt, Artificial Sequence
  Description of Artificial Sequence: Synthetic oligonucleotide
gagcuguuggcuacugaug

SEQ ID NO: 2265576 - RNA, 19 nt, Artificial Sequence
  Description of Artificial Sequence: Synthetic oligonucleotide
aaaccucugcacagcucuc

SEQ ID NO: 2265577 - RNA, 19 nt, Artificial Sequence
  Description of Artificial Sequence: Synthetic oligonucleotide
auaagggcgugacccugug

SEQ ID NO: 2265578 - RNA, 19 nt, Artificial Sequence
  Description of Artificial Sequence: Synthetic oligonucleotide
cauaucaggggauggucaa

SEQ ID NO: 2265579 - RNA, 19 nt, Artificial Sequence
  Description of Artificial Sequence: Synthetic oligonucleotide
cuccuucgcacacuccaag

SEQ ID NO: 2265580 - RNA, 19 nt, Artificial Sequence
  Description of Artificial Sequence: Synthetic oligonucleotide
gcagcgaccgucuuggcuc

SEQ ID NO: 2265581 - RNA, 19 nt, Artificial Sequence
  Description of Artificial Sequence: Synthetic oligonucleotide
guucucugggagaacgaug

SEQ ID NO: 2265582 - RNA, 19 nt, Artificial Sequence
  Description of Artificial Sequence: Synthetic oligonucleotide
gaccacaauggaagccagg

SEQ ID NO: 2265583 - RNA, 19 nt, Artificial Sequence
  Description of Artificial Sequence: Synthetic oligonucleotide
ggagaacgaugguaacagg

SEQ ID NO: 2265584 - RNA, 19 nt, Artificial Sequence
  Description of Artificial Sequence: Synthetic oligonucleotide
cuuccgagccgaguaugcg

SEQ ID NO: 2265585 - RNA, 19 nt, Artificial Sequence
  Description of Artificial Sequence: Synthetic oligonucleotide
cuugagcccuuauguuggc

SEQ ID NO: 2265586 - RNA, 19 nt, Artificial Sequence
  Description of Artificial Sequence: Synthetic oligonucleotide
gagccgaguaugcggcugc

SEQ ID NO: 2265587 - RNA, 19 nt, Artificial Sequence
  Description of Artificial Sequence: Synthetic oligonucleotide
caucauccagaaaccucug

SEQ ID NO: 2265588 - RNA, 19 nt, Artificial Sequence
  Description of Artificial Sequence: Synthetic oligonucleotide
gaccgucuuggcucccagg

SEQ ID NO: 2265589 - RNA, 19 nt, Artificial Sequence
  Description of Artificial Sequence: Synthetic oligonucleotide
gagcccuuauguuggcuuc

SEQ ID NO: 2265590 - RNA, 19 nt, Artificial Sequence
  Description of Artificial Sequence: Synthetic oligonucleotide
ugguaacagggaugcccag

SEQ ID NO: 2265591 - RNA, 19 nt, Artificial Sequence
  Description of Artificial Sequence: Synthetic oligonucleotide
caauggaagccagggccgg

SEQ ID NO: 2265592 - RNA, 19 nt, Artificial Sequence
  Description of Artificial Sequence: Synthetic oligonucleotide
augcccagcuuccgagccg

SEQ ID NO: 2265593 - RNA, 19 nt, Artificial Sequence
  Description of Artificial Sequence: Synthetic oligonucleotide
aggcuccaccagcaugcgc

SEQ ID NO: 2265594 - RNA, 19 nt, Artificial Sequence
  Description of Artificial Sequence: Synthetic oligonucleotide
cuccaagguccgugcagcg

SEQ ID NO: 2265595 - RNA, 19 nt, Artificial Sequence
  Description of Artificial Sequence: Synthetic oligonucleotide
ucccauaucaggggauggu

SEQ ID NO: 2265596 - RNA, 19 nt, Artificial Sequence
  Description of Artificial Sequence: Synthetic oligonucleotide
gaacgaugguaacagggau

SEQ ID NO: 2265597 - RNA, 19 nt, Artificial Sequence
  Description of Artificial Sequence: Synthetic oligonucleotide
uggagcuguuggcuacuga

SEQ ID NO: 2265598 - RNA, 19 nt, Artificial Sequence
  Description of Artificial Sequence: Synthetic oligonucleotide
augggcacauuaggcuggc

SEQ ID NO: 2265599 - RNA, 19 nt, Artificial Sequence
  Description of Artificial Sequence: Synthetic oligonucleotide
ggaaguguucucugggaga

SEQ ID NO: 2265600 - RNA, 19 nt, Artificial Sequence
  Description of Artificial Sequence: Synthetic oligonucleotide
cucucuggaguccuuggga

SEQ ID NO: 2265601 - RNA, 19 nt, Artificial Sequence
  Description of Artificial Sequence: Synthetic oligonucleotide
uccagccggcuguacauuc

SEQ ID NO: 2265602 - RNA, 19 nt, Artificial Sequence
  Description of Artificial Sequence: Synthetic oligonucleotide
ggcgugacccuguggaaag

SEQ ID NO: 2265603 - RNA, 19 nt, Artificial Sequence
  Description of Artificial Sequence: Synthetic oligonucleotide
gaaaggcucugcccugaca

SEQ ID NO: 2265604 - RNA, 19 nt, Artificial Sequence
  Description of Artificial Sequence: Synthetic oligonucleotide
cacagcucucacagccucc

SEQ ID NO: 2265605 - RNA, 19 nt, Artificial Sequence
  Description of Artificial Sequence: Synthetic oligonucleotide
cucccauaucaggggaugg

SEQ ID NO: 2265606 - RNA, 19 nt, Artificial Sequence
  Description of Artificial Sequence: Synthetic oligonucleotide
gguccgaggagccucucug

SEQ ID NO: 2265607 - RNA, 19 nt, Artificial Sequence
  Description of Artificial Sequence: Synthetic oligonucleotide
gccgcguugaagcugugug

SEQ ID NO: 2265608 - RNA, 19 nt, Artificial Sequence
  Description of Artificial Sequence: Synthetic oligonucleotide
uggccaagucuugagcccu

SEQ ID NO: 2265609 - RNA, 19 nt, Artificial Sequence
  Description of Artificial Sequence: Synthetic oligonucleotide
guggaaaggcucugcccug

SEQ ID NO: 2265610 - RNA, 19 nt, Artificial Sequence
  Description of Artificial Sequence: Synthetic oligonucleotide
cauuaggcuggcauggccu

SEQ ID NO: 2265611 - RNA, 19 nt, Artificial Sequence
  Description of Artificial Sequence: Synthetic oligonucleotide
uggugauaucuggcaaagc

SEQ ID NO: 2265612 - RNA, 19 nt, Artificial Sequence
  Description of Artificial Sequence: Synthetic oligonucleotide
ccugacacgcuccaccaag

SEQ ID NO: 2265613 - RNA, 19 nt, Artificial Sequence
  Description of Artificial Sequence: Synthetic oligonucleotide
cugggagaacgaugguaac

SEQ ID NO: 2265614 - RNA, 19 nt, Artificial Sequence
  Description of Artificial Sequence: Synthetic oligonucleotide
aauguccgaugccccggau

SEQ ID NO: 2265615 - RNA, 19 nt, Artificial Sequence
  Description of Artificial Sequence: Synthetic oligonucleotide
accacacacgaugaccaca

SEQ ID NO: 2265616 - RNA, 19 nt, Artificial Sequence
  Description of Artificial Sequence: Synthetic oligonucleotide
uggaaaggcucugcccuga

SEQ ID NO: 2265617 - RNA, 19 nt, Artificial Sequence
  Description of Artificial Sequence: Synthetic oligonucleotide
agggaugcccagcuuccga

SEQ ID NO: 2265618 - RNA, 19 nt, Artificial Sequence
  Description of Artificial Sequence: Synthetic oligonucleotide
ucccagccgccucaccacc

SEQ ID NO: 2265619 - RNA, 19 nt, Artificial Sequence
  Description of Artificial Sequence: Synthetic oligonucleotide
caucccuuguggccaaguc

SEQ ID NO: 2265620 - RNA, 19 nt, Artificial Sequence
  Description of Artificial Sequence: Synthetic oligonucleotide
cccggaucuuaaaggaucc

SEQ ID NO: 2265621 - RNA, 19 nt, Artificial Sequence
  Description of Artificial Sequence: Synthetic oligonucleotide
ggaugccugaguauacagc

SEQ ID NO: 2265622 - RNA, 19 nt, Artificial Sequence
  Description of Artificial Sequence: Synthetic oligonucleotide
caagguccgugcagcgacc

SEQ ID NO: 2265623 - RNA, 19 nt, Artificial Sequence
  Description of Artificial Sequence: Synthetic oligonucleotide
augcgcucaucauccagaa

SEQ ID NO: 2265624 - RNA, 19 nt, Artificial Sequence
  Description of Artificial Sequence: Synthetic oligonucleotide
agcccucagcuacagccca

SEQ ID NO: 2265625 - RNA, 19 nt, Artificial Sequence
  Description of Artificial Sequence: Synthetic oligonucleotide
uccaagguccgugcagcga

SEQ ID NO: 2265626 - RNA, 19 nt, Artificial Sequence
  Description of Artificial Sequence: Synthetic oligonucleotide
cuggagccuccccaggaug

SEQ ID NO: 2265627 - RNA, 19 nt, Artificial Sequence
  Description of Artificial Sequence: Synthetic oligonucleotide
gaagacgggcaugccugcc

SEQ ID NO: 2265628 - RNA, 19 nt, Artificial Sequence
  Description of Artificial Sequence: Synthetic oligonucleotide
agaugccugcauccccuca

SEQ ID NO: 2265629 - RNA, 19 nt, Artificial Sequence
  Description of Artificial Sequence: Synthetic oligonucleotide
agcccaucccuuguggcca

SEQ ID NO: 2265630 - RNA, 19 nt, Artificial Sequence
  Description of Artificial Sequence: Synthetic oligonucleotide
ccaagguccgugcagcgac

SEQ ID NO: 2265631 - RNA, 19 nt, Artificial Sequence
  Description of Artificial Sequence: Synthetic oligonucleotide
caggcggccuucagccugg

SEQ ID NO: 2265632 - RNA, 19 nt, Artificial Sequence
  Description of Artificial Sequence: Synthetic oligonucleotide
acacuccaagguccgugca

SEQ ID NO: 2265633 - RNA, 19 nt, Artificial Sequence
  Description of Artificial Sequence: Synthetic oligonucleotide
ugcccagcuuccgagccga

SEQ ID NO: 2265634 - RNA, 19 nt, Artificial Sequence
  Description of Artificial Sequence: Synthetic oligonucleotide
gcccagcucuccaauaagg

SEQ ID NO: 2265635 - RNA, 19 nt, Artificial Sequence
  Description of Artificial Sequence: Synthetic oligonucleotide
accaccucagagaguaccu

SEQ ID NO: 2265636 - RNA, 19 nt, Artificial Sequence
  Description of Artificial Sequence: Synthetic oligonucleotide
gagacagugcccagcucuc

SEQ ID NO: 2265637 - RNA, 19 nt, Artificial Sequence
  Description of Artificial Sequence: Synthetic oligonucleotide
cugcauccccucauggcca

SEQ ID NO: 2265638 - RNA, 19 nt, Artificial Sequence
  Description of Artificial Sequence: Synthetic oligonucleotide
uugagcccuuauguuggcu

SEQ ID NO: 2265639 - RNA, 19 nt, Artificial Sequence
  Description of Artificial Sequence: Synthetic oligonucleotide
ugcgcucaucauccagaaa

SEQ ID NO: 2265640 - RNA, 19 nt, Artificial Sequence
  Description of Artificial Sequence: Synthetic oligonucleotide
ccccggaucuuaaaggauc

SEQ ID NO: 2265641 - RNA, 19 nt, Artificial Sequence
  Description of Artificial Sequence: Synthetic oligonucleotide
cgugcagcgaccgucuugg

SEQ ID NO: 2265642 - RNA, 19 nt, Artificial Sequence
  Description of Artificial Sequence: Synthetic oligonucleotide
ucacacuccuucgcacacu

SEQ ID NO: 2265643 - RNA, 19 nt, Artificial Sequence
  Description of Artificial Sequence: Synthetic oligonucleotide
uguugccaccacacacgau

SEQ ID NO: 2265644 - RNA, 19 nt, Artificial Sequence
  Description of Artificial Sequence: Synthetic oligonucleotide
ggcuacacuggugauaucu

SEQ ID NO: 2265645 - RNA, 19 nt, Artificial Sequence
  Description of Artificial Sequence: Synthetic oligonucleotide
cagcgaccgucuuggcucc

SEQ ID NO: 2265646 - RNA, 19 nt, Artificial Sequence
  Description of Artificial Sequence: Synthetic oligonucleotide
caaggccgcguugaagcug

SEQ ID NO: 2265647 - RNA, 19 nt, Artificial Sequence
  Description of Artificial Sequence: Synthetic oligonucleotide
ggagcuguuggcuacugau

SEQ ID NO: 2265648 - RNA, 19 nt, Artificial Sequence
  Description of Artificial Sequence: Synthetic oligonucleotide
ccauaucaggggaugguca

SEQ ID NO: 2265649 - RNA, 19 nt, Artificial Sequence
  Description of Artificial Sequence: Synthetic oligonucleotide
cugccacccgagacagugc

SEQ ID NO: 2265650 - RNA, 19 nt, Artificial Sequence
  Description of Artificial Sequence: Synthetic oligonucleotide
ggcuacugauguuguugcc

SEQ ID NO: 2265651 - RNA, 19 nt, Artificial Sequence
  Description of Artificial Sequence: Synthetic oligonucleotide
gacgggcaugccugccacc

SEQ ID NO: 2265652 - RNA, 19 nt, Artificial Sequence
  Description of Artificial Sequence: Synthetic oligonucleotide
uggcauggccucccauauc

SEQ ID NO: 2265653 - RNA, 19 nt, Artificial Sequence
  Description of Artificial Sequence: Synthetic oligonucleotide
auaucaggggauggucaaa

SEQ ID NO: 2265654 - RNA, 19 nt, Artificial Sequence
  Description of Artificial Sequence: Synthetic oligonucleotide
ccuucggguggccaugaag

SEQ ID NO: 2265655 - RNA, 19 nt, Artificial Sequence
  Description of Artificial Sequence: Synthetic oligonucleotide
cggccuucagccuggagcc

SEQ ID NO: 2265656 - RNA, 19 nt, Artificial Sequence
  Description of Artificial Sequence: Synthetic oligonucleotide
ugccugcaaggccgcguug

SEQ ID NO: 2265657 - RNA, 19 nt, Artificial Sequence
  Description of Artificial Sequence: Synthetic oligonucleotide
gccugaguauacagcagcc

SEQ ID NO: 2265658 - RNA, 19 nt, Artificial Sequence
  Description of Artificial Sequence: Synthetic oligonucleotide
cgaguaugcggcugcaaug

SEQ ID NO: 2265659 - RNA, 19 nt, Artificial Sequence
  Description of Artificial Sequence: Synthetic oligonucleotide
gccccucgggucuccaugg

SEQ ID NO: 2265660 - RNA, 19 nt, Artificial Sequence
  Description of Artificial Sequence: Synthetic oligonucleotide
agcccuuauguuggcuuca

SEQ ID NO: 2265661 - RNA, 19 nt, Artificial Sequence
  Description of Artificial Sequence: Synthetic oligonucleotide
cagcuacagcccagcuggg

SEQ ID NO: 2265662 - RNA, 19 nt, Artificial Sequence
  Description of Artificial Sequence: Synthetic oligonucleotide
cagccggcuguacauucuc

SEQ ID NO: 2265663 - RNA, 19 nt, Artificial Sequence
  Description of Artificial Sequence: Synthetic oligonucleotide
cagggaugcccagcuuccg

SEQ ID NO: 2265664 - RNA, 19 nt, Artificial Sequence
  Description of Artificial Sequence: Synthetic oligonucleotide
ccgcguugaagcugugugc

SEQ ID NO: 2265665 - RNA, 19 nt, Artificial Sequence
  Description of Artificial Sequence: Synthetic oligonucleotide
agcuacagcccagcugggu

SEQ ID NO: 2265666 - RNA, 19 nt, Artificial Sequence
  Description of Artificial Sequence: Synthetic oligonucleotide
cgaugaccacaauggaagc

SEQ ID NO: 2265667 - RNA, 19 nt, Artificial Sequence
  Description of Artificial Sequence: Synthetic oligonucleotide
cgcguugaagcugugugcc

SEQ ID NO: 2265668 - RNA, 19 nt, Artificial Sequence
  Description of Artificial Sequence: Synthetic oligonucleotide
cguugaagcugugugcccc

SEQ ID NO: 2265669 - RNA, 19 nt, Artificial Sequence
  Description of Artificial Sequence: Synthetic oligonucleotide
cucuccaauaagggcguga

SEQ ID NO: 2265670 - RNA, 19 nt, Artificial Sequence
  Description of Artificial Sequence: Synthetic oligonucleotide
caccagcaugcgcucauca

SEQ ID NO: 2265671 - RNA, 19 nt, Artificial Sequence
  Description of Artificial Sequence: Synthetic oligonucleotide
agacauucacccagcccau

SEQ ID NO: 2265672 - RNA, 19 nt, Artificial Sequence
  Description of Artificial Sequence: Synthetic oligonucleotide
agggcgugacccuguggaa

SEQ ID NO: 2265673 - RNA, 19 nt, Artificial Sequence
  Description of Artificial Sequence: Synthetic oligonucleotide
ccugcauggaaguguucuc

SEQ ID NO: 2265674 - RNA, 19 nt, Artificial Sequence
  Description of Artificial Sequence: Synthetic oligonucleotide
guugaagcugugugccccu

SEQ ID NO: 2265675 - RNA, 19 nt, Artificial Sequence
  Description of Artificial Sequence: Synthetic oligonucleotide
cuggaguccuugggagccc

SEQ ID NO: 2265676 - RNA, 19 nt, Artificial Sequence
  Description of Artificial Sequence: Synthetic oligonucleotide
cccagaccuucccagucag

SEQ ID NO: 2265677 - RNA, 19 nt, Artificial Sequence
  Description of Artificial Sequence: Synthetic oligonucleotide
ggggauggucaaaugggga

SEQ ID NO: 2265678 - RNA, 19 nt, Artificial Sequence
  Description of Artificial Sequence: Synthetic oligonucleotide
cccucucccucccagccgc

SEQ ID NO: 2265679 - RNA, 19 nt, Artificial Sequence
  Description of Artificial Sequence: Synthetic oligonucleotide
guaugcggcugcaaugccu

SEQ ID NO: 2265680 - RNA, 19 nt, Artificial Sequence
  Description of Artificial Sequence: Synthetic oligonucleotide
gcuguacauucucauauuu

SEQ ID NO: 2265681 - RNA, 19 nt, Artificial Sequence
  Description of Artificial Sequence: Synthetic oligonucleotide
guguucucugggagaacga

SEQ ID NO: 2265682 - RNA, 19 nt, Artificial Sequence
  Description of Artificial Sequence: Synthetic oligonucleotide
ccacacacgaugaccacaa

SEQ ID NO: 2265683 - RNA, 19 nt, Artificial Sequence
  Description of Artificial Sequence: Synthetic oligonucleotide
ucgggucuccauggcaaua

SEQ ID NO: 2265684 - RNA, 19 nt, Artificial Sequence
  Description of Artificial Sequence: Synthetic oligonucleotide
gccagggcggccccacagg

SEQ ID NO: 2265685 - RNA, 19 nt, Artificial Sequence
  Description of Artificial Sequence: Synthetic oligonucleotide
cacccgagacagugcccag

SEQ ID NO: 2265686 - RNA, 19 nt, Artificial Sequence
  Description of Artificial Sequence: Synthetic oligonucleotide
ccgaggagccucucuggag

SEQ ID NO: 2265687 - RNA, 19 nt, Artificial Sequence
  Description of Artificial Sequence: Synthetic oligonucleotide
ccuucagccuggagccucc

SEQ ID NO: 2265688 - RNA, 19 nt, Artificial Sequence
  Description of Artificial Sequence: Synthetic oligonucleotide
cccauaucaggggaugguc

SEQ ID NO: 2265689 - RNA, 19 nt, Artificial Sequence
  Description of Artificial Sequence: Synthetic oligonucleotide
ccaggcggccuucagccug

SEQ ID NO: 2265690 - RNA, 19 nt, Artificial Sequence
  Description of Artificial Sequence: Synthetic oligonucleotide
ggaaaggcucugcccugac

SEQ ID NO: 2265691 - RNA, 19 nt, Artificial Sequence
  Description of Artificial Sequence: Synthetic oligonucleotide
acccuguggaaaggcucug

SEQ ID NO: 2265692 - RNA, 19 nt, Artificial Sequence
  Description of Artificial Sequence: Synthetic oligonucleotide
agguccgugcagcgaccgu

SEQ ID NO: 2265693 - RNA, 19 nt, Artificial Sequence
  Description of Artificial Sequence: Synthetic oligonucleotide
cuuggcucccaggcuccug

SEQ ID NO: 2265694 - RNA, 19 nt, Artificial Sequence
  Description of Artificial Sequence: Synthetic oligonucleotide
gcugacagaaauguccgau

SEQ ID NO: 2265695 - RNA, 19 nt, Artificial Sequence
  Description of Artificial Sequence: Synthetic oligonucleotide
agcgaccgucuuggcuccc

SEQ ID NO: 2265696 - RNA, 19 nt, Artificial Sequence
  Description of Artificial Sequence: Synthetic oligonucleotide
cuucagccuggagccuccc

SEQ ID NO: 2265697 - RNA, 19 nt, Artificial Sequence
  Description of Artificial Sequence: Synthetic oligonucleotide
ggccucccauaucagggga

SEQ ID NO: 2265698 - RNA, 19 nt, Artificial Sequence
  Description of Artificial Sequence: Synthetic oligonucleotide
ccucccauaucaggggaug

SEQ ID NO: 2265699 - RNA, 19 nt, Artificial Sequence
  Description of Artificial Sequence: Synthetic oligonucleotide
agccggcuguacauucuca

SEQ ID NO: 2265700 - RNA, 19 nt, Artificial Sequence
  Description of Artificial Sequence: Synthetic oligonucleotide
caccugcauggaaguguuc

SEQ ID NO: 2265701 - RNA, 19 nt, Artificial Sequence
  Description of Artificial Sequence: Synthetic oligonucleotide
ugugugccccucgggucuc

SEQ ID NO: 2265702 - RNA, 19 nt, Artificial Sequence
  Description of Artificial Sequence: Synthetic oligonucleotide
ccagcuuccgagccgagua

SEQ ID NO: 2265703 - RNA, 19 nt, Artificial Sequence
  Description of Artificial Sequence: Synthetic oligonucleotide
gcccugacacgcuccacca

SEQ ID NO: 2265704 - RNA, 19 nt, Artificial Sequence
  Description of Artificial Sequence: Synthetic oligonucleotide
gguggccaugaaggggucc

SEQ ID NO: 2265705 - RNA, 19 nt, Artificial Sequence
  Description of Artificial Sequence: Synthetic oligonucleotide
cccucauggccaucugcug

SEQ ID NO: 2265706 - RNA, 19 nt, Artificial Sequence
  Description of Artificial Sequence: Synthetic oligonucleotide
ccauggcaauaaugggcac

SEQ ID NO: 2265707 - RNA, 19 nt, Artificial Sequence
  Description of Artificial Sequence: Synthetic oligonucleotide
acagcccagcuggguuuuc

SEQ ID NO: 2265708 - RNA, 19 nt, Artificial Sequence
  Description of Artificial Sequence: Synthetic oligonucleotide
uccgugcagcgaccgucuu

SEQ ID NO: 2265709 - RNA, 19 nt, Artificial Sequence
  Description of Artificial Sequence: Synthetic oligonucleotide
cucccucccagccgccuca

SEQ ID NO: 2265710 - RNA, 19 nt, Artificial Sequence
  Description of Artificial Sequence: Synthetic oligonucleotide
cagcucucacagccuccug

SEQ ID NO: 2265711 - RNA, 19 nt, Artificial Sequence
  Description of Artificial Sequence: Synthetic oligonucleotide
ccucgggucuccauggcaa

SEQ ID NO: 2265712 - RNA, 19 nt, Artificial Sequence
  Description of Artificial Sequence: Synthetic oligonucleotide
ugggcacauuaggcuggca

SEQ ID NO: 2265713 - RNA, 19 nt, Artificial Sequence
  Description of Artificial Sequence: Synthetic oligonucleotide
cuacagcccagcuggguuu

SEQ ID NO: 2265714 - RNA, 19 nt, Artificial Sequence
  Description of Artificial Sequence: Synthetic oligonucleotide
ggagccuccccaggaugcc

SEQ ID NO: 2265715 - RNA, 19 nt, Artificial Sequence
  Description of Artificial Sequence: Synthetic oligonucleotide
cgugacccuguggaaaggc

SEQ ID NO: 2265716 - RNA, 19 nt, Artificial Sequence
  Description of Artificial Sequence: Synthetic oligonucleotide
uggcuacacuggugauauc

SEQ ID NO: 2265717 - RNA, 19 nt, Artificial Sequence
  Description of Artificial Sequence: Synthetic oligonucleotide
ucccaggcuccuggcuaca

SEQ ID NO: 2265718 - RNA, 19 nt, Artificial Sequence
  Description of Artificial Sequence: Synthetic oligonucleotide
uggcuucaucccagaccuu

SEQ ID NO: 2265719 - RNA, 19 nt, Artificial Sequence
  Description of Artificial Sequence: Synthetic oligonucleotide
agccgaguaugcggcugca

SEQ ID NO: 2265720 - RNA, 19 nt, Artificial Sequence
  Description of Artificial Sequence: Synthetic oligonucleotide
gcuacagcccagcuggguu

SEQ ID NO: 2265721 - RNA, 19 nt, Artificial Sequence
  Description of Artificial Sequence: Synthetic oligonucleotide
uggcaauaaugggcacauu

SEQ ID NO: 2265722 - RNA, 19 nt, Artificial Sequence
  Description of Artificial Sequence: Synthetic oligonucleotide
gaagggguccgaggagccu

SEQ ID NO: 2265723 - RNA, 19 nt, Artificial Sequence
  Description of Artificial Sequence: Synthetic oligonucleotide
cagggcggccccacaggca

SEQ ID NO: 2265724 - RNA, 19 nt, Artificial Sequence
  Description of Artificial Sequence: Synthetic oligonucleotide
gugcagcgaccgucuuggc

SEQ ID NO: 2265725 - RNA, 19 nt, Artificial Sequence
  Description of Artificial Sequence: Synthetic oligonucleotide
agggguccgaggagccucu

SEQ ID NO: 2265726 - RNA, 19 nt, Artificial Sequence
  Description of Artificial Sequence: Synthetic oligonucleotide
ccucagagaguaccucaca

SEQ ID NO: 2265727 - RNA, 19 nt, Artificial Sequence
  Description of Artificial Sequence: Synthetic oligonucleotide
gcgugacccuguggaaagg

SEQ ID NO: 2265728 - RNA, 19 nt, Artificial Sequence
  Description of Artificial Sequence: Synthetic oligonucleotide
cccuguggaaaggcucugc

SEQ ID NO: 2265729 - RNA, 19 nt, Artificial Sequence
  Description of Artificial Sequence: Synthetic oligonucleotide
cccaggaugccugaguaua

SEQ ID NO: 2265730 - RNA, 19 nt, Artificial Sequence
  Description of Artificial Sequence: Synthetic oligonucleotide
gcucaucauccagaaaccu

SEQ ID NO: 2265731 - RNA, 19 nt, Artificial Sequence
  Description of Artificial Sequence: Synthetic oligonucleotide
cgaccagccugccugccug

SEQ ID NO: 2265732 - RNA, 19 nt, Artificial Sequence
  Description of Artificial Sequence: Synthetic oligonucleotide
ggcuguacauucucauauu

SEQ ID NO: 2265733 - RNA, 19 nt, Artificial Sequence
  Description of Artificial Sequence: Synthetic oligonucleotide
cccuuguggccaagucuug

SEQ ID NO: 2265734 - RNA, 19 nt, Artificial Sequence
  Description of Artificial Sequence: Synthetic oligonucleotide
cccagucagcuggaccucc

SEQ ID NO: 2265735 - RNA, 19 nt, Artificial Sequence
  Description of Artificial Sequence: Synthetic oligonucleotide
ccaauaagggcgugacccu

SEQ ID NO: 2265736 - RNA, 19 nt, Artificial Sequence
  Description of Artificial Sequence: Synthetic oligonucleotide
agaguaccucacacuccuu

SEQ ID NO: 2265737 - RNA, 19 nt, Artificial Sequence
  Description of Artificial Sequence: Synthetic oligonucleotide
ccuucgcacacuccaaggu

SEQ ID NO: 2265738 - RNA, 19 nt, Artificial Sequence
  Description of Artificial Sequence: Synthetic oligonucleotide
gccuucagccuggagccuc

SEQ ID NO: 2265739 - RNA, 19 nt, Artificial Sequence
  Description of Artificial Sequence: Synthetic oligonucleotide
ccgugcagcgaccgucuug

SEQ ID NO: 2265740 - RNA, 19 nt, Artificial Sequence
  Description of Artificial Sequence: Synthetic oligonucleotide
gggcgugacccuguggaaa

SEQ ID NO: 2265741 - RNA, 19 nt, Artificial Sequence
  Description of Artificial Sequence: Synthetic oligonucleotide
ccuuguggccaagucuuga

SEQ ID NO: 2265742 - RNA, 19 nt, Artificial Sequence
  Description of Artificial Sequence: Synthetic oligonucleotide
ucccucccagccgccucac

SEQ ID NO: 2265743 - RNA, 19 nt, Artificial Sequence
  Description of Artificial Sequence: Synthetic oligonucleotide
ccgccucaccaccugcaug

SEQ ID NO: 2265744 - RNA, 19 nt, Artificial Sequence
  Description of Artificial Sequence: Synthetic oligonucleotide
ccagccgccucaccaccug

SEQ ID NO: 2265745 - RNA, 19 nt, Artificial Sequence
  Description of Artificial Sequence: Synthetic oligonucleotide
guccgugcagcgaccgucu

SEQ ID NO: 2265746 - RNA, 19 nt, Artificial Sequence
  Description of Artificial Sequence: Synthetic oligonucleotide
cggcuguacauucucauau

SEQ ID NO: 2265747 - RNA, 19 nt, Artificial Sequence
  Description of Artificial Sequence: Synthetic oligonucleotide
gcccucagcuacagcccag

SEQ ID NO: 2265748 - RNA, 19 nt, Artificial Sequence
  Description of Artificial Sequence: Synthetic oligonucleotide
ccggcuguacauucucaua

SEQ ID NO: 2265749 - RNA, 19 nt, Artificial Sequence
  Description of Artificial Sequence: Synthetic oligonucleotide
ccgaguaugcggcugcaau

SEQ ID NO: 2265750 - RNA, 19 nt, Artificial Sequence
  Description of Artificial Sequence: Synthetic oligonucleotide
ggucaaauggggagacauu

SEQ ID NO: 2265751 - RNA, 19 nt, Artificial Sequence
  Description of Artificial Sequence: Synthetic oligonucleotide
gcuguuggcuacugauguu

SEQ ID NO: 2265752 - RNA, 19 nt, Artificial Sequence
  Description of Artificial Sequence: Synthetic oligonucleotide
gugugccccucgggucucc

SEQ ID NO: 2265753 - RNA, 19 nt, Artificial Sequence
  Description of Artificial Sequence: Synthetic oligonucleotide
cccucgggucuccauggca

SEQ ID NO: 2265754 - RNA, 19 nt, Artificial Sequence
  Description of Artificial Sequence: Synthetic oligonucleotide
gcucuccaauaagggcgug

SEQ ID NO: 2265755 - RNA, 19 nt, Artificial Sequence
  Description of Artificial Sequence: Synthetic oligonucleotide
cagcuuccgagccgaguau

SEQ ID NO: 2265756 - RNA, 19 nt, Artificial Sequence
  Description of Artificial Sequence: Synthetic oligonucleotide
cccgagacagugcccagcu

SEQ ID NO: 2265757 - RNA, 19 nt, Artificial Sequence
  Description of Artificial Sequence: Synthetic oligonucleotide
gccccuucggguggccaug

SEQ ID NO: 2265758 - RNA, 19 nt, Artificial Sequence
  Description of Artificial Sequence: Synthetic oligonucleotide
ccaccaccucagagaguac

SEQ ID NO: 2265759 - RNA, 19 nt, Artificial Sequence
  Description of Artificial Sequence: Synthetic oligonucleotide
ccccucgggucuccauggc

SEQ ID NO: 2265760 - RNA, 19 nt, Artificial Sequence
  Description of Artificial Sequence: Synthetic oligonucleotide
ccucucccucccagccgcc

SEQ ID NO: 2265761 - RNA, 19 nt, Artificial Sequence
  Description of Artificial Sequence: Synthetic oligonucleotide
cgaccgucuuggcucccag

SEQ ID NO: 2265762 - RNA, 19 nt, Artificial Sequence
  Description of Artificial Sequence: Synthetic oligonucleotide
cgggcaugccugccacccg

SEQ ID NO: 2265763 - RNA, 19 nt, Artificial Sequence
  Description of Artificial Sequence: Synthetic oligonucleotide
ggguccgaggagccucucu

SEQ ID NO: 2265764 - RNA, 19 nt, Artificial Sequence
  Description of Artificial Sequence: Synthetic oligonucleotide
ccggaucuuaaaggaucca

SEQ ID NO: 2265765 - RNA, 19 nt, Artificial Sequence
  Description of Artificial Sequence: Synthetic oligonucleotide
ccaccugcauggaaguguu

SEQ ID NO: 2265766 - RNA, 19 nt, Artificial Sequence
  Description of Artificial Sequence: Synthetic oligonucleotide
cacacacgaugaccacaau

SEQ ID NO: 2265767 - RNA, 19 nt, Artificial Sequence
  Description of Artificial Sequence: Synthetic oligonucleotide
gggcggccccacaggcagg

SEQ ID NO: 2265768 - RNA, 19 nt, Artificial Sequence
  Description of Artificial Sequence: Synthetic oligonucleotide
gcgaccagccugccugccu

SEQ ID NO: 2265769 - RNA, 19 nt, Artificial Sequence
  Description of Artificial Sequence: Synthetic oligonucleotide
gcgaccgucuuggcuccca

SEQ ID NO: 2265770 - RNA, 19 nt, Artificial Sequence
  Description of Artificial Sequence: Synthetic oligonucleotide
ccagccggcuguacauucu

SEQ ID NO: 2265771 - RNA, 19 nt, Artificial Sequence
  Description of Artificial Sequence: Synthetic oligonucleotide
gccgaguaugcggcugcaa

SEQ ID NO: 2265772 - RNA, 19 nt, Artificial Sequence
  Description of Artificial Sequence: Synthetic oligonucleotide
gcccaucccuuguggccaa

SEQ ID NO: 2265773 - RNA, 19 nt, Artificial Sequence
  Description of Artificial Sequence: Synthetic oligonucleotide
ccgaugccccggaucuuaa

SEQ ID NO: 2265774 - RNA, 19 nt, Artificial Sequence
  Description of Artificial Sequence: Synthetic oligonucleotide
gcacaccagaugccugcau

SEQ ID NO: 2265775 - RNA, 19 nt, Artificial Sequence
  Description of Artificial Sequence: Synthetic oligonucleotide
aggccgcguugaagcugug

SEQ ID NO: 2265776 - RNA, 19 nt, Artificial Sequence
  Description of Artificial Sequence: Synthetic oligonucleotide
aggcggccuucagccugga

SEQ ID NO: 2265777 - RNA, 19 nt, Artificial Sequence
  Description of Artificial Sequence: Synthetic oligonucleotide
cccugacacgcuccaccaa

SEQ ID NO: 2265778 - RNA, 19 nt, Artificial Sequence
  Description of Artificial Sequence: Synthetic oligonucleotide
gccccggaucuuaaaggau

SEQ ID NO: 2265779 - RNA, 19 nt, Artificial Sequence
  Description of Artificial Sequence: Synthetic oligonucleotide
ggccgcguugaagcugugu

SEQ ID NO: 2265780 - RNA, 19 nt, Artificial Sequence
  Description of Artificial Sequence: Synthetic oligonucleotide
gcccuuauguuggcuucau

SEQ ID NO: 2265781 - RNA, 19 nt, Artificial Sequence
  Description of Artificial Sequence: Synthetic oligonucleotide
gcauccccucauggccauc

SEQ ID NO: 2265782 - RNA, 19 nt, Artificial Sequence
  Description of Artificial Sequence: Synthetic oligonucleotide
ccccaggaugccugaguau

SEQ ID NO: 2265783 - RNA, 19 nt, Artificial Sequence
  Description of Artificial Sequence: Synthetic oligonucleotide
gggguccgaggagccucuc

SEQ ID NO: 2265784 - RNA, 19 nt, Artificial Sequence
  Description of Artificial Sequence: Synthetic oligonucleotide
ccccuucggguggccauga

SEQ ID NO: 2265785 - RNA, 19 nt, Artificial Sequence
  Description of Artificial Sequence: Synthetic oligonucleotide
ccaucccuuguggccaagu

SEQ ID NO: 2265786 - RNA, 19 nt, Artificial Sequence
  Description of Artificial Sequence: Synthetic oligonucleotide
ggccuucagccuggagccu

SEQ ID NO: 2265787 - RNA, 19 nt, Artificial Sequence
  Description of Artificial Sequence: Synthetic oligonucleotide
ccgagccgaguaugcggcu

SEQ ID NO: 2265788 - RNA, 19 nt, Artificial Sequence
  Description of Artificial Sequence: Synthetic oligonucleotide
cccuucggguggccaugaa

SEQ ID NO: 2265789 - RNA, 19 nt, Artificial Sequence
  Description of Artificial Sequence: Synthetic oligonucleotide
gccugccacccgagacagu

SEQ ID NO: 2265790 - RNA, 19 nt, Artificial Sequence
  Description of Artificial Sequence: Synthetic oligonucleotide
acuuuaaugagccugaggc

SEQ ID NO: 2265791 - RNA, 19 nt, Artificial Sequence
  Description of Artificial Sequence: Synthetic oligonucleotide
uguugaaaagaauaugucg

SEQ ID NO: 2265792 - RNA, 19 nt, Artificial Sequence
  Description of Artificial Sequence: Synthetic oligonucleotide
aguaguaaaacaaaguugg

SEQ ID NO: 2265793 - RNA, 19 nt, Artificial Sequence
  Description of Artificial Sequence: Synthetic oligonucleotide
acaaauacuuuaaugagcc

SEQ ID NO: 2265794 - RNA, 19 nt, Artificial Sequence
  Description of Artificial Sequence: Synthetic oligonucleotide
gauaauaacaggaucauac

SEQ ID NO: 2265795 - RNA, 19 nt, Artificial Sequence
  Description of Artificial Sequence: Synthetic oligonucleotide
ugggcuuugcauaaaaugg

SEQ ID NO: 2265796 - RNA, 19 nt, Artificial Sequence
  Description of Artificial Sequence: Synthetic oligonucleotide
aaaagaauaugucgauagg

SEQ ID NO: 2265797 - RNA, 19 nt, Artificial Sequence
  Description of Artificial Sequence: Synthetic oligonucleotide
aaauacuuuaaugagccug

SEQ ID NO: 2265798 - RNA, 19 nt, Artificial Sequence
  Description of Artificial Sequence: Synthetic oligonucleotide
uuucaguaguaaaacaaag

SEQ ID NO: 2265799 - RNA, 19 nt, Artificial Sequence
  Description of Artificial Sequence: Synthetic oligonucleotide
ugauuucacucacagaaag

SEQ ID NO: 2265800 - RNA, 19 nt, Artificial Sequence
  Description of Artificial Sequence: Synthetic oligonucleotide
aacaggaucauacucaaua

SEQ ID NO: 2265801 - RNA, 19 nt, Artificial Sequence
  Description of Artificial Sequence: Synthetic oligonucleotide
ucaguaguaaaacaaaguu

SEQ ID NO: 2265802 - RNA, 19 nt, Artificial Sequence
  Description of Artificial Sequence: Synthetic oligonucleotide
acagucgcugcccacaucc

SEQ ID NO: 2265803 - RNA, 19 nt, Artificial Sequence
  Description of Artificial Sequence: Synthetic oligonucleotide
aauaacaggaucauacuca

SEQ ID NO: 2265804 - RNA, 19 nt, Artificial Sequence
  Description of Artificial Sequence: Synthetic oligonucleotide
uucgaaagaagcaaucaca

SEQ ID NO: 2265805 - RNA, 19 nt, Artificial Sequence
  Description of Artificial Sequence: Synthetic oligonucleotide
uuauuuuaguguugaaaag

SEQ ID NO: 2265806 - RNA, 19 nt, Artificial Sequence
  Description of Artificial Sequence: Synthetic oligonucleotide
aucggaucaagucaucugg

SEQ ID NO: 2265807 - RNA, 19 nt, Artificial Sequence
  Description of Artificial Sequence: Synthetic oligonucleotide
agaaaucccacuccuuggc

SEQ ID NO: 2265808 - RNA, 19 nt, Artificial Sequence
  Description of Artificial Sequence: Synthetic oligonucleotide
uguguagucauguucccag

SEQ ID NO: 2265809 - RNA, 19 nt, Artificial Sequence
  Description of Artificial Sequence: Synthetic oligonucleotide
uuuguagacugcacagucg

SEQ ID NO: 2265810 - RNA, 19 nt, Artificial Sequence
  Description of Artificial Sequence: Synthetic oligonucleotide
ucaagauaauaacaggauc

SEQ ID NO: 2265811 - RNA, 19 nt, Artificial Sequence
  Description of Artificial Sequence: Synthetic oligonucleotide
uuaguguugaaaagaauau

SEQ ID NO: 2265812 - RNA, 19 nt, Artificial Sequence
  Description of Artificial Sequence: Synthetic oligonucleotide
agauuuguagacugcacag

SEQ ID NO: 2265813 - RNA, 19 nt, Artificial Sequence
  Description of Artificial Sequence: Synthetic oligonucleotide
uuugcagaugguuaucuug

SEQ ID NO: 2265814 - RNA, 19 nt, Artificial Sequence
  Description of Artificial Sequence: Synthetic oligonucleotide
ugugcuuucucuucuucgg

SEQ ID NO: 2265815 - RNA, 19 nt, Artificial Sequence
  Description of Artificial Sequence: Synthetic oligonucleotide
uucacucacagaaaguaga

SEQ ID NO: 2265816 - RNA, 19 nt, Artificial Sequence
  Description of Artificial Sequence: Synthetic oligonucleotide
auacucaauauauuugucu

SEQ ID NO: 2265817 - RNA, 19 nt, Artificial Sequence
  Description of Artificial Sequence: Synthetic oligonucleotide
gguacaaacaaggagaggc

SEQ ID NO: 2265818 - RNA, 19 nt, Artificial Sequence
  Description of Artificial Sequence: Synthetic oligonucleotide
uuuaaugagccugaggcac

SEQ ID NO: 2265819 - RNA, 19 nt, Artificial Sequence
  Description of Artificial Sequence: Synthetic oligonucleotide
uuguagacugcacagucgc

SEQ ID NO: 2265820 - RNA, 19 nt, Artificial Sequence
  Description of Artificial Sequence: Synthetic oligonucleotide
ucgaugucaggacaaauac

SEQ ID NO: 2265821 - RNA, 19 nt, Artificial Sequence
  Description of Artificial Sequence: Synthetic oligonucleotide
auggcauuaaucaagauaa

SEQ ID NO: 2265822 - RNA, 19 nt, Artificial Sequence
  Description of Artificial Sequence: Synthetic oligonucleotide
gacaaauacuuuaaugagc

SEQ ID NO: 2265823 - RNA, 19 nt, Artificial Sequence
  Description of Artificial Sequence: Synthetic oligonucleotide
gaugguuaucuugaguacg

SEQ ID NO: 2265824 - RNA, 19 nt, Artificial Sequence
  Description of Artificial Sequence: Synthetic oligonucleotide
caguaguaaaacaaaguug

SEQ ID NO: 2265825 - RNA, 19 nt, Artificial Sequence
  Description of Artificial Sequence: Synthetic oligonucleotide
ucgaaagaagcaaucacaa

SEQ ID NO: 2265826 - RNA, 19 nt, Artificial Sequence
  Description of Artificial Sequence: Synthetic oligonucleotide
guugaaaagaauaugucga

SEQ ID NO: 2265827 - RNA, 19 nt, Artificial Sequence
  Description of Artificial Sequence: Synthetic oligonucleotide
aauacuuuaaugagccuga

SEQ ID NO: 2265828 - RNA, 19 nt, Artificial Sequence
  Description of Artificial Sequence: Synthetic oligonucleotide
gauacagcgguacaaacaa

SEQ ID NO: 2265829 - RNA, 19 nt, Artificial Sequence
  Description of Artificial Sequence: Synthetic oligonucleotide
aaagcaaacaaaacaugca

SEQ ID NO: 2265830 - RNA, 19 nt, Artificial Sequence
  Description of Artificial Sequence: Synthetic oligonucleotide
auaauaacaggaucauacu

SEQ ID NO: 2265831 - RNA, 19 nt, Artificial Sequence
  Description of Artificial Sequence: Synthetic oligonucleotide
uagaccaugaugcucucca

SEQ ID NO: 2265832 - RNA, 19 nt, Artificial Sequence
  Description of Artificial Sequence: Synthetic oligonucleotide
uacuuuaaugagccugagg

SEQ ID NO: 2265833 - RNA, 19 nt, Artificial Sequence
  Description of Artificial Sequence: Synthetic oligonucleotide
aaggagaggcaaccgucgc

SEQ ID NO: 2265834 - RNA, 19 nt, Artificial Sequence
  Description of Artificial Sequence: Synthetic oligonucleotide
agaugguuaucuugaguac

SEQ ID NO: 2265835 - RNA, 19 nt, Artificial Sequence
  Description of Artificial Sequence: Synthetic oligonucleotide
ucacucacagaaaguagag

SEQ ID NO: 2265836 - RNA, 19 nt, Artificial Sequence
  Description of Artificial Sequence: Synthetic oligonucleotide
agaauaugucgauaggccu

SEQ ID NO: 2265837 - RNA, 19 nt, Artificial Sequence
  Description of Artificial Sequence: Synthetic oligonucleotide
aaaauggcauuaaucaaga

SEQ ID NO: 2265838 - RNA, 19 nt, Artificial Sequence
  Description of Artificial Sequence: Synthetic oligonucleotide
acugguucuucagaagucc

SEQ ID NO: 2265839 - RNA, 19 nt, Artificial Sequence
  Description of Artificial Sequence: Synthetic oligonucleotide
uacucaauauauuugucua

SEQ ID NO: 2265840 - RNA, 19 nt, Artificial Sequence
  Description of Artificial Sequence: Synthetic oligonucleotide
uugugcuuucucuucuucg

SEQ ID NO: 2265841 - RNA, 19 nt, Artificial Sequence
  Description of Artificial Sequence: Synthetic oligonucleotide
aacaaggagaggcaaccgu

SEQ ID NO: 2265842 - RNA, 19 nt, Artificial Sequence
  Description of Artificial Sequence: Synthetic oligonucleotide
aaguagaccaugaugcucu

SEQ ID NO: 2265843 - RNA, 19 nt, Artificial Sequence
  Description of Artificial Sequence: Synthetic oligonucleotide
ucaggaauccccaggcuug

SEQ ID NO: 2265844 - RNA, 19 nt, Artificial Sequence
  Description of Artificial Sequence: Synthetic oligonucleotide
caggacaaauacuuuaaug

SEQ ID NO: 2265845 - RNA, 19 nt, Artificial Sequence
  Description of Artificial Sequence: Synthetic oligonucleotide
aucuugaguacgccguggc

SEQ ID NO: 2265846 - RNA, 19 nt, Artificial Sequence
  Description of Artificial Sequence: Synthetic oligonucleotide
cagcuuguucgaaagaagc

SEQ ID NO: 2265847 - RNA, 19 nt, Artificial Sequence
  Description of Artificial Sequence: Synthetic oligonucleotide
ucuggcaagauuugcagau

SEQ ID NO: 2265848 - RNA, 19 nt, Artificial Sequence
  Description of Artificial Sequence: Synthetic oligonucleotide
caugcagaguuucccaugg

SEQ ID NO: 2265849 - RNA, 19 nt, Artificial Sequence
  Description of Artificial Sequence: Synthetic oligonucleotide
uuuguugucauggguagcu

SEQ ID NO: 2265850 - RNA, 19 nt, Artificial Sequence
  Description of Artificial Sequence: Synthetic oligonucleotide
gaauaugucgauaggccug

SEQ ID NO: 2265851 - RNA, 19 nt, Artificial Sequence
  Description of Artificial Sequence: Synthetic oligonucleotide
ucggaucaagucaucuggg

SEQ ID NO: 2265852 - RNA, 19 nt, Artificial Sequence
  Description of Artificial Sequence: Synthetic oligonucleotide
augucgauaggccugggcu

SEQ ID NO: 2265853 - RNA, 19 nt, Artificial Sequence
  Description of Artificial Sequence: Synthetic oligonucleotide
uguucgaaagaagcaauca

SEQ ID NO: 2265854 - RNA, 19 nt, Artificial Sequence
  Description of Artificial Sequence: Synthetic oligonucleotide
aacauccuguagaaauccc

SEQ ID NO: 2265855 - RNA, 19 nt, Artificial Sequence
  Description of Artificial Sequence: Synthetic oligonucleotide
uccugagauuuguagacug

SEQ ID NO: 2265856 - RNA, 19 nt, Artificial Sequence
  Description of Artificial Sequence: Synthetic oligonucleotide
uuugcauaaaauggcauua

SEQ ID NO: 2265857 - RNA, 19 nt, Artificial Sequence
  Description of Artificial Sequence: Synthetic oligonucleotide
gaaauucgaugucaggaca

SEQ ID NO: 2265858 - RNA, 19 nt, Artificial Sequence
  Description of Artificial Sequence: Synthetic oligonucleotide
caugaugcucuccagcagc

SEQ ID NO: 2265859 - RNA, 19 nt, Artificial Sequence
  Description of Artificial Sequence: Synthetic oligonucleotide
caaacaaggagaggcaacc

SEQ ID NO: 2265860 - RNA, 19 nt, Artificial Sequence
  Description of Artificial Sequence: Synthetic oligonucleotide
augagccugaggcacaaag

SEQ ID NO: 2265861 - RNA, 19 nt, Artificial Sequence
  Description of Artificial Sequence: Synthetic oligonucleotide
cuggcuugagucuugcagc

SEQ ID NO: 2265862 - RNA, 19 nt, Artificial Sequence
  Description of Artificial Sequence: Synthetic oligonucleotide
ugucaggacaaauacuuua

SEQ ID NO: 2265863 - RNA, 19 nt, Artificial Sequence
  Description of Artificial Sequence: Synthetic oligonucleotide
agcgguacaaacaaggaga

SEQ ID NO: 2265864 - RNA, 19 nt, Artificial Sequence
  Description of Artificial Sequence: Synthetic oligonucleotide
uuucccauggauauuuauu

SEQ ID NO: 2265865 - RNA, 19 nt, Artificial Sequence
  Description of Artificial Sequence: Synthetic oligonucleotide
uucccauggauauuuauuu

SEQ ID NO: 2265866 - RNA, 19 nt, Artificial Sequence
  Description of Artificial Sequence: Synthetic oligonucleotide
uugaaaagaauaugucgau

SEQ ID NO: 2265867 - RNA, 19 nt, Artificial Sequence
  Description of Artificial Sequence: Synthetic oligonucleotide
agguaugcuucacaaagca

SEQ ID NO: 2265868 - RNA, 19 nt, Artificial Sequence
  Description of Artificial Sequence: Synthetic oligonucleotide
aagauaauaacaggaucau

SEQ ID NO: 2265869 - RNA, 19 nt, Artificial Sequence
  Description of Artificial Sequence: Synthetic oligonucleotide
aguagagacuugcuuucuc

SEQ ID NO: 2265870 - RNA, 19 nt, Artificial Sequence
  Description of Artificial Sequence: Synthetic oligonucleotide
agaaaguagagacuugcuu

SEQ ID NO: 2265871 - RNA, 19 nt, Artificial Sequence
  Description of Artificial Sequence: Synthetic oligonucleotide
uaucggaucaagucaucug

SEQ ID NO: 2265872 - RNA, 19 nt, Artificial Sequence
  Description of Artificial Sequence: Synthetic oligonucleotide
ugagauuuguagacugcac

SEQ ID NO: 2265873 - RNA, 19 nt, Artificial Sequence
  Description of Artificial Sequence: Synthetic oligonucleotide
guucgaaagaagcaaucac

SEQ ID NO: 2265874 - RNA, 19 nt, Artificial Sequence
  Description of Artificial Sequence: Synthetic oligonucleotide
uggcauaucggaucaaguc

SEQ ID NO: 2265875 - RNA, 19 nt, Artificial Sequence
  Description of Artificial Sequence: Synthetic oligonucleotide
uaguguugaaaagaauaug

SEQ ID NO: 2265876 - RNA, 19 nt, Artificial Sequence
  Description of Artificial Sequence: Synthetic oligonucleotide
caaggagaggcaaccgucg

SEQ ID NO: 2265877 - RNA, 19 nt, Artificial Sequence
  Description of Artificial Sequence: Synthetic oligonucleotide
uucgguaacugguucuuca

SEQ ID NO: 2265878 - RNA, 19 nt, Artificial Sequence
  Description of Artificial Sequence: Synthetic oligonucleotide
aaaucccacuccuuggcau

SEQ ID NO: 2265879 - RNA, 19 nt, Artificial Sequence
  Description of Artificial Sequence: Synthetic oligonucleotide
uuaucuugaguacgccgug

SEQ ID NO: 2265880 - RNA, 19 nt, Artificial Sequence
  Description of Artificial Sequence: Synthetic oligonucleotide
uucagaaguccugagauuu

SEQ ID NO: 2265881 - RNA, 19 nt, Artificial Sequence
  Description of Artificial Sequence: Synthetic oligonucleotide
gguuaucuugaguacgccg

SEQ ID NO: 2265882 - RNA, 19 nt, Artificial Sequence
  Description of Artificial Sequence: Synthetic oligonucleotide
ucacagaaaguagagacuu

SEQ ID NO: 2265883 - RNA, 19 nt, Artificial Sequence
  Description of Artificial Sequence: Synthetic oligonucleotide
aacaugcagaguuucccau

SEQ ID NO: 2265884 - RNA, 19 nt, Artificial Sequence
  Description of Artificial Sequence: Synthetic oligonucleotide
auuucacucacagaaagua

SEQ ID NO: 2265885 - RNA, 19 nt, Artificial Sequence
  Description of Artificial Sequence: Synthetic oligonucleotide
aggagaggcaaccgucgcc

SEQ ID NO: 2265886 - RNA, 19 nt, Artificial Sequence
  Description of Artificial Sequence: Synthetic oligonucleotide
agagacuugcuuucucuug

SEQ ID NO: 2265887 - RNA, 19 nt, Artificial Sequence
  Description of Artificial Sequence: Synthetic oligonucleotide
acucugauugccuggaaau

SEQ ID NO: 2265888 - RNA, 19 nt, Artificial Sequence
  Description of Artificial Sequence: Synthetic oligonucleotide
uuaaugagccugaggcaca

SEQ ID NO: 2265889 - RNA, 19 nt, Artificial Sequence
  Description of Artificial Sequence: Synthetic oligonucleotide
cagaugguuaucuugagua

SEQ ID NO: 2265890 - RNA, 19 nt, Artificial Sequence
  Description of Artificial Sequence: Synthetic oligonucleotide
uugguguucagagucacuc

SEQ ID NO: 2265891 - RNA, 19 nt, Artificial Sequence
  Description of Artificial Sequence: Synthetic oligonucleotide
ucuacccacaggaaagcaa

SEQ ID NO: 2265892 - RNA, 19 nt, Artificial Sequence
  Description of Artificial Sequence: Synthetic oligonucleotide
gucuaggugguucagaucu

SEQ ID NO: 2265893 - RNA, 19 nt, Artificial Sequence
  Description of Artificial Sequence: Synthetic oligonucleotide
uugauuucacucacagaaa

SEQ ID NO: 2265894 - RNA, 19 nt, Artificial Sequence
  Description of Artificial Sequence: Synthetic oligonucleotide
acaaacaaggagaggcaac

SEQ ID NO: 2265895 - RNA, 19 nt, Artificial Sequence
  Description of Artificial Sequence: Synthetic oligonucleotide
uaugucgauaggccugggc

SEQ ID NO: 2265896 - RNA, 19 nt, Artificial Sequence
  Description of Artificial Sequence: Synthetic oligonucleotide
guaugcuucacaaagcaaa

SEQ ID NO: 2265897 - RNA, 19 nt, Artificial Sequence
  Description of Artificial Sequence: Synthetic oligonucleotide
guaguaaaacaaaguuggg

SEQ ID NO: 2265898 - RNA, 19 nt, Artificial Sequence
  Description of Artificial Sequence: Synthetic oligonucleotide
agccacucagcacagccag

SEQ ID NO: 2265899 - RNA, 19 nt, Artificial Sequence
  Description of Artificial Sequence: Synthetic oligonucleotide
agaaguagaccaugaugcu

SEQ ID NO: 2265900 - RNA, 19 nt, Artificial Sequence
  Description of Artificial Sequence: Synthetic oligonucleotide
ucgguaacugguucuucag

SEQ ID NO: 2265901 - RNA, 19 nt, Artificial Sequence
  Description of Artificial Sequence: Synthetic oligonucleotide
gucauggguagcucuaccc

SEQ ID NO: 2265902 - RNA, 19 nt, Artificial Sequence
  Description of Artificial Sequence: Synthetic oligonucleotide
ucagaaguccugagauuug

SEQ ID NO: 2265903 - RNA, 19 nt, Artificial Sequence
  Description of Artificial Sequence: Synthetic oligonucleotide
cuugaguacgccguggcug

SEQ ID NO: 2265904 - RNA, 19 nt, Artificial Sequence
  Description of Artificial Sequence: Synthetic oligonucleotide
acaaggagaggcaaccguc

SEQ ID NO: 2265905 - RNA, 19 nt, Artificial Sequence
  Description of Artificial Sequence: Synthetic oligonucleotide
gaccaugaugcucuccagc

SEQ ID NO: 2265906 - RNA, 19 nt, Artificial Sequence
  Description of Artificial Sequence: Synthetic oligonucleotide
ggaaauucgaugucaggac

SEQ ID NO: 2265907 - RNA, 19 nt, Artificial Sequence
  Description of Artificial Sequence: Synthetic oligonucleotide
cuggaaauucgaugucagg

SEQ ID NO: 2265908 - RNA, 19 nt, Artificial Sequence
  Description of Artificial Sequence: Synthetic oligonucleotide
ucccauagcuggacaacag

SEQ ID NO: 2265909 - RNA, 19 nt, Artificial Sequence
  Description of Artificial Sequence: Synthetic oligonucleotide
aucaagauaauaacaggau

SEQ ID NO: 2265910 - RNA, 19 nt, Artificial Sequence
  Description of Artificial Sequence: Synthetic oligonucleotide
ucccacuccauccucugga

SEQ ID NO: 2265911 - RNA, 19 nt, Artificial Sequence
  Description of Artificial Sequence: Synthetic oligonucleotide
aaauucgaugucaggacaa

SEQ ID NO: 2265912 - RNA, 19 nt, Artificial Sequence
  Description of Artificial Sequence: Synthetic oligonucleotide
ugaaaagaauaugucgaua

SEQ ID NO: 2265913 - RNA, 19 nt, Artificial Sequence
  Description of Artificial Sequence: Synthetic oligonucleotide
ucuucuucgguaacugguu

SEQ ID NO: 2265914 - RNA, 19 nt, Artificial Sequence
  Description of Artificial Sequence: Synthetic oligonucleotide
uacgccguggcuguagucc

SEQ ID NO: 2265915 - RNA, 19 nt, Artificial Sequence
  Description of Artificial Sequence: Synthetic oligonucleotide
uucuucgguaacugguucu

SEQ ID NO: 2265916 - RNA, 19 nt, Artificial Sequence
  Description of Artificial Sequence: Synthetic oligonucleotide
caagauuugcagaugguua

SEQ ID NO: 2265917 - RNA, 19 nt, Artificial Sequence
  Description of Artificial Sequence: Synthetic oligonucleotide
agcucuacccacaggaaag

SEQ ID NO: 2265918 - RNA, 19 nt, Artificial Sequence
  Description of Artificial Sequence: Synthetic oligonucleotide
cugcgguugguguucagag

SEQ ID NO: 2265919 - RNA, 19 nt, Artificial Sequence
  Description of Artificial Sequence: Synthetic oligonucleotide
gagucacucugauugccug

SEQ ID NO: 2265920 - RNA, 19 nt, Artificial Sequence
  Description of Artificial Sequence: Synthetic oligonucleotide
ucgauacagcgguacaaac

SEQ ID NO: 2265921 - RNA, 19 nt, Artificial Sequence
  Description of Artificial Sequence: Synthetic oligonucleotide
uugaguacgccguggcugu

SEQ ID NO: 2265922 - RNA, 19 nt, Artificial Sequence
  Description of Artificial Sequence: Synthetic oligonucleotide
cauggguagcucuacccac

SEQ ID NO: 2265923 - RNA, 19 nt, Artificial Sequence
  Description of Artificial Sequence: Synthetic oligonucleotide
gaaguagaccaugaugcuc

SEQ ID NO: 2265924 - RNA, 19 nt, Artificial Sequence
  Description of Artificial Sequence: Synthetic oligonucleotide
ggcauaucggaucaaguca

SEQ ID NO: 2265925 - RNA, 19 nt, Artificial Sequence
  Description of Artificial Sequence: Synthetic oligonucleotide
agcagggagagccugcggu

SEQ ID NO: 2265926 - RNA, 19 nt, Artificial Sequence
  Description of Artificial Sequence: Synthetic oligonucleotide
acaugcagaguuucccaug

SEQ ID NO: 2265927 - RNA, 19 nt, Artificial Sequence
  Description of Artificial Sequence: Synthetic oligonucleotide
guagacugcacagucgcug

SEQ ID NO: 2265928 - RNA, 19 nt, Artificial Sequence
  Description of Artificial Sequence: Synthetic oligonucleotide
ccauggauauuuauuuuag

SEQ ID NO: 2265929 - RNA, 19 nt, Artificial Sequence
  Description of Artificial Sequence: Synthetic oligonucleotide
ugauugccuggaaauucga

SEQ ID NO: 2265930 - RNA, 19 nt, Artificial Sequence
  Description of Artificial Sequence: Synthetic oligonucleotide
guugcacucgauacagcgg

SEQ ID NO: 2265931 - RNA, 19 nt, Artificial Sequence
  Description of Artificial Sequence: Synthetic oligonucleotide
uggguagcucuacccacag

SEQ ID NO: 2265932 - RNA, 19 nt, Artificial Sequence
  Description of Artificial Sequence: Synthetic oligonucleotide
ucccgguugcacucgauac

SEQ ID NO: 2265933 - RNA, 19 nt, Artificial Sequence
  Description of Artificial Sequence: Synthetic oligonucleotide
ucuugaguacgccguggcu

SEQ ID NO: 2265934 - RNA, 19 nt, Artificial Sequence
  Description of Artificial Sequence: Synthetic oligonucleotide
gguguucagagucacucug

SEQ ID NO: 2265935 - RNA, 19 nt, Artificial Sequence
  Description of Artificial Sequence: Synthetic oligonucleotide
auaucggaucaagucaucu

SEQ ID NO: 2265936 - RNA, 19 nt, Artificial Sequence
  Description of Artificial Sequence: Synthetic oligonucleotide
acgccguggcuguaguccc

SEQ ID NO: 2265937 - RNA, 19 nt, Artificial Sequence
  Description of Artificial Sequence: Synthetic oligonucleotide
agauuugcagaugguuauc

SEQ ID NO: 2265938 - RNA, 19 nt, Artificial Sequence
  Description of Artificial Sequence: Synthetic oligonucleotide
uuuuguugucauggguagc

SEQ ID NO: 2265939 - RNA, 19 nt, Artificial Sequence
  Description of Artificial Sequence: Synthetic oligonucleotide
agaggcaaccgucgccgcg

SEQ ID NO: 2265940 - RNA, 19 nt, Artificial Sequence
  Description of Artificial Sequence: Synthetic oligonucleotide
ugucuggguggguucagga

SEQ ID NO: 2265941 - RNA, 19 nt, Artificial Sequence
  Description of Artificial Sequence: Synthetic oligonucleotide
gcauaaaauggcauuaauc

SEQ ID NO: 2265942 - RNA, 19 nt, Artificial Sequence
  Description of Artificial Sequence: Synthetic oligonucleotide
gaaaucccacuccuuggca

SEQ ID NO: 2265943 - RNA, 19 nt, Artificial Sequence
  Description of Artificial Sequence: Synthetic oligonucleotide
agcgcuuucaguaguaaaa

SEQ ID NO: 2265944 - RNA, 19 nt, Artificial Sequence
  Description of Artificial Sequence: Synthetic oligonucleotide
uucccauagcuggacaaca

SEQ ID NO: 2265945 - RNA, 19 nt, Artificial Sequence
  Description of Artificial Sequence: Synthetic oligonucleotide
guuucuggcaagauuugca

SEQ ID NO: 2265946 - RNA, 19 nt, Artificial Sequence
  Description of Artificial Sequence: Synthetic oligonucleotide
auauauuugucuacugguu

SEQ ID NO: 2265947 - RNA, 19 nt, Artificial Sequence
  Description of Artificial Sequence: Synthetic oligonucleotide
aauucgaugucaggacaaa

SEQ ID NO: 2265948 - RNA, 19 nt, Artificial Sequence
  Description of Artificial Sequence: Synthetic oligonucleotide
uggcuugagucuugcagcu

SEQ ID NO: 2265949 - RNA, 19 nt, Artificial Sequence
  Description of Artificial Sequence: Synthetic oligonucleotide
cuugagucuugcagcugcc

SEQ ID NO: 2265950 - RNA, 19 nt, Artificial Sequence
  Description of Artificial Sequence: Synthetic oligonucleotide
uguagacugcacagucgcu

SEQ ID NO: 2265951 - RNA, 19 nt, Artificial Sequence
  Description of Artificial Sequence: Synthetic oligonucleotide
uuucccauagcuggacaac

SEQ ID NO: 2265952 - RNA, 19 nt, Artificial Sequence
  Description of Artificial Sequence: Synthetic oligonucleotide
ggagaggcaaccgucgccg

SEQ ID NO: 2265953 - RNA, 19 nt, Artificial Sequence
  Description of Artificial Sequence: Synthetic oligonucleotide
uugcauaaaauggcauuaa

SEQ ID NO: 2265954 - RNA, 19 nt, Artificial Sequence
  Description of Artificial Sequence: Synthetic oligonucleotide
ugguguucagagucacucu

SEQ ID NO: 2265955 - RNA, 19 nt, Artificial Sequence
  Description of Artificial Sequence: Synthetic oligonucleotide
gacaacagcagcgcuuuca

SEQ ID NO: 2265956 - RNA, 19 nt, Artificial Sequence
  Description of Artificial Sequence: Synthetic oligonucleotide
aaguagagacuugcuuucu

SEQ ID NO: 2265957 - RNA, 19 nt, Artificial Sequence
  Description of Artificial Sequence: Synthetic oligonucleotide
ugugucuaggugguucaga

SEQ ID NO: 2265958 - RNA, 19 nt, Artificial Sequence
  Description of Artificial Sequence: Synthetic oligonucleotide
guuaucuugaguacgccgu

SEQ ID NO: 2265959 - RNA, 19 nt, Artificial Sequence
  Description of Artificial Sequence: Synthetic oligonucleotide
gguggguucaggaaucccc

SEQ ID NO: 2265960 - RNA, 19 nt, Artificial Sequence
  Description of Artificial Sequence: Synthetic oligonucleotide
gucauguucccagaugaca

SEQ ID NO: 2265961 - RNA, 19 nt, Artificial Sequence
  Description of Artificial Sequence: Synthetic oligonucleotide
agucuugcagcugccacca

SEQ ID NO: 2265962 - RNA, 19 nt, Artificial Sequence
  Description of Artificial Sequence: Synthetic oligonucleotide
ugucgauaggccugggcuu

SEQ ID NO: 2265963 - RNA, 19 nt, Artificial Sequence
  Description of Artificial Sequence: Synthetic oligonucleotide
agcuuguucgaaagaagca

SEQ ID NO: 2265964 - RNA, 19 nt, Artificial Sequence
  Description of Artificial Sequence: Synthetic oligonucleotide
gguucagaucuuccugggg

SEQ ID NO: 2265965 - RNA, 19 nt, Artificial Sequence
  Description of Artificial Sequence: Synthetic oligonucleotide
ugguuaucuugaguacgcc

SEQ ID NO: 2265966 - RNA, 19 nt, Artificial Sequence
  Description of Artificial Sequence: Synthetic oligonucleotide
auacuuuaaugagccugag

SEQ ID NO: 2265967 - RNA, 19 nt, Artificial Sequence
  Description of Artificial Sequence: Synthetic oligonucleotide
gaauccccaggcuugauuu

SEQ ID NO: 2265968 - RNA, 19 nt, Artificial Sequence
  Description of Artificial Sequence: Synthetic oligonucleotide
gcuuucaguaguaaaacaa

SEQ ID NO: 2265969 - RNA, 19 nt, Artificial Sequence
  Description of Artificial Sequence: Synthetic oligonucleotide
aucaagucaucuggggcug

SEQ ID NO: 2265970 - RNA, 19 nt, Artificial Sequence
  Description of Artificial Sequence: Synthetic oligonucleotide
ggguucaggaauccccagg

SEQ ID NO: 2265971 - RNA, 19 nt, Artificial Sequence
  Description of Artificial Sequence: Synthetic oligonucleotide
gauuugcagaugguuaucu

SEQ ID NO: 2265972 - RNA, 19 nt, Artificial Sequence
  Description of Artificial Sequence: Synthetic oligonucleotide
ucccauggauauuuauuuu

SEQ ID NO: 2265973 - RNA, 19 nt, Artificial Sequence
  Description of Artificial Sequence: Synthetic oligonucleotide
auuugcagaugguuaucuu

SEQ ID NO: 2265974 - RNA, 19 nt, Artificial Sequence
  Description of Artificial Sequence: Synthetic oligonucleotide
ccuggaaauucgaugucag

SEQ ID NO: 2265975 - RNA, 19 nt, Artificial Sequence
  Description of Artificial Sequence: Synthetic oligonucleotide
cccacaucccacuccaucc

SEQ ID NO: 2265976 - RNA, 19 nt, Artificial Sequence
  Description of Artificial Sequence: Synthetic oligonucleotide
uggacaacagcagcgcuuu

SEQ ID NO: 2265977 - RNA, 19 nt, Artificial Sequence
  Description of Artificial Sequence: Synthetic oligonucleotide
ggcacaaagguguguaguc

SEQ ID NO: 2265978 - RNA, 19 nt, Artificial Sequence
  Description of Artificial Sequence: Synthetic oligonucleotide
cuggguggguucaggaauc

SEQ ID NO: 2265979 - RNA, 19 nt, Artificial Sequence
  Description of Artificial Sequence: Synthetic oligonucleotide
gucaggacaaauacuuuaa

SEQ ID NO: 2265980 - RNA, 19 nt, Artificial Sequence
  Description of Artificial Sequence: Synthetic oligonucleotide
ugcgguugguguucagagu

SEQ ID NO: 2265981 - RNA, 19 nt, Artificial Sequence
  Description of Artificial Sequence: Synthetic oligonucleotide
cauaucggaucaagucauc

SEQ ID NO: 2265982 - RNA, 19 nt, Artificial Sequence
  Description of Artificial Sequence: Synthetic oligonucleotide
uggcauuaaucaagauaau

SEQ ID NO: 2265983 - RNA, 19 nt, Artificial Sequence
  Description of Artificial Sequence: Synthetic oligonucleotide
gaggcaaccgucgccgcgc

SEQ ID NO: 2265984 - RNA, 19 nt, Artificial Sequence
  Description of Artificial Sequence: Synthetic oligonucleotide
gcgguugguguucagaguc

SEQ ID NO: 2265985 - RNA, 19 nt, Artificial Sequence
  Description of Artificial Sequence: Synthetic oligonucleotide
aagcaaucacaaacauccu

SEQ ID NO: 2265986 - RNA, 19 nt, Artificial Sequence
  Description of Artificial Sequence: Synthetic oligonucleotide
cucuucuucgguaacuggu

SEQ ID NO: 2265987 - RNA, 19 nt, Artificial Sequence
  Description of Artificial Sequence: Synthetic oligonucleotide
agauaauaacaggaucaua

SEQ ID NO: 2265988 - RNA, 19 nt, Artificial Sequence
  Description of Artificial Sequence: Synthetic oligonucleotide
gucuacugguuucuggcaa

SEQ ID NO: 2265989 - RNA, 19 nt, Artificial Sequence
  Description of Artificial Sequence: Synthetic oligonucleotide
ugccuggaaauucgauguc

SEQ ID NO: 2265990 - RNA, 19 nt, Artificial Sequence
  Description of Artificial Sequence: Synthetic oligonucleotide
acagcgguacaaacaagga

SEQ ID NO: 2265991 - RNA, 19 nt, Artificial Sequence
  Description of Artificial Sequence: Synthetic oligonucleotide
guccccauggccacucuag

SEQ ID NO: 2265992 - RNA, 19 nt, Artificial Sequence
  Description of Artificial Sequence: Synthetic oligonucleotide
gauuuguagacugcacagu

SEQ ID NO: 2265993 - RNA, 19 nt, Artificial Sequence
  Description of Artificial Sequence: Synthetic oligonucleotide
uacccacaggaaagcaaaa

SEQ ID NO: 2265994 - RNA, 19 nt, Artificial Sequence
  Description of Artificial Sequence: Synthetic oligonucleotide
aguacgccguggcuguagu

SEQ ID NO: 2265995 - RNA, 19 nt, Artificial Sequence
  Description of Artificial Sequence: Synthetic oligonucleotide
ucuucgguaacugguucuu

SEQ ID NO: 2265996 - RNA, 19 nt, Artificial Sequence
  Description of Artificial Sequence: Synthetic oligonucleotide
cuaggugguucagaucuuc

SEQ ID NO: 2265997 - RNA, 19 nt, Artificial Sequence
  Description of Artificial Sequence: Synthetic oligonucleotide
gauuucacucacagaaagu

SEQ ID NO: 2265998 - RNA, 19 nt, Artificial Sequence
  Description of Artificial Sequence: Synthetic oligonucleotide
augcuucacaaagcaaaca

SEQ ID NO: 2265999 - RNA, 19 nt, Artificial Sequence
  Description of Artificial Sequence: Synthetic oligonucleotide
uggggcuguguucuggcuu

SEQ ID NO: 2266000 - RNA, 19 nt, Artificial Sequence
  Description of Artificial Sequence: Synthetic oligonucleotide
gggauuagcaggaguuucc

SEQ ID NO: 2266001 - RNA, 19 nt, Artificial Sequence
  Description of Artificial Sequence: Synthetic oligonucleotide
uggcuguagucccgguaca

SEQ ID NO: 2266002 - RNA, 19 nt, Artificial Sequence
  Description of Artificial Sequence: Synthetic oligonucleotide
gguguguagucauguuccc

SEQ ID NO: 2266003 - RNA, 19 nt, Artificial Sequence
  Description of Artificial Sequence: Synthetic oligonucleotide
uugagucuugcagcugcca

SEQ ID NO: 2266004 - RNA, 19 nt, Artificial Sequence
  Description of Artificial Sequence: Synthetic oligonucleotide
aagccacucagcacagcca

SEQ ID NO: 2266005 - RNA, 19 nt, Artificial Sequence
  Description of Artificial Sequence: Synthetic oligonucleotide
uugucauggguagcucuac

SEQ ID NO: 2266006 - RNA, 19 nt, Artificial Sequence
  Description of Artificial Sequence: Synthetic oligonucleotide
cuuguucgaaagaagcaau

SEQ ID NO: 2266007 - RNA, 19 nt, Artificial Sequence
  Description of Artificial Sequence: Synthetic oligonucleotide
gucgccgcgcccucggugc

SEQ ID NO: 2266008 - RNA, 19 nt, Artificial Sequence
  Description of Artificial Sequence: Synthetic oligonucleotide
ucuaggugguucagaucuu

SEQ ID NO: 2266009 - RNA, 19 nt, Artificial Sequence
  Description of Artificial Sequence: Synthetic oligonucleotide
gauaggccugggcuuugca

SEQ ID NO: 2266010 - RNA, 19 nt, Artificial Sequence
  Description of Artificial Sequence: Synthetic oligonucleotide
gaguacgccguggcuguag

SEQ ID NO: 2266011 - RNA, 19 nt, Artificial Sequence
  Description of Artificial Sequence: Synthetic oligonucleotide
aggcaaccgucgccgcgcc

SEQ ID NO: 2266012 - RNA, 19 nt, Artificial Sequence
  Description of Artificial Sequence: Synthetic oligonucleotide
auacagcgguacaaacaag

SEQ ID NO: 2266013 - RNA, 19 nt, Artificial Sequence
  Description of Artificial Sequence: Synthetic oligonucleotide
gcgguacaaacaaggagag

SEQ ID NO: 2266014 - RNA, 19 nt, Artificial Sequence
  Description of Artificial Sequence: Synthetic oligonucleotide
gcuuguucgaaagaagcaa

SEQ ID NO: 2266015 - RNA, 19 nt, Artificial Sequence
  Description of Artificial Sequence: Synthetic oligonucleotide
cccacuccuuggcauaucg

SEQ ID NO: 2266016 - RNA, 19 nt, Artificial Sequence
  Description of Artificial Sequence: Synthetic oligonucleotide
cuggcaagauuugcagaug

SEQ ID NO: 2266017 - RNA, 19 nt, Artificial Sequence
  Description of Artificial Sequence: Synthetic oligonucleotide
cccauagcuggacaacagc

SEQ ID NO: 2266018 - RNA, 19 nt, Artificial Sequence
  Description of Artificial Sequence: Synthetic oligonucleotide
ggcuuugcauaaaauggca

SEQ ID NO: 2266019 - RNA, 19 nt, Artificial Sequence
  Description of Artificial Sequence: Synthetic oligonucleotide
cacucugauugccuggaaa

SEQ ID NO: 2266020 - RNA, 19 nt, Artificial Sequence
  Description of Artificial Sequence: Synthetic oligonucleotide
gagaggcaaccgucgccgc

SEQ ID NO: 2266021 - RNA, 19 nt, Artificial Sequence
  Description of Artificial Sequence: Synthetic oligonucleotide
uggguggguucaggaaucc

SEQ ID NO: 2266022 - RNA, 19 nt, Artificial Sequence
  Description of Artificial Sequence: Synthetic oligonucleotide
guagaccaugaugcucucc

SEQ ID NO: 2266023 - RNA, 19 nt, Artificial Sequence
  Description of Artificial Sequence: Synthetic oligonucleotide
aggcagcuuguucgaaaga

SEQ ID NO: 2266024 - RNA, 19 nt, Artificial Sequence
  Description of Artificial Sequence: Synthetic oligonucleotide
auggguagcucuacccaca

SEQ ID NO: 2266025 - RNA, 19 nt, Artificial Sequence
  Description of Artificial Sequence: Synthetic oligonucleotide
cucggugcccuucccggac

SEQ ID NO: 2266026 - RNA, 19 nt, Artificial Sequence
  Description of Artificial Sequence: Synthetic oligonucleotide
ccaggcuugauuucacuca

SEQ ID NO: 2266027 - RNA, 19 nt, Artificial Sequence
  Description of Artificial Sequence: Synthetic oligonucleotide
gugcccuucccggaccgcg

SEQ ID NO: 2266028 - RNA, 19 nt, Artificial Sequence
  Description of Artificial Sequence: Synthetic oligonucleotide
augcagaguuucccaugga

SEQ ID NO: 2266029 - RNA, 19 nt, Artificial Sequence
  Description of Artificial Sequence: Synthetic oligonucleotide
cagaaaguagagacuugcu

SEQ ID NO: 2266030 - RNA, 19 nt, Artificial Sequence
  Description of Artificial Sequence: Synthetic oligonucleotide
ggcagcuuguucgaaagaa

SEQ ID NO: 2266031 - RNA, 19 nt, Artificial Sequence
  Description of Artificial Sequence: Synthetic oligonucleotide
guugucauggguagcucua

SEQ ID NO: 2266032 - RNA, 19 nt, Artificial Sequence
  Description of Artificial Sequence: Synthetic oligonucleotide
agcaagccacucagcacag

SEQ ID NO: 2266033 - RNA, 19 nt, Artificial Sequence
  Description of Artificial Sequence: Synthetic oligonucleotide
gucgcugcccacaucccac

SEQ ID NO: 2266034 - RNA, 19 nt, Artificial Sequence
  Description of Artificial Sequence: Synthetic oligonucleotide
ugccaccaccucagguaug

SEQ ID NO: 2266035 - RNA, 19 nt, Artificial Sequence
  Description of Artificial Sequence: Synthetic oligonucleotide
ugcacucgauacagcggua

SEQ ID NO: 2266036 - RNA, 19 nt, Artificial Sequence
  Description of Artificial Sequence: Synthetic oligonucleotide
auaugucgauaggccuggg

SEQ ID NO: 2266037 - RNA, 19 nt, Artificial Sequence
  Description of Artificial Sequence: Synthetic oligonucleotide
cacaaagguguguagucau

SEQ ID NO: 2266038 - RNA, 19 nt, Artificial Sequence
  Description of Artificial Sequence: Synthetic oligonucleotide
cacucacagaaaguagaga

SEQ ID NO: 2266039 - RNA, 19 nt, Artificial Sequence
  Description of Artificial Sequence: Synthetic oligonucleotide
gcgcuuucaguaguaaaac

SEQ ID NO: 2266040 - RNA, 19 nt, Artificial Sequence
  Description of Artificial Sequence: Synthetic oligonucleotide
guguguagucauguuccca

SEQ ID NO: 2266041 - RNA, 19 nt, Artificial Sequence
  Description of Artificial Sequence: Synthetic oligonucleotide
caagucaucuggggcugug

SEQ ID NO: 2266042 - RNA, 19 nt, Artificial Sequence
  Description of Artificial Sequence: Synthetic oligonucleotide
cacucgauacagcgguaca

SEQ ID NO: 2266043 - RNA, 19 nt, Artificial Sequence
  Description of Artificial Sequence: Synthetic oligonucleotide
ucgcugcccacaucccacu

SEQ ID NO: 2266044 - RNA, 19 nt, Artificial Sequence
  Description of Artificial Sequence: Synthetic oligonucleotide
ugcccuucccggaccgcgu

SEQ ID NO: 2266045 - RNA, 19 nt, Artificial Sequence
  Description of Artificial Sequence: Synthetic oligonucleotide
cuucgguaacugguucuuc

SEQ ID NO: 2266046 - RNA, 19 nt, Artificial Sequence
  Description of Artificial Sequence: Synthetic oligonucleotide
acgcccgccaguccccaug

SEQ ID NO: 2266047 - RNA, 19 nt, Artificial Sequence
  Description of Artificial Sequence: Synthetic oligonucleotide
cgauacagcgguacaaaca

SEQ ID NO: 2266048 - RNA, 19 nt, Artificial Sequence
  Description of Artificial Sequence: Synthetic oligonucleotide
ucgauaggccugggcuuug

SEQ ID NO: 2266049 - RNA, 19 nt, Artificial Sequence
  Description of Artificial Sequence: Synthetic oligonucleotide
guagcucuacccacaggaa

SEQ ID NO: 2266050 - RNA, 19 nt, Artificial Sequence
  Description of Artificial Sequence: Synthetic oligonucleotide
gauugccuggaaauucgau

SEQ ID NO: 2266051 - RNA, 19 nt, Artificial Sequence
  Description of Artificial Sequence: Synthetic oligonucleotide
aaugagccugaggcacaaa

SEQ ID NO: 2266052 - RNA, 19 nt, Artificial Sequence
  Description of Artificial Sequence: Synthetic oligonucleotide
gagccugcgguugguguuc

SEQ ID NO: 2266053 - RNA, 19 nt, Artificial Sequence
  Description of Artificial Sequence: Synthetic oligonucleotide
ccucagguaugcuucacaa

SEQ ID NO: 2266054 - RNA, 19 nt, Artificial Sequence
  Description of Artificial Sequence: Synthetic oligonucleotide
agucccgguacagcuccug

SEQ ID NO: 2266055 - RNA, 19 nt, Artificial Sequence
  Description of Artificial Sequence: Synthetic oligonucleotide
gcucuacccacaggaaagc

SEQ ID NO: 2266056 - RNA, 19 nt, Artificial Sequence
  Description of Artificial Sequence: Synthetic oligonucleotide
gguaugcuucacaaagcaa

SEQ ID NO: 2266057 - RNA, 19 nt, Artificial Sequence
  Description of Artificial Sequence: Synthetic oligonucleotide
gccuggaaauucgauguca

SEQ ID NO: 2266058 - RNA, 19 nt, Artificial Sequence
  Description of Artificial Sequence: Synthetic oligonucleotide
cucuacccacaggaaagca

SEQ ID NO: 2266059 - RNA, 19 nt, Artificial Sequence
  Description of Artificial Sequence: Synthetic oligonucleotide
gcacucgauacagcgguac

SEQ ID NO: 2266060 - RNA, 19 nt, Artificial Sequence
  Description of Artificial Sequence: Synthetic oligonucleotide
uagucccgguacagcuccu

SEQ ID NO: 2266061 - RNA, 19 nt, Artificial Sequence
  Description of Artificial Sequence: Synthetic oligonucleotide
gcccacaucccacuccauc

SEQ ID NO: 2266062 - RNA, 19 nt, Artificial Sequence
  Description of Artificial Sequence: Synthetic oligonucleotide
guacgccguggcuguaguc

SEQ ID NO: 2266063 - RNA, 19 nt, Artificial Sequence
  Description of Artificial Sequence: Synthetic oligonucleotide
aggcuugauuucacucaca

SEQ ID NO: 2266064 - RNA, 19 nt, Artificial Sequence
  Description of Artificial Sequence: Synthetic oligonucleotide
gcauaucggaucaagucau

SEQ ID NO: 2266065 - RNA, 19 nt, Artificial Sequence
  Description of Artificial Sequence: Synthetic oligonucleotide
cucccgguugcacucgaua

SEQ ID NO: 2266066 - RNA, 19 nt, Artificial Sequence
  Description of Artificial Sequence: Synthetic oligonucleotide
caccucagguaugcuucac

SEQ ID NO: 2266067 - RNA, 19 nt, Artificial Sequence
  Description of Artificial Sequence: Synthetic oligonucleotide
gcugggauuagcaggaguu

SEQ ID NO: 2266068 - RNA, 19 nt, Artificial Sequence
  Description of Artificial Sequence: Synthetic oligonucleotide
cacagucgcugcccacauc

SEQ ID NO: 2266069 - RNA, 19 nt, Artificial Sequence
  Description of Artificial Sequence: Synthetic oligonucleotide
agcagcgcuuucaguagua

SEQ ID NO: 2266070 - RNA, 19 nt, Artificial Sequence
  Description of Artificial Sequence: Synthetic oligonucleotide
guccugagauuuguagacu

SEQ ID NO: 2266071 - RNA, 19 nt, Artificial Sequence
  Description of Artificial Sequence: Synthetic oligonucleotide
cgcuuucaguaguaaaaca

SEQ ID NO: 2266072 - RNA, 19 nt, Artificial Sequence
  Description of Artificial Sequence: Synthetic oligonucleotide
ugcccacaucccacuccau

SEQ ID NO: 2266073 - RNA, 19 nt, Artificial Sequence
  Description of Artificial Sequence: Synthetic oligonucleotide
caggaauccccaggcuuga

SEQ ID NO: 2266074 - RNA, 19 nt, Artificial Sequence
  Description of Artificial Sequence: Synthetic oligonucleotide
ggguggguucaggaauccc

SEQ ID NO: 2266075 - RNA, 19 nt, Artificial Sequence
  Description of Artificial Sequence: Synthetic oligonucleotide
ccagaugacagcugggauu

SEQ ID NO: 2266076 - RNA, 19 nt, Artificial Sequence
  Description of Artificial Sequence: Synthetic oligonucleotide
gccugggcuuugcauaaaa

SEQ ID NO: 2266077 - RNA, 19 nt, Artificial Sequence
  Description of Artificial Sequence: Synthetic oligonucleotide
cugggccucccgguugcac

SEQ ID NO: 2266078 - RNA, 19 nt, Artificial Sequence
  Description of Artificial Sequence: Synthetic oligonucleotide
ucccacuccuuggcauauc

SEQ ID NO: 2266079 - RNA, 19 nt, Artificial Sequence
  Description of Artificial Sequence: Synthetic oligonucleotide
caacagcagcgcuuucagu

SEQ ID NO: 2266080 - RNA, 19 nt, Artificial Sequence
  Description of Artificial Sequence: Synthetic oligonucleotide
cccgguugcacucgauaca

SEQ ID NO: 2266081 - RNA, 19 nt, Artificial Sequence
  Description of Artificial Sequence: Synthetic oligonucleotide
ugaguacgccguggcugua

SEQ ID NO: 2266082 - RNA, 19 nt, Artificial Sequence
  Description of Artificial Sequence: Synthetic oligonucleotide
aggaauccccaggcuugau

SEQ ID NO: 2266083 - RNA, 19 nt, Artificial Sequence
  Description of Artificial Sequence: Synthetic oligonucleotide
caaccgucgccgcgcccuc

SEQ ID NO: 2266084 - RNA, 19 nt, Artificial Sequence
  Description of Artificial Sequence: Synthetic oligonucleotide
gucgauaggccugggcuuu

SEQ ID NO: 2266085 - RNA, 19 nt, Artificial Sequence
  Description of Artificial Sequence: Synthetic oligonucleotide
cgguacaaacaaggagagg

SEQ ID NO: 2266086 - RNA, 19 nt, Artificial Sequence
  Description of Artificial Sequence: Synthetic oligonucleotide
gcuggacaacagcagcgcu

SEQ ID NO: 2266087 - RNA, 19 nt, Artificial Sequence
  Description of Artificial Sequence: Synthetic oligonucleotide
ggcaagauuugcagauggu

SEQ ID NO: 2266088 - RNA, 19 nt, Artificial Sequence
  Description of Artificial Sequence: Synthetic oligonucleotide
cagcagcgcuuucaguagu

SEQ ID NO: 2266089 - RNA, 19 nt, Artificial Sequence
  Description of Artificial Sequence: Synthetic oligonucleotide
ccugcgguugguguucaga

SEQ ID NO: 2266090 - RNA, 19 nt, Artificial Sequence
  Description of Artificial Sequence: Synthetic oligonucleotide
cugggauuagcaggaguuu

SEQ ID NO: 2266091 - RNA, 19 nt, Artificial Sequence
  Description of Artificial Sequence: Synthetic oligonucleotide
cgguaacugguucuucaga

SEQ ID NO: 2266092 - RNA, 19 nt, Artificial Sequence
  Description of Artificial Sequence: Synthetic oligonucleotide
gcaaccgucgccgcgcccu

SEQ ID NO: 2266093 - RNA, 19 nt, Artificial Sequence
  Description of Artificial Sequence: Synthetic oligonucleotide
ggacaacagcagcgcuuuc

SEQ ID NO: 2266094 - RNA, 19 nt, Artificial Sequence
  Description of Artificial Sequence: Synthetic oligonucleotide
ccgacgcccgccagucccc

SEQ ID NO: 2266095 - RNA, 19 nt, Artificial Sequence
  Description of Artificial Sequence: Synthetic oligonucleotide
cccuucccggaccgcgucc

SEQ ID NO: 2266096 - RNA, 19 nt, Artificial Sequence
  Description of Artificial Sequence: Synthetic oligonucleotide
gcagcgcuuucaguaguaa

SEQ ID NO: 2266097 - RNA, 19 nt, Artificial Sequence
  Description of Artificial Sequence: Synthetic oligonucleotide
ggcaaccgucgccgcgccc

SEQ ID NO: 2266098 - RNA, 19 nt, Artificial Sequence
  Description of Artificial Sequence: Synthetic oligonucleotide
cgcccgccaguccccaugg

SEQ ID NO: 2266099 - RNA, 19 nt, Artificial Sequence
  Description of Artificial Sequence: Synthetic oligonucleotide
ggugcccuucccggaccgc

SEQ ID NO: 2266100 - RNA, 19 nt, Artificial Sequence
  Description of Artificial Sequence: Synthetic oligonucleotide
cggugcccuucccggaccg

SEQ ID NO: 2266101 - RNA, 19 nt, Artificial Sequence
  Description of Artificial Sequence: Synthetic oligonucleotide
cgccguggcuguagucccg

SEQ ID NO: 2266102 - RNA, 19 nt, Artificial Sequence
  Description of Artificial Sequence: Synthetic oligonucleotide
ccacaucccacuccauccu

SEQ ID NO: 2266103 - RNA, 19 nt, Artificial Sequence
  Description of Artificial Sequence: Synthetic oligonucleotide
ccucggugcccuucccgga

SEQ ID NO: 2266104 - RNA, 19 nt, Artificial Sequence
  Description of Artificial Sequence: Synthetic oligonucleotide
cgucgccgcgcccucggug

SEQ ID NO: 2266105 - RNA, 19 nt, Artificial Sequence
  Description of Artificial Sequence: Synthetic oligonucleotide
gacgcccgccaguccccau

SEQ ID NO: 2266106 - RNA, 19 nt, Artificial Sequence
  Description of Artificial Sequence: Synthetic oligonucleotide
ccccaggcuugauuucacu

SEQ ID NO: 2266107 - RNA, 19 nt, Artificial Sequence
  Description of Artificial Sequence: Synthetic oligonucleotide
ccccgacgcccgccagucc

SEQ ID NO: 2266108 - RNA, 19 nt, Artificial Sequence
  Description of Artificial Sequence: Synthetic oligonucleotide
ccucccgguugcacucgau

SEQ ID NO: 2266109 - RNA, 19 nt, Artificial Sequence
  Description of Artificial Sequence: Synthetic oligonucleotide
auuauuauuaggcagaucu

SEQ ID NO: 2266110 - RNA, 19 nt, Artificial Sequence
  Description of Artificial Sequence: Synthetic oligonucleotide
aagagagccaucuuggacc

SEQ ID NO: 2266111 - RNA, 19 nt, Artificial Sequence
  Description of Artificial Sequence: Synthetic oligonucleotide
uuuaugaagaccaaaugcc

SEQ ID NO: 2266112 - RNA, 19 nt, Artificial Sequence
  Description of Artificial Sequence: Synthetic oligonucleotide
uaaaagauggcuuaaccag

SEQ ID NO: 2266113 - RNA, 19 nt, Artificial Sequence
  Description of Artificial Sequence: Synthetic oligonucleotide
uauuauuauuauuauuagg

SEQ ID NO: 2266114 - RNA, 19 nt, Artificial Sequence
  Description of Artificial Sequence: Synthetic oligonucleotide
agcaauuuguaucuaagcg

SEQ ID NO: 2266115 - RNA, 19 nt, Artificial Sequence
  Description of Artificial Sequence: Synthetic oligonucleotide
uauaaaagauggcuuaacc

SEQ ID NO: 2266116 - RNA, 19 nt, Artificial Sequence
  Description of Artificial Sequence: Synthetic oligonucleotide
gauaaugugugcuaaaguc

SEQ ID NO: 2266117 - RNA, 19 nt, Artificial Sequence
  Description of Artificial Sequence: Synthetic oligonucleotide
uauccugcgacucuggagg

SEQ ID NO: 2266118 - RNA, 19 nt, Artificial Sequence
  Description of Artificial Sequence: Synthetic oligonucleotide
uuauuauuauuauuauuag

SEQ ID NO: 2266119 - RNA, 19 nt, Artificial Sequence
  Description of Artificial Sequence: Synthetic oligonucleotide
agaguuuacacacucgagg

SEQ ID NO: 2266120 - RNA, 19 nt, Artificial Sequence
  Description of Artificial Sequence: Synthetic oligonucleotide
cuuauuauuauuauuauua

SEQ ID NO: 2266121 - RNA, 19 nt, Artificial Sequence
  Description of Artificial Sequence: Synthetic oligonucleotide
uaagcgauuauaaaucugu

SEQ ID NO: 2266122 - RNA, 19 nt, Artificial Sequence
  Description of Artificial Sequence: Synthetic oligonucleotide
auuauuauuauuauuauua

SEQ ID NO: 2266123 - RNA, 19 nt, Artificial Sequence
  Description of Artificial Sequence: Synthetic oligonucleotide
uacuagucaaggaacagag

SEQ ID NO: 2266124 - RNA, 19 nt, Artificial Sequence
  Description of Artificial Sequence: Synthetic oligonucleotide
aaaagauggcuuaaccagc

SEQ ID NO: 2266125 - RNA, 19 nt, Artificial Sequence
  Description of Artificial Sequence: Synthetic oligonucleotide
auaaaagauggcuuaacca

SEQ ID NO: 2266126 - RNA, 19 nt, Artificial Sequence
  Description of Artificial Sequence: Synthetic oligonucleotide
ugaguuacuagucaaggaa

SEQ ID NO: 2266127 - RNA, 19 nt, Artificial Sequence
  Description of Artificial Sequence: Synthetic oligonucleotide
uguaucuaagcgauuauaa

SEQ ID NO: 2266128 - RNA, 19 nt, Artificial Sequence
  Description of Artificial Sequence: Synthetic oligonucleotide
uaucuaagcgauuauaaau

SEQ ID NO: 2266129 - RNA, 19 nt, Artificial Sequence
  Description of Artificial Sequence: Synthetic oligonucleotide
uguuuaugaagaccaaaug

SEQ ID NO: 2266130 - RNA, 19 nt, Artificial Sequence
  Description of Artificial Sequence: Synthetic oligonucleotide
uaggguaauguacaccacg

SEQ ID NO: 2266131 - RNA, 19 nt, Artificial Sequence
  Description of Artificial Sequence: Synthetic oligonucleotide
ucuucaaaacugaaacugc

SEQ ID NO: 2266132 - RNA, 19 nt, Artificial Sequence
  Description of Artificial Sequence: Synthetic oligonucleotide
uuuuggucaucacaguuug

SEQ ID NO: 2266133 - RNA, 19 nt, Artificial Sequence
  Description of Artificial Sequence: Synthetic oligonucleotide
agauggcuuaaccagcgcc

SEQ ID NO: 2266134 - RNA, 19 nt, Artificial Sequence
  Description of Artificial Sequence: Synthetic oligonucleotide
auccacagcaauuuguauc

SEQ ID NO: 2266135 - RNA, 19 nt, Artificial Sequence
  Description of Artificial Sequence: Synthetic oligonucleotide
uucaaaacugaaacugcag

SEQ ID NO: 2266136 - RNA, 19 nt, Artificial Sequence
  Description of Artificial Sequence: Synthetic oligonucleotide
caaaacugaaacugcagag

SEQ ID NO: 2266137 - RNA, 19 nt, Artificial Sequence
  Description of Artificial Sequence: Synthetic oligonucleotide
aagaguaccuuggagaugu

SEQ ID NO: 2266138 - RNA, 19 nt, Artificial Sequence
  Description of Artificial Sequence: Synthetic oligonucleotide
agguagauggcacaggcag

SEQ ID NO: 2266139 - RNA, 19 nt, Artificial Sequence
  Description of Artificial Sequence: Synthetic oligonucleotide
uaaugugugcuaaagucac

SEQ ID NO: 2266140 - RNA, 19 nt, Artificial Sequence
  Description of Artificial Sequence: Synthetic oligonucleotide
auaggagugaguuacuagu

SEQ ID NO: 2266141 - RNA, 19 nt, Artificial Sequence
  Description of Artificial Sequence: Synthetic oligonucleotide
uuaugaagaccaaaugccu

SEQ ID NO: 2266142 - RNA, 19 nt, Artificial Sequence
  Description of Artificial Sequence: Synthetic oligonucleotide
gucggaaacucucugaugc

SEQ ID NO: 2266143 - RNA, 19 nt, Artificial Sequence
  Description of Artificial Sequence: Synthetic oligonucleotide
guaauguacaccacguugg

SEQ ID NO: 2266144 - RNA, 19 nt, Artificial Sequence
  Description of Artificial Sequence: Synthetic oligonucleotide
aucuaagcgauuauaaauc

SEQ ID NO: 2266145 - RNA, 19 nt, Artificial Sequence
  Description of Artificial Sequence: Synthetic oligonucleotide
uuauuauuauuauuauuau

SEQ ID NO: 2266146 - RNA, 19 nt, Artificial Sequence
  Description of Artificial Sequence: Synthetic oligonucleotide
uccggaaagaguaccuugg

SEQ ID NO: 2266147 - RNA, 19 nt, Artificial Sequence
  Description of Artificial Sequence: Synthetic oligonucleotide
aauuuuggucaucacaguu

SEQ ID NO: 2266148 - RNA, 19 nt, Artificial Sequence
  Description of Artificial Sequence: Synthetic oligonucleotide
ucuacagaguggcauagga

SEQ ID NO: 2266149 - RNA, 19 nt, Artificial Sequence
  Description of Artificial Sequence: Synthetic oligonucleotide
uauuauuaggcagaucucu

SEQ ID NO: 2266150 - RNA, 19 nt, Artificial Sequence
  Description of Artificial Sequence: Synthetic oligonucleotide
agccccauaacccugagca

SEQ ID NO: 2266151 - RNA, 19 nt, Artificial Sequence
  Description of Artificial Sequence: Synthetic oligonucleotide
uaauguacaccacguuggg

SEQ ID NO: 2266152 - RNA, 19 nt, Artificial Sequence
  Description of Artificial Sequence: Synthetic oligonucleotide
uuucgcuggauaaugugug

SEQ ID NO: 2266153 - RNA, 19 nt, Artificial Sequence
  Description of Artificial Sequence: Synthetic oligonucleotide
ucuaagcgauuauaaaucu

SEQ ID NO: 2266154 - RNA, 19 nt, Artificial Sequence
  Description of Artificial Sequence: Synthetic oligonucleotide
aguuuuaaguugucuucac

SEQ ID NO: 2266155 - RNA, 19 nt, Artificial Sequence
  Description of Artificial Sequence: Synthetic oligonucleotide
ugaauccacagcaauuugu

SEQ ID NO: 2266156 - RNA, 19 nt, Artificial Sequence
  Description of Artificial Sequence: Synthetic oligonucleotide
ugcuccagaguuuacacac

SEQ ID NO: 2266157 - RNA, 19 nt, Artificial Sequence
  Description of Artificial Sequence: Synthetic oligonucleotide
agugaguuacuagucaagg

SEQ ID NO: 2266158 - RNA, 19 nt, Artificial Sequence
  Description of Artificial Sequence: Synthetic oligonucleotide
uauuauuauuauuauuauu

SEQ ID NO: 2266159 - RNA, 19 nt, Artificial Sequence
  Description of Artificial Sequence: Synthetic oligonucleotide
uuuaaguugucuucacuuc

SEQ ID NO: 2266160 - RNA, 19 nt, Artificial Sequence
  Description of Artificial Sequence: Synthetic oligonucleotide
uaacccugagcauagccag

SEQ ID NO: 2266161 - RNA, 19 nt, Artificial Sequence
  Description of Artificial Sequence: Synthetic oligonucleotide
aagcccuuauuguuuauga

SEQ ID NO: 2266162 - RNA, 19 nt, Artificial Sequence
  Description of Artificial Sequence: Synthetic oligonucleotide
aagauggcuuaaccagcgc

SEQ ID NO: 2266163 - RNA, 19 nt, Artificial Sequence
  Description of Artificial Sequence: Synthetic oligonucleotide
augaagaccaaaugccuug

SEQ ID NO: 2266164 - RNA, 19 nt, Artificial Sequence
  Description of Artificial Sequence: Synthetic oligonucleotide
acuuccugcaguauaaaag

SEQ ID NO: 2266165 - RNA, 19 nt, Artificial Sequence
  Description of Artificial Sequence: Synthetic oligonucleotide
ucuguaugcaggcaucuuc

SEQ ID NO: 2266166 - RNA, 19 nt, Artificial Sequence
  Description of Artificial Sequence: Synthetic oligonucleotide
uggauaaugugugcuaaag

SEQ ID NO: 2266167 - RNA, 19 nt, Artificial Sequence
  Description of Artificial Sequence: Synthetic oligonucleotide
gaggucugaauccacagca

SEQ ID NO: 2266168 - RNA, 19 nt, Artificial Sequence
  Description of Artificial Sequence: Synthetic oligonucleotide
agcauagccagguacuuca

SEQ ID NO: 2266169 - RNA, 19 nt, Artificial Sequence
  Description of Artificial Sequence: Synthetic oligonucleotide
cuguaugcaggcaucuucc

SEQ ID NO: 2266170 - RNA, 19 nt, Artificial Sequence
  Description of Artificial Sequence: Synthetic oligonucleotide
uuauuauuaggcagaucuc

SEQ ID NO: 2266171 - RNA, 19 nt, Artificial Sequence
  Description of Artificial Sequence: Synthetic oligonucleotide
uuauccugcgacucuggag

SEQ ID NO: 2266172 - RNA, 19 nt, Artificial Sequence
  Description of Artificial Sequence: Synthetic oligonucleotide
cugcgcuuggguuucaccg

SEQ ID NO: 2266173 - RNA, 19 nt, Artificial Sequence
  Description of Artificial Sequence: Synthetic oligonucleotide
acuuauuauuauuauuauu

SEQ ID NO: 2266174 - RNA, 19 nt, Artificial Sequence
  Description of Artificial Sequence: Synthetic oligonucleotide
ucuuucgcuggauaaugug

SEQ ID NO: 2266175 - RNA, 19 nt, Artificial Sequence
  Description of Artificial Sequence: Synthetic oligonucleotide
caauuuugaaguuuuaagu

SEQ ID NO: 2266176 - RNA, 19 nt, Artificial Sequence
  Description of Artificial Sequence: Synthetic oligonucleotide
cauaacccugagcauagcc

SEQ ID NO: 2266177 - RNA, 19 nt, Artificial Sequence
  Description of Artificial Sequence: Synthetic oligonucleotide
gcuugauccgcuuggagcg

SEQ ID NO: 2266178 - RNA, 19 nt, Artificial Sequence
  Description of Artificial Sequence: Synthetic oligonucleotide
auaaugugugcuaaaguca

SEQ ID NO: 2266179 - RNA, 19 nt, Artificial Sequence
  Description of Artificial Sequence: Synthetic oligonucleotide
aguccauucuguaugcagg

SEQ ID NO: 2266180 - RNA, 19 nt, Artificial Sequence
  Description of Artificial Sequence: Synthetic oligonucleotide
ucauucuuucgcuggauaa

SEQ ID NO: 2266181 - RNA, 19 nt, Artificial Sequence
  Description of Artificial Sequence: Synthetic oligonucleotide
uggcauaggagugaguuac

SEQ ID NO: 2266182 - RNA, 19 nt, Artificial Sequence
  Description of Artificial Sequence: Synthetic oligonucleotide
uuggguugcagugugcugc

SEQ ID NO: 2266183 - RNA, 19 nt, Artificial Sequence
  Description of Artificial Sequence: Synthetic oligonucleotide
uuaaccagcgccuccugac

SEQ ID NO: 2266184 - RNA, 19 nt, Artificial Sequence
  Description of Artificial Sequence: Synthetic oligonucleotide
uggaaagaggcccugccaa

SEQ ID NO: 2266185 - RNA, 19 nt, Artificial Sequence
  Description of Artificial Sequence: Synthetic oligonucleotide
gacgaggggccacagauac

SEQ ID NO: 2266186 - RNA, 19 nt, Artificial Sequence
  Description of Artificial Sequence: Synthetic oligonucleotide
uuacuagucaaggaacaga

SEQ ID NO: 2266187 - RNA, 19 nt, Artificial Sequence
  Description of Artificial Sequence: Synthetic oligonucleotide
accuuggagaugucgcggc

SEQ ID NO: 2266188 - RNA, 19 nt, Artificial Sequence
  Description of Artificial Sequence: Synthetic oligonucleotide
auguacaccacguuggguu

SEQ ID NO: 2266189 - RNA, 19 nt, Artificial Sequence
  Description of Artificial Sequence: Synthetic oligonucleotide
auuggcaggcuugauccgc

SEQ ID NO: 2266190 - RNA, 19 nt, Artificial Sequence
  Description of Artificial Sequence: Synthetic oligonucleotide
cuaagcgauuauaaaucug

SEQ ID NO: 2266191 - RNA, 19 nt, Artificial Sequence
  Description of Artificial Sequence: Synthetic oligonucleotide
ugcagagucggaaacucuc

SEQ ID NO: 2266192 - RNA, 19 nt, Artificial Sequence
  Description of Artificial Sequence: Synthetic oligonucleotide
uaaccagcgccuccugacg

SEQ ID NO: 2266193 - RNA, 19 nt, Artificial Sequence
  Description of Artificial Sequence: Synthetic oligonucleotide
ugauggauuucagugcagc

SEQ ID NO: 2266194 - RNA, 19 nt, Artificial Sequence
  Description of Artificial Sequence: Synthetic oligonucleotide
auauuacuuauuauuauua

SEQ ID NO: 2266195 - RNA, 19 nt, Artificial Sequence
  Description of Artificial Sequence: Synthetic oligonucleotide
agcgauuauaaaucuguaa

SEQ ID NO: 2266196 - RNA, 19 nt, Artificial Sequence
  Description of Artificial Sequence: Synthetic oligonucleotide
cuucaaaacugaaacugca

SEQ ID NO: 2266197 - RNA, 19 nt, Artificial Sequence
  Description of Artificial Sequence: Synthetic oligonucleotide
gaguuacuagucaaggaac

SEQ ID NO: 2266198 - RNA, 19 nt, Artificial Sequence
  Description of Artificial Sequence: Synthetic oligonucleotide
uuuggucaucacaguuugg

SEQ ID NO: 2266199 - RNA, 19 nt, Artificial Sequence
  Description of Artificial Sequence: Synthetic oligonucleotide
guaccuuggagaugucgcg

SEQ ID NO: 2266200 - RNA, 19 nt, Artificial Sequence
  Description of Artificial Sequence: Synthetic oligonucleotide
uuuguaucuaagcgauuau

SEQ ID NO: 2266201 - RNA, 19 nt, Artificial Sequence
  Description of Artificial Sequence: Synthetic oligonucleotide
aauccacagcaauuuguau

SEQ ID NO: 2266202 - RNA, 19 nt, Artificial Sequence
  Description of Artificial Sequence: Synthetic oligonucleotide
uccuuucgaggucugaauc

SEQ ID NO: 2266203 - RNA, 19 nt, Artificial Sequence
  Description of Artificial Sequence: Synthetic oligonucleotide
gagaugucgcggcuguggg

SEQ ID NO: 2266204 - RNA, 19 nt, Artificial Sequence
  Description of Artificial Sequence: Synthetic oligonucleotide
uugaaguuuuaaguugucu

SEQ ID NO: 2266205 - RNA, 19 nt, Artificial Sequence
  Description of Artificial Sequence: Synthetic oligonucleotide
aaagaggcccugccaaccu

SEQ ID NO: 2266206 - RNA, 19 nt, Artificial Sequence
  Description of Artificial Sequence: Synthetic oligonucleotide
gcaauuuguaucuaagcga

SEQ ID NO: 2266207 - RNA, 19 nt, Artificial Sequence
  Description of Artificial Sequence: Synthetic oligonucleotide
ugucguaauggcuggcucu

SEQ ID NO: 2266208 - RNA, 19 nt, Artificial Sequence
  Description of Artificial Sequence: Synthetic oligonucleotide
cacagauaccacugcauac

SEQ ID NO: 2266209 - RNA, 19 nt, Artificial Sequence
  Description of Artificial Sequence: Synthetic oligonucleotide
acagauaccacugcauacu

SEQ ID NO: 2266210 - RNA, 19 nt, Artificial Sequence
  Description of Artificial Sequence: Synthetic oligonucleotide
uucgaggucugaauccaca

SEQ ID NO: 2266211 - RNA, 19 nt, Artificial Sequence
  Description of Artificial Sequence: Synthetic oligonucleotide
uguacaccacguuggguug

SEQ ID NO: 2266212 - RNA, 19 nt, Artificial Sequence
  Description of Artificial Sequence: Synthetic oligonucleotide
uucaccgugccacggauau

SEQ ID NO: 2266213 - RNA, 19 nt, Artificial Sequence
  Description of Artificial Sequence: Synthetic oligonucleotide
gcccuuauuguuuaugaag

SEQ ID NO: 2266214 - RNA, 19 nt, Artificial Sequence
  Description of Artificial Sequence: Synthetic oligonucleotide
agcguaggguaauguacac

SEQ ID NO: 2266215 - RNA, 19 nt, Artificial Sequence
  Description of Artificial Sequence: Synthetic oligonucleotide
uggucaucacaguuuggcc

SEQ ID NO: 2266216 - RNA, 19 nt, Artificial Sequence
  Description of Artificial Sequence: Synthetic oligonucleotide
ugaaacugcagagucggaa

SEQ ID NO: 2266217 - RNA, 19 nt, Artificial Sequence
  Description of Artificial Sequence: Synthetic oligonucleotide
gaaacugcagagucggaaa

SEQ ID NO: 2266218 - RNA, 19 nt, Artificial Sequence
  Description of Artificial Sequence: Synthetic oligonucleotide
uaggagugaguuacuaguc

SEQ ID NO: 2266219 - RNA, 19 nt, Artificial Sequence
  Description of Artificial Sequence: Synthetic oligonucleotide
uuauuauuauuaggcagau

SEQ ID NO: 2266220 - RNA, 19 nt, Artificial Sequence
  Description of Artificial Sequence: Synthetic oligonucleotide
auucuuucgcuggauaaug

SEQ ID NO: 2266221 - RNA, 19 nt, Artificial Sequence
  Description of Artificial Sequence: Synthetic oligonucleotide
uuggaucauucuuucgcug

SEQ ID NO: 2266222 - RNA, 19 nt, Artificial Sequence
  Description of Artificial Sequence: Synthetic oligonucleotide
cuucugucguaauggcugg

SEQ ID NO: 2266223 - RNA, 19 nt, Artificial Sequence
  Description of Artificial Sequence: Synthetic oligonucleotide
ugcccaugcuggaaagagg

SEQ ID NO: 2266224 - RNA, 19 nt, Artificial Sequence
  Description of Artificial Sequence: Synthetic oligonucleotide
ugccuucuagcaauuuuga

SEQ ID NO: 2266225 - RNA, 19 nt, Artificial Sequence
  Description of Artificial Sequence: Synthetic oligonucleotide
aagaagcccuuauuguuua

SEQ ID NO: 2266226 - RNA, 19 nt, Artificial Sequence
  Description of Artificial Sequence: Synthetic oligonucleotide
cagaguuuacacacucgag

SEQ ID NO: 2266227 - RNA, 19 nt, Artificial Sequence
  Description of Artificial Sequence: Synthetic oligonucleotide
aguggcauaggagugaguu

SEQ ID NO: 2266228 - RNA, 19 nt, Artificial Sequence
  Description of Artificial Sequence: Synthetic oligonucleotide
ccuuggaucauucuuucgc

SEQ ID NO: 2266229 - RNA, 19 nt, Artificial Sequence
  Description of Artificial Sequence: Synthetic oligonucleotide
uucuuucgcuggauaaugu

SEQ ID NO: 2266230 - RNA, 19 nt, Artificial Sequence
  Description of Artificial Sequence: Synthetic oligonucleotide
guaucuaagcgauuauaaa

SEQ ID NO: 2266231 - RNA, 19 nt, Artificial Sequence
  Description of Artificial Sequence: Synthetic oligonucleotide
gaguaccuuggagaugucg

SEQ ID NO: 2266232 - RNA, 19 nt, Artificial Sequence
  Description of Artificial Sequence: Synthetic oligonucleotide
ucuagcaauuuugaaguuu

SEQ ID NO: 2266233 - RNA, 19 nt, Artificial Sequence
  Description of Artificial Sequence: Synthetic oligonucleotide
aaagaguaccuuggagaug

SEQ ID NO: 2266234 - RNA, 19 nt, Artificial Sequence
  Description of Artificial Sequence: Synthetic oligonucleotide
agagucggaaacucucuga

SEQ ID NO: 2266235 - RNA, 19 nt, Artificial Sequence
  Description of Artificial Sequence: Synthetic oligonucleotide
uaccuuggagaugucgcgg

SEQ ID NO: 2266236 - RNA, 19 nt, Artificial Sequence
  Description of Artificial Sequence: Synthetic oligonucleotide
aguuacuagucaaggaaca

SEQ ID NO: 2266237 - RNA, 19 nt, Artificial Sequence
  Description of Artificial Sequence: Synthetic oligonucleotide
guccauucuguaugcaggc

SEQ ID NO: 2266238 - RNA, 19 nt, Artificial Sequence
  Description of Artificial Sequence: Synthetic oligonucleotide
gagugaguuacuagucaag

SEQ ID NO: 2266239 - RNA, 19 nt, Artificial Sequence
  Description of Artificial Sequence: Synthetic oligonucleotide
uucgcuggauaaugugugc

SEQ ID NO: 2266240 - RNA, 19 nt, Artificial Sequence
  Description of Artificial Sequence: Synthetic oligonucleotide
aaucaaagagagccaucuu

SEQ ID NO: 2266241 - RNA, 19 nt, Artificial Sequence
  Description of Artificial Sequence: Synthetic oligonucleotide
aggagcuucugucguaaug

SEQ ID NO: 2266242 - RNA, 19 nt, Artificial Sequence
  Description of Artificial Sequence: Synthetic oligonucleotide
aguauaaaagauggcuuaa

SEQ ID NO: 2266243 - RNA, 19 nt, Artificial Sequence
  Description of Artificial Sequence: Synthetic oligonucleotide
aauguacaccacguugggu

SEQ ID NO: 2266244 - RNA, 19 nt, Artificial Sequence
  Description of Artificial Sequence: Synthetic oligonucleotide
cauucuguaugcaggcauc

SEQ ID NO: 2266245 - RNA, 19 nt, Artificial Sequence
  Description of Artificial Sequence: Synthetic oligonucleotide
cauuauccugcgacucugg

SEQ ID NO: 2266246 - RNA, 19 nt, Artificial Sequence
  Description of Artificial Sequence: Synthetic oligonucleotide
guauaaaagauggcuuaac

SEQ ID NO: 2266247 - RNA, 19 nt, Artificial Sequence
  Description of Artificial Sequence: Synthetic oligonucleotide
agacugaaggagcuucugu

SEQ ID NO: 2266248 - RNA, 19 nt, Artificial Sequence
  Description of Artificial Sequence: Synthetic oligonucleotide
gaagcccuuauuguuuaug

SEQ ID NO: 2266249 - RNA, 19 nt, Artificial Sequence
  Description of Artificial Sequence: Synthetic oligonucleotide
ucggaaacucucugaugcc

SEQ ID NO: 2266250 - RNA, 19 nt, Artificial Sequence
  Description of Artificial Sequence: Synthetic oligonucleotide
caauuuguaucuaagcgau

SEQ ID NO: 2266251 - RNA, 19 nt, Artificial Sequence
  Description of Artificial Sequence: Synthetic oligonucleotide
uuguaucuaagcgauuaua

SEQ ID NO: 2266252 - RNA, 19 nt, Artificial Sequence
  Description of Artificial Sequence: Synthetic oligonucleotide
caggcaucuuccuuucgag

SEQ ID NO: 2266253 - RNA, 19 nt, Artificial Sequence
  Description of Artificial Sequence: Synthetic oligonucleotide
auccgcuuggagcguaggg

SEQ ID NO: 2266254 - RNA, 19 nt, Artificial Sequence
  Description of Artificial Sequence: Synthetic oligonucleotide
gaaacucucugaugccuuc

SEQ ID NO: 2266255 - RNA, 19 nt, Artificial Sequence
  Description of Artificial Sequence: Synthetic oligonucleotide
cauagccagguacuucagc

SEQ ID NO: 2266256 - RNA, 19 nt, Artificial Sequence
  Description of Artificial Sequence: Synthetic oligonucleotide
gagcuucugucguaauggc

SEQ ID NO: 2266257 - RNA, 19 nt, Artificial Sequence
  Description of Artificial Sequence: Synthetic oligonucleotide
cuccggaaagaguaccuug

SEQ ID NO: 2266258 - RNA, 19 nt, Artificial Sequence
  Description of Artificial Sequence: Synthetic oligonucleotide
aaccagcgccuccugacga

SEQ ID NO: 2266259 - RNA, 19 nt, Artificial Sequence
  Description of Artificial Sequence: Synthetic oligonucleotide
ugcauacuucuuccugcgc

SEQ ID NO: 2266260 - RNA, 19 nt, Artificial Sequence
  Description of Artificial Sequence: Synthetic oligonucleotide
gugaguuacuagucaagga

SEQ ID NO: 2266261 - RNA, 19 nt, Artificial Sequence
  Description of Artificial Sequence: Synthetic oligonucleotide
cugcaguauaaaagauggc

SEQ ID NO: 2266262 - RNA, 19 nt, Artificial Sequence
  Description of Artificial Sequence: Synthetic oligonucleotide
agaugucgcggcugugggg

SEQ ID NO: 2266263 - RNA, 19 nt, Artificial Sequence
  Description of Artificial Sequence: Synthetic oligonucleotide
auuuuggucaucacaguuu

SEQ ID NO: 2266264 - RNA, 19 nt, Artificial Sequence
  Description of Artificial Sequence: Synthetic oligonucleotide
caccgugccacggauauug

SEQ ID NO: 2266265 - RNA, 19 nt, Artificial Sequence
  Description of Artificial Sequence: Synthetic oligonucleotide
ucugguccugggacgccgg

SEQ ID NO: 2266266 - RNA, 19 nt, Artificial Sequence
  Description of Artificial Sequence: Synthetic oligonucleotide
ucugucguaauggcuggcu

SEQ ID NO: 2266267 - RNA, 19 nt, Artificial Sequence
  Description of Artificial Sequence: Synthetic oligonucleotide
acggauauuggcaggcuug

SEQ ID NO: 2266268 - RNA, 19 nt, Artificial Sequence
  Description of Artificial Sequence: Synthetic oligonucleotide
agaguggcauaggagugag

SEQ ID NO: 2266269 - RNA, 19 nt, Artificial Sequence
  Description of Artificial Sequence: Synthetic oligonucleotide
aggguaauguacaccacgu

SEQ ID NO: 2266270 - RNA, 19 nt, Artificial Sequence
  Description of Artificial Sequence: Synthetic oligonucleotide
uccgcuuggagcguagggu

SEQ ID NO: 2266271 - RNA, 19 nt, Artificial Sequence
  Description of Artificial Sequence: Synthetic oligonucleotide
uuucgaggucugaauccac

SEQ ID NO: 2266272 - RNA, 19 nt, Artificial Sequence
  Description of Artificial Sequence: Synthetic oligonucleotide
ccuuucgaggucugaaucc

SEQ ID NO: 2266273 - RNA, 19 nt, Artificial Sequence
  Description of Artificial Sequence: Synthetic oligonucleotide
uuccuuucgaggucugaau

SEQ ID NO: 2266274 - RNA, 19 nt, Artificial Sequence
  Description of Artificial Sequence: Synthetic oligonucleotide
ugccacggauauuggcagg

SEQ ID NO: 2266275 - RNA, 19 nt, Artificial Sequence
  Description of Artificial Sequence: Synthetic oligonucleotide
ugcaggcaucuuccuuucg

SEQ ID NO: 2266276 - RNA, 19 nt, Artificial Sequence
  Description of Artificial Sequence: Synthetic oligonucleotide
uggagcguaggguaaugua

SEQ ID NO: 2266277 - RNA, 19 nt, Artificial Sequence
  Description of Artificial Sequence: Synthetic oligonucleotide
uauuauuauuaggcagauc

SEQ ID NO: 2266278 - RNA, 19 nt, Artificial Sequence
  Description of Artificial Sequence: Synthetic oligonucleotide
gacgccggcugcuccagag

SEQ ID NO: 2266279 - RNA, 19 nt, Artificial Sequence
  Description of Artificial Sequence: Synthetic oligonucleotide
gagcguaggguaauguaca

SEQ ID NO: 2266280 - RNA, 19 nt, Artificial Sequence
  Description of Artificial Sequence: Synthetic oligonucleotide
gacuuccugcaguauaaaa

SEQ ID NO: 2266281 - RNA, 19 nt, Artificial Sequence
  Description of Artificial Sequence: Synthetic oligonucleotide
acagaguggcauaggagug

SEQ ID NO: 2266282 - RNA, 19 nt, Artificial Sequence
  Description of Artificial Sequence: Synthetic oligonucleotide
cuucugucaaagaagcccu

SEQ ID NO: 2266283 - RNA, 19 nt, Artificial Sequence
  Description of Artificial Sequence: Synthetic oligonucleotide
agccaucuuggaccacucg

SEQ ID NO: 2266284 - RNA, 19 nt, Artificial Sequence
  Description of Artificial Sequence: Synthetic oligonucleotide
aaugugugcuaaagucaca

SEQ ID NO: 2266285 - RNA, 19 nt, Artificial Sequence
  Description of Artificial Sequence: Synthetic oligonucleotide
ggaccacucguggugaugg

SEQ ID NO: 2266286 - RNA, 19 nt, Artificial Sequence
  Description of Artificial Sequence: Synthetic oligonucleotide
cugcccaugcuggaaagag

SEQ ID NO: 2266287 - RNA, 19 nt, Artificial Sequence
  Description of Artificial Sequence: Synthetic oligonucleotide
agagccaucuuggaccacu

SEQ ID NO: 2266288 - RNA, 19 nt, Artificial Sequence
  Description of Artificial Sequence: Synthetic oligonucleotide
uggucuacagaguggcaua

SEQ ID NO: 2266289 - RNA, 19 nt, Artificial Sequence
  Description of Artificial Sequence: Synthetic oligonucleotide
ucguggugauggauuucag

SEQ ID NO: 2266290 - RNA, 19 nt, Artificial Sequence
  Description of Artificial Sequence: Synthetic oligonucleotide
agauaccacugcauacuuc

SEQ ID NO: 2266291 - RNA, 19 nt, Artificial Sequence
  Description of Artificial Sequence: Synthetic oligonucleotide
uggcuuaaccagcgccucc

SEQ ID NO: 2266292 - RNA, 19 nt, Artificial Sequence
  Description of Artificial Sequence: Synthetic oligonucleotide
aucuuggaccacucguggu

SEQ ID NO: 2266293 - RNA, 19 nt, Artificial Sequence
  Description of Artificial Sequence: Synthetic oligonucleotide
auucuguaugcaggcaucu

SEQ ID NO: 2266294 - RNA, 19 nt, Artificial Sequence
  Description of Artificial Sequence: Synthetic oligonucleotide
ugauccgcuuggagcguag

SEQ ID NO: 2266295 - RNA, 19 nt, Artificial Sequence
  Description of Artificial Sequence: Synthetic oligonucleotide
cuagcaauuuugaaguuuu

SEQ ID NO: 2266296 - RNA, 19 nt, Artificial Sequence
  Description of Artificial Sequence: Synthetic oligonucleotide
ggagcguaggguaauguac

SEQ ID NO: 2266297 - RNA, 19 nt, Artificial Sequence
  Description of Artificial Sequence: Synthetic oligonucleotide
uuggcaggcuugauccgcu

SEQ ID NO: 2266298 - RNA, 19 nt, Artificial Sequence
  Description of Artificial Sequence: Synthetic oligonucleotide
cacguuggguugcagugug

SEQ ID NO: 2266299 - RNA, 19 nt, Artificial Sequence
  Description of Artificial Sequence: Synthetic oligonucleotide
gaauuuuggucaucacagu

SEQ ID NO: 2266300 - RNA, 19 nt, Artificial Sequence
  Description of Artificial Sequence: Synthetic oligonucleotide
cuuucgcuggauaaugugu

SEQ ID NO: 2266301 - RNA, 19 nt, Artificial Sequence
  Description of Artificial Sequence: Synthetic oligonucleotide
guuuuaaguugucuucacu

SEQ ID NO: 2266302 - RNA, 19 nt, Artificial Sequence
  Description of Artificial Sequence: Synthetic oligonucleotide
ucgcuggauaaugugugcu

SEQ ID NO: 2266303 - RNA, 19 nt, Artificial Sequence
  Description of Artificial Sequence: Synthetic oligonucleotide
ugaaggagcuucugucgua

SEQ ID NO: 2266304 - RNA, 19 nt, Artificial Sequence
  Description of Artificial Sequence: Synthetic oligonucleotide
ucugucaaagaagcccuua

SEQ ID NO: 2266305 - RNA, 19 nt, Artificial Sequence
  Description of Artificial Sequence: Synthetic oligonucleotide
gagacugaaggagcuucug

SEQ ID NO: 2266306 - RNA, 19 nt, Artificial Sequence
  Description of Artificial Sequence: Synthetic oligonucleotide
agcccuuauuguuuaugaa

SEQ ID NO: 2266307 - RNA, 19 nt, Artificial Sequence
  Description of Artificial Sequence: Synthetic oligonucleotide
cguaggguaauguacacca

SEQ ID NO: 2266308 - RNA, 19 nt, Artificial Sequence
  Description of Artificial Sequence: Synthetic oligonucleotide
ugccauuauccugcgacuc

SEQ ID NO: 2266309 - RNA, 19 nt, Artificial Sequence
  Description of Artificial Sequence: Synthetic oligonucleotide
caaagagagccaucuugga

SEQ ID NO: 2266310 - RNA, 19 nt, Artificial Sequence
  Description of Artificial Sequence: Synthetic oligonucleotide
aagcgauuauaaaucugua

SEQ ID NO: 2266311 - RNA, 19 nt, Artificial Sequence
  Description of Artificial Sequence: Synthetic oligonucleotide
cuuggaucauucuuucgcu

SEQ ID NO: 2266312 - RNA, 19 nt, Artificial Sequence
  Description of Artificial Sequence: Synthetic oligonucleotide
ugcagugugcugccauuau

SEQ ID NO: 2266313 - RNA, 19 nt, Artificial Sequence
  Description of Artificial Sequence: Synthetic oligonucleotide
cuuucgaggucugaaucca

SEQ ID NO: 2266314 - RNA, 19 nt, Artificial Sequence
  Description of Artificial Sequence: Synthetic oligonucleotide
gauggcuuaaccagcgccu

SEQ ID NO: 2266315 - RNA, 19 nt, Artificial Sequence
  Description of Artificial Sequence: Synthetic oligonucleotide
uagcaauuuugaaguuuua

SEQ ID NO: 2266316 - RNA, 19 nt, Artificial Sequence
  Description of Artificial Sequence: Synthetic oligonucleotide
ccugagcauagccagguac

SEQ ID NO: 2266317 - RNA, 19 nt, Artificial Sequence
  Description of Artificial Sequence: Synthetic oligonucleotide
ugcgcgacuuccugcagua

SEQ ID NO: 2266318 - RNA, 19 nt, Artificial Sequence
  Description of Artificial Sequence: Synthetic oligonucleotide
agcgccuccugacgagggg

SEQ ID NO: 2266319 - RNA, 19 nt, Artificial Sequence
  Description of Artificial Sequence: Synthetic oligonucleotide
gaagcccagguagauggca

SEQ ID NO: 2266320 - RNA, 19 nt, Artificial Sequence
  Description of Artificial Sequence: Synthetic oligonucleotide
gucugcccaugcuggaaag

SEQ ID NO: 2266321 - RNA, 19 nt, Artificial Sequence
  Description of Artificial Sequence: Synthetic oligonucleotide
uuggagcguaggguaaugu

SEQ ID NO: 2266322 - RNA, 19 nt, Artificial Sequence
  Description of Artificial Sequence: Synthetic oligonucleotide
gaaggagcuucugucguaa

SEQ ID NO: 2266323 - RNA, 19 nt, Artificial Sequence
  Description of Artificial Sequence: Synthetic oligonucleotide
cugucguaauggcuggcuc

SEQ ID NO: 2266324 - RNA, 19 nt, Artificial Sequence
  Description of Artificial Sequence: Synthetic oligonucleotide
gaugucgcggcuguggggu

SEQ ID NO: 2266325 - RNA, 19 nt, Artificial Sequence
  Description of Artificial Sequence: Synthetic oligonucleotide
aucacaguuuggccucagu

SEQ ID NO: 2266326 - RNA, 19 nt, Artificial Sequence
  Description of Artificial Sequence: Synthetic oligonucleotide
gucuacagaguggcauagg

SEQ ID NO: 2266327 - RNA, 19 nt, Artificial Sequence
  Description of Artificial Sequence: Synthetic oligonucleotide
gauccgcuuggagcguagg

SEQ ID NO: 2266328 - RNA, 19 nt, Artificial Sequence
  Description of Artificial Sequence: Synthetic oligonucleotide
ugagcauagccagguacuu

SEQ ID NO: 2266329 - RNA, 19 nt, Artificial Sequence
  Description of Artificial Sequence: Synthetic oligonucleotide
ucaguccauucuguaugca

SEQ ID NO: 2266330 - RNA, 19 nt, Artificial Sequence
  Description of Artificial Sequence: Synthetic oligonucleotide
aaggagcuucugucguaau

SEQ ID NO: 2266331 - RNA, 19 nt, Artificial Sequence
  Description of Artificial Sequence: Synthetic oligonucleotide
cugagcauagccagguacu

SEQ ID NO: 2266332 - RNA, 19 nt, Artificial Sequence
  Description of Artificial Sequence: Synthetic oligonucleotide
uuucaccgugccacggaua

SEQ ID NO: 2266333 - RNA, 19 nt, Artificial Sequence
  Description of Artificial Sequence: Synthetic oligonucleotide
ccagaguuuacacacucga

SEQ ID NO: 2266334 - RNA, 19 nt, Artificial Sequence
  Description of Artificial Sequence: Synthetic oligonucleotide
ugacgaggggccacagaua

SEQ ID NO: 2266335 - RNA, 19 nt, Artificial Sequence
  Description of Artificial Sequence: Synthetic oligonucleotide
ugccugcgcgacuuccugc

SEQ ID NO: 2266336 - RNA, 19 nt, Artificial Sequence
  Description of Artificial Sequence: Synthetic oligonucleotide
ucugcccaugcuggaaaga

SEQ ID NO: 2266337 - RNA, 19 nt, Artificial Sequence
  Description of Artificial Sequence: Synthetic oligonucleotide
acuagucaaggaacagaga

SEQ ID NO: 2266338 - RNA, 19 nt, Artificial Sequence
  Description of Artificial Sequence: Synthetic oligonucleotide
guaauggcuggcucuucaa

SEQ ID NO: 2266339 - RNA, 19 nt, Artificial Sequence
  Description of Artificial Sequence: Synthetic oligonucleotide
ggucuacagaguggcauag

SEQ ID NO: 2266340 - RNA, 19 nt, Artificial Sequence
  Description of Artificial Sequence: Synthetic oligonucleotide
ggaaagaggcccugccaac

SEQ ID NO: 2266341 - RNA, 19 nt, Artificial Sequence
  Description of Artificial Sequence: Synthetic oligonucleotide
aucuccggaaagaguaccu

SEQ ID NO: 2266342 - RNA, 19 nt, Artificial Sequence
  Description of Artificial Sequence: Synthetic oligonucleotide
cuuggagcguaggguaaug

SEQ ID NO: 2266343 - RNA, 19 nt, Artificial Sequence
  Description of Artificial Sequence: Synthetic oligonucleotide
ucuccggaaagaguaccuu

SEQ ID NO: 2266344 - RNA, 19 nt, Artificial Sequence
  Description of Artificial Sequence: Synthetic oligonucleotide
gagcauagccagguacuuc

SEQ ID NO: 2266345 - RNA, 19 nt, Artificial Sequence
  Description of Artificial Sequence: Synthetic oligonucleotide
uucugucguaauggcuggc

SEQ ID NO: 2266346 - RNA, 19 nt, Artificial Sequence
  Description of Artificial Sequence: Synthetic oligonucleotide
gugauggauuucagugcag

SEQ ID NO: 2266347 - RNA, 19 nt, Artificial Sequence
  Description of Artificial Sequence: Synthetic oligonucleotide
gccuuggaucauucuuucg

SEQ ID NO: 2266348 - RNA, 19 nt, Artificial Sequence
  Description of Artificial Sequence: Synthetic oligonucleotide
cugacgaggggccacagau

SEQ ID NO: 2266349 - RNA, 19 nt, Artificial Sequence
  Description of Artificial Sequence: Synthetic oligonucleotide
uggaccacucguggugaug

SEQ ID NO: 2266350 - RNA, 19 nt, Artificial Sequence
  Description of Artificial Sequence: Synthetic oligonucleotide
uacaccacguuggguugca

SEQ ID NO: 2266351 - RNA, 19 nt, Artificial Sequence
  Description of Artificial Sequence: Synthetic oligonucleotide
guaggguaauguacaccac

SEQ ID NO: 2266352 - RNA, 19 nt, Artificial Sequence
  Description of Artificial Sequence: Synthetic oligonucleotide
cuuccuuucgaggucugaa

SEQ ID NO: 2266353 - RNA, 19 nt, Artificial Sequence
  Description of Artificial Sequence: Synthetic oligonucleotide
agaagcccuuauuguuuau

SEQ ID NO: 2266354 - RNA, 19 nt, Artificial Sequence
  Description of Artificial Sequence: Synthetic oligonucleotide
ucacagaauuuuggucauc

SEQ ID NO: 2266355 - RNA, 19 nt, Artificial Sequence
  Description of Artificial Sequence: Synthetic oligonucleotide
acguuggguugcagugugc

SEQ ID NO: 2266356 - RNA, 19 nt, Artificial Sequence
  Description of Artificial Sequence: Synthetic oligonucleotide
caugcuggaaagaggcccu

SEQ ID NO: 2266357 - RNA, 19 nt, Artificial Sequence
  Description of Artificial Sequence: Synthetic oligonucleotide
acgaggggccacagauacc

SEQ ID NO: 2266358 - RNA, 19 nt, Artificial Sequence
  Description of Artificial Sequence: Synthetic oligonucleotide
guacaccacguuggguugc

SEQ ID NO: 2266359 - RNA, 19 nt, Artificial Sequence
  Description of Artificial Sequence: Synthetic oligonucleotide
cagcagguuccuucugguc

SEQ ID NO: 2266360 - RNA, 19 nt, Artificial Sequence
  Description of Artificial Sequence: Synthetic oligonucleotide
cuggcucuucaaaacugaa

SEQ ID NO: 2266361 - RNA, 19 nt, Artificial Sequence
  Description of Artificial Sequence: Synthetic oligonucleotide
cuuccugcgcuuggguuuc

SEQ ID NO: 2266362 - RNA, 19 nt, Artificial Sequence
  Description of Artificial Sequence: Synthetic oligonucleotide
uucuguaugcaggcaucuu

SEQ ID NO: 2266363 - RNA, 19 nt, Artificial Sequence
  Description of Artificial Sequence: Synthetic oligonucleotide
gugcugccauuauccugcg

SEQ ID NO: 2266364 - RNA, 19 nt, Artificial Sequence
  Description of Artificial Sequence: Synthetic oligonucleotide
ugcugccauuauccugcga

SEQ ID NO: 2266365 - RNA, 19 nt, Artificial Sequence
  Description of Artificial Sequence: Synthetic oligonucleotide
ugucgcggcuguggggugc

SEQ ID NO: 2266366 - RNA, 19 nt, Artificial Sequence
  Description of Artificial Sequence: Synthetic oligonucleotide
guggcauaggagugaguua

SEQ ID NO: 2266367 - RNA, 19 nt, Artificial Sequence
  Description of Artificial Sequence: Synthetic oligonucleotide
cagaguggcauaggaguga

SEQ ID NO: 2266368 - RNA, 19 nt, Artificial Sequence
  Description of Artificial Sequence: Synthetic oligonucleotide
aguuuggccucaguccauu

SEQ ID NO: 2266369 - RNA, 19 nt, Artificial Sequence
  Description of Artificial Sequence: Synthetic oligonucleotide
cugggacgccggcugcucc

SEQ ID NO: 2266370 - RNA, 19 nt, Artificial Sequence
  Description of Artificial Sequence: Synthetic oligonucleotide
gccacggauauuggcaggc

SEQ ID NO: 2266371 - RNA, 19 nt, Artificial Sequence
  Description of Artificial Sequence: Synthetic oligonucleotide
gguuucaccgugccacgga

SEQ ID NO: 2266372 - RNA, 19 nt, Artificial Sequence
  Description of Artificial Sequence: Synthetic oligonucleotide
cuuucaguggucugcccau

SEQ ID NO: 2266373 - RNA, 19 nt, Artificial Sequence
  Description of Artificial Sequence: Synthetic oligonucleotide
ccaggguaccauccagggg

SEQ ID NO: 2266374 - RNA, 19 nt, Artificial Sequence
  Description of Artificial Sequence: Synthetic oligonucleotide
accacucguggugauggau

SEQ ID NO: 2266375 - RNA, 19 nt, Artificial Sequence
  Description of Artificial Sequence: Synthetic oligonucleotide
uuggaccacucguggugau

SEQ ID NO: 2266376 - RNA, 19 nt, Artificial Sequence
  Description of Artificial Sequence: Synthetic oligonucleotide
gcuggauaaugugugcuaa

SEQ ID NO: 2266377 - RNA, 19 nt, Artificial Sequence
  Description of Artificial Sequence: Synthetic oligonucleotide
uccugacgaggggccacag

SEQ ID NO: 2266378 - RNA, 19 nt, Artificial Sequence
  Description of Artificial Sequence: Synthetic oligonucleotide
gcguaggguaauguacacc

SEQ ID NO: 2266379 - RNA, 19 nt, Artificial Sequence
  Description of Artificial Sequence: Synthetic oligonucleotide
ugguccugggacgccggcu

SEQ ID NO: 2266380 - RNA, 19 nt, Artificial Sequence
  Description of Artificial Sequence: Synthetic oligonucleotide
uugauccgcuuggagcgua

SEQ ID NO: 2266381 - RNA, 19 nt, Artificial Sequence
  Description of Artificial Sequence: Synthetic oligonucleotide
guuucaccgugccacggau

SEQ ID NO: 2266382 - RNA, 19 nt, Artificial Sequence
  Description of Artificial Sequence: Synthetic oligonucleotide
accgugccacggauauugg

SEQ ID NO: 2266383 - RNA, 19 nt, Artificial Sequence
  Description of Artificial Sequence: Synthetic oligonucleotide
ggguuucaccgugccacgg

SEQ ID NO: 2266384 - RNA, 19 nt, Artificial Sequence
  Description of Artificial Sequence: Synthetic oligonucleotide
ccugcgcuuggguuucacc

SEQ ID NO: 2266385 - RNA, 19 nt, Artificial Sequence
  Description of Artificial Sequence: Synthetic oligonucleotide
gaccacucguggugaugga

SEQ ID NO: 2266386 - RNA, 19 nt, Artificial Sequence
  Description of Artificial Sequence: Synthetic oligonucleotide
cauucuuucgcuggauaau

SEQ ID NO: 2266387 - RNA, 19 nt, Artificial Sequence
  Description of Artificial Sequence: Synthetic oligonucleotide
gcaucugcugccugcgcga

SEQ ID NO: 2266388 - RNA, 19 nt, Artificial Sequence
  Description of Artificial Sequence: Synthetic oligonucleotide
ggucugaauccacagcaau

SEQ ID NO: 2266389 - RNA, 19 nt, Artificial Sequence
  Description of Artificial Sequence: Synthetic oligonucleotide
ucguaauggcuggcucuuc

SEQ ID NO: 2266390 - RNA, 19 nt, Artificial Sequence
  Description of Artificial Sequence: Synthetic oligonucleotide
cuggucuacagaguggcau

SEQ ID NO: 2266391 - RNA, 19 nt, Artificial Sequence
  Description of Artificial Sequence: Synthetic oligonucleotide
ggucugcccaugcuggaaa

SEQ ID NO: 2266392 - RNA, 19 nt, Artificial Sequence
  Description of Artificial Sequence: Synthetic oligonucleotide
agaguaccuuggagauguc

SEQ ID NO: 2266393 - RNA, 19 nt, Artificial Sequence
  Description of Artificial Sequence: Synthetic oligonucleotide
augucgcggcuguggggug

SEQ ID NO: 2266394 - RNA, 19 nt, Artificial Sequence
  Description of Artificial Sequence: Synthetic oligonucleotide
gccuucuagcaauuuugaa

SEQ ID NO: 2266395 - RNA, 19 nt, Artificial Sequence
  Description of Artificial Sequence: Synthetic oligonucleotide
ccgugccacggauauuggc

SEQ ID NO: 2266396 - RNA, 19 nt, Artificial Sequence
  Description of Artificial Sequence: Synthetic oligonucleotide
gcuuaaccagcgccuccug

SEQ ID NO: 2266397 - RNA, 19 nt, Artificial Sequence
  Description of Artificial Sequence: Synthetic oligonucleotide
gcgacuuccugcaguauaa

SEQ ID NO: 2266398 - RNA, 19 nt, Artificial Sequence
  Description of Artificial Sequence: Synthetic oligonucleotide
ccacagauaccacugcaua

SEQ ID NO: 2266399 - RNA, 19 nt, Artificial Sequence
  Description of Artificial Sequence: Synthetic oligonucleotide
gcauagccagguacuucag

SEQ ID NO: 2266400 - RNA, 19 nt, Artificial Sequence
  Description of Artificial Sequence: Synthetic oligonucleotide
gccauuauccugcgacucu

SEQ ID NO: 2266401 - RNA, 19 nt, Artificial Sequence
  Description of Artificial Sequence: Synthetic oligonucleotide
gcauaggagugaguuacua

SEQ ID NO: 2266402 - RNA, 19 nt, Artificial Sequence
  Description of Artificial Sequence: Synthetic oligonucleotide
auaccacugcauacuucuu

SEQ ID NO: 2266403 - RNA, 19 nt, Artificial Sequence
  Description of Artificial Sequence: Synthetic oligonucleotide
cagauaccacugcauacuu

SEQ ID NO: 2266404 - RNA, 19 nt, Artificial Sequence
  Description of Artificial Sequence: Synthetic oligonucleotide
cacucguggugauggauuu

SEQ ID NO: 2266405 - RNA, 19 nt, Artificial Sequence
  Description of Artificial Sequence: Synthetic oligonucleotide
ccccuuucaguggucugcc

SEQ ID NO: 2266406 - RNA, 19 nt, Artificial Sequence
  Description of Artificial Sequence: Synthetic oligonucleotide
gguugcagugugcugccau

SEQ ID NO: 2266407 - RNA, 19 nt, Artificial Sequence
  Description of Artificial Sequence: Synthetic oligonucleotide
gucgcggcuguggggugcc

SEQ ID NO: 2266408 - RNA, 19 nt, Artificial Sequence
  Description of Artificial Sequence: Synthetic oligonucleotide
gucguaauggcuggcucuu

SEQ ID NO: 2266409 - RNA, 19 nt, Artificial Sequence
  Description of Artificial Sequence: Synthetic oligonucleotide
cccuuucaguggucugccc

SEQ ID NO: 2266410 - RNA, 19 nt, Artificial Sequence
  Description of Artificial Sequence: Synthetic oligonucleotide
ccggaaagaguaccuugga

SEQ ID NO: 2266411 - RNA, 19 nt, Artificial Sequence
  Description of Artificial Sequence: Synthetic oligonucleotide
cacggauauuggcaggcuu

SEQ ID NO: 2266412 - RNA, 19 nt, Artificial Sequence
  Description of Artificial Sequence: Synthetic oligonucleotide
ccugccaaccuggcucacc

SEQ ID NO: 2266413 - RNA, 19 nt, Artificial Sequence
  Description of Artificial Sequence: Synthetic oligonucleotide
ggccucaguccauucugua

SEQ ID NO: 2266414 - RNA, 19 nt, Artificial Sequence
  Description of Artificial Sequence: Synthetic oligonucleotide
ucaccgugccacggauauu

SEQ ID NO: 2266415 - RNA, 19 nt, Artificial Sequence
  Description of Artificial Sequence: Synthetic oligonucleotide
cugcgcgacuuccugcagu

SEQ ID NO: 2266416 - RNA, 19 nt, Artificial Sequence
  Description of Artificial Sequence: Synthetic oligonucleotide
ccccauaacccugagcaua

SEQ ID NO: 2266417 - RNA, 19 nt, Artificial Sequence
  Description of Artificial Sequence: Synthetic oligonucleotide
cuccugacgaggggccaca

SEQ ID NO: 2266418 - RNA, 19 nt, Artificial Sequence
  Description of Artificial Sequence: Synthetic oligonucleotide
ggauuucagugcagcccca

SEQ ID NO: 2266419 - RNA, 19 nt, Artificial Sequence
  Description of Artificial Sequence: Synthetic oligonucleotide
ccauaacccugagcauagc

SEQ ID NO: 2266420 - RNA, 19 nt, Artificial Sequence
  Description of Artificial Sequence: Synthetic oligonucleotide
ccgcuuggagcguagggua

SEQ ID NO: 2266421 - RNA, 19 nt, Artificial Sequence
  Description of Artificial Sequence: Synthetic oligonucleotide
cgcuuggguuucaccgugc

SEQ ID NO: 2266422 - RNA, 19 nt, Artificial Sequence
  Description of Artificial Sequence: Synthetic oligonucleotide
cuugauccgcuuggagcgu

SEQ ID NO: 2266423 - RNA, 19 nt, Artificial Sequence
  Description of Artificial Sequence: Synthetic oligonucleotide
gggacgccggcugcuccag

SEQ ID NO: 2266424 - RNA, 19 nt, Artificial Sequence
  Description of Artificial Sequence: Synthetic oligonucleotide
cguggugauggauuucagu

SEQ ID NO: 2266425 - RNA, 19 nt, Artificial Sequence
  Description of Artificial Sequence: Synthetic oligonucleotide
ggggaucuccggaaagagu

SEQ ID NO: 2266426 - RNA, 19 nt, Artificial Sequence
  Description of Artificial Sequence: Synthetic oligonucleotide
caguuuggccucaguccau

SEQ ID NO: 2266427 - RNA, 19 nt, Artificial Sequence
  Description of Artificial Sequence: Synthetic oligonucleotide
ccuccugacgaggggccac

SEQ ID NO: 2266428 - RNA, 19 nt, Artificial Sequence
  Description of Artificial Sequence: Synthetic oligonucleotide
gaguggcauaggagugagu

SEQ ID NO: 2266429 - RNA, 19 nt, Artificial Sequence
  Description of Artificial Sequence: Synthetic oligonucleotide
cugcugccugcgcgacuuc

SEQ ID NO: 2266430 - RNA, 19 nt, Artificial Sequence
  Description of Artificial Sequence: Synthetic oligonucleotide
cgcuggauaaugugugcua

SEQ ID NO: 2266431 - RNA, 19 nt, Artificial Sequence
  Description of Artificial Sequence: Synthetic oligonucleotide
ggcauaggagugaguuacu

SEQ ID NO: 2266432 - RNA, 19 nt, Artificial Sequence
  Description of Artificial Sequence: Synthetic oligonucleotide
cgcgacuuccugcaguaua

SEQ ID NO: 2266433 - RNA, 19 nt, Artificial Sequence
  Description of Artificial Sequence: Synthetic oligonucleotide
ccacucguggugauggauu

SEQ ID NO: 2266434 - RNA, 19 nt, Artificial Sequence
  Description of Artificial Sequence: Synthetic oligonucleotide
gcuccagaguuuacacacu

SEQ ID NO: 2266435 - RNA, 19 nt, Artificial Sequence
  Description of Artificial Sequence: Synthetic oligonucleotide
ccggcugcuccagaguuua

SEQ ID NO: 2266436 - RNA, 19 nt, Artificial Sequence
  Description of Artificial Sequence: Synthetic oligonucleotide
gcuuggagcguaggguaau

SEQ ID NO: 2266437 - RNA, 19 nt, Artificial Sequence
  Description of Artificial Sequence: Synthetic oligonucleotide
ccugggacgccggcugcuc

SEQ ID NO: 2266438 - RNA, 19 nt, Artificial Sequence
  Description of Artificial Sequence: Synthetic oligonucleotide
cguuggguugcagugugcu

SEQ ID NO: 2266439 - RNA, 19 nt, Artificial Sequence
  Description of Artificial Sequence: Synthetic oligonucleotide
cgcuuggagcguaggguaa

SEQ ID NO: 2266440 - RNA, 19 nt, Artificial Sequence
  Description of Artificial Sequence: Synthetic oligonucleotide
ggguugcagugugcugcca

SEQ ID NO: 2266441 - RNA, 19 nt, Artificial Sequence
  Description of Artificial Sequence: Synthetic oligonucleotide
gcugccugcgcgacuuccu

SEQ ID NO: 2266442 - RNA, 19 nt, Artificial Sequence
  Description of Artificial Sequence: Synthetic oligonucleotide
ccacguuggguugcagugu

SEQ ID NO: 2266443 - RNA, 19 nt, Artificial Sequence
  Description of Artificial Sequence: Synthetic oligonucleotide
cccugagcauagccaggua

SEQ ID NO: 2266444 - RNA, 19 nt, Artificial Sequence
  Description of Artificial Sequence: Synthetic oligonucleotide
ccacggauauuggcaggcu

SEQ ID NO: 2266445 - RNA, 19 nt, Artificial Sequence
  Description of Artificial Sequence: Synthetic oligonucleotide
gccggcugcuccagaguuu

SEQ ID NO: 2266446 - RNA, 19 nt, Artificial Sequence
  Description of Artificial Sequence: Synthetic oligonucleotide
gcgcgacuuccugcaguau

SEQ ID NO: 2266447 - RNA, 19 nt, Artificial Sequence
  Description of Artificial Sequence: Synthetic oligonucleotide
aauguuuggguuuuguucc

SEQ ID NO: 2266448 - RNA, 19 nt, Artificial Sequence
  Description of Artificial Sequence: Synthetic oligonucleotide
uaucugacuaccauggacg

SEQ ID NO: 2266449 - RNA, 19 nt, Artificial Sequence
  Description of Artificial Sequence: Synthetic oligonucleotide
ucuggugccacacagagcu

SEQ ID NO: 2266450 - RNA, 19 nt, Artificial Sequence
  Description of Artificial Sequence: Synthetic oligonucleotide
aagccauuuauuuucccac

SEQ ID NO: 2266451 - RNA, 19 nt, Artificial Sequence
  Description of Artificial Sequence: Synthetic oligonucleotide
aaagccguguucuggaccg

SEQ ID NO: 2266452 - RNA, 19 nt, Artificial Sequence
  Description of Artificial Sequence: Synthetic oligonucleotide
uggaacagcacugaaauag

SEQ ID NO: 2266453 - RNA, 19 nt, Artificial Sequence
  Description of Artificial Sequence: Synthetic oligonucleotide
uccuaucugacuaccaugg

SEQ ID NO: 2266454 - RNA, 19 nt, Artificial Sequence
  Description of Artificial Sequence: Synthetic oligonucleotide
ugagaacagaguaaggagc

SEQ ID NO: 2266455 - RNA, 19 nt, Artificial Sequence
  Description of Artificial Sequence: Synthetic oligonucleotide
uuuguaauaggucuucuaa

SEQ ID NO: 2266456 - RNA, 19 nt, Artificial Sequence
  Description of Artificial Sequence: Synthetic oligonucleotide
uaagccgacgacaugaggc

SEQ ID NO: 2266457 - RNA, 19 nt, Artificial Sequence
  Description of Artificial Sequence: Synthetic oligonucleotide
gaaguaaggagcuugguga

SEQ ID NO: 2266458 - RNA, 19 nt, Artificial Sequence
  Description of Artificial Sequence: Synthetic oligonucleotide
aauagaggcaggucucugg

SEQ ID NO: 2266459 - RNA, 19 nt, Artificial Sequence
  Description of Artificial Sequence: Synthetic oligonucleotide
uguaauaggucuucuaaac

SEQ ID NO: 2266460 - RNA, 19 nt, Artificial Sequence
  Description of Artificial Sequence: Synthetic oligonucleotide
aaaguagucaguaagccga

SEQ ID NO: 2266461 - RNA, 19 nt, Artificial Sequence
  Description of Artificial Sequence: Synthetic oligonucleotide
ucuaaacucagaaguaggc

SEQ ID NO: 2266462 - RNA, 19 nt, Artificial Sequence
  Description of Artificial Sequence: Synthetic oligonucleotide
agauguaugggugaggagg

SEQ ID NO: 2266463 - RNA, 19 nt, Artificial Sequence
  Description of Artificial Sequence: Synthetic oligonucleotide
ugaggauagacucuccugc

SEQ ID NO: 2266464 - RNA, 19 nt, Artificial Sequence
  Description of Artificial Sequence: Synthetic oligonucleotide
aacagaguaaggagcaggc

SEQ ID NO: 2266465 - RNA, 19 nt, Artificial Sequence
  Description of Artificial Sequence: Synthetic oligonucleotide
aagccgacgacaugaggcc

SEQ ID NO: 2266466 - RNA, 19 nt, Artificial Sequence
  Description of Artificial Sequence: Synthetic oligonucleotide
gaauguuuggguuuuguuc

SEQ ID NO: 2266467 - RNA, 19 nt, Artificial Sequence
  Description of Artificial Sequence: Synthetic oligonucleotide
uaauaggucuucuaaacuc

SEQ ID NO: 2266468 - RNA, 19 nt, Artificial Sequence
  Description of Artificial Sequence: Synthetic oligonucleotide
ucuccgaaguucaaaguag

SEQ ID NO: 2266469 - RNA, 19 nt, Artificial Sequence
  Description of Artificial Sequence: Synthetic oligonucleotide
uuucaauccuaucugacua

SEQ ID NO: 2266470 - RNA, 19 nt, Artificial Sequence
  Description of Artificial Sequence: Synthetic oligonucleotide
uaaggagcaggccagugcc

SEQ ID NO: 2266471 - RNA, 19 nt, Artificial Sequence
  Description of Artificial Sequence: Synthetic oligonucleotide
agcaggaucaaaguggcac

SEQ ID NO: 2266472 - RNA, 19 nt, Artificial Sequence
  Description of Artificial Sequence: Synthetic oligonucleotide
caagaaggaaacccaaucc

SEQ ID NO: 2266473 - RNA, 19 nt, Artificial Sequence
  Description of Artificial Sequence: Synthetic oligonucleotide
caaaguagucaguaagccg

SEQ ID NO: 2266474 - RNA, 19 nt, Artificial Sequence
  Description of Artificial Sequence: Synthetic oligonucleotide
acagcagugacacagcaga

SEQ ID NO: 2266475 - RNA, 19 nt, Artificial Sequence
  Description of Artificial Sequence: Synthetic oligonucleotide
ucaaaguagucaguaagcc

SEQ ID NO: 2266476 - RNA, 19 nt, Artificial Sequence
  Description of Artificial Sequence: Synthetic oligonucleotide
ccaaaagaccucaagaagg

SEQ ID NO: 2266477 - RNA, 19 nt, Artificial Sequence
  Description of Artificial Sequence: Synthetic oligonucleotide
aaguaaggagcuuggugag

SEQ ID NO: 2266478 - RNA, 19 nt, Artificial Sequence
  Description of Artificial Sequence: Synthetic oligonucleotide
uucaccugagaacagagua

SEQ ID NO: 2266479 - RNA, 19 nt, Artificial Sequence
  Description of Artificial Sequence: Synthetic oligonucleotide
uggacguuggcuuggaaug

SEQ ID NO: 2266480 - RNA, 19 nt, Artificial Sequence
  Description of Artificial Sequence: Synthetic oligonucleotide
uccuaucugaagcaucucc

SEQ ID NO: 2266481 - RNA, 19 nt, Artificial Sequence
  Description of Artificial Sequence: Synthetic oligonucleotide
agcacugaaauagaggcag

SEQ ID NO: 2266482 - RNA, 19 nt, Artificial Sequence
  Description of Artificial Sequence: Synthetic oligonucleotide
uagacucuccugcagagga

SEQ ID NO: 2266483 - RNA, 19 nt, Artificial Sequence
  Description of Artificial Sequence: Synthetic oligonucleotide
cuggcugugaugaggauag

SEQ ID NO: 2266484 - RNA, 19 nt, Artificial Sequence
  Description of Artificial Sequence: Synthetic oligonucleotide
gauauagguggcuggcuag

SEQ ID NO: 2266485 - RNA, 19 nt, Artificial Sequence
  Description of Artificial Sequence: Synthetic oligonucleotide
aagguagcauuuucagcuc

SEQ ID NO: 2266486 - RNA, 19 nt, Artificial Sequence
  Description of Artificial Sequence: Synthetic oligonucleotide
aauuugaucuucaccugag

SEQ ID NO: 2266487 - RNA, 19 nt, Artificial Sequence
  Description of Artificial Sequence: Synthetic oligonucleotide
cucaagguagcauuuucag

SEQ ID NO: 2266488 - RNA, 19 nt, Artificial Sequence
  Description of Artificial Sequence: Synthetic oligonucleotide
aauaggucuucuaaacuca

SEQ ID NO: 2266489 - RNA, 19 nt, Artificial Sequence
  Description of Artificial Sequence: Synthetic oligonucleotide
ucaagguagcauuuucagc

SEQ ID NO: 2266490 - RNA, 19 nt, Artificial Sequence
  Description of Artificial Sequence: Synthetic oligonucleotide
agucuggugccacacagag

SEQ ID NO: 2266491 - RNA, 19 nt, Artificial Sequence
  Description of Artificial Sequence: Synthetic oligonucleotide
ucagaaguaggcccaagaa

SEQ ID NO: 2266492 - RNA, 19 nt, Artificial Sequence
  Description of Artificial Sequence: Synthetic oligonucleotide
uccgaaguaaggagcuugg

SEQ ID NO: 2266493 - RNA, 19 nt, Artificial Sequence
  Description of Artificial Sequence: Synthetic oligonucleotide
ugugaugaggauagacucu

SEQ ID NO: 2266494 - RNA, 19 nt, Artificial Sequence
  Description of Artificial Sequence: Synthetic oligonucleotide
cuucuaaacucagaaguag

SEQ ID NO: 2266495 - RNA, 19 nt, Artificial Sequence
  Description of Artificial Sequence: Synthetic oligonucleotide
uggguuuuguuccuaucug

SEQ ID NO: 2266496 - RNA, 19 nt, Artificial Sequence
  Description of Artificial Sequence: Synthetic oligonucleotide
uuguaauaggucuucuaaa

SEQ ID NO: 2266497 - RNA, 19 nt, Artificial Sequence
  Description of Artificial Sequence: Synthetic oligonucleotide
uaaagccguguucuggacc

SEQ ID NO: 2266498 - RNA, 19 nt, Artificial Sequence
  Description of Artificial Sequence: Synthetic oligonucleotide
gaauuugaucuucaccuga

SEQ ID NO: 2266499 - RNA, 19 nt, Artificial Sequence
  Description of Artificial Sequence: Synthetic oligonucleotide
gaccucaagaaggaaaccc

SEQ ID NO: 2266500 - RNA, 19 nt, Artificial Sequence
  Description of Artificial Sequence: Synthetic oligonucleotide
acagucuggugccacacag

SEQ ID NO: 2266501 - RNA, 19 nt, Artificial Sequence
  Description of Artificial Sequence: Synthetic oligonucleotide
caagguagcauuuucagcu

SEQ ID NO: 2266502 - RNA, 19 nt, Artificial Sequence
  Description of Artificial Sequence: Synthetic oligonucleotide
cugacuaccauggacguug

SEQ ID NO: 2266503 - RNA, 19 nt, Artificial Sequence
  Description of Artificial Sequence: Synthetic oligonucleotide
guuuuguuccuaucugaag

SEQ ID NO: 2266504 - RNA, 19 nt, Artificial Sequence
  Description of Artificial Sequence: Synthetic oligonucleotide
cacucuucacccaucacug

SEQ ID NO: 2266505 - RNA, 19 nt, Artificial Sequence
  Description of Artificial Sequence: Synthetic oligonucleotide
agaaguaggcccaagaauu

SEQ ID NO: 2266506 - RNA, 19 nt, Artificial Sequence
  Description of Artificial Sequence: Synthetic oligonucleotide
uggcuagagggcaagauuu

SEQ ID NO: 2266507 - RNA, 19 nt, Artificial Sequence
  Description of Artificial Sequence: Synthetic oligonucleotide
acuaccauggacguuggcu

SEQ ID NO: 2266508 - RNA, 19 nt, Artificial Sequence
  Description of Artificial Sequence: Synthetic oligonucleotide
augaggauagacucuccug

SEQ ID NO: 2266509 - RNA, 19 nt, Artificial Sequence
  Description of Artificial Sequence: Synthetic oligonucleotide
caauccuggggaaugucag

SEQ ID NO: 2266510 - RNA, 19 nt, Artificial Sequence
  Description of Artificial Sequence: Synthetic oligonucleotide
uuuuguaauaggucuucua

SEQ ID NO: 2266511 - RNA, 19 nt, Artificial Sequence
  Description of Artificial Sequence: Synthetic oligonucleotide
aaguucaaaguagucagua

SEQ ID NO: 2266512 - RNA, 19 nt, Artificial Sequence
  Description of Artificial Sequence: Synthetic oligonucleotide
acccuuucaauccuaucug

SEQ ID NO: 2266513 - RNA, 19 nt, Artificial Sequence
  Description of Artificial Sequence: Synthetic oligonucleotide
gagcuuggugagcacaaag

SEQ ID NO: 2266514 - RNA, 19 nt, Artificial Sequence
  Description of Artificial Sequence: Synthetic oligonucleotide
auccuaucugacuaccaug

SEQ ID NO: 2266515 - RNA, 19 nt, Artificial Sequence
  Description of Artificial Sequence: Synthetic oligonucleotide
acgacaugaggcccucgcc

SEQ ID NO: 2266516 - RNA, 19 nt, Artificial Sequence
  Description of Artificial Sequence: Synthetic oligonucleotide
cucagcuggccaaaagacc

SEQ ID NO: 2266517 - RNA, 19 nt, Artificial Sequence
  Description of Artificial Sequence: Synthetic oligonucleotide
ucaauccuaucugacuacc

SEQ ID NO: 2266518 - RNA, 19 nt, Artificial Sequence
  Description of Artificial Sequence: Synthetic oligonucleotide
uucaauccuaucugacuac

SEQ ID NO: 2266519 - RNA, 19 nt, Artificial Sequence
  Description of Artificial Sequence: Synthetic oligonucleotide
gagaacagaguaaggagca

SEQ ID NO: 2266520 - RNA, 19 nt, Artificial Sequence
  Description of Artificial Sequence: Synthetic oligonucleotide
aucuccgaaguucaaagua

SEQ ID NO: 2266521 - RNA, 19 nt, Artificial Sequence
  Description of Artificial Sequence: Synthetic oligonucleotide
ucacccaucacugggcuca

SEQ ID NO: 2266522 - RNA, 19 nt, Artificial Sequence
  Description of Artificial Sequence: Synthetic oligonucleotide
acagaguaaggagcaggcc

SEQ ID NO: 2266523 - RNA, 19 nt, Artificial Sequence
  Description of Artificial Sequence: Synthetic oligonucleotide
gagccagacaaagaugcag

SEQ ID NO: 2266524 - RNA, 19 nt, Artificial Sequence
  Description of Artificial Sequence: Synthetic oligonucleotide
ccuaucugaagcaucuccg

SEQ ID NO: 2266525 - RNA, 19 nt, Artificial Sequence
  Description of Artificial Sequence: Synthetic oligonucleotide
aggucucuggaguccuucc

SEQ ID NO: 2266526 - RNA, 19 nt, Artificial Sequence
  Description of Artificial Sequence: Synthetic oligonucleotide
auagaggcaggucucugga

SEQ ID NO: 2266527 - RNA, 19 nt, Artificial Sequence
  Description of Artificial Sequence: Synthetic oligonucleotide
agaaggaaacccaauccug

SEQ ID NO: 2266528 - RNA, 19 nt, Artificial Sequence
  Description of Artificial Sequence: Synthetic oligonucleotide
aaguagucaguaagccgac

SEQ ID NO: 2266529 - RNA, 19 nt, Artificial Sequence
  Description of Artificial Sequence: Synthetic oligonucleotide
uagucaguaagccgacgac

SEQ ID NO: 2266530 - RNA, 19 nt, Artificial Sequence
  Description of Artificial Sequence: Synthetic oligonucleotide
aguaaggagcuuggugagc

SEQ ID NO: 2266531 - RNA, 19 nt, Artificial Sequence
  Description of Artificial Sequence: Synthetic oligonucleotide
gccaaaagaccucaagaag

SEQ ID NO: 2266532 - RNA, 19 nt, Artificial Sequence
  Description of Artificial Sequence: Synthetic oligonucleotide
cacagagcuagcuccuccg

SEQ ID NO: 2266533 - RNA, 19 nt, Artificial Sequence
  Description of Artificial Sequence: Synthetic oligonucleotide
gacgacaugaggcccucgc

SEQ ID NO: 2266534 - RNA, 19 nt, Artificial Sequence
  Description of Artificial Sequence: Synthetic oligonucleotide
aguucaaaguagucaguaa

SEQ ID NO: 2266535 - RNA, 19 nt, Artificial Sequence
  Description of Artificial Sequence: Synthetic oligonucleotide
uacguaggccagauguaug

SEQ ID NO: 2266536 - RNA, 19 nt, Artificial Sequence
  Description of Artificial Sequence: Synthetic oligonucleotide
aagcguucgaggcuccaga

SEQ ID NO: 2266537 - RNA, 19 nt, Artificial Sequence
  Description of Artificial Sequence: Synthetic oligonucleotide
ggaucaaaguggcacagac

SEQ ID NO: 2266538 - RNA, 19 nt, Artificial Sequence
  Description of Artificial Sequence: Synthetic oligonucleotide
gcgacugucccauucacag

SEQ ID NO: 2266539 - RNA, 19 nt, Artificial Sequence
  Description of Artificial Sequence: Synthetic oligonucleotide
gaucaaaguggcacagacc

SEQ ID NO: 2266540 - RNA, 19 nt, Artificial Sequence
  Description of Artificial Sequence: Synthetic oligonucleotide
agaguaaggagcaggccag

SEQ ID NO: 2266541 - RNA, 19 nt, Artificial Sequence
  Description of Artificial Sequence: Synthetic oligonucleotide
aaaguggcacagaccaaag

SEQ ID NO: 2266542 - RNA, 19 nt, Artificial Sequence
  Description of Artificial Sequence: Synthetic oligonucleotide
gagcccaggaccaacaguc

SEQ ID NO: 2266543 - RNA, 19 nt, Artificial Sequence
  Description of Artificial Sequence: Synthetic oligonucleotide
agcguucgaggcuccagac

SEQ ID NO: 2266544 - RNA, 19 nt, Artificial Sequence
  Description of Artificial Sequence: Synthetic oligonucleotide
aaguaggcccaagaauuug

SEQ ID NO: 2266545 - RNA, 19 nt, Artificial Sequence
  Description of Artificial Sequence: Synthetic oligonucleotide
aaauagaggcaggucucug

SEQ ID NO: 2266546 - RNA, 19 nt, Artificial Sequence
  Description of Artificial Sequence: Synthetic oligonucleotide
aacccaauccuggggaaug

SEQ ID NO: 2266547 - RNA, 19 nt, Artificial Sequence
  Description of Artificial Sequence: Synthetic oligonucleotide
cuccuccgaaguaaggagc

SEQ ID NO: 2266548 - RNA, 19 nt, Artificial Sequence
  Description of Artificial Sequence: Synthetic oligonucleotide
auggacguuggcuuggaau

SEQ ID NO: 2266549 - RNA, 19 nt, Artificial Sequence
  Description of Artificial Sequence: Synthetic oligonucleotide
uucacagggcacaggcuca

SEQ ID NO: 2266550 - RNA, 19 nt, Artificial Sequence
  Description of Artificial Sequence: Synthetic oligonucleotide
guaugggugaggaggaagc

SEQ ID NO: 2266551 - RNA, 19 nt, Artificial Sequence
  Description of Artificial Sequence: Synthetic oligonucleotide
gcaucuccgaaguucaaag

SEQ ID NO: 2266552 - RNA, 19 nt, Artificial Sequence
  Description of Artificial Sequence: Synthetic oligonucleotide
caccugagaacagaguaag

SEQ ID NO: 2266553 - RNA, 19 nt, Artificial Sequence
  Description of Artificial Sequence: Synthetic oligonucleotide
cuugcagccgggcggaggc

SEQ ID NO: 2266554 - RNA, 19 nt, Artificial Sequence
  Description of Artificial Sequence: Synthetic oligonucleotide
caggaacgagcccaggacc

SEQ ID NO: 2266555 - RNA, 19 nt, Artificial Sequence
  Description of Artificial Sequence: Synthetic oligonucleotide
aaagcguucgaggcuccag

SEQ ID NO: 2266556 - RNA, 19 nt, Artificial Sequence
  Description of Artificial Sequence: Synthetic oligonucleotide
gauguaugggugaggagga

SEQ ID NO: 2266557 - RNA, 19 nt, Artificial Sequence
  Description of Artificial Sequence: Synthetic oligonucleotide
uccgaaguucaaaguaguc

SEQ ID NO: 2266558 - RNA, 19 nt, Artificial Sequence
  Description of Artificial Sequence: Synthetic oligonucleotide
gucagggcuacguaggcca

SEQ ID NO: 2266559 - RNA, 19 nt, Artificial Sequence
  Description of Artificial Sequence: Synthetic oligonucleotide
ucaguaagccgacgacaug

SEQ ID NO: 2266560 - RNA, 19 nt, Artificial Sequence
  Description of Artificial Sequence: Synthetic oligonucleotide
uggugccacacagagcuag

SEQ ID NO: 2266561 - RNA, 19 nt, Artificial Sequence
  Description of Artificial Sequence: Synthetic oligonucleotide
guaagccgacgacaugagg

SEQ ID NO: 2266562 - RNA, 19 nt, Artificial Sequence
  Description of Artificial Sequence: Synthetic oligonucleotide
ugacuaccauggacguugg

SEQ ID NO: 2266563 - RNA, 19 nt, Artificial Sequence
  Description of Artificial Sequence: Synthetic oligonucleotide
uuaaagccguguucuggac

SEQ ID NO: 2266564 - RNA, 19 nt, Artificial Sequence
  Description of Artificial Sequence: Synthetic oligonucleotide
ugcccuuaaagccguguuc

SEQ ID NO: 2266565 - RNA, 19 nt, Artificial Sequence
  Description of Artificial Sequence: Synthetic oligonucleotide
cuggccaaaagaccucaag

SEQ ID NO: 2266566 - RNA, 19 nt, Artificial Sequence
  Description of Artificial Sequence: Synthetic oligonucleotide
auuucuggaacagcacuga

SEQ ID NO: 2266567 - RNA, 19 nt, Artificial Sequence
  Description of Artificial Sequence: Synthetic oligonucleotide
agucaguaagccgacgaca

SEQ ID NO: 2266568 - RNA, 19 nt, Artificial Sequence
  Description of Artificial Sequence: Synthetic oligonucleotide
aacagucuggugccacaca

SEQ ID NO: 2266569 - RNA, 19 nt, Artificial Sequence
  Description of Artificial Sequence: Synthetic oligonucleotide
gacucuccugcagaggacc

SEQ ID NO: 2266570 - RNA, 19 nt, Artificial Sequence
  Description of Artificial Sequence: Synthetic oligonucleotide
guaauaggucuucuaaacu

SEQ ID NO: 2266571 - RNA, 19 nt, Artificial Sequence
  Description of Artificial Sequence: Synthetic oligonucleotide
aucugacuaccauggacgu

SEQ ID NO: 2266572 - RNA, 19 nt, Artificial Sequence
  Description of Artificial Sequence: Synthetic oligonucleotide
agcaggaacgagcccagga

SEQ ID NO: 2266573 - RNA, 19 nt, Artificial Sequence
  Description of Artificial Sequence: Synthetic oligonucleotide
aagaugcagguugugcccu

SEQ ID NO: 2266574 - RNA, 19 nt, Artificial Sequence
  Description of Artificial Sequence: Synthetic oligonucleotide
gaggauagacucuccugca

SEQ ID NO: 2266575 - RNA, 19 nt, Artificial Sequence
  Description of Artificial Sequence: Synthetic oligonucleotide
agcaggauauagguggcug

SEQ ID NO: 2266576 - RNA, 19 nt, Artificial Sequence
  Description of Artificial Sequence: Synthetic oligonucleotide
aaaagaccucaagaaggaa

SEQ ID NO: 2266577 - RNA, 19 nt, Artificial Sequence
  Description of Artificial Sequence: Synthetic oligonucleotide
gcaggauauagguggcugg

SEQ ID NO: 2266578 - RNA, 19 nt, Artificial Sequence
  Description of Artificial Sequence: Synthetic oligonucleotide
auaggucuucuaaacucag

SEQ ID NO: 2266579 - RNA, 19 nt, Artificial Sequence
  Description of Artificial Sequence: Synthetic oligonucleotide
caggauauagguggcuggc

SEQ ID NO: 2266580 - RNA, 19 nt, Artificial Sequence
  Description of Artificial Sequence: Synthetic oligonucleotide
acccugacacacucuucac

SEQ ID NO: 2266581 - RNA, 19 nt, Artificial Sequence
  Description of Artificial Sequence: Synthetic oligonucleotide
acagaccaaagguggguga

SEQ ID NO: 2266582 - RNA, 19 nt, Artificial Sequence
  Description of Artificial Sequence: Synthetic oligonucleotide
acacagcagugacacagca

SEQ ID NO: 2266583 - RNA, 19 nt, Artificial Sequence
  Description of Artificial Sequence: Synthetic oligonucleotide
cacaaagcguucgaggcuc

SEQ ID NO: 2266584 - RNA, 19 nt, Artificial Sequence
  Description of Artificial Sequence: Synthetic oligonucleotide
uguucuggaccggugggac

SEQ ID NO: 2266585 - RNA, 19 nt, Artificial Sequence
  Description of Artificial Sequence: Synthetic oligonucleotide
cacucuggcugugaugagg

SEQ ID NO: 2266586 - RNA, 19 nt, Artificial Sequence
  Description of Artificial Sequence: Synthetic oligonucleotide
cuuucaauccuaucugacu

SEQ ID NO: 2266587 - RNA, 19 nt, Artificial Sequence
  Description of Artificial Sequence: Synthetic oligonucleotide
caguaagccgacgacauga

SEQ ID NO: 2266588 - RNA, 19 nt, Artificial Sequence
  Description of Artificial Sequence: Synthetic oligonucleotide
gcccauggggagcagaggg

SEQ ID NO: 2266589 - RNA, 19 nt, Artificial Sequence
  Description of Artificial Sequence: Synthetic oligonucleotide
uggaauguuuggguuuugu

SEQ ID NO: 2266590 - RNA, 19 nt, Artificial Sequence
  Description of Artificial Sequence: Synthetic oligonucleotide
cucgccacuucccugcgac

SEQ ID NO: 2266591 - RNA, 19 nt, Artificial Sequence
  Description of Artificial Sequence: Synthetic oligonucleotide
accaacagucuggugccac

SEQ ID NO: 2266592 - RNA, 19 nt, Artificial Sequence
  Description of Artificial Sequence: Synthetic oligonucleotide
ggccaaaagaccucaagaa

SEQ ID NO: 2266593 - RNA, 19 nt, Artificial Sequence
  Description of Artificial Sequence: Synthetic oligonucleotide
cuccgaaguaaggagcuug

SEQ ID NO: 2266594 - RNA, 19 nt, Artificial Sequence
  Description of Artificial Sequence: Synthetic oligonucleotide
aguaggcccaagaauuuga

SEQ ID NO: 2266595 - RNA, 19 nt, Artificial Sequence
  Description of Artificial Sequence: Synthetic oligonucleotide
agcuccuccgaaguaagga

SEQ ID NO: 2266596 - RNA, 19 nt, Artificial Sequence
  Description of Artificial Sequence: Synthetic oligonucleotide
ugcagaggacccuuucaau

SEQ ID NO: 2266597 - RNA, 19 nt, Artificial Sequence
  Description of Artificial Sequence: Synthetic oligonucleotide
ucagggcuacguaggccag

SEQ ID NO: 2266598 - RNA, 19 nt, Artificial Sequence
  Description of Artificial Sequence: Synthetic oligonucleotide
uggaccggugggacucugg

SEQ ID NO: 2266599 - RNA, 19 nt, Artificial Sequence
  Description of Artificial Sequence: Synthetic oligonucleotide
cucagaaguaggcccaaga

SEQ ID NO: 2266600 - RNA, 19 nt, Artificial Sequence
  Description of Artificial Sequence: Synthetic oligonucleotide
uaggcccaagaauuugauc

SEQ ID NO: 2266601 - RNA, 19 nt, Artificial Sequence
  Description of Artificial Sequence: Synthetic oligonucleotide
uccuggggaaugucagggc

SEQ ID NO: 2266602 - RNA, 19 nt, Artificial Sequence
  Description of Artificial Sequence: Synthetic oligonucleotide
uucuggaccggugggacuc

SEQ ID NO: 2266603 - RNA, 19 nt, Artificial Sequence
  Description of Artificial Sequence: Synthetic oligonucleotide
gcagaggacccuuucaauc

SEQ ID NO: 2266604 - RNA, 19 nt, Artificial Sequence
  Description of Artificial Sequence: Synthetic oligonucleotide
gcuccuccgaaguaaggag

SEQ ID NO: 2266605 - RNA, 19 nt, Artificial Sequence
  Description of Artificial Sequence: Synthetic oligonucleotide
cucugggcguggauggaag

SEQ ID NO: 2266606 - RNA, 19 nt, Artificial Sequence
  Description of Artificial Sequence: Synthetic oligonucleotide
ggcuacguaggccagaugu

SEQ ID NO: 2266607 - RNA, 19 nt, Artificial Sequence
  Description of Artificial Sequence: Synthetic oligonucleotide
caaaguggcacagaccaaa

SEQ ID NO: 2266608 - RNA, 19 nt, Artificial Sequence
  Description of Artificial Sequence: Synthetic oligonucleotide
aaacccaauccuggggaau

SEQ ID NO: 2266609 - RNA, 19 nt, Artificial Sequence
  Description of Artificial Sequence: Synthetic oligonucleotide
accaaaggugggugaugag

SEQ ID NO: 2266610 - RNA, 19 nt, Artificial Sequence
  Description of Artificial Sequence: Synthetic oligonucleotide
cguggauggaagcacacag

SEQ ID NO: 2266611 - RNA, 19 nt, Artificial Sequence
  Description of Artificial Sequence: Synthetic oligonucleotide
aguaagccgacgacaugag

SEQ ID NO: 2266612 - RNA, 19 nt, Artificial Sequence
  Description of Artificial Sequence: Synthetic oligonucleotide
agccaccaaggcccaggcc

SEQ ID NO: 2266613 - RNA, 19 nt, Artificial Sequence
  Description of Artificial Sequence: Synthetic oligonucleotide
ucccacauuccagaucuuc

SEQ ID NO: 2266614 - RNA, 19 nt, Artificial Sequence
  Description of Artificial Sequence: Synthetic oligonucleotide
auauagguggcuggcuaga

SEQ ID NO: 2266615 - RNA, 19 nt, Artificial Sequence
  Description of Artificial Sequence: Synthetic oligonucleotide
aacgagcccaggaccaaca

SEQ ID NO: 2266616 - RNA, 19 nt, Artificial Sequence
  Description of Artificial Sequence: Synthetic oligonucleotide
aggccagauguauggguga

SEQ ID NO: 2266617 - RNA, 19 nt, Artificial Sequence
  Description of Artificial Sequence: Synthetic oligonucleotide
ggauagacucuccugcaga

SEQ ID NO: 2266618 - RNA, 19 nt, Artificial Sequence
  Description of Artificial Sequence: Synthetic oligonucleotide
ugggcucaagguagcauuu

SEQ ID NO: 2266619 - RNA, 19 nt, Artificial Sequence
  Description of Artificial Sequence: Synthetic oligonucleotide
agccgacgacaugaggccc

SEQ ID NO: 2266620 - RNA, 19 nt, Artificial Sequence
  Description of Artificial Sequence: Synthetic oligonucleotide
ggaccggugggacucuggg

SEQ ID NO: 2266621 - RNA, 19 nt, Artificial Sequence
  Description of Artificial Sequence: Synthetic oligonucleotide
agacaaagaugcagguugu

SEQ ID NO: 2266622 - RNA, 19 nt, Artificial Sequence
  Description of Artificial Sequence: Synthetic oligonucleotide
cagcagugacacagcagag

SEQ ID NO: 2266623 - RNA, 19 nt, Artificial Sequence
  Description of Artificial Sequence: Synthetic oligonucleotide
gaccaccgcuugcagccgg

SEQ ID NO: 2266624 - RNA, 19 nt, Artificial Sequence
  Description of Artificial Sequence: Synthetic oligonucleotide
caauccuaucugacuacca

SEQ ID NO: 2266625 - RNA, 19 nt, Artificial Sequence
  Description of Artificial Sequence: Synthetic oligonucleotide
ugggcguggauggaagcac

SEQ ID NO: 2266626 - RNA, 19 nt, Artificial Sequence
  Description of Artificial Sequence: Synthetic oligonucleotide
uccguggaccaccgcuugc

SEQ ID NO: 2266627 - RNA, 19 nt, Artificial Sequence
  Description of Artificial Sequence: Synthetic oligonucleotide
acaaagcguucgaggcucc

SEQ ID NO: 2266628 - RNA, 19 nt, Artificial Sequence
  Description of Artificial Sequence: Synthetic oligonucleotide
accugagaacagaguaagg

SEQ ID NO: 2266629 - RNA, 19 nt, Artificial Sequence
  Description of Artificial Sequence: Synthetic oligonucleotide
aggcucagcuggccaaaag

SEQ ID NO: 2266630 - RNA, 19 nt, Artificial Sequence
  Description of Artificial Sequence: Synthetic oligonucleotide
aggggucugggccuccgug

SEQ ID NO: 2266631 - RNA, 19 nt, Artificial Sequence
  Description of Artificial Sequence: Synthetic oligonucleotide
aggaacgagcccaggacca

SEQ ID NO: 2266632 - RNA, 19 nt, Artificial Sequence
  Description of Artificial Sequence: Synthetic oligonucleotide
agguugugcccugcuuggc

SEQ ID NO: 2266633 - RNA, 19 nt, Artificial Sequence
  Description of Artificial Sequence: Synthetic oligonucleotide
uucgaggcuccagacccug

SEQ ID NO: 2266634 - RNA, 19 nt, Artificial Sequence
  Description of Artificial Sequence: Synthetic oligonucleotide
cgaaguaaggagcuuggug

SEQ ID NO: 2266635 - RNA, 19 nt, Artificial Sequence
  Description of Artificial Sequence: Synthetic oligonucleotide
uugugcccugcuuggcagc

SEQ ID NO: 2266636 - RNA, 19 nt, Artificial Sequence
  Description of Artificial Sequence: Synthetic oligonucleotide
gaaauagaggcaggucucu

SEQ ID NO: 2266637 - RNA, 19 nt, Artificial Sequence
  Description of Artificial Sequence: Synthetic oligonucleotide
gugagcacaaagcguucga

SEQ ID NO: 2266638 - RNA, 19 nt, Artificial Sequence
  Description of Artificial Sequence: Synthetic oligonucleotide
agcaucuccgaaguucaaa

SEQ ID NO: 2266639 - RNA, 19 nt, Artificial Sequence
  Description of Artificial Sequence: Synthetic oligonucleotide
ggggucugggccuccgugg

SEQ ID NO: 2266640 - RNA, 19 nt, Artificial Sequence
  Description of Artificial Sequence: Synthetic oligonucleotide
agaccaaaggugggugaug

SEQ ID NO: 2266641 - RNA, 19 nt, Artificial Sequence
  Description of Artificial Sequence: Synthetic oligonucleotide
cagcacugaaauagaggca

SEQ ID NO: 2266642 - RNA, 19 nt, Artificial Sequence
  Description of Artificial Sequence: Synthetic oligonucleotide
agugcccuuaaagccgugu

SEQ ID NO: 2266643 - RNA, 19 nt, Artificial Sequence
  Description of Artificial Sequence: Synthetic oligonucleotide
guaggccagauguaugggu

SEQ ID NO: 2266644 - RNA, 19 nt, Artificial Sequence
  Description of Artificial Sequence: Synthetic oligonucleotide
ggauauagguggcuggcua

SEQ ID NO: 2266645 - RNA, 19 nt, Artificial Sequence
  Description of Artificial Sequence: Synthetic oligonucleotide
agcucccuccucugagcag

SEQ ID NO: 2266646 - RNA, 19 nt, Artificial Sequence
  Description of Artificial Sequence: Synthetic oligonucleotide
uucacccaucacugggcuc

SEQ ID NO: 2266647 - RNA, 19 nt, Artificial Sequence
  Description of Artificial Sequence: Synthetic oligonucleotide
ggcucaagguagcauuuuc

SEQ ID NO: 2266648 - RNA, 19 nt, Artificial Sequence
  Description of Artificial Sequence: Synthetic oligonucleotide
gacuaccauggacguuggc

SEQ ID NO: 2266649 - RNA, 19 nt, Artificial Sequence
  Description of Artificial Sequence: Synthetic oligonucleotide
ggauggaagcacacagcag

SEQ ID NO: 2266650 - RNA, 19 nt, Artificial Sequence
  Description of Artificial Sequence: Synthetic oligonucleotide
gugaugagccagacaaaga

SEQ ID NO: 2266651 - RNA, 19 nt, Artificial Sequence
  Description of Artificial Sequence: Synthetic oligonucleotide
gaacgagcccaggaccaac

SEQ ID NO: 2266652 - RNA, 19 nt, Artificial Sequence
  Description of Artificial Sequence: Synthetic oligonucleotide
acucagaaguaggcccaag

SEQ ID NO: 2266653 - RNA, 19 nt, Artificial Sequence
  Description of Artificial Sequence: Synthetic oligonucleotide
aggaucaaaguggcacaga

SEQ ID NO: 2266654 - RNA, 19 nt, Artificial Sequence
  Description of Artificial Sequence: Synthetic oligonucleotide
ggaacagcacugaaauaga

SEQ ID NO: 2266655 - RNA, 19 nt, Artificial Sequence
  Description of Artificial Sequence: Synthetic oligonucleotide
aagccguguucuggaccgg

SEQ ID NO: 2266656 - RNA, 19 nt, Artificial Sequence
  Description of Artificial Sequence: Synthetic oligonucleotide
cccugacacacucuucacc

SEQ ID NO: 2266657 - RNA, 19 nt, Artificial Sequence
  Description of Artificial Sequence: Synthetic oligonucleotide
ggcagcugcccauggggag

SEQ ID NO: 2266658 - RNA, 19 nt, Artificial Sequence
  Description of Artificial Sequence: Synthetic oligonucleotide
gggacucugggcguggaug

SEQ ID NO: 2266659 - RNA, 19 nt, Artificial Sequence
  Description of Artificial Sequence: Synthetic oligonucleotide
cuccgaaguucaaaguagu

SEQ ID NO: 2266660 - RNA, 19 nt, Artificial Sequence
  Description of Artificial Sequence: Synthetic oligonucleotide
cugacacacucuucaccca

SEQ ID NO: 2266661 - RNA, 19 nt, Artificial Sequence
  Description of Artificial Sequence: Synthetic oligonucleotide
gggcaagauuucuggaaca

SEQ ID NO: 2266662 - RNA, 19 nt, Artificial Sequence
  Description of Artificial Sequence: Synthetic oligonucleotide
ccguguucuggaccggugg

SEQ ID NO: 2266663 - RNA, 19 nt, Artificial Sequence
  Description of Artificial Sequence: Synthetic oligonucleotide
ucgaggcuccagacccuga

SEQ ID NO: 2266664 - RNA, 19 nt, Artificial Sequence
  Description of Artificial Sequence: Synthetic oligonucleotide
cauuccagaucuucguuuu

SEQ ID NO: 2266665 - RNA, 19 nt, Artificial Sequence
  Description of Artificial Sequence: Synthetic oligonucleotide
aggcccucgccacuucccu

SEQ ID NO: 2266666 - RNA, 19 nt, Artificial Sequence
  Description of Artificial Sequence: Synthetic oligonucleotide
gucaguaagccgacgacau

SEQ ID NO: 2266667 - RNA, 19 nt, Artificial Sequence
  Description of Artificial Sequence: Synthetic oligonucleotide
uuccuaucugaagcaucuc

SEQ ID NO: 2266668 - RNA, 19 nt, Artificial Sequence
  Description of Artificial Sequence: Synthetic oligonucleotide
ucugacuaccauggacguu

SEQ ID NO: 2266669 - RNA, 19 nt, Artificial Sequence
  Description of Artificial Sequence: Synthetic oligonucleotide
cagcuggccaaaagaccuc

SEQ ID NO: 2266670 - RNA, 19 nt, Artificial Sequence
  Description of Artificial Sequence: Synthetic oligonucleotide
ccagauguaugggugagga

SEQ ID NO: 2266671 - RNA, 19 nt, Artificial Sequence
  Description of Artificial Sequence: Synthetic oligonucleotide
ccccgugacgucacgggcg

SEQ ID NO: 2266672 - RNA, 19 nt, Artificial Sequence
  Description of Artificial Sequence: Synthetic oligonucleotide
agggcuacguaggccagau

SEQ ID NO: 2266673 - RNA, 19 nt, Artificial Sequence
  Description of Artificial Sequence: Synthetic oligonucleotide
gugaggaggaagccaccaa

SEQ ID NO: 2266674 - RNA, 19 nt, Artificial Sequence
  Description of Artificial Sequence: Synthetic oligonucleotide
guuuggguuuuguuccuau

SEQ ID NO: 2266675 - RNA, 19 nt, Artificial Sequence
  Description of Artificial Sequence: Synthetic oligonucleotide
gaaguaggcccaagaauuu

SEQ ID NO: 2266676 - RNA, 19 nt, Artificial Sequence
  Description of Artificial Sequence: Synthetic oligonucleotide
caucuccgaaguucaaagu

SEQ ID NO: 2266677 - RNA, 19 nt, Artificial Sequence
  Description of Artificial Sequence: Synthetic oligonucleotide
gugggugaugagccagaca

SEQ ID NO: 2266678 - RNA, 19 nt, Artificial Sequence
  Description of Artificial Sequence: Synthetic oligonucleotide
ugggacucugggcguggau

SEQ ID NO: 2266679 - RNA, 19 nt, Artificial Sequence
  Description of Artificial Sequence: Synthetic oligonucleotide
cagucuggugccacacaga

SEQ ID NO: 2266680 - RNA, 19 nt, Artificial Sequence
  Description of Artificial Sequence: Synthetic oligonucleotide
gucuggugccacacagagc

SEQ ID NO: 2266681 - RNA, 19 nt, Artificial Sequence
  Description of Artificial Sequence: Synthetic oligonucleotide
ggugaggaggaagccacca

SEQ ID NO: 2266682 - RNA, 19 nt, Artificial Sequence
  Description of Artificial Sequence: Synthetic oligonucleotide
ggccagauguaugggugag

SEQ ID NO: 2266683 - RNA, 19 nt, Artificial Sequence
  Description of Artificial Sequence: Synthetic oligonucleotide
gcuagcuccuccgaaguaa

SEQ ID NO: 2266684 - RNA, 19 nt, Artificial Sequence
  Description of Artificial Sequence: Synthetic oligonucleotide
gcguucgaggcuccagacc

SEQ ID NO: 2266685 - RNA, 19 nt, Artificial Sequence
  Description of Artificial Sequence: Synthetic oligonucleotide
aguccuuccugaggccacu

SEQ ID NO: 2266686 - RNA, 19 nt, Artificial Sequence
  Description of Artificial Sequence: Synthetic oligonucleotide
gguggcuggcuagagggca

SEQ ID NO: 2266687 - RNA, 19 nt, Artificial Sequence
  Description of Artificial Sequence: Synthetic oligonucleotide
guguucuggaccgguggga

SEQ ID NO: 2266688 - RNA, 19 nt, Artificial Sequence
  Description of Artificial Sequence: Synthetic oligonucleotide
cuggaacagcacugaaaua

SEQ ID NO: 2266689 - RNA, 19 nt, Artificial Sequence
  Description of Artificial Sequence: Synthetic oligonucleotide
cuucacccaucacugggcu

SEQ ID NO: 2266690 - RNA, 19 nt, Artificial Sequence
  Description of Artificial Sequence: Synthetic oligonucleotide
ccucaagaaggaaacccaa

SEQ ID NO: 2266691 - RNA, 19 nt, Artificial Sequence
  Description of Artificial Sequence: Synthetic oligonucleotide
cccgugacgucacgggcgg

SEQ ID NO: 2266692 - RNA, 19 nt, Artificial Sequence
  Description of Artificial Sequence: Synthetic oligonucleotide
cagugacacagcagagaaa

SEQ ID NO: 2266693 - RNA, 19 nt, Artificial Sequence
  Description of Artificial Sequence: Synthetic oligonucleotide
aagcaucuccgaaguucaa

SEQ ID NO: 2266694 - RNA, 19 nt, Artificial Sequence
  Description of Artificial Sequence: Synthetic oligonucleotide
gggaaugucagggcuacgu

SEQ ID NO: 2266695 - RNA, 19 nt, Artificial Sequence
  Description of Artificial Sequence: Synthetic oligonucleotide
cuacguaggccagauguau

SEQ ID NO: 2266696 - RNA, 19 nt, Artificial Sequence
  Description of Artificial Sequence: Synthetic oligonucleotide
gcagcugcccauggggagc

SEQ ID NO: 2266697 - RNA, 19 nt, Artificial Sequence
  Description of Artificial Sequence: Synthetic oligonucleotide
cuggcuagagggcaagauu

SEQ ID NO: 2266698 - RNA, 19 nt, Artificial Sequence
  Description of Artificial Sequence: Synthetic oligonucleotide
agccguguucuggaccggu

SEQ ID NO: 2266699 - RNA, 19 nt, Artificial Sequence
  Description of Artificial Sequence: Synthetic oligonucleotide
auguaugggugaggaggaa

SEQ ID NO: 2266700 - RNA, 19 nt, Artificial Sequence
  Description of Artificial Sequence: Synthetic oligonucleotide
gcccuuaaagccguguucu

SEQ ID NO: 2266701 - RNA, 19 nt, Artificial Sequence
  Description of Artificial Sequence: Synthetic oligonucleotide
ggugggacucugggcgugg

SEQ ID NO: 2266702 - RNA, 19 nt, Artificial Sequence
  Description of Artificial Sequence: Synthetic oligonucleotide
cgacugucccauucacagg

SEQ ID NO: 2266703 - RNA, 19 nt, Artificial Sequence
  Description of Artificial Sequence: Synthetic oligonucleotide
ggugggugaugagccagac

SEQ ID NO: 2266704 - RNA, 19 nt, Artificial Sequence
  Description of Artificial Sequence: Synthetic oligonucleotide
uucccacauuccagaucuu

SEQ ID NO: 2266705 - RNA, 19 nt, Artificial Sequence
  Description of Artificial Sequence: Synthetic oligonucleotide
gccccgugacgucacgggc

SEQ ID NO: 2266706 - RNA, 19 nt, Artificial Sequence
  Description of Artificial Sequence: Synthetic oligonucleotide
gccagacaaagaugcaggu

SEQ ID NO: 2266707 - RNA, 19 nt, Artificial Sequence
  Description of Artificial Sequence: Synthetic oligonucleotide
guucuggaccggugggacu

SEQ ID NO: 2266708 - RNA, 19 nt, Artificial Sequence
  Description of Artificial Sequence: Synthetic oligonucleotide
gaggacccuuucaauccua

SEQ ID NO: 2266709 - RNA, 19 nt, Artificial Sequence
  Description of Artificial Sequence: Synthetic oligonucleotide
acguuggcuuggaauguuu

SEQ ID NO: 2266710 - RNA, 19 nt, Artificial Sequence
  Description of Artificial Sequence: Synthetic oligonucleotide
guaggcccaagaauuugau

SEQ ID NO: 2266711 - RNA, 19 nt, Artificial Sequence
  Description of Artificial Sequence: Synthetic oligonucleotide
gaccaacagucuggugcca

SEQ ID NO: 2266712 - RNA, 19 nt, Artificial Sequence
  Description of Artificial Sequence: Synthetic oligonucleotide
ggcguggauggaagcacac

SEQ ID NO: 2266713 - RNA, 19 nt, Artificial Sequence
  Description of Artificial Sequence: Synthetic oligonucleotide
gagcaggauauagguggcu

SEQ ID NO: 2266714 - RNA, 19 nt, Artificial Sequence
  Description of Artificial Sequence: Synthetic oligonucleotide
gugcccuuaaagccguguu

SEQ ID NO: 2266715 - RNA, 19 nt, Artificial Sequence
  Description of Artificial Sequence: Synthetic oligonucleotide
uggcugugaugaggauaga

SEQ ID NO: 2266716 - RNA, 19 nt, Artificial Sequence
  Description of Artificial Sequence: Synthetic oligonucleotide
caaagcguucgaggcucca

SEQ ID NO: 2266717 - RNA, 19 nt, Artificial Sequence
  Description of Artificial Sequence: Synthetic oligonucleotide
ggaccaccgcuugcagccg

SEQ ID NO: 2266718 - RNA, 19 nt, Artificial Sequence
  Description of Artificial Sequence: Synthetic oligonucleotide
cagugcccuuaaagccgug

SEQ ID NO: 2266719 - RNA, 19 nt, Artificial Sequence
  Description of Artificial Sequence: Synthetic oligonucleotide
cauggacguuggcuuggaa

SEQ ID NO: 2266720 - RNA, 19 nt, Artificial Sequence
  Description of Artificial Sequence: Synthetic oligonucleotide
ccuaucugacuaccaugga

SEQ ID NO: 2266721 - RNA, 19 nt, Artificial Sequence
  Description of Artificial Sequence: Synthetic oligonucleotide
cgaggcuccagacccugac

SEQ ID NO: 2266722 - RNA, 19 nt, Artificial Sequence
  Description of Artificial Sequence: Synthetic oligonucleotide
cccugcgacugucccauuc

SEQ ID NO: 2266723 - RNA, 19 nt, Artificial Sequence
  Description of Artificial Sequence: Synthetic oligonucleotide
gacguuggcuuggaauguu

SEQ ID NO: 2266724 - RNA, 19 nt, Artificial Sequence
  Description of Artificial Sequence: Synthetic oligonucleotide
gcuacguaggccagaugua

SEQ ID NO: 2266725 - RNA, 19 nt, Artificial Sequence
  Description of Artificial Sequence: Synthetic oligonucleotide
ccuggggaaugucagggcu

SEQ ID NO: 2266726 - RNA, 19 nt, Artificial Sequence
  Description of Artificial Sequence: Synthetic oligonucleotide
ggggaaugucagggcuacg

SEQ ID NO: 2266727 - RNA, 19 nt, Artificial Sequence
  Description of Artificial Sequence: Synthetic oligonucleotide
gggugaggaggaagccacc

SEQ ID NO: 2266728 - RNA, 19 nt, Artificial Sequence
  Description of Artificial Sequence: Synthetic oligonucleotide
cagaccaaaggugggugau

SEQ ID NO: 2266729 - RNA, 19 nt, Artificial Sequence
  Description of Artificial Sequence: Synthetic oligonucleotide
cgccccgugacgucacggg

SEQ ID NO: 2266730 - RNA, 19 nt, Artificial Sequence
  Description of Artificial Sequence: Synthetic oligonucleotide
cuggaccggugggacucug

SEQ ID NO: 2266731 - RNA, 19 nt, Artificial Sequence
  Description of Artificial Sequence: Synthetic oligonucleotide
ggcccaagaauuugaucuu

SEQ ID NO: 2266732 - RNA, 19 nt, Artificial Sequence
  Description of Artificial Sequence: Synthetic oligonucleotide
gccguguucuggaccggug

SEQ ID NO: 2266733 - RNA, 19 nt, Artificial Sequence
  Description of Artificial Sequence: Synthetic oligonucleotide
gggcguggauggaagcaca

SEQ ID NO: 2266734 - RNA, 19 nt, Artificial Sequence
  Description of Artificial Sequence: Synthetic oligonucleotide
cugcuuggcagcugcccau

SEQ ID NO: 2266735 - RNA, 19 nt, Artificial Sequence
  Description of Artificial Sequence: Synthetic oligonucleotide
ggcgccccgugacgucacg

SEQ ID NO: 2266736 - RNA, 19 nt, Artificial Sequence
  Description of Artificial Sequence: Synthetic oligonucleotide
cagggcuacguaggccaga

SEQ ID NO: 2266737 - RNA, 19 nt, Artificial Sequence
  Description of Artificial Sequence: Synthetic oligonucleotide
gggcuacguaggccagaug

SEQ ID NO: 2266738 - RNA, 19 nt, Artificial Sequence
  Description of Artificial Sequence: Synthetic oligonucleotide
ggacguuggcuuggaaugu

SEQ ID NO: 2266739 - RNA, 19 nt, Artificial Sequence
  Description of Artificial Sequence: Synthetic oligonucleotide
ggaacgagcccaggaccaa

SEQ ID NO: 2266740 - RNA, 19 nt, Artificial Sequence
  Description of Artificial Sequence: Synthetic oligonucleotide
ggagcuuggugagcacaaa

SEQ ID NO: 2266741 - RNA, 19 nt, Artificial Sequence
  Description of Artificial Sequence: Synthetic oligonucleotide
gcgccccgugacgucacgg

SEQ ID NO: 2266742 - RNA, 19 nt, Artificial Sequence
  Description of Artificial Sequence: Synthetic oligonucleotide
cccuccucugagcaggaua

SEQ ID NO: 2266743 - RNA, 19 nt, Artificial Sequence
  Description of Artificial Sequence: Synthetic oligonucleotide
guucgaggcuccagacccu

SEQ ID NO: 2266744 - RNA, 19 nt, Artificial Sequence
  Description of Artificial Sequence: Synthetic oligonucleotide
gugggacucugggcgugga

SEQ ID NO: 2266745 - RNA, 19 nt, Artificial Sequence
  Description of Artificial Sequence: Synthetic oligonucleotide
cccucgccacuucccugcg

SEQ ID NO: 2266746 - RNA, 19 nt, Artificial Sequence
  Description of Artificial Sequence: Synthetic oligonucleotide
gcugcccauggggagcaga

SEQ ID NO: 2266747 - RNA, 19 nt, Artificial Sequence
  Description of Artificial Sequence: Synthetic oligonucleotide
cuggugccacacagagcua

SEQ ID NO: 2266748 - RNA, 19 nt, Artificial Sequence
  Description of Artificial Sequence: Synthetic oligonucleotide
ccacuucccugcgacuguc

SEQ ID NO: 2266749 - RNA, 19 nt, Artificial Sequence
  Description of Artificial Sequence: Synthetic oligonucleotide
ccguggaccaccgcuugca

SEQ ID NO: 2266750 - RNA, 19 nt, Artificial Sequence
  Description of Artificial Sequence: Synthetic oligonucleotide
ggcuggcuagagggcaaga

SEQ ID NO: 2266751 - RNA, 19 nt, Artificial Sequence
  Description of Artificial Sequence: Synthetic oligonucleotide
ccaccgcuugcagccgggc

SEQ ID NO: 2266752 - RNA, 19 nt, Artificial Sequence
  Description of Artificial Sequence: Synthetic oligonucleotide
gccgacgacaugaggcccu

SEQ ID NO: 2266753 - RNA, 19 nt, Artificial Sequence
  Description of Artificial Sequence: Synthetic oligonucleotide
ggccuccguggaccaccgc

SEQ ID NO: 2266754 - RNA, 19 nt, Artificial Sequence
  Description of Artificial Sequence: Synthetic oligonucleotide
ccgacgacaugaggcccuc

SEQ ID NO: 2266755 - RNA, 19 nt, Artificial Sequence
  Description of Artificial Sequence: Synthetic oligonucleotide
cgacgacaugaggcccucg

SEQ ID NO: 2266756 - RNA, 19 nt, Artificial Sequence
  Description of Artificial Sequence: Synthetic oligonucleotide
gccggcgccccgugacguc

SEQ ID NO: 2266757 - RNA, 19 nt, Artificial Sequence
  Description of Artificial Sequence: Synthetic oligonucleotide
ccgaaguaaggagcuuggu

SEQ ID NO: 2266758 - RNA, 19 nt, Artificial Sequence
  Description of Artificial Sequence: Synthetic oligonucleotide
cgagcccaggaccaacagu

SEQ ID NO: 2266759 - RNA, 19 nt, Artificial Sequence
  Description of Artificial Sequence: Synthetic oligonucleotide
ccgcuugcagccgggcgga

SEQ ID NO: 2266760 - RNA, 19 nt, Artificial Sequence
  Description of Artificial Sequence: Synthetic oligonucleotide
cggugggacucugggcgug

SEQ ID NO: 2266761 - RNA, 19 nt, Artificial Sequence
  Description of Artificial Sequence: Synthetic oligonucleotide
ccgugacgucacgggcggc

SEQ ID NO: 2266762 - RNA, 19 nt, Artificial Sequence
  Description of Artificial Sequence: Synthetic oligonucleotide
ccggugggacucugggcgu

SEQ ID NO: 2266763 - RNA, 19 nt, Artificial Sequence
  Description of Artificial Sequence: Synthetic oligonucleotide
ggccggcgccccgugacgu

SEQ ID NO: 2266764 - RNA, 19 nt, Artificial Sequence
  Description of Artificial Sequence: Synthetic oligonucleotide
cggcgccccgugacgucac

SEQ ID NO: 2266765 - RNA, 19 nt, Artificial Sequence
  Description of Artificial Sequence: Synthetic oligonucleotide
ccuccgaaguaaggagcuu

SEQ ID NO: 2266766 - RNA, 19 nt, Artificial Sequence
  Description of Artificial Sequence: Synthetic oligonucleotide
aauacauaaguuuucauga

SEQ ID NO: 2266767 - RNA, 19 nt, Artificial Sequence
  Description of Artificial Sequence: Synthetic oligonucleotide
uuugagagaaguccuagcg

SEQ ID NO: 2266768 - RNA, 19 nt, Artificial Sequence
  Description of Artificial Sequence: Synthetic oligonucleotide
uuaggaaccaucuucaucu

SEQ ID NO: 2266769 - RNA, 19 nt, Artificial Sequence
  Description of Artificial Sequence: Synthetic oligonucleotide
acaaguuugagagaagucc

SEQ ID NO: 2266770 - RNA, 19 nt, Artificial Sequence
  Description of Artificial Sequence: Synthetic oligonucleotide
aaaccuguacuuuaaguag

SEQ ID NO: 2266771 - RNA, 19 nt, Artificial Sequence
  Description of Artificial Sequence: Synthetic oligonucleotide
uuugucucaauacauaagu

SEQ ID NO: 2266772 - RNA, 19 nt, Artificial Sequence
  Description of Artificial Sequence: Synthetic oligonucleotide
aauguuauaccucucucca

SEQ ID NO: 2266773 - RNA, 19 nt, Artificial Sequence
  Description of Artificial Sequence: Synthetic oligonucleotide
aguucauggucuuacauuc

SEQ ID NO: 2266774 - RNA, 19 nt, Artificial Sequence
  Description of Artificial Sequence: Synthetic oligonucleotide
uuaaguugaaaugucauug

SEQ ID NO: 2266775 - RNA, 19 nt, Artificial Sequence
  Description of Artificial Sequence: Synthetic oligonucleotide
ucuauugugcuguuguugg

SEQ ID NO: 2266776 - RNA, 19 nt, Artificial Sequence
  Description of Artificial Sequence: Synthetic oligonucleotide
uuuucaugagccaaucugc

SEQ ID NO: 2266777 - RNA, 19 nt, Artificial Sequence
  Description of Artificial Sequence: Synthetic oligonucleotide
ucuuacauucagcaaauug

SEQ ID NO: 2266778 - RNA, 19 nt, Artificial Sequence
  Description of Artificial Sequence: Synthetic oligonucleotide
acauaaguuuucaugagcc

SEQ ID NO: 2266779 - RNA, 19 nt, Artificial Sequence
  Description of Artificial Sequence: Synthetic oligonucleotide
uguuauaccucucuccacc

SEQ ID NO: 2266780 - RNA, 19 nt, Artificial Sequence
  Description of Artificial Sequence: Synthetic oligonucleotide
aaaccugcccaccagcaac

SEQ ID NO: 2266781 - RNA, 19 nt, Artificial Sequence
  Description of Artificial Sequence: Synthetic oligonucleotide
gauuacauguauuuacaug

SEQ ID NO: 2266782 - RNA, 19 nt, Artificial Sequence
  Description of Artificial Sequence: Synthetic oligonucleotide
gaaaacuuuacauauguua

SEQ ID NO: 2266783 - RNA, 19 nt, Artificial Sequence
  Description of Artificial Sequence: Synthetic oligonucleotide
uguacuuuaaguaggguuu

SEQ ID NO: 2266784 - RNA, 19 nt, Artificial Sequence
  Description of Artificial Sequence: Synthetic oligonucleotide
cauaguucugguuagcuug

SEQ ID NO: 2266785 - RNA, 19 nt, Artificial Sequence
  Description of Artificial Sequence: Synthetic oligonucleotide
uuaucugaaggguucaaug

SEQ ID NO: 2266786 - RNA, 19 nt, Artificial Sequence
  Description of Artificial Sequence: Synthetic oligonucleotide
caaucugcugauuucagcc

SEQ ID NO: 2266787 - RNA, 19 nt, Artificial Sequence
  Description of Artificial Sequence: Synthetic oligonucleotide
guugaaaugucauuguuuc

SEQ ID NO: 2266788 - RNA, 19 nt, Artificial Sequence
  Description of Artificial Sequence: Synthetic oligonucleotide
  modified_base (17)..(17): a, c, u, g, unknown or other
aauuauucucauaaaanaa

SEQ ID NO: 2266789 - RNA, 19 nt, Artificial Sequence
  Description of Artificial Sequence: Synthetic oligonucleotide
guuuucaugagccaaucug

SEQ ID NO: 2266790 - RNA, 19 nt, Artificial Sequence
  Description of Artificial Sequence: Synthetic oligonucleotide
uaaaccuguacuuuaagua

SEQ ID NO: 2266791 - RNA, 19 nt, Artificial Sequence
  Description of Artificial Sequence: Synthetic oligonucleotide
guucugguuagcuugaggc

SEQ ID NO: 2266792 - RNA, 19 nt, Artificial Sequence
  Description of Artificial Sequence: Synthetic oligonucleotide
agaauaaaggccagaaaac

SEQ ID NO: 2266793 - RNA, 19 nt, Artificial Sequence
  Description of Artificial Sequence: Synthetic oligonucleotide
gguucaaugaaacaggaac

SEQ ID NO: 2266794 - RNA, 19 nt, Artificial Sequence
  Description of Artificial Sequence: Synthetic oligonucleotide
aauuuaaaccuguacuuua

SEQ ID NO: 2266795 - RNA, 19 nt, Artificial Sequence
  Description of Artificial Sequence: Synthetic oligonucleotide
uacauauguuacaagauua

SEQ ID NO: 2266796 - RNA, 19 nt, Artificial Sequence
  Description of Artificial Sequence: Synthetic oligonucleotide
uuuuaaguugaaaugucau

SEQ ID NO: 2266797 - RNA, 19 nt, Artificial Sequence
  Description of Artificial Sequence: Synthetic oligonucleotide
uacuaacauuucuagauug

SEQ ID NO: 2266798 - RNA, 19 nt, Artificial Sequence
  Description of Artificial Sequence: Synthetic oligonucleotide
uggucuuacauucagcaaa

SEQ ID NO: 2266799 - RNA, 19 nt, Artificial Sequence
  Description of Artificial Sequence: Synthetic oligonucleotide
uaaguaggguuuuaaguug

SEQ ID NO: 2266800 - RNA, 19 nt, Artificial Sequence
  Description of Artificial Sequence: Synthetic oligonucleotide
  modified_base (16)..(16): a, c, u, g, unknown or other
auuauucucauaaaanaaa

SEQ ID NO: 2266801 - RNA, 19 nt, Artificial Sequence
  Description of Artificial Sequence: Synthetic oligonucleotide
aggguuuuaaguugaaaug

SEQ ID NO: 2266802 - RNA, 19 nt, Artificial Sequence
  Description of Artificial Sequence: Synthetic oligonucleotide
uuaaaccuguacuuuaagu

SEQ ID NO: 2266803 - RNA, 19 nt, Artificial Sequence
  Description of Artificial Sequence: Synthetic oligonucleotide
ugagagaaguccuagcgac

SEQ ID NO: 2266804 - RNA, 19 nt, Artificial Sequence
  Description of Artificial Sequence: Synthetic oligonucleotide
uuugucaccuuucagucuc

SEQ ID NO: 2266805 - RNA, 19 nt, Artificial Sequence
  Description of Artificial Sequence: Synthetic oligonucleotide
uucuuaggaaccaucuuca

SEQ ID NO: 2266806 - RNA, 19 nt, Artificial Sequence
  Description of Artificial Sequence: Synthetic oligonucleotide
aaaguuaauuuaaaccugu

SEQ ID NO: 2266807 - RNA, 19 nt, Artificial Sequence
  Description of Artificial Sequence: Synthetic oligonucleotide
uacaagauuacauguauuu

SEQ ID NO: 2266808 - RNA, 19 nt, Artificial Sequence
  Description of Artificial Sequence: Synthetic oligonucleotide
uucauggucuuacauucag

SEQ ID NO: 2266809 - RNA, 19 nt, Artificial Sequence
  Description of Artificial Sequence: Synthetic oligonucleotide
uuuccagggagaaacgaug

SEQ ID NO: 2266810 - RNA, 19 nt, Artificial Sequence
  Description of Artificial Sequence: Synthetic oligonucleotide
uuacauauguuacaagauu

SEQ ID NO: 2266811 - RNA, 19 nt, Artificial Sequence
  Description of Artificial Sequence: Synthetic oligonucleotide
aagcuugggcuugauaggc

SEQ ID NO: 2266812 - RNA, 19 nt, Artificial Sequence
  Description of Artificial Sequence: Synthetic oligonucleotide
uaucugaaggguucaauga

SEQ ID NO: 2266813 - RNA, 19 nt, Artificial Sequence
  Description of Artificial Sequence: Synthetic oligonucleotide
ugucauuguuuccuuaucu

SEQ ID NO: 2266814 - RNA, 19 nt, Artificial Sequence
  Description of Artificial Sequence: Synthetic oligonucleotide
agcgacuucgaguucgggc

SEQ ID NO: 2266815 - RNA, 19 nt, Artificial Sequence
  Description of Artificial Sequence: Synthetic oligonucleotide
auguaaauuuaauuauucu

SEQ ID NO: 2266816 - RNA, 19 nt, Artificial Sequence
  Description of Artificial Sequence: Synthetic oligonucleotide
aacgaugcaccgaucaaac

SEQ ID NO: 2266817 - RNA, 19 nt, Artificial Sequence
  Description of Artificial Sequence: Synthetic oligonucleotide
agagauguugcuuucugcu

SEQ ID NO: 2266818 - RNA, 19 nt, Artificial Sequence
  Description of Artificial Sequence: Synthetic oligonucleotide
uauaccucucuccaccacc

SEQ ID NO: 2266819 - RNA, 19 nt, Artificial Sequence
  Description of Artificial Sequence: Synthetic oligonucleotide
gcaagcuugggcuugauag

SEQ ID NO: 2266820 - RNA, 19 nt, Artificial Sequence
  Description of Artificial Sequence: Synthetic oligonucleotide
ugcuagauccuuuucuuug

SEQ ID NO: 2266821 - RNA, 19 nt, Artificial Sequence
  Description of Artificial Sequence: Synthetic oligonucleotide
aaaguucauggucuuacau

SEQ ID NO: 2266822 - RNA, 19 nt, Artificial Sequence
  Description of Artificial Sequence: Synthetic oligonucleotide
auuguuuccuuaucugaag

SEQ ID NO: 2266823 - RNA, 19 nt, Artificial Sequence
  Description of Artificial Sequence: Synthetic oligonucleotide
agaaacgaugcaccgauca

SEQ ID NO: 2266824 - RNA, 19 nt, Artificial Sequence
  Description of Artificial Sequence: Synthetic oligonucleotide
aacuuuacauauguuacaa

SEQ ID NO: 2266825 - RNA, 19 nt, Artificial Sequence
  Description of Artificial Sequence: Synthetic oligonucleotide
aaauuuaauuauucucaua

SEQ ID NO: 2266826 - RNA, 19 nt, Artificial Sequence
  Description of Artificial Sequence: Synthetic oligonucleotide
aagauuacauguauuuaca

SEQ ID NO: 2266827 - RNA, 19 nt, Artificial Sequence
  Description of Artificial Sequence: Synthetic oligonucleotide
ucuuacuaacauuucuaga

SEQ ID NO: 2266828 - RNA, 19 nt, Artificial Sequence
  Description of Artificial Sequence: Synthetic oligonucleotide
cuaacauuucuagauuggg

SEQ ID NO: 2266829 - RNA, 19 nt, Artificial Sequence
  Description of Artificial Sequence: Synthetic oligonucleotide
acuaaauuuggcuccggca

SEQ ID NO: 2266830 - RNA, 19 nt, Artificial Sequence
  Description of Artificial Sequence: Synthetic oligonucleotide
guucaaugaaacaggaacc

SEQ ID NO: 2266831 - RNA, 19 nt, Artificial Sequence
  Description of Artificial Sequence: Synthetic oligonucleotide
aggcucuuguucuugcccc

SEQ ID NO: 2266832 - RNA, 19 nt, Artificial Sequence
  Description of Artificial Sequence: Synthetic oligonucleotide
ugguucacuaaauuuggcu

SEQ ID NO: 2266833 - RNA, 19 nt, Artificial Sequence
  Description of Artificial Sequence: Synthetic oligonucleotide
uuuaaguugaaaugucauu

SEQ ID NO: 2266834 - RNA, 19 nt, Artificial Sequence
  Description of Artificial Sequence: Synthetic oligonucleotide
aaguucauggucuuacauu

SEQ ID NO: 2266835 - RNA, 19 nt, Artificial Sequence
  Description of Artificial Sequence: Synthetic oligonucleotide
ggagcugaggccaacaucg

SEQ ID NO: 2266836 - RNA, 19 nt, Artificial Sequence
  Description of Artificial Sequence: Synthetic oligonucleotide
uguugguucuuacuaacau

SEQ ID NO: 2266837 - RNA, 19 nt, Artificial Sequence
  Description of Artificial Sequence: Synthetic oligonucleotide
uugagagaaguccuagcga

SEQ ID NO: 2266838 - RNA, 19 nt, Artificial Sequence
  Description of Artificial Sequence: Synthetic oligonucleotide
cuuugucucaauacauaag

SEQ ID NO: 2266839 - RNA, 19 nt, Artificial Sequence
  Description of Artificial Sequence: Synthetic oligonucleotide
aaucugcugauuucagccu

SEQ ID NO: 2266840 - RNA, 19 nt, Artificial Sequence
  Description of Artificial Sequence: Synthetic oligonucleotide
ucaccuuucagucuccuuu

SEQ ID NO: 2266841 - RNA, 19 nt, Artificial Sequence
  Description of Artificial Sequence: Synthetic oligonucleotide
agcauuccaacuuggguug

SEQ ID NO: 2266842 - RNA, 19 nt, Artificial Sequence
  Description of Artificial Sequence: Synthetic oligonucleotide
aaguuuucaugagccaauc

SEQ ID NO: 2266843 - RNA, 19 nt, Artificial Sequence
  Description of Artificial Sequence: Synthetic oligonucleotide
ucucaauacauaaguuuuc

SEQ ID NO: 2266844 - RNA, 19 nt, Artificial Sequence
  Description of Artificial Sequence: Synthetic oligonucleotide
acuaacauuucuagauugg

SEQ ID NO: 2266845 - RNA, 19 nt, Artificial Sequence
  Description of Artificial Sequence: Synthetic oligonucleotide
ucugaaggguucaaugaaa

SEQ ID NO: 2266846 - RNA, 19 nt, Artificial Sequence
  Description of Artificial Sequence: Synthetic oligonucleotide
uccggcauaguucugguua

SEQ ID NO: 2266847 - RNA, 19 nt, Artificial Sequence
  Description of Artificial Sequence: Synthetic oligonucleotide
uucacuaaauuuggcuccg

SEQ ID NO: 2266848 - RNA, 19 nt, Artificial Sequence
  Description of Artificial Sequence: Synthetic oligonucleotide
guuagcuugaggcuuaaaa

SEQ ID NO: 2266849 - RNA, 19 nt, Artificial Sequence
  Description of Artificial Sequence: Synthetic oligonucleotide
aguccuagcgacuucgagu

SEQ ID NO: 2266850 - RNA, 19 nt, Artificial Sequence
  Description of Artificial Sequence: Synthetic oligonucleotide
aauaaaggccagaaaacuu

SEQ ID NO: 2266851 - RNA, 19 nt, Artificial Sequence
  Description of Artificial Sequence: Synthetic oligonucleotide
acuuuacauauguuacaag

SEQ ID NO: 2266852 - RNA, 19 nt, Artificial Sequence
  Description of Artificial Sequence: Synthetic oligonucleotide
gucauuguuuccuuaucug

SEQ ID NO: 2266853 - RNA, 19 nt, Artificial Sequence
  Description of Artificial Sequence: Synthetic oligonucleotide
cugaaggguucaaugaaac

SEQ ID NO: 2266854 - RNA, 19 nt, Artificial Sequence
  Description of Artificial Sequence: Synthetic oligonucleotide
uaggcuagcauuccaacuu

SEQ ID NO: 2266855 - RNA, 19 nt, Artificial Sequence
  Description of Artificial Sequence: Synthetic oligonucleotide
ugauccuuggucuucuguc

SEQ ID NO: 2266856 - RNA, 19 nt, Artificial Sequence
  Description of Artificial Sequence: Synthetic oligonucleotide
agaaguccuagcgacuucg

SEQ ID NO: 2266857 - RNA, 19 nt, Artificial Sequence
  Description of Artificial Sequence: Synthetic oligonucleotide
aaugaaacaggaacccagu

SEQ ID NO: 2266858 - RNA, 19 nt, Artificial Sequence
  Description of Artificial Sequence: Synthetic oligonucleotide
agggagaaacgaugcaccg

SEQ ID NO: 2266859 - RNA, 19 nt, Artificial Sequence
  Description of Artificial Sequence: Synthetic oligonucleotide
auguuauaccucucuccac

SEQ ID NO: 2266860 - RNA, 19 nt, Artificial Sequence
  Description of Artificial Sequence: Synthetic oligonucleotide
aaguccuagcgacuucgag

SEQ ID NO: 2266861 - RNA, 19 nt, Artificial Sequence
  Description of Artificial Sequence: Synthetic oligonucleotide
caagcuugggcuugauagg

SEQ ID NO: 2266862 - RNA, 19 nt, Artificial Sequence
  Description of Artificial Sequence: Synthetic oligonucleotide
uuggcuccggcauaguucu

SEQ ID NO: 2266863 - RNA, 19 nt, Artificial Sequence
  Description of Artificial Sequence: Synthetic oligonucleotide
ucaucugggaauucugauc

SEQ ID NO: 2266864 - RNA, 19 nt, Artificial Sequence
  Description of Artificial Sequence: Synthetic oligonucleotide
aaaggccagaaaacuuuac

SEQ ID NO: 2266865 - RNA, 19 nt, Artificial Sequence
  Description of Artificial Sequence: Synthetic oligonucleotide
ugaaggguucaaugaaaca

SEQ ID NO: 2266866 - RNA, 19 nt, Artificial Sequence
  Description of Artificial Sequence: Synthetic oligonucleotide
uuguugguucuuacuaaca

SEQ ID NO: 2266867 - RNA, 19 nt, Artificial Sequence
  Description of Artificial Sequence: Synthetic oligonucleotide
ugauaggcuagcauuccaa

SEQ ID NO: 2266868 - RNA, 19 nt, Artificial Sequence
  Description of Artificial Sequence: Synthetic oligonucleotide
guuguugguucuuacuaac

SEQ ID NO: 2266869 - RNA, 19 nt, Artificial Sequence
  Description of Artificial Sequence: Synthetic oligonucleotide
ucauggucuuacauucagc

SEQ ID NO: 2266870 - RNA, 19 nt, Artificial Sequence
  Description of Artificial Sequence: Synthetic oligonucleotide
uaauuuaaaccuguacuuu

SEQ ID NO: 2266871 - RNA, 19 nt, Artificial Sequence
  Description of Artificial Sequence: Synthetic oligonucleotide
agauuacauguauuuacau

SEQ ID NO: 2266872 - RNA, 19 nt, Artificial Sequence
  Description of Artificial Sequence: Synthetic oligonucleotide
gaugcaccgaucaaaccug

SEQ ID NO: 2266873 - RNA, 19 nt, Artificial Sequence
  Description of Artificial Sequence: Synthetic oligonucleotide
gaauucugauccuuggucu

SEQ ID NO: 2266874 - RNA, 19 nt, Artificial Sequence
  Description of Artificial Sequence: Synthetic oligonucleotide
aguuugagagaaguccuag

SEQ ID NO: 2266875 - RNA, 19 nt, Artificial Sequence
  Description of Artificial Sequence: Synthetic oligonucleotide
gaucaaaccugcccaccag

SEQ ID NO: 2266876 - RNA, 19 nt, Artificial Sequence
  Description of Artificial Sequence: Synthetic oligonucleotide
gcgacuucgaguucgggcg

SEQ ID NO: 2266877 - RNA, 19 nt, Artificial Sequence
  Description of Artificial Sequence: Synthetic oligonucleotide
ucugcuagauccuuuucuu

SEQ ID NO: 2266878 - RNA, 19 nt, Artificial Sequence
  Description of Artificial Sequence: Synthetic oligonucleotide
aaacgaugcaccgaucaaa

SEQ ID NO: 2266879 - RNA, 19 nt, Artificial Sequence
  Description of Artificial Sequence: Synthetic oligonucleotide
uuacaagauuacauguauu

SEQ ID NO: 2266880 - RNA, 19 nt, Artificial Sequence
  Description of Artificial Sequence: Synthetic oligonucleotide
augaaacaggaacccagug

SEQ ID NO: 2266881 - RNA, 19 nt, Artificial Sequence
  Description of Artificial Sequence: Synthetic oligonucleotide
gaauaaaggccagaaaacu

SEQ ID NO: 2266882 - RNA, 19 nt, Artificial Sequence
  Description of Artificial Sequence: Synthetic oligonucleotide
auaccucucuccaccaccc

SEQ ID NO: 2266883 - RNA, 19 nt, Artificial Sequence
  Description of Artificial Sequence: Synthetic oligonucleotide
aggaaccaucuucaucugg

SEQ ID NO: 2266884 - RNA, 19 nt, Artificial Sequence
  Description of Artificial Sequence: Synthetic oligonucleotide
guuuuaaguugaaauguca

SEQ ID NO: 2266885 - RNA, 19 nt, Artificial Sequence
  Description of Artificial Sequence: Synthetic oligonucleotide
uaaaggccagaaaacuuua

SEQ ID NO: 2266886 - RNA, 19 nt, Artificial Sequence
  Description of Artificial Sequence: Synthetic oligonucleotide
uucugguuagcuugaggcu

SEQ ID NO: 2266887 - RNA, 19 nt, Artificial Sequence
  Description of Artificial Sequence: Synthetic oligonucleotide
auggugguucacuaaauuu

SEQ ID NO: 2266888 - RNA, 19 nt, Artificial Sequence
  Description of Artificial Sequence: Synthetic oligonucleotide
accgaucaaaccugcccac

SEQ ID NO: 2266889 - RNA, 19 nt, Artificial Sequence
  Description of Artificial Sequence: Synthetic oligonucleotide
gaggccaacaucgagucuc

SEQ ID NO: 2266890 - RNA, 19 nt, Artificial Sequence
  Description of Artificial Sequence: Synthetic oligonucleotide
uaaauuuggcuccggcaua

SEQ ID NO: 2266891 - RNA, 19 nt, Artificial Sequence
  Description of Artificial Sequence: Synthetic oligonucleotide
auaaaggccagaaaacuuu

SEQ ID NO: 2266892 - RNA, 19 nt, Artificial Sequence
  Description of Artificial Sequence: Synthetic oligonucleotide
aaguaggguuuuaaguuga

SEQ ID NO: 2266893 - RNA, 19 nt, Artificial Sequence
  Description of Artificial Sequence: Synthetic oligonucleotide
aaaccucccucccuuucca

SEQ ID NO: 2266894 - RNA, 19 nt, Artificial Sequence
  Description of Artificial Sequence: Synthetic oligonucleotide
uugucucaauacauaaguu

SEQ ID NO: 2266895 - RNA, 19 nt, Artificial Sequence
  Description of Artificial Sequence: Synthetic oligonucleotide
ucgaguucgggcggcagcg

SEQ ID NO: 2266896 - RNA, 19 nt, Artificial Sequence
  Description of Artificial Sequence: Synthetic oligonucleotide
auguauuuacauguaaauu

SEQ ID NO: 2266897 - RNA, 19 nt, Artificial Sequence
  Description of Artificial Sequence: Synthetic oligonucleotide
ucccucucgaccuccaaac

SEQ ID NO: 2266898 - RNA, 19 nt, Artificial Sequence
  Description of Artificial Sequence: Synthetic oligonucleotide
cacuaaauuuggcuccggc

SEQ ID NO: 2266899 - RNA, 19 nt, Artificial Sequence
  Description of Artificial Sequence: Synthetic oligonucleotide
gaucgcaggguuuccacuc

SEQ ID NO: 2266900 - RNA, 19 nt, Artificial Sequence
  Description of Artificial Sequence: Synthetic oligonucleotide
uccgucuucaacccagcuc

SEQ ID NO: 2266901 - RNA, 19 nt, Artificial Sequence
  Description of Artificial Sequence: Synthetic oligonucleotide
aacuuggguuguuggcgag

SEQ ID NO: 2266902 - RNA, 19 nt, Artificial Sequence
  Description of Artificial Sequence: Synthetic oligonucleotide
uggccugccgcgcagcugc

SEQ ID NO: 2266903 - RNA, 19 nt, Artificial Sequence
  Description of Artificial Sequence: Synthetic oligonucleotide
cuugauaggcuagcauucc

SEQ ID NO: 2266904 - RNA, 19 nt, Artificial Sequence
  Description of Artificial Sequence: Synthetic oligonucleotide
agaacacuuggugauggug

SEQ ID NO: 2266905 - RNA, 19 nt, Artificial Sequence
  Description of Artificial Sequence: Synthetic oligonucleotide
cugcccaccagcaacucac

SEQ ID NO: 2266906 - RNA, 19 nt, Artificial Sequence
  Description of Artificial Sequence: Synthetic oligonucleotide
cauuguuuccuuaucugaa

SEQ ID NO: 2266907 - RNA, 19 nt, Artificial Sequence
  Description of Artificial Sequence: Synthetic oligonucleotide
aagaacacuuggugauggu

SEQ ID NO: 2266908 - RNA, 19 nt, Artificial Sequence
  Description of Artificial Sequence: Synthetic oligonucleotide
ucgaccuccaaaccucccu

SEQ ID NO: 2266909 - RNA, 19 nt, Artificial Sequence
  Description of Artificial Sequence: Synthetic oligonucleotide
cacaaguuugagagaaguc

SEQ ID NO: 2266910 - RNA, 19 nt, Artificial Sequence
  Description of Artificial Sequence: Synthetic oligonucleotide
uucgaguucgggcggcagc

SEQ ID NO: 2266911 - RNA, 19 nt, Artificial Sequence
  Description of Artificial Sequence: Synthetic oligonucleotide
acagaccacaguuccgucu

SEQ ID NO: 2266912 - RNA, 19 nt, Artificial Sequence
  Description of Artificial Sequence: Synthetic oligonucleotide
gucuauugugcuguuguug

SEQ ID NO: 2266913 - RNA, 19 nt, Artificial Sequence
  Description of Artificial Sequence: Synthetic oligonucleotide
uguugcuuucugcuagauc

SEQ ID NO: 2266914 - RNA, 19 nt, Artificial Sequence
  Description of Artificial Sequence: Synthetic oligonucleotide
cugaggccaacaucgaguc

SEQ ID NO: 2266915 - RNA, 19 nt, Artificial Sequence
  Description of Artificial Sequence: Synthetic oligonucleotide
cauaaguuuucaugagcca

SEQ ID NO: 2266916 - RNA, 19 nt, Artificial Sequence
  Description of Artificial Sequence: Synthetic oligonucleotide
uuauaccucucuccaccac

SEQ ID NO: 2266917 - RNA, 19 nt, Artificial Sequence
  Description of Artificial Sequence: Synthetic oligonucleotide
accuguacuuuaaguaggg

SEQ ID NO: 2266918 - RNA, 19 nt, Artificial Sequence
  Description of Artificial Sequence: Synthetic oligonucleotide
ugauggugguucacuaaau

SEQ ID NO: 2266919 - RNA, 19 nt, Artificial Sequence
  Description of Artificial Sequence: Synthetic oligonucleotide
ccaggauaagagauguugc

SEQ ID NO: 2266920 - RNA, 19 nt, Artificial Sequence
  Description of Artificial Sequence: Synthetic oligonucleotide
auuuaaaccuguacuuuaa

SEQ ID NO: 2266921 - RNA, 19 nt, Artificial Sequence
  Description of Artificial Sequence: Synthetic oligonucleotide
ccaccagcaacucacagac

SEQ ID NO: 2266922 - RNA, 19 nt, Artificial Sequence
  Description of Artificial Sequence: Synthetic oligonucleotide
aggcuagcauuccaacuug

SEQ ID NO: 2266923 - RNA, 19 nt, Artificial Sequence
  Description of Artificial Sequence: Synthetic oligonucleotide
agcugaggccaacaucgag

SEQ ID NO: 2266924 - RNA, 19 nt, Artificial Sequence
  Description of Artificial Sequence: Synthetic oligonucleotide
ugguucuuacuaacauuuc

SEQ ID NO: 2266925 - RNA, 19 nt, Artificial Sequence
  Description of Artificial Sequence: Synthetic oligonucleotide
ugauuucagccugggagcu

SEQ ID NO: 2266926 - RNA, 19 nt, Artificial Sequence
  Description of Artificial Sequence: Synthetic oligonucleotide
gaaacgaugcaccgaucaa

SEQ ID NO: 2266927 - RNA, 19 nt, Artificial Sequence
  Description of Artificial Sequence: Synthetic oligonucleotide
gauguugcuuucugcuaga

SEQ ID NO: 2266928 - RNA, 19 nt, Artificial Sequence
  Description of Artificial Sequence: Synthetic oligonucleotide
guucuuacuaacauuucua

SEQ ID NO: 2266929 - RNA, 19 nt, Artificial Sequence
  Description of Artificial Sequence: Synthetic oligonucleotide
caucgagucuccucagcac

SEQ ID NO: 2266930 - RNA, 19 nt, Artificial Sequence
  Description of Artificial Sequence: Synthetic oligonucleotide
gugauggugguucacuaaa

SEQ ID NO: 2266931 - RNA, 19 nt, Artificial Sequence
  Description of Artificial Sequence: Synthetic oligonucleotide
cuagcgacuucgaguucgg

SEQ ID NO: 2266932 - RNA, 19 nt, Artificial Sequence
  Description of Artificial Sequence: Synthetic oligonucleotide
caaguuugagagaaguccu

SEQ ID NO: 2266933 - RNA, 19 nt, Artificial Sequence
  Description of Artificial Sequence: Synthetic oligonucleotide
ggaauguuauaccucucuc

SEQ ID NO: 2266934 - RNA, 19 nt, Artificial Sequence
  Description of Artificial Sequence: Synthetic oligonucleotide
agaucgcaggguuuccacu

SEQ ID NO: 2266935 - RNA, 19 nt, Artificial Sequence
  Description of Artificial Sequence: Synthetic oligonucleotide
ucuuaggaaccaucuucau

SEQ ID NO: 2266936 - RNA, 19 nt, Artificial Sequence
  Description of Artificial Sequence: Synthetic oligonucleotide
ucugucuauugugcuguug

SEQ ID NO: 2266937 - RNA, 19 nt, Artificial Sequence
  Description of Artificial Sequence: Synthetic oligonucleotide
ugcaccgaucaaaccugcc

SEQ ID NO: 2266938 - RNA, 19 nt, Artificial Sequence
  Description of Artificial Sequence: Synthetic oligonucleotide
ccaacuuggguuguuggcg

SEQ ID NO: 2266939 - RNA, 19 nt, Artificial Sequence
  Description of Artificial Sequence: Synthetic oligonucleotide
agccaaucugcugauuuca

SEQ ID NO: 2266940 - RNA, 19 nt, Artificial Sequence
  Description of Artificial Sequence: Synthetic oligonucleotide
ucccucccuuuccagggag

SEQ ID NO: 2266941 - RNA, 19 nt, Artificial Sequence
  Description of Artificial Sequence: Synthetic oligonucleotide
gguuuuaaguugaaauguc

SEQ ID NO: 2266942 - RNA, 19 nt, Artificial Sequence
  Description of Artificial Sequence: Synthetic oligonucleotide
uccuuaucugaaggguuca

SEQ ID NO: 2266943 - RNA, 19 nt, Artificial Sequence
  Description of Artificial Sequence: Synthetic oligonucleotide
aggauaagagauguugcuu

SEQ ID NO: 2266944 - RNA, 19 nt, Artificial Sequence
  Description of Artificial Sequence: Synthetic oligonucleotide
ggggcuggaauguuauacc

SEQ ID NO: 2266945 - RNA, 19 nt, Artificial Sequence
  Description of Artificial Sequence: Synthetic oligonucleotide
ugcugauuucagccuggga

SEQ ID NO: 2266946 - RNA, 19 nt, Artificial Sequence
  Description of Artificial Sequence: Synthetic oligonucleotide
gcaccgaucaaaccugccc

SEQ ID NO: 2266947 - RNA, 19 nt, Artificial Sequence
  Description of Artificial Sequence: Synthetic oligonucleotide
ucagaucgcaggguuucca

SEQ ID NO: 2266948 - RNA, 19 nt, Artificial Sequence
  Description of Artificial Sequence: Synthetic oligonucleotide
cagaucgcaggguuuccac

SEQ ID NO: 2266949 - RNA, 19 nt, Artificial Sequence
  Description of Artificial Sequence: Synthetic oligonucleotide
caccgaucaaaccugccca

SEQ ID NO: 2266950 - RNA, 19 nt, Artificial Sequence
  Description of Artificial Sequence: Synthetic oligonucleotide
gagauguugcuuucugcua

SEQ ID NO: 2266951 - RNA, 19 nt, Artificial Sequence
  Description of Artificial Sequence: Synthetic oligonucleotide
gguucuuacuaacauuucu

SEQ ID NO: 2266952 - RNA, 19 nt, Artificial Sequence
  Description of Artificial Sequence: Synthetic oligonucleotide
gauuguacccguguccucu

SEQ ID NO: 2266953 - RNA, 19 nt, Artificial Sequence
  Description of Artificial Sequence: Synthetic oligonucleotide
ugucuauugugcuguuguu

SEQ ID NO: 2266954 - RNA, 19 nt, Artificial Sequence
  Description of Artificial Sequence: Synthetic oligonucleotide
gcugccgccggauuguacc

SEQ ID NO: 2266955 - RNA, 19 nt, Artificial Sequence
  Description of Artificial Sequence: Synthetic oligonucleotide
uugucaccuuucagucucc

SEQ ID NO: 2266956 - RNA, 19 nt, Artificial Sequence
  Description of Artificial Sequence: Synthetic oligonucleotide
ccuagcgacuucgaguucg

SEQ ID NO: 2266957 - RNA, 19 nt, Artificial Sequence
  Description of Artificial Sequence: Synthetic oligonucleotide
caacaucgagucuccucag

SEQ ID NO: 2266958 - RNA, 19 nt, Artificial Sequence
  Description of Artificial Sequence: Synthetic oligonucleotide
aggguucaaugaaacagga

SEQ ID NO: 2266959 - RNA, 19 nt, Artificial Sequence
  Description of Artificial Sequence: Synthetic oligonucleotide
cugucuauugugcuguugu

SEQ ID NO: 2266960 - RNA, 19 nt, Artificial Sequence
  Description of Artificial Sequence: Synthetic oligonucleotide
gccagaaaacuuuacauau

SEQ ID NO: 2266961 - RNA, 19 nt, Artificial Sequence
  Description of Artificial Sequence: Synthetic oligonucleotide
auaguucugguuagcuuga

SEQ ID NO: 2266962 - RNA, 19 nt, Artificial Sequence
  Description of Artificial Sequence: Synthetic oligonucleotide
uuccgucuucaacccagcu

SEQ ID NO: 2266963 - RNA, 19 nt, Artificial Sequence
  Description of Artificial Sequence: Synthetic oligonucleotide
guuuccuuaucugaagggu

SEQ ID NO: 2266964 - RNA, 19 nt, Artificial Sequence
  Description of Artificial Sequence: Synthetic oligonucleotide
cuagcauuccaacuugggu

SEQ ID NO: 2266965 - RNA, 19 nt, Artificial Sequence
  Description of Artificial Sequence: Synthetic oligonucleotide
gaguucgggcggcagcggc

SEQ ID NO: 2266966 - RNA, 19 nt, Artificial Sequence
  Description of Artificial Sequence: Synthetic oligonucleotide
aaguuugagagaaguccua

SEQ ID NO: 2266967 - RNA, 19 nt, Artificial Sequence
  Description of Artificial Sequence: Synthetic oligonucleotide
augcaccgaucaaaccugc

SEQ ID NO: 2266968 - RNA, 19 nt, Artificial Sequence
  Description of Artificial Sequence: Synthetic oligonucleotide
cuugggaagaacacuuggu

SEQ ID NO: 2266969 - RNA, 19 nt, Artificial Sequence
  Description of Artificial Sequence: Synthetic oligonucleotide
ccaacaucgagucuccuca

SEQ ID NO: 2266970 - RNA, 19 nt, Artificial Sequence
  Description of Artificial Sequence: Synthetic oligonucleotide
gcuagcauuccaacuuggg

SEQ ID NO: 2266971 - RNA, 19 nt, Artificial Sequence
  Description of Artificial Sequence: Synthetic oligonucleotide
gauggugguucacuaaauu

SEQ ID NO: 2266972 - RNA, 19 nt, Artificial Sequence
  Description of Artificial Sequence: Synthetic oligonucleotide
ucugauccuuggucuucug

SEQ ID NO: 2266973 - RNA, 19 nt, Artificial Sequence
  Description of Artificial Sequence: Synthetic oligonucleotide
aggccaacaucgagucucc

SEQ ID NO: 2266974 - RNA, 19 nt, Artificial Sequence
  Description of Artificial Sequence: Synthetic oligonucleotide
uucagaucgcaggguuucc

SEQ ID NO: 2266975 - RNA, 19 nt, Artificial Sequence
  Description of Artificial Sequence: Synthetic oligonucleotide
ugggagcugaggccaacau

SEQ ID NO: 2266976 - RNA, 19 nt, Artificial Sequence
  Description of Artificial Sequence: Synthetic oligonucleotide
aaccugcccaccagcaacu

SEQ ID NO: 2266977 - RNA, 19 nt, Artificial Sequence
  Description of Artificial Sequence: Synthetic oligonucleotide
ggguuuuaaguugaaaugu

SEQ ID NO: 2266978 - RNA, 19 nt, Artificial Sequence
  Description of Artificial Sequence: Synthetic oligonucleotide
ucgcaggguuuccacucug

SEQ ID NO: 2266979 - RNA, 19 nt, Artificial Sequence
  Description of Artificial Sequence: Synthetic oligonucleotide
aucgcaggguuuccacucu

SEQ ID NO: 2266980 - RNA, 19 nt, Artificial Sequence
  Description of Artificial Sequence: Synthetic oligonucleotide
agaaaacuuuacauauguu

SEQ ID NO: 2266981 - RNA, 19 nt, Artificial Sequence
  Description of Artificial Sequence: Synthetic oligonucleotide
uccuuggucuucugucuau

SEQ ID NO: 2266982 - RNA, 19 nt, Artificial Sequence
  Description of Artificial Sequence: Synthetic oligonucleotide
gcuucuuugucaccuuuca

SEQ ID NO: 2266983 - RNA, 19 nt, Artificial Sequence
  Description of Artificial Sequence: Synthetic oligonucleotide
ugggcuugauaggcuagca

SEQ ID NO: 2266984 - RNA, 19 nt, Artificial Sequence
  Description of Artificial Sequence: Synthetic oligonucleotide
gagaaguccuagcgacuuc

SEQ ID NO: 2266985 - RNA, 19 nt, Artificial Sequence
  Description of Artificial Sequence: Synthetic oligonucleotide
ggauaagagauguugcuuu

SEQ ID NO: 2266986 - RNA, 19 nt, Artificial Sequence
  Description of Artificial Sequence: Synthetic oligonucleotide
gcuugauaggcuagcauuc

SEQ ID NO: 2266987 - RNA, 19 nt, Artificial Sequence
  Description of Artificial Sequence: Synthetic oligonucleotide
ugccacgcccaggauaaga

SEQ ID NO: 2266988 - RNA, 19 nt, Artificial Sequence
  Description of Artificial Sequence: Synthetic oligonucleotide
guugguucuuacuaacauu

SEQ ID NO: 2266989 - RNA, 19 nt, Artificial Sequence
  Description of Artificial Sequence: Synthetic oligonucleotide
cucgaccuccaaaccuccc

SEQ ID NO: 2266990 - RNA, 19 nt, Artificial Sequence
  Description of Artificial Sequence: Synthetic oligonucleotide
ggagaaacgaugcaccgau

SEQ ID NO: 2266991 - RNA, 19 nt, Artificial Sequence
  Description of Artificial Sequence: Synthetic oligonucleotide
aguucgggcggcagcggcg

SEQ ID NO: 2266992 - RNA, 19 nt, Artificial Sequence
  Description of Artificial Sequence: Synthetic oligonucleotide
ggcuccggcauaguucugg

SEQ ID NO: 2266993 - RNA, 19 nt, Artificial Sequence
  Description of Artificial Sequence: Synthetic oligonucleotide
uacuuuaaguaggguuuua

SEQ ID NO: 2266994 - RNA, 19 nt, Artificial Sequence
  Description of Artificial Sequence: Synthetic oligonucleotide
cugccgccggauuguaccc

SEQ ID NO: 2266995 - RNA, 19 nt, Artificial Sequence
  Description of Artificial Sequence: Synthetic oligonucleotide
cuccuucuaccuuuaccga

SEQ ID NO: 2266996 - RNA, 19 nt, Artificial Sequence
  Description of Artificial Sequence: Synthetic oligonucleotide
uaccucucuccaccaccca

SEQ ID NO: 2266997 - RNA, 19 nt, Artificial Sequence
  Description of Artificial Sequence: Synthetic oligonucleotide
agcggcgacucccucucga

SEQ ID NO: 2266998 - RNA, 19 nt, Artificial Sequence
  Description of Artificial Sequence: Synthetic oligonucleotide
agucuccuuuucagaucgc

SEQ ID NO: 2266999 - RNA, 19 nt, Artificial Sequence
  Description of Artificial Sequence: Synthetic oligonucleotide
ugcccaccagcaacucaca

SEQ ID NO: 2267000 - RNA, 19 nt, Artificial Sequence
  Description of Artificial Sequence: Synthetic oligonucleotide
cuuuccagggagaaacgau

SEQ ID NO: 2267001 - RNA, 19 nt, Artificial Sequence
  Description of Artificial Sequence: Synthetic oligonucleotide
ccggauuguacccgugucc

SEQ ID NO: 2267002 - RNA, 19 nt, Artificial Sequence
  Description of Artificial Sequence: Synthetic oligonucleotide
gguggcuugggaagaacac

SEQ ID NO: 2267003 - RNA, 19 nt, Artificial Sequence
  Description of Artificial Sequence: Synthetic oligonucleotide
ugccgccggauuguacccg

SEQ ID NO: 2267004 - RNA, 19 nt, Artificial Sequence
  Description of Artificial Sequence: Synthetic oligonucleotide
gacuucgaguucgggcggc

SEQ ID NO: 2267005 - RNA, 19 nt, Artificial Sequence
  Description of Artificial Sequence: Synthetic oligonucleotide
cuuuucagaucgcaggguu

SEQ ID NO: 2267006 - RNA, 19 nt, Artificial Sequence
  Description of Artificial Sequence: Synthetic oligonucleotide
ggcuagcauuccaacuugg

SEQ ID NO: 2267007 - RNA, 19 nt, Artificial Sequence
  Description of Artificial Sequence: Synthetic oligonucleotide
uagcgacuucgaguucggg

SEQ ID NO: 2267008 - RNA, 19 nt, Artificial Sequence
  Description of Artificial Sequence: Synthetic oligonucleotide
auuguacccguguccucuu

SEQ ID NO: 2267009 - RNA, 19 nt, Artificial Sequence
  Description of Artificial Sequence: Synthetic oligonucleotide
guucauggucuuacauuca

SEQ ID NO: 2267010 - RNA, 19 nt, Artificial Sequence
  Description of Artificial Sequence: Synthetic oligonucleotide
ggcuugauaggcuagcauu

SEQ ID NO: 2267011 - RNA, 19 nt, Artificial Sequence
  Description of Artificial Sequence: Synthetic oligonucleotide
cacagaccacaguuccguc

SEQ ID NO: 2267012 - RNA, 19 nt, Artificial Sequence
  Description of Artificial Sequence: Synthetic oligonucleotide
cacgcccaggauaagagau

SEQ ID NO: 2267013 - RNA, 19 nt, Artificial Sequence
  Description of Artificial Sequence: Synthetic oligonucleotide
ggugauggugguucacuaa

SEQ ID NO: 2267014 - RNA, 19 nt, Artificial Sequence
  Description of Artificial Sequence: Synthetic oligonucleotide
gccaacaucgagucuccuc

SEQ ID NO: 2267015 - RNA, 19 nt, Artificial Sequence
  Description of Artificial Sequence: Synthetic oligonucleotide
ccggcauaguucugguuag

SEQ ID NO: 2267016 - RNA, 19 nt, Artificial Sequence
  Description of Artificial Sequence: Synthetic oligonucleotide
gaaguccuagcgacuucga

SEQ ID NO: 2267017 - RNA, 19 nt, Artificial Sequence
  Description of Artificial Sequence: Synthetic oligonucleotide
uccaaaccucccucccuuu

SEQ ID NO: 2267018 - RNA, 19 nt, Artificial Sequence
  Description of Artificial Sequence: Synthetic oligonucleotide
gccacgcccaggauaagag

SEQ ID NO: 2267019 - RNA, 19 nt, Artificial Sequence
  Description of Artificial Sequence: Synthetic oligonucleotide
uacccguguccucuuucuu

SEQ ID NO: 2267020 - RNA, 19 nt, Artificial Sequence
  Description of Artificial Sequence: Synthetic oligonucleotide
guuccgucuucaacccagc

SEQ ID NO: 2267021 - RNA, 19 nt, Artificial Sequence
  Description of Artificial Sequence: Synthetic oligonucleotide
ggguuuccacucugugucc

SEQ ID NO: 2267022 - RNA, 19 nt, Artificial Sequence
  Description of Artificial Sequence: Synthetic oligonucleotide
gagaaacgaugcaccgauc

SEQ ID NO: 2267023 - RNA, 19 nt, Artificial Sequence
  Description of Artificial Sequence: Synthetic oligonucleotide
acgcccaggauaagagaug

SEQ ID NO: 2267024 - RNA, 19 nt, Artificial Sequence
  Description of Artificial Sequence: Synthetic oligonucleotide
gcuagauccuuuucuuugu

SEQ ID NO: 2267025 - RNA, 19 nt, Artificial Sequence
  Description of Artificial Sequence: Synthetic oligonucleotide
ccacaguuccgucuucaac

SEQ ID NO: 2267026 - RNA, 19 nt, Artificial Sequence
  Description of Artificial Sequence: Synthetic oligonucleotide
cuccaccacccaucuucag

SEQ ID NO: 2267027 - RNA, 19 nt, Artificial Sequence
  Description of Artificial Sequence: Synthetic oligonucleotide
guacccguguccucuuucu

SEQ ID NO: 2267028 - RNA, 19 nt, Artificial Sequence
  Description of Artificial Sequence: Synthetic oligonucleotide
uuguacccguguccucuuu

SEQ ID NO: 2267029 - RNA, 19 nt, Artificial Sequence
  Description of Artificial Sequence: Synthetic oligonucleotide
ggcuggaauguuauaccuc

SEQ ID NO: 2267030 - RNA, 19 nt, Artificial Sequence
  Description of Artificial Sequence: Synthetic oligonucleotide
agcuugggcuugauaggcu

SEQ ID NO: 2267031 - RNA, 19 nt, Artificial Sequence
  Description of Artificial Sequence: Synthetic oligonucleotide
uguuggcgaggcucuuguu

SEQ ID NO: 2267032 - RNA, 19 nt, Artificial Sequence
  Description of Artificial Sequence: Synthetic oligonucleotide
cuuaucugaaggguucaau

SEQ ID NO: 2267033 - RNA, 19 nt, Artificial Sequence
  Description of Artificial Sequence: Synthetic oligonucleotide
gcugccacgcccaggauaa

SEQ ID NO: 2267034 - RNA, 19 nt, Artificial Sequence
  Description of Artificial Sequence: Synthetic oligonucleotide
gcgaggcucuuguucuugc

SEQ ID NO: 2267035 - RNA, 19 nt, Artificial Sequence
  Description of Artificial Sequence: Synthetic oligonucleotide
cuauugugcuguuguuggu

SEQ ID NO: 2267036 - RNA, 19 nt, Artificial Sequence
  Description of Artificial Sequence: Synthetic oligonucleotide
agcugccgccggauuguac

SEQ ID NO: 2267037 - RNA, 19 nt, Artificial Sequence
  Description of Artificial Sequence: Synthetic oligonucleotide
cucccucucgaccuccaaa

SEQ ID NO: 2267038 - RNA, 19 nt, Artificial Sequence
  Description of Artificial Sequence: Synthetic oligonucleotide
gcuugggcuugauaggcua

SEQ ID NO: 2267039 - RNA, 19 nt, Artificial Sequence
  Description of Artificial Sequence: Synthetic oligonucleotide
gggagaaacgaugcaccga

SEQ ID NO: 2267040 - RNA, 19 nt, Artificial Sequence
  Description of Artificial Sequence: Synthetic oligonucleotide
ggcgacucccucucgaccu

SEQ ID NO: 2267041 - RNA, 19 nt, Artificial Sequence
  Description of Artificial Sequence: Synthetic oligonucleotide
gccggauuguacccguguc

SEQ ID NO: 2267042 - RNA, 19 nt, Artificial Sequence
  Description of Artificial Sequence: Synthetic oligonucleotide
acuucgaguucgggcggca

SEQ ID NO: 2267043 - RNA, 19 nt, Artificial Sequence
  Description of Artificial Sequence: Synthetic oligonucleotide
cugccgcgcagcugccgcc

SEQ ID NO: 2267044 - RNA, 19 nt, Artificial Sequence
  Description of Artificial Sequence: Synthetic oligonucleotide
gcagcggcgacucccucuc

SEQ ID NO: 2267045 - RNA, 19 nt, Artificial Sequence
  Description of Artificial Sequence: Synthetic oligonucleotide
guacuuuaaguaggguuuu

SEQ ID NO: 2267046 - RNA, 19 nt, Artificial Sequence
  Description of Artificial Sequence: Synthetic oligonucleotide
caguggcuugguggcuugg

SEQ ID NO: 2267047 - RNA, 19 nt, Artificial Sequence
  Description of Artificial Sequence: Synthetic oligonucleotide
cccucucgaccuccaaacc

SEQ ID NO: 2267048 - RNA, 19 nt, Artificial Sequence
  Description of Artificial Sequence: Synthetic oligonucleotide
ggucuuacauucagcaaau

SEQ ID NO: 2267049 - RNA, 19 nt, Artificial Sequence
  Description of Artificial Sequence: Synthetic oligonucleotide
uggcuccggcauaguucug

SEQ ID NO: 2267050 - RNA, 19 nt, Artificial Sequence
  Description of Artificial Sequence: Synthetic oligonucleotide
caugagccaaucugcugau

SEQ ID NO: 2267051 - RNA, 19 nt, Artificial Sequence
  Description of Artificial Sequence: Synthetic oligonucleotide
ccgaucaaaccugcccacc

SEQ ID NO: 2267052 - RNA, 19 nt, Artificial Sequence
  Description of Artificial Sequence: Synthetic oligonucleotide
ccugccgcgcagcugccgc

SEQ ID NO: 2267053 - RNA, 19 nt, Artificial Sequence
  Description of Artificial Sequence: Synthetic oligonucleotide
guucgggcggcagcggcga

SEQ ID NO: 2267054 - RNA, 19 nt, Artificial Sequence
  Description of Artificial Sequence: Synthetic oligonucleotide
uggcgaggcucuuguucuu

SEQ ID NO: 2267055 - RNA, 19 nt, Artificial Sequence
  Description of Artificial Sequence: Synthetic oligonucleotide
cagcuccuucuaccuuuac

SEQ ID NO: 2267056 - RNA, 19 nt, Artificial Sequence
  Description of Artificial Sequence: Synthetic oligonucleotide
ccuuuccagggagaaacga

SEQ ID NO: 2267057 - RNA, 19 nt, Artificial Sequence
  Description of Artificial Sequence: Synthetic oligonucleotide
cgacuucgaguucgggcgg

SEQ ID NO: 2267058 - RNA, 19 nt, Artificial Sequence
  Description of Artificial Sequence: Synthetic oligonucleotide
aggaacccaguggcuuggu

SEQ ID NO: 2267059 - RNA, 19 nt, Artificial Sequence
  Description of Artificial Sequence: Synthetic oligonucleotide
cucccucccuuuccaggga

SEQ ID NO: 2267060 - RNA, 19 nt, Artificial Sequence
  Description of Artificial Sequence: Synthetic oligonucleotide
gcggcgacucccucucgac

SEQ ID NO: 2267061 - RNA, 19 nt, Artificial Sequence
  Description of Artificial Sequence: Synthetic oligonucleotide
acccaguggcuugguggcu

SEQ ID NO: 2267062 - RNA, 19 nt, Artificial Sequence
  Description of Artificial Sequence: Synthetic oligonucleotide
cgaccuccaaaccucccuc

SEQ ID NO: 2267063 - RNA, 19 nt, Artificial Sequence
  Description of Artificial Sequence: Synthetic oligonucleotide
ccucucgaccuccaaaccu

SEQ ID NO: 2267064 - RNA, 19 nt, Artificial Sequence
  Description of Artificial Sequence: Synthetic oligonucleotide
gggcuugauaggcuagcau

SEQ ID NO: 2267065 - RNA, 19 nt, Artificial Sequence
  Description of Artificial Sequence: Synthetic oligonucleotide
cggcgacucccucucgacc

SEQ ID NO: 2267066 - RNA, 19 nt, Artificial Sequence
  Description of Artificial Sequence: Synthetic oligonucleotide
ccugcccaccagcaacuca

SEQ ID NO: 2267067 - RNA, 19 nt, Artificial Sequence
  Description of Artificial Sequence: Synthetic oligonucleotide
gcgacucccucucgaccuc

SEQ ID NO: 2267068 - RNA, 19 nt, Artificial Sequence
  Description of Artificial Sequence: Synthetic oligonucleotide
cugccacgcccaggauaag

SEQ ID NO: 2267069 - RNA, 19 nt, Artificial Sequence
  Description of Artificial Sequence: Synthetic oligonucleotide
gcuccggcauaguucuggu

SEQ ID NO: 2267070 - RNA, 19 nt, Artificial Sequence
  Description of Artificial Sequence: Synthetic oligonucleotide
gucuuacauucagcaaauu

SEQ ID NO: 2267071 - RNA, 19 nt, Artificial Sequence
  Description of Artificial Sequence: Synthetic oligonucleotide
gguuagcuugaggcuuaaa

SEQ ID NO: 2267072 - RNA, 19 nt, Artificial Sequence
  Description of Artificial Sequence: Synthetic oligonucleotide
ccuuaucugaaggguucaa

SEQ ID NO: 2267073 - RNA, 19 nt, Artificial Sequence
  Description of Artificial Sequence: Synthetic oligonucleotide
gccgcgcagcugccgccgg

SEQ ID NO: 2267074 - RNA, 19 nt, Artificial Sequence
  Description of Artificial Sequence: Synthetic oligonucleotide
cggcauaguucugguuagc

SEQ ID NO: 2267075 - RNA, 19 nt, Artificial Sequence
  Description of Artificial Sequence: Synthetic oligonucleotide
cauuccaacuuggguuguu

SEQ ID NO: 2267076 - RNA, 19 nt, Artificial Sequence
  Description of Artificial Sequence: Synthetic oligonucleotide
cggauuguacccguguccu

SEQ ID NO: 2267077 - RNA, 19 nt, Artificial Sequence
  Description of Artificial Sequence: Synthetic oligonucleotide
cccguguccucuuucuuuu

SEQ ID NO: 2267078 - RNA, 19 nt, Artificial Sequence
  Description of Artificial Sequence: Synthetic oligonucleotide
cccucccuuuccagggaga

SEQ ID NO: 2267079 - RNA, 19 nt, Artificial Sequence
  Description of Artificial Sequence: Synthetic oligonucleotide
cgaguucgggcggcagcgg

SEQ ID NO: 2267080 - RNA, 19 nt, Artificial Sequence
  Description of Artificial Sequence: Synthetic oligonucleotide
gccgccggauuguacccgu

SEQ ID NO: 2267081 - RNA, 19 nt, Artificial Sequence
  Description of Artificial Sequence: Synthetic oligonucleotide
ccgccggauuguacccgug

SEQ ID NO: 2267082 - RNA, 19 nt, Artificial Sequence
  Description of Artificial Sequence: Synthetic oligonucleotide
gcauuccaacuuggguugu

SEQ ID NO: 2267083 - RNA, 19 nt, Artificial Sequence
  Description of Artificial Sequence: Synthetic oligonucleotide
caccacccaucuucagcuu

SEQ ID NO: 2267084 - RNA, 19 nt, Artificial Sequence
  Description of Artificial Sequence: Synthetic oligonucleotide
cagcugccgccggauugua

SEQ ID NO: 2267085 - RNA, 19 nt, Artificial Sequence
  Description of Artificial Sequence: Synthetic oligonucleotide
gguuguuggcgaggcucuu

SEQ ID NO: 2267086 - RNA, 19 nt, Artificial Sequence
  Description of Artificial Sequence: Synthetic oligonucleotide
ggccaacaucgagucuccu

SEQ ID NO: 2267087 - RNA, 19 nt, Artificial Sequence
  Description of Artificial Sequence: Synthetic oligonucleotide
ccuuggucuucugucuauu

SEQ ID NO: 2267088 - RNA, 19 nt, Artificial Sequence
  Description of Artificial Sequence: Synthetic oligonucleotide
cgccggauuguacccgugu

SEQ ID NO: 2267089 - RNA, 19 nt, Artificial Sequence
  Description of Artificial Sequence: Synthetic oligonucleotide
cccaguggcuugguggcuu

SEQ ID NO: 2267090 - RNA, 19 nt, Artificial Sequence
  Description of Artificial Sequence: Synthetic oligonucleotide
gcccaggauaagagauguu

SEQ ID NO: 2267091 - RNA, 19 nt, Artificial Sequence
  Description of Artificial Sequence: Synthetic oligonucleotide
gcgcagcugccgccggauu

SEQ ID NO: 2267092 - RNA, 19 nt, Artificial Sequence
  Description of Artificial Sequence: Synthetic oligonucleotide
uuuagcaugaauaaaagca

SEQ ID NO: 2267093 - RNA, 19 nt, Artificial Sequence
  Description of Artificial Sequence: Synthetic oligonucleotide
aauaaaagcagguauuccu

SEQ ID NO: 2267094 - RNA, 19 nt, Artificial Sequence
  Description of Artificial Sequence: Synthetic oligonucleotide
uuuauuucgauacacaguu

SEQ ID NO: 2267095 - RNA, 19 nt, Artificial Sequence
  Description of Artificial Sequence: Synthetic oligonucleotide
uauuucgauacacaguuag

SEQ ID NO: 2267096 - RNA, 19 nt, Artificial Sequence
  Description of Artificial Sequence: Synthetic oligonucleotide
uuagcaugaauaaaagcag

SEQ ID NO: 2267097 - RNA, 19 nt, Artificial Sequence
  Description of Artificial Sequence: Synthetic oligonucleotide
aaugaugccugcugaaaac

SEQ ID NO: 2267098 - RNA, 19 nt, Artificial Sequence
  Description of Artificial Sequence: Synthetic oligonucleotide
ucaauguucaucuuugaca

SEQ ID NO: 2267099 - RNA, 19 nt, Artificial Sequence
  Description of Artificial Sequence: Synthetic oligonucleotide
gagcauuuuccucagaccg

SEQ ID NO: 2267100 - RNA, 19 nt, Artificial Sequence
  Description of Artificial Sequence: Synthetic oligonucleotide
uauucaauguucaucuuug

SEQ ID NO: 2267101 - RNA, 19 nt, Artificial Sequence
  Description of Artificial Sequence: Synthetic oligonucleotide
uccaauuauaccaccagcc

SEQ ID NO: 2267102 - RNA, 19 nt, Artificial Sequence
  Description of Artificial Sequence: Synthetic oligonucleotide
cuuaaggcauuuuauuucg

SEQ ID NO: 2267103 - RNA, 19 nt, Artificial Sequence
  Description of Artificial Sequence: Synthetic oligonucleotide
guuuacucugaacaaaccg

SEQ ID NO: 2267104 - RNA, 19 nt, Artificial Sequence
  Description of Artificial Sequence: Synthetic oligonucleotide
cuuugcuugguuuaucugg

SEQ ID NO: 2267105 - RNA, 19 nt, Artificial Sequence
  Description of Artificial Sequence: Synthetic oligonucleotide
aguucuccaacuccaacgc

SEQ ID NO: 2267106 - RNA, 19 nt, Artificial Sequence
  Description of Artificial Sequence: Synthetic oligonucleotide
ucaucaagcaucccauagg

SEQ ID NO: 2267107 - RNA, 19 nt, Artificial Sequence
  Description of Artificial Sequence: Synthetic oligonucleotide
agugccaucaucaagcauc

SEQ ID NO: 2267108 - RNA, 19 nt, Artificial Sequence
  Description of Artificial Sequence: Synthetic oligonucleotide
aaguuuacucugaacaaac

SEQ ID NO: 2267109 - RNA, 19 nt, Artificial Sequence
  Description of Artificial Sequence: Synthetic oligonucleotide
uuuuagcaugaauaaaagc

SEQ ID NO: 2267110 - RNA, 19 nt, Artificial Sequence
  Description of Artificial Sequence: Synthetic oligonucleotide
ugcaauuuucucagggagg

SEQ ID NO: 2267111 - RNA, 19 nt, Artificial Sequence
  Description of Artificial Sequence: Synthetic oligonucleotide
ugagacauagggaugcggc

SEQ ID NO: 2267112 - RNA, 19 nt, Artificial Sequence
  Description of Artificial Sequence: Synthetic oligonucleotide
uuacucugaacaaaccgcc

SEQ ID NO: 2267113 - RNA, 19 nt, Artificial Sequence
  Description of Artificial Sequence: Synthetic oligonucleotide
gauauauucaauguucauc

SEQ ID NO: 2267114 - RNA, 19 nt, Artificial Sequence
  Description of Artificial Sequence: Synthetic oligonucleotide
ugaacaaaccgccugugac

SEQ ID NO: 2267115 - RNA, 19 nt, Artificial Sequence
  Description of Artificial Sequence: Synthetic oligonucleotide
uguguugcagcuuucgucu

SEQ ID NO: 2267116 - RNA, 19 nt, Artificial Sequence
  Description of Artificial Sequence: Synthetic oligonucleotide
uucgauacacaguuagucc

SEQ ID NO: 2267117 - RNA, 19 nt, Artificial Sequence
  Description of Artificial Sequence: Synthetic oligonucleotide
aauccgcagccacagcacc

SEQ ID NO: 2267118 - RNA, 19 nt, Artificial Sequence
  Description of Artificial Sequence: Synthetic oligonucleotide
aagacucggggaaaggacc

SEQ ID NO: 2267119 - RNA, 19 nt, Artificial Sequence
  Description of Artificial Sequence: Synthetic oligonucleotide
aaagacucggggaaaggac

SEQ ID NO: 2267120 - RNA, 19 nt, Artificial Sequence
  Description of Artificial Sequence: Synthetic oligonucleotide
uugcacagcgucaaagcgg

SEQ ID NO: 2267121 - RNA, 19 nt, Artificial Sequence
  Description of Artificial Sequence: Synthetic oligonucleotide
aauggcuuaaggcauuuua

SEQ ID NO: 2267122 - RNA, 19 nt, Artificial Sequence
  Description of Artificial Sequence: Synthetic oligonucleotide
uucgucuccacucuuccag

SEQ ID NO: 2267123 - RNA, 19 nt, Artificial Sequence
  Description of Artificial Sequence: Synthetic oligonucleotide
uggcaaaauggcuuaaggc

SEQ ID NO: 2267124 - RNA, 19 nt, Artificial Sequence
  Description of Artificial Sequence: Synthetic oligonucleotide
ucgauacacaguuagucca

SEQ ID NO: 2267125 - RNA, 19 nt, Artificial Sequence
  Description of Artificial Sequence: Synthetic oligonucleotide
aucaucaagcaucccauag

SEQ ID NO: 2267126 - RNA, 19 nt, Artificial Sequence
  Description of Artificial Sequence: Synthetic oligonucleotide
guugaauaugguuacaaaa

SEQ ID NO: 2267127 - RNA, 19 nt, Artificial Sequence
  Description of Artificial Sequence: Synthetic oligonucleotide
uuuuccucagaccgaaucu

SEQ ID NO: 2267128 - RNA, 19 nt, Artificial Sequence
  Description of Artificial Sequence: Synthetic oligonucleotide
accgaaucuucucuaaguc

SEQ ID NO: 2267129 - RNA, 19 nt, Artificial Sequence
  Description of Artificial Sequence: Synthetic oligonucleotide
caaggcuccaauuauacca

SEQ ID NO: 2267130 - RNA, 19 nt, Artificial Sequence
  Description of Artificial Sequence: Synthetic oligonucleotide
caguucuccaacuccaacg

SEQ ID NO: 2267131 - RNA, 19 nt, Artificial Sequence
  Description of Artificial Sequence: Synthetic oligonucleotide
caucaagcaucccauaggc

SEQ ID NO: 2267132 - RNA, 19 nt, Artificial Sequence
  Description of Artificial Sequence: Synthetic oligonucleotide
aaagcgguuauggaacauc

SEQ ID NO: 2267133 - RNA, 19 nt, Artificial Sequence
  Description of Artificial Sequence: Synthetic oligonucleotide
aacaaaccgccugugacag

SEQ ID NO: 2267134 - RNA, 19 nt, Artificial Sequence
  Description of Artificial Sequence: Synthetic oligonucleotide
uuugacaacagcugccgga

SEQ ID NO: 2267135 - RNA, 19 nt, Artificial Sequence
  Description of Artificial Sequence: Synthetic oligonucleotide
agucucaucacaguacuuc

SEQ ID NO: 2267136 - RNA, 19 nt, Artificial Sequence
  Description of Artificial Sequence: Synthetic oligonucleotide
acggagugccuucuggucc

SEQ ID NO: 2267137 - RNA, 19 nt, Artificial Sequence
  Description of Artificial Sequence: Synthetic oligonucleotide
uuucgauacacaguuaguc

SEQ ID NO: 2267138 - RNA, 19 nt, Artificial Sequence
  Description of Artificial Sequence: Synthetic oligonucleotide
auaaaagcagguauuccuc

SEQ ID NO: 2267139 - RNA, 19 nt, Artificial Sequence
  Description of Artificial Sequence: Synthetic oligonucleotide
auaggcguacccaacaagg

SEQ ID NO: 2267140 - RNA, 19 nt, Artificial Sequence
  Description of Artificial Sequence: Synthetic oligonucleotide
acaguacuucugcagugcc

SEQ ID NO: 2267141 - RNA, 19 nt, Artificial Sequence
  Description of Artificial Sequence: Synthetic oligonucleotide
uauggaacaucuccccuug

SEQ ID NO: 2267142 - RNA, 19 nt, Artificial Sequence
  Description of Artificial Sequence: Synthetic oligonucleotide
augaaggguuccuaggaag

SEQ ID NO: 2267143 - RNA, 19 nt, Artificial Sequence
  Description of Artificial Sequence: Synthetic oligonucleotide
cuuugcacagcgucaaagc

SEQ ID NO: 2267144 - RNA, 19 nt, Artificial Sequence
  Description of Artificial Sequence: Synthetic oligonucleotide
ggcaaaauggcuuaaggca

SEQ ID NO: 2267145 - RNA, 19 nt, Artificial Sequence
  Description of Artificial Sequence: Synthetic oligonucleotide
agucacuugcaauuuucuc

SEQ ID NO: 2267146 - RNA, 19 nt, Artificial Sequence
  Description of Artificial Sequence: Synthetic oligonucleotide
uaagucacuugcaauuuuc

SEQ ID NO: 2267147 - RNA, 19 nt, Artificial Sequence
  Description of Artificial Sequence: Synthetic oligonucleotide
aaggcuccaauuauaccac

SEQ ID NO: 2267148 - RNA, 19 nt, Artificial Sequence
  Description of Artificial Sequence: Synthetic oligonucleotide
caauuauaccaccagccac

SEQ ID NO: 2267149 - RNA, 19 nt, Artificial Sequence
  Description of Artificial Sequence: Synthetic oligonucleotide
uucucuaagucacuugcaa

SEQ ID NO: 2267150 - RNA, 19 nt, Artificial Sequence
  Description of Artificial Sequence: Synthetic oligonucleotide
ucggugugcacuuugcaca

SEQ ID NO: 2267151 - RNA, 19 nt, Artificial Sequence
  Description of Artificial Sequence: Synthetic oligonucleotide
uccuaggaagguuuagcag

SEQ ID NO: 2267152 - RNA, 19 nt, Artificial Sequence
  Description of Artificial Sequence: Synthetic oligonucleotide
aauggcaaaauggcuuaag

SEQ ID NO: 2267153 - RNA, 19 nt, Artificial Sequence
  Description of Artificial Sequence: Synthetic oligonucleotide
ucuucucuccugaacaguc

SEQ ID NO: 2267154 - RNA, 19 nt, Artificial Sequence
  Description of Artificial Sequence: Synthetic oligonucleotide
uguugaauaugguuacaaa

SEQ ID NO: 2267155 - RNA, 19 nt, Artificial Sequence
  Description of Artificial Sequence: Synthetic oligonucleotide
aguuuacucugaacaaacc

SEQ ID NO: 2267156 - RNA, 19 nt, Artificial Sequence
  Description of Artificial Sequence: Synthetic oligonucleotide
ugcacagcgucaaagcggu

SEQ ID NO: 2267157 - RNA, 19 nt, Artificial Sequence
  Description of Artificial Sequence: Synthetic oligonucleotide
agcgucaaagcgguuaugg

SEQ ID NO: 2267158 - RNA, 19 nt, Artificial Sequence
  Description of Artificial Sequence: Synthetic oligonucleotide
accuaaguuuacucugaac

SEQ ID NO: 2267159 - RNA, 19 nt, Artificial Sequence
  Description of Artificial Sequence: Synthetic oligonucleotide
ccuaggaagguuuagcagc

SEQ ID NO: 2267160 - RNA, 19 nt, Artificial Sequence
  Description of Artificial Sequence: Synthetic oligonucleotide
ccuaaguuuacucugaaca

SEQ ID NO: 2267161 - RNA, 19 nt, Artificial Sequence
  Description of Artificial Sequence: Synthetic oligonucleotide
uuaucuggcgaugaagggu

SEQ ID NO: 2267162 - RNA, 19 nt, Artificial Sequence
  Description of Artificial Sequence: Synthetic oligonucleotide
uaaguuuacucugaacaaa

SEQ ID NO: 2267163 - RNA, 19 nt, Artificial Sequence
  Description of Artificial Sequence: Synthetic oligonucleotide
gacucugcucgauguagcg

SEQ ID NO: 2267164 - RNA, 19 nt, Artificial Sequence
  Description of Artificial Sequence: Synthetic oligonucleotide
acucugaacaaaccgccug

SEQ ID NO: 2267165 - RNA, 19 nt, Artificial Sequence
  Description of Artificial Sequence: Synthetic oligonucleotide
uugacaacagcugccggag

SEQ ID NO: 2267166 - RNA, 19 nt, Artificial Sequence
  Description of Artificial Sequence: Synthetic oligonucleotide
cuccaauuauaccaccagc

SEQ ID NO: 2267167 - RNA, 19 nt, Artificial Sequence
  Description of Artificial Sequence: Synthetic oligonucleotide
gugugcacuuugcacagcg

SEQ ID NO: 2267168 - RNA, 19 nt, Artificial Sequence
  Description of Artificial Sequence: Synthetic oligonucleotide
uaucuggcgaugaaggguu

SEQ ID NO: 2267169 - RNA, 19 nt, Artificial Sequence
  Description of Artificial Sequence: Synthetic oligonucleotide
uugacucugcucgauguag

SEQ ID NO: 2267170 - RNA, 19 nt, Artificial Sequence
  Description of Artificial Sequence: Synthetic oligonucleotide
caagccucgaauaccuaag

SEQ ID NO: 2267171 - RNA, 19 nt, Artificial Sequence
  Description of Artificial Sequence: Synthetic oligonucleotide
gaacaaaccgccugugaca

SEQ ID NO: 2267172 - RNA, 19 nt, Artificial Sequence
  Description of Artificial Sequence: Synthetic oligonucleotide
gacauagggaugcggcucc

SEQ ID NO: 2267173 - RNA, 19 nt, Artificial Sequence
  Description of Artificial Sequence: Synthetic oligonucleotide
auagggaugcggcucccgg

SEQ ID NO: 2267174 - RNA, 19 nt, Artificial Sequence
  Description of Artificial Sequence: Synthetic oligonucleotide
gaauaccuaaguuuacucu

SEQ ID NO: 2267175 - RNA, 19 nt, Artificial Sequence
  Description of Artificial Sequence: Synthetic oligonucleotide
uggaacaucuccccuugac

SEQ ID NO: 2267176 - RNA, 19 nt, Artificial Sequence
  Description of Artificial Sequence: Synthetic oligonucleotide
uaggcguacccaacaaggc

SEQ ID NO: 2267177 - RNA, 19 nt, Artificial Sequence
  Description of Artificial Sequence: Synthetic oligonucleotide
cucugagacauagggaugc

SEQ ID NO: 2267178 - RNA, 19 nt, Artificial Sequence
  Description of Artificial Sequence: Synthetic oligonucleotide
ucgaauaccuaaguuuacu

SEQ ID NO: 2267179 - RNA, 19 nt, Artificial Sequence
  Description of Artificial Sequence: Synthetic oligonucleotide
cuuucgucuccacucuucc

SEQ ID NO: 2267180 - RNA, 19 nt, Artificial Sequence
  Description of Artificial Sequence: Synthetic oligonucleotide
cuaaguuuacucugaacaa

SEQ ID NO: 2267181 - RNA, 19 nt, Artificial Sequence
  Description of Artificial Sequence: Synthetic oligonucleotide
ugcugaaaacagcugcccu

SEQ ID NO: 2267182 - RNA, 19 nt, Artificial Sequence
  Description of Artificial Sequence: Synthetic oligonucleotide
gcgguuauggaacaucucc

SEQ ID NO: 2267183 - RNA, 19 nt, Artificial Sequence
  Description of Artificial Sequence: Synthetic oligonucleotide
ucaaagcgguuauggaaca

SEQ ID NO: 2267184 - RNA, 19 nt, Artificial Sequence
  Description of Artificial Sequence: Synthetic oligonucleotide
agaccccuuguccucaguc

SEQ ID NO: 2267185 - RNA, 19 nt, Artificial Sequence
  Description of Artificial Sequence: Synthetic oligonucleotide
acuuugcacagcgucaaag

SEQ ID NO: 2267186 - RNA, 19 nt, Artificial Sequence
  Description of Artificial Sequence: Synthetic oligonucleotide
ugacucugcucgauguagc

SEQ ID NO: 2267187 - RNA, 19 nt, Artificial Sequence
  Description of Artificial Sequence: Synthetic oligonucleotide
agacauagggaugcggcuc

SEQ ID NO: 2267188 - RNA, 19 nt, Artificial Sequence
  Description of Artificial Sequence: Synthetic oligonucleotide
gguuauggaacaucucccc

SEQ ID NO: 2267189 - RNA, 19 nt, Artificial Sequence
  Description of Artificial Sequence: Synthetic oligonucleotide
caugaauaaaagcagguau

SEQ ID NO: 2267190 - RNA, 19 nt, Artificial Sequence
  Description of Artificial Sequence: Synthetic oligonucleotide
acuccaacgccagccauac

SEQ ID NO: 2267191 - RNA, 19 nt, Artificial Sequence
  Description of Artificial Sequence: Synthetic oligonucleotide
uacuucugcagugccauca

SEQ ID NO: 2267192 - RNA, 19 nt, Artificial Sequence
  Description of Artificial Sequence: Synthetic oligonucleotide
agaccgaaucuucucuaag

SEQ ID NO: 2267193 - RNA, 19 nt, Artificial Sequence
  Description of Artificial Sequence: Synthetic oligonucleotide
gggacagacacgcaggggc

SEQ ID NO: 2267194 - RNA, 19 nt, Artificial Sequence
  Description of Artificial Sequence: Synthetic oligonucleotide
ugcuccgcaaagucuuggg

SEQ ID NO: 2267195 - RNA, 19 nt, Artificial Sequence
  Description of Artificial Sequence: Synthetic oligonucleotide
gcagauauauucaauguuc

SEQ ID NO: 2267196 - RNA, 19 nt, Artificial Sequence
  Description of Artificial Sequence: Synthetic oligonucleotide
gcuuaaggcauuuuauuuc

SEQ ID NO: 2267197 - RNA, 19 nt, Artificial Sequence
  Description of Artificial Sequence: Synthetic oligonucleotide
aagcgguuauggaacaucu

SEQ ID NO: 2267198 - RNA, 19 nt, Artificial Sequence
  Description of Artificial Sequence: Synthetic oligonucleotide
agccccucgugccagcucg

SEQ ID NO: 2267199 - RNA, 19 nt, Artificial Sequence
  Description of Artificial Sequence: Synthetic oligonucleotide
cucggugugcacuuugcac

SEQ ID NO: 2267200 - RNA, 19 nt, Artificial Sequence
  Description of Artificial Sequence: Synthetic oligonucleotide
cauaggcguacccaacaag

SEQ ID NO: 2267201 - RNA, 19 nt, Artificial Sequence
  Description of Artificial Sequence: Synthetic oligonucleotide
acgccagccauaccggagg

SEQ ID NO: 2267202 - RNA, 19 nt, Artificial Sequence
  Description of Artificial Sequence: Synthetic oligonucleotide
ugggaauccgcagccacag

SEQ ID NO: 2267203 - RNA, 19 nt, Artificial Sequence
  Description of Artificial Sequence: Synthetic oligonucleotide
aggcuccaauuauaccacc

SEQ ID NO: 2267204 - RNA, 19 nt, Artificial Sequence
  Description of Artificial Sequence: Synthetic oligonucleotide
aucuucucuaagucacuug

SEQ ID NO: 2267205 - RNA, 19 nt, Artificial Sequence
  Description of Artificial Sequence: Synthetic oligonucleotide
agcaugaauaaaagcaggu

SEQ ID NO: 2267206 - RNA, 19 nt, Artificial Sequence
  Description of Artificial Sequence: Synthetic oligonucleotide
gguauuccuccauaugccc

SEQ ID NO: 2267207 - RNA, 19 nt, Artificial Sequence
  Description of Artificial Sequence: Synthetic oligonucleotide
acaguuaguccaguguuca

SEQ ID NO: 2267208 - RNA, 19 nt, Artificial Sequence
  Description of Artificial Sequence: Synthetic oligonucleotide
agacucggggaaaggaccc

SEQ ID NO: 2267209 - RNA, 19 nt, Artificial Sequence
  Description of Artificial Sequence: Synthetic oligonucleotide
guuccuaggaagguuuagc

SEQ ID NO: 2267210 - RNA, 19 nt, Artificial Sequence
  Description of Artificial Sequence: Synthetic oligonucleotide
uaccggaggaagccccucg

SEQ ID NO: 2267211 - RNA, 19 nt, Artificial Sequence
  Description of Artificial Sequence: Synthetic oligonucleotide
uggcuuaaggcauuuuauu

SEQ ID NO: 2267212 - RNA, 19 nt, Artificial Sequence
  Description of Artificial Sequence: Synthetic oligonucleotide
ucggggaaaggaccccagg

SEQ ID NO: 2267213 - RNA, 19 nt, Artificial Sequence
  Description of Artificial Sequence: Synthetic oligonucleotide
cuuugacaacagcugccgg

SEQ ID NO: 2267214 - RNA, 19 nt, Artificial Sequence
  Description of Artificial Sequence: Synthetic oligonucleotide
uccgcaaagucuugggaau

SEQ ID NO: 2267215 - RNA, 19 nt, Artificial Sequence
  Description of Artificial Sequence: Synthetic oligonucleotide
uacccaacaaggcuccaau

SEQ ID NO: 2267216 - RNA, 19 nt, Artificial Sequence
  Description of Artificial Sequence: Synthetic oligonucleotide
uugggaauccgcagccaca

SEQ ID NO: 2267217 - RNA, 19 nt, Artificial Sequence
  Description of Artificial Sequence: Synthetic oligonucleotide
ucuaagucacuugcaauuu

SEQ ID NO: 2267218 - RNA, 19 nt, Artificial Sequence
  Description of Artificial Sequence: Synthetic oligonucleotide
uugguuuaucuggcgauga

SEQ ID NO: 2267219 - RNA, 19 nt, Artificial Sequence
  Description of Artificial Sequence: Synthetic oligonucleotide
agcaauggcaaaauggcuu

SEQ ID NO: 2267220 - RNA, 19 nt, Artificial Sequence
  Description of Artificial Sequence: Synthetic oligonucleotide
ucugagacauagggaugcg

SEQ ID NO: 2267221 - RNA, 19 nt, Artificial Sequence
  Description of Artificial Sequence: Synthetic oligonucleotide
acuccggggaacccggcuc

SEQ ID NO: 2267222 - RNA, 19 nt, Artificial Sequence
  Description of Artificial Sequence: Synthetic oligonucleotide
ugacaacagcugccggagg

SEQ ID NO: 2267223 - RNA, 19 nt, Artificial Sequence
  Description of Artificial Sequence: Synthetic oligonucleotide
aggcguacccaacaaggcu

SEQ ID NO: 2267224 - RNA, 19 nt, Artificial Sequence
  Description of Artificial Sequence: Synthetic oligonucleotide
cucgaauaccuaaguuuac

SEQ ID NO: 2267225 - RNA, 19 nt, Artificial Sequence
  Description of Artificial Sequence: Synthetic oligonucleotide
gcugaaaacagcugcccug

SEQ ID NO: 2267226 - RNA, 19 nt, Artificial Sequence
  Description of Artificial Sequence: Synthetic oligonucleotide
cgaaucuucucuaagucac

SEQ ID NO: 2267227 - RNA, 19 nt, Artificial Sequence
  Description of Artificial Sequence: Synthetic oligonucleotide
ucugaacaaaccgccugug

SEQ ID NO: 2267228 - RNA, 19 nt, Artificial Sequence
  Description of Artificial Sequence: Synthetic oligonucleotide
cagggaggagcucagugug

SEQ ID NO: 2267229 - RNA, 19 nt, Artificial Sequence
  Description of Artificial Sequence: Synthetic oligonucleotide
uuauuucgauacacaguua

SEQ ID NO: 2267230 - RNA, 19 nt, Artificial Sequence
  Description of Artificial Sequence: Synthetic oligonucleotide
gguuuaucuggcgaugaag

SEQ ID NO: 2267231 - RNA, 19 nt, Artificial Sequence
  Description of Artificial Sequence: Synthetic oligonucleotide
ucacggagugccuucuggu

SEQ ID NO: 2267232 - RNA, 19 nt, Artificial Sequence
  Description of Artificial Sequence: Synthetic oligonucleotide
uccauaugcccagccaaug

SEQ ID NO: 2267233 - RNA, 19 nt, Artificial Sequence
  Description of Artificial Sequence: Synthetic oligonucleotide
agcagguauuccuccauau

SEQ ID NO: 2267234 - RNA, 19 nt, Artificial Sequence
  Description of Artificial Sequence: Synthetic oligonucleotide
ggcauuccuucacacacag

SEQ ID NO: 2267235 - RNA, 19 nt, Artificial Sequence
  Description of Artificial Sequence: Synthetic oligonucleotide
gaaaggaccccaggccggg

SEQ ID NO: 2267236 - RNA, 19 nt, Artificial Sequence
  Description of Artificial Sequence: Synthetic oligonucleotide
gucccauccggacuccggg

SEQ ID NO: 2267237 - RNA, 19 nt, Artificial Sequence
  Description of Artificial Sequence: Synthetic oligonucleotide
uaccuaaguuuacucugaa

SEQ ID NO: 2267238 - RNA, 19 nt, Artificial Sequence
  Description of Artificial Sequence: Synthetic oligonucleotide
cacaguacuucugcagugc

SEQ ID NO: 2267239 - RNA, 19 nt, Artificial Sequence
  Description of Artificial Sequence: Synthetic oligonucleotide
ucagaccgaaucuucucua

SEQ ID NO: 2267240 - RNA, 19 nt, Artificial Sequence
  Description of Artificial Sequence: Synthetic oligonucleotide
ccggcucugagacauaggg

SEQ ID NO: 2267241 - RNA, 19 nt, Artificial Sequence
  Description of Artificial Sequence: Synthetic oligonucleotide
gugcacuuugcacagcguc

SEQ ID NO: 2267242 - RNA, 19 nt, Artificial Sequence
  Description of Artificial Sequence: Synthetic oligonucleotide
cuugguuuaucuggcgaug

SEQ ID NO: 2267243 - RNA, 19 nt, Artificial Sequence
  Description of Artificial Sequence: Synthetic oligonucleotide
gcuccaauuauaccaccag

SEQ ID NO: 2267244 - RNA, 19 nt, Artificial Sequence
  Description of Artificial Sequence: Synthetic oligonucleotide
uuucgucuccacucuucca

SEQ ID NO: 2267245 - RNA, 19 nt, Artificial Sequence
  Description of Artificial Sequence: Synthetic oligonucleotide
ggaauccgcagccacagca

SEQ ID NO: 2267246 - RNA, 19 nt, Artificial Sequence
  Description of Artificial Sequence: Synthetic oligonucleotide
auaccuaaguuuacucuga

SEQ ID NO: 2267247 - RNA, 19 nt, Artificial Sequence
  Description of Artificial Sequence: Synthetic oligonucleotide
aagcagguauuccuccaua

SEQ ID NO: 2267248 - RNA, 19 nt, Artificial Sequence
  Description of Artificial Sequence: Synthetic oligonucleotide
gaccgaaucuucucuaagu

SEQ ID NO: 2267249 - RNA, 19 nt, Artificial Sequence
  Description of Artificial Sequence: Synthetic oligonucleotide
agggaugcggcucccggug

SEQ ID NO: 2267250 - RNA, 19 nt, Artificial Sequence
  Description of Artificial Sequence: Synthetic oligonucleotide
ucccauccggacuccgggg

SEQ ID NO: 2267251 - RNA, 19 nt, Artificial Sequence
  Description of Artificial Sequence: Synthetic oligonucleotide
acagcgucaaagcgguuau

SEQ ID NO: 2267252 - RNA, 19 nt, Artificial Sequence
  Description of Artificial Sequence: Synthetic oligonucleotide
ugguuuaucuggcgaugaa

SEQ ID NO: 2267253 - RNA, 19 nt, Artificial Sequence
  Description of Artificial Sequence: Synthetic oligonucleotide
ggcgaugaaggguuccuag

SEQ ID NO: 2267254 - RNA, 19 nt, Artificial Sequence
  Description of Artificial Sequence: Synthetic oligonucleotide
acucugcucgauguagcgg

SEQ ID NO: 2267255 - RNA, 19 nt, Artificial Sequence
  Description of Artificial Sequence: Synthetic oligonucleotide
acccgcagcaaagacucgg

SEQ ID NO: 2267256 - RNA, 19 nt, Artificial Sequence
  Description of Artificial Sequence: Synthetic oligonucleotide
acaaaccgccugugacagc

SEQ ID NO: 2267257 - RNA, 19 nt, Artificial Sequence
  Description of Artificial Sequence: Synthetic oligonucleotide
auaugcccagccaaugaug

SEQ ID NO: 2267258 - RNA, 19 nt, Artificial Sequence
  Description of Artificial Sequence: Synthetic oligonucleotide
auuucgauacacaguuagu

SEQ ID NO: 2267259 - RNA, 19 nt, Artificial Sequence
  Description of Artificial Sequence: Synthetic oligonucleotide
cugcugaaaacagcugccc

SEQ ID NO: 2267260 - RNA, 19 nt, Artificial Sequence
  Description of Artificial Sequence: Synthetic oligonucleotide
gcgaugaaggguuccuagg

SEQ ID NO: 2267261 - RNA, 19 nt, Artificial Sequence
  Description of Artificial Sequence: Synthetic oligonucleotide
ugugcacuuugcacagcgu

SEQ ID NO: 2267262 - RNA, 19 nt, Artificial Sequence
  Description of Artificial Sequence: Synthetic oligonucleotide
auggcuuaaggcauuuuau

SEQ ID NO: 2267263 - RNA, 19 nt, Artificial Sequence
  Description of Artificial Sequence: Synthetic oligonucleotide
uuaguccaguguucacugu

SEQ ID NO: 2267264 - RNA, 19 nt, Artificial Sequence
  Description of Artificial Sequence: Synthetic oligonucleotide
caguguguugcagcuuucg

SEQ ID NO: 2267265 - RNA, 19 nt, Artificial Sequence
  Description of Artificial Sequence: Synthetic oligonucleotide
gaauccgcagccacagcac

SEQ ID NO: 2267266 - RNA, 19 nt, Artificial Sequence
  Description of Artificial Sequence: Synthetic oligonucleotide
cugcagugccaucaucaag

SEQ ID NO: 2267267 - RNA, 19 nt, Artificial Sequence
  Description of Artificial Sequence: Synthetic oligonucleotide
acacgcaggggcuggcgag

SEQ ID NO: 2267268 - RNA, 19 nt, Artificial Sequence
  Description of Artificial Sequence: Synthetic oligonucleotide
ucuggcgaugaaggguucc

SEQ ID NO: 2267269 - RNA, 19 nt, Artificial Sequence
  Description of Artificial Sequence: Synthetic oligonucleotide
cuccgcaaagucuugggaa

SEQ ID NO: 2267270 - RNA, 19 nt, Artificial Sequence
  Description of Artificial Sequence: Synthetic oligonucleotide
gggaacccggcucugagac

SEQ ID NO: 2267271 - RNA, 19 nt, Artificial Sequence
  Description of Artificial Sequence: Synthetic oligonucleotide
gcaauuuucucagggagga

SEQ ID NO: 2267272 - RNA, 19 nt, Artificial Sequence
  Description of Artificial Sequence: Synthetic oligonucleotide
ucccauaggcguacccaac

SEQ ID NO: 2267273 - RNA, 19 nt, Artificial Sequence
  Description of Artificial Sequence: Synthetic oligonucleotide
cacccggggacagacacgc

SEQ ID NO: 2267274 - RNA, 19 nt, Artificial Sequence
  Description of Artificial Sequence: Synthetic oligonucleotide
acagacacgcaggggcugg

SEQ ID NO: 2267275 - RNA, 19 nt, Artificial Sequence
  Description of Artificial Sequence: Synthetic oligonucleotide
caaagacucggggaaagga

SEQ ID NO: 2267276 - RNA, 19 nt, Artificial Sequence
  Description of Artificial Sequence: Synthetic oligonucleotide
guguugaauaugguuacaa

SEQ ID NO: 2267277 - RNA, 19 nt, Artificial Sequence
  Description of Artificial Sequence: Synthetic oligonucleotide
cucuaagucacuugcaauu

SEQ ID NO: 2267278 - RNA, 19 nt, Artificial Sequence
  Description of Artificial Sequence: Synthetic oligonucleotide
cacuggcauuccuucacac

SEQ ID NO: 2267279 - RNA, 19 nt, Artificial Sequence
  Description of Artificial Sequence: Synthetic oligonucleotide
auccggacuccggggaacc

SEQ ID NO: 2267280 - RNA, 19 nt, Artificial Sequence
  Description of Artificial Sequence: Synthetic oligonucleotide
aagccccucgugccagcuc

SEQ ID NO: 2267281 - RNA, 19 nt, Artificial Sequence
  Description of Artificial Sequence: Synthetic oligonucleotide
gagacauagggaugcggcu

SEQ ID NO: 2267282 - RNA, 19 nt, Artificial Sequence
  Description of Artificial Sequence: Synthetic oligonucleotide
ggcucugagacauagggau

SEQ ID NO: 2267283 - RNA, 19 nt, Artificial Sequence
  Description of Artificial Sequence: Synthetic oligonucleotide
gaggcggucccauccggac

SEQ ID NO: 2267284 - RNA, 19 nt, Artificial Sequence
  Description of Artificial Sequence: Synthetic oligonucleotide
ugcucgauguagcgguuuu

SEQ ID NO: 2267285 - RNA, 19 nt, Artificial Sequence
  Description of Artificial Sequence: Synthetic oligonucleotide
ggauucucugagcauuuuc

SEQ ID NO: 2267286 - RNA, 19 nt, Artificial Sequence
  Description of Artificial Sequence: Synthetic oligonucleotide
gcagguauuccuccauaug

SEQ ID NO: 2267287 - RNA, 19 nt, Artificial Sequence
  Description of Artificial Sequence: Synthetic oligonucleotide
uuagcagcuccuggauucu

SEQ ID NO: 2267288 - RNA, 19 nt, Artificial Sequence
  Description of Artificial Sequence: Synthetic oligonucleotide
cuaggaagguuuagcagcu

SEQ ID NO: 2267289 - RNA, 19 nt, Artificial Sequence
  Description of Artificial Sequence: Synthetic oligonucleotide
cacggagugccuucugguc

SEQ ID NO: 2267290 - RNA, 19 nt, Artificial Sequence
  Description of Artificial Sequence: Synthetic oligonucleotide
cuccauggcgcccucccac

SEQ ID NO: 2267291 - RNA, 19 nt, Artificial Sequence
  Description of Artificial Sequence: Synthetic oligonucleotide
uagggaugcggcucccggu

SEQ ID NO: 2267292 - RNA, 19 nt, Artificial Sequence
  Description of Artificial Sequence: Synthetic oligonucleotide
agcauuuuccucagaccga

SEQ ID NO: 2267293 - RNA, 19 nt, Artificial Sequence
  Description of Artificial Sequence: Synthetic oligonucleotide
ggaguagccuggcacuggc

SEQ ID NO: 2267294 - RNA, 19 nt, Artificial Sequence
  Description of Artificial Sequence: Synthetic oligonucleotide
agcgguuauggaacaucuc

SEQ ID NO: 2267295 - RNA, 19 nt, Artificial Sequence
  Description of Artificial Sequence: Synthetic oligonucleotide
cucugcucgauguagcggu

SEQ ID NO: 2267296 - RNA, 19 nt, Artificial Sequence
  Description of Artificial Sequence: Synthetic oligonucleotide
ccaauuauaccaccagcca

SEQ ID NO: 2267297 - RNA, 19 nt, Artificial Sequence
  Description of Artificial Sequence: Synthetic oligonucleotide
cgaauaccuaaguuuacuc

SEQ ID NO: 2267298 - RNA, 19 nt, Artificial Sequence
  Description of Artificial Sequence: Synthetic oligonucleotide
caacaaggcuccaauuaua

SEQ ID NO: 2267299 - RNA, 19 nt, Artificial Sequence
  Description of Artificial Sequence: Synthetic oligonucleotide
cucggggaaaggaccccag

SEQ ID NO: 2267300 - RNA, 19 nt, Artificial Sequence
  Description of Artificial Sequence: Synthetic oligonucleotide
gcaaagucuugggaauccg

SEQ ID NO: 2267301 - RNA, 19 nt, Artificial Sequence
  Description of Artificial Sequence: Synthetic oligonucleotide
ccucgaauaccuaaguuua

SEQ ID NO: 2267302 - RNA, 19 nt, Artificial Sequence
  Description of Artificial Sequence: Synthetic oligonucleotide
aacuccaacgccagccaua

SEQ ID NO: 2267303 - RNA, 19 nt, Artificial Sequence
  Description of Artificial Sequence: Synthetic oligonucleotide
cauagggaugcggcucccg

SEQ ID NO: 2267304 - RNA, 19 nt, Artificial Sequence
  Description of Artificial Sequence: Synthetic oligonucleotide
agcgccgcgggagagggug

SEQ ID NO: 2267305 - RNA, 19 nt, Artificial Sequence
  Description of Artificial Sequence: Synthetic oligonucleotide
accccuuguccucagucuu

SEQ ID NO: 2267306 - RNA, 19 nt, Artificial Sequence
  Description of Artificial Sequence: Synthetic oligonucleotide
ccagccauaccggaggaag

SEQ ID NO: 2267307 - RNA, 19 nt, Artificial Sequence
  Description of Artificial Sequence: Synthetic oligonucleotide
ccauaccggaggaagcccc

SEQ ID NO: 2267308 - RNA, 19 nt, Artificial Sequence
  Description of Artificial Sequence: Synthetic oligonucleotide
ggcuaagcaggccgcgggg

SEQ ID NO: 2267309 - RNA, 19 nt, Artificial Sequence
  Description of Artificial Sequence: Synthetic oligonucleotide
ucugcucacggagugccuu

SEQ ID NO: 2267310 - RNA, 19 nt, Artificial Sequence
  Description of Artificial Sequence: Synthetic oligonucleotide
agccaccaagccucgaaua

SEQ ID NO: 2267311 - RNA, 19 nt, Artificial Sequence
  Description of Artificial Sequence: Synthetic oligonucleotide
acagcacccgcagcaaaga

SEQ ID NO: 2267312 - RNA, 19 nt, Artificial Sequence
  Description of Artificial Sequence: Synthetic oligonucleotide
acccggcucugagacauag

SEQ ID NO: 2267313 - RNA, 19 nt, Artificial Sequence
  Description of Artificial Sequence: Synthetic oligonucleotide
cucagaccgaaucuucucu

SEQ ID NO: 2267314 - RNA, 19 nt, Artificial Sequence
  Description of Artificial Sequence: Synthetic oligonucleotide
ggcguacccaacaaggcuc

SEQ ID NO: 2267315 - RNA, 19 nt, Artificial Sequence
  Description of Artificial Sequence: Synthetic oligonucleotide
uccccuugacucugcucga

SEQ ID NO: 2267316 - RNA, 19 nt, Artificial Sequence
  Description of Artificial Sequence: Synthetic oligonucleotide
gcacccgcagcaaagacuc

SEQ ID NO: 2267317 - RNA, 19 nt, Artificial Sequence
  Description of Artificial Sequence: Synthetic oligonucleotide
auaccggaggaagccccuc

SEQ ID NO: 2267318 - RNA, 19 nt, Artificial Sequence
  Description of Artificial Sequence: Synthetic oligonucleotide
guugcagcuuucgucucca

SEQ ID NO: 2267319 - RNA, 19 nt, Artificial Sequence
  Description of Artificial Sequence: Synthetic oligonucleotide
gacucggggaaaggacccc

SEQ ID NO: 2267320 - RNA, 19 nt, Artificial Sequence
  Description of Artificial Sequence: Synthetic oligonucleotide
aaaccgccugugacagcuc

SEQ ID NO: 2267321 - RNA, 19 nt, Artificial Sequence
  Description of Artificial Sequence: Synthetic oligonucleotide
agacacgcaggggcuggcg

SEQ ID NO: 2267322 - RNA, 19 nt, Artificial Sequence
  Description of Artificial Sequence: Synthetic oligonucleotide
auggaacaucuccccuuga

SEQ ID NO: 2267323 - RNA, 19 nt, Artificial Sequence
  Description of Artificial Sequence: Synthetic oligonucleotide
gaccccuuguccucagucu

SEQ ID NO: 2267324 - RNA, 19 nt, Artificial Sequence
  Description of Artificial Sequence: Synthetic oligonucleotide
caccaagccucgaauaccu

SEQ ID NO: 2267325 - RNA, 19 nt, Artificial Sequence
  Description of Artificial Sequence: Synthetic oligonucleotide
cgauacacaguuaguccag

SEQ ID NO: 2267326 - RNA, 19 nt, Artificial Sequence
  Description of Artificial Sequence: Synthetic oligonucleotide
cucugaacaaaccgccugu

SEQ ID NO: 2267327 - RNA, 19 nt, Artificial Sequence
  Description of Artificial Sequence: Synthetic oligonucleotide
ucugcucgauguagcgguu

SEQ ID NO: 2267328 - RNA, 19 nt, Artificial Sequence
  Description of Artificial Sequence: Synthetic oligonucleotide
gaacccggcucugagacau

SEQ ID NO: 2267329 - RNA, 19 nt, Artificial Sequence
  Description of Artificial Sequence: Synthetic oligonucleotide
acccaacaaggcuccaauu

SEQ ID NO: 2267330 - RNA, 19 nt, Artificial Sequence
  Description of Artificial Sequence: Synthetic oligonucleotide
cauaugcccagccaaugau

SEQ ID NO: 2267331 - RNA, 19 nt, Artificial Sequence
  Description of Artificial Sequence: Synthetic oligonucleotide
gcaguucuccaacuccaac

SEQ ID NO: 2267332 - RNA, 19 nt, Artificial Sequence
  Description of Artificial Sequence: Synthetic oligonucleotide
cagaccgaaucuucucuaa

SEQ ID NO: 2267333 - RNA, 19 nt, Artificial Sequence
  Description of Artificial Sequence: Synthetic oligonucleotide
aggcggucccauccggacu

SEQ ID NO: 2267334 - RNA, 19 nt, Artificial Sequence
  Description of Artificial Sequence: Synthetic oligonucleotide
agcugcccugcagauauau

SEQ ID NO: 2267335 - RNA, 19 nt, Artificial Sequence
  Description of Artificial Sequence: Synthetic oligonucleotide
acucggggaaaggacccca

SEQ ID NO: 2267336 - RNA, 19 nt, Artificial Sequence
  Description of Artificial Sequence: Synthetic oligonucleotide
cagcacccgcagcaaagac

SEQ ID NO: 2267337 - RNA, 19 nt, Artificial Sequence
  Description of Artificial Sequence: Synthetic oligonucleotide
cacagcgucaaagcgguua

SEQ ID NO: 2267338 - RNA, 19 nt, Artificial Sequence
  Description of Artificial Sequence: Synthetic oligonucleotide
gcaugaauaaaagcaggua

SEQ ID NO: 2267339 - RNA, 19 nt, Artificial Sequence
  Description of Artificial Sequence: Synthetic oligonucleotide
cugcucacggagugccuuc

SEQ ID NO: 2267340 - RNA, 19 nt, Artificial Sequence
  Description of Artificial Sequence: Synthetic oligonucleotide
ugcucacggagugccuucu

SEQ ID NO: 2267341 - RNA, 19 nt, Artificial Sequence
  Description of Artificial Sequence: Synthetic oligonucleotide
cucgugccagcucggugug

SEQ ID NO: 2267342 - RNA, 19 nt, Artificial Sequence
  Description of Artificial Sequence: Synthetic oligonucleotide
cuugacucugcucgaugua

SEQ ID NO: 2267343 - RNA, 19 nt, Artificial Sequence
  Description of Artificial Sequence: Synthetic oligonucleotide
cccgcagcaaagacucggg

SEQ ID NO: 2267344 - RNA, 19 nt, Artificial Sequence
  Description of Artificial Sequence: Synthetic oligonucleotide
cagcucggugugcacuuug

SEQ ID NO: 2267345 - RNA, 19 nt, Artificial Sequence
  Description of Artificial Sequence: Synthetic oligonucleotide
gccggaggcggucccaucc

SEQ ID NO: 2267346 - RNA, 19 nt, Artificial Sequence
  Description of Artificial Sequence: Synthetic oligonucleotide
cucagucuuugcuugguuu

SEQ ID NO: 2267347 - RNA, 19 nt, Artificial Sequence
  Description of Artificial Sequence: Synthetic oligonucleotide
ggcggucccauccggacuc

SEQ ID NO: 2267348 - RNA, 19 nt, Artificial Sequence
  Description of Artificial Sequence: Synthetic oligonucleotide
ccaccaagccucgaauacc

SEQ ID NO: 2267349 - RNA, 19 nt, Artificial Sequence
  Description of Artificial Sequence: Synthetic oligonucleotide
cgucaaagcgguuauggaa

SEQ ID NO: 2267350 - RNA, 19 nt, Artificial Sequence
  Description of Artificial Sequence: Synthetic oligonucleotide
caucaucaagcaucccaua

SEQ ID NO: 2267351 - RNA, 19 nt, Artificial Sequence
  Description of Artificial Sequence: Synthetic oligonucleotide
caaaauggcuuaaggcauu

SEQ ID NO: 2267352 - RNA, 19 nt, Artificial Sequence
  Description of Artificial Sequence: Synthetic oligonucleotide
ggcuccaauuauaccacca

SEQ ID NO: 2267353 - RNA, 19 nt, Artificial Sequence
  Description of Artificial Sequence: Synthetic oligonucleotide
cauccggacuccggggaac

SEQ ID NO: 2267354 - RNA, 19 nt, Artificial Sequence
  Description of Artificial Sequence: Synthetic oligonucleotide
cggggaaaggaccccaggc

SEQ ID NO: 2267355 - RNA, 19 nt, Artificial Sequence
  Description of Artificial Sequence: Synthetic oligonucleotide
cccaacaaggcuccaauua

SEQ ID NO: 2267356 - RNA, 19 nt, Artificial Sequence
  Description of Artificial Sequence: Synthetic oligonucleotide
uaggaagguuuagcagcuc

SEQ ID NO: 2267357 - RNA, 19 nt, Artificial Sequence
  Description of Artificial Sequence: Synthetic oligonucleotide
caggggcuggcgagcgccg

SEQ ID NO: 2267358 - RNA, 19 nt, Artificial Sequence
  Description of Artificial Sequence: Synthetic oligonucleotide
aggccgggcuaagcaggcc

SEQ ID NO: 2267359 - RNA, 19 nt, Artificial Sequence
  Description of Artificial Sequence: Synthetic oligonucleotide
cacccgcagcaaagacucg

SEQ ID NO: 2267360 - RNA, 19 nt, Artificial Sequence
  Description of Artificial Sequence: Synthetic oligonucleotide
gcaucccauaggcguaccc

SEQ ID NO: 2267361 - RNA, 19 nt, Artificial Sequence
  Description of Artificial Sequence: Synthetic oligonucleotide
cacgcaggggcuggcgagc

SEQ ID NO: 2267362 - RNA, 19 nt, Artificial Sequence
  Description of Artificial Sequence: Synthetic oligonucleotide
acgcaggggcuggcgagcg

SEQ ID NO: 2267363 - RNA, 19 nt, Artificial Sequence
  Description of Artificial Sequence: Synthetic oligonucleotide
uggcgagcgccgcgggaga

SEQ ID NO: 2267364 - RNA, 19 nt, Artificial Sequence
  Description of Artificial Sequence: Synthetic oligonucleotide
gcgucaaagcgguuaugga

SEQ ID NO: 2267365 - RNA, 19 nt, Artificial Sequence
  Description of Artificial Sequence: Synthetic oligonucleotide
aucuggcgaugaaggguuc

SEQ ID NO: 2267366 - RNA, 19 nt, Artificial Sequence
  Description of Artificial Sequence: Synthetic oligonucleotide
cccacccggggacagacac

SEQ ID NO: 2267367 - RNA, 19 nt, Artificial Sequence
  Description of Artificial Sequence: Synthetic oligonucleotide
gcuccgcaaagucuuggga

SEQ ID NO: 2267368 - RNA, 19 nt, Artificial Sequence
  Description of Artificial Sequence: Synthetic oligonucleotide
gcucugagacauagggaug

SEQ ID NO: 2267369 - RNA, 19 nt, Artificial Sequence
  Description of Artificial Sequence: Synthetic oligonucleotide
uugcagcuuucgucuccac

SEQ ID NO: 2267370 - RNA, 19 nt, Artificial Sequence
  Description of Artificial Sequence: Synthetic oligonucleotide
ccugaacagucucaucaca

SEQ ID NO: 2267371 - RNA, 19 nt, Artificial Sequence
  Description of Artificial Sequence: Synthetic oligonucleotide
guacccaacaaggcuccaa

SEQ ID NO: 2267372 - RNA, 19 nt, Artificial Sequence
  Description of Artificial Sequence: Synthetic oligonucleotide
uggcgaugaaggguuccua

SEQ ID NO: 2267373 - RNA, 19 nt, Artificial Sequence
  Description of Artificial Sequence: Synthetic oligonucleotide
ccauaugcccagccaauga

SEQ ID NO: 2267374 - RNA, 19 nt, Artificial Sequence
  Description of Artificial Sequence: Synthetic oligonucleotide
uccggacuccggggaaccc

SEQ ID NO: 2267375 - RNA, 19 nt, Artificial Sequence
  Description of Artificial Sequence: Synthetic oligonucleotide
cuaagucacuugcaauuuu

SEQ ID NO: 2267376 - RNA, 19 nt, Artificial Sequence
  Description of Artificial Sequence: Synthetic oligonucleotide
ccuccauaugcccagccaa

SEQ ID NO: 2267377 - RNA, 19 nt, Artificial Sequence
  Description of Artificial Sequence: Synthetic oligonucleotide
cgaugaaggguuccuagga

SEQ ID NO: 2267378 - RNA, 19 nt, Artificial Sequence
  Description of Artificial Sequence: Synthetic oligonucleotide
gcuugguuuaucuggcgau

SEQ ID NO: 2267379 - RNA, 19 nt, Artificial Sequence
  Description of Artificial Sequence: Synthetic oligonucleotide
cccaggccgggcuaagcag

SEQ ID NO: 2267380 - RNA, 19 nt, Artificial Sequence
  Description of Artificial Sequence: Synthetic oligonucleotide
gcuuucgucuccacucuuc

SEQ ID NO: 2267381 - RNA, 19 nt, Artificial Sequence
  Description of Artificial Sequence: Synthetic oligonucleotide
gcguacccaacaaggcucc

SEQ ID NO: 2267382 - RNA, 19 nt, Artificial Sequence
  Description of Artificial Sequence: Synthetic oligonucleotide
gaugcggcucccggugcuc

SEQ ID NO: 2267383 - RNA, 19 nt, Artificial Sequence
  Description of Artificial Sequence: Synthetic oligonucleotide
gccauaccggaggaagccc

SEQ ID NO: 2267384 - RNA, 19 nt, Artificial Sequence
  Description of Artificial Sequence: Synthetic oligonucleotide
cccauaggcguacccaaca

SEQ ID NO: 2267385 - RNA, 19 nt, Artificial Sequence
  Description of Artificial Sequence: Synthetic oligonucleotide
cauaccggaggaagccccu

SEQ ID NO: 2267386 - RNA, 19 nt, Artificial Sequence
  Description of Artificial Sequence: Synthetic oligonucleotide
cuccaacgccagccauacc

SEQ ID NO: 2267387 - RNA, 19 nt, Artificial Sequence
  Description of Artificial Sequence: Synthetic oligonucleotide
gcucggugugcacuuugca

SEQ ID NO: 2267388 - RNA, 19 nt, Artificial Sequence
  Description of Artificial Sequence: Synthetic oligonucleotide
ccaacaaggcuccaauuau

SEQ ID NO: 2267389 - RNA, 19 nt, Artificial Sequence
  Description of Artificial Sequence: Synthetic oligonucleotide
gggaauccgcagccacagc

SEQ ID NO: 2267390 - RNA, 19 nt, Artificial Sequence
  Description of Artificial Sequence: Synthetic oligonucleotide
ggugcuccgcaaagucuug

SEQ ID NO: 2267391 - RNA, 19 nt, Artificial Sequence
  Description of Artificial Sequence: Synthetic oligonucleotide
uccggggaacccggcucug

SEQ ID NO: 2267392 - RNA, 19 nt, Artificial Sequence
  Description of Artificial Sequence: Synthetic oligonucleotide
cccuugacucugcucgaug

SEQ ID NO: 2267393 - RNA, 19 nt, Artificial Sequence
  Description of Artificial Sequence: Synthetic oligonucleotide
ccuugacucugcucgaugu

SEQ ID NO: 2267394 - RNA, 19 nt, Artificial Sequence
  Description of Artificial Sequence: Synthetic oligonucleotide
cggacuccggggaacccgg

SEQ ID NO: 2267395 - RNA, 19 nt, Artificial Sequence
  Description of Artificial Sequence: Synthetic oligonucleotide
cagcgucaaagcgguuaug

SEQ ID NO: 2267396 - RNA, 19 nt, Artificial Sequence
  Description of Artificial Sequence: Synthetic oligonucleotide
ccacccggggacagacacg

SEQ ID NO: 2267397 - RNA, 19 nt, Artificial Sequence
  Description of Artificial Sequence: Synthetic oligonucleotide
gcccugcagauauauucaa

SEQ ID NO: 2267398 - RNA, 19 nt, Artificial Sequence
  Description of Artificial Sequence: Synthetic oligonucleotide
cagcuuucgucuccacucu

SEQ ID NO: 2267399 - RNA, 19 nt, Artificial Sequence
  Description of Artificial Sequence: Synthetic oligonucleotide
gaccccaggccgggcuaag

SEQ ID NO: 2267400 - RNA, 19 nt, Artificial Sequence
  Description of Artificial Sequence: Synthetic oligonucleotide
ggggaacccggcucugaga

SEQ ID NO: 2267401 - RNA, 19 nt, Artificial Sequence
  Description of Artificial Sequence: Synthetic oligonucleotide
ccggacuccggggaacccg

SEQ ID NO: 2267402 - RNA, 19 nt, Artificial Sequence
  Description of Artificial Sequence: Synthetic oligonucleotide
ccggaggcggucccauccg

SEQ ID NO: 2267403 - RNA, 19 nt, Artificial Sequence
  Description of Artificial Sequence: Synthetic oligonucleotide
cccggcucugagacauagg

SEQ ID NO: 2267404 - RNA, 19 nt, Artificial Sequence
  Description of Artificial Sequence: Synthetic oligonucleotide
ggugugcacuuugcacagc

SEQ ID NO: 2267405 - RNA, 19 nt, Artificial Sequence
  Description of Artificial Sequence: Synthetic oligonucleotide
ggaacccggcucugagaca

SEQ ID NO: 2267406 - RNA, 19 nt, Artificial Sequence
  Description of Artificial Sequence: Synthetic oligonucleotide
cagcaaagacucggggaaa

SEQ ID NO: 2267407 - RNA, 19 nt, Artificial Sequence
  Description of Artificial Sequence: Synthetic oligonucleotide
gcucacggagugccuucug

SEQ ID NO: 2267408 - RNA, 19 nt, Artificial Sequence
  Description of Artificial Sequence: Synthetic oligonucleotide
ugccggaggcggucccauc

SEQ ID NO: 2267409 - RNA, 19 nt, Artificial Sequence
  Description of Artificial Sequence: Synthetic oligonucleotide
ccauaggcguacccaacaa

SEQ ID NO: 2267410 - RNA, 19 nt, Artificial Sequence
  Description of Artificial Sequence: Synthetic oligonucleotide
ccgccugugacagcuccag

SEQ ID NO: 2267411 - RNA, 19 nt, Artificial Sequence
  Description of Artificial Sequence: Synthetic oligonucleotide
ggcuggcgagcgccgcggg

SEQ ID NO: 2267412 - RNA, 19 nt, Artificial Sequence
  Description of Artificial Sequence: Synthetic oligonucleotide
ccggaggaagccccucgug

SEQ ID NO: 2267413 - RNA, 19 nt, Artificial Sequence
  Description of Artificial Sequence: Synthetic oligonucleotide
cuccggggaacccggcucu

SEQ ID NO: 2267414 - RNA, 19 nt, Artificial Sequence
  Description of Artificial Sequence: Synthetic oligonucleotide
caacuccaacgccagccau

SEQ ID NO: 2267415 - RNA, 19 nt, Artificial Sequence
  Description of Artificial Sequence: Synthetic oligonucleotide
accaagccucgaauaccua

SEQ ID NO: 2267416 - RNA, 19 nt, Artificial Sequence
  Description of Artificial Sequence: Synthetic oligonucleotide
gccgggcuaagcaggccgc

SEQ ID NO: 2267417 - RNA, 19 nt, Artificial Sequence
  Description of Artificial Sequence: Synthetic oligonucleotide
cgagcgccgcgggagaggg

SEQ ID NO: 2267418 - RNA, 19 nt, Artificial Sequence
  Description of Artificial Sequence: Synthetic oligonucleotide
cagccaccaagccucgaau

SEQ ID NO: 2267419 - RNA, 19 nt, Artificial Sequence
  Description of Artificial Sequence: Synthetic oligonucleotide
ggacagacacgcaggggcu

SEQ ID NO: 2267420 - RNA, 19 nt, Artificial Sequence
  Description of Artificial Sequence: Synthetic oligonucleotide
cccauccggacuccgggga

SEQ ID NO: 2267421 - RNA, 19 nt, Artificial Sequence
  Description of Artificial Sequence: Synthetic oligonucleotide
cccucgugccagcucggug

SEQ ID NO: 2267422 - RNA, 19 nt, Artificial Sequence
  Description of Artificial Sequence: Synthetic oligonucleotide
ggaggcggucccauccgga

SEQ ID NO: 2267423 - RNA, 19 nt, Artificial Sequence
  Description of Artificial Sequence: Synthetic oligonucleotide
ccuggauucucugagcauu

SEQ ID NO: 2267424 - RNA, 19 nt, Artificial Sequence
  Description of Artificial Sequence: Synthetic oligonucleotide
accagccaccaagccucga

SEQ ID NO: 2267425 - RNA, 19 nt, Artificial Sequence
  Description of Artificial Sequence: Synthetic oligonucleotide
caaagcgguuauggaacau

SEQ ID NO: 2267426 - RNA, 19 nt, Artificial Sequence
  Description of Artificial Sequence: Synthetic oligonucleotide
ggcgagcgccgcgggagag

SEQ ID NO: 2267427 - RNA, 19 nt, Artificial Sequence
  Description of Artificial Sequence: Synthetic oligonucleotide
ccgggcuaagcaggccgcg

SEQ ID NO: 2267428 - RNA, 19 nt, Artificial Sequence
  Description of Artificial Sequence: Synthetic oligonucleotide
gcucccggugcuccgcaaa

SEQ ID NO: 2267429 - RNA, 19 nt, Artificial Sequence
  Description of Artificial Sequence: Synthetic oligonucleotide
agcaggccgcggggcgcgg

SEQ ID NO: 2267430 - RNA, 19 nt, Artificial Sequence
  Description of Artificial Sequence: Synthetic oligonucleotide
gcauuccuucacacacaga

SEQ ID NO: 2267431 - RNA, 19 nt, Artificial Sequence
  Description of Artificial Sequence: Synthetic oligonucleotide
aacccggcucugagacaua

SEQ ID NO: 2267432 - RNA, 19 nt, Artificial Sequence
  Description of Artificial Sequence: Synthetic oligonucleotide
gcuggcgagcgccgcggga

SEQ ID NO: 2267433 - RNA, 19 nt, Artificial Sequence
  Description of Artificial Sequence: Synthetic oligonucleotide
cgggcuaagcaggccgcgg

SEQ ID NO: 2267434 - RNA, 19 nt, Artificial Sequence
  Description of Artificial Sequence: Synthetic oligonucleotide
gcggcgccuccauggcgcc

SEQ ID NO: 2267435 - RNA, 19 nt, Artificial Sequence
  Description of Artificial Sequence: Synthetic oligonucleotide
cccugcagauauauucaau

SEQ ID NO: 2267436 - RNA, 19 nt, Artificial Sequence
  Description of Artificial Sequence: Synthetic oligonucleotide
gccccucgugccagcucgg

SEQ ID NO: 2267437 - RNA, 19 nt, Artificial Sequence
  Description of Artificial Sequence: Synthetic oligonucleotide
ccauccggacuccggggaa

SEQ ID NO: 2267438 - RNA, 19 nt, Artificial Sequence
  Description of Artificial Sequence: Synthetic oligonucleotide
ccacagcacccgcagcaaa

SEQ ID NO: 2267439 - RNA, 19 nt, Artificial Sequence
  Description of Artificial Sequence: Synthetic oligonucleotide
gcggcucccggugcuccgc

SEQ ID NO: 2267440 - RNA, 19 nt, Artificial Sequence
  Description of Artificial Sequence: Synthetic oligonucleotide
gccgcgggagagggugacc

SEQ ID NO: 2267441 - RNA, 19 nt, Artificial Sequence
  Description of Artificial Sequence: Synthetic oligonucleotide
cagaccccuuguccucagu

SEQ ID NO: 2267442 - RNA, 19 nt, Artificial Sequence
  Description of Artificial Sequence: Synthetic oligonucleotide
cgcgggagagggugaccug

SEQ ID NO: 2267443 - RNA, 19 nt, Artificial Sequence
  Description of Artificial Sequence: Synthetic oligonucleotide
cugcucgauguagcgguuu

SEQ ID NO: 2267444 - RNA, 19 nt, Artificial Sequence
  Description of Artificial Sequence: Synthetic oligonucleotide
ccagccaaugaugccugcu

SEQ ID NO: 2267445 - RNA, 19 nt, Artificial Sequence
  Description of Artificial Sequence: Synthetic oligonucleotide
gcggucccauccggacucc

SEQ ID NO: 2267446 - RNA, 19 nt, Artificial Sequence
  Description of Artificial Sequence: Synthetic oligonucleotide
ggaccccaggccgggcuaa

SEQ ID NO: 2267447 - RNA, 19 nt, Artificial Sequence
  Description of Artificial Sequence: Synthetic oligonucleotide
cggugcuccgcaaagucuu

SEQ ID NO: 2267448 - RNA, 19 nt, Artificial Sequence
  Description of Artificial Sequence: Synthetic oligonucleotide
cggagugccuucugguccu

SEQ ID NO: 2267449 - RNA, 19 nt, Artificial Sequence
  Description of Artificial Sequence: Synthetic oligonucleotide
ccgcgggagagggugaccu

SEQ ID NO: 2267450 - RNA, 19 nt, Artificial Sequence
  Description of Artificial Sequence: Synthetic oligonucleotide
cugccggaggcggucccau

SEQ ID NO: 2267451 - RNA, 19 nt, Artificial Sequence
  Description of Artificial Sequence: Synthetic oligonucleotide
ccggggaacccggcucuga

SEQ ID NO: 2267452 - RNA, 19 nt, Artificial Sequence
  Description of Artificial Sequence: Synthetic oligonucleotide
cguacccaacaaggcucca

SEQ ID NO: 2267453 - RNA, 19 nt, Artificial Sequence
  Description of Artificial Sequence: Synthetic oligonucleotide
gagcgccgcgggagagggu

SEQ ID NO: 2267454 - RNA, 19 nt, Artificial Sequence
  Description of Artificial Sequence: Synthetic oligonucleotide
cggcgccuccauggcgccc

SEQ ID NO: 2267455 - RNA, 19 nt, Artificial Sequence
  Description of Artificial Sequence: Synthetic oligonucleotide
ggagugccuucugguccuu

SEQ ID NO: 2267456 - RNA, 19 nt, Artificial Sequence
  Description of Artificial Sequence: Synthetic oligonucleotide
ccccuugacucugcucgau

SEQ ID NO: 2267457 - RNA, 19 nt, Artificial Sequence
  Description of Artificial Sequence: Synthetic oligonucleotide
ccccucgugccagcucggu

SEQ ID NO: 2267458 - RNA, 19 nt, Artificial Sequence
  Description of Artificial Sequence: Synthetic oligonucleotide
ccagcucggugugcacuuu

SEQ ID NO: 2267459 - RNA, 19 nt, Artificial Sequence
  Description of Artificial Sequence: Synthetic oligonucleotide
gcacagcgucaaagcgguu

SEQ ID NO: 2267460 - RNA, 19 nt, Artificial Sequence
  Description of Artificial Sequence: Synthetic oligonucleotide
auugauuugaaccauaggg

SEQ ID NO: 2267461 - RNA, 19 nt, Artificial Sequence
  Description of Artificial Sequence: Synthetic oligonucleotide
uagauuacuacuaagaugu

SEQ ID NO: 2267462 - RNA, 19 nt, Artificial Sequence
  Description of Artificial Sequence: Synthetic oligonucleotide
uuauguuauaauaacagag

SEQ ID NO: 2267463 - RNA, 19 nt, Artificial Sequence
  Description of Artificial Sequence: Synthetic oligonucleotide
aacacuauaaagcauacgu

SEQ ID NO: 2267464 - RNA, 19 nt, Artificial Sequence
  Description of Artificial Sequence: Synthetic oligonucleotide
aaucaaacggaguaucugg

SEQ ID NO: 2267465 - RNA, 19 nt, Artificial Sequence
  Description of Artificial Sequence: Synthetic oligonucleotide
uugauuugaaccauagggg

SEQ ID NO: 2267466 - RNA, 19 nt, Artificial Sequence
  Description of Artificial Sequence: Synthetic oligonucleotide
auucauagcggauaugggc

SEQ ID NO: 2267467 - RNA, 19 nt, Artificial Sequence
  Description of Artificial Sequence: Synthetic oligonucleotide
aucguuggguguuagaucc

SEQ ID NO: 2267468 - RNA, 19 nt, Artificial Sequence
  Description of Artificial Sequence: Synthetic oligonucleotide
uauacaucguauaaaaggu

SEQ ID NO: 2267469 - RNA, 19 nt, Artificial Sequence
  Description of Artificial Sequence: Synthetic oligonucleotide
auaaagcauacguagauag

SEQ ID NO: 2267470 - RNA, 19 nt, Artificial Sequence
  Description of Artificial Sequence: Synthetic oligonucleotide
ucuguaagagugaagagcu

SEQ ID NO: 2267471 - RNA, 19 nt, Artificial Sequence
  Description of Artificial Sequence: Synthetic oligonucleotide
auguuauaauaacagaguc

SEQ ID NO: 2267472 - RNA, 19 nt, Artificial Sequence
  Description of Artificial Sequence: Synthetic oligonucleotide
uguuagauccucauaguag

SEQ ID NO: 2267473 - RNA, 19 nt, Artificial Sequence
  Description of Artificial Sequence: Synthetic oligonucleotide
acuucauauacucucauug

SEQ ID NO: 2267474 - RNA, 19 nt, Artificial Sequence
  Description of Artificial Sequence: Synthetic oligonucleotide
uauaauaacagaguccuca

SEQ ID NO: 2267475 - RNA, 19 nt, Artificial Sequence
  Description of Artificial Sequence: Synthetic oligonucleotide
ugugaaaucaaacggagua

SEQ ID NO: 2267476 - RNA, 19 nt, Artificial Sequence
  Description of Artificial Sequence: Synthetic oligonucleotide
cacuauaaagcauacguag

SEQ ID NO: 2267477 - RNA, 19 nt, Artificial Sequence
  Description of Artificial Sequence: Synthetic oligonucleotide
agucacgcagcauacaugg

SEQ ID NO: 2267478 - RNA, 19 nt, Artificial Sequence
  Description of Artificial Sequence: Synthetic oligonucleotide
ucuucaauaucguugggug

SEQ ID NO: 2267479 - RNA, 19 nt, Artificial Sequence
  Description of Artificial Sequence: Synthetic oligonucleotide
uacaucguauaaaagguug

SEQ ID NO: 2267480 - RNA, 19 nt, Artificial Sequence
  Description of Artificial Sequence: Synthetic oligonucleotide
uacuaagaugugcaggugg

SEQ ID NO: 2267481 - RNA, 19 nt, Artificial Sequence
  Description of Artificial Sequence: Synthetic oligonucleotide
augucuucaauaucguugg

SEQ ID NO: 2267482 - RNA, 19 nt, Artificial Sequence
  Description of Artificial Sequence: Synthetic oligonucleotide
aaagcauacguagauagcu

SEQ ID NO: 2267483 - RNA, 19 nt, Artificial Sequence
  Description of Artificial Sequence: Synthetic oligonucleotide
aaagguugcuacuucauau

SEQ ID NO: 2267484 - RNA, 19 nt, Artificial Sequence
  Description of Artificial Sequence: Synthetic oligonucleotide
uccuauuuuauuucuccgg

SEQ ID NO: 2267485 - RNA, 19 nt, Artificial Sequence
  Description of Artificial Sequence: Synthetic oligonucleotide
ugcuagauuacuacuaaga

SEQ ID NO: 2267486 - RNA, 19 nt, Artificial Sequence
  Description of Artificial Sequence: Synthetic oligonucleotide
uucauagcggauaugggca

SEQ ID NO: 2267487 - RNA, 19 nt, Artificial Sequence
  Description of Artificial Sequence: Synthetic oligonucleotide
ucguauaaaagguugcuac

SEQ ID NO: 2267488 - RNA, 19 nt, Artificial Sequence
  Description of Artificial Sequence: Synthetic oligonucleotide
gggaauaaacacuauaaag

SEQ ID NO: 2267489 - RNA, 19 nt, Artificial Sequence
  Description of Artificial Sequence: Synthetic oligonucleotide
uucauauacucucauugga

SEQ ID NO: 2267490 - RNA, 19 nt, Artificial Sequence
  Description of Artificial Sequence: Synthetic oligonucleotide
acuacuaagaugugcaggu

SEQ ID NO: 2267491 - RNA, 19 nt, Artificial Sequence
  Description of Artificial Sequence: Synthetic oligonucleotide
aauaaggcuccuccagcac

SEQ ID NO: 2267492 - RNA, 19 nt, Artificial Sequence
  Description of Artificial Sequence: Synthetic oligonucleotide
auaaggcuccuccagcacc

SEQ ID NO: 2267493 - RNA, 19 nt, Artificial Sequence
  Description of Artificial Sequence: Synthetic oligonucleotide
agcaacuccaaguugcuag

SEQ ID NO: 2267494 - RNA, 19 nt, Artificial Sequence
  Description of Artificial Sequence: Synthetic oligonucleotide
aaauaaggcuccuccagca

SEQ ID NO: 2267495 - RNA, 19 nt, Artificial Sequence
  Description of Artificial Sequence: Synthetic oligonucleotide
uauucauagcggauauggg

SEQ ID NO: 2267496 - RNA, 19 nt, Artificial Sequence
  Description of Artificial Sequence: Synthetic oligonucleotide
uuaaaggccugcuuggaca

SEQ ID NO: 2267497 - RNA, 19 nt, Artificial Sequence
  Description of Artificial Sequence: Synthetic oligonucleotide
uucagaguugaguauaagu

SEQ ID NO: 2267498 - RNA, 19 nt, Artificial Sequence
  Description of Artificial Sequence: Synthetic oligonucleotide
ugacacacuagucagcaac

SEQ ID NO: 2267499 - RNA, 19 nt, Artificial Sequence
  Description of Artificial Sequence: Synthetic oligonucleotide
ucucauuggagguacuugc

SEQ ID NO: 2267500 - RNA, 19 nt, Artificial Sequence
  Description of Artificial Sequence: Synthetic oligonucleotide
auuccuugcaugucuuccc

SEQ ID NO: 2267501 - RNA, 19 nt, Artificial Sequence
  Description of Artificial Sequence: Synthetic oligonucleotide
uuccuauuuuauuucuccg

SEQ ID NO: 2267502 - RNA, 19 nt, Artificial Sequence
  Description of Artificial Sequence: Synthetic oligonucleotide
auuacuacuaagaugugca

SEQ ID NO: 2267503 - RNA, 19 nt, Artificial Sequence
  Description of Artificial Sequence: Synthetic oligonucleotide
uguaagagugaagagcuug

SEQ ID NO: 2267504 - RNA, 19 nt, Artificial Sequence
  Description of Artificial Sequence: Synthetic oligonucleotide
aaagccagguccuuugggu

SEQ ID NO: 2267505 - RNA, 19 nt, Artificial Sequence
  Description of Artificial Sequence: Synthetic oligonucleotide
ucaggaguaucucugugca

SEQ ID NO: 2267506 - RNA, 19 nt, Artificial Sequence
  Description of Artificial Sequence: Synthetic oligonucleotide
ucuuauaguuuuccggugu

SEQ ID NO: 2267507 - RNA, 19 nt, Artificial Sequence
  Description of Artificial Sequence: Synthetic oligonucleotide
acagccgcggcuuuaugcc

SEQ ID NO: 2267508 - RNA, 19 nt, Artificial Sequence
  Description of Artificial Sequence: Synthetic oligonucleotide
agcauacguagauagcuuc

SEQ ID NO: 2267509 - RNA, 19 nt, Artificial Sequence
  Description of Artificial Sequence: Synthetic oligonucleotide
uaguaguugucauugauuu

SEQ ID NO: 2267510 - RNA, 19 nt, Artificial Sequence
  Description of Artificial Sequence: Synthetic oligonucleotide
auaacagaguccucacagg

SEQ ID NO: 2267511 - RNA, 19 nt, Artificial Sequence
  Description of Artificial Sequence: Synthetic oligonucleotide
agguugcuacuucauauac

SEQ ID NO: 2267512 - RNA, 19 nt, Artificial Sequence
  Description of Artificial Sequence: Synthetic oligonucleotide
cugugcacaaauaaggcuc

SEQ ID NO: 2267513 - RNA, 19 nt, Artificial Sequence
  Description of Artificial Sequence: Synthetic oligonucleotide
guuauaauaacagaguccu

SEQ ID NO: 2267514 - RNA, 19 nt, Artificial Sequence
  Description of Artificial Sequence: Synthetic oligonucleotide
uacuacuaagaugugcagg

SEQ ID NO: 2267515 - RNA, 19 nt, Artificial Sequence
  Description of Artificial Sequence: Synthetic oligonucleotide
acuggauuauguuauaaua

SEQ ID NO: 2267516 - RNA, 19 nt, Artificial Sequence
  Description of Artificial Sequence: Synthetic oligonucleotide
gauuacuacuaagaugugc

SEQ ID NO: 2267517 - RNA, 19 nt, Artificial Sequence
  Description of Artificial Sequence: Synthetic oligonucleotide
ucacgcagcauacauggug

SEQ ID NO: 2267518 - RNA, 19 nt, Artificial Sequence
  Description of Artificial Sequence: Synthetic oligonucleotide
ugcuacuucauauacucuc

SEQ ID NO: 2267519 - RNA, 19 nt, Artificial Sequence
  Description of Artificial Sequence: Synthetic oligonucleotide
uaucucugugcacaaauaa

SEQ ID NO: 2267520 - RNA, 19 nt, Artificial Sequence
  Description of Artificial Sequence: Synthetic oligonucleotide
auaaaagguugcuacuuca

SEQ ID NO: 2267521 - RNA, 19 nt, Artificial Sequence
  Description of Artificial Sequence: Synthetic oligonucleotide
uguuguucugacacacuag

SEQ ID NO: 2267522 - RNA, 19 nt, Artificial Sequence
  Description of Artificial Sequence: Synthetic oligonucleotide
uaaagcauacguagauagc

SEQ ID NO: 2267523 - RNA, 19 nt, Artificial Sequence
  Description of Artificial Sequence: Synthetic oligonucleotide
caaguugcuagauuacuac

SEQ ID NO: 2267524 - RNA, 19 nt, Artificial Sequence
  Description of Artificial Sequence: Synthetic oligonucleotide
aaguugcuagauuacuacu

SEQ ID NO: 2267525 - RNA, 19 nt, Artificial Sequence
  Description of Artificial Sequence: Synthetic oligonucleotide
ugugcacaaauaaggcucc

SEQ ID NO: 2267526 - RNA, 19 nt, Artificial Sequence
  Description of Artificial Sequence: Synthetic oligonucleotide
auccauucugccucugggc

SEQ ID NO: 2267527 - RNA, 19 nt, Artificial Sequence
  Description of Artificial Sequence: Synthetic oligonucleotide
uuuuauuucuccggggaca

SEQ ID NO: 2267528 - RNA, 19 nt, Artificial Sequence
  Description of Artificial Sequence: Synthetic oligonucleotide
gucuuaugcaaauuccuug

SEQ ID NO: 2267529 - RNA, 19 nt, Artificial Sequence
  Description of Artificial Sequence: Synthetic oligonucleotide
gugucuguuguucugacac

SEQ ID NO: 2267530 - RNA, 19 nt, Artificial Sequence
  Description of Artificial Sequence: Synthetic oligonucleotide
ucgguuauacaucguauaa

SEQ ID NO: 2267531 - RNA, 19 nt, Artificial Sequence
  Description of Artificial Sequence: Synthetic oligonucleotide
uagaguaagguagugucug

SEQ ID NO: 2267532 - RNA, 19 nt, Artificial Sequence
  Description of Artificial Sequence: Synthetic oligonucleotide
uuuauuucuccggggacag

SEQ ID NO: 2267533 - RNA, 19 nt, Artificial Sequence
  Description of Artificial Sequence: Synthetic oligonucleotide
ggguguuagauccucauag

SEQ ID NO: 2267534 - RNA, 19 nt, Artificial Sequence
  Description of Artificial Sequence: Synthetic oligonucleotide
ugugcaggugggaauaaac

SEQ ID NO: 2267535 - RNA, 19 nt, Artificial Sequence
  Description of Artificial Sequence: Synthetic oligonucleotide
acaucguauaaaagguugc

SEQ ID NO: 2267536 - RNA, 19 nt, Artificial Sequence
  Description of Artificial Sequence: Synthetic oligonucleotide
auauacucucauuggaggu

SEQ ID NO: 2267537 - RNA, 19 nt, Artificial Sequence
  Description of Artificial Sequence: Synthetic oligonucleotide
gguuuuggaacuuucccag

SEQ ID NO: 2267538 - RNA, 19 nt, Artificial Sequence
  Description of Artificial Sequence: Synthetic oligonucleotide
guaguugucauugauuuga

SEQ ID NO: 2267539 - RNA, 19 nt, Artificial Sequence
  Description of Artificial Sequence: Synthetic oligonucleotide
ugggcuagauccaggacug

SEQ ID NO: 2267540 - RNA, 19 nt, Artificial Sequence
  Description of Artificial Sequence: Synthetic oligonucleotide
aguaucucugugcacaaau

SEQ ID NO: 2267541 - RNA, 19 nt, Artificial Sequence
  Description of Artificial Sequence: Synthetic oligonucleotide
uuacuacuaagaugugcag

SEQ ID NO: 2267542 - RNA, 19 nt, Artificial Sequence
  Description of Artificial Sequence: Synthetic oligonucleotide
uuauuccaagcuuucucug

SEQ ID NO: 2267543 - RNA, 19 nt, Artificial Sequence
  Description of Artificial Sequence: Synthetic oligonucleotide
agguuuuggaacuuuccca

SEQ ID NO: 2267544 - RNA, 19 nt, Artificial Sequence
  Description of Artificial Sequence: Synthetic oligonucleotide
auacauggugugguggugc

SEQ ID NO: 2267545 - RNA, 19 nt, Artificial Sequence
  Description of Artificial Sequence: Synthetic oligonucleotide
acuccaaguugcuagauua

SEQ ID NO: 2267546 - RNA, 19 nt, Artificial Sequence
  Description of Artificial Sequence: Synthetic oligonucleotide
ucuggguuauucucaggag

SEQ ID NO: 2267547 - RNA, 19 nt, Artificial Sequence
  Description of Artificial Sequence: Synthetic oligonucleotide
uacuugcaaaacuucugcc

SEQ ID NO: 2267548 - RNA, 19 nt, Artificial Sequence
  Description of Artificial Sequence: Synthetic oligonucleotide
agcgccaaggagaacaugg

SEQ ID NO: 2267549 - RNA, 19 nt, Artificial Sequence
  Description of Artificial Sequence: Synthetic oligonucleotide
cauugauuugaaccauagg

SEQ ID NO: 2267550 - RNA, 19 nt, Artificial Sequence
  Description of Artificial Sequence: Synthetic oligonucleotide
aauaucguuggguguuaga

SEQ ID NO: 2267551 - RNA, 19 nt, Artificial Sequence
  Description of Artificial Sequence: Synthetic oligonucleotide
uggagguacuugcaaaacu

SEQ ID NO: 2267552 - RNA, 19 nt, Artificial Sequence
  Description of Artificial Sequence: Synthetic oligonucleotide
gguagaguaagguaguguc

SEQ ID NO: 2267553 - RNA, 19 nt, Artificial Sequence
  Description of Artificial Sequence: Synthetic oligonucleotide
ggcuuuaugcccuucuggg

SEQ ID NO: 2267554 - RNA, 19 nt, Artificial Sequence
  Description of Artificial Sequence: Synthetic oligonucleotide
uuucgguuauacaucguau

SEQ ID NO: 2267555 - RNA, 19 nt, Artificial Sequence
  Description of Artificial Sequence: Synthetic oligonucleotide
acuaagaugugcagguggg

SEQ ID NO: 2267556 - RNA, 19 nt, Artificial Sequence
  Description of Artificial Sequence: Synthetic oligonucleotide
uauaaguuaaaggccugcu

SEQ ID NO: 2267557 - RNA, 19 nt, Artificial Sequence
  Description of Artificial Sequence: Synthetic oligonucleotide
uaguuuuccggugugaaau

SEQ ID NO: 2267558 - RNA, 19 nt, Artificial Sequence
  Description of Artificial Sequence: Synthetic oligonucleotide
ugaaugugguacuugccaa

SEQ ID NO: 2267559 - RNA, 19 nt, Artificial Sequence
  Description of Artificial Sequence: Synthetic oligonucleotide
ggggcauuuacacaggccc

SEQ ID NO: 2267560 - RNA, 19 nt, Artificial Sequence
  Description of Artificial Sequence: Synthetic oligonucleotide
cuggauuauguuauaauaa

SEQ ID NO: 2267561 - RNA, 19 nt, Artificial Sequence
  Description of Artificial Sequence: Synthetic oligonucleotide
uggguaguucuuuacuaug

SEQ ID NO: 2267562 - RNA, 19 nt, Artificial Sequence
  Description of Artificial Sequence: Synthetic oligonucleotide
uaaaagguugcuacuucau

SEQ ID NO: 2267563 - RNA, 19 nt, Artificial Sequence
  Description of Artificial Sequence: Synthetic oligonucleotide
ccuauuuuauuucuccggg

SEQ ID NO: 2267564 - RNA, 19 nt, Artificial Sequence
  Description of Artificial Sequence: Synthetic oligonucleotide
uugcuagauuacuacuaag

SEQ ID NO: 2267565 - RNA, 19 nt, Artificial Sequence
  Description of Artificial Sequence: Synthetic oligonucleotide
ugucuuaugcaaauuccuu

SEQ ID NO: 2267566 - RNA, 19 nt, Artificial Sequence
  Description of Artificial Sequence: Synthetic oligonucleotide
auacucucauuggagguac

SEQ ID NO: 2267567 - RNA, 19 nt, Artificial Sequence
  Description of Artificial Sequence: Synthetic oligonucleotide
uggguuauucucaggagua

SEQ ID NO: 2267568 - RNA, 19 nt, Artificial Sequence
  Description of Artificial Sequence: Synthetic oligonucleotide
aaacggaguaucuggguua

SEQ ID NO: 2267569 - RNA, 19 nt, Artificial Sequence
  Description of Artificial Sequence: Synthetic oligonucleotide
aguuuuccggugugaaauc

SEQ ID NO: 2267570 - RNA, 19 nt, Artificial Sequence
  Description of Artificial Sequence: Synthetic oligonucleotide
auuggagguacuugcaaaa

SEQ ID NO: 2267571 - RNA, 19 nt, Artificial Sequence
  Description of Artificial Sequence: Synthetic oligonucleotide
uccacuucuguaagaguga

SEQ ID NO: 2267572 - RNA, 19 nt, Artificial Sequence
  Description of Artificial Sequence: Synthetic oligonucleotide
uacguagauagcuuccuau

SEQ ID NO: 2267573 - RNA, 19 nt, Artificial Sequence
  Description of Artificial Sequence: Synthetic oligonucleotide
ucagagucacgcagcauac

SEQ ID NO: 2267574 - RNA, 19 nt, Artificial Sequence
  Description of Artificial Sequence: Synthetic oligonucleotide
gaguaucuggguuauucuc

SEQ ID NO: 2267575 - RNA, 19 nt, Artificial Sequence
  Description of Artificial Sequence: Synthetic oligonucleotide
aaaacuucugccaccuuau

SEQ ID NO: 2267576 - RNA, 19 nt, Artificial Sequence
  Description of Artificial Sequence: Synthetic oligonucleotide
auagcggauaugggcagcc

SEQ ID NO: 2267577 - RNA, 19 nt, Artificial Sequence
  Description of Artificial Sequence: Synthetic oligonucleotide
aagaugugcaggugggaau

SEQ ID NO: 2267578 - RNA, 19 nt, Artificial Sequence
  Description of Artificial Sequence: Synthetic oligonucleotide
aagguugcuacuucauaua

SEQ ID NO: 2267579 - RNA, 19 nt, Artificial Sequence
  Description of Artificial Sequence: Synthetic oligonucleotide
cuuauaguuuuccggugug

SEQ ID NO: 2267580 - RNA, 19 nt, Artificial Sequence
  Description of Artificial Sequence: Synthetic oligonucleotide
guuagauccucauaguagu

SEQ ID NO: 2267581 - RNA, 19 nt, Artificial Sequence
  Description of Artificial Sequence: Synthetic oligonucleotide
aguaguugucauugauuug

SEQ ID NO: 2267582 - RNA, 19 nt, Artificial Sequence
  Description of Artificial Sequence: Synthetic oligonucleotide
uauaguuuuccggugugaa

SEQ ID NO: 2267583 - RNA, 19 nt, Artificial Sequence
  Description of Artificial Sequence: Synthetic oligonucleotide
ucauuggagguacuugcaa

SEQ ID NO: 2267584 - RNA, 19 nt, Artificial Sequence
  Description of Artificial Sequence: Synthetic oligonucleotide
aggaguaucucugugcaca

SEQ ID NO: 2267585 - RNA, 19 nt, Artificial Sequence
  Description of Artificial Sequence: Synthetic oligonucleotide
ucauagcggauaugggcag

SEQ ID NO: 2267586 - RNA, 19 nt, Artificial Sequence
  Description of Artificial Sequence: Synthetic oligonucleotide
uucgguuauacaucguaua

SEQ ID NO: 2267587 - RNA, 19 nt, Artificial Sequence
  Description of Artificial Sequence: Synthetic oligonucleotide
cuugccaacuggcuuucgg

SEQ ID NO: 2267588 - RNA, 19 nt, Artificial Sequence
  Description of Artificial Sequence: Synthetic oligonucleotide
agagucacgcagcauacau

SEQ ID NO: 2267589 - RNA, 19 nt, Artificial Sequence
  Description of Artificial Sequence: Synthetic oligonucleotide
uccaaccuuuauuccaagc

SEQ ID NO: 2267590 - RNA, 19 nt, Artificial Sequence
  Description of Artificial Sequence: Synthetic oligonucleotide
auaucguuggguguuagau

SEQ ID NO: 2267591 - RNA, 19 nt, Artificial Sequence
  Description of Artificial Sequence: Synthetic oligonucleotide
aucaaacggaguaucuggg

SEQ ID NO: 2267592 - RNA, 19 nt, Artificial Sequence
  Description of Artificial Sequence: Synthetic oligonucleotide
ucaaacggaguaucugggu

SEQ ID NO: 2267593 - RNA, 19 nt, Artificial Sequence
  Description of Artificial Sequence: Synthetic oligonucleotide
ggcuuucgguuauacaucg

SEQ ID NO: 2267594 - RNA, 19 nt, Artificial Sequence
  Description of Artificial Sequence: Synthetic oligonucleotide
acuauaaagcauacguaga

SEQ ID NO: 2267595 - RNA, 19 nt, Artificial Sequence
  Description of Artificial Sequence: Synthetic oligonucleotide
uuuccggugugaaaucaaa

SEQ ID NO: 2267596 - RNA, 19 nt, Artificial Sequence
  Description of Artificial Sequence: Synthetic oligonucleotide
agaguugaguauaaguuaa

SEQ ID NO: 2267597 - RNA, 19 nt, Artificial Sequence
  Description of Artificial Sequence: Synthetic oligonucleotide
aaccauaggggcauuuaca

SEQ ID NO: 2267598 - RNA, 19 nt, Artificial Sequence
  Description of Artificial Sequence: Synthetic oligonucleotide
auaaguuaaaggccugcuu

SEQ ID NO: 2267599 - RNA, 19 nt, Artificial Sequence
  Description of Artificial Sequence: Synthetic oligonucleotide
agcauacaugguguggugg

SEQ ID NO: 2267600 - RNA, 19 nt, Artificial Sequence
  Description of Artificial Sequence: Synthetic oligonucleotide
ugucuucaauaucguuggg

SEQ ID NO: 2267601 - RNA, 19 nt, Artificial Sequence
  Description of Artificial Sequence: Synthetic oligonucleotide
uugcaaaacuucugccacc

SEQ ID NO: 2267602 - RNA, 19 nt, Artificial Sequence
  Description of Artificial Sequence: Synthetic oligonucleotide
gugggaauaaacacuauaa

SEQ ID NO: 2267603 - RNA, 19 nt, Artificial Sequence
  Description of Artificial Sequence: Synthetic oligonucleotide
guauaaguuaaaggccugc

SEQ ID NO: 2267604 - RNA, 19 nt, Artificial Sequence
  Description of Artificial Sequence: Synthetic oligonucleotide
gauuugaaccauaggggca

SEQ ID NO: 2267605 - RNA, 19 nt, Artificial Sequence
  Description of Artificial Sequence: Synthetic oligonucleotide
uaucguuggguguuagauc

SEQ ID NO: 2267606 - RNA, 19 nt, Artificial Sequence
  Description of Artificial Sequence: Synthetic oligonucleotide
ggugugaaaucaaacggag

SEQ ID NO: 2267607 - RNA, 19 nt, Artificial Sequence
  Description of Artificial Sequence: Synthetic oligonucleotide
uuauaauaacagaguccuc

SEQ ID NO: 2267608 - RNA, 19 nt, Artificial Sequence
  Description of Artificial Sequence: Synthetic oligonucleotide
agcuuccuauuuuauuucu

SEQ ID NO: 2267609 - RNA, 19 nt, Artificial Sequence
  Description of Artificial Sequence: Synthetic oligonucleotide
cucuuauaguuuuccggug

SEQ ID NO: 2267610 - RNA, 19 nt, Artificial Sequence
  Description of Artificial Sequence: Synthetic oligonucleotide
uuuuccggugugaaaucaa

SEQ ID NO: 2267611 - RNA, 19 nt, Artificial Sequence
  Description of Artificial Sequence: Synthetic oligonucleotide
uccaaguugcuagauuacu

SEQ ID NO: 2267612 - RNA, 19 nt, Artificial Sequence
  Description of Artificial Sequence: Synthetic oligonucleotide
guugcuagauuacuacuaa

SEQ ID NO: 2267613 - RNA, 19 nt, Artificial Sequence
  Description of Artificial Sequence: Synthetic oligonucleotide
cacagccgcggcuuuaugc

SEQ ID NO: 2267614 - RNA, 19 nt, Artificial Sequence
  Description of Artificial Sequence: Synthetic oligonucleotide
aacuccaaguugcuagauu

SEQ ID NO: 2267615 - RNA, 19 nt, Artificial Sequence
  Description of Artificial Sequence: Synthetic oligonucleotide
uuauaguuuuccgguguga

SEQ ID NO: 2267616 - RNA, 19 nt, Artificial Sequence
  Description of Artificial Sequence: Synthetic oligonucleotide
uugccaacuggcuuucggu

SEQ ID NO: 2267617 - RNA, 19 nt, Artificial Sequence
  Description of Artificial Sequence: Synthetic oligonucleotide
ccggugugaaaucaaacgg

SEQ ID NO: 2267618 - RNA, 19 nt, Artificial Sequence
  Description of Artificial Sequence: Synthetic oligonucleotide
uuguucugacacacuaguc

SEQ ID NO: 2267619 - RNA, 19 nt, Artificial Sequence
  Description of Artificial Sequence: Synthetic oligonucleotide
uauacucucauuggaggua

SEQ ID NO: 2267620 - RNA, 19 nt, Artificial Sequence
  Description of Artificial Sequence: Synthetic oligonucleotide
uugggugguucagucagag

SEQ ID NO: 2267621 - RNA, 19 nt, Artificial Sequence
  Description of Artificial Sequence: Synthetic oligonucleotide
ucuguuguucugacacacu

SEQ ID NO: 2267622 - RNA, 19 nt, Artificial Sequence
  Description of Artificial Sequence: Synthetic oligonucleotide
ggguaguucuuuacuaugg

SEQ ID NO: 2267623 - RNA, 19 nt, Artificial Sequence
  Description of Artificial Sequence: Synthetic oligonucleotide
gucagagucacgcagcaua

SEQ ID NO: 2267624 - RNA, 19 nt, Artificial Sequence
  Description of Artificial Sequence: Synthetic oligonucleotide
aggacuggaagcacagccg

SEQ ID NO: 2267625 - RNA, 19 nt, Artificial Sequence
  Description of Artificial Sequence: Synthetic oligonucleotide
ccaaggagaacauggcggg

SEQ ID NO: 2267626 - RNA, 19 nt, Artificial Sequence
  Description of Artificial Sequence: Synthetic oligonucleotide
cuggcuuucgguuauacau

SEQ ID NO: 2267627 - RNA, 19 nt, Artificial Sequence
  Description of Artificial Sequence: Synthetic oligonucleotide
uuauucucaggaguaucuc

SEQ ID NO: 2267628 - RNA, 19 nt, Artificial Sequence
  Description of Artificial Sequence: Synthetic oligonucleotide
auaguuuuccggugugaaa

SEQ ID NO: 2267629 - RNA, 19 nt, Artificial Sequence
  Description of Artificial Sequence: Synthetic oligonucleotide
ugucuguuguucugacaca

SEQ ID NO: 2267630 - RNA, 19 nt, Artificial Sequence
  Description of Artificial Sequence: Synthetic oligonucleotide
cagccauccauucugccuc

SEQ ID NO: 2267631 - RNA, 19 nt, Artificial Sequence
  Description of Artificial Sequence: Synthetic oligonucleotide
auggccucuauccucuuau

SEQ ID NO: 2267632 - RNA, 19 nt, Artificial Sequence
  Description of Artificial Sequence: Synthetic oligonucleotide
uugcuacuucauauacucu

SEQ ID NO: 2267633 - RNA, 19 nt, Artificial Sequence
  Description of Artificial Sequence: Synthetic oligonucleotide
cagaguugaguauaaguua

SEQ ID NO: 2267634 - RNA, 19 nt, Artificial Sequence
  Description of Artificial Sequence: Synthetic oligonucleotide
uccuuugggugguucaguc

SEQ ID NO: 2267635 - RNA, 19 nt, Artificial Sequence
  Description of Artificial Sequence: Synthetic oligonucleotide
cuuuaugcccuucugggua

SEQ ID NO: 2267636 - RNA, 19 nt, Artificial Sequence
  Description of Artificial Sequence: Synthetic oligonucleotide
ggugcagaccugaaugugg

SEQ ID NO: 2267637 - RNA, 19 nt, Artificial Sequence
  Description of Artificial Sequence: Synthetic oligonucleotide
aggggcauuuacacaggcc

SEQ ID NO: 2267638 - RNA, 19 nt, Artificial Sequence
  Description of Artificial Sequence: Synthetic oligonucleotide
uaguugucauugauuugaa

SEQ ID NO: 2267639 - RNA, 19 nt, Artificial Sequence
  Description of Artificial Sequence: Synthetic oligonucleotide
uuggguguuagauccucau

SEQ ID NO: 2267640 - RNA, 19 nt, Artificial Sequence
  Description of Artificial Sequence: Synthetic oligonucleotide
gauaugggcagccauccau

SEQ ID NO: 2267641 - RNA, 19 nt, Artificial Sequence
  Description of Artificial Sequence: Synthetic oligonucleotide
uacauggugugguggugca

SEQ ID NO: 2267642 - RNA, 19 nt, Artificial Sequence
  Description of Artificial Sequence: Synthetic oligonucleotide
acuauggccucuauccucu

SEQ ID NO: 2267643 - RNA, 19 nt, Artificial Sequence
  Description of Artificial Sequence: Synthetic oligonucleotide
gguacuugcaaaacuucug

SEQ ID NO: 2267644 - RNA, 19 nt, Artificial Sequence
  Description of Artificial Sequence: Synthetic oligonucleotide
cuccaaguugcuagauuac

SEQ ID NO: 2267645 - RNA, 19 nt, Artificial Sequence
  Description of Artificial Sequence: Synthetic oligonucleotide
cuuucgguuauacaucgua

SEQ ID NO: 2267646 - RNA, 19 nt, Artificial Sequence
  Description of Artificial Sequence: Synthetic oligonucleotide
cuauaaagcauacguagau

SEQ ID NO: 2267647 - RNA, 19 nt, Artificial Sequence
  Description of Artificial Sequence: Synthetic oligonucleotide
accauuuugcacagcuguc

SEQ ID NO: 2267648 - RNA, 19 nt, Artificial Sequence
  Description of Artificial Sequence: Synthetic oligonucleotide
uuggagguacuugcaaaac

SEQ ID NO: 2267649 - RNA, 19 nt, Artificial Sequence
  Description of Artificial Sequence: Synthetic oligonucleotide
aguugcuagauuacuacua

SEQ ID NO: 2267650 - RNA, 19 nt, Artificial Sequence
  Description of Artificial Sequence: Synthetic oligonucleotide
acuggcuuucgguuauaca

SEQ ID NO: 2267651 - RNA, 19 nt, Artificial Sequence
  Description of Artificial Sequence: Synthetic oligonucleotide
agcuugucagcuguagucu

SEQ ID NO: 2267652 - RNA, 19 nt, Artificial Sequence
  Description of Artificial Sequence: Synthetic oligonucleotide
guaagguagugucuguugu

SEQ ID NO: 2267653 - RNA, 19 nt, Artificial Sequence
  Description of Artificial Sequence: Synthetic oligonucleotide
cauucugccucugggcuag

SEQ ID NO: 2267654 - RNA, 19 nt, Artificial Sequence
  Description of Artificial Sequence: Synthetic oligonucleotide
guguuagauccucauagua

SEQ ID NO: 2267655 - RNA, 19 nt, Artificial Sequence
  Description of Artificial Sequence: Synthetic oligonucleotide
uaugggcagccauccauuc

SEQ ID NO: 2267656 - RNA, 19 nt, Artificial Sequence
  Description of Artificial Sequence: Synthetic oligonucleotide
cauuggagguacuugcaaa

SEQ ID NO: 2267657 - RNA, 19 nt, Artificial Sequence
  Description of Artificial Sequence: Synthetic oligonucleotide
uggcucacagcagaaccgc

SEQ ID NO: 2267658 - RNA, 19 nt, Artificial Sequence
  Description of Artificial Sequence: Synthetic oligonucleotide
agggcggcaaggccggccg

SEQ ID NO: 2267659 - RNA, 19 nt, Artificial Sequence
  Description of Artificial Sequence: Synthetic oligonucleotide
ggccucuauccucuuauag

SEQ ID NO: 2267660 - RNA, 19 nt, Artificial Sequence
  Description of Artificial Sequence: Synthetic oligonucleotide
augugguacuugccaacug

SEQ ID NO: 2267661 - RNA, 19 nt, Artificial Sequence
  Description of Artificial Sequence: Synthetic oligonucleotide
aacggaguaucuggguuau

SEQ ID NO: 2267662 - RNA, 19 nt, Artificial Sequence
  Description of Artificial Sequence: Synthetic oligonucleotide
guuauucucaggaguaucu

SEQ ID NO: 2267663 - RNA, 19 nt, Artificial Sequence
  Description of Artificial Sequence: Synthetic oligonucleotide
uuucuccggggacaguuuu

SEQ ID NO: 2267664 - RNA, 19 nt, Artificial Sequence
  Description of Artificial Sequence: Synthetic oligonucleotide
cacuucuguaagagugaag

SEQ ID NO: 2267665 - RNA, 19 nt, Artificial Sequence
  Description of Artificial Sequence: Synthetic oligonucleotide
ggugguucagucagagagg

SEQ ID NO: 2267666 - RNA, 19 nt, Artificial Sequence
  Description of Artificial Sequence: Synthetic oligonucleotide
uggguguuagauccucaua

SEQ ID NO: 2267667 - RNA, 19 nt, Artificial Sequence
  Description of Artificial Sequence: Synthetic oligonucleotide
gaaccgcccacuccuuggc

SEQ ID NO: 2267668 - RNA, 19 nt, Artificial Sequence
  Description of Artificial Sequence: Synthetic oligonucleotide
agguagaguaagguagugu

SEQ ID NO: 2267669 - RNA, 19 nt, Artificial Sequence
  Description of Artificial Sequence: Synthetic oligonucleotide
accuuauucauagcggaua

SEQ ID NO: 2267670 - RNA, 19 nt, Artificial Sequence
  Description of Artificial Sequence: Synthetic oligonucleotide
cuuggacaccaaagccagg

SEQ ID NO: 2267671 - RNA, 19 nt, Artificial Sequence
  Description of Artificial Sequence: Synthetic oligonucleotide
ugaaccauaggggcauuua

SEQ ID NO: 2267672 - RNA, 19 nt, Artificial Sequence
  Description of Artificial Sequence: Synthetic oligonucleotide
cuuauucauagcggauaug

SEQ ID NO: 2267673 - RNA, 19 nt, Artificial Sequence
  Description of Artificial Sequence: Synthetic oligonucleotide
gagucacgcagcauacaug

SEQ ID NO: 2267674 - RNA, 19 nt, Artificial Sequence
  Description of Artificial Sequence: Synthetic oligonucleotide
acacuauaaagcauacgua

SEQ ID NO: 2267675 - RNA, 19 nt, Artificial Sequence
  Description of Artificial Sequence: Synthetic oligonucleotide
aucguauaaaagguugcua

SEQ ID NO: 2267676 - RNA, 19 nt, Artificial Sequence
  Description of Artificial Sequence: Synthetic oligonucleotide
aagcauacguagauagcuu

SEQ ID NO: 2267677 - RNA, 19 nt, Artificial Sequence
  Description of Artificial Sequence: Synthetic oligonucleotide
ugcacaaauaaggcuccuc

SEQ ID NO: 2267678 - RNA, 19 nt, Artificial Sequence
  Description of Artificial Sequence: Synthetic oligonucleotide
auaggggcauuuacacagg

SEQ ID NO: 2267679 - RNA, 19 nt, Artificial Sequence
  Description of Artificial Sequence: Synthetic oligonucleotide
agcggauaugggcagccau

SEQ ID NO: 2267680 - RNA, 19 nt, Artificial Sequence
  Description of Artificial Sequence: Synthetic oligonucleotide
guucagucagagaggugag

SEQ ID NO: 2267681 - RNA, 19 nt, Artificial Sequence
  Description of Artificial Sequence: Synthetic oligonucleotide
agcuuugaguucaucaaua

SEQ ID NO: 2267682 - RNA, 19 nt, Artificial Sequence
  Description of Artificial Sequence: Synthetic oligonucleotide
aacagaguccucacaggua

SEQ ID NO: 2267683 - RNA, 19 nt, Artificial Sequence
  Description of Artificial Sequence: Synthetic oligonucleotide
guagauagcuuccuauuuu

SEQ ID NO: 2267684 - RNA, 19 nt, Artificial Sequence
  Description of Artificial Sequence: Synthetic oligonucleotide
auacguagauagcuuccua

SEQ ID NO: 2267685 - RNA, 19 nt, Artificial Sequence
  Description of Artificial Sequence: Synthetic oligonucleotide
ggugggaauaaacacuaua

SEQ ID NO: 2267686 - RNA, 19 nt, Artificial Sequence
  Description of Artificial Sequence: Synthetic oligonucleotide
guuuuccggugugaaauca

SEQ ID NO: 2267687 - RNA, 19 nt, Artificial Sequence
  Description of Artificial Sequence: Synthetic oligonucleotide
gaccugaaugugguacuug

SEQ ID NO: 2267688 - RNA, 19 nt, Artificial Sequence
  Description of Artificial Sequence: Synthetic oligonucleotide
gcagaccugaaugugguac

SEQ ID NO: 2267689 - RNA, 19 nt, Artificial Sequence
  Description of Artificial Sequence: Synthetic oligonucleotide
uauggccucuauccucuua

SEQ ID NO: 2267690 - RNA, 19 nt, Artificial Sequence
  Description of Artificial Sequence: Synthetic oligonucleotide
agaugugcaggugggaaua

SEQ ID NO: 2267691 - RNA, 19 nt, Artificial Sequence
  Description of Artificial Sequence: Synthetic oligonucleotide
auacaucguauaaaagguu

SEQ ID NO: 2267692 - RNA, 19 nt, Artificial Sequence
  Description of Artificial Sequence: Synthetic oligonucleotide
agcuggcucacagcagaac

SEQ ID NO: 2267693 - RNA, 19 nt, Artificial Sequence
  Description of Artificial Sequence: Synthetic oligonucleotide
caagcuuucucugaagggu

SEQ ID NO: 2267694 - RNA, 19 nt, Artificial Sequence
  Description of Artificial Sequence: Synthetic oligonucleotide
cuccaaccuuuauuccaag

SEQ ID NO: 2267695 - RNA, 19 nt, Artificial Sequence
  Description of Artificial Sequence: Synthetic oligonucleotide
cuacuaagaugugcaggug

SEQ ID NO: 2267696 - RNA, 19 nt, Artificial Sequence
  Description of Artificial Sequence: Synthetic oligonucleotide
cagcauacaugguguggug

SEQ ID NO: 2267697 - RNA, 19 nt, Artificial Sequence
  Description of Artificial Sequence: Synthetic oligonucleotide
augcccuucuggguaguuc

SEQ ID NO: 2267698 - RNA, 19 nt, Artificial Sequence
  Description of Artificial Sequence: Synthetic oligonucleotide
ucaauaucguuggguguua

SEQ ID NO: 2267699 - RNA, 19 nt, Artificial Sequence
  Description of Artificial Sequence: Synthetic oligonucleotide
cauagcggauaugggcagc

SEQ ID NO: 2267700 - RNA, 19 nt, Artificial Sequence
  Description of Artificial Sequence: Synthetic oligonucleotide
cuggguuauucucaggagu

SEQ ID NO: 2267701 - RNA, 19 nt, Artificial Sequence
  Description of Artificial Sequence: Synthetic oligonucleotide
cuggaagcacagccgcggc

SEQ ID NO: 2267702 - RNA, 19 nt, Artificial Sequence
  Description of Artificial Sequence: Synthetic oligonucleotide
cagcuguagucucuccaac

SEQ ID NO: 2267703 - RNA, 19 nt, Artificial Sequence
  Description of Artificial Sequence: Synthetic oligonucleotide
gcauacguagauagcuucc

SEQ ID NO: 2267704 - RNA, 19 nt, Artificial Sequence
  Description of Artificial Sequence: Synthetic oligonucleotide
caggaguaucucugugcac

SEQ ID NO: 2267705 - RNA, 19 nt, Artificial Sequence
  Description of Artificial Sequence: Synthetic oligonucleotide
gguuauucucaggaguauc

SEQ ID NO: 2267706 - RNA, 19 nt, Artificial Sequence
  Description of Artificial Sequence: Synthetic oligonucleotide
ucguuggguguuagauccu

SEQ ID NO: 2267707 - RNA, 19 nt, Artificial Sequence
  Description of Artificial Sequence: Synthetic oligonucleotide
cuucaauaucguugggugu

SEQ ID NO: 2267708 - RNA, 19 nt, Artificial Sequence
  Description of Artificial Sequence: Synthetic oligonucleotide
gucuucaauaucguugggu

SEQ ID NO: 2267709 - RNA, 19 nt, Artificial Sequence
  Description of Artificial Sequence: Synthetic oligonucleotide
acgcagcauacauggugug

SEQ ID NO: 2267710 - RNA, 19 nt, Artificial Sequence
  Description of Artificial Sequence: Synthetic oligonucleotide
ugggugguucagucagaga

SEQ ID NO: 2267711 - RNA, 19 nt, Artificial Sequence
  Description of Artificial Sequence: Synthetic oligonucleotide
agauagcuuccuauuuuau

SEQ ID NO: 2267712 - RNA, 19 nt, Artificial Sequence
  Description of Artificial Sequence: Synthetic oligonucleotide
guaagagugaagagcuugu

SEQ ID NO: 2267713 - RNA, 19 nt, Artificial Sequence
  Description of Artificial Sequence: Synthetic oligonucleotide
agauuacuacuaagaugug

SEQ ID NO: 2267714 - RNA, 19 nt, Artificial Sequence
  Description of Artificial Sequence: Synthetic oligonucleotide
cugucagagucacgcagca

SEQ ID NO: 2267715 - RNA, 19 nt, Artificial Sequence
  Description of Artificial Sequence: Synthetic oligonucleotide
cagguagaguaagguagug

SEQ ID NO: 2267716 - RNA, 19 nt, Artificial Sequence
  Description of Artificial Sequence: Synthetic oligonucleotide
gaguugaguauaaguuaaa

SEQ ID NO: 2267717 - RNA, 19 nt, Artificial Sequence
  Description of Artificial Sequence: Synthetic oligonucleotide
gcugucagagucacgcagc

SEQ ID NO: 2267718 - RNA, 19 nt, Artificial Sequence
  Description of Artificial Sequence: Synthetic oligonucleotide
cucgcagcgccaaggagaa

SEQ ID NO: 2267719 - RNA, 19 nt, Artificial Sequence
  Description of Artificial Sequence: Synthetic oligonucleotide
guagaguaagguagugucu

SEQ ID NO: 2267720 - RNA, 19 nt, Artificial Sequence
  Description of Artificial Sequence: Synthetic oligonucleotide
ccaccuuauucauagcgga

SEQ ID NO: 2267721 - RNA, 19 nt, Artificial Sequence
  Description of Artificial Sequence: Synthetic oligonucleotide
cucacagguagaguaaggu

SEQ ID NO: 2267722 - RNA, 19 nt, Artificial Sequence
  Description of Artificial Sequence: Synthetic oligonucleotide
cuugcaugucuuccccaca

SEQ ID NO: 2267723 - RNA, 19 nt, Artificial Sequence
  Description of Artificial Sequence: Synthetic oligonucleotide
cagaaccgcccacuccuug

SEQ ID NO: 2267724 - RNA, 19 nt, Artificial Sequence
  Description of Artificial Sequence: Synthetic oligonucleotide
cagccgcggcuuuaugccc

SEQ ID NO: 2267725 - RNA, 19 nt, Artificial Sequence
  Description of Artificial Sequence: Synthetic oligonucleotide
acucucauuggagguacuu

SEQ ID NO: 2267726 - RNA, 19 nt, Artificial Sequence
  Description of Artificial Sequence: Synthetic oligonucleotide
ccucuuauaguuuuccggu

SEQ ID NO: 2267727 - RNA, 19 nt, Artificial Sequence
  Description of Artificial Sequence: Synthetic oligonucleotide
caucguauaaaagguugcu

SEQ ID NO: 2267728 - RNA, 19 nt, Artificial Sequence
  Description of Artificial Sequence: Synthetic oligonucleotide
gcaacuccaaguugcuaga

SEQ ID NO: 2267729 - RNA, 19 nt, Artificial Sequence
  Description of Artificial Sequence: Synthetic oligonucleotide
gugaaaucaaacggaguau

SEQ ID NO: 2267730 - RNA, 19 nt, Artificial Sequence
  Description of Artificial Sequence: Synthetic oligonucleotide
gguguuagauccucauagu

SEQ ID NO: 2267731 - RNA, 19 nt, Artificial Sequence
  Description of Artificial Sequence: Synthetic oligonucleotide
guaucucugugcacaaaua

SEQ ID NO: 2267732 - RNA, 19 nt, Artificial Sequence
  Description of Artificial Sequence: Synthetic oligonucleotide
gugguucagucagagaggu

SEQ ID NO: 2267733 - RNA, 19 nt, Artificial Sequence
  Description of Artificial Sequence: Synthetic oligonucleotide
agccauccauucugccucu

SEQ ID NO: 2267734 - RNA, 19 nt, Artificial Sequence
  Description of Artificial Sequence: Synthetic oligonucleotide
cuggguaguucuuuacuau

SEQ ID NO: 2267735 - RNA, 19 nt, Artificial Sequence
  Description of Artificial Sequence: Synthetic oligonucleotide
guuggguguuagauccuca

SEQ ID NO: 2267736 - RNA, 19 nt, Artificial Sequence
  Description of Artificial Sequence: Synthetic oligonucleotide
gggacaguuuucagaguug

SEQ ID NO: 2267737 - RNA, 19 nt, Artificial Sequence
  Description of Artificial Sequence: Synthetic oligonucleotide
gguacuugccaacuggcuu

SEQ ID NO: 2267738 - RNA, 19 nt, Artificial Sequence
  Description of Artificial Sequence: Synthetic oligonucleotide
cauacguagauagcuuccu

SEQ ID NO: 2267739 - RNA, 19 nt, Artificial Sequence
  Description of Artificial Sequence: Synthetic oligonucleotide
gcucgcagcgccaaggaga

SEQ ID NO: 2267740 - RNA, 19 nt, Artificial Sequence
  Description of Artificial Sequence: Synthetic oligonucleotide
acuugccaacuggcuuucg

SEQ ID NO: 2267741 - RNA, 19 nt, Artificial Sequence
  Description of Artificial Sequence: Synthetic oligonucleotide
cggcuuuaugcccuucugg

SEQ ID NO: 2267742 - RNA, 19 nt, Artificial Sequence
  Description of Artificial Sequence: Synthetic oligonucleotide
gaugugcaggugggaauaa

SEQ ID NO: 2267743 - RNA, 19 nt, Artificial Sequence
  Description of Artificial Sequence: Synthetic oligonucleotide
uggccucuauccucuuaua

SEQ ID NO: 2267744 - RNA, 19 nt, Artificial Sequence
  Description of Artificial Sequence: Synthetic oligonucleotide
agaccugaaugugguacuu

SEQ ID NO: 2267745 - RNA, 19 nt, Artificial Sequence
  Description of Artificial Sequence: Synthetic oligonucleotide
ccaaguugcuagauuacua

SEQ ID NO: 2267746 - RNA, 19 nt, Artificial Sequence
  Description of Artificial Sequence: Synthetic oligonucleotide
cagaccugaaugugguacu

SEQ ID NO: 2267747 - RNA, 19 nt, Artificial Sequence
  Description of Artificial Sequence: Synthetic oligonucleotide
uuaugcccuucuggguagu

SEQ ID NO: 2267748 - RNA, 19 nt, Artificial Sequence
  Description of Artificial Sequence: Synthetic oligonucleotide
ugucagagucacgcagcau

SEQ ID NO: 2267749 - RNA, 19 nt, Artificial Sequence
  Description of Artificial Sequence: Synthetic oligonucleotide
uagcggauaugggcagcca

SEQ ID NO: 2267750 - RNA, 19 nt, Artificial Sequence
  Description of Artificial Sequence: Synthetic oligonucleotide
ggggacaguuuucagaguu

SEQ ID NO: 2267751 - RNA, 19 nt, Artificial Sequence
  Description of Artificial Sequence: Synthetic oligonucleotide
aggccggccgcccgcgcuc

SEQ ID NO: 2267752 - RNA, 19 nt, Artificial Sequence
  Description of Artificial Sequence: Synthetic oligonucleotide
gcggcuuuaugcccuucug

SEQ ID NO: 2267753 - RNA, 19 nt, Artificial Sequence
  Description of Artificial Sequence: Synthetic oligonucleotide
gcauacauggugugguggu

SEQ ID NO: 2267754 - RNA, 19 nt, Artificial Sequence
  Description of Artificial Sequence: Synthetic oligonucleotide
cggugugaaaucaaacgga

SEQ ID NO: 2267755 - RNA, 19 nt, Artificial Sequence
  Description of Artificial Sequence: Synthetic oligonucleotide
cccagguuuuggaacuuuc

SEQ ID NO: 2267756 - RNA, 19 nt, Artificial Sequence
  Description of Artificial Sequence: Synthetic oligonucleotide
ggagguacuugcaaaacuu

SEQ ID NO: 2267757 - RNA, 19 nt, Artificial Sequence
  Description of Artificial Sequence: Synthetic oligonucleotide
cuacuucauauacucucau

SEQ ID NO: 2267758 - RNA, 19 nt, Artificial Sequence
  Description of Artificial Sequence: Synthetic oligonucleotide
ggcuagauccaggacugga

SEQ ID NO: 2267759 - RNA, 19 nt, Artificial Sequence
  Description of Artificial Sequence: Synthetic oligonucleotide
gcauuccacuucuguaaga

SEQ ID NO: 2267760 - RNA, 19 nt, Artificial Sequence
  Description of Artificial Sequence: Synthetic oligonucleotide
augugcaggugggaauaaa

SEQ ID NO: 2267761 - RNA, 19 nt, Artificial Sequence
  Description of Artificial Sequence: Synthetic oligonucleotide
gcagcauacaugguguggu

SEQ ID NO: 2267762 - RNA, 19 nt, Artificial Sequence
  Description of Artificial Sequence: Synthetic oligonucleotide
auuucuccggggacaguuu

SEQ ID NO: 2267763 - RNA, 19 nt, Artificial Sequence
  Description of Artificial Sequence: Synthetic oligonucleotide
gugcagaccugaauguggu

SEQ ID NO: 2267764 - RNA, 19 nt, Artificial Sequence
  Description of Artificial Sequence: Synthetic oligonucleotide
cagaguccucacagguaga

SEQ ID NO: 2267765 - RNA, 19 nt, Artificial Sequence
  Description of Artificial Sequence: Synthetic oligonucleotide
ccauaggggcauuuacaca

SEQ ID NO: 2267766 - RNA, 19 nt, Artificial Sequence
  Description of Artificial Sequence: Synthetic oligonucleotide
ggauaugggcagccaucca

SEQ ID NO: 2267767 - RNA, 19 nt, Artificial Sequence
  Description of Artificial Sequence: Synthetic oligonucleotide
gccaacuggcuuucgguua

SEQ ID NO: 2267768 - RNA, 19 nt, Artificial Sequence
  Description of Artificial Sequence: Synthetic oligonucleotide
gguugcuacuucauauacu

SEQ ID NO: 2267769 - RNA, 19 nt, Artificial Sequence
  Description of Artificial Sequence: Synthetic oligonucleotide
agccgcggcuuuaugcccu

SEQ ID NO: 2267770 - RNA, 19 nt, Artificial Sequence
  Description of Artificial Sequence: Synthetic oligonucleotide
caccuuauucauagcggau

SEQ ID NO: 2267771 - RNA, 19 nt, Artificial Sequence
  Description of Artificial Sequence: Synthetic oligonucleotide
uaugcccuucuggguaguu

SEQ ID NO: 2267772 - RNA, 19 nt, Artificial Sequence
  Description of Artificial Sequence: Synthetic oligonucleotide
gcgccaaggagaacauggc

SEQ ID NO: 2267773 - RNA, 19 nt, Artificial Sequence
  Description of Artificial Sequence: Synthetic oligonucleotide
cgcagcauacauggugugg

SEQ ID NO: 2267774 - RNA, 19 nt, Artificial Sequence
  Description of Artificial Sequence: Synthetic oligonucleotide
gcggauaugggcagccauc

SEQ ID NO: 2267775 - RNA, 19 nt, Artificial Sequence
  Description of Artificial Sequence: Synthetic oligonucleotide
uucugccucugggcuagau

SEQ ID NO: 2267776 - RNA, 19 nt, Artificial Sequence
  Description of Artificial Sequence: Synthetic oligonucleotide
cagggcggcaaggccggcc

SEQ ID NO: 2267777 - RNA, 19 nt, Artificial Sequence
  Description of Artificial Sequence: Synthetic oligonucleotide
cagguccuuugggugguuc

SEQ ID NO: 2267778 - RNA, 19 nt, Artificial Sequence
  Description of Artificial Sequence: Synthetic oligonucleotide
cguauaaaagguugcuacu

SEQ ID NO: 2267779 - RNA, 19 nt, Artificial Sequence
  Description of Artificial Sequence: Synthetic oligonucleotide
ggcaaggccggccgcccgc

SEQ ID NO: 2267780 - RNA, 19 nt, Artificial Sequence
  Description of Artificial Sequence: Synthetic oligonucleotide
ccuuugggugguucaguca

SEQ ID NO: 2267781 - RNA, 19 nt, Artificial Sequence
  Description of Artificial Sequence: Synthetic oligonucleotide
aggugggaauaaacacuau

SEQ ID NO: 2267782 - RNA, 19 nt, Artificial Sequence
  Description of Artificial Sequence: Synthetic oligonucleotide
ccuuauucauagcggauau

SEQ ID NO: 2267783 - RNA, 19 nt, Artificial Sequence
  Description of Artificial Sequence: Synthetic oligonucleotide
cagagucacgcagcauaca

SEQ ID NO: 2267784 - RNA, 19 nt, Artificial Sequence
  Description of Artificial Sequence: Synthetic oligonucleotide
cgcagcgccaaggagaaca

SEQ ID NO: 2267785 - RNA, 19 nt, Artificial Sequence
  Description of Artificial Sequence: Synthetic oligonucleotide
gaagggucuccaggaugcu

SEQ ID NO: 2267786 - RNA, 19 nt, Artificial Sequence
  Description of Artificial Sequence: Synthetic oligonucleotide
gaagcacagccgcggcuuu

SEQ ID NO: 2267787 - RNA, 19 nt, Artificial Sequence
  Description of Artificial Sequence: Synthetic oligonucleotide
cuguaagagugaagagcuu

SEQ ID NO: 2267788 - RNA, 19 nt, Artificial Sequence
  Description of Artificial Sequence: Synthetic oligonucleotide
ggcggcaaggccggccgcc

SEQ ID NO: 2267789 - RNA, 19 nt, Artificial Sequence
  Description of Artificial Sequence: Synthetic oligonucleotide
gcaaggccggccgcccgcg

SEQ ID NO: 2267790 - RNA, 19 nt, Artificial Sequence
  Description of Artificial Sequence: Synthetic oligonucleotide
cguuggguguuagauccuc

SEQ ID NO: 2267791 - RNA, 19 nt, Artificial Sequence
  Description of Artificial Sequence: Synthetic oligonucleotide
cgguuauacaucguauaaa

SEQ ID NO: 2267792 - RNA, 19 nt, Artificial Sequence
  Description of Artificial Sequence: Synthetic oligonucleotide
ccacuucuguaagagugaa

SEQ ID NO: 2267793 - RNA, 19 nt, Artificial Sequence
  Description of Artificial Sequence: Synthetic oligonucleotide
cagcaacuccaaguugcua

SEQ ID NO: 2267794 - RNA, 19 nt, Artificial Sequence
  Description of Artificial Sequence: Synthetic oligonucleotide
gcacagccgcggcuuuaug

SEQ ID NO: 2267795 - RNA, 19 nt, Artificial Sequence
  Description of Artificial Sequence: Synthetic oligonucleotide
cgcgcucgcagcgccaagg

SEQ ID NO: 2267796 - RNA, 19 nt, Artificial Sequence
  Description of Artificial Sequence: Synthetic oligonucleotide
ccuuuauuccaagcuuucu

SEQ ID NO: 2267797 - RNA, 19 nt, Artificial Sequence
  Description of Artificial Sequence: Synthetic oligonucleotide
gugcacaaauaaggcuccu

SEQ ID NO: 2267798 - RNA, 19 nt, Artificial Sequence
  Description of Artificial Sequence: Synthetic oligonucleotide
gcgcucgcagcgccaagga

SEQ ID NO: 2267799 - RNA, 19 nt, Artificial Sequence
  Description of Artificial Sequence: Synthetic oligonucleotide
caacuccaaguugcuagau

SEQ ID NO: 2267800 - RNA, 19 nt, Artificial Sequence
  Description of Artificial Sequence: Synthetic oligonucleotide
ggguuauucucaggaguau

SEQ ID NO: 2267801 - RNA, 19 nt, Artificial Sequence
  Description of Artificial Sequence: Synthetic oligonucleotide
gucacgcagcauacauggu

SEQ ID NO: 2267802 - RNA, 19 nt, Artificial Sequence
  Description of Artificial Sequence: Synthetic oligonucleotide
cgcucgcagcgccaaggag

SEQ ID NO: 2267803 - RNA, 19 nt, Artificial Sequence
  Description of Artificial Sequence: Synthetic oligonucleotide
acggaguaucuggguuauu

SEQ ID NO: 2267804 - RNA, 19 nt, Artificial Sequence
  Description of Artificial Sequence: Synthetic oligonucleotide
gcggcaaggccggccgccc

SEQ ID NO: 2267805 - RNA, 19 nt, Artificial Sequence
  Description of Artificial Sequence: Synthetic oligonucleotide
gcuuucgguuauacaucgu

SEQ ID NO: 2267806 - RNA, 19 nt, Artificial Sequence
  Description of Artificial Sequence: Synthetic oligonucleotide
cuauggccucuauccucuu

SEQ ID NO: 2267807 - RNA, 19 nt, Artificial Sequence
  Description of Artificial Sequence: Synthetic oligonucleotide
ccgcgcucgcagcgccaag

SEQ ID NO: 2267808 - RNA, 19 nt, Artificial Sequence
  Description of Artificial Sequence: Synthetic oligonucleotide
gcagaaccgcccacuccuu

SEQ ID NO: 2267809 - RNA, 19 nt, Artificial Sequence
  Description of Artificial Sequence: Synthetic oligonucleotide
cccgcgcucgcagcgccaa

SEQ ID NO: 2267810 - RNA, 19 nt, Artificial Sequence
  Description of Artificial Sequence: Synthetic oligonucleotide
ccgcggcuuuaugcccuuc

SEQ ID NO: 2267811 - RNA, 19 nt, Artificial Sequence
  Description of Artificial Sequence: Synthetic oligonucleotide
gccgcggcuuuaugcccuu

SEQ ID NO: 2267812 - RNA, 19 nt, Artificial Sequence
  Description of Artificial Sequence: Synthetic oligonucleotide
ccacuccuuggcccagguu

SEQ ID NO: 2267813 - RNA, 19 nt, Artificial Sequence
  Description of Artificial Sequence: Synthetic oligonucleotide
aagacaauugagcucaaac

SEQ ID NO: 2267814 - RNA, 19 nt, Artificial Sequence
  Description of Artificial Sequence: Synthetic oligonucleotide
agcguaguaagccagacgg

SEQ ID NO: 2267815 - RNA, 19 nt, Artificial Sequence
  Description of Artificial Sequence: Synthetic oligonucleotide
gacaauugagcucaaacag

SEQ ID NO: 2267816 - RNA, 19 nt, Artificial Sequence
  Description of Artificial Sequence: Synthetic oligonucleotide
augacgucuauccaaauac

SEQ ID NO: 2267817 - RNA, 19 nt, Artificial Sequence
  Description of Artificial Sequence: Synthetic oligonucleotide
auagaaaaggcguucguag

SEQ ID NO: 2267818 - RNA, 19 nt, Artificial Sequence
  Description of Artificial Sequence: Synthetic oligonucleotide
uagaugacaccuuugagcu

SEQ ID NO: 2267819 - RNA, 19 nt, Artificial Sequence
  Description of Artificial Sequence: Synthetic oligonucleotide
ucuauccaaauacgcaugg

SEQ ID NO: 2267820 - RNA, 19 nt, Artificial Sequence
  Description of Artificial Sequence: Synthetic oligonucleotide
caauugagcucaaacagcc

SEQ ID NO: 2267821 - RNA, 19 nt, Artificial Sequence
  Description of Artificial Sequence: Synthetic oligonucleotide
ucuggagaccgauagaccc

SEQ ID NO: 2267822 - RNA, 19 nt, Artificial Sequence
  Description of Artificial Sequence: Synthetic oligonucleotide
acaccuuugagcuuggucu

SEQ ID NO: 2267823 - RNA, 19 nt, Artificial Sequence
  Description of Artificial Sequence: Synthetic oligonucleotide
agcucaaacagccggcucc

SEQ ID NO: 2267824 - RNA, 19 nt, Artificial Sequence
  Description of Artificial Sequence: Synthetic oligonucleotide
uauccaaauacgcauggcu

SEQ ID NO: 2267825 - RNA, 19 nt, Artificial Sequence
  Description of Artificial Sequence: Synthetic oligonucleotide
gucacgaugacgucuaucc

SEQ ID NO: 2267826 - RNA, 19 nt, Artificial Sequence
  Description of Artificial Sequence: Synthetic oligonucleotide
aauacgcauggcuuccggg

SEQ ID NO: 2267827 - RNA, 19 nt, Artificial Sequence
  Description of Artificial Sequence: Synthetic oligonucleotide
agacaauugagcucaaaca

SEQ ID NO: 2267828 - RNA, 19 nt, Artificial Sequence
  Description of Artificial Sequence: Synthetic oligonucleotide
gacgcagaaggucaggcgg

SEQ ID NO: 2267829 - RNA, 19 nt, Artificial Sequence
  Description of Artificial Sequence: Synthetic oligonucleotide
auacgcauggcuuccgggc

SEQ ID NO: 2267830 - RNA, 19 nt, Artificial Sequence
  Description of Artificial Sequence: Synthetic oligonucleotide
uagaaaaggcguucguagg

SEQ ID NO: 2267831 - RNA, 19 nt, Artificial Sequence
  Description of Artificial Sequence: Synthetic oligonucleotide
uccucaauagccuggaagu

SEQ ID NO: 2267832 - RNA, 19 nt, Artificial Sequence
  Description of Artificial Sequence: Synthetic oligonucleotide
aacagcagcuuggugagcg

SEQ ID NO: 2267833 - RNA, 19 nt, Artificial Sequence
  Description of Artificial Sequence: Synthetic oligonucleotide
aaacagccggcuccguucc

SEQ ID NO: 2267834 - RNA, 19 nt, Artificial Sequence
  Description of Artificial Sequence: Synthetic oligonucleotide
acuacauguucccugaaga

SEQ ID NO: 2267835 - RNA, 19 nt, Artificial Sequence
  Description of Artificial Sequence: Synthetic oligonucleotide
gaaggcgcagcguaagugg

SEQ ID NO: 2267836 - RNA, 19 nt, Artificial Sequence
  Description of Artificial Sequence: Synthetic oligonucleotide
acaauugagcucaaacagc

SEQ ID NO: 2267837 - RNA, 19 nt, Artificial Sequence
  Description of Artificial Sequence: Synthetic oligonucleotide
uucugugugaacagcagcu

SEQ ID NO: 2267838 - RNA, 19 nt, Artificial Sequence
  Description of Artificial Sequence: Synthetic oligonucleotide
ugacgucuauccaaauacg

SEQ ID NO: 2267839 - RNA, 19 nt, Artificial Sequence
  Description of Artificial Sequence: Synthetic oligonucleotide
aaauacgcauggcuuccgg

SEQ ID NO: 2267840 - RNA, 19 nt, Artificial Sequence
  Description of Artificial Sequence: Synthetic oligonucleotide
gaugacaccuuugagcuug

SEQ ID NO: 2267841 - RNA, 19 nt, Artificial Sequence
  Description of Artificial Sequence: Synthetic oligonucleotide
ucccugaagacaauugagc

SEQ ID NO: 2267842 - RNA, 19 nt, Artificial Sequence
  Description of Artificial Sequence: Synthetic oligonucleotide
cuguggacggagaagaggc

SEQ ID NO: 2267843 - RNA, 19 nt, Artificial Sequence
  Description of Artificial Sequence: Synthetic oligonucleotide
acaauggagggacaaaggu

SEQ ID NO: 2267844 - RNA, 19 nt, Artificial Sequence
  Description of Artificial Sequence: Synthetic oligonucleotide
uggcggucaaagcagaacc

SEQ ID NO: 2267845 - RNA, 19 nt, Artificial Sequence
  Description of Artificial Sequence: Synthetic oligonucleotide
ugugugagggccugaacag

SEQ ID NO: 2267846 - RNA, 19 nt, Artificial Sequence
  Description of Artificial Sequence: Synthetic oligonucleotide
uagacuuccucaauagccu

SEQ ID NO: 2267847 - RNA, 19 nt, Artificial Sequence
  Description of Artificial Sequence: Synthetic oligonucleotide
acggagaagaggcacgagg

SEQ ID NO: 2267848 - RNA, 19 nt, Artificial Sequence
  Description of Artificial Sequence: Synthetic oligonucleotide
gugguuuucguccgcagcg

SEQ ID NO: 2267849 - RNA, 19 nt, Artificial Sequence
  Description of Artificial Sequence: Synthetic oligonucleotide
ugguagacuuccucaauag

SEQ ID NO: 2267850 - RNA, 19 nt, Artificial Sequence
  Description of Artificial Sequence: Synthetic oligonucleotide
uccuugucagcguaguaag

SEQ ID NO: 2267851 - RNA, 19 nt, Artificial Sequence
  Description of Artificial Sequence: Synthetic oligonucleotide
uguucccugaagacaauug

SEQ ID NO: 2267852 - RNA, 19 nt, Artificial Sequence
  Description of Artificial Sequence: Synthetic oligonucleotide
uugccgauugucuauuccc

SEQ ID NO: 2267853 - RNA, 19 nt, Artificial Sequence
  Description of Artificial Sequence: Synthetic oligonucleotide
agagccgaggccuccaagg

SEQ ID NO: 2267854 - RNA, 19 nt, Artificial Sequence
  Description of Artificial Sequence: Synthetic oligonucleotide
uugucuauucccagggcca

SEQ ID NO: 2267855 - RNA, 19 nt, Artificial Sequence
  Description of Artificial Sequence: Synthetic oligonucleotide
aaaaggcguucguaggucu

SEQ ID NO: 2267856 - RNA, 19 nt, Artificial Sequence
  Description of Artificial Sequence: Synthetic oligonucleotide
aauugccgauugucuauuc

SEQ ID NO: 2267857 - RNA, 19 nt, Artificial Sequence
  Description of Artificial Sequence: Synthetic oligonucleotide
uaguaagccagacggcgag

SEQ ID NO: 2267858 - RNA, 19 nt, Artificial Sequence
  Description of Artificial Sequence: Synthetic oligonucleotide
gaugcggccacccaucuuc

SEQ ID NO: 2267859 - RNA, 19 nt, Artificial Sequence
  Description of Artificial Sequence: Synthetic oligonucleotide
uuggugagcgcuuggucgg

SEQ ID NO: 2267860 - RNA, 19 nt, Artificial Sequence
  Description of Artificial Sequence: Synthetic oligonucleotide
ucaaagcagaaccagcguu

SEQ ID NO: 2267861 - RNA, 19 nt, Artificial Sequence
  Description of Artificial Sequence: Synthetic oligonucleotide
agaaaaggcguucguaggu

SEQ ID NO: 2267862 - RNA, 19 nt, Artificial Sequence
  Description of Artificial Sequence: Synthetic oligonucleotide
acccaucuucaccaggggc

SEQ ID NO: 2267863 - RNA, 19 nt, Artificial Sequence
  Description of Artificial Sequence: Synthetic oligonucleotide
uccuguucucuggagaccg

SEQ ID NO: 2267864 - RNA, 19 nt, Artificial Sequence
  Description of Artificial Sequence: Synthetic oligonucleotide
aaguccccacuacauguuc

SEQ ID NO: 2267865 - RNA, 19 nt, Artificial Sequence
  Description of Artificial Sequence: Synthetic oligonucleotide
uggacggagaagaggcacg

SEQ ID NO: 2267866 - RNA, 19 nt, Artificial Sequence
  Description of Artificial Sequence: Synthetic oligonucleotide
uccaaauacgcauggcuuc

SEQ ID NO: 2267867 - RNA, 19 nt, Artificial Sequence
  Description of Artificial Sequence: Synthetic oligonucleotide
gacgucuauccaaauacgc

SEQ ID NO: 2267868 - RNA, 19 nt, Artificial Sequence
  Description of Artificial Sequence: Synthetic oligonucleotide
uuuugaugcggccacccau

SEQ ID NO: 2267869 - RNA, 19 nt, Artificial Sequence
  Description of Artificial Sequence: Synthetic oligonucleotide
ugaauugccgauugucuau

SEQ ID NO: 2267870 - RNA, 19 nt, Artificial Sequence
  Description of Artificial Sequence: Synthetic oligonucleotide
cacauucgcaguagggucc

SEQ ID NO: 2267871 - RNA, 19 nt, Artificial Sequence
  Description of Artificial Sequence: Synthetic oligonucleotide
guggaggccacauucgcag

SEQ ID NO: 2267872 - RNA, 19 nt, Artificial Sequence
  Description of Artificial Sequence: Synthetic oligonucleotide
gguccuguacaauggaggg

SEQ ID NO: 2267873 - RNA, 19 nt, Artificial Sequence
  Description of Artificial Sequence: Synthetic oligonucleotide
uauagaaaaggcguucgua

SEQ ID NO: 2267874 - RNA, 19 nt, Artificial Sequence
  Description of Artificial Sequence: Synthetic oligonucleotide
aaguggucgugguagacuu

SEQ ID NO: 2267875 - RNA, 19 nt, Artificial Sequence
  Description of Artificial Sequence: Synthetic oligonucleotide
cuacauguucccugaagac

SEQ ID NO: 2267876 - RNA, 19 nt, Artificial Sequence
  Description of Artificial Sequence: Synthetic oligonucleotide
cagcuuuccggauuguggc

SEQ ID NO: 2267877 - RNA, 19 nt, Artificial Sequence
  Description of Artificial Sequence: Synthetic oligonucleotide
uuugaugcggccacccauc

SEQ ID NO: 2267878 - RNA, 19 nt, Artificial Sequence
  Description of Artificial Sequence: Synthetic oligonucleotide
agaaccagcguuuccgcca

SEQ ID NO: 2267879 - RNA, 19 nt, Artificial Sequence
  Description of Artificial Sequence: Synthetic oligonucleotide
ucagagaaguccccacuac

SEQ ID NO: 2267880 - RNA, 19 nt, Artificial Sequence
  Description of Artificial Sequence: Synthetic oligonucleotide
cucaauagccuggaaguag

SEQ ID NO: 2267881 - RNA, 19 nt, Artificial Sequence
  Description of Artificial Sequence: Synthetic oligonucleotide
auauagaaaaggcguucgu

SEQ ID NO: 2267882 - RNA, 19 nt, Artificial Sequence
  Description of Artificial Sequence: Synthetic oligonucleotide
ucgggcucagagaaguccc

SEQ ID NO: 2267883 - RNA, 19 nt, Artificial Sequence
  Description of Artificial Sequence: Synthetic oligonucleotide
gaugucugggugaauugcc

SEQ ID NO: 2267884 - RNA, 19 nt, Artificial Sequence
  Description of Artificial Sequence: Synthetic oligonucleotide
uuuucguccgcagcgguca

SEQ ID NO: 2267885 - RNA, 19 nt, Artificial Sequence
  Description of Artificial Sequence: Synthetic oligonucleotide
ucuugacgcagaaggucag

SEQ ID NO: 2267886 - RNA, 19 nt, Artificial Sequence
  Description of Artificial Sequence: Synthetic oligonucleotide
gauugucuauucccagggc

SEQ ID NO: 2267887 - RNA, 19 nt, Artificial Sequence
  Description of Artificial Sequence: Synthetic oligonucleotide
acuguggacggagaagagg

SEQ ID NO: 2267888 - RNA, 19 nt, Artificial Sequence
  Description of Artificial Sequence: Synthetic oligonucleotide
ugccgauugucuauuccca

SEQ ID NO: 2267889 - RNA, 19 nt, Artificial Sequence
  Description of Artificial Sequence: Synthetic oligonucleotide
uguggacgaugucugggug

SEQ ID NO: 2267890 - RNA, 19 nt, Artificial Sequence
  Description of Artificial Sequence: Synthetic oligonucleotide
auucgcaguaggguccugc

SEQ ID NO: 2267891 - RNA, 19 nt, Artificial Sequence
  Description of Artificial Sequence: Synthetic oligonucleotide
cuccguuccugugugaggg

SEQ ID NO: 2267892 - RNA, 19 nt, Artificial Sequence
  Description of Artificial Sequence: Synthetic oligonucleotide
gaccgauagaccccuucag

SEQ ID NO: 2267893 - RNA, 19 nt, Artificial Sequence
  Description of Artificial Sequence: Synthetic oligonucleotide
caccauauagaaaaggcgu

SEQ ID NO: 2267894 - RNA, 19 nt, Artificial Sequence
  Description of Artificial Sequence: Synthetic oligonucleotide
uucucaucccuucccuggc

SEQ ID NO: 2267895 - RNA, 19 nt, Artificial Sequence
  Description of Artificial Sequence: Synthetic oligonucleotide
ugaaggcgcagcguaagug

SEQ ID NO: 2267896 - RNA, 19 nt, Artificial Sequence
  Description of Artificial Sequence: Synthetic oligonucleotide
uuuccgccagguuuugaug

SEQ ID NO: 2267897 - RNA, 19 nt, Artificial Sequence
  Description of Artificial Sequence: Synthetic oligonucleotide
gacaccuuugagcuugguc

SEQ ID NO: 2267898 - RNA, 19 nt, Artificial Sequence
  Description of Artificial Sequence: Synthetic oligonucleotide
gaugacgucuauccaaaua

SEQ ID NO: 2267899 - RNA, 19 nt, Artificial Sequence
  Description of Artificial Sequence: Synthetic oligonucleotide
caaacagccggcuccguuc

SEQ ID NO: 2267900 - RNA, 19 nt, Artificial Sequence
  Description of Artificial Sequence: Synthetic oligonucleotide
ucuucucaucccuucccug

SEQ ID NO: 2267901 - RNA, 19 nt, Artificial Sequence
  Description of Artificial Sequence: Synthetic oligonucleotide
gccacaguugagcagcugg

SEQ ID NO: 2267902 - RNA, 19 nt, Artificial Sequence
  Description of Artificial Sequence: Synthetic oligonucleotide
agaccgauagaccccuuca

SEQ ID NO: 2267903 - RNA, 19 nt, Artificial Sequence
  Description of Artificial Sequence: Synthetic oligonucleotide
ugguagaaagggugucucc

SEQ ID NO: 2267904 - RNA, 19 nt, Artificial Sequence
  Description of Artificial Sequence: Synthetic oligonucleotide
uugacgcagaaggucaggc

SEQ ID NO: 2267905 - RNA, 19 nt, Artificial Sequence
  Description of Artificial Sequence: Synthetic oligonucleotide
cacuacauguucccugaag

SEQ ID NO: 2267906 - RNA, 19 nt, Artificial Sequence
  Description of Artificial Sequence: Synthetic oligonucleotide
uugcgcaagagccgaggcc

SEQ ID NO: 2267907 - RNA, 19 nt, Artificial Sequence
  Description of Artificial Sequence: Synthetic oligonucleotide
cugugugagggccugaaca

SEQ ID NO: 2267908 - RNA, 19 nt, Artificial Sequence
  Description of Artificial Sequence: Synthetic oligonucleotide
aguccccacuacauguucc

SEQ ID NO: 2267909 - RNA, 19 nt, Artificial Sequence
  Description of Artificial Sequence: Synthetic oligonucleotide
cguucguaggucuugacgc

SEQ ID NO: 2267910 - RNA, 19 nt, Artificial Sequence
  Description of Artificial Sequence: Synthetic oligonucleotide
ccgauagaccccuucaggg

SEQ ID NO: 2267911 - RNA, 19 nt, Artificial Sequence
  Description of Artificial Sequence: Synthetic oligonucleotide
cuggagaccgauagacccc

SEQ ID NO: 2267912 - RNA, 19 nt, Artificial Sequence
  Description of Artificial Sequence: Synthetic oligonucleotide
ucacgaugacgucuaucca

SEQ ID NO: 2267913 - RNA, 19 nt, Artificial Sequence
  Description of Artificial Sequence: Synthetic oligonucleotide
uaaguggucgugguagacu

SEQ ID NO: 2267914 - RNA, 19 nt, Artificial Sequence
  Description of Artificial Sequence: Synthetic oligonucleotide
cucuggagaccgauagacc

SEQ ID NO: 2267915 - RNA, 19 nt, Artificial Sequence
  Description of Artificial Sequence: Synthetic oligonucleotide
aggaguccccacugcuugc

SEQ ID NO: 2267916 - RNA, 19 nt, Artificial Sequence
  Description of Artificial Sequence: Synthetic oligonucleotide
ucuugaaggcgcagcguaa

SEQ ID NO: 2267917 - RNA, 19 nt, Artificial Sequence
  Description of Artificial Sequence: Synthetic oligonucleotide
uacgcauggcuuccgggcu

SEQ ID NO: 2267918 - RNA, 19 nt, Artificial Sequence
  Description of Artificial Sequence: Synthetic oligonucleotide
cuuggucgggcucagagaa

SEQ ID NO: 2267919 - RNA, 19 nt, Artificial Sequence
  Description of Artificial Sequence: Synthetic oligonucleotide
auuguggcccuucuggcuu

SEQ ID NO: 2267920 - RNA, 19 nt, Artificial Sequence
  Description of Artificial Sequence: Synthetic oligonucleotide
gagguggaggccacauucg

SEQ ID NO: 2267921 - RNA, 19 nt, Artificial Sequence
  Description of Artificial Sequence: Synthetic oligonucleotide
cuugcgcaagagccgaggc

SEQ ID NO: 2267922 - RNA, 19 nt, Artificial Sequence
  Description of Artificial Sequence: Synthetic oligonucleotide
gccaccauauagaaaaggc

SEQ ID NO: 2267923 - RNA, 19 nt, Artificial Sequence
  Description of Artificial Sequence: Synthetic oligonucleotide
gaaaaggcguucguagguc

SEQ ID NO: 2267924 - RNA, 19 nt, Artificial Sequence
  Description of Artificial Sequence: Synthetic oligonucleotide
ugguuuucguccgcagcgg

SEQ ID NO: 2267925 - RNA, 19 nt, Artificial Sequence
  Description of Artificial Sequence: Synthetic oligonucleotide
aguaagccagacggcgagc

SEQ ID NO: 2267926 - RNA, 19 nt, Artificial Sequence
  Description of Artificial Sequence: Synthetic oligonucleotide
ucucaucccuucccuggcc

SEQ ID NO: 2267927 - RNA, 19 nt, Artificial Sequence
  Description of Artificial Sequence: Synthetic oligonucleotide
uucgcaguaggguccugca

SEQ ID NO: 2267928 - RNA, 19 nt, Artificial Sequence
  Description of Artificial Sequence: Synthetic oligonucleotide
cugggugaauugccgauug

SEQ ID NO: 2267929 - RNA, 19 nt, Artificial Sequence
  Description of Artificial Sequence: Synthetic oligonucleotide
gguagacuuccucaauagc

SEQ ID NO: 2267930 - RNA, 19 nt, Artificial Sequence
  Description of Artificial Sequence: Synthetic oligonucleotide
cuugaaggcgcagcguaag

SEQ ID NO: 2267931 - RNA, 19 nt, Artificial Sequence
  Description of Artificial Sequence: Synthetic oligonucleotide
uguggacggagaagaggca

SEQ ID NO: 2267932 - RNA, 19 nt, Artificial Sequence
  Description of Artificial Sequence: Synthetic oligonucleotide
acacccgcaagugagggca

SEQ ID NO: 2267933 - RNA, 19 nt, Artificial Sequence
  Description of Artificial Sequence: Synthetic oligonucleotide
acgucuauccaaauacgca

SEQ ID NO: 2267934 - RNA, 19 nt, Artificial Sequence
  Description of Artificial Sequence: Synthetic oligonucleotide
cuauccaaauacgcauggc

SEQ ID NO: 2267935 - RNA, 19 nt, Artificial Sequence
  Description of Artificial Sequence: Synthetic oligonucleotide
ggcucuugaaggcgcagcg

SEQ ID NO: 2267936 - RNA, 19 nt, Artificial Sequence
  Description of Artificial Sequence: Synthetic oligonucleotide
ucgcaguaggguccugcag

SEQ ID NO: 2267937 - RNA, 19 nt, Artificial Sequence
  Description of Artificial Sequence: Synthetic oligonucleotide
uugaaggcgcagcguaagu

SEQ ID NO: 2267938 - RNA, 19 nt, Artificial Sequence
  Description of Artificial Sequence: Synthetic oligonucleotide
ggguccuguacaauggagg

SEQ ID NO: 2267939 - RNA, 19 nt, Artificial Sequence
  Description of Artificial Sequence: Synthetic oligonucleotide
ucgugguagacuuccucaa

SEQ ID NO: 2267940 - RNA, 19 nt, Artificial Sequence
  Description of Artificial Sequence: Synthetic oligonucleotide
caggaguccccacugcuug

SEQ ID NO: 2267941 - RNA, 19 nt, Artificial Sequence
  Description of Artificial Sequence: Synthetic oligonucleotide
aaggcguucguaggucuug

SEQ ID NO: 2267942 - RNA, 19 nt, Artificial Sequence
  Description of Artificial Sequence: Synthetic oligonucleotide
cacgaugacgucuauccaa

SEQ ID NO: 2267943 - RNA, 19 nt, Artificial Sequence
  Description of Artificial Sequence: Synthetic oligonucleotide
aucuucaccaggggcccgc

SEQ ID NO: 2267944 - RNA, 19 nt, Artificial Sequence
  Description of Artificial Sequence: Synthetic oligonucleotide
guggucgugguagacuucc

SEQ ID NO: 2267945 - RNA, 19 nt, Artificial Sequence
  Description of Artificial Sequence: Synthetic oligonucleotide
gcguucguaggucuugacg

SEQ ID NO: 2267946 - RNA, 19 nt, Artificial Sequence
  Description of Artificial Sequence: Synthetic oligonucleotide
ggagggacaaaggucgggg

SEQ ID NO: 2267947 - RNA, 19 nt, Artificial Sequence
  Description of Artificial Sequence: Synthetic oligonucleotide
cagcguaguaagccagacg

SEQ ID NO: 2267948 - RNA, 19 nt, Artificial Sequence
  Description of Artificial Sequence: Synthetic oligonucleotide
gcagcuuuccggauugugg

SEQ ID NO: 2267949 - RNA, 19 nt, Artificial Sequence
  Description of Artificial Sequence: Synthetic oligonucleotide
ucaaacagccggcuccguu

SEQ ID NO: 2267950 - RNA, 19 nt, Artificial Sequence
  Description of Artificial Sequence: Synthetic oligonucleotide
gauccccucuggcuggccc

SEQ ID NO: 2267951 - RNA, 19 nt, Artificial Sequence
  Description of Artificial Sequence: Synthetic oligonucleotide
ucagcguaguaagccagac

SEQ ID NO: 2267952 - RNA, 19 nt, Artificial Sequence
  Description of Artificial Sequence: Synthetic oligonucleotide
gugaauugccgauugucua

SEQ ID NO: 2267953 - RNA, 19 nt, Artificial Sequence
  Description of Artificial Sequence: Synthetic oligonucleotide
gucuugacgcagaagguca

SEQ ID NO: 2267954 - RNA, 19 nt, Artificial Sequence
  Description of Artificial Sequence: Synthetic oligonucleotide
uugaugcggccacccaucu

SEQ ID NO: 2267955 - RNA, 19 nt, Artificial Sequence
  Description of Artificial Sequence: Synthetic oligonucleotide
guccccacuacauguuccc

SEQ ID NO: 2267956 - RNA, 19 nt, Artificial Sequence
  Description of Artificial Sequence: Synthetic oligonucleotide
agcugguagaaaggguguc

SEQ ID NO: 2267957 - RNA, 19 nt, Artificial Sequence
  Description of Artificial Sequence: Synthetic oligonucleotide
uguucucuggagaccgaua

SEQ ID NO: 2267958 - RNA, 19 nt, Artificial Sequence
  Description of Artificial Sequence: Synthetic oligonucleotide
ugucuccccuccuccgggg

SEQ ID NO: 2267959 - RNA, 19 nt, Artificial Sequence
  Description of Artificial Sequence: Synthetic oligonucleotide
agccgcuccauguggacga

SEQ ID NO: 2267960 - RNA, 19 nt, Artificial Sequence
  Description of Artificial Sequence: Synthetic oligonucleotide
gagaccgauagaccccuuc

SEQ ID NO: 2267961 - RNA, 19 nt, Artificial Sequence
  Description of Artificial Sequence: Synthetic oligonucleotide
cuugagcagccuuucccuc

SEQ ID NO: 2267962 - RNA, 19 nt, Artificial Sequence
  Description of Artificial Sequence: Synthetic oligonucleotide
caaauacgcauggcuuccg

SEQ ID NO: 2267963 - RNA, 19 nt, Artificial Sequence
  Description of Artificial Sequence: Synthetic oligonucleotide
gaggccacauucgcaguag

SEQ ID NO: 2267964 - RNA, 19 nt, Artificial Sequence
  Description of Artificial Sequence: Synthetic oligonucleotide
gcguaaguggucgugguag

SEQ ID NO: 2267965 - RNA, 19 nt, Artificial Sequence
  Description of Artificial Sequence: Synthetic oligonucleotide
auccaaauacgcauggcuu

SEQ ID NO: 2267966 - RNA, 19 nt, Artificial Sequence
  Description of Artificial Sequence: Synthetic oligonucleotide
uuggucgggcucagagaag

SEQ ID NO: 2267967 - RNA, 19 nt, Artificial Sequence
  Description of Artificial Sequence: Synthetic oligonucleotide
aguagcuggcggucugucu

SEQ ID NO: 2267968 - RNA, 19 nt, Artificial Sequence
  Description of Artificial Sequence: Synthetic oligonucleotide
cuugacgcagaaggucagg

SEQ ID NO: 2267969 - RNA, 19 nt, Artificial Sequence
  Description of Artificial Sequence: Synthetic oligonucleotide
gucgggcucagagaagucc

SEQ ID NO: 2267970 - RNA, 19 nt, Artificial Sequence
  Description of Artificial Sequence: Synthetic oligonucleotide
aggccacauucgcaguagg

SEQ ID NO: 2267971 - RNA, 19 nt, Artificial Sequence
  Description of Artificial Sequence: Synthetic oligonucleotide
cgauugucuauucccaggg

SEQ ID NO: 2267972 - RNA, 19 nt, Artificial Sequence
  Description of Artificial Sequence: Synthetic oligonucleotide
uggagaccgauagaccccu

SEQ ID NO: 2267973 - RNA, 19 nt, Artificial Sequence
  Description of Artificial Sequence: Synthetic oligonucleotide
ugucuauucccagggccac

SEQ ID NO: 2267974 - RNA, 19 nt, Artificial Sequence
  Description of Artificial Sequence: Synthetic oligonucleotide
cguaguaagccagacggcg

SEQ ID NO: 2267975 - RNA, 19 nt, Artificial Sequence
  Description of Artificial Sequence: Synthetic oligonucleotide
cuuucccucucugccacag

SEQ ID NO: 2267976 - RNA, 19 nt, Artificial Sequence
  Description of Artificial Sequence: Synthetic oligonucleotide
agccuucugcaggagccgc

SEQ ID NO: 2267977 - RNA, 19 nt, Artificial Sequence
  Description of Artificial Sequence: Synthetic oligonucleotide
uccggggcaggcuuccugu

SEQ ID NO: 2267978 - RNA, 19 nt, Artificial Sequence
  Description of Artificial Sequence: Synthetic oligonucleotide
gacacccgcaagugagggc

SEQ ID NO: 2267979 - RNA, 19 nt, Artificial Sequence
  Description of Artificial Sequence: Synthetic oligonucleotide
ugagcuuggucuccuccuu

SEQ ID NO: 2267980 - RNA, 19 nt, Artificial Sequence
  Description of Artificial Sequence: Synthetic oligonucleotide
ccgauugucuauucccagg

SEQ ID NO: 2267981 - RNA, 19 nt, Artificial Sequence
  Description of Artificial Sequence: Synthetic oligonucleotide
ucacggggcgugguuuucg

SEQ ID NO: 2267982 - RNA, 19 nt, Artificial Sequence
  Description of Artificial Sequence: Synthetic oligonucleotide
acuuccucaauagccugga

SEQ ID NO: 2267983 - RNA, 19 nt, Artificial Sequence
  Description of Artificial Sequence: Synthetic oligonucleotide
guucguaggucuugacgca

SEQ ID NO: 2267984 - RNA, 19 nt, Artificial Sequence
  Description of Artificial Sequence: Synthetic oligonucleotide
ugggugaauugccgauugu

SEQ ID NO: 2267985 - RNA, 19 nt, Artificial Sequence
  Description of Artificial Sequence: Synthetic oligonucleotide
uuccuguucucuggagacc

SEQ ID NO: 2267986 - RNA, 19 nt, Artificial Sequence
  Description of Artificial Sequence: Synthetic oligonucleotide
cagagaaguccccacuaca

SEQ ID NO: 2267987 - RNA, 19 nt, Artificial Sequence
  Description of Artificial Sequence: Synthetic oligonucleotide
uccggauuguggcccuucu

SEQ ID NO: 2267988 - RNA, 19 nt, Artificial Sequence
  Description of Artificial Sequence: Synthetic oligonucleotide
agccuuucccucucugcca

SEQ ID NO: 2267989 - RNA, 19 nt, Artificial Sequence
  Description of Artificial Sequence: Synthetic oligonucleotide
accaguagcuggcggucug

SEQ ID NO: 2267990 - RNA, 19 nt, Artificial Sequence
  Description of Artificial Sequence: Synthetic oligonucleotide
aguccccacugcuugcgca

SEQ ID NO: 2267991 - RNA, 19 nt, Artificial Sequence
  Description of Artificial Sequence: Synthetic oligonucleotide
ggccaccauauagaaaagg

SEQ ID NO: 2267992 - RNA, 19 nt, Artificial Sequence
  Description of Artificial Sequence: Synthetic oligonucleotide
ggcgcagcguaaguggucg

SEQ ID NO: 2267993 - RNA, 19 nt, Artificial Sequence
  Description of Artificial Sequence: Synthetic oligonucleotide
aaggcgcagcguaaguggu

SEQ ID NO: 2267994 - RNA, 19 nt, Artificial Sequence
  Description of Artificial Sequence: Synthetic oligonucleotide
guggacgaugucuggguga

SEQ ID NO: 2267995 - RNA, 19 nt, Artificial Sequence
  Description of Artificial Sequence: Synthetic oligonucleotide
agcggucacgaugacgucu

SEQ ID NO: 2267996 - RNA, 19 nt, Artificial Sequence
  Description of Artificial Sequence: Synthetic oligonucleotide
acgcagaaggucaggcggg

SEQ ID NO: 2267997 - RNA, 19 nt, Artificial Sequence
  Description of Artificial Sequence: Synthetic oligonucleotide
aggguccuguacaauggag

SEQ ID NO: 2267998 - RNA, 19 nt, Artificial Sequence
  Description of Artificial Sequence: Synthetic oligonucleotide
guuuugaugcggccaccca

SEQ ID NO: 2267999 - RNA, 19 nt, Artificial Sequence
  Description of Artificial Sequence: Synthetic oligonucleotide
gaaccaguagcuggcgguc

SEQ ID NO: 2268000 - RNA, 19 nt, Artificial Sequence
  Description of Artificial Sequence: Synthetic oligonucleotide
guaggucuugacgcagaag

SEQ ID NO: 2268001 - RNA, 19 nt, Artificial Sequence
  Description of Artificial Sequence: Synthetic oligonucleotide
ucguccgcagcggucacga

SEQ ID NO: 2268002 - RNA, 19 nt, Artificial Sequence
  Description of Artificial Sequence: Synthetic oligonucleotide
aaccaguagcuggcggucu

SEQ ID NO: 2268003 - RNA, 19 nt, Artificial Sequence
  Description of Artificial Sequence: Synthetic oligonucleotide
cucuugaaggcgcagcgua

SEQ ID NO: 2268004 - RNA, 19 nt, Artificial Sequence
  Description of Artificial Sequence: Synthetic oligonucleotide
ugagcgcuuggucgggcuc

SEQ ID NO: 2268005 - RNA, 19 nt, Artificial Sequence
  Description of Artificial Sequence: Synthetic oligonucleotide
ccacauucgcaguaggguc

SEQ ID NO: 2268006 - RNA, 19 nt, Artificial Sequence
  Description of Artificial Sequence: Synthetic oligonucleotide
cuccuugucagcguaguaa

SEQ ID NO: 2268007 - RNA, 19 nt, Artificial Sequence
  Description of Artificial Sequence: Synthetic oligonucleotide
ccggacacccgcaagugag

SEQ ID NO: 2268008 - RNA, 19 nt, Artificial Sequence
  Description of Artificial Sequence: Synthetic oligonucleotide
guaaguggucgugguagac

SEQ ID NO: 2268009 - RNA, 19 nt, Artificial Sequence
  Description of Artificial Sequence: Synthetic oligonucleotide
ugaagacaauugagcucaa

SEQ ID NO: 2268010 - RNA, 19 nt, Artificial Sequence
  Description of Artificial Sequence: Synthetic oligonucleotide
guaguaagccagacggcga

SEQ ID NO: 2268011 - RNA, 19 nt, Artificial Sequence
  Description of Artificial Sequence: Synthetic oligonucleotide
gguuuugaugcggccaccc

SEQ ID NO: 2268012 - RNA, 19 nt, Artificial Sequence
  Description of Artificial Sequence: Synthetic oligonucleotide
ccaaauacgcauggcuucc

SEQ ID NO: 2268013 - RNA, 19 nt, Artificial Sequence
  Description of Artificial Sequence: Synthetic oligonucleotide
acgaugacgucuauccaaa

SEQ ID NO: 2268014 - RNA, 19 nt, Artificial Sequence
  Description of Artificial Sequence: Synthetic oligonucleotide
gcagcguaaguggucgugg

SEQ ID NO: 2268015 - RNA, 19 nt, Artificial Sequence
  Description of Artificial Sequence: Synthetic oligonucleotide
ucugggugaauugccgauu

SEQ ID NO: 2268016 - RNA, 19 nt, Artificial Sequence
  Description of Artificial Sequence: Synthetic oligonucleotide
ucuucaccaggggcccgcg

SEQ ID NO: 2268017 - RNA, 19 nt, Artificial Sequence
  Description of Artificial Sequence: Synthetic oligonucleotide
gccgauugucuauucccag

SEQ ID NO: 2268018 - RNA, 19 nt, Artificial Sequence
  Description of Artificial Sequence: Synthetic oligonucleotide
agccgaggccuccaagggu

SEQ ID NO: 2268019 - RNA, 19 nt, Artificial Sequence
  Description of Artificial Sequence: Synthetic oligonucleotide
ggucuugacgcagaagguc

SEQ ID NO: 2268020 - RNA, 19 nt, Artificial Sequence
  Description of Artificial Sequence: Synthetic oligonucleotide
gagcucaaacagccggcuc

SEQ ID NO: 2268021 - RNA, 19 nt, Artificial Sequence
  Description of Artificial Sequence: Synthetic oligonucleotide
ggggcgugguuuucguccg

SEQ ID NO: 2268022 - RNA, 19 nt, Artificial Sequence
  Description of Artificial Sequence: Synthetic oligonucleotide
aaccagcguuuccgccagg

SEQ ID NO: 2268023 - RNA, 19 nt, Artificial Sequence
  Description of Artificial Sequence: Synthetic oligonucleotide
ccauauagaaaaggcguuc

SEQ ID NO: 2268024 - RNA, 19 nt, Artificial Sequence
  Description of Artificial Sequence: Synthetic oligonucleotide
guuuccgccagguuuugau

SEQ ID NO: 2268025 - RNA, 19 nt, Artificial Sequence
  Description of Artificial Sequence: Synthetic oligonucleotide
ggacacccgcaagugaggg

SEQ ID NO: 2268026 - RNA, 19 nt, Artificial Sequence
  Description of Artificial Sequence: Synthetic oligonucleotide
auggagggacaaaggucgg

SEQ ID NO: 2268027 - RNA, 19 nt, Artificial Sequence
  Description of Artificial Sequence: Synthetic oligonucleotide
gacggagaagaggcacgag

SEQ ID NO: 2268028 - RNA, 19 nt, Artificial Sequence
  Description of Artificial Sequence: Synthetic oligonucleotide
accccuucagggaacugug

SEQ ID NO: 2268029 - RNA, 19 nt, Artificial Sequence
  Description of Artificial Sequence: Synthetic oligonucleotide
uggaggccacauucgcagu

SEQ ID NO: 2268030 - RNA, 19 nt, Artificial Sequence
  Description of Artificial Sequence: Synthetic oligonucleotide
gggugaauugccgauuguc

SEQ ID NO: 2268031 - RNA, 19 nt, Artificial Sequence
  Description of Artificial Sequence: Synthetic oligonucleotide
ggccacauucgcaguaggg

SEQ ID NO: 2268032 - RNA, 19 nt, Artificial Sequence
  Description of Artificial Sequence: Synthetic oligonucleotide
acauucgcaguaggguccu

SEQ ID NO: 2268033 - RNA, 19 nt, Artificial Sequence
  Description of Artificial Sequence: Synthetic oligonucleotide
agcguaaguggucguggua

SEQ ID NO: 2268034 - RNA, 19 nt, Artificial Sequence
  Description of Artificial Sequence: Synthetic oligonucleotide
acggggcgugguuuucguc

SEQ ID NO: 2268035 - RNA, 19 nt, Artificial Sequence
  Description of Artificial Sequence: Synthetic oligonucleotide
gcuuuccggauuguggccc

SEQ ID NO: 2268036 - RNA, 19 nt, Artificial Sequence
  Description of Artificial Sequence: Synthetic oligonucleotide
gaguccccacugcuugcgc

SEQ ID NO: 2268037 - RNA, 19 nt, Artificial Sequence
  Description of Artificial Sequence: Synthetic oligonucleotide
cuccuccuugucagcguag

SEQ ID NO: 2268038 - RNA, 19 nt, Artificial Sequence
  Description of Artificial Sequence: Synthetic oligonucleotide
uggugagcgcuuggucggg

SEQ ID NO: 2268039 - RNA, 19 nt, Artificial Sequence
  Description of Artificial Sequence: Synthetic oligonucleotide
aaaggcguucguaggucuu

SEQ ID NO: 2268040 - RNA, 19 nt, Artificial Sequence
  Description of Artificial Sequence: Synthetic oligonucleotide
agcuuggugagcgcuuggu

SEQ ID NO: 2268041 - RNA, 19 nt, Artificial Sequence
  Description of Artificial Sequence: Synthetic oligonucleotide
gaagacaauugagcucaaa

SEQ ID NO: 2268042 - RNA, 19 nt, Artificial Sequence
  Description of Artificial Sequence: Synthetic oligonucleotide
uagaccccuucagggaacu

SEQ ID NO: 2268043 - RNA, 19 nt, Artificial Sequence
  Description of Artificial Sequence: Synthetic oligonucleotide
acccgcaagugagggcagc

SEQ ID NO: 2268044 - RNA, 19 nt, Artificial Sequence
  Description of Artificial Sequence: Synthetic oligonucleotide
uuucguccgcagcggucac

SEQ ID NO: 2268045 - RNA, 19 nt, Artificial Sequence
  Description of Artificial Sequence: Synthetic oligonucleotide
agcguuuccgccagguuuu

SEQ ID NO: 2268046 - RNA, 19 nt, Artificial Sequence
  Description of Artificial Sequence: Synthetic oligonucleotide
uccugugugagggccugaa

SEQ ID NO: 2268047 - RNA, 19 nt, Artificial Sequence
  Description of Artificial Sequence: Synthetic oligonucleotide
aguggucgugguagacuuc

SEQ ID NO: 2268048 - RNA, 19 nt, Artificial Sequence
  Description of Artificial Sequence: Synthetic oligonucleotide
ggugaauugccgauugucu

SEQ ID NO: 2268049 - RNA, 19 nt, Artificial Sequence
  Description of Artificial Sequence: Synthetic oligonucleotide
ccuugucagcguaguaagc

SEQ ID NO: 2268050 - RNA, 19 nt, Artificial Sequence
  Description of Artificial Sequence: Synthetic oligonucleotide
uagcuggcggucugucuuc

SEQ ID NO: 2268051 - RNA, 19 nt, Artificial Sequence
  Description of Artificial Sequence: Synthetic oligonucleotide
ggaguccccacugcuugcg

SEQ ID NO: 2268052 - RNA, 19 nt, Artificial Sequence
  Description of Artificial Sequence: Synthetic oligonucleotide
gcuccguuccugugugagg

SEQ ID NO: 2268053 - RNA, 19 nt, Artificial Sequence
  Description of Artificial Sequence: Synthetic oligonucleotide
agccagacggcgagccugg

SEQ ID NO: 2268054 - RNA, 19 nt, Artificial Sequence
  Description of Artificial Sequence: Synthetic oligonucleotide
gcggccacccaucuucacc

SEQ ID NO: 2268055 - RNA, 19 nt, Artificial Sequence
  Description of Artificial Sequence: Synthetic oligonucleotide
ggucgugguagacuuccuc

SEQ ID NO: 2268056 - RNA, 19 nt, Artificial Sequence
  Description of Artificial Sequence: Synthetic oligonucleotide
gcagcggucacgaugacgu

SEQ ID NO: 2268057 - RNA, 19 nt, Artificial Sequence
  Description of Artificial Sequence: Synthetic oligonucleotide
ugagggcagcuuuccggau

SEQ ID NO: 2268058 - RNA, 19 nt, Artificial Sequence
  Description of Artificial Sequence: Synthetic oligonucleotide
aucacggggcgugguuuuc

SEQ ID NO: 2268059 - RNA, 19 nt, Artificial Sequence
  Description of Artificial Sequence: Synthetic oligonucleotide
auguucccugaagacaauu

SEQ ID NO: 2268060 - RNA, 19 nt, Artificial Sequence
  Description of Artificial Sequence: Synthetic oligonucleotide
gcuugcgcaagagccgagg

SEQ ID NO: 2268061 - RNA, 19 nt, Artificial Sequence
  Description of Artificial Sequence: Synthetic oligonucleotide
cggggcgugguuuucgucc

SEQ ID NO: 2268062 - RNA, 19 nt, Artificial Sequence
  Description of Artificial Sequence: Synthetic oligonucleotide
cggucaaagcagaaccagc

SEQ ID NO: 2268063 - RNA, 19 nt, Artificial Sequence
  Description of Artificial Sequence: Synthetic oligonucleotide
uccccacuacauguucccu

SEQ ID NO: 2268064 - RNA, 19 nt, Artificial Sequence
  Description of Artificial Sequence: Synthetic oligonucleotide
aggcgcagcguaagugguc

SEQ ID NO: 2268065 - RNA, 19 nt, Artificial Sequence
  Description of Artificial Sequence: Synthetic oligonucleotide
gggaacuguggacggagaa

SEQ ID NO: 2268066 - RNA, 19 nt, Artificial Sequence
  Description of Artificial Sequence: Synthetic oligonucleotide
cgugguuuucguccgcagc

SEQ ID NO: 2268067 - RNA, 19 nt, Artificial Sequence
  Description of Artificial Sequence: Synthetic oligonucleotide
gagcgcuuggucgggcuca

SEQ ID NO: 2268068 - RNA, 19 nt, Artificial Sequence
  Description of Artificial Sequence: Synthetic oligonucleotide
cccugaagacaauugagcu

SEQ ID NO: 2268069 - RNA, 19 nt, Artificial Sequence
  Description of Artificial Sequence: Synthetic oligonucleotide
cuccggggcaggcuuccug

SEQ ID NO: 2268070 - RNA, 19 nt, Artificial Sequence
  Description of Artificial Sequence: Synthetic oligonucleotide
agacggcgagccuggcggu

SEQ ID NO: 2268071 - RNA, 19 nt, Artificial Sequence
  Description of Artificial Sequence: Synthetic oligonucleotide
caccaggggcccgcgacag

SEQ ID NO: 2268072 - RNA, 19 nt, Artificial Sequence
  Description of Artificial Sequence: Synthetic oligonucleotide
uuccggauuguggcccuuc

SEQ ID NO: 2268073 - RNA, 19 nt, Artificial Sequence
  Description of Artificial Sequence: Synthetic oligonucleotide
gcuuggucgggcucagaga

SEQ ID NO: 2268074 - RNA, 19 nt, Artificial Sequence
  Description of Artificial Sequence: Synthetic oligonucleotide
aggcguucguaggucuuga

SEQ ID NO: 2268075 - RNA, 19 nt, Artificial Sequence
  Description of Artificial Sequence: Synthetic oligonucleotide
gaggcacgaggagguggag

SEQ ID NO: 2268076 - RNA, 19 nt, Artificial Sequence
  Description of Artificial Sequence: Synthetic oligonucleotide
gucugggugaauugccgau

SEQ ID NO: 2268077 - RNA, 19 nt, Artificial Sequence
  Description of Artificial Sequence: Synthetic oligonucleotide
gcaguaggguccugcagaa

SEQ ID NO: 2268078 - RNA, 19 nt, Artificial Sequence
  Description of Artificial Sequence: Synthetic oligonucleotide
gaauugccgauugucuauu

SEQ ID NO: 2268079 - RNA, 19 nt, Artificial Sequence
  Description of Artificial Sequence: Synthetic oligonucleotide
ugcggccacccaucuucac

SEQ ID NO: 2268080 - RNA, 19 nt, Artificial Sequence
  Description of Artificial Sequence: Synthetic oligonucleotide
cacccgcaagugagggcag

SEQ ID NO: 2268081 - RNA, 19 nt, Artificial Sequence
  Description of Artificial Sequence: Synthetic oligonucleotide
cgcuuggucgggcucagag

SEQ ID NO: 2268082 - RNA, 19 nt, Artificial Sequence
  Description of Artificial Sequence: Synthetic oligonucleotide
cagcguuuccgccagguuu

SEQ ID NO: 2268083 - RNA, 19 nt, Artificial Sequence
  Description of Artificial Sequence: Synthetic oligonucleotide
gguggaggccacauucgca

SEQ ID NO: 2268084 - RNA, 19 nt, Artificial Sequence
  Description of Artificial Sequence: Synthetic oligonucleotide
ccagacggcgagccuggcg

SEQ ID NO: 2268085 - RNA, 19 nt, Artificial Sequence
  Description of Artificial Sequence: Synthetic oligonucleotide
ggagccgcuccauguggac

SEQ ID NO: 2268086 - RNA, 19 nt, Artificial Sequence
  Description of Artificial Sequence: Synthetic oligonucleotide
gccgaggccuccaaggguc

SEQ ID NO: 2268087 - RNA, 19 nt, Artificial Sequence
  Description of Artificial Sequence: Synthetic oligonucleotide
ccccuucagggaacugugg

SEQ ID NO: 2268088 - RNA, 19 nt, Artificial Sequence
  Description of Artificial Sequence: Synthetic oligonucleotide
gggcucuugaaggcgcagc

SEQ ID NO: 2268089 - RNA, 19 nt, Artificial Sequence
  Description of Artificial Sequence: Synthetic oligonucleotide
uggcccugucuccccuccu

SEQ ID NO: 2268090 - RNA, 19 nt, Artificial Sequence
  Description of Artificial Sequence: Synthetic oligonucleotide
gaucacggggcgugguuuu

SEQ ID NO: 2268091 - RNA, 19 nt, Artificial Sequence
  Description of Artificial Sequence: Synthetic oligonucleotide
gccacauucgcaguagggu

SEQ ID NO: 2268092 - RNA, 19 nt, Artificial Sequence
  Description of Artificial Sequence: Synthetic oligonucleotide
gcguaguaagccagacggc

SEQ ID NO: 2268093 - RNA, 19 nt, Artificial Sequence
  Description of Artificial Sequence: Synthetic oligonucleotide
gagggcagcuuuccggauu

SEQ ID NO: 2268094 - RNA, 19 nt, Artificial Sequence
  Description of Artificial Sequence: Synthetic oligonucleotide
ggaggccacauucgcagua

SEQ ID NO: 2268095 - RNA, 19 nt, Artificial Sequence
  Description of Artificial Sequence: Synthetic oligonucleotide
agccggcuccguuccugug

SEQ ID NO: 2268096 - RNA, 19 nt, Artificial Sequence
  Description of Artificial Sequence: Synthetic oligonucleotide
ggacggagaagaggcacga

SEQ ID NO: 2268097 - RNA, 19 nt, Artificial Sequence
  Description of Artificial Sequence: Synthetic oligonucleotide
ggucacgaugacgucuauc

SEQ ID NO: 2268098 - RNA, 19 nt, Artificial Sequence
  Description of Artificial Sequence: Synthetic oligonucleotide
gaaguccccacuacauguu

SEQ ID NO: 2268099 - RNA, 19 nt, Artificial Sequence
  Description of Artificial Sequence: Synthetic oligonucleotide
gcccugucuccccuccucc

SEQ ID NO: 2268100 - RNA, 19 nt, Artificial Sequence
  Description of Artificial Sequence: Synthetic oligonucleotide
acggcgagccuggcgguca

SEQ ID NO: 2268101 - RNA, 19 nt, Artificial Sequence
  Description of Artificial Sequence: Synthetic oligonucleotide
caguaggguccugcagaac

SEQ ID NO: 2268102 - RNA, 19 nt, Artificial Sequence
  Description of Artificial Sequence: Synthetic oligonucleotide
gucuauucccagggccaca

SEQ ID NO: 2268103 - RNA, 19 nt, Artificial Sequence
  Description of Artificial Sequence: Synthetic oligonucleotide
cgauagaccccuucaggga

SEQ ID NO: 2268104 - RNA, 19 nt, Artificial Sequence
  Description of Artificial Sequence: Synthetic oligonucleotide
ggggcaggcuuccuguucu

SEQ ID NO: 2268105 - RNA, 19 nt, Artificial Sequence
  Description of Artificial Sequence: Synthetic oligonucleotide
gggccgaucacggggcgug

SEQ ID NO: 2268106 - RNA, 19 nt, Artificial Sequence
  Description of Artificial Sequence: Synthetic oligonucleotide
agcuggcggucugucuucu

SEQ ID NO: 2268107 - RNA, 19 nt, Artificial Sequence
  Description of Artificial Sequence: Synthetic oligonucleotide
ggcguucguaggucuugac

SEQ ID NO: 2268108 - RNA, 19 nt, Artificial Sequence
  Description of Artificial Sequence: Synthetic oligonucleotide
cagcggucacgaugacguc

SEQ ID NO: 2268109 - RNA, 19 nt, Artificial Sequence
  Description of Artificial Sequence: Synthetic oligonucleotide
cuccuccggggcaggcuuc

SEQ ID NO: 2268110 - RNA, 19 nt, Artificial Sequence
  Description of Artificial Sequence: Synthetic oligonucleotide
cagcguaaguggucguggu

SEQ ID NO: 2268111 - RNA, 19 nt, Artificial Sequence
  Description of Artificial Sequence: Synthetic oligonucleotide
cgccagguuuugaugcggc

SEQ ID NO: 2268112 - RNA, 19 nt, Artificial Sequence
  Description of Artificial Sequence: Synthetic oligonucleotide
gguuuucguccgcagcggu

SEQ ID NO: 2268113 - RNA, 19 nt, Artificial Sequence
  Description of Artificial Sequence: Synthetic oligonucleotide
augcggccacccaucuuca

SEQ ID NO: 2268114 - RNA, 19 nt, Artificial Sequence
  Description of Artificial Sequence: Synthetic oligonucleotide
gacggcgagccuggcgguc

SEQ ID NO: 2268115 - RNA, 19 nt, Artificial Sequence
  Description of Artificial Sequence: Synthetic oligonucleotide
caagagccgaggccuccaa

SEQ ID NO: 2268116 - RNA, 19 nt, Artificial Sequence
  Description of Artificial Sequence: Synthetic oligonucleotide
gugagcgcuuggucgggcu

SEQ ID NO: 2268117 - RNA, 19 nt, Artificial Sequence
  Description of Artificial Sequence: Synthetic oligonucleotide
uuuccggauuguggcccuu

SEQ ID NO: 2268118 - RNA, 19 nt, Artificial Sequence
  Description of Artificial Sequence: Synthetic oligonucleotide
ccggauuguggcccuucug

SEQ ID NO: 2268119 - RNA, 19 nt, Artificial Sequence
  Description of Artificial Sequence: Synthetic oligonucleotide
ggugagcgcuuggucgggc

SEQ ID NO: 2268120 - RNA, 19 nt, Artificial Sequence
  Description of Artificial Sequence: Synthetic oligonucleotide
ccgccagguuuugaugcgg

SEQ ID NO: 2268121 - RNA, 19 nt, Artificial Sequence
  Description of Artificial Sequence: Synthetic oligonucleotide
ggcggucugucuucugugu

SEQ ID NO: 2268122 - RNA, 19 nt, Artificial Sequence
  Description of Artificial Sequence: Synthetic oligonucleotide
ccgaggccuccaagggucc

SEQ ID NO: 2268123 - RNA, 19 nt, Artificial Sequence
  Description of Artificial Sequence: Synthetic oligonucleotide
cauucgcaguaggguccug

SEQ ID NO: 2268124 - RNA, 19 nt, Artificial Sequence
  Description of Artificial Sequence: Synthetic oligonucleotide
cguaaguggucgugguaga

SEQ ID NO: 2268125 - RNA, 19 nt, Artificial Sequence
  Description of Artificial Sequence: Synthetic oligonucleotide
cauguucccugaagacaau

SEQ ID NO: 2268126 - RNA, 19 nt, Artificial Sequence
  Description of Artificial Sequence: Synthetic oligonucleotide
gggcccgcgacagcagccc

SEQ ID NO: 2268127 - RNA, 19 nt, Artificial Sequence
  Description of Artificial Sequence: Synthetic oligonucleotide
gcacgaggagguggaggcc

SEQ ID NO: 2268128 - RNA, 19 nt, Artificial Sequence
  Description of Artificial Sequence: Synthetic oligonucleotide
cgcagcggucacgaugacg

SEQ ID NO: 2268129 - RNA, 19 nt, Artificial Sequence
  Description of Artificial Sequence: Synthetic oligonucleotide
gcuggcggucugucuucug

SEQ ID NO: 2268130 - RNA, 19 nt, Artificial Sequence
  Description of Artificial Sequence: Synthetic oligonucleotide
cuguucucuggagaccgau

SEQ ID NO: 2268131 - RNA, 19 nt, Artificial Sequence
  Description of Artificial Sequence: Synthetic oligonucleotide
gggcggggccgaucacggg

SEQ ID NO: 2268132 - RNA, 19 nt, Artificial Sequence
  Description of Artificial Sequence: Synthetic oligonucleotide
gcaagagccgaggccucca

SEQ ID NO: 2268133 - RNA, 19 nt, Artificial Sequence
  Description of Artificial Sequence: Synthetic oligonucleotide
gggcgugguuuucguccgc

SEQ ID NO: 2268134 - RNA, 19 nt, Artificial Sequence
  Description of Artificial Sequence: Synthetic oligonucleotide
ggcccgcgacagcagcccc

SEQ ID NO: 2268135 - RNA, 19 nt, Artificial Sequence
  Description of Artificial Sequence: Synthetic oligonucleotide
ccaggggcccgcgacagca

SEQ ID NO: 2268136 - RNA, 19 nt, Artificial Sequence
  Description of Artificial Sequence: Synthetic oligonucleotide
gcggucacgaugacgucua

SEQ ID NO: 2268137 - RNA, 19 nt, Artificial Sequence
  Description of Artificial Sequence: Synthetic oligonucleotide
ggccgaucacggggcgugg

SEQ ID NO: 2268138 - RNA, 19 nt, Artificial Sequence
  Description of Artificial Sequence: Synthetic oligonucleotide
cacggggcgugguuuucgu

SEQ ID NO: 2268139 - RNA, 19 nt, Artificial Sequence
  Description of Artificial Sequence: Synthetic oligonucleotide
ggccacaguugagcagcug

SEQ ID NO: 2268140 - RNA, 19 nt, Artificial Sequence
  Description of Artificial Sequence: Synthetic oligonucleotide
ccucaauagccuggaagua

SEQ ID NO: 2268141 - RNA, 19 nt, Artificial Sequence
  Description of Artificial Sequence: Synthetic oligonucleotide
ccuguucucuggagaccga

SEQ ID NO: 2268142 - RNA, 19 nt, Artificial Sequence
  Description of Artificial Sequence: Synthetic oligonucleotide
ccccggacacccgcaagug

SEQ ID NO: 2268143 - RNA, 19 nt, Artificial Sequence
  Description of Artificial Sequence: Synthetic oligonucleotide
cgcaagagccgaggccucc

SEQ ID NO: 2268144 - RNA, 19 nt, Artificial Sequence
  Description of Artificial Sequence: Synthetic oligonucleotide
ccuggcggucaaagcagaa

SEQ ID NO: 2268145 - RNA, 19 nt, Artificial Sequence
  Description of Artificial Sequence: Synthetic oligonucleotide
cccggacacccgcaaguga

SEQ ID NO: 2268146 - RNA, 19 nt, Artificial Sequence
  Description of Artificial Sequence: Synthetic oligonucleotide
gcguuuccgccagguuuug

SEQ ID NO: 2268147 - RNA, 19 nt, Artificial Sequence
  Description of Artificial Sequence: Synthetic oligonucleotide
gcucuugaaggcgcagcgu

SEQ ID NO: 2268148 - RNA, 19 nt, Artificial Sequence
  Description of Artificial Sequence: Synthetic oligonucleotide
ggauccccucuggcuggcc

SEQ ID NO: 2268149 - RNA, 19 nt, Artificial Sequence
  Description of Artificial Sequence: Synthetic oligonucleotide
cggggcaggcuuccuguuc

SEQ ID NO: 2268150 - RNA, 19 nt, Artificial Sequence
  Description of Artificial Sequence: Synthetic oligonucleotide
cucaaacagccggcuccgu

SEQ ID NO: 2268151 - RNA, 19 nt, Artificial Sequence
  Description of Artificial Sequence: Synthetic oligonucleotide
gcgcaagagccgaggccuc

SEQ ID NO: 2268152 - RNA, 19 nt, Artificial Sequence
  Description of Artificial Sequence: Synthetic oligonucleotide
cggggccgaucacggggcg

SEQ ID NO: 2268153 - RNA, 19 nt, Artificial Sequence
  Description of Artificial Sequence: Synthetic oligonucleotide
gccagacggcgagccuggc

SEQ ID NO: 2268154 - RNA, 19 nt, Artificial Sequence
  Description of Artificial Sequence: Synthetic oligonucleotide
cguuccugugugagggccu

SEQ ID NO: 2268155 - RNA, 19 nt, Artificial Sequence
  Description of Artificial Sequence: Synthetic oligonucleotide
ccuccuccggggcaggcuu

SEQ ID NO: 2268156 - RNA, 19 nt, Artificial Sequence
  Description of Artificial Sequence: Synthetic oligonucleotide
cccgcaagugagggcagcu

SEQ ID NO: 2268157 - RNA, 19 nt, Artificial Sequence
  Description of Artificial Sequence: Synthetic oligonucleotide
gcgcagcguaaguggucgu

SEQ ID NO: 2268158 - RNA, 19 nt, Artificial Sequence
  Description of Artificial Sequence: Synthetic oligonucleotide
ccgcagcggucacgaugac

SEQ ID NO: 2268159 - RNA, 19 nt, Artificial Sequence
  Description of Artificial Sequence: Synthetic oligonucleotide
gccgaucacggggcguggu

SEQ ID NO: 2268160 - RNA, 19 nt, Artificial Sequence
  Description of Artificial Sequence: Synthetic oligonucleotide
cguuuccgccagguuuuga

SEQ ID NO: 2268161 - RNA, 19 nt, Artificial Sequence
  Description of Artificial Sequence: Synthetic oligonucleotide
cgaugacgucuauccaaau

SEQ ID NO: 2268162 - RNA, 19 nt, Artificial Sequence
  Description of Artificial Sequence: Synthetic oligonucleotide
ggggccgaucacggggcgu

SEQ ID NO: 2268163 - RNA, 19 nt, Artificial Sequence
  Description of Artificial Sequence: Synthetic oligonucleotide
ccagcguuuccgccagguu

SEQ ID NO: 2268164 - RNA, 19 nt, Artificial Sequence
  Description of Artificial Sequence: Synthetic oligonucleotide
ccgaucacggggcgugguu

SEQ ID NO: 2268165 - RNA, 19 nt, Artificial Sequence
  Description of Artificial Sequence: Synthetic oligonucleotide
cgaucacggggcgugguuu

SEQ ID NO: 2268166 - RNA, 19 nt, Artificial Sequence
  Description of Artificial Sequence: Synthetic oligonucleotide
ggagaccgauagaccccuu

SEQ ID NO: 2268167 - RNA, 19 nt, Artificial Sequence
  Description of Artificial Sequence: Synthetic oligonucleotide
ccgcaagugagggcagcuu

SEQ ID NO: 2268168 - RNA, 19 nt, Artificial Sequence
  Description of Artificial Sequence: Synthetic oligonucleotide
ccggggcaggcuuccuguu

SEQ ID NO: 2268169 - RNA, 19 nt, Artificial Sequence
  Description of Artificial Sequence: Synthetic oligonucleotide
auuuucagugauucgaccc

SEQ ID NO: 2268170 - RNA, 19 nt, Artificial Sequence
  Description of Artificial Sequence: Synthetic oligonucleotide
agugauucgacccagacca

SEQ ID NO: 2268171 - RNA, 19 nt, Artificial Sequence
  Description of Artificial Sequence: Synthetic oligonucleotide
aguuaaugucucuucaugc

SEQ ID NO: 2268172 - RNA, 19 nt, Artificial Sequence
  Description of Artificial Sequence: Synthetic oligonucleotide
ugaguaagaauccaaguug

SEQ ID NO: 2268173 - RNA, 19 nt, Artificial Sequence
  Description of Artificial Sequence: Synthetic oligonucleotide
ugaugaaacaccacaauug

SEQ ID NO: 2268174 - RNA, 19 nt, Artificial Sequence
  Description of Artificial Sequence: Synthetic oligonucleotide
aaauuugacacgaugaugu

SEQ ID NO: 2268175 - RNA, 19 nt, Artificial Sequence
  Description of Artificial Sequence: Synthetic oligonucleotide
uguuauuccaaauuugaca

SEQ ID NO: 2268176 - RNA, 19 nt, Artificial Sequence
  Description of Artificial Sequence: Synthetic oligonucleotide
cuugaguagacuuugcugc

SEQ ID NO: 2268177 - RNA, 19 nt, Artificial Sequence
  Description of Artificial Sequence: Synthetic oligonucleotide
agaaggacuguucugcucc

SEQ ID NO: 2268178 - RNA, 19 nt, Artificial Sequence
  Description of Artificial Sequence: Synthetic oligonucleotide
uuauacuuagcguagggug

SEQ ID NO: 2268179 - RNA, 19 nt, Artificial Sequence
  Description of Artificial Sequence: Synthetic oligonucleotide
uuaaugucucuucaugccg

SEQ ID NO: 2268180 - RNA, 19 nt, Artificial Sequence
  Description of Artificial Sequence: Synthetic oligonucleotide
acucacauaauacacucgg

SEQ ID NO: 2268181 - RNA, 19 nt, Artificial Sequence
  Description of Artificial Sequence: Synthetic oligonucleotide
uuugacacgaugaugucug

SEQ ID NO: 2268182 - RNA, 19 nt, Artificial Sequence
  Description of Artificial Sequence: Synthetic oligonucleotide
aaaagcagaaaagggcacc

SEQ ID NO: 2268183 - RNA, 19 nt, Artificial Sequence
  Description of Artificial Sequence: Synthetic oligonucleotide
gaugaaacaccacaauugc

SEQ ID NO: 2268184 - RNA, 19 nt, Artificial Sequence
  Description of Artificial Sequence: Synthetic oligonucleotide
uucucaaacaucacucggg

SEQ ID NO: 2268185 - RNA, 19 nt, Artificial Sequence
  Description of Artificial Sequence: Synthetic oligonucleotide
aaguuugggaugcccauac

SEQ ID NO: 2268186 - RNA, 19 nt, Artificial Sequence
  Description of Artificial Sequence: Synthetic oligonucleotide
aaccacuacucccugguac

SEQ ID NO: 2268187 - RNA, 19 nt, Artificial Sequence
  Description of Artificial Sequence: Synthetic oligonucleotide
aaaacacguccccagugac

SEQ ID NO: 2268188 - RNA, 19 nt, Artificial Sequence
  Description of Artificial Sequence: Synthetic oligonucleotide
uuccauacaagaaggacug

SEQ ID NO: 2268189 - RNA, 19 nt, Artificial Sequence
  Description of Artificial Sequence: Synthetic oligonucleotide
uauacuuagcguagggugc

SEQ ID NO: 2268190 - RNA, 19 nt, Artificial Sequence
  Description of Artificial Sequence: Synthetic oligonucleotide
aaugucugcuugaugaaac

SEQ ID NO: 2268191 - RNA, 19 nt, Artificial Sequence
  Description of Artificial Sequence: Synthetic oligonucleotide
cauauaucaguguuauucc

SEQ ID NO: 2268192 - RNA, 19 nt, Artificial Sequence
  Description of Artificial Sequence: Synthetic oligonucleotide
guaaucgagagcuguaacg

SEQ ID NO: 2268193 - RNA, 19 nt, Artificial Sequence
  Description of Artificial Sequence: Synthetic oligonucleotide
cugagaaguauuuucagug

SEQ ID NO: 2268194 - RNA, 19 nt, Artificial Sequence
  Description of Artificial Sequence: Synthetic oligonucleotide
aaaggaacgucugccaugg

SEQ ID NO: 2268195 - RNA, 19 nt, Artificial Sequence
  Description of Artificial Sequence: Synthetic oligonucleotide
ugcaagguaaucgagagcu

SEQ ID NO: 2268196 - RNA, 19 nt, Artificial Sequence
  Description of Artificial Sequence: Synthetic oligonucleotide
uuugcugccaccccaaaac

SEQ ID NO: 2268197 - RNA, 19 nt, Artificial Sequence
  Description of Artificial Sequence: Synthetic oligonucleotide
uggguaauugaacucagga

SEQ ID NO: 2268198 - RNA, 19 nt, Artificial Sequence
  Description of Artificial Sequence: Synthetic oligonucleotide
ucagucaagggccucaucu

SEQ ID NO: 2268199 - RNA, 19 nt, Artificial Sequence
  Description of Artificial Sequence: Synthetic oligonucleotide
aaguauuuucagugauucg

SEQ ID NO: 2268200 - RNA, 19 nt, Artificial Sequence
  Description of Artificial Sequence: Synthetic oligonucleotide
cauacuaaguuaaugucuc

SEQ ID NO: 2268201 - RNA, 19 nt, Artificial Sequence
  Description of Artificial Sequence: Synthetic oligonucleotide
auccaaguugcauauauca

SEQ ID NO: 2268202 - RNA, 19 nt, Artificial Sequence
  Description of Artificial Sequence: Synthetic oligonucleotide
aacaaagcuaaguccucuc

SEQ ID NO: 2268203 - RNA, 19 nt, Artificial Sequence
  Description of Artificial Sequence: Synthetic oligonucleotide
aauuugacacgaugauguc

SEQ ID NO: 2268204 - RNA, 19 nt, Artificial Sequence
  Description of Artificial Sequence: Synthetic oligonucleotide
uugaguaagaauccaaguu

SEQ ID NO: 2268205 - RNA, 19 nt, Artificial Sequence
  Description of Artificial Sequence: Synthetic oligonucleotide
guuaaugucucuucaugcc

SEQ ID NO: 2268206 - RNA, 19 nt, Artificial Sequence
  Description of Artificial Sequence: Synthetic oligonucleotide
uauuccaaauuugacacga

SEQ ID NO: 2268207 - RNA, 19 nt, Artificial Sequence
  Description of Artificial Sequence: Synthetic oligonucleotide
uucgcaaucuucucaaaca

SEQ ID NO: 2268208 - RNA, 19 nt, Artificial Sequence
  Description of Artificial Sequence: Synthetic oligonucleotide
aagaauccaaguugcauau

SEQ ID NO: 2268209 - RNA, 19 nt, Artificial Sequence
  Description of Artificial Sequence: Synthetic oligonucleotide
uccaaguugcauauaucag

SEQ ID NO: 2268210 - RNA, 19 nt, Artificial Sequence
  Description of Artificial Sequence: Synthetic oligonucleotide
uuauccacacuuuauacuu

SEQ ID NO: 2268211 - RNA, 19 nt, Artificial Sequence
  Description of Artificial Sequence: Synthetic oligonucleotide
ucaguguuauuccaaauuu

SEQ ID NO: 2268212 - RNA, 19 nt, Artificial Sequence
  Description of Artificial Sequence: Synthetic oligonucleotide
uaagaauccaaguugcaua

SEQ ID NO: 2268213 - RNA, 19 nt, Artificial Sequence
  Description of Artificial Sequence: Synthetic oligonucleotide
caaguugcauauaucagug

SEQ ID NO: 2268214 - RNA, 19 nt, Artificial Sequence
  Description of Artificial Sequence: Synthetic oligonucleotide
uuuucagugauucgaccca

SEQ ID NO: 2268215 - RNA, 19 nt, Artificial Sequence
  Description of Artificial Sequence: Synthetic oligonucleotide
aaucagcaaaguuugggau

SEQ ID NO: 2268216 - RNA, 19 nt, Artificial Sequence
  Description of Artificial Sequence: Synthetic oligonucleotide
uucuguugaguaagaaucc

SEQ ID NO: 2268217 - RNA, 19 nt, Artificial Sequence
  Description of Artificial Sequence: Synthetic oligonucleotide
ugcagauucuccccgaugu

SEQ ID NO: 2268218 - RNA, 19 nt, Artificial Sequence
  Description of Artificial Sequence: Synthetic oligonucleotide
aagagcagucgccauuuuc

SEQ ID NO: 2268219 - RNA, 19 nt, Artificial Sequence
  Description of Artificial Sequence: Synthetic oligonucleotide
ugggucuugguaaacuucc

SEQ ID NO: 2268220 - RNA, 19 nt, Artificial Sequence
  Description of Artificial Sequence: Synthetic oligonucleotide
agcuguaacgugcagccgg

SEQ ID NO: 2268221 - RNA, 19 nt, Artificial Sequence
  Description of Artificial Sequence: Synthetic oligonucleotide
gauuucaacacaugauuuc

SEQ ID NO: 2268222 - RNA, 19 nt, Artificial Sequence
  Description of Artificial Sequence: Synthetic oligonucleotide
uauaucaguguuauuccaa

SEQ ID NO: 2268223 - RNA, 19 nt, Artificial Sequence
  Description of Artificial Sequence: Synthetic oligonucleotide
gaaacaguaggugccgucg

SEQ ID NO: 2268224 - RNA, 19 nt, Artificial Sequence
  Description of Artificial Sequence: Synthetic oligonucleotide
cuucaugccguacauauuc

SEQ ID NO: 2268225 - RNA, 19 nt, Artificial Sequence
  Description of Artificial Sequence: Synthetic oligonucleotide
uuauuccaaauuugacacg

SEQ ID NO: 2268226 - RNA, 19 nt, Artificial Sequence
  Description of Artificial Sequence: Synthetic oligonucleotide
cuuuauacuuagcguaggg

SEQ ID NO: 2268227 - RNA, 19 nt, Artificial Sequence
  Description of Artificial Sequence: Synthetic oligonucleotide
uugaugaaacaccacaauu

SEQ ID NO: 2268228 - RNA, 19 nt, Artificial Sequence
  Description of Artificial Sequence: Synthetic oligonucleotide
agccggaaacaguaggugc

SEQ ID NO: 2268229 - RNA, 19 nt, Artificial Sequence
  Description of Artificial Sequence: Synthetic oligonucleotide
ugagaaguauuuucaguga

SEQ ID NO: 2268230 - RNA, 19 nt, Artificial Sequence
  Description of Artificial Sequence: Synthetic oligonucleotide
aaacaguaggugccgucgg

SEQ ID NO: 2268231 - RNA, 19 nt, Artificial Sequence
  Description of Artificial Sequence: Synthetic oligonucleotide
aaagcuaaguccucucaau

SEQ ID NO: 2268232 - RNA, 19 nt, Artificial Sequence
  Description of Artificial Sequence: Synthetic oligonucleotide
ugacacuagcuuauccccg

SEQ ID NO: 2268233 - RNA, 19 nt, Artificial Sequence
  Description of Artificial Sequence: Synthetic oligonucleotide
acacuuuauacuuagcgua

SEQ ID NO: 2268234 - RNA, 19 nt, Artificial Sequence
  Description of Artificial Sequence: Synthetic oligonucleotide
uuauccccggagauguugg

SEQ ID NO: 2268235 - RNA, 19 nt, Artificial Sequence
  Description of Artificial Sequence: Synthetic oligonucleotide
uuugggaugcccauacuaa

SEQ ID NO: 2268236 - RNA, 19 nt, Artificial Sequence
  Description of Artificial Sequence: Synthetic oligonucleotide
uuucgcaaucuucucaaac

SEQ ID NO: 2268237 - RNA, 19 nt, Artificial Sequence
  Description of Artificial Sequence: Synthetic oligonucleotide
acauaauacacucggucgu

SEQ ID NO: 2268238 - RNA, 19 nt, Artificial Sequence
  Description of Artificial Sequence: Synthetic oligonucleotide
ucagcaaaguuugggaugc

SEQ ID NO: 2268239 - RNA, 19 nt, Artificial Sequence
  Description of Artificial Sequence: Synthetic oligonucleotide
uauuucgcaaucuucucaa

SEQ ID NO: 2268240 - RNA, 19 nt, Artificial Sequence
  Description of Artificial Sequence: Synthetic oligonucleotide
acccagaccagauuucaac

SEQ ID NO: 2268241 - RNA, 19 nt, Artificial Sequence
  Description of Artificial Sequence: Synthetic oligonucleotide
uauuuucagugauucgacc

SEQ ID NO: 2268242 - RNA, 19 nt, Artificial Sequence
  Description of Artificial Sequence: Synthetic oligonucleotide
ucacucacauaauacacuc

SEQ ID NO: 2268243 - RNA, 19 nt, Artificial Sequence
  Description of Artificial Sequence: Synthetic oligonucleotide
ucucaaacaucacucgggu

SEQ ID NO: 2268244 - RNA, 19 nt, Artificial Sequence
  Description of Artificial Sequence: Synthetic oligonucleotide
ugugcagccggaaacagua

SEQ ID NO: 2268245 - RNA, 19 nt, Artificial Sequence
  Description of Artificial Sequence: Synthetic oligonucleotide
uacugagaaguauuuucag

SEQ ID NO: 2268246 - RNA, 19 nt, Artificial Sequence
  Description of Artificial Sequence: Synthetic oligonucleotide
ugcagccggaaacaguagg

SEQ ID NO: 2268247 - RNA, 19 nt, Artificial Sequence
  Description of Artificial Sequence: Synthetic oligonucleotide
cuucccgcuagcuugauuc

SEQ ID NO: 2268248 - RNA, 19 nt, Artificial Sequence
  Description of Artificial Sequence: Synthetic oligonucleotide
aacaguaggugccgucggg

SEQ ID NO: 2268249 - RNA, 19 nt, Artificial Sequence
  Description of Artificial Sequence: Synthetic oligonucleotide
gacacuagcuuauccccgg

SEQ ID NO: 2268250 - RNA, 19 nt, Artificial Sequence
  Description of Artificial Sequence: Synthetic oligonucleotide
cuuagcguagggugcaagg

SEQ ID NO: 2268251 - RNA, 19 nt, Artificial Sequence
  Description of Artificial Sequence: Synthetic oligonucleotide
aucagcaaaguuugggaug

SEQ ID NO: 2268252 - RNA, 19 nt, Artificial Sequence
  Description of Artificial Sequence: Synthetic oligonucleotide
aucgagagcuguaacgugc

SEQ ID NO: 2268253 - RNA, 19 nt, Artificial Sequence
  Description of Artificial Sequence: Synthetic oligonucleotide
auacacucggucguugugc

SEQ ID NO: 2268254 - RNA, 19 nt, Artificial Sequence
  Description of Artificial Sequence: Synthetic oligonucleotide
uaaucgagagcuguaacgu

SEQ ID NO: 2268255 - RNA, 19 nt, Artificial Sequence
  Description of Artificial Sequence: Synthetic oligonucleotide
augaugucugcacacauau

SEQ ID NO: 2268256 - RNA, 19 nt, Artificial Sequence
  Description of Artificial Sequence: Synthetic oligonucleotide
caucucacucacauaauac

SEQ ID NO: 2268257 - RNA, 19 nt, Artificial Sequence
  Description of Artificial Sequence: Synthetic oligonucleotide
aaucgagagcuguaacgug

SEQ ID NO: 2268258 - RNA, 19 nt, Artificial Sequence
  Description of Artificial Sequence: Synthetic oligonucleotide
cacuuuauacuuagcguag

SEQ ID NO: 2268259 - RNA, 19 nt, Artificial Sequence
  Description of Artificial Sequence: Synthetic oligonucleotide
cauacaagaaggacuguuc

SEQ ID NO: 2268260 - RNA, 19 nt, Artificial Sequence
  Description of Artificial Sequence: Synthetic oligonucleotide
gcauauaucaguguuauuc

SEQ ID NO: 2268261 - RNA, 19 nt, Artificial Sequence
  Description of Artificial Sequence: Synthetic oligonucleotide
uuucaacacaugauuucca

SEQ ID NO: 2268262 - RNA, 19 nt, Artificial Sequence
  Description of Artificial Sequence: Synthetic oligonucleotide
aguugcauauaucaguguu

SEQ ID NO: 2268263 - RNA, 19 nt, Artificial Sequence
  Description of Artificial Sequence: Synthetic oligonucleotide
guagggugcaagguaaucg

SEQ ID NO: 2268264 - RNA, 19 nt, Artificial Sequence
  Description of Artificial Sequence: Synthetic oligonucleotide
uuuauacuuagcguagggu

SEQ ID NO: 2268265 - RNA, 19 nt, Artificial Sequence
  Description of Artificial Sequence: Synthetic oligonucleotide
gacacgaugaugucugcac

SEQ ID NO: 2268266 - RNA, 19 nt, Artificial Sequence
  Description of Artificial Sequence: Synthetic oligonucleotide
aguguuauuccaaauuuga

SEQ ID NO: 2268267 - RNA, 19 nt, Artificial Sequence
  Description of Artificial Sequence: Synthetic oligonucleotide
uaaugucucuucaugccgu

SEQ ID NO: 2268268 - RNA, 19 nt, Artificial Sequence
  Description of Artificial Sequence: Synthetic oligonucleotide
auauaucaguguuauucca

SEQ ID NO: 2268269 - RNA, 19 nt, Artificial Sequence
  Description of Artificial Sequence: Synthetic oligonucleotide
aaaacccaaaggaacgucu

SEQ ID NO: 2268270 - RNA, 19 nt, Artificial Sequence
  Description of Artificial Sequence: Synthetic oligonucleotide
agucaagggccucaucuuc

SEQ ID NO: 2268271 - RNA, 19 nt, Artificial Sequence
  Description of Artificial Sequence: Synthetic oligonucleotide
gugacacuagcuuaucccc

SEQ ID NO: 2268272 - RNA, 19 nt, Artificial Sequence
  Description of Artificial Sequence: Synthetic oligonucleotide
aggaacgucugccauggag

SEQ ID NO: 2268273 - RNA, 19 nt, Artificial Sequence
  Description of Artificial Sequence: Synthetic oligonucleotide
ugcagccggaacuuguggg

SEQ ID NO: 2268274 - RNA, 19 nt, Artificial Sequence
  Description of Artificial Sequence: Synthetic oligonucleotide
aauccaaguugcauauauc

SEQ ID NO: 2268275 - RNA, 19 nt, Artificial Sequence
  Description of Artificial Sequence: Synthetic oligonucleotide
aggaacaaagcuaaguccu

SEQ ID NO: 2268276 - RNA, 19 nt, Artificial Sequence
  Description of Artificial Sequence: Synthetic oligonucleotide
auccacacuuuauacuuag

SEQ ID NO: 2268277 - RNA, 19 nt, Artificial Sequence
  Description of Artificial Sequence: Synthetic oligonucleotide
agcuaaguccucucaauca

SEQ ID NO: 2268278 - RNA, 19 nt, Artificial Sequence
  Description of Artificial Sequence: Synthetic oligonucleotide
auggaguaaaccacuacuc

SEQ ID NO: 2268279 - RNA, 19 nt, Artificial Sequence
  Description of Artificial Sequence: Synthetic oligonucleotide
aguccucucaaucagcaaa

SEQ ID NO: 2268280 - RNA, 19 nt, Artificial Sequence
  Description of Artificial Sequence: Synthetic oligonucleotide
uaaguuaaugucucuucau

SEQ ID NO: 2268281 - RNA, 19 nt, Artificial Sequence
  Description of Artificial Sequence: Synthetic oligonucleotide
gguacugagaaguauuuuc

SEQ ID NO: 2268282 - RNA, 19 nt, Artificial Sequence
  Description of Artificial Sequence: Synthetic oligonucleotide
uugggaugcccauacuaag

SEQ ID NO: 2268283 - RNA, 19 nt, Artificial Sequence
  Description of Artificial Sequence: Synthetic oligonucleotide
acccaaaggaacgucugcc

SEQ ID NO: 2268284 - RNA, 19 nt, Artificial Sequence
  Description of Artificial Sequence: Synthetic oligonucleotide
ggugcaagguaaucgagag

SEQ ID NO: 2268285 - RNA, 19 nt, Artificial Sequence
  Description of Artificial Sequence: Synthetic oligonucleotide
agcaaaguuugggaugccc

SEQ ID NO: 2268286 - RNA, 19 nt, Artificial Sequence
  Description of Artificial Sequence: Synthetic oligonucleotide
ucagugauucgacccagac

SEQ ID NO: 2268287 - RNA, 19 nt, Artificial Sequence
  Description of Artificial Sequence: Synthetic oligonucleotide
uugaguagacuuugcugcc

SEQ ID NO: 2268288 - RNA, 19 nt, Artificial Sequence
  Description of Artificial Sequence: Synthetic oligonucleotide
uccccggagauguuggcgg

SEQ ID NO: 2268289 - RNA, 19 nt, Artificial Sequence
  Description of Artificial Sequence: Synthetic oligonucleotide
acauauaggaacaaagcua

SEQ ID NO: 2268290 - RNA, 19 nt, Artificial Sequence
  Description of Artificial Sequence: Synthetic oligonucleotide
ccacacuuuauacuuagcg

SEQ ID NO: 2268291 - RNA, 19 nt, Artificial Sequence
  Description of Artificial Sequence: Synthetic oligonucleotide
uagggugcaagguaaucga

SEQ ID NO: 2268292 - RNA, 19 nt, Artificial Sequence
  Description of Artificial Sequence: Synthetic oligonucleotide
caugauuuccauacaagaa

SEQ ID NO: 2268293 - RNA, 19 nt, Artificial Sequence
  Description of Artificial Sequence: Synthetic oligonucleotide
uucgacccagaccagauuu

SEQ ID NO: 2268294 - RNA, 19 nt, Artificial Sequence
  Description of Artificial Sequence: Synthetic oligonucleotide
ucugcagucuugaguagac

SEQ ID NO: 2268295 - RNA, 19 nt, Artificial Sequence
  Description of Artificial Sequence: Synthetic oligonucleotide
aguagacuuugcugccacc

SEQ ID NO: 2268296 - RNA, 19 nt, Artificial Sequence
  Description of Artificial Sequence: Synthetic oligonucleotide
accacaauugccauggggu

SEQ ID NO: 2268297 - RNA, 19 nt, Artificial Sequence
  Description of Artificial Sequence: Synthetic oligonucleotide
uugcguggguaauugaacu

SEQ ID NO: 2268298 - RNA, 19 nt, Artificial Sequence
  Description of Artificial Sequence: Synthetic oligonucleotide
uucaacacaugauuuccau

SEQ ID NO: 2268299 - RNA, 19 nt, Artificial Sequence
  Description of Artificial Sequence: Synthetic oligonucleotide
uguauuucgcaaucuucuc

SEQ ID NO: 2268300 - RNA, 19 nt, Artificial Sequence
  Description of Artificial Sequence: Synthetic oligonucleotide
cuaaguuaaugucucuuca

SEQ ID NO: 2268301 - RNA, 19 nt, Artificial Sequence
  Description of Artificial Sequence: Synthetic oligonucleotide
ucccaaaacacguccccag

SEQ ID NO: 2268302 - RNA, 19 nt, Artificial Sequence
  Description of Artificial Sequence: Synthetic oligonucleotide
caaauuugacacgaugaug

SEQ ID NO: 2268303 - RNA, 19 nt, Artificial Sequence
  Description of Artificial Sequence: Synthetic oligonucleotide
acuagcuuauccccggaga

SEQ ID NO: 2268304 - RNA, 19 nt, Artificial Sequence
  Description of Artificial Sequence: Synthetic oligonucleotide
caguguuauuccaaauuug

SEQ ID NO: 2268305 - RNA, 19 nt, Artificial Sequence
  Description of Artificial Sequence: Synthetic oligonucleotide
uguaacgugcagccggaac

SEQ ID NO: 2268306 - RNA, 19 nt, Artificial Sequence
  Description of Artificial Sequence: Synthetic oligonucleotide
acuuuauacuuagcguagg

SEQ ID NO: 2268307 - RNA, 19 nt, Artificial Sequence
  Description of Artificial Sequence: Synthetic oligonucleotide
ucguugugcagccggaaac

SEQ ID NO: 2268308 - RNA, 19 nt, Artificial Sequence
  Description of Artificial Sequence: Synthetic oligonucleotide
uugcauauaucaguguuau

SEQ ID NO: 2268309 - RNA, 19 nt, Artificial Sequence
  Description of Artificial Sequence: Synthetic oligonucleotide
ucgcaaucuucucaaacau

SEQ ID NO: 2268310 - RNA, 19 nt, Artificial Sequence
  Description of Artificial Sequence: Synthetic oligonucleotide
acaaagcuaaguccucuca

SEQ ID NO: 2268311 - RNA, 19 nt, Artificial Sequence
  Description of Artificial Sequence: Synthetic oligonucleotide
aaguugcauauaucagugu

SEQ ID NO: 2268312 - RNA, 19 nt, Artificial Sequence
  Description of Artificial Sequence: Synthetic oligonucleotide
aaacuucccaaaacacguc

SEQ ID NO: 2268313 - RNA, 19 nt, Artificial Sequence
  Description of Artificial Sequence: Synthetic oligonucleotide
ugggaugcccauacuaagu

SEQ ID NO: 2268314 - RNA, 19 nt, Artificial Sequence
  Description of Artificial Sequence: Synthetic oligonucleotide
guauuucgcaaucuucuca

SEQ ID NO: 2268315 - RNA, 19 nt, Artificial Sequence
  Description of Artificial Sequence: Synthetic oligonucleotide
cccaaaacccaaaggaacg

SEQ ID NO: 2268316 - RNA, 19 nt, Artificial Sequence
  Description of Artificial Sequence: Synthetic oligonucleotide
cacucacauaauacacucg

SEQ ID NO: 2268317 - RNA, 19 nt, Artificial Sequence
  Description of Artificial Sequence: Synthetic oligonucleotide
aaacccaaaggaacgucug

SEQ ID NO: 2268318 - RNA, 19 nt, Artificial Sequence
  Description of Artificial Sequence: Synthetic oligonucleotide
ugcugccaccccaaaaccc

SEQ ID NO: 2268319 - RNA, 19 nt, Artificial Sequence
  Description of Artificial Sequence: Synthetic oligonucleotide
guagacuuugcugccaccc

SEQ ID NO: 2268320 - RNA, 19 nt, Artificial Sequence
  Description of Artificial Sequence: Synthetic oligonucleotide
uaauacacucggucguugu

SEQ ID NO: 2268321 - RNA, 19 nt, Artificial Sequence
  Description of Artificial Sequence: Synthetic oligonucleotide
acucggucguugugcagcc

SEQ ID NO: 2268322 - RNA, 19 nt, Artificial Sequence
  Description of Artificial Sequence: Synthetic oligonucleotide
aguaaaccacuacucccug

SEQ ID NO: 2268323 - RNA, 19 nt, Artificial Sequence
  Description of Artificial Sequence: Synthetic oligonucleotide
gaauccaaguugcauauau

SEQ ID NO: 2268324 - RNA, 19 nt, Artificial Sequence
  Description of Artificial Sequence: Synthetic oligonucleotide
auuugacacgaugaugucu

SEQ ID NO: 2268325 - RNA, 19 nt, Artificial Sequence
  Description of Artificial Sequence: Synthetic oligonucleotide
cacauauaggaacaaagcu

SEQ ID NO: 2268326 - RNA, 19 nt, Artificial Sequence
  Description of Artificial Sequence: Synthetic oligonucleotide
caccacaauugccaugggg

SEQ ID NO: 2268327 - RNA, 19 nt, Artificial Sequence
  Description of Artificial Sequence: Synthetic oligonucleotide
uucuccaaugucugcuuga

SEQ ID NO: 2268328 - RNA, 19 nt, Artificial Sequence
  Description of Artificial Sequence: Synthetic oligonucleotide
gaugcccauacuaaguuaa

SEQ ID NO: 2268329 - RNA, 19 nt, Artificial Sequence
  Description of Artificial Sequence: Synthetic oligonucleotide
agcuuauccccggagaugu

SEQ ID NO: 2268330 - RNA, 19 nt, Artificial Sequence
  Description of Artificial Sequence: Synthetic oligonucleotide
cacgaugaugucugcacac

SEQ ID NO: 2268331 - RNA, 19 nt, Artificial Sequence
  Description of Artificial Sequence: Synthetic oligonucleotide
cagugauucgacccagacc

SEQ ID NO: 2268332 - RNA, 19 nt, Artificial Sequence
  Description of Artificial Sequence: Synthetic oligonucleotide
ucgagagcuguaacgugca

SEQ ID NO: 2268333 - RNA, 19 nt, Artificial Sequence
  Description of Artificial Sequence: Synthetic oligonucleotide
caugggguccacuuuucug

SEQ ID NO: 2268334 - RNA, 19 nt, Artificial Sequence
  Description of Artificial Sequence: Synthetic oligonucleotide
ugcccauacuaaguuaaug

SEQ ID NO: 2268335 - RNA, 19 nt, Artificial Sequence
  Description of Artificial Sequence: Synthetic oligonucleotide
uuagcguagggugcaaggu

SEQ ID NO: 2268336 - RNA, 19 nt, Artificial Sequence
  Description of Artificial Sequence: Synthetic oligonucleotide
accacuacucccugguacu

SEQ ID NO: 2268337 - RNA, 19 nt, Artificial Sequence
  Description of Artificial Sequence: Synthetic oligonucleotide
guacugagaaguauuuuca

SEQ ID NO: 2268338 - RNA, 19 nt, Artificial Sequence
  Description of Artificial Sequence: Synthetic oligonucleotide
uaucaguguuauuccaaau

SEQ ID NO: 2268339 - RNA, 19 nt, Artificial Sequence
  Description of Artificial Sequence: Synthetic oligonucleotide
auacuaaguuaaugucucu

SEQ ID NO: 2268340 - RNA, 19 nt, Artificial Sequence
  Description of Artificial Sequence: Synthetic oligonucleotide
uacacucggucguugugca

SEQ ID NO: 2268341 - RNA, 19 nt, Artificial Sequence
  Description of Artificial Sequence: Synthetic oligonucleotide
uacuaaguuaaugucucuu

SEQ ID NO: 2268342 - RNA, 19 nt, Artificial Sequence
  Description of Artificial Sequence: Synthetic oligonucleotide
gaguagacuuugcugccac

SEQ ID NO: 2268343 - RNA, 19 nt, Artificial Sequence
  Description of Artificial Sequence: Synthetic oligonucleotide
cacaauugccauggggucc

SEQ ID NO: 2268344 - RNA, 19 nt, Artificial Sequence
  Description of Artificial Sequence: Synthetic oligonucleotide
agacuuugcugccacccca

SEQ ID NO: 2268345 - RNA, 19 nt, Artificial Sequence
  Description of Artificial Sequence: Synthetic oligonucleotide
guugaguaagaauccaagu

SEQ ID NO: 2268346 - RNA, 19 nt, Artificial Sequence
  Description of Artificial Sequence: Synthetic oligonucleotide
uccccagugacacuagcuu

SEQ ID NO: 2268347 - RNA, 19 nt, Artificial Sequence
  Description of Artificial Sequence: Synthetic oligonucleotide
uccccgauguauuucgcaa

SEQ ID NO: 2268348 - RNA, 19 nt, Artificial Sequence
  Description of Artificial Sequence: Synthetic oligonucleotide
ugugggucuugguaaacuu

SEQ ID NO: 2268349 - RNA, 19 nt, Artificial Sequence
  Description of Artificial Sequence: Synthetic oligonucleotide
ucgggucuccucuucaguc

SEQ ID NO: 2268350 - RNA, 19 nt, Artificial Sequence
  Description of Artificial Sequence: Synthetic oligonucleotide
ucaugccguacauauucuc

SEQ ID NO: 2268351 - RNA, 19 nt, Artificial Sequence
  Description of Artificial Sequence: Synthetic oligonucleotide
caaaacacguccccaguga

SEQ ID NO: 2268352 - RNA, 19 nt, Artificial Sequence
  Description of Artificial Sequence: Synthetic oligonucleotide
auaauacacucggucguug

SEQ ID NO: 2268353 - RNA, 19 nt, Artificial Sequence
  Description of Artificial Sequence: Synthetic oligonucleotide
cuuauccccggagauguug

SEQ ID NO: 2268354 - RNA, 19 nt, Artificial Sequence
  Description of Artificial Sequence: Synthetic oligonucleotide
ugcguggguaauugaacuc

SEQ ID NO: 2268355 - RNA, 19 nt, Artificial Sequence
  Description of Artificial Sequence: Synthetic oligonucleotide
gucgccauuuucuguugag

SEQ ID NO: 2268356 - RNA, 19 nt, Artificial Sequence
  Description of Artificial Sequence: Synthetic oligonucleotide
ugauucgacccagaccaga

SEQ ID NO: 2268357 - RNA, 19 nt, Artificial Sequence
  Description of Artificial Sequence: Synthetic oligonucleotide
cacacuuuauacuuagcgu

SEQ ID NO: 2268358 - RNA, 19 nt, Artificial Sequence
  Description of Artificial Sequence: Synthetic oligonucleotide
cacucggucguugugcagc

SEQ ID NO: 2268359 - RNA, 19 nt, Artificial Sequence
  Description of Artificial Sequence: Synthetic oligonucleotide
uagcguagggugcaaggua

SEQ ID NO: 2268360 - RNA, 19 nt, Artificial Sequence
  Description of Artificial Sequence: Synthetic oligonucleotide
acaauugccauggggucca

SEQ ID NO: 2268361 - RNA, 19 nt, Artificial Sequence
  Description of Artificial Sequence: Synthetic oligonucleotide
ugaguagacuuugcugcca

SEQ ID NO: 2268362 - RNA, 19 nt, Artificial Sequence
  Description of Artificial Sequence: Synthetic oligonucleotide
guugcguggguaauugaac

SEQ ID NO: 2268363 - RNA, 19 nt, Artificial Sequence
  Description of Artificial Sequence: Synthetic oligonucleotide
aaaguuugggaugcccaua

SEQ ID NO: 2268364 - RNA, 19 nt, Artificial Sequence
  Description of Artificial Sequence: Synthetic oligonucleotide
aaguccucucaaucagcaa

SEQ ID NO: 2268365 - RNA, 19 nt, Artificial Sequence
  Description of Artificial Sequence: Synthetic oligonucleotide
auuuucuguugaguaagaa

SEQ ID NO: 2268366 - RNA, 19 nt, Artificial Sequence
  Description of Artificial Sequence: Synthetic oligonucleotide
aaacacguccccagugaca

SEQ ID NO: 2268367 - RNA, 19 nt, Artificial Sequence
  Description of Artificial Sequence: Synthetic oligonucleotide
auacuuagcguagggugca

SEQ ID NO: 2268368 - RNA, 19 nt, Artificial Sequence
  Description of Artificial Sequence: Synthetic oligonucleotide
agcagucgccauuuucugu

SEQ ID NO: 2268369 - RNA, 19 nt, Artificial Sequence
  Description of Artificial Sequence: Synthetic oligonucleotide
ugacacgaugaugucugca

SEQ ID NO: 2268370 - RNA, 19 nt, Artificial Sequence
  Description of Artificial Sequence: Synthetic oligonucleotide
gguaaucgagagcuguaac

SEQ ID NO: 2268371 - RNA, 19 nt, Artificial Sequence
  Description of Artificial Sequence: Synthetic oligonucleotide
aguaagaauccaaguugca

SEQ ID NO: 2268372 - RNA, 19 nt, Artificial Sequence
  Description of Artificial Sequence: Synthetic oligonucleotide
cagaccagauuucaacaca

SEQ ID NO: 2268373 - RNA, 19 nt, Artificial Sequence
  Description of Artificial Sequence: Synthetic oligonucleotide
cccauacuaaguuaauguc

SEQ ID NO: 2268374 - RNA, 19 nt, Artificial Sequence
  Description of Artificial Sequence: Synthetic oligonucleotide
uucccgcuagcuugauucc

SEQ ID NO: 2268375 - RNA, 19 nt, Artificial Sequence
  Description of Artificial Sequence: Synthetic oligonucleotide
cucuucaugccguacauau

SEQ ID NO: 2268376 - RNA, 19 nt, Artificial Sequence
  Description of Artificial Sequence: Synthetic oligonucleotide
cucaaacaucacucggguc

SEQ ID NO: 2268377 - RNA, 19 nt, Artificial Sequence
  Description of Artificial Sequence: Synthetic oligonucleotide
cagauuucaacacaugauu

SEQ ID NO: 2268378 - RNA, 19 nt, Artificial Sequence
  Description of Artificial Sequence: Synthetic oligonucleotide
gucaagggccucaucuucc

SEQ ID NO: 2268379 - RNA, 19 nt, Artificial Sequence
  Description of Artificial Sequence: Synthetic oligonucleotide
caaagcuaaguccucucaa

SEQ ID NO: 2268380 - RNA, 19 nt, Artificial Sequence
  Description of Artificial Sequence: Synthetic oligonucleotide
caaaacccaaaggaacguc

SEQ ID NO: 2268381 - RNA, 19 nt, Artificial Sequence
  Description of Artificial Sequence: Synthetic oligonucleotide
guggguaauugaacucagg

SEQ ID NO: 2268382 - RNA, 19 nt, Artificial Sequence
  Description of Artificial Sequence: Synthetic oligonucleotide
uugacacgaugaugucugc

SEQ ID NO: 2268383 - RNA, 19 nt, Artificial Sequence
  Description of Artificial Sequence: Synthetic oligonucleotide
cauuuucuguugaguaaga

SEQ ID NO: 2268384 - RNA, 19 nt, Artificial Sequence
  Description of Artificial Sequence: Synthetic oligonucleotide
guuggcggccagcuucagg

SEQ ID NO: 2268385 - RNA, 19 nt, Artificial Sequence
  Description of Artificial Sequence: Synthetic oligonucleotide
auauaggaacaaagcuaag

SEQ ID NO: 2268386 - RNA, 19 nt, Artificial Sequence
  Description of Artificial Sequence: Synthetic oligonucleotide
cacuagcuuauccccggag

SEQ ID NO: 2268387 - RNA, 19 nt, Artificial Sequence
  Description of Artificial Sequence: Synthetic oligonucleotide
aaaccacuacucccuggua

SEQ ID NO: 2268388 - RNA, 19 nt, Artificial Sequence
  Description of Artificial Sequence: Synthetic oligonucleotide
ucuccccgauguauuucgc

SEQ ID NO: 2268389 - RNA, 19 nt, Artificial Sequence
  Description of Artificial Sequence: Synthetic oligonucleotide
ucgacccagaccagauuuc

SEQ ID NO: 2268390 - RNA, 19 nt, Artificial Sequence
  Description of Artificial Sequence: Synthetic oligonucleotide
gugcaagguaaucgagagc

SEQ ID NO: 2268391 - RNA, 19 nt, Artificial Sequence
  Description of Artificial Sequence: Synthetic oligonucleotide
auccccggagauguuggcg

SEQ ID NO: 2268392 - RNA, 19 nt, Artificial Sequence
  Description of Artificial Sequence: Synthetic oligonucleotide
gugguugcguggguaauug

SEQ ID NO: 2268393 - RNA, 19 nt, Artificial Sequence
  Description of Artificial Sequence: Synthetic oligonucleotide
guugcauauaucaguguua

SEQ ID NO: 2268394 - RNA, 19 nt, Artificial Sequence
  Description of Artificial Sequence: Synthetic oligonucleotide
ccguacauauucuccaaug

SEQ ID NO: 2268395 - RNA, 19 nt, Artificial Sequence
  Description of Artificial Sequence: Synthetic oligonucleotide
ucgccauuuucuguugagu

SEQ ID NO: 2268396 - RNA, 19 nt, Artificial Sequence
  Description of Artificial Sequence: Synthetic oligonucleotide
aaggacuguucugcuccag

SEQ ID NO: 2268397 - RNA, 19 nt, Artificial Sequence
  Description of Artificial Sequence: Synthetic oligonucleotide
aagguaaucgagagcugua

SEQ ID NO: 2268398 - RNA, 19 nt, Artificial Sequence
  Description of Artificial Sequence: Synthetic oligonucleotide
ugaugucugcacacauaua

SEQ ID NO: 2268399 - RNA, 19 nt, Artificial Sequence
  Description of Artificial Sequence: Synthetic oligonucleotide
acgucugccauggaguaaa

SEQ ID NO: 2268400 - RNA, 19 nt, Artificial Sequence
  Description of Artificial Sequence: Synthetic oligonucleotide
gaacgucugccauggagua

SEQ ID NO: 2268401 - RNA, 19 nt, Artificial Sequence
  Description of Artificial Sequence: Synthetic oligonucleotide
uauccccggagauguuggc

SEQ ID NO: 2268402 - RNA, 19 nt, Artificial Sequence
  Description of Artificial Sequence: Synthetic oligonucleotide
agucgccauuuucuguuga

SEQ ID NO: 2268403 - RNA, 19 nt, Artificial Sequence
  Description of Artificial Sequence: Synthetic oligonucleotide
ugcacacauauaggaacaa

SEQ ID NO: 2268404 - RNA, 19 nt, Artificial Sequence
  Description of Artificial Sequence: Synthetic oligonucleotide
agguaaucgagagcuguaa

SEQ ID NO: 2268405 - RNA, 19 nt, Artificial Sequence
  Description of Artificial Sequence: Synthetic oligonucleotide
auuucgcaaucuucucaaa

SEQ ID NO: 2268406 - RNA, 19 nt, Artificial Sequence
  Description of Artificial Sequence: Synthetic oligonucleotide
ccagaccagauuucaacac

SEQ ID NO: 2268407 - RNA, 19 nt, Artificial Sequence
  Description of Artificial Sequence: Synthetic oligonucleotide
gaaggacuguucugcucca

SEQ ID NO: 2268408 - RNA, 19 nt, Artificial Sequence
  Description of Artificial Sequence: Synthetic oligonucleotide
acuuagcguagggugcaag

SEQ ID NO: 2268409 - RNA, 19 nt, Artificial Sequence
  Description of Artificial Sequence: Synthetic oligonucleotide
guaagaauccaaguugcau

SEQ ID NO: 2268410 - RNA, 19 nt, Artificial Sequence
  Description of Artificial Sequence: Synthetic oligonucleotide
gcccauacuaaguuaaugu

SEQ ID NO: 2268411 - RNA, 19 nt, Artificial Sequence
  Description of Artificial Sequence: Synthetic oligonucleotide
acgaugaugucugcacaca

SEQ ID NO: 2268412 - RNA, 19 nt, Artificial Sequence
  Description of Artificial Sequence: Synthetic oligonucleotide
caagggccucaucuucccg

SEQ ID NO: 2268413 - RNA, 19 nt, Artificial Sequence
  Description of Artificial Sequence: Synthetic oligonucleotide
ggucuugguaaacuuccca

SEQ ID NO: 2268414 - RNA, 19 nt, Artificial Sequence
  Description of Artificial Sequence: Synthetic oligonucleotide
caugugguugcguggguaa

SEQ ID NO: 2268415 - RNA, 19 nt, Artificial Sequence
  Description of Artificial Sequence: Synthetic oligonucleotide
cuugaugaaacaccacaau

SEQ ID NO: 2268416 - RNA, 19 nt, Artificial Sequence
  Description of Artificial Sequence: Synthetic oligonucleotide
ggccucaucuucccgcuag

SEQ ID NO: 2268417 - RNA, 19 nt, Artificial Sequence
  Description of Artificial Sequence: Synthetic oligonucleotide
aacgugcagccggaacuug

SEQ ID NO: 2268418 - RNA, 19 nt, Artificial Sequence
  Description of Artificial Sequence: Synthetic oligonucleotide
agcguagggugcaagguaa

SEQ ID NO: 2268419 - RNA, 19 nt, Artificial Sequence
  Description of Artificial Sequence: Synthetic oligonucleotide
gagcuguaacgugcagccg

SEQ ID NO: 2268420 - RNA, 19 nt, Artificial Sequence
  Description of Artificial Sequence: Synthetic oligonucleotide
agccggaacuugugggucu

SEQ ID NO: 2268421 - RNA, 19 nt, Artificial Sequence
  Description of Artificial Sequence: Synthetic oligonucleotide
ucccgcuagcuugauuccc

SEQ ID NO: 2268422 - RNA, 19 nt, Artificial Sequence
  Description of Artificial Sequence: Synthetic oligonucleotide
gucgggccuguccaccagg

SEQ ID NO: 2268423 - RNA, 19 nt, Artificial Sequence
  Description of Artificial Sequence: Synthetic oligonucleotide
ugguugcguggguaauuga

SEQ ID NO: 2268424 - RNA, 19 nt, Artificial Sequence
  Description of Artificial Sequence: Synthetic oligonucleotide
uucagucaagggccucauc

SEQ ID NO: 2268425 - RNA, 19 nt, Artificial Sequence
  Description of Artificial Sequence: Synthetic oligonucleotide
cacuuuucugcagucuuga

SEQ ID NO: 2268426 - RNA, 19 nt, Artificial Sequence
  Description of Artificial Sequence: Synthetic oligonucleotide
cugcagauucuccccgaug

SEQ ID NO: 2268427 - RNA, 19 nt, Artificial Sequence
  Description of Artificial Sequence: Synthetic oligonucleotide
aauugccaugggguccacu

SEQ ID NO: 2268428 - RNA, 19 nt, Artificial Sequence
  Description of Artificial Sequence: Synthetic oligonucleotide
ccauacuaaguuaaugucu

SEQ ID NO: 2268429 - RNA, 19 nt, Artificial Sequence
  Description of Artificial Sequence: Synthetic oligonucleotide
cagccggaaacaguaggug

SEQ ID NO: 2268430 - RNA, 19 nt, Artificial Sequence
  Description of Artificial Sequence: Synthetic oligonucleotide
uaacgugcagccggaacuu

SEQ ID NO: 2268431 - RNA, 19 nt, Artificial Sequence
  Description of Artificial Sequence: Synthetic oligonucleotide
acacuagcuuauccccgga

SEQ ID NO: 2268432 - RNA, 19 nt, Artificial Sequence
  Description of Artificial Sequence: Synthetic oligonucleotide
ggaaacaguaggugccguc

SEQ ID NO: 2268433 - RNA, 19 nt, Artificial Sequence
  Description of Artificial Sequence: Synthetic oligonucleotide
ugugguugcguggguaauu

SEQ ID NO: 2268434 - RNA, 19 nt, Artificial Sequence
  Description of Artificial Sequence: Synthetic oligonucleotide
ccaaguugcauauaucagu

SEQ ID NO: 2268435 - RNA, 19 nt, Artificial Sequence
  Description of Artificial Sequence: Synthetic oligonucleotide
cuugugggucuugguaaac

SEQ ID NO: 2268436 - RNA, 19 nt, Artificial Sequence
  Description of Artificial Sequence: Synthetic oligonucleotide
cccgcuagcuugauucccg

SEQ ID NO: 2268437 - RNA, 19 nt, Artificial Sequence
  Description of Artificial Sequence: Synthetic oligonucleotide
gcaaaguuugggaugccca

SEQ ID NO: 2268438 - RNA, 19 nt, Artificial Sequence
  Description of Artificial Sequence: Synthetic oligonucleotide
uccauacaagaaggacugu

SEQ ID NO: 2268439 - RNA, 19 nt, Artificial Sequence
  Description of Artificial Sequence: Synthetic oligonucleotide
caagguaaucgagagcugu

SEQ ID NO: 2268440 - RNA, 19 nt, Artificial Sequence
  Description of Artificial Sequence: Synthetic oligonucleotide
acacucggucguugugcag

SEQ ID NO: 2268441 - RNA, 19 nt, Artificial Sequence
  Description of Artificial Sequence: Synthetic oligonucleotide
aacgucugccauggaguaa

SEQ ID NO: 2268442 - RNA, 19 nt, Artificial Sequence
  Description of Artificial Sequence: Synthetic oligonucleotide
uugccaugggguccacuuu

SEQ ID NO: 2268443 - RNA, 19 nt, Artificial Sequence
  Description of Artificial Sequence: Synthetic oligonucleotide
auucgacccagaccagauu

SEQ ID NO: 2268444 - RNA, 19 nt, Artificial Sequence
  Description of Artificial Sequence: Synthetic oligonucleotide
ggugccgucgggccugucc

SEQ ID NO: 2268445 - RNA, 19 nt, Artificial Sequence
  Description of Artificial Sequence: Synthetic oligonucleotide
cagucgccauuuucuguug

SEQ ID NO: 2268446 - RNA, 19 nt, Artificial Sequence
  Description of Artificial Sequence: Synthetic oligonucleotide
cuagcuuauccccggagau

SEQ ID NO: 2268447 - RNA, 19 nt, Artificial Sequence
  Description of Artificial Sequence: Synthetic oligonucleotide
gagauguuggcggccagcu

SEQ ID NO: 2268448 - RNA, 19 nt, Artificial Sequence
  Description of Artificial Sequence: Synthetic oligonucleotide
cuuugcugccaccccaaaa

SEQ ID NO: 2268449 - RNA, 19 nt, Artificial Sequence
  Description of Artificial Sequence: Synthetic oligonucleotide
ccaccccaaaacccaaagg

SEQ ID NO: 2268450 - RNA, 19 nt, Artificial Sequence
  Description of Artificial Sequence: Synthetic oligonucleotide
caaaguuugggaugcccau

SEQ ID NO: 2268451 - RNA, 19 nt, Artificial Sequence
  Description of Artificial Sequence: Synthetic oligonucleotide
ccacaauugccaugggguc

SEQ ID NO: 2268452 - RNA, 19 nt, Artificial Sequence
  Description of Artificial Sequence: Synthetic oligonucleotide
aaggaacgucugccaugga

SEQ ID NO: 2268453 - RNA, 19 nt, Artificial Sequence
  Description of Artificial Sequence: Synthetic oligonucleotide
cuccccgauguauuucgca

SEQ ID NO: 2268454 - RNA, 19 nt, Artificial Sequence
  Description of Artificial Sequence: Synthetic oligonucleotide
ucuucccgcuagcuugauu

SEQ ID NO: 2268455 - RNA, 19 nt, Artificial Sequence
  Description of Artificial Sequence: Synthetic oligonucleotide
gugccgucgggccugucca

SEQ ID NO: 2268456 - RNA, 19 nt, Artificial Sequence
  Description of Artificial Sequence: Synthetic oligonucleotide
gguugcguggguaauugaa

SEQ ID NO: 2268457 - RNA, 19 nt, Artificial Sequence
  Description of Artificial Sequence: Synthetic oligonucleotide
gauucgacccagaccagau

SEQ ID NO: 2268458 - RNA, 19 nt, Artificial Sequence
  Description of Artificial Sequence: Synthetic oligonucleotide
aucacucgggucuccucuu

SEQ ID NO: 2268459 - RNA, 19 nt, Artificial Sequence
  Description of Artificial Sequence: Synthetic oligonucleotide
cccagaccagauuucaaca

SEQ ID NO: 2268460 - RNA, 19 nt, Artificial Sequence
  Description of Artificial Sequence: Synthetic oligonucleotide
caagaaggacuguucugcu

SEQ ID NO: 2268461 - RNA, 19 nt, Artificial Sequence
  Description of Artificial Sequence: Synthetic oligonucleotide
ggaacgucugccauggagu

SEQ ID NO: 2268462 - RNA, 19 nt, Artificial Sequence
  Description of Artificial Sequence: Synthetic oligonucleotide
cccgauguauuucgcaauc

SEQ ID NO: 2268463 - RNA, 19 nt, Artificial Sequence
  Description of Artificial Sequence: Synthetic oligonucleotide
gcguggguaauugaacuca

SEQ ID NO: 2268464 - RNA, 19 nt, Artificial Sequence
  Description of Artificial Sequence: Synthetic oligonucleotide
auuccaaauuugacacgau

SEQ ID NO: 2268465 - RNA, 19 nt, Artificial Sequence
  Description of Artificial Sequence: Synthetic oligonucleotide
gacuuugcugccaccccaa

SEQ ID NO: 2268466 - RNA, 19 nt, Artificial Sequence
  Description of Artificial Sequence: Synthetic oligonucleotide
auguuggcggccagcuuca

SEQ ID NO: 2268467 - RNA, 19 nt, Artificial Sequence
  Description of Artificial Sequence: Synthetic oligonucleotide
gggugcaagguaaucgaga

SEQ ID NO: 2268468 - RNA, 19 nt, Artificial Sequence
  Description of Artificial Sequence: Synthetic oligonucleotide
gugauucgacccagaccag

SEQ ID NO: 2268469 - RNA, 19 nt, Artificial Sequence
  Description of Artificial Sequence: Synthetic oligonucleotide
ccuggugugguggugcaug

SEQ ID NO: 2268470 - RNA, 19 nt, Artificial Sequence
  Description of Artificial Sequence: Synthetic oligonucleotide
ccagauuucaacacaugau

SEQ ID NO: 2268471 - RNA, 19 nt, Artificial Sequence
  Description of Artificial Sequence: Synthetic oligonucleotide
ccggaaacaguaggugccg

SEQ ID NO: 2268472 - RNA, 19 nt, Artificial Sequence
  Description of Artificial Sequence: Synthetic oligonucleotide
agaauccaaguugcauaua

SEQ ID NO: 2268473 - RNA, 19 nt, Artificial Sequence
  Description of Artificial Sequence: Synthetic oligonucleotide
ggaugcccauacuaaguua

SEQ ID NO: 2268474 - RNA, 19 nt, Artificial Sequence
  Description of Artificial Sequence: Synthetic oligonucleotide
uacuuagcguagggugcaa

SEQ ID NO: 2268475 - RNA, 19 nt, Artificial Sequence
  Description of Artificial Sequence: Synthetic oligonucleotide
gugcagccggaaacaguag

SEQ ID NO: 2268476 - RNA, 19 nt, Artificial Sequence
  Description of Artificial Sequence: Synthetic oligonucleotide
gggguccacuuuucugcag

SEQ ID NO: 2268477 - RNA, 19 nt, Artificial Sequence
  Description of Artificial Sequence: Synthetic oligonucleotide
cccaaaggaacgucugcca

SEQ ID NO: 2268478 - RNA, 19 nt, Artificial Sequence
  Description of Artificial Sequence: Synthetic oligonucleotide
uguuggcggccagcuucag

SEQ ID NO: 2268479 - RNA, 19 nt, Artificial Sequence
  Description of Artificial Sequence: Synthetic oligonucleotide
cacguccccagugacacua

SEQ ID NO: 2268480 - RNA, 19 nt, Artificial Sequence
  Description of Artificial Sequence: Synthetic oligonucleotide
cgcaaucuucucaaacauc

SEQ ID NO: 2268481 - RNA, 19 nt, Artificial Sequence
  Description of Artificial Sequence: Synthetic oligonucleotide
gacccagaccagauuucaa

SEQ ID NO: 2268482 - RNA, 19 nt, Artificial Sequence
  Description of Artificial Sequence: Synthetic oligonucleotide
cacucgggucuccucuuca

SEQ ID NO: 2268483 - RNA, 19 nt, Artificial Sequence
  Description of Artificial Sequence: Synthetic oligonucleotide
cuacucccugguacugaga

SEQ ID NO: 2268484 - RNA, 19 nt, Artificial Sequence
  Description of Artificial Sequence: Synthetic oligonucleotide
caggcuuuauccacacuuu

SEQ ID NO: 2268485 - RNA, 19 nt, Artificial Sequence
  Description of Artificial Sequence: Synthetic oligonucleotide
augcccauacuaaguuaau

SEQ ID NO: 2268486 - RNA, 19 nt, Artificial Sequence
  Description of Artificial Sequence: Synthetic oligonucleotide
gcagucgccauuuucuguu

SEQ ID NO: 2268487 - RNA, 19 nt, Artificial Sequence
  Description of Artificial Sequence: Synthetic oligonucleotide
acacguccccagugacacu

SEQ ID NO: 2268488 - RNA, 19 nt, Artificial Sequence
  Description of Artificial Sequence: Synthetic oligonucleotide
ccaggcuuuauccacacuu

SEQ ID NO: 2268489 - RNA, 19 nt, Artificial Sequence
  Description of Artificial Sequence: Synthetic oligonucleotide
cagauucuccccgauguau

SEQ ID NO: 2268490 - RNA, 19 nt, Artificial Sequence
  Description of Artificial Sequence: Synthetic oligonucleotide
cucggucguugugcagccg

SEQ ID NO: 2268491 - RNA, 19 nt, Artificial Sequence
  Description of Artificial Sequence: Synthetic oligonucleotide
cauaauacacucggucguu

SEQ ID NO: 2268492 - RNA, 19 nt, Artificial Sequence
  Description of Artificial Sequence: Synthetic oligonucleotide
ugccgucgggccuguccac

SEQ ID NO: 2268493 - RNA, 19 nt, Artificial Sequence
  Description of Artificial Sequence: Synthetic oligonucleotide
gggaugcccauacuaaguu

SEQ ID NO: 2268494 - RNA, 19 nt, Artificial Sequence
  Description of Artificial Sequence: Synthetic oligonucleotide
gccucaucuucccgcuagc

SEQ ID NO: 2268495 - RNA, 19 nt, Artificial Sequence
  Description of Artificial Sequence: Synthetic oligonucleotide
cugccaccccaaaacccaa

SEQ ID NO: 2268496 - RNA, 19 nt, Artificial Sequence
  Description of Artificial Sequence: Synthetic oligonucleotide
gcuguaacgugcagccgga

SEQ ID NO: 2268497 - RNA, 19 nt, Artificial Sequence
  Description of Artificial Sequence: Synthetic oligonucleotide
gcagccggaacuugugggu

SEQ ID NO: 2268498 - RNA, 19 nt, Artificial Sequence
  Description of Artificial Sequence: Synthetic oligonucleotide
acguccccagugacacuag

SEQ ID NO: 2268499 - RNA, 19 nt, Artificial Sequence
  Description of Artificial Sequence: Synthetic oligonucleotide
gcagauucuccccgaugua

SEQ ID NO: 2268500 - RNA, 19 nt, Artificial Sequence
  Description of Artificial Sequence: Synthetic oligonucleotide
cuggaagagcagucgccau

SEQ ID NO: 2268501 - RNA, 19 nt, Artificial Sequence
  Description of Artificial Sequence: Synthetic oligonucleotide
gaagagcagucgccauuuu

SEQ ID NO: 2268502 - RNA, 19 nt, Artificial Sequence
  Description of Artificial Sequence: Synthetic oligonucleotide
ccacuacucccugguacug

SEQ ID NO: 2268503 - RNA, 19 nt, Artificial Sequence
  Description of Artificial Sequence: Synthetic oligonucleotide
cguagggugcaagguaauc

SEQ ID NO: 2268504 - RNA, 19 nt, Artificial Sequence
  Description of Artificial Sequence: Synthetic oligonucleotide
ccaaaggaacgucugccau

SEQ ID NO: 2268505 - RNA, 19 nt, Artificial Sequence
  Description of Artificial Sequence: Synthetic oligonucleotide
gcagucuugaguagacuuu

SEQ ID NO: 2268506 - RNA, 19 nt, Artificial Sequence
  Description of Artificial Sequence: Synthetic oligonucleotide
caauugccaugggguccac

SEQ ID NO: 2268507 - RNA, 19 nt, Artificial Sequence
  Description of Artificial Sequence: Synthetic oligonucleotide
gccauggaguaaaccacua

SEQ ID NO: 2268508 - RNA, 19 nt, Artificial Sequence
  Description of Artificial Sequence: Synthetic oligonucleotide
cgagagcuguaacgugcag

SEQ ID NO: 2268509 - RNA, 19 nt, Artificial Sequence
  Description of Artificial Sequence: Synthetic oligonucleotide
ccaaaacccaaaggaacgu

SEQ ID NO: 2268510 - RNA, 19 nt, Artificial Sequence
  Description of Artificial Sequence: Synthetic oligonucleotide
gccguacauauucuccaau

SEQ ID NO: 2268511 - RNA, 19 nt, Artificial Sequence
  Description of Artificial Sequence: Synthetic oligonucleotide
cguccccagugacacuagc

SEQ ID NO: 2268512 - RNA, 19 nt, Artificial Sequence
  Description of Artificial Sequence: Synthetic oligonucleotide
aucuucccgcuagcuugau

SEQ ID NO: 2268513 - RNA, 19 nt, Artificial Sequence
  Description of Artificial Sequence: Synthetic oligonucleotide
gccgucgggccuguccacc

SEQ ID NO: 2268514 - RNA, 19 nt, Artificial Sequence
  Description of Artificial Sequence: Synthetic oligonucleotide
ccauacaagaaggacuguu

SEQ ID NO: 2268515 - RNA, 19 nt, Artificial Sequence
  Description of Artificial Sequence: Synthetic oligonucleotide
ggucguugugcagccggaa

SEQ ID NO: 2268516 - RNA, 19 nt, Artificial Sequence
  Description of Artificial Sequence: Synthetic oligonucleotide
cugcagucuugaguagacu

SEQ ID NO: 2268517 - RNA, 19 nt, Artificial Sequence
  Description of Artificial Sequence: Synthetic oligonucleotide
cuucagucaagggccucau

SEQ ID NO: 2268518 - RNA, 19 nt, Artificial Sequence
  Description of Artificial Sequence: Synthetic oligonucleotide
cuguaacgugcagccggaa

SEQ ID NO: 2268519 - RNA, 19 nt, Artificial Sequence
  Description of Artificial Sequence: Synthetic oligonucleotide
cccaaaacacguccccagu

SEQ ID NO: 2268520 - RNA, 19 nt, Artificial Sequence
  Description of Artificial Sequence: Synthetic oligonucleotide
ccgauguauuucgcaaucu

SEQ ID NO: 2268521 - RNA, 19 nt, Artificial Sequence
  Description of Artificial Sequence: Synthetic oligonucleotide
cgucgggccuguccaccag

SEQ ID NO: 2268522 - RNA, 19 nt, Artificial Sequence
  Description of Artificial Sequence: Synthetic oligonucleotide
ccccgauguauuucgcaau

SEQ ID NO: 2268523 - RNA, 19 nt, Artificial Sequence
  Description of Artificial Sequence: Synthetic oligonucleotide
aggugccgucgggccuguc

SEQ ID NO: 2268524 - RNA, 19 nt, Artificial Sequence
  Description of Artificial Sequence: Synthetic oligonucleotide
ccggaacuugugggucuug

SEQ ID NO: 2268525 - RNA, 19 nt, Artificial Sequence
  Description of Artificial Sequence: Synthetic oligonucleotide
ccucaucuucccgcuagcu

SEQ ID NO: 2268526 - RNA, 19 nt, Artificial Sequence
  Description of Artificial Sequence: Synthetic oligonucleotide
cggucguugugcagccgga

SEQ ID NO: 2268527 - RNA, 19 nt, Artificial Sequence
  Description of Artificial Sequence: Synthetic oligonucleotide
gggccucaucuucccgcua

SEQ ID NO: 2268528 - RNA, 19 nt, Artificial Sequence
  Description of Artificial Sequence: Synthetic oligonucleotide
cccugguacugagaaguau

SEQ ID NO: 2268529 - RNA, 19 nt, Artificial Sequence
  Description of Artificial Sequence: Synthetic oligonucleotide
gcguagggugcaagguaau

SEQ ID NO: 2268530 - RNA, 19 nt, Artificial Sequence
  Description of Artificial Sequence: Synthetic oligonucleotide
cggaaacaguaggugccgu

SEQ ID NO: 2268531 - RNA, 19 nt, Artificial Sequence
  Description of Artificial Sequence: Synthetic oligonucleotide
gccuggugugguggugcau

SEQ ID NO: 2268532 - RNA, 19 nt, Artificial Sequence
  Description of Artificial Sequence: Synthetic oligonucleotide
aaggcuucccuuuagaugg

SEQ ID NO: 2268533 - RNA, 19 nt, Artificial Sequence
  Description of Artificial Sequence: Synthetic oligonucleotide
uguuacauaaauaagaaua

SEQ ID NO: 2268534 - RNA, 19 nt, Artificial Sequence
  Description of Artificial Sequence: Synthetic oligonucleotide
aauucuaguagaaugcucc

SEQ ID NO: 2268535 - RNA, 19 nt, Artificial Sequence
  Description of Artificial Sequence: Synthetic oligonucleotide
uaagaauauauacacaacc

SEQ ID NO: 2268536 - RNA, 19 nt, Artificial Sequence
  Description of Artificial Sequence: Synthetic oligonucleotide
aguacaauucccuuaacac

SEQ ID NO: 2268537 - RNA, 19 nt, Artificial Sequence
  Description of Artificial Sequence: Synthetic oligonucleotide
auucccuuaacacugaaac

SEQ ID NO: 2268538 - RNA, 19 nt, Artificial Sequence
  Description of Artificial Sequence: Synthetic oligonucleotide
uacaaauagaauuacauaa

SEQ ID NO: 2268539 - RNA, 19 nt, Artificial Sequence
  Description of Artificial Sequence: Synthetic oligonucleotide
aauagaagaggacuccgac

SEQ ID NO: 2268540 - RNA, 19 nt, Artificial Sequence
  Description of Artificial Sequence: Synthetic oligonucleotide
aguaagguaggacacaggg

SEQ ID NO: 2268541 - RNA, 19 nt, Artificial Sequence
  Description of Artificial Sequence: Synthetic oligonucleotide
guagaaugcuccuagaagg

SEQ ID NO: 2268542 - RNA, 19 nt, Artificial Sequence
  Description of Artificial Sequence: Synthetic oligonucleotide
agaauauauacacaaccgg

SEQ ID NO: 2268543 - RNA, 19 nt, Artificial Sequence
  Description of Artificial Sequence: Synthetic oligonucleotide
aaccaauucuaguagaaug

SEQ ID NO: 2268544 - RNA, 19 nt, Artificial Sequence
  Description of Artificial Sequence: Synthetic oligonucleotide
uaguauaauuuuauuaacc

SEQ ID NO: 2268545 - RNA, 19 nt, Artificial Sequence
  Description of Artificial Sequence: Synthetic oligonucleotide
auaguauaauuuuauuaac

SEQ ID NO: 2268546 - RNA, 19 nt, Artificial Sequence
  Description of Artificial Sequence: Synthetic oligonucleotide
aguauaauuuuauuaacca

SEQ ID NO: 2268547 - RNA, 19 nt, Artificial Sequence
  Description of Artificial Sequence: Synthetic oligonucleotide
uacaauucccuuaacacug

SEQ ID NO: 2268548 - RNA, 19 nt, Artificial Sequence
  Description of Artificial Sequence: Synthetic oligonucleotide
aauauacauauucucucag

SEQ ID NO: 2268549 - RNA, 19 nt, Artificial Sequence
  Description of Artificial Sequence: Synthetic oligonucleotide
gaaaauacuguagacuugg

SEQ ID NO: 2268550 - RNA, 19 nt, Artificial Sequence
  Description of Artificial Sequence: Synthetic oligonucleotide
auugugcugaaauucaggg

SEQ ID NO: 2268551 - RNA, 19 nt, Artificial Sequence
  Description of Artificial Sequence: Synthetic oligonucleotide
auuuauuccacaugauaac

SEQ ID NO: 2268552 - RNA, 19 nt, Artificial Sequence
  Description of Artificial Sequence: Synthetic oligonucleotide
uuugaaacuggaagaauag

SEQ ID NO: 2268553 - RNA, 19 nt, Artificial Sequence
  Description of Artificial Sequence: Synthetic oligonucleotide
ucuaguagaaugcuccuag

SEQ ID NO: 2268554 - RNA, 19 nt, Artificial Sequence
  Description of Artificial Sequence: Synthetic oligonucleotide
aaacuggaagaauagccuc

SEQ ID NO: 2268555 - RNA, 19 nt, Artificial Sequence
  Description of Artificial Sequence: Synthetic oligonucleotide
auacuguagacuuggauuc

SEQ ID NO: 2268556 - RNA, 19 nt, Artificial Sequence
  Description of Artificial Sequence: Synthetic oligonucleotide
aaggaugccaguaagguag

SEQ ID NO: 2268557 - RNA, 19 nt, Artificial Sequence
  Description of Artificial Sequence: Synthetic oligonucleotide
ucuacugucuugaugccgg

SEQ ID NO: 2268558 - RNA, 19 nt, Artificial Sequence
  Description of Artificial Sequence: Synthetic oligonucleotide
ugugcugaaauucaggguc

SEQ ID NO: 2268559 - RNA, 19 nt, Artificial Sequence
  Description of Artificial Sequence: Synthetic oligonucleotide
uuauuaaccaauucuagua

SEQ ID NO: 2268560 - RNA, 19 nt, Artificial Sequence
  Description of Artificial Sequence: Synthetic oligonucleotide
uuaaaugucuacaaaguuu

SEQ ID NO: 2268561 - RNA, 19 nt, Artificial Sequence
  Description of Artificial Sequence: Synthetic oligonucleotide
ucaaauguaugucaguuau

SEQ ID NO: 2268562 - RNA, 19 nt, Artificial Sequence
  Description of Artificial Sequence: Synthetic oligonucleotide
uggaagaauagccucagca

SEQ ID NO: 2268563 - RNA, 19 nt, Artificial Sequence
  Description of Artificial Sequence: Synthetic oligonucleotide
aauucagggucucgaagac

SEQ ID NO: 2268564 - RNA, 19 nt, Artificial Sequence
  Description of Artificial Sequence: Synthetic oligonucleotide
agaaaauuguuacauaaau

SEQ ID NO: 2268565 - RNA, 19 nt, Artificial Sequence
  Description of Artificial Sequence: Synthetic oligonucleotide
uguaugucaguuauuguac

SEQ ID NO: 2268566 - RNA, 19 nt, Artificial Sequence
  Description of Artificial Sequence: Synthetic oligonucleotide
aaaucuagacauuauucaa

SEQ ID NO: 2268567 - RNA, 19 nt, Artificial Sequence
  Description of Artificial Sequence: Synthetic oligonucleotide
uauugugcugaaauucagg

SEQ ID NO: 2268568 - RNA, 19 nt, Artificial Sequence
  Description of Artificial Sequence: Synthetic oligonucleotide
aaguacaauucccuuaaca

SEQ ID NO: 2268569 - RNA, 19 nt, Artificial Sequence
  Description of Artificial Sequence: Synthetic oligonucleotide
ucuucagagugucuaagcc

SEQ ID NO: 2268570 - RNA, 19 nt, Artificial Sequence
  Description of Artificial Sequence: Synthetic oligonucleotide
uuucaaaguacaauucccu

SEQ ID NO: 2268571 - RNA, 19 nt, Artificial Sequence
  Description of Artificial Sequence: Synthetic oligonucleotide
accaauucuaguagaaugc

SEQ ID NO: 2268572 - RNA, 19 nt, Artificial Sequence
  Description of Artificial Sequence: Synthetic oligonucleotide
ucucucagaaaauuguuac

SEQ ID NO: 2268573 - RNA, 19 nt, Artificial Sequence
  Description of Artificial Sequence: Synthetic oligonucleotide
ucccuuaacacugaaacug

SEQ ID NO: 2268574 - RNA, 19 nt, Artificial Sequence
  Description of Artificial Sequence: Synthetic oligonucleotide
uagauggcgacacuaagac

SEQ ID NO: 2268575 - RNA, 19 nt, Artificial Sequence
  Description of Artificial Sequence: Synthetic oligonucleotide
uuuagauggcgacacuaag

SEQ ID NO: 2268576 - RNA, 19 nt, Artificial Sequence
  Description of Artificial Sequence: Synthetic oligonucleotide
aagggugcuuaucugaugu

SEQ ID NO: 2268577 - RNA, 19 nt, Artificial Sequence
  Description of Artificial Sequence: Synthetic oligonucleotide
aauaauuucucaaaaucua

SEQ ID NO: 2268578 - RNA, 19 nt, Artificial Sequence
  Description of Artificial Sequence: Synthetic oligonucleotide
uuagauggcgacacuaaga

SEQ ID NO: 2268579 - RNA, 19 nt, Artificial Sequence
  Description of Artificial Sequence: Synthetic oligonucleotide
ugcuuuuaaaaccuuguau

SEQ ID NO: 2268580 - RNA, 19 nt, Artificial Sequence
  Description of Artificial Sequence: Synthetic oligonucleotide
uccuccguuacauaaauaa

SEQ ID NO: 2268581 - RNA, 19 nt, Artificial Sequence
  Description of Artificial Sequence: Synthetic oligonucleotide
acauaaauaauuucucaaa

SEQ ID NO: 2268582 - RNA, 19 nt, Artificial Sequence
  Description of Artificial Sequence: Synthetic oligonucleotide
uuaacacugaaacugcgua

SEQ ID NO: 2268583 - RNA, 19 nt, Artificial Sequence
  Description of Artificial Sequence: Synthetic oligonucleotide
gacauuauucaaauguaug

SEQ ID NO: 2268584 - RNA, 19 nt, Artificial Sequence
  Description of Artificial Sequence: Synthetic oligonucleotide
uguagacuuggauucacug

SEQ ID NO: 2268585 - RNA, 19 nt, Artificial Sequence
  Description of Artificial Sequence: Synthetic oligonucleotide
aaauacuguagacuuggau

SEQ ID NO: 2268586 - RNA, 19 nt, Artificial Sequence
  Description of Artificial Sequence: Synthetic oligonucleotide
gaaauucagggucucgaag

SEQ ID NO: 2268587 - RNA, 19 nt, Artificial Sequence
  Description of Artificial Sequence: Synthetic oligonucleotide
aauauauacacaaccggau

SEQ ID NO: 2268588 - RNA, 19 nt, Artificial Sequence
  Description of Artificial Sequence: Synthetic oligonucleotide
aaggcauuuauuccacaug

SEQ ID NO: 2268589 - RNA, 19 nt, Artificial Sequence
  Description of Artificial Sequence: Synthetic oligonucleotide
aguauagaaaauacuguag

SEQ ID NO: 2268590 - RNA, 19 nt, Artificial Sequence
  Description of Artificial Sequence: Synthetic oligonucleotide
caugauaaccuuuuggaga

SEQ ID NO: 2268591 - RNA, 19 nt, Artificial Sequence
  Description of Artificial Sequence: Synthetic oligonucleotide
agagacacagcacaguggu

SEQ ID NO: 2268592 - RNA, 19 nt, Artificial Sequence
  Description of Artificial Sequence: Synthetic oligonucleotide
aagguccuucuucagagug

SEQ ID NO: 2268593 - RNA, 19 nt, Artificial Sequence
  Description of Artificial Sequence: Synthetic oligonucleotide
uuaggaagguccuucuuca

SEQ ID NO: 2268594 - RNA, 19 nt, Artificial Sequence
  Description of Artificial Sequence: Synthetic oligonucleotide
agugguuuccuuucuuagg

SEQ ID NO: 2268595 - RNA, 19 nt, Artificial Sequence
  Description of Artificial Sequence: Synthetic oligonucleotide
cuuggauccugcuggaagg

SEQ ID NO: 2268596 - RNA, 19 nt, Artificial Sequence
  Description of Artificial Sequence: Synthetic oligonucleotide
cuagacauuauucaaaugu

SEQ ID NO: 2268597 - RNA, 19 nt, Artificial Sequence
  Description of Artificial Sequence: Synthetic oligonucleotide
aguuauuguacaaauagaa

SEQ ID NO: 2268598 - RNA, 19 nt, Artificial Sequence
  Description of Artificial Sequence: Synthetic oligonucleotide
gaaggcuucccuuuagaug

SEQ ID NO: 2268599 - RNA, 19 nt, Artificial Sequence
  Description of Artificial Sequence: Synthetic oligonucleotide
aaaucugugggcauuggcu

SEQ ID NO: 2268600 - RNA, 19 nt, Artificial Sequence
  Description of Artificial Sequence: Synthetic oligonucleotide
aauguaugucaguuauugu

SEQ ID NO: 2268601 - RNA, 19 nt, Artificial Sequence
  Description of Artificial Sequence: Synthetic oligonucleotide
ucgaagacagccuuggauc

SEQ ID NO: 2268602 - RNA, 19 nt, Artificial Sequence
  Description of Artificial Sequence: Synthetic oligonucleotide
agucaggagagacacagca

SEQ ID NO: 2268603 - RNA, 19 nt, Artificial Sequence
  Description of Artificial Sequence: Synthetic oligonucleotide
agcaggagaagucaggaga

SEQ ID NO: 2268604 - RNA, 19 nt, Artificial Sequence
  Description of Artificial Sequence: Synthetic oligonucleotide
aaccggauuuucaaaguac

SEQ ID NO: 2268605 - RNA, 19 nt, Artificial Sequence
  Description of Artificial Sequence: Synthetic oligonucleotide
auguaugucaguuauugua

SEQ ID NO: 2268606 - RNA, 19 nt, Artificial Sequence
  Description of Artificial Sequence: Synthetic oligonucleotide
uccguuacauaaauaauuu

SEQ ID NO: 2268607 - RNA, 19 nt, Artificial Sequence
  Description of Artificial Sequence: Synthetic oligonucleotide
auuaaccaauucuaguaga

SEQ ID NO: 2268608 - RNA, 19 nt, Artificial Sequence
  Description of Artificial Sequence: Synthetic oligonucleotide
uccugaggaaauagaagag

SEQ ID NO: 2268609 - RNA, 19 nt, Artificial Sequence
  Description of Artificial Sequence: Synthetic oligonucleotide
uucagagugucuaagccau

SEQ ID NO: 2268610 - RNA, 19 nt, Artificial Sequence
  Description of Artificial Sequence: Synthetic oligonucleotide
aaucuucccgcaaaggcag

SEQ ID NO: 2268611 - RNA, 19 nt, Artificial Sequence
  Description of Artificial Sequence: Synthetic oligonucleotide
gggucuacugucuugaugc

SEQ ID NO: 2268612 - RNA, 19 nt, Artificial Sequence
  Description of Artificial Sequence: Synthetic oligonucleotide
uuguacaaauagaauuaca

SEQ ID NO: 2268613 - RNA, 19 nt, Artificial Sequence
  Description of Artificial Sequence: Synthetic oligonucleotide
uagaaugcuccuagaaggc

SEQ ID NO: 2268614 - RNA, 19 nt, Artificial Sequence
  Description of Artificial Sequence: Synthetic oligonucleotide
uagaagguuguccaagggu

SEQ ID NO: 2268615 - RNA, 19 nt, Artificial Sequence
  Description of Artificial Sequence: Synthetic oligonucleotide
uagacauuauucaaaugua

SEQ ID NO: 2268616 - RNA, 19 nt, Artificial Sequence
  Description of Artificial Sequence: Synthetic oligonucleotide
cacaugauaaccuuuugga

SEQ ID NO: 2268617 - RNA, 19 nt, Artificial Sequence
  Description of Artificial Sequence: Synthetic oligonucleotide
ucaaaguacaauucccuua

SEQ ID NO: 2268618 - RNA, 19 nt, Artificial Sequence
  Description of Artificial Sequence: Synthetic oligonucleotide
cuagaaggcauuuauucca

SEQ ID NO: 2268619 - RNA, 19 nt, Artificial Sequence
  Description of Artificial Sequence: Synthetic oligonucleotide
cacaaccggauuuucaaag

SEQ ID NO: 2268620 - RNA, 19 nt, Artificial Sequence
  Description of Artificial Sequence: Synthetic oligonucleotide
gaagaauagccucagcaaa

SEQ ID NO: 2268621 - RNA, 19 nt, Artificial Sequence
  Description of Artificial Sequence: Synthetic oligonucleotide
aggaaauagaagaggacuc

SEQ ID NO: 2268622 - RNA, 19 nt, Artificial Sequence
  Description of Artificial Sequence: Synthetic oligonucleotide
gagaagucaggagagacac

SEQ ID NO: 2268623 - RNA, 19 nt, Artificial Sequence
  Description of Artificial Sequence: Synthetic oligonucleotide
uucacaaucuucccgcaaa

SEQ ID NO: 2268624 - RNA, 19 nt, Artificial Sequence
  Description of Artificial Sequence: Synthetic oligonucleotide
guagacuuggauucacugc

SEQ ID NO: 2268625 - RNA, 19 nt, Artificial Sequence
  Description of Artificial Sequence: Synthetic oligonucleotide
auauacauauucucucaga

SEQ ID NO: 2268626 - RNA, 19 nt, Artificial Sequence
  Description of Artificial Sequence: Synthetic oligonucleotide
uaaccuuuuggagaaguca

SEQ ID NO: 2268627 - RNA, 19 nt, Artificial Sequence
  Description of Artificial Sequence: Synthetic oligonucleotide
agggaguagaagguugucc

SEQ ID NO: 2268628 - RNA, 19 nt, Artificial Sequence
  Description of Artificial Sequence: Synthetic oligonucleotide
uucuucagagugucuaagc

SEQ ID NO: 2268629 - RNA, 19 nt, Artificial Sequence
  Description of Artificial Sequence: Synthetic oligonucleotide
acacuaagacugcuccacc

SEQ ID NO: 2268630 - RNA, 19 nt, Artificial Sequence
  Description of Artificial Sequence: Synthetic oligonucleotide
ucuaagccauccugggagg

SEQ ID NO: 2268631 - RNA, 19 nt, Artificial Sequence
  Description of Artificial Sequence: Synthetic oligonucleotide
uaguagaaugcuccuagaa

SEQ ID NO: 2268632 - RNA, 19 nt, Artificial Sequence
  Description of Artificial Sequence: Synthetic oligonucleotide
agaagguuguccaagggug

SEQ ID NO: 2268633 - RNA, 19 nt, Artificial Sequence
  Description of Artificial Sequence: Synthetic oligonucleotide
uggugaguccucuggaugc

SEQ ID NO: 2268634 - RNA, 19 nt, Artificial Sequence
  Description of Artificial Sequence: Synthetic oligonucleotide
aucguggugaguccucugg

SEQ ID NO: 2268635 - RNA, 19 nt, Artificial Sequence
  Description of Artificial Sequence: Synthetic oligonucleotide
cagcuuuggaguaggaagc

SEQ ID NO: 2268636 - RNA, 19 nt, Artificial Sequence
  Description of Artificial Sequence: Synthetic oligonucleotide
agccucagcaaaucugugg

SEQ ID NO: 2268637 - RNA, 19 nt, Artificial Sequence
  Description of Artificial Sequence: Synthetic oligonucleotide
ucuagacauuauucaaaug

SEQ ID NO: 2268638 - RNA, 19 nt, Artificial Sequence
  Description of Artificial Sequence: Synthetic oligonucleotide
gauguucuggaacuuuuga

SEQ ID NO: 2268639 - RNA, 19 nt, Artificial Sequence
  Description of Artificial Sequence: Synthetic oligonucleotide
agacuugaccugugugucc

SEQ ID NO: 2268640 - RNA, 19 nt, Artificial Sequence
  Description of Artificial Sequence: Synthetic oligonucleotide
uccaagggugcuuaucuga

SEQ ID NO: 2268641 - RNA, 19 nt, Artificial Sequence
  Description of Artificial Sequence: Synthetic oligonucleotide
uucucucagaaaauuguua

SEQ ID NO: 2268642 - RNA, 19 nt, Artificial Sequence
  Description of Artificial Sequence: Synthetic oligonucleotide
cuuggauucacugcaguug

SEQ ID NO: 2268643 - RNA, 19 nt, Artificial Sequence
  Description of Artificial Sequence: Synthetic oligonucleotide
acuccgacccuucuuucac

SEQ ID NO: 2268644 - RNA, 19 nt, Artificial Sequence
  Description of Artificial Sequence: Synthetic oligonucleotide
uggaguaggaagccuuccc

SEQ ID NO: 2268645 - RNA, 19 nt, Artificial Sequence
  Description of Artificial Sequence: Synthetic oligonucleotide
agcuggagucgugagaucg

SEQ ID NO: 2268646 - RNA, 19 nt, Artificial Sequence
  Description of Artificial Sequence: Synthetic oligonucleotide
agaauagccucagcaaauc

SEQ ID NO: 2268647 - RNA, 19 nt, Artificial Sequence
  Description of Artificial Sequence: Synthetic oligonucleotide
ucucaaaaucuagacauua

SEQ ID NO: 2268648 - RNA, 19 nt, Artificial Sequence
  Description of Artificial Sequence: Synthetic oligonucleotide
auucaaauguaugucaguu

SEQ ID NO: 2268649 - RNA, 19 nt, Artificial Sequence
  Description of Artificial Sequence: Synthetic oligonucleotide
gacacuaagacugcuccac

SEQ ID NO: 2268650 - RNA, 19 nt, Artificial Sequence
  Description of Artificial Sequence: Synthetic oligonucleotide
ugaaauucagggucucgaa

SEQ ID NO: 2268651 - RNA, 19 nt, Artificial Sequence
  Description of Artificial Sequence: Synthetic oligonucleotide
ugggaggacucucucuucc

SEQ ID NO: 2268652 - RNA, 19 nt, Artificial Sequence
  Description of Artificial Sequence: Synthetic oligonucleotide
guacaaauagaauuacaua

SEQ ID NO: 2268653 - RNA, 19 nt, Artificial Sequence
  Description of Artificial Sequence: Synthetic oligonucleotide
gaguagaagguuguccaag

SEQ ID NO: 2268654 - RNA, 19 nt, Artificial Sequence
  Description of Artificial Sequence: Synthetic oligonucleotide
uauccuccguuacauaaau

SEQ ID NO: 2268655 - RNA, 19 nt, Artificial Sequence
  Description of Artificial Sequence: Synthetic oligonucleotide
uuauccuccguuacauaaa

SEQ ID NO: 2268656 - RNA, 19 nt, Artificial Sequence
  Description of Artificial Sequence: Synthetic oligonucleotide
gaggaaauagaagaggacu

SEQ ID NO: 2268657 - RNA, 19 nt, Artificial Sequence
  Description of Artificial Sequence: Synthetic oligonucleotide
uuucuuaggaagguccuuc

SEQ ID NO: 2268658 - RNA, 19 nt, Artificial Sequence
  Description of Artificial Sequence: Synthetic oligonucleotide
uugcuuuuaaaaccuugua

SEQ ID NO: 2268659 - RNA, 19 nt, Artificial Sequence
  Description of Artificial Sequence: Synthetic oligonucleotide
aagaauagccucagcaaau

SEQ ID NO: 2268660 - RNA, 19 nt, Artificial Sequence
  Description of Artificial Sequence: Synthetic oligonucleotide
uggagucgugagaucgugg

SEQ ID NO: 2268661 - RNA, 19 nt, Artificial Sequence
  Description of Artificial Sequence: Synthetic oligonucleotide
gguuuccuuucuuaggaag

SEQ ID NO: 2268662 - RNA, 19 nt, Artificial Sequence
  Description of Artificial Sequence: Synthetic oligonucleotide
acaaccggauuuucaaagu

SEQ ID NO: 2268663 - RNA, 19 nt, Artificial Sequence
  Description of Artificial Sequence: Synthetic oligonucleotide
agucgugagaucgugguga

SEQ ID NO: 2268664 - RNA, 19 nt, Artificial Sequence
  Description of Artificial Sequence: Synthetic oligonucleotide
uuccacaugauaaccuuuu

SEQ ID NO: 2268665 - RNA, 19 nt, Artificial Sequence
  Description of Artificial Sequence: Synthetic oligonucleotide
ugucuaagccauccuggga

SEQ ID NO: 2268666 - RNA, 19 nt, Artificial Sequence
  Description of Artificial Sequence: Synthetic oligonucleotide
caaucuucccgcaaaggca

SEQ ID NO: 2268667 - RNA, 19 nt, Artificial Sequence
  Description of Artificial Sequence: Synthetic oligonucleotide
ugcaguugacagcugcaga

SEQ ID NO: 2268668 - RNA, 19 nt, Artificial Sequence
  Description of Artificial Sequence: Synthetic oligonucleotide
auucuaguagaaugcuccu

SEQ ID NO: 2268669 - RNA, 19 nt, Artificial Sequence
  Description of Artificial Sequence: Synthetic oligonucleotide
aagcacacuuaauuuucau

SEQ ID NO: 2268670 - RNA, 19 nt, Artificial Sequence
  Description of Artificial Sequence: Synthetic oligonucleotide
cuggaaggaugccaguaag

SEQ ID NO: 2268671 - RNA, 19 nt, Artificial Sequence
  Description of Artificial Sequence: Synthetic oligonucleotide
auagccucagcaaaucugu

SEQ ID NO: 2268672 - RNA, 19 nt, Artificial Sequence
  Description of Artificial Sequence: Synthetic oligonucleotide
auaaccuuuuggagaaguc

SEQ ID NO: 2268673 - RNA, 19 nt, Artificial Sequence
  Description of Artificial Sequence: Synthetic oligonucleotide
caguuauuguacaaauaga

SEQ ID NO: 2268674 - RNA, 19 nt, Artificial Sequence
  Description of Artificial Sequence: Synthetic oligonucleotide
aagucaggagagacacagc

SEQ ID NO: 2268675 - RNA, 19 nt, Artificial Sequence
  Description of Artificial Sequence: Synthetic oligonucleotide
agacauaguauaauuuuau

SEQ ID NO: 2268676 - RNA, 19 nt, Artificial Sequence
  Description of Artificial Sequence: Synthetic oligonucleotide
gaugccaguaagguaggac

SEQ ID NO: 2268677 - RNA, 19 nt, Artificial Sequence
  Description of Artificial Sequence: Synthetic oligonucleotide
cuaagacugcuccaccgac

SEQ ID NO: 2268678 - RNA, 19 nt, Artificial Sequence
  Description of Artificial Sequence: Synthetic oligonucleotide
guacaauucccuuaacacu

SEQ ID NO: 2268679 - RNA, 19 nt, Artificial Sequence
  Description of Artificial Sequence: Synthetic oligonucleotide
ggaaauagaagaggacucc

SEQ ID NO: 2268680 - RNA, 19 nt, Artificial Sequence
  Description of Artificial Sequence: Synthetic oligonucleotide
guauugugcugaaauucag

SEQ ID NO: 2268681 - RNA, 19 nt, Artificial Sequence
  Description of Artificial Sequence: Synthetic oligonucleotide
ccacaugauaaccuuuugg

SEQ ID NO: 2268682 - RNA, 19 nt, Artificial Sequence
  Description of Artificial Sequence: Synthetic oligonucleotide
cuugaugccggcagcagga

SEQ ID NO: 2268683 - RNA, 19 nt, Artificial Sequence
  Description of Artificial Sequence: Synthetic oligonucleotide
uagacuugaccuguguguc

SEQ ID NO: 2268684 - RNA, 19 nt, Artificial Sequence
  Description of Artificial Sequence: Synthetic oligonucleotide
guagacuugaccugugugu

SEQ ID NO: 2268685 - RNA, 19 nt, Artificial Sequence
  Description of Artificial Sequence: Synthetic oligonucleotide
acagcuggagucgugagau

SEQ ID NO: 2268686 - RNA, 19 nt, Artificial Sequence
  Description of Artificial Sequence: Synthetic oligonucleotide
ucuucccgcaaaggcaggg

SEQ ID NO: 2268687 - RNA, 19 nt, Artificial Sequence
  Description of Artificial Sequence: Synthetic oligonucleotide
cagggucucgaagacagcc

SEQ ID NO: 2268688 - RNA, 19 nt, Artificial Sequence
  Description of Artificial Sequence: Synthetic oligonucleotide
uucacucugucugccguag

SEQ ID NO: 2268689 - RNA, 19 nt, Artificial Sequence
  Description of Artificial Sequence: Synthetic oligonucleotide
ucccuuuagauggcgacac

SEQ ID NO: 2268690 - RNA, 19 nt, Artificial Sequence
  Description of Artificial Sequence: Synthetic oligonucleotide
agacauuauucaaauguau

SEQ ID NO: 2268691 - RNA, 19 nt, Artificial Sequence
  Description of Artificial Sequence: Synthetic oligonucleotide
uucucaaaaucuagacauu

SEQ ID NO: 2268692 - RNA, 19 nt, Artificial Sequence
  Description of Artificial Sequence: Synthetic oligonucleotide
cagaaaauuguuacauaaa

SEQ ID NO: 2268693 - RNA, 19 nt, Artificial Sequence
  Description of Artificial Sequence: Synthetic oligonucleotide
ggaguaggaagccuucccc

SEQ ID NO: 2268694 - RNA, 19 nt, Artificial Sequence
  Description of Artificial Sequence: Synthetic oligonucleotide
uaggaagguccuucuucag

SEQ ID NO: 2268695 - RNA, 19 nt, Artificial Sequence
  Description of Artificial Sequence: Synthetic oligonucleotide
acuuggauucacugcaguu

SEQ ID NO: 2268696 - RNA, 19 nt, Artificial Sequence
  Description of Artificial Sequence: Synthetic oligonucleotide
ugcguauugugcugaaauu

SEQ ID NO: 2268697 - RNA, 19 nt, Artificial Sequence
  Description of Artificial Sequence: Synthetic oligonucleotide
uucuuucacucugucugcc

SEQ ID NO: 2268698 - RNA, 19 nt, Artificial Sequence
  Description of Artificial Sequence: Synthetic oligonucleotide
gaccuguguguccaguuuc

SEQ ID NO: 2268699 - RNA, 19 nt, Artificial Sequence
  Description of Artificial Sequence: Synthetic oligonucleotide
gcgacacuaagacugcucc

SEQ ID NO: 2268700 - RNA, 19 nt, Artificial Sequence
  Description of Artificial Sequence: Synthetic oligonucleotide
cuuuagauggcgacacuaa

SEQ ID NO: 2268701 - RNA, 19 nt, Artificial Sequence
  Description of Artificial Sequence: Synthetic oligonucleotide
ggauuuucaaaguacaauu

SEQ ID NO: 2268702 - RNA, 19 nt, Artificial Sequence
  Description of Artificial Sequence: Synthetic oligonucleotide
ugggcauuggcuucacaau

SEQ ID NO: 2268703 - RNA, 19 nt, Artificial Sequence
  Description of Artificial Sequence: Synthetic oligonucleotide
gugggcauuggcuucacaa

SEQ ID NO: 2268704 - RNA, 19 nt, Artificial Sequence
  Description of Artificial Sequence: Synthetic oligonucleotide
gucuacugucuugaugccg

SEQ ID NO: 2268705 - RNA, 19 nt, Artificial Sequence
  Description of Artificial Sequence: Synthetic oligonucleotide
ugagaucguggugaguccu

SEQ ID NO: 2268706 - RNA, 19 nt, Artificial Sequence
  Description of Artificial Sequence: Synthetic oligonucleotide
aagguuguccaagggugcu

SEQ ID NO: 2268707 - RNA, 19 nt, Artificial Sequence
  Description of Artificial Sequence: Synthetic oligonucleotide
caguaagguaggacacagg

SEQ ID NO: 2268708 - RNA, 19 nt, Artificial Sequence
  Description of Artificial Sequence: Synthetic oligonucleotide
accggauuuucaaaguaca

SEQ ID NO: 2268709 - RNA, 19 nt, Artificial Sequence
  Description of Artificial Sequence: Synthetic oligonucleotide
ucguggugaguccucugga

SEQ ID NO: 2268710 - RNA, 19 nt, Artificial Sequence
  Description of Artificial Sequence: Synthetic oligonucleotide
gaaggaugccaguaaggua

SEQ ID NO: 2268711 - RNA, 19 nt, Artificial Sequence
  Description of Artificial Sequence: Synthetic oligonucleotide
cacucugucugccguagac

SEQ ID NO: 2268712 - RNA, 19 nt, Artificial Sequence
  Description of Artificial Sequence: Synthetic oligonucleotide
uuggaguaggaagccuucc

SEQ ID NO: 2268713 - RNA, 19 nt, Artificial Sequence
  Description of Artificial Sequence: Synthetic oligonucleotide
agagugucuaagccauccu

SEQ ID NO: 2268714 - RNA, 19 nt, Artificial Sequence
  Description of Artificial Sequence: Synthetic oligonucleotide
uuuuauccuccguuacaua

SEQ ID NO: 2268715 - RNA, 19 nt, Artificial Sequence
  Description of Artificial Sequence: Synthetic oligonucleotide
gauaaccuuuuggagaagu

SEQ ID NO: 2268716 - RNA, 19 nt, Artificial Sequence
  Description of Artificial Sequence: Synthetic oligonucleotide
auggcgacacuaagacugc

SEQ ID NO: 2268717 - RNA, 19 nt, Artificial Sequence
  Description of Artificial Sequence: Synthetic oligonucleotide
aagaggacuccgacccuuc

SEQ ID NO: 2268718 - RNA, 19 nt, Artificial Sequence
  Description of Artificial Sequence: Synthetic oligonucleotide
agauggcgacacuaagacu

SEQ ID NO: 2268719 - RNA, 19 nt, Artificial Sequence
  Description of Artificial Sequence: Synthetic oligonucleotide
cucucagcuuuggaguagg

SEQ ID NO: 2268720 - RNA, 19 nt, Artificial Sequence
  Description of Artificial Sequence: Synthetic oligonucleotide
gagucgugagaucguggug

SEQ ID NO: 2268721 - RNA, 19 nt, Artificial Sequence
  Description of Artificial Sequence: Synthetic oligonucleotide
cuccguuacauaaauaauu

SEQ ID NO: 2268722 - RNA, 19 nt, Artificial Sequence
  Description of Artificial Sequence: Synthetic oligonucleotide
uagccucagcaaaucugug

SEQ ID NO: 2268723 - RNA, 19 nt, Artificial Sequence
  Description of Artificial Sequence: Synthetic oligonucleotide
gugagaucguggugagucc

SEQ ID NO: 2268724 - RNA, 19 nt, Artificial Sequence
  Description of Artificial Sequence: Synthetic oligonucleotide
acacaaccggauuuucaaa

SEQ ID NO: 2268725 - RNA, 19 nt, Artificial Sequence
  Description of Artificial Sequence: Synthetic oligonucleotide
caagcacacuuaauuuuca

SEQ ID NO: 2268726 - RNA, 19 nt, Artificial Sequence
  Description of Artificial Sequence: Synthetic oligonucleotide
uccgacccuucuuucacuc

SEQ ID NO: 2268727 - RNA, 19 nt, Artificial Sequence
  Description of Artificial Sequence: Synthetic oligonucleotide
agacugcuccaccgacagc

SEQ ID NO: 2268728 - RNA, 19 nt, Artificial Sequence
  Description of Artificial Sequence: Synthetic oligonucleotide
gucgugagaucguggugag

SEQ ID NO: 2268729 - RNA, 19 nt, Artificial Sequence
  Description of Artificial Sequence: Synthetic oligonucleotide
gcuuaucugauguucugga

SEQ ID NO: 2268730 - RNA, 19 nt, Artificial Sequence
  Description of Artificial Sequence: Synthetic oligonucleotide
ucucgaagacagccuugga

SEQ ID NO: 2268731 - RNA, 19 nt, Artificial Sequence
  Description of Artificial Sequence: Synthetic oligonucleotide
caagggugcuuaucugaug

SEQ ID NO: 2268732 - RNA, 19 nt, Artificial Sequence
  Description of Artificial Sequence: Synthetic oligonucleotide
cccuuaacacugaaacugc

SEQ ID NO: 2268733 - RNA, 19 nt, Artificial Sequence
  Description of Artificial Sequence: Synthetic oligonucleotide
gaauagccucagcaaaucu

SEQ ID NO: 2268734 - RNA, 19 nt, Artificial Sequence
  Description of Artificial Sequence: Synthetic oligonucleotide
gacuccgacccuucuuuca

SEQ ID NO: 2268735 - RNA, 19 nt, Artificial Sequence
  Description of Artificial Sequence: Synthetic oligonucleotide
uucuaguagaaugcuccua

SEQ ID NO: 2268736 - RNA, 19 nt, Artificial Sequence
  Description of Artificial Sequence: Synthetic oligonucleotide
ugccguagacuugaccugu

SEQ ID NO: 2268737 - RNA, 19 nt, Artificial Sequence
  Description of Artificial Sequence: Synthetic oligonucleotide
cuaguagaaugcuccuaga

SEQ ID NO: 2268738 - RNA, 19 nt, Artificial Sequence
  Description of Artificial Sequence: Synthetic oligonucleotide
auucucucagaaaauuguu

SEQ ID NO: 2268739 - RNA, 19 nt, Artificial Sequence
  Description of Artificial Sequence: Synthetic oligonucleotide
cucagaaaauuguuacaua

SEQ ID NO: 2268740 - RNA, 19 nt, Artificial Sequence
  Description of Artificial Sequence: Synthetic oligonucleotide
uggauucacugcaguugac

SEQ ID NO: 2268741 - RNA, 19 nt, Artificial Sequence
  Description of Artificial Sequence: Synthetic oligonucleotide
uugaccuguguguccaguu

SEQ ID NO: 2268742 - RNA, 19 nt, Artificial Sequence
  Description of Artificial Sequence: Synthetic oligonucleotide
gaucguggugaguccucug

SEQ ID NO: 2268743 - RNA, 19 nt, Artificial Sequence
  Description of Artificial Sequence: Synthetic oligonucleotide
ugauaaccuuuuggagaag

SEQ ID NO: 2268744 - RNA, 19 nt, Artificial Sequence
  Description of Artificial Sequence: Synthetic oligonucleotide
gagaagucaagcacacuua

SEQ ID NO: 2268745 - RNA, 19 nt, Artificial Sequence
  Description of Artificial Sequence: Synthetic oligonucleotide
gucaagcacacuuaauuuu

SEQ ID NO: 2268746 - RNA, 19 nt, Artificial Sequence
  Description of Artificial Sequence: Synthetic oligonucleotide
ucucagcuuuggaguagga

SEQ ID NO: 2268747 - RNA, 19 nt, Artificial Sequence
  Description of Artificial Sequence: Synthetic oligonucleotide
guccaagggugcuuaucug

SEQ ID NO: 2268748 - RNA, 19 nt, Artificial Sequence
  Description of Artificial Sequence: Synthetic oligonucleotide
agaagaggacuccgacccu

SEQ ID NO: 2268749 - RNA, 19 nt, Artificial Sequence
  Description of Artificial Sequence: Synthetic oligonucleotide
acagggaguagaagguugu

SEQ ID NO: 2268750 - RNA, 19 nt, Artificial Sequence
  Description of Artificial Sequence: Synthetic oligonucleotide
gcguauugugcugaaauuc

SEQ ID NO: 2268751 - RNA, 19 nt, Artificial Sequence
  Description of Artificial Sequence: Synthetic oligonucleotide
cuucccgcaaaggcagggg

SEQ ID NO: 2268752 - RNA, 19 nt, Artificial Sequence
  Description of Artificial Sequence: Synthetic oligonucleotide
cuacugucuugaugccggc

SEQ ID NO: 2268753 - RNA, 19 nt, Artificial Sequence
  Description of Artificial Sequence: Synthetic oligonucleotide
gucugccguagacuugacc

SEQ ID NO: 2268754 - RNA, 19 nt, Artificial Sequence
  Description of Artificial Sequence: Synthetic oligonucleotide
agacuuggauucacugcag

SEQ ID NO: 2268755 - RNA, 19 nt, Artificial Sequence
  Description of Artificial Sequence: Synthetic oligonucleotide
gucaggagagacacagcac

SEQ ID NO: 2268756 - RNA, 19 nt, Artificial Sequence
  Description of Artificial Sequence: Synthetic oligonucleotide
gaggacucucucuuccucu

SEQ ID NO: 2268757 - RNA, 19 nt, Artificial Sequence
  Description of Artificial Sequence: Synthetic oligonucleotide
uugaugccggcagcaggag

SEQ ID NO: 2268758 - RNA, 19 nt, Artificial Sequence
  Description of Artificial Sequence: Synthetic oligonucleotide
uacugucuugaugccggca

SEQ ID NO: 2268759 - RNA, 19 nt, Artificial Sequence
  Description of Artificial Sequence: Synthetic oligonucleotide
uuguccaagggugcuuauc

SEQ ID NO: 2268760 - RNA, 19 nt, Artificial Sequence
  Description of Artificial Sequence: Synthetic oligonucleotide
cucaaaaucuagacauuau

SEQ ID NO: 2268761 - RNA, 19 nt, Artificial Sequence
  Description of Artificial Sequence: Synthetic oligonucleotide
gcugaaauucagggucucg

SEQ ID NO: 2268762 - RNA, 19 nt, Artificial Sequence
  Description of Artificial Sequence: Synthetic oligonucleotide
ggggucuacugucuugaug

SEQ ID NO: 2268763 - RNA, 19 nt, Artificial Sequence
  Description of Artificial Sequence: Synthetic oligonucleotide
caaccggauuuucaaagua

SEQ ID NO: 2268764 - RNA, 19 nt, Artificial Sequence
  Description of Artificial Sequence: Synthetic oligonucleotide
gacuuggauucacugcagu

SEQ ID NO: 2268765 - RNA, 19 nt, Artificial Sequence
  Description of Artificial Sequence: Synthetic oligonucleotide
agaucguggugaguccucu

SEQ ID NO: 2268766 - RNA, 19 nt, Artificial Sequence
  Description of Artificial Sequence: Synthetic oligonucleotide
ccguuacauaaauaauuuc

SEQ ID NO: 2268767 - RNA, 19 nt, Artificial Sequence
  Description of Artificial Sequence: Synthetic oligonucleotide
ggauucacugcaguugaca

SEQ ID NO: 2268768 - RNA, 19 nt, Artificial Sequence
  Description of Artificial Sequence: Synthetic oligonucleotide
cugcguauugugcugaaau

SEQ ID NO: 2268769 - RNA, 19 nt, Artificial Sequence
  Description of Artificial Sequence: Synthetic oligonucleotide
cuggagucgugagaucgug

SEQ ID NO: 2268770 - RNA, 19 nt, Artificial Sequence
  Description of Artificial Sequence: Synthetic oligonucleotide
cauauucucucagaaaauu

SEQ ID NO: 2268771 - RNA, 19 nt, Artificial Sequence
  Description of Artificial Sequence: Synthetic oligonucleotide
gucaguuauuguacaaaua

SEQ ID NO: 2268772 - RNA, 19 nt, Artificial Sequence
  Description of Artificial Sequence: Synthetic oligonucleotide
gaaugcuccuagaaggcau

SEQ ID NO: 2268773 - RNA, 19 nt, Artificial Sequence
  Description of Artificial Sequence: Synthetic oligonucleotide
cguauugugcugaaauuca

SEQ ID NO: 2268774 - RNA, 19 nt, Artificial Sequence
  Description of Artificial Sequence: Synthetic oligonucleotide
cgugagaucguggugaguc

SEQ ID NO: 2268775 - RNA, 19 nt, Artificial Sequence
  Description of Artificial Sequence: Synthetic oligonucleotide
ugcugaaauucagggucuc

SEQ ID NO: 2268776 - RNA, 19 nt, Artificial Sequence
  Description of Artificial Sequence: Synthetic oligonucleotide
gucuugaugccggcagcag

SEQ ID NO: 2268777 - RNA, 19 nt, Artificial Sequence
  Description of Artificial Sequence: Synthetic oligonucleotide
cucgaagacagccuuggau

SEQ ID NO: 2268778 - RNA, 19 nt, Artificial Sequence
  Description of Artificial Sequence: Synthetic oligonucleotide
ggucuacugucuugaugcc

SEQ ID NO: 2268779 - RNA, 19 nt, Artificial Sequence
  Description of Artificial Sequence: Synthetic oligonucleotide
ggagaagucaggagagaca

SEQ ID NO: 2268780 - RNA, 19 nt, Artificial Sequence
  Description of Artificial Sequence: Synthetic oligonucleotide
ugccaaguucucucagcuu

SEQ ID NO: 2268781 - RNA, 19 nt, Artificial Sequence
  Description of Artificial Sequence: Synthetic oligonucleotide
agcugcagacauaguauaa

SEQ ID NO: 2268782 - RNA, 19 nt, Artificial Sequence
  Description of Artificial Sequence: Synthetic oligonucleotide
ggagucgugagaucguggu

SEQ ID NO: 2268783 - RNA, 19 nt, Artificial Sequence
  Description of Artificial Sequence: Synthetic oligonucleotide
accuguguguccaguuucu

SEQ ID NO: 2268784 - RNA, 19 nt, Artificial Sequence
  Description of Artificial Sequence: Synthetic oligonucleotide
cagcugcagacauaguaua

SEQ ID NO: 2268785 - RNA, 19 nt, Artificial Sequence
  Description of Artificial Sequence: Synthetic oligonucleotide
gaagguccuucuucagagu

SEQ ID NO: 2268786 - RNA, 19 nt, Artificial Sequence
  Description of Artificial Sequence: Synthetic oligonucleotide
ugcuccuagaaggcauuua

SEQ ID NO: 2268787 - RNA, 19 nt, Artificial Sequence
  Description of Artificial Sequence: Synthetic oligonucleotide
cguagacuugaccugugug

SEQ ID NO: 2268788 - RNA, 19 nt, Artificial Sequence
  Description of Artificial Sequence: Synthetic oligonucleotide
gagaucguggugaguccuc

SEQ ID NO: 2268789 - RNA, 19 nt, Artificial Sequence
  Description of Artificial Sequence: Synthetic oligonucleotide
gguaggacacagggaguag

SEQ ID NO: 2268790 - RNA, 19 nt, Artificial Sequence
  Description of Artificial Sequence: Synthetic oligonucleotide
agggucucgaagacagccu

SEQ ID NO: 2268791 - RNA, 19 nt, Artificial Sequence
  Description of Artificial Sequence: Synthetic oligonucleotide
acacagggaguagaagguu

SEQ ID NO: 2268792 - RNA, 19 nt, Artificial Sequence
  Description of Artificial Sequence: Synthetic oligonucleotide
cacacuuaauuuucauuuu

SEQ ID NO: 2268793 - RNA, 19 nt, Artificial Sequence
  Description of Artificial Sequence: Synthetic oligonucleotide
ggaguagaagguuguccaa

SEQ ID NO: 2268794 - RNA, 19 nt, Artificial Sequence
  Description of Artificial Sequence: Synthetic oligonucleotide
ugucugccguagacuugac

SEQ ID NO: 2268795 - RNA, 19 nt, Artificial Sequence
  Description of Artificial Sequence: Synthetic oligonucleotide
aucuucccgcaaaggcagg

SEQ ID NO: 2268796 - RNA, 19 nt, Artificial Sequence
  Description of Artificial Sequence: Synthetic oligonucleotide
agggugcuuaucugauguu

SEQ ID NO: 2268797 - RNA, 19 nt, Artificial Sequence
  Description of Artificial Sequence: Synthetic oligonucleotide
gccaaguucucucagcuuu

SEQ ID NO: 2268798 - RNA, 19 nt, Artificial Sequence
  Description of Artificial Sequence: Synthetic oligonucleotide
cucugucugccguagacuu

SEQ ID NO: 2268799 - RNA, 19 nt, Artificial Sequence
  Description of Artificial Sequence: Synthetic oligonucleotide
gcuccuagaaggcauuuau

SEQ ID NO: 2268800 - RNA, 19 nt, Artificial Sequence
  Description of Artificial Sequence: Synthetic oligonucleotide
cuaagccauccugggagga

SEQ ID NO: 2268801 - RNA, 19 nt, Artificial Sequence
  Description of Artificial Sequence: Synthetic oligonucleotide
ggugcuuaucugauguucu

SEQ ID NO: 2268802 - RNA, 19 nt, Artificial Sequence
  Description of Artificial Sequence: Synthetic oligonucleotide
acugcguauugugcugaaa

SEQ ID NO: 2268803 - RNA, 19 nt, Artificial Sequence
  Description of Artificial Sequence: Synthetic oligonucleotide
uggcgacacuaagacugcu

SEQ ID NO: 2268804 - RNA, 19 nt, Artificial Sequence
  Description of Artificial Sequence: Synthetic oligonucleotide
ggcuucccuuuagauggcg

SEQ ID NO: 2268805 - RNA, 19 nt, Artificial Sequence
  Description of Artificial Sequence: Synthetic oligonucleotide
cagggaguagaagguuguc

SEQ ID NO: 2268806 - RNA, 19 nt, Artificial Sequence
  Description of Artificial Sequence: Synthetic oligonucleotide
ccaccgacagcuggagucg

SEQ ID NO: 2268807 - RNA, 19 nt, Artificial Sequence
  Description of Artificial Sequence: Synthetic oligonucleotide
gaagacagccuuggauccu

SEQ ID NO: 2268808 - RNA, 19 nt, Artificial Sequence
  Description of Artificial Sequence: Synthetic oligonucleotide
ucgugagaucguggugagu

SEQ ID NO: 2268809 - RNA, 19 nt, Artificial Sequence
  Description of Artificial Sequence: Synthetic oligonucleotide
ggcauuggcuucacaaucu

SEQ ID NO: 2268810 - RNA, 19 nt, Artificial Sequence
  Description of Artificial Sequence: Synthetic oligonucleotide
guugacagcugcagacaua

SEQ ID NO: 2268811 - RNA, 19 nt, Artificial Sequence
  Description of Artificial Sequence: Synthetic oligonucleotide
ggcgacacuaagacugcuc

SEQ ID NO: 2268812 - RNA, 19 nt, Artificial Sequence
  Description of Artificial Sequence: Synthetic oligonucleotide
ccggauuuucaaaguacaa

SEQ ID NO: 2268813 - RNA, 19 nt, Artificial Sequence
  Description of Artificial Sequence: Synthetic oligonucleotide
cuccuagaaggcauuuauu

SEQ ID NO: 2268814 - RNA, 19 nt, Artificial Sequence
  Description of Artificial Sequence: Synthetic oligonucleotide
gaggacuccgacccuucuu

SEQ ID NO: 2268815 - RNA, 19 nt, Artificial Sequence
  Description of Artificial Sequence: Synthetic oligonucleotide
ccuuuagauggcgacacua

SEQ ID NO: 2268816 - RNA, 19 nt, Artificial Sequence
  Description of Artificial Sequence: Synthetic oligonucleotide
gguuguccaagggugcuua

SEQ ID NO: 2268817 - RNA, 19 nt, Artificial Sequence
  Description of Artificial Sequence: Synthetic oligonucleotide
ggacuccgacccuucuuuc

SEQ ID NO: 2268818 - RNA, 19 nt, Artificial Sequence
  Description of Artificial Sequence: Synthetic oligonucleotide
augcuccuagaaggcauuu

SEQ ID NO: 2268819 - RNA, 19 nt, Artificial Sequence
  Description of Artificial Sequence: Synthetic oligonucleotide
gccaguaagguaggacaca

SEQ ID NO: 2268820 - RNA, 19 nt, Artificial Sequence
  Description of Artificial Sequence: Synthetic oligonucleotide
accgacagcuggagucgug

SEQ ID NO: 2268821 - RNA, 19 nt, Artificial Sequence
  Description of Artificial Sequence: Synthetic oligonucleotide
gcugcagacauaguauaau

SEQ ID NO: 2268822 - RNA, 19 nt, Artificial Sequence
  Description of Artificial Sequence: Synthetic oligonucleotide
ccaauucuaguagaaugcu

SEQ ID NO: 2268823 - RNA, 19 nt, Artificial Sequence
  Description of Artificial Sequence: Synthetic oligonucleotide
auccuccguuacauaaaua

SEQ ID NO: 2268824 - RNA, 19 nt, Artificial Sequence
  Description of Artificial Sequence: Synthetic oligonucleotide
cuugaccuguguguccagu

SEQ ID NO: 2268825 - RNA, 19 nt, Artificial Sequence
  Description of Artificial Sequence: Synthetic oligonucleotide
ccuccguuacauaaauaau

SEQ ID NO: 2268826 - RNA, 19 nt, Artificial Sequence
  Description of Artificial Sequence: Synthetic oligonucleotide
guuguccaagggugcuuau

SEQ ID NO: 2268827 - RNA, 19 nt, Artificial Sequence
  Description of Artificial Sequence: Synthetic oligonucleotide
cgacagcuggagucgugag

SEQ ID NO: 2268828 - RNA, 19 nt, Artificial Sequence
  Description of Artificial Sequence: Synthetic oligonucleotide
cuccgacccuucuuucacu

SEQ ID NO: 2268829 - RNA, 19 nt, Artificial Sequence
  Description of Artificial Sequence: Synthetic oligonucleotide
gggaggacucucucuuccu

SEQ ID NO: 2268830 - RNA, 19 nt, Artificial Sequence
  Description of Artificial Sequence: Synthetic oligonucleotide
gccguagacuugaccugug

SEQ ID NO: 2268831 - RNA, 19 nt, Artificial Sequence
  Description of Artificial Sequence: Synthetic oligonucleotide
ccaagggugcuuaucugau

SEQ ID NO: 2268832 - RNA, 19 nt, Artificial Sequence
  Description of Artificial Sequence: Synthetic oligonucleotide
ggaugccaguaagguagga

SEQ ID NO: 2268833 - RNA, 19 nt, Artificial Sequence
  Description of Artificial Sequence: Synthetic oligonucleotide
gcuuuggaguaggaagccu

SEQ ID NO: 2268834 - RNA, 19 nt, Artificial Sequence
  Description of Artificial Sequence: Synthetic oligonucleotide
cgacacuaagacugcucca

SEQ ID NO: 2268835 - RNA, 19 nt, Artificial Sequence
  Description of Artificial Sequence: Synthetic oligonucleotide
ccgacagcuggagucguga

SEQ ID NO: 2268836 - RNA, 19 nt, Artificial Sequence
  Description of Artificial Sequence: Synthetic oligonucleotide
gagacacagcacagugguu

SEQ ID NO: 2268837 - RNA, 19 nt, Artificial Sequence
  Description of Artificial Sequence: Synthetic oligonucleotide
gcuggagucgugagaucgu

SEQ ID NO: 2268838 - RNA, 19 nt, Artificial Sequence
  Description of Artificial Sequence: Synthetic oligonucleotide
cccguuuccugaggaaaua

SEQ ID NO: 2268839 - RNA, 19 nt, Artificial Sequence
  Description of Artificial Sequence: Synthetic oligonucleotide
ccguagacuugaccugugu

SEQ ID NO: 2268840 - RNA, 19 nt, Artificial Sequence
  Description of Artificial Sequence: Synthetic oligonucleotide
caccgacagcuggagucgu

SEQ ID NO: 2268841 - RNA, 19 nt, Artificial Sequence
  Description of Artificial Sequence: Synthetic oligonucleotide
ccgacccuucuuucacucu

SEQ ID NO: 2268842 - RNA, 19 nt, Artificial Sequence
  Description of Artificial Sequence: Synthetic oligonucleotide
aaauagaauaccuuuagcu

SEQ ID NO: 2268843 - RNA, 19 nt, Artificial Sequence
  Description of Artificial Sequence: Synthetic oligonucleotide
uuuaguugaguacaaaccc

SEQ ID NO: 2268844 - RNA, 19 nt, Artificial Sequence
  Description of Artificial Sequence: Synthetic oligonucleotide
uacauguuuacaaggaugg

SEQ ID NO: 2268845 - RNA, 19 nt, Artificial Sequence
  Description of Artificial Sequence: Synthetic oligonucleotide
uuuuaguugaguacaaacc

SEQ ID NO: 2268846 - RNA, 19 nt, Artificial Sequence
  Description of Artificial Sequence: Synthetic oligonucleotide
ucuuagaggagugugagcg

SEQ ID NO: 2268847 - RNA, 19 nt, Artificial Sequence
  Description of Artificial Sequence: Synthetic oligonucleotide
auaaauagaauaccuuuag

SEQ ID NO: 2268848 - RNA, 19 nt, Artificial Sequence
  Description of Artificial Sequence: Synthetic oligonucleotide
aaaccuauuccuuucauaa

SEQ ID NO: 2268849 - RNA, 19 nt, Artificial Sequence
  Description of Artificial Sequence: Synthetic oligonucleotide
uuugauucuccauagguca

SEQ ID NO: 2268850 - RNA, 19 nt, Artificial Sequence
  Description of Artificial Sequence: Synthetic oligonucleotide
ugucucacaaccaaccagg

SEQ ID NO: 2268851 - RNA, 19 nt, Artificial Sequence
  Description of Artificial Sequence: Synthetic oligonucleotide
uuuuagacccagcugacag

SEQ ID NO: 2268852 - RNA, 19 nt, Artificial Sequence
  Description of Artificial Sequence: Synthetic oligonucleotide
aauagaauaccuuuagcuu

SEQ ID NO: 2268853 - RNA, 19 nt, Artificial Sequence
  Description of Artificial Sequence: Synthetic oligonucleotide
accagugucaauaugacac

SEQ ID NO: 2268854 - RNA, 19 nt, Artificial Sequence
  Description of Artificial Sequence: Synthetic oligonucleotide
gaaaguaugcugcugauuc

SEQ ID NO: 2268855 - RNA, 19 nt, Artificial Sequence
  Description of Artificial Sequence: Synthetic oligonucleotide
aaacagguugguuuucugg

SEQ ID NO: 2268856 - RNA, 19 nt, Artificial Sequence
  Description of Artificial Sequence: Synthetic oligonucleotide
uggccuaagacucacacgc

SEQ ID NO: 2268857 - RNA, 19 nt, Artificial Sequence
  Description of Artificial Sequence: Synthetic oligonucleotide
aaaguaugcugcugauucc

SEQ ID NO: 2268858 - RNA, 19 nt, Artificial Sequence
  Description of Artificial Sequence: Synthetic oligonucleotide
uauacaggauauaaagggc

SEQ ID NO: 2268859 - RNA, 19 nt, Artificial Sequence
  Description of Artificial Sequence: Synthetic oligonucleotide
aucugagaagcccugaaac

SEQ ID NO: 2268860 - RNA, 19 nt, Artificial Sequence
  Description of Artificial Sequence: Synthetic oligonucleotide
ucaguagucuuuuaguuga

SEQ ID NO: 2268861 - RNA, 19 nt, Artificial Sequence
  Description of Artificial Sequence: Synthetic oligonucleotide
aaaagugagggguuggccu

SEQ ID NO: 2268862 - RNA, 19 nt, Artificial Sequence
  Description of Artificial Sequence: Synthetic oligonucleotide
uuacuuuauuuaaaagaag

SEQ ID NO: 2268863 - RNA, 19 nt, Artificial Sequence
  Description of Artificial Sequence: Synthetic oligonucleotide
ucucuugcuuuauaaauag

SEQ ID NO: 2268864 - RNA, 19 nt, Artificial Sequence
  Description of Artificial Sequence: Synthetic oligonucleotide
caaaguaggagcaugacca

SEQ ID NO: 2268865 - RNA, 19 nt, Artificial Sequence
  Description of Artificial Sequence: Synthetic oligonucleotide
cucacaaccaaccagggac

SEQ ID NO: 2268866 - RNA, 19 nt, Artificial Sequence
  Description of Artificial Sequence: Synthetic oligonucleotide
uaaauagaauaccuuuagc

SEQ ID NO: 2268867 - RNA, 19 nt, Artificial Sequence
  Description of Artificial Sequence: Synthetic oligonucleotide
aaguaugcugcugauuccc

SEQ ID NO: 2268868 - RNA, 19 nt, Artificial Sequence
  Description of Artificial Sequence: Synthetic oligonucleotide
uucaccacaguucuuugag

SEQ ID NO: 2268869 - RNA, 19 nt, Artificial Sequence
  Description of Artificial Sequence: Synthetic oligonucleotide
caacaguacaguaaacagg

SEQ ID NO: 2268870 - RNA, 19 nt, Artificial Sequence
  Description of Artificial Sequence: Synthetic oligonucleotide
gaaaucuucagugaagaca

SEQ ID NO: 2268871 - RNA, 19 nt, Artificial Sequence
  Description of Artificial Sequence: Synthetic oligonucleotide
auaccuuuagcuuaaguua

SEQ ID NO: 2268872 - RNA, 19 nt, Artificial Sequence
  Description of Artificial Sequence: Synthetic oligonucleotide
aaaauagagucucuugcuu

SEQ ID NO: 2268873 - RNA, 19 nt, Artificial Sequence
  Description of Artificial Sequence: Synthetic oligonucleotide
aagacucacacgcagccca

SEQ ID NO: 2268874 - RNA, 19 nt, Artificial Sequence
  Description of Artificial Sequence: Synthetic oligonucleotide
auagaauaccuuuagcuua

SEQ ID NO: 2268875 - RNA, 19 nt, Artificial Sequence
  Description of Artificial Sequence: Synthetic oligonucleotide
guggaugcuacacugugcg

SEQ ID NO: 2268876 - RNA, 19 nt, Artificial Sequence
  Description of Artificial Sequence: Synthetic oligonucleotide
aaacaaaaccgacuuccca

SEQ ID NO: 2268877 - RNA, 19 nt, Artificial Sequence
  Description of Artificial Sequence: Synthetic oligonucleotide
cugauugcuauacaccccg

SEQ ID NO: 2268878 - RNA, 19 nt, Artificial Sequence
  Description of Artificial Sequence: Synthetic oligonucleotide
ugaaacaccagugucaaua

SEQ ID NO: 2268879 - RNA, 19 nt, Artificial Sequence
  Description of Artificial Sequence: Synthetic oligonucleotide
acaguaaacagguugguuu

SEQ ID NO: 2268880 - RNA, 19 nt, Artificial Sequence
  Description of Artificial Sequence: Synthetic oligonucleotide
uuagcuuaaguuacuccca

SEQ ID NO: 2268881 - RNA, 19 nt, Artificial Sequence
  Description of Artificial Sequence: Synthetic oligonucleotide
augaccaagggcaacacgg

SEQ ID NO: 2268882 - RNA, 19 nt, Artificial Sequence
  Description of Artificial Sequence: Synthetic oligonucleotide
ucuccauaggucaucugag

SEQ ID NO: 2268883 - RNA, 19 nt, Artificial Sequence
  Description of Artificial Sequence: Synthetic oligonucleotide
aaauagagucucuugcuuu

SEQ ID NO: 2268884 - RNA, 19 nt, Artificial Sequence
  Description of Artificial Sequence: Synthetic oligonucleotide
aaaaugcugggccaccaca

SEQ ID NO: 2268885 - RNA, 19 nt, Artificial Sequence
  Description of Artificial Sequence: Synthetic oligonucleotide
cuacacugugcguaaaggg

SEQ ID NO: 2268886 - RNA, 19 nt, Artificial Sequence
  Description of Artificial Sequence: Synthetic oligonucleotide
ucaacaaacauggugguua

SEQ ID NO: 2268887 - RNA, 19 nt, Artificial Sequence
  Description of Artificial Sequence: Synthetic oligonucleotide
aaaccgacuucccaguggu

SEQ ID NO: 2268888 - RNA, 19 nt, Artificial Sequence
  Description of Artificial Sequence: Synthetic oligonucleotide
aagggcacgguauuuacaa

SEQ ID NO: 2268889 - RNA, 19 nt, Artificial Sequence
  Description of Artificial Sequence: Synthetic oligonucleotide
gugucaauaugacaccggg

SEQ ID NO: 2268890 - RNA, 19 nt, Artificial Sequence
  Description of Artificial Sequence: Synthetic oligonucleotide
ucacacgcagcccacacug

SEQ ID NO: 2268891 - RNA, 19 nt, Artificial Sequence
  Description of Artificial Sequence: Synthetic oligonucleotide
gcuacagggaaacaaaacc

SEQ ID NO: 2268892 - RNA, 19 nt, Artificial Sequence
  Description of Artificial Sequence: Synthetic oligonucleotide
caguacaguaaacagguug

SEQ ID NO: 2268893 - RNA, 19 nt, Artificial Sequence
  Description of Artificial Sequence: Synthetic oligonucleotide
cuaagacucacacgcagcc

SEQ ID NO: 2268894 - RNA, 19 nt, Artificial Sequence
  Description of Artificial Sequence: Synthetic oligonucleotide
uugcuauacaccccgaguc

SEQ ID NO: 2268895 - RNA, 19 nt, Artificial Sequence
  Description of Artificial Sequence: Synthetic oligonucleotide
cuuuagcuuaaguuacucc

SEQ ID NO: 2268896 - RNA, 19 nt, Artificial Sequence
  Description of Artificial Sequence: Synthetic oligonucleotide
acgcagcccacacugagcc

SEQ ID NO: 2268897 - RNA, 19 nt, Artificial Sequence
  Description of Artificial Sequence: Synthetic oligonucleotide
cucagaaauagaaaauuca

SEQ ID NO: 2268898 - RNA, 19 nt, Artificial Sequence
  Description of Artificial Sequence: Synthetic oligonucleotide
gaagccaauauacaggaua

SEQ ID NO: 2268899 - RNA, 19 nt, Artificial Sequence
  Description of Artificial Sequence: Synthetic oligonucleotide
uagucuuuuaguugaguac

SEQ ID NO: 2268900 - RNA, 19 nt, Artificial Sequence
  Description of Artificial Sequence: Synthetic oligonucleotide
ucugagaagcccugaaaca

SEQ ID NO: 2268901 - RNA, 19 nt, Artificial Sequence
  Description of Artificial Sequence: Synthetic oligonucleotide
uaguugaguacaaaccccu

SEQ ID NO: 2268902 - RNA, 19 nt, Artificial Sequence
  Description of Artificial Sequence: Synthetic oligonucleotide
ggaaacaaaaccgacuucc

SEQ ID NO: 2268903 - RNA, 19 nt, Artificial Sequence
  Description of Artificial Sequence: Synthetic oligonucleotide
cuccuuuggagucuuagag

SEQ ID NO: 2268904 - RNA, 19 nt, Artificial Sequence
  Description of Artificial Sequence: Synthetic oligonucleotide
cauggugguuaucucaucc

SEQ ID NO: 2268905 - RNA, 19 nt, Artificial Sequence
  Description of Artificial Sequence: Synthetic oligonucleotide
aaaaccuauuccuuucaua

SEQ ID NO: 2268906 - RNA, 19 nt, Artificial Sequence
  Description of Artificial Sequence: Synthetic oligonucleotide
uugguuuucugguaggguc

SEQ ID NO: 2268907 - RNA, 19 nt, Artificial Sequence
  Description of Artificial Sequence: Synthetic oligonucleotide
aggagcaugaccaagggca

SEQ ID NO: 2268908 - RNA, 19 nt, Artificial Sequence
  Description of Artificial Sequence: Synthetic oligonucleotide
gaguacaaaccccucccgg

SEQ ID NO: 2268909 - RNA, 19 nt, Artificial Sequence
  Description of Artificial Sequence: Synthetic oligonucleotide
gaaguauguacauguuuac

SEQ ID NO: 2268910 - RNA, 19 nt, Artificial Sequence
  Description of Artificial Sequence: Synthetic oligonucleotide
aggccuuccagacacacug

SEQ ID NO: 2268911 - RNA, 19 nt, Artificial Sequence
  Description of Artificial Sequence: Synthetic oligonucleotide
gcuuaaguuacucccaucc

SEQ ID NO: 2268912 - RNA, 19 nt, Artificial Sequence
  Description of Artificial Sequence: Synthetic oligonucleotide
agugguucuccuuuggagu

SEQ ID NO: 2268913 - RNA, 19 nt, Artificial Sequence
  Description of Artificial Sequence: Synthetic oligonucleotide
agucuuuuaguugaguaca

SEQ ID NO: 2268914 - RNA, 19 nt, Artificial Sequence
  Description of Artificial Sequence: Synthetic oligonucleotide
aagacaaggugaggaaagg

SEQ ID NO: 2268915 - RNA, 19 nt, Artificial Sequence
  Description of Artificial Sequence: Synthetic oligonucleotide
ugagaagcccugaaacacc

SEQ ID NO: 2268916 - RNA, 19 nt, Artificial Sequence
  Description of Artificial Sequence: Synthetic oligonucleotide
accuauuccuuucauaaaa

SEQ ID NO: 2268917 - RNA, 19 nt, Artificial Sequence
  Description of Artificial Sequence: Synthetic oligonucleotide
cauguuuacaaggauggac

SEQ ID NO: 2268918 - RNA, 19 nt, Artificial Sequence
  Description of Artificial Sequence: Synthetic oligonucleotide
guugaguacaaaccccucc

SEQ ID NO: 2268919 - RNA, 19 nt, Artificial Sequence
  Description of Artificial Sequence: Synthetic oligonucleotide
acagaagacaaggugagga

SEQ ID NO: 2268920 - RNA, 19 nt, Artificial Sequence
  Description of Artificial Sequence: Synthetic oligonucleotide
agccuggaaaucuucagug

SEQ ID NO: 2268921 - RNA, 19 nt, Artificial Sequence
  Description of Artificial Sequence: Synthetic oligonucleotide
agugguuugauucuccaua

SEQ ID NO: 2268922 - RNA, 19 nt, Artificial Sequence
  Description of Artificial Sequence: Synthetic oligonucleotide
auugcuauacaccccgagu

SEQ ID NO: 2268923 - RNA, 19 nt, Artificial Sequence
  Description of Artificial Sequence: Synthetic oligonucleotide
cccgagucaacaaacaugg

SEQ ID NO: 2268924 - RNA, 19 nt, Artificial Sequence
  Description of Artificial Sequence: Synthetic oligonucleotide
ugucaauaugacaccgggc

SEQ ID NO: 2268925 - RNA, 19 nt, Artificial Sequence
  Description of Artificial Sequence: Synthetic oligonucleotide
ucccggugauuuuagaccc

SEQ ID NO: 2268926 - RNA, 19 nt, Artificial Sequence
  Description of Artificial Sequence: Synthetic oligonucleotide
ugagggguuggccuaagac

SEQ ID NO: 2268927 - RNA, 19 nt, Artificial Sequence
  Description of Artificial Sequence: Synthetic oligonucleotide
uagaauaccuuuagcuuaa

SEQ ID NO: 2268928 - RNA, 19 nt, Artificial Sequence
  Description of Artificial Sequence: Synthetic oligonucleotide
uacaggauauaaagggcac

SEQ ID NO: 2268929 - RNA, 19 nt, Artificial Sequence
  Description of Artificial Sequence: Synthetic oligonucleotide
cuuaaguuacucccauccc

SEQ ID NO: 2268930 - RNA, 19 nt, Artificial Sequence
  Description of Artificial Sequence: Synthetic oligonucleotide
caggauauaaagggcacgg

SEQ ID NO: 2268931 - RNA, 19 nt, Artificial Sequence
  Description of Artificial Sequence: Synthetic oligonucleotide
cucccggugauuuuagacc

SEQ ID NO: 2268932 - RNA, 19 nt, Artificial Sequence
  Description of Artificial Sequence: Synthetic oligonucleotide
gauugcuauacaccccgag

SEQ ID NO: 2268933 - RNA, 19 nt, Artificial Sequence
  Description of Artificial Sequence: Synthetic oligonucleotide
agacacagcaaccgugggg

SEQ ID NO: 2268934 - RNA, 19 nt, Artificial Sequence
  Description of Artificial Sequence: Synthetic oligonucleotide
gguacugauugcuauacac

SEQ ID NO: 2268935 - RNA, 19 nt, Artificial Sequence
  Description of Artificial Sequence: Synthetic oligonucleotide
cugacagacacagcaaccg

SEQ ID NO: 2268936 - RNA, 19 nt, Artificial Sequence
  Description of Artificial Sequence: Synthetic oligonucleotide
guacauguuuacaaggaug

SEQ ID NO: 2268937 - RNA, 19 nt, Artificial Sequence
  Description of Artificial Sequence: Synthetic oligonucleotide
uuggccuaagacucacacg

SEQ ID NO: 2268938 - RNA, 19 nt, Artificial Sequence
  Description of Artificial Sequence: Synthetic oligonucleotide
ucacaaccaaccagggacc

SEQ ID NO: 2268939 - RNA, 19 nt, Artificial Sequence
  Description of Artificial Sequence: Synthetic oligonucleotide
aacacggagagcccaucug

SEQ ID NO: 2268940 - RNA, 19 nt, Artificial Sequence
  Description of Artificial Sequence: Synthetic oligonucleotide
acgguauuuacaacaguac

SEQ ID NO: 2268941 - RNA, 19 nt, Artificial Sequence
  Description of Artificial Sequence: Synthetic oligonucleotide
gugauuuuagacccagcug

SEQ ID NO: 2268942 - RNA, 19 nt, Artificial Sequence
  Description of Artificial Sequence: Synthetic oligonucleotide
aggucaucugagcuccacc

SEQ ID NO: 2268943 - RNA, 19 nt, Artificial Sequence
  Description of Artificial Sequence: Synthetic oligonucleotide
ugcuauacaccccgaguca

SEQ ID NO: 2268944 - RNA, 19 nt, Artificial Sequence
  Description of Artificial Sequence: Synthetic oligonucleotide
gaaugugugugugugugug

SEQ ID NO: 2268945 - RNA, 19 nt, Artificial Sequence
  Description of Artificial Sequence: Synthetic oligonucleotide
aacggccuauccuacauua

SEQ ID NO: 2268946 - RNA, 19 nt, Artificial Sequence
  Description of Artificial Sequence: Synthetic oligonucleotide
gaguccaaaguggacaggc

SEQ ID NO: 2268947 - RNA, 19 nt, Artificial Sequence
  Description of Artificial Sequence: Synthetic oligonucleotide
uuucugguagggucaguag

SEQ ID NO: 2268948 - RNA, 19 nt, Artificial Sequence
  Description of Artificial Sequence: Synthetic oligonucleotide
agagucucuugcuuuauaa

SEQ ID NO: 2268949 - RNA, 19 nt, Artificial Sequence
  Description of Artificial Sequence: Synthetic oligonucleotide
aaacaccagugucaauaug

SEQ ID NO: 2268950 - RNA, 19 nt, Artificial Sequence
  Description of Artificial Sequence: Synthetic oligonucleotide
ugugugucucacaaccaac

SEQ ID NO: 2268951 - RNA, 19 nt, Artificial Sequence
  Description of Artificial Sequence: Synthetic oligonucleotide
auacaggauauaaagggca

SEQ ID NO: 2268952 - RNA, 19 nt, Artificial Sequence
  Description of Artificial Sequence: Synthetic oligonucleotide
agggguuggccuaagacuc

SEQ ID NO: 2268953 - RNA, 19 nt, Artificial Sequence
  Description of Artificial Sequence: Synthetic oligonucleotide
uuagaggagugugagcgug

SEQ ID NO: 2268954 - RNA, 19 nt, Artificial Sequence
  Description of Artificial Sequence: Synthetic oligonucleotide
caaagugguuugauucucc

SEQ ID NO: 2268955 - RNA, 19 nt, Artificial Sequence
  Description of Artificial Sequence: Synthetic oligonucleotide
aaaguggacaggccuucca

SEQ ID NO: 2268956 - RNA, 19 nt, Artificial Sequence
  Description of Artificial Sequence: Synthetic oligonucleotide
aaugugugugugugugugu

SEQ ID NO: 2268957 - RNA, 19 nt, Artificial Sequence
  Description of Artificial Sequence: Synthetic oligonucleotide
uaaagggcacgguauuuac

SEQ ID NO: 2268958 - RNA, 19 nt, Artificial Sequence
  Description of Artificial Sequence: Synthetic oligonucleotide
ugagcgugugugaaugugu

SEQ ID NO: 2268959 - RNA, 19 nt, Artificial Sequence
  Description of Artificial Sequence: Synthetic oligonucleotide
guuggccuaagacucacac

SEQ ID NO: 2268960 - RNA, 19 nt, Artificial Sequence
  Description of Artificial Sequence: Synthetic oligonucleotide
guacugauugcuauacacc

SEQ ID NO: 2268961 - RNA, 19 nt, Artificial Sequence
  Description of Artificial Sequence: Synthetic oligonucleotide
uuuagacccagcugacaga

SEQ ID NO: 2268962 - RNA, 19 nt, Artificial Sequence
  Description of Artificial Sequence: Synthetic oligonucleotide
acaaaaccgacuucccagu

SEQ ID NO: 2268963 - RNA, 19 nt, Artificial Sequence
  Description of Artificial Sequence: Synthetic oligonucleotide
gaaaagugagggguuggcc

SEQ ID NO: 2268964 - RNA, 19 nt, Artificial Sequence
  Description of Artificial Sequence: Synthetic oligonucleotide
ucaauaugacaccgggcuc

SEQ ID NO: 2268965 - RNA, 19 nt, Artificial Sequence
  Description of Artificial Sequence: Synthetic oligonucleotide
aaaguaggagcaugaccaa

SEQ ID NO: 2268966 - RNA, 19 nt, Artificial Sequence
  Description of Artificial Sequence: Synthetic oligonucleotide
acaggauauaaagggcacg

SEQ ID NO: 2268967 - RNA, 19 nt, Artificial Sequence
  Description of Artificial Sequence: Synthetic oligonucleotide
cuuugagagcuugggaggg

SEQ ID NO: 2268968 - RNA, 19 nt, Artificial Sequence
  Description of Artificial Sequence: Synthetic oligonucleotide
gcuuuauaaauagaauacc

SEQ ID NO: 2268969 - RNA, 19 nt, Artificial Sequence
  Description of Artificial Sequence: Synthetic oligonucleotide
cagaguccaaaguggacag

SEQ ID NO: 2268970 - RNA, 19 nt, Artificial Sequence
  Description of Artificial Sequence: Synthetic oligonucleotide
aaagugagggguuggccua

SEQ ID NO: 2268971 - RNA, 19 nt, Artificial Sequence
  Description of Artificial Sequence: Synthetic oligonucleotide
cagugguucuccuuuggag

SEQ ID NO: 2268972 - RNA, 19 nt, Artificial Sequence
  Description of Artificial Sequence: Synthetic oligonucleotide
aaguaggagcaugaccaag

SEQ ID NO: 2268973 - RNA, 19 nt, Artificial Sequence
  Description of Artificial Sequence: Synthetic oligonucleotide
accacaacggccuauccua

SEQ ID NO: 2268974 - RNA, 19 nt, Artificial Sequence
  Description of Artificial Sequence: Synthetic oligonucleotide
acucacacgcagcccacac

SEQ ID NO: 2268975 - RNA, 19 nt, Artificial Sequence
  Description of Artificial Sequence: Synthetic oligonucleotide
ccaaccagggaccugaaag

SEQ ID NO: 2268976 - RNA, 19 nt, Artificial Sequence
  Description of Artificial Sequence: Synthetic oligonucleotide
uuacucccaucccaaaguc

SEQ ID NO: 2268977 - RNA, 19 nt, Artificial Sequence
  Description of Artificial Sequence: Synthetic oligonucleotide
uggaaaagugagggguugg

SEQ ID NO: 2268978 - RNA, 19 nt, Artificial Sequence
  Description of Artificial Sequence: Synthetic oligonucleotide
aaccuauuccuuucauaaa

SEQ ID NO: 2268979 - RNA, 19 nt, Artificial Sequence
  Description of Artificial Sequence: Synthetic oligonucleotide
uauacaccccgagucaaca

SEQ ID NO: 2268980 - RNA, 19 nt, Artificial Sequence
  Description of Artificial Sequence: Synthetic oligonucleotide
uccagacacacugcuacag

SEQ ID NO: 2268981 - RNA, 19 nt, Artificial Sequence
  Description of Artificial Sequence: Synthetic oligonucleotide
aauaugacaccgggcucag

SEQ ID NO: 2268982 - RNA, 19 nt, Artificial Sequence
  Description of Artificial Sequence: Synthetic oligonucleotide
ugugugaaugugugugugu

SEQ ID NO: 2268983 - RNA, 19 nt, Artificial Sequence
  Description of Artificial Sequence: Synthetic oligonucleotide
guuugauucuccauagguc

SEQ ID NO: 2268984 - RNA, 19 nt, Artificial Sequence
  Description of Artificial Sequence: Synthetic oligonucleotide
uaggagcaugaccaagggc

SEQ ID NO: 2268985 - RNA, 19 nt, Artificial Sequence
  Description of Artificial Sequence: Synthetic oligonucleotide
accgacuucccagugguuc

SEQ ID NO: 2268986 - RNA, 19 nt, Artificial Sequence
  Description of Artificial Sequence: Synthetic oligonucleotide
ugcaccuauguauguggcc

SEQ ID NO: 2268987 - RNA, 19 nt, Artificial Sequence
  Description of Artificial Sequence: Synthetic oligonucleotide
gugaaugugugugugugug

SEQ ID NO: 2268988 - RNA, 19 nt, Artificial Sequence
  Description of Artificial Sequence: Synthetic oligonucleotide
auauaaagggcacgguauu

SEQ ID NO: 2268989 - RNA, 19 nt, Artificial Sequence
  Description of Artificial Sequence: Synthetic oligonucleotide
aacauggugguuaucucau

SEQ ID NO: 2268990 - RNA, 19 nt, Artificial Sequence
  Description of Artificial Sequence: Synthetic oligonucleotide
cagguugguuuucugguag

SEQ ID NO: 2268991 - RNA, 19 nt, Artificial Sequence
  Description of Artificial Sequence: Synthetic oligonucleotide
gacagacacagcaaccgug

SEQ ID NO: 2268992 - RNA, 19 nt, Artificial Sequence
  Description of Artificial Sequence: Synthetic oligonucleotide
agugucaauaugacaccgg

SEQ ID NO: 2268993 - RNA, 19 nt, Artificial Sequence
  Description of Artificial Sequence: Synthetic oligonucleotide
uuguggggaguucaccaca

SEQ ID NO: 2268994 - RNA, 19 nt, Artificial Sequence
  Description of Artificial Sequence: Synthetic oligonucleotide
agcuuaaguuacucccauc

SEQ ID NO: 2268995 - RNA, 19 nt, Artificial Sequence
  Description of Artificial Sequence: Synthetic oligonucleotide
uuuucugguagggucagua

SEQ ID NO: 2268996 - RNA, 19 nt, Artificial Sequence
  Description of Artificial Sequence: Synthetic oligonucleotide
ugugaaugugugugugugu

SEQ ID NO: 2268997 - RNA, 19 nt, Artificial Sequence
  Description of Artificial Sequence: Synthetic oligonucleotide
gauauaaagggcacgguau

SEQ ID NO: 2268998 - RNA, 19 nt, Artificial Sequence
  Description of Artificial Sequence: Synthetic oligonucleotide
cacgguauuuacaacagua

SEQ ID NO: 2268999 - RNA, 19 nt, Artificial Sequence
  Description of Artificial Sequence: Synthetic oligonucleotide
agcaaaaugcugggccacc

SEQ ID NO: 2269000 - RNA, 19 nt, Artificial Sequence
  Description of Artificial Sequence: Synthetic oligonucleotide
uacaccccgagucaacaaa

SEQ ID NO: 2269001 - RNA, 19 nt, Artificial Sequence
  Description of Artificial Sequence: Synthetic oligonucleotide
ggaccugaaaguaugcugc

SEQ ID NO: 2269002 - RNA, 19 nt, Artificial Sequence
  Description of Artificial Sequence: Synthetic oligonucleotide
cuccauaggucaucugagc

SEQ ID NO: 2269003 - RNA, 19 nt, Artificial Sequence
  Description of Artificial Sequence: Synthetic oligonucleotide
agguugguuuucugguagg

SEQ ID NO: 2269004 - RNA, 19 nt, Artificial Sequence
  Description of Artificial Sequence: Synthetic oligonucleotide
ggucaucugagcuccaccc

SEQ ID NO: 2269005 - RNA, 19 nt, Artificial Sequence
  Description of Artificial Sequence: Synthetic oligonucleotide
cagugucaauaugacaccg

SEQ ID NO: 2269006 - RNA, 19 nt, Artificial Sequence
  Description of Artificial Sequence: Synthetic oligonucleotide
gauuuuagacccagcugac

SEQ ID NO: 2269007 - RNA, 19 nt, Artificial Sequence
  Description of Artificial Sequence: Synthetic oligonucleotide
acacggagagcccaucuga

SEQ ID NO: 2269008 - RNA, 19 nt, Artificial Sequence
  Description of Artificial Sequence: Synthetic oligonucleotide
caugaccaagggcaacacg

SEQ ID NO: 2269009 - RNA, 19 nt, Artificial Sequence
  Description of Artificial Sequence: Synthetic oligonucleotide
uagcuuaaguuacucccau

SEQ ID NO: 2269010 - RNA, 19 nt, Artificial Sequence
  Description of Artificial Sequence: Synthetic oligonucleotide
caaccgugggguagggugg

SEQ ID NO: 2269011 - RNA, 19 nt, Artificial Sequence
  Description of Artificial Sequence: Synthetic oligonucleotide
aguaaacagguugguuuuc

SEQ ID NO: 2269012 - RNA, 19 nt, Artificial Sequence
  Description of Artificial Sequence: Synthetic oligonucleotide
uggggaguucaccacaguu

SEQ ID NO: 2269013 - RNA, 19 nt, Artificial Sequence
  Description of Artificial Sequence: Synthetic oligonucleotide
aguccaaaguggacaggcc

SEQ ID NO: 2269014 - RNA, 19 nt, Artificial Sequence
  Description of Artificial Sequence: Synthetic oligonucleotide
ugaaugugugugugugugu

SEQ ID NO: 2269015 - RNA, 19 nt, Artificial Sequence
  Description of Artificial Sequence: Synthetic oligonucleotide
gugugaaugugugugugug

SEQ ID NO: 2269016 - RNA, 19 nt, Artificial Sequence
  Description of Artificial Sequence: Synthetic oligonucleotide
acacgcagcccacacugag

SEQ ID NO: 2269017 - RNA, 19 nt, Artificial Sequence
  Description of Artificial Sequence: Synthetic oligonucleotide
uugauucuccauaggucau

SEQ ID NO: 2269018 - RNA, 19 nt, Artificial Sequence
  Description of Artificial Sequence: Synthetic oligonucleotide
aaagaaguauguacauguu

SEQ ID NO: 2269019 - RNA, 19 nt, Artificial Sequence
  Description of Artificial Sequence: Synthetic oligonucleotide
ccaaaguaggagcaugacc

SEQ ID NO: 2269020 - RNA, 19 nt, Artificial Sequence
  Description of Artificial Sequence: Synthetic oligonucleotide
agggcacgguauuuacaac

SEQ ID NO: 2269021 - RNA, 19 nt, Artificial Sequence
  Description of Artificial Sequence: Synthetic oligonucleotide
aguggacaggccuuccaga

SEQ ID NO: 2269022 - RNA, 19 nt, Artificial Sequence
  Description of Artificial Sequence: Synthetic oligonucleotide
gggaccugaaaguaugcug

SEQ ID NO: 2269023 - RNA, 19 nt, Artificial Sequence
  Description of Artificial Sequence: Synthetic oligonucleotide
aaaugcugggccaccacaa

SEQ ID NO: 2269024 - RNA, 19 nt, Artificial Sequence
  Description of Artificial Sequence: Synthetic oligonucleotide
ucuuuuaguugaguacaaa

SEQ ID NO: 2269025 - RNA, 19 nt, Artificial Sequence
  Description of Artificial Sequence: Synthetic oligonucleotide
acaguucuuugagagcuug

SEQ ID NO: 2269026 - RNA, 19 nt, Artificial Sequence
  Description of Artificial Sequence: Synthetic oligonucleotide
gagggguuggccuaagacu

SEQ ID NO: 2269027 - RNA, 19 nt, Artificial Sequence
  Description of Artificial Sequence: Synthetic oligonucleotide
acccagcugacagacacag

SEQ ID NO: 2269028 - RNA, 19 nt, Artificial Sequence
  Description of Artificial Sequence: Synthetic oligonucleotide
uaagacucacacgcagccc

SEQ ID NO: 2269029 - RNA, 19 nt, Artificial Sequence
  Description of Artificial Sequence: Synthetic oligonucleotide
acaacggccuauccuacau

SEQ ID NO: 2269030 - RNA, 19 nt, Artificial Sequence
  Description of Artificial Sequence: Synthetic oligonucleotide
augugugugugugugugug

SEQ ID NO: 2269031 - RNA, 19 nt, Artificial Sequence
  Description of Artificial Sequence: Synthetic oligonucleotide
caauaugacaccgggcuca

SEQ ID NO: 2269032 - RNA, 19 nt, Artificial Sequence
  Description of Artificial Sequence: Synthetic oligonucleotide
acaccgggcucagaaauag

SEQ ID NO: 2269033 - RNA, 19 nt, Artificial Sequence
  Description of Artificial Sequence: Synthetic oligonucleotide
guuacucccaucccaaagu

SEQ ID NO: 2269034 - RNA, 19 nt, Artificial Sequence
  Description of Artificial Sequence: Synthetic oligonucleotide
uauaaagggcacgguauuu

SEQ ID NO: 2269035 - RNA, 19 nt, Artificial Sequence
  Description of Artificial Sequence: Synthetic oligonucleotide
acaccccgagucaacaaac

SEQ ID NO: 2269036 - RNA, 19 nt, Artificial Sequence
  Description of Artificial Sequence: Synthetic oligonucleotide
gagucucuugcuuuauaaa

SEQ ID NO: 2269037 - RNA, 19 nt, Artificial Sequence
  Description of Artificial Sequence: Synthetic oligonucleotide
cugcaccuauguauguggc

SEQ ID NO: 2269038 - RNA, 19 nt, Artificial Sequence
  Description of Artificial Sequence: Synthetic oligonucleotide
gacacagcaaccguggggu

SEQ ID NO: 2269039 - RNA, 19 nt, Artificial Sequence
  Description of Artificial Sequence: Synthetic oligonucleotide
ugugugugugugugugucu

SEQ ID NO: 2269040 - RNA, 19 nt, Artificial Sequence
  Description of Artificial Sequence: Synthetic oligonucleotide
cuauacaccccgagucaac

SEQ ID NO: 2269041 - RNA, 19 nt, Artificial Sequence
  Description of Artificial Sequence: Synthetic oligonucleotide
gagcgugugugaaugugug

SEQ ID NO: 2269042 - RNA, 19 nt, Artificial Sequence
  Description of Artificial Sequence: Synthetic oligonucleotide
gugugagcgugugugaaug

SEQ ID NO: 2269043 - RNA, 19 nt, Artificial Sequence
  Description of Artificial Sequence: Synthetic oligonucleotide
ugauugcuauacaccccga

SEQ ID NO: 2269044 - RNA, 19 nt, Artificial Sequence
  Description of Artificial Sequence: Synthetic oligonucleotide
agcagaguccaaaguggac

SEQ ID NO: 2269045 - RNA, 19 nt, Artificial Sequence
  Description of Artificial Sequence: Synthetic oligonucleotide
aguugaguacaaaccccuc

SEQ ID NO: 2269046 - RNA, 19 nt, Artificial Sequence
  Description of Artificial Sequence: Synthetic oligonucleotide
cgagucaacaaacauggug

SEQ ID NO: 2269047 - RNA, 19 nt, Artificial Sequence
  Description of Artificial Sequence: Synthetic oligonucleotide
gugugugugugucucacaa

SEQ ID NO: 2269048 - RNA, 19 nt, Artificial Sequence
  Description of Artificial Sequence: Synthetic oligonucleotide
ugugugugugugugucuca

SEQ ID NO: 2269049 - RNA, 19 nt, Artificial Sequence
  Description of Artificial Sequence: Synthetic oligonucleotide
gcaccuauguauguggccc

SEQ ID NO: 2269050 - RNA, 19 nt, Artificial Sequence
  Description of Artificial Sequence: Synthetic oligonucleotide
ugcugcaccuauguaugug

SEQ ID NO: 2269051 - RNA, 19 nt, Artificial Sequence
  Description of Artificial Sequence: Synthetic oligonucleotide
ugugugugugugugugugu

SEQ ID NO: 2269052 - RNA, 19 nt, Artificial Sequence
  Description of Artificial Sequence: Synthetic oligonucleotide
ugugugugugugucucaca

SEQ ID NO: 2269053 - RNA, 19 nt, Artificial Sequence
  Description of Artificial Sequence: Synthetic oligonucleotide
ccaagggcaacacggagag

SEQ ID NO: 2269054 - RNA, 19 nt, Artificial Sequence
  Description of Artificial Sequence: Synthetic oligonucleotide
gucuuagaggagugugagc

SEQ ID NO: 2269055 - RNA, 19 nt, Artificial Sequence
  Description of Artificial Sequence: Synthetic oligonucleotide
uuccagacacacugcuaca

SEQ ID NO: 2269056 - RNA, 19 nt, Artificial Sequence
  Description of Artificial Sequence: Synthetic oligonucleotide
ggauauaaagggcacggua

SEQ ID NO: 2269057 - RNA, 19 nt, Artificial Sequence
  Description of Artificial Sequence: Synthetic oligonucleotide
auaaagggcacgguauuua

SEQ ID NO: 2269058 - RNA, 19 nt, Artificial Sequence
  Description of Artificial Sequence: Synthetic oligonucleotide
acucccaucccaaagucaa

SEQ ID NO: 2269059 - RNA, 19 nt, Artificial Sequence
  Description of Artificial Sequence: Synthetic oligonucleotide
aguagucuuuuaguugagu

SEQ ID NO: 2269060 - RNA, 19 nt, Artificial Sequence
  Description of Artificial Sequence: Synthetic oligonucleotide
caccuauguauguggcccc

SEQ ID NO: 2269061 - RNA, 19 nt, Artificial Sequence
  Description of Artificial Sequence: Synthetic oligonucleotide
ggagucuuagaggagugug

SEQ ID NO: 2269062 - RNA, 19 nt, Artificial Sequence
  Description of Artificial Sequence: Synthetic oligonucleotide
auuuuagacccagcugaca

SEQ ID NO: 2269063 - RNA, 19 nt, Artificial Sequence
  Description of Artificial Sequence: Synthetic oligonucleotide
caaaaugcugggccaccac

SEQ ID NO: 2269064 - RNA, 19 nt, Artificial Sequence
  Description of Artificial Sequence: Synthetic oligonucleotide
gugugugugugugugugug

SEQ ID NO: 2269065 - RNA, 19 nt, Artificial Sequence
  Description of Artificial Sequence: Synthetic oligonucleotide
ugaaaguaugcugcugauu

SEQ ID NO: 2269066 - RNA, 19 nt, Artificial Sequence
  Description of Artificial Sequence: Synthetic oligonucleotide
aaccgugggguaggguggg

SEQ ID NO: 2269067 - RNA, 19 nt, Artificial Sequence
  Description of Artificial Sequence: Synthetic oligonucleotide
gagucuuagaggaguguga

SEQ ID NO: 2269068 - RNA, 19 nt, Artificial Sequence
  Description of Artificial Sequence: Synthetic oligonucleotide
gccuaagacucacacgcag

SEQ ID NO: 2269069 - RNA, 19 nt, Artificial Sequence
  Description of Artificial Sequence: Synthetic oligonucleotide
ccuaagacucacacgcagc

SEQ ID NO: 2269070 - RNA, 19 nt, Artificial Sequence
  Description of Artificial Sequence: Synthetic oligonucleotide
gccaauauacaggauauaa

SEQ ID NO: 2269071 - RNA, 19 nt, Artificial Sequence
  Description of Artificial Sequence: Synthetic oligonucleotide
gguugguuuucugguaggg

SEQ ID NO: 2269072 - RNA, 19 nt, Artificial Sequence
  Description of Artificial Sequence: Synthetic oligonucleotide
cagggaccugaaaguaugc

SEQ ID NO: 2269073 - RNA, 19 nt, Artificial Sequence
  Description of Artificial Sequence: Synthetic oligonucleotide
gaaacaccagugucaauau

SEQ ID NO: 2269074 - RNA, 19 nt, Artificial Sequence
  Description of Artificial Sequence: Synthetic oligonucleotide
cuggaaaagugagggguug

SEQ ID NO: 2269075 - RNA, 19 nt, Artificial Sequence
  Description of Artificial Sequence: Synthetic oligonucleotide
ugagagcuugggagggaac

SEQ ID NO: 2269076 - RNA, 19 nt, Artificial Sequence
  Description of Artificial Sequence: Synthetic oligonucleotide
gucucacaaccaaccaggg

SEQ ID NO: 2269077 - RNA, 19 nt, Artificial Sequence
  Description of Artificial Sequence: Synthetic oligonucleotide
ugauucuccauaggucauc

SEQ ID NO: 2269078 - RNA, 19 nt, Artificial Sequence
  Description of Artificial Sequence: Synthetic oligonucleotide
uagagucucuugcuuuaua

SEQ ID NO: 2269079 - RNA, 19 nt, Artificial Sequence
  Description of Artificial Sequence: Synthetic oligonucleotide
gaauaccuuuagcuuaagu

SEQ ID NO: 2269080 - RNA, 19 nt, Artificial Sequence
  Description of Artificial Sequence: Synthetic oligonucleotide
agugugagcgugugugaau

SEQ ID NO: 2269081 - RNA, 19 nt, Artificial Sequence
  Description of Artificial Sequence: Synthetic oligonucleotide
gugugugaaugugugugug

SEQ ID NO: 2269082 - RNA, 19 nt, Artificial Sequence
  Description of Artificial Sequence: Synthetic oligonucleotide
caguagucuuuuaguugag

SEQ ID NO: 2269083 - RNA, 19 nt, Artificial Sequence
  Description of Artificial Sequence: Synthetic oligonucleotide
aaaccccucccggugauuu

SEQ ID NO: 2269084 - RNA, 19 nt, Artificial Sequence
  Description of Artificial Sequence: Synthetic oligonucleotide
ccagugucaauaugacacc

SEQ ID NO: 2269085 - RNA, 19 nt, Artificial Sequence
  Description of Artificial Sequence: Synthetic oligonucleotide
agagcuugggagggaacug

SEQ ID NO: 2269086 - RNA, 19 nt, Artificial Sequence
  Description of Artificial Sequence: Synthetic oligonucleotide
ugcugcugauucccugcug

SEQ ID NO: 2269087 - RNA, 19 nt, Artificial Sequence
  Description of Artificial Sequence: Synthetic oligonucleotide
ggcacgguauuuacaacag

SEQ ID NO: 2269088 - RNA, 19 nt, Artificial Sequence
  Description of Artificial Sequence: Synthetic oligonucleotide
caaccaaccagggaccuga

SEQ ID NO: 2269089 - RNA, 19 nt, Artificial Sequence
  Description of Artificial Sequence: Synthetic oligonucleotide
cacagcaaccgugggguag

SEQ ID NO: 2269090 - RNA, 19 nt, Artificial Sequence
  Description of Artificial Sequence: Synthetic oligonucleotide
ccagggaccugaaaguaug

SEQ ID NO: 2269091 - RNA, 19 nt, Artificial Sequence
  Description of Artificial Sequence: Synthetic oligonucleotide
accccgagucaacaaacau

SEQ ID NO: 2269092 - RNA, 19 nt, Artificial Sequence
  Description of Artificial Sequence: Synthetic oligonucleotide
gugagcgugugugaaugug

SEQ ID NO: 2269093 - RNA, 19 nt, Artificial Sequence
  Description of Artificial Sequence: Synthetic oligonucleotide
aggauauaaagggcacggu

SEQ ID NO: 2269094 - RNA, 19 nt, Artificial Sequence
  Description of Artificial Sequence: Synthetic oligonucleotide
agggcaacacggagagccc

SEQ ID NO: 2269095 - RNA, 19 nt, Artificial Sequence
  Description of Artificial Sequence: Synthetic oligonucleotide
acauguuuacaaggaugga

SEQ ID NO: 2269096 - RNA, 19 nt, Artificial Sequence
  Description of Artificial Sequence: Synthetic oligonucleotide
accgggcucagaaauagaa

SEQ ID NO: 2269097 - RNA, 19 nt, Artificial Sequence
  Description of Artificial Sequence: Synthetic oligonucleotide
cacacugagccuggaaauc

SEQ ID NO: 2269098 - RNA, 19 nt, Artificial Sequence
  Description of Artificial Sequence: Synthetic oligonucleotide
cagggaaacaaaaccgacu

SEQ ID NO: 2269099 - RNA, 19 nt, Artificial Sequence
  Description of Artificial Sequence: Synthetic oligonucleotide
uggaugcuacacugugcgu

SEQ ID NO: 2269100 - RNA, 19 nt, Artificial Sequence
  Description of Artificial Sequence: Synthetic oligonucleotide
ccccgagucaacaaacaug

SEQ ID NO: 2269101 - RNA, 19 nt, Artificial Sequence
  Description of Artificial Sequence: Synthetic oligonucleotide
guguguguguguguguguc

SEQ ID NO: 2269102 - RNA, 19 nt, Artificial Sequence
  Description of Artificial Sequence: Synthetic oligonucleotide
auacaccccgagucaacaa

SEQ ID NO: 2269103 - RNA, 19 nt, Artificial Sequence
  Description of Artificial Sequence: Synthetic oligonucleotide
cugcuacagggaaacaaaa

SEQ ID NO: 2269104 - RNA, 19 nt, Artificial Sequence
  Description of Artificial Sequence: Synthetic oligonucleotide
agaauaccuuuagcuuaag

SEQ ID NO: 2269105 - RNA, 19 nt, Artificial Sequence
  Description of Artificial Sequence: Synthetic oligonucleotide
ccagacacacugcuacagg

SEQ ID NO: 2269106 - RNA, 19 nt, Artificial Sequence
  Description of Artificial Sequence: Synthetic oligonucleotide
uaggucaucugagcuccac

SEQ ID NO: 2269107 - RNA, 19 nt, Artificial Sequence
  Description of Artificial Sequence: Synthetic oligonucleotide
augacaccgggcucagaaa

SEQ ID NO: 2269108 - RNA, 19 nt, Artificial Sequence
  Description of Artificial Sequence: Synthetic oligonucleotide
gugugugugugugugucuc

SEQ ID NO: 2269109 - RNA, 19 nt, Artificial Sequence
  Description of Artificial Sequence: Synthetic oligonucleotide
gggaguucaccacaguucu

SEQ ID NO: 2269110 - RNA, 19 nt, Artificial Sequence
  Description of Artificial Sequence: Synthetic oligonucleotide
caucugagaagcccugaaa

SEQ ID NO: 2269111 - RNA, 19 nt, Artificial Sequence
  Description of Artificial Sequence: Synthetic oligonucleotide
agacucacacgcagcccac

SEQ ID NO: 2269112 - RNA, 19 nt, Artificial Sequence
  Description of Artificial Sequence: Synthetic oligonucleotide
ccucccggugauuuuagac

SEQ ID NO: 2269113 - RNA, 19 nt, Artificial Sequence
  Description of Artificial Sequence: Synthetic oligonucleotide
caaagucaaagugguuuga

SEQ ID NO: 2269114 - RNA, 19 nt, Artificial Sequence
  Description of Artificial Sequence: Synthetic oligonucleotide
gugugugugugugucucac

SEQ ID NO: 2269115 - RNA, 19 nt, Artificial Sequence
  Description of Artificial Sequence: Synthetic oligonucleotide
ugguagggucaguagucuu

SEQ ID NO: 2269116 - RNA, 19 nt, Artificial Sequence
  Description of Artificial Sequence: Synthetic oligonucleotide
gguggaugcuacacugugc

SEQ ID NO: 2269117 - RNA, 19 nt, Artificial Sequence
  Description of Artificial Sequence: Synthetic oligonucleotide
gggguacugauugcuauac

SEQ ID NO: 2269118 - RNA, 19 nt, Artificial Sequence
  Description of Artificial Sequence: Synthetic oligonucleotide
ggggaguucaccacaguuc

SEQ ID NO: 2269119 - RNA, 19 nt, Artificial Sequence
  Description of Artificial Sequence: Synthetic oligonucleotide
agcccaucugagaagcccu

SEQ ID NO: 2269120 - RNA, 19 nt, Artificial Sequence
  Description of Artificial Sequence: Synthetic oligonucleotide
guaaacagguugguuuucu

SEQ ID NO: 2269121 - RNA, 19 nt, Artificial Sequence
  Description of Artificial Sequence: Synthetic oligonucleotide
ucccaaagucaaagugguu

SEQ ID NO: 2269122 - RNA, 19 nt, Artificial Sequence
  Description of Artificial Sequence: Synthetic oligonucleotide
gaccugaaaguaugcugcu

SEQ ID NO: 2269123 - RNA, 19 nt, Artificial Sequence
  Description of Artificial Sequence: Synthetic oligonucleotide
auagagucucuugcuuuau

SEQ ID NO: 2269124 - RNA, 19 nt, Artificial Sequence
  Description of Artificial Sequence: Synthetic oligonucleotide
acaaccaaccagggaccug

SEQ ID NO: 2269125 - RNA, 19 nt, Artificial Sequence
  Description of Artificial Sequence: Synthetic oligonucleotide
gggaaacaaaaccgacuuc

SEQ ID NO: 2269126 - RNA, 19 nt, Artificial Sequence
  Description of Artificial Sequence: Synthetic oligonucleotide
cccugaaacaccaguguca

SEQ ID NO: 2269127 - RNA, 19 nt, Artificial Sequence
  Description of Artificial Sequence: Synthetic oligonucleotide
ggaugcuacacugugcgua

SEQ ID NO: 2269128 - RNA, 19 nt, Artificial Sequence
  Description of Artificial Sequence: Synthetic oligonucleotide
gucuuuuaguugaguacaa

SEQ ID NO: 2269129 - RNA, 19 nt, Artificial Sequence
  Description of Artificial Sequence: Synthetic oligonucleotide
ggucaguagucuuuuaguu

SEQ ID NO: 2269130 - RNA, 19 nt, Artificial Sequence
  Description of Artificial Sequence: Synthetic oligonucleotide
caguaaacagguugguuuu

SEQ ID NO: 2269131 - RNA, 19 nt, Artificial Sequence
  Description of Artificial Sequence: Synthetic oligonucleotide
gggucaguagucuuuuagu

SEQ ID NO: 2269132 - RNA, 19 nt, Artificial Sequence
  Description of Artificial Sequence: Synthetic oligonucleotide
cgguauuuacaacaguaca

SEQ ID NO: 2269133 - RNA, 19 nt, Artificial Sequence
  Description of Artificial Sequence: Synthetic oligonucleotide
caccccgagucaacaaaca

SEQ ID NO: 2269134 - RNA, 19 nt, Artificial Sequence
  Description of Artificial Sequence: Synthetic oligonucleotide
cacaacggccuauccuaca

SEQ ID NO: 2269135 - RNA, 19 nt, Artificial Sequence
  Description of Artificial Sequence: Synthetic oligonucleotide
guugguuuucugguagggu

SEQ ID NO: 2269136 - RNA, 19 nt, Artificial Sequence
  Description of Artificial Sequence: Synthetic oligonucleotide
gauucccugcugcaccuau

SEQ ID NO: 2269137 - RNA, 19 nt, Artificial Sequence
  Description of Artificial Sequence: Synthetic oligonucleotide
ggagugugagcguguguga

SEQ ID NO: 2269138 - RNA, 19 nt, Artificial Sequence
  Description of Artificial Sequence: Synthetic oligonucleotide
aaccccucccggugauuuu

SEQ ID NO: 2269139 - RNA, 19 nt, Artificial Sequence
  Description of Artificial Sequence: Synthetic oligonucleotide
ggccuauccuacauuaaaa

SEQ ID NO: 2269140 - RNA, 19 nt, Artificial Sequence
  Description of Artificial Sequence: Synthetic oligonucleotide
uagggucaguagucuuuua

SEQ ID NO: 2269141 - RNA, 19 nt, Artificial Sequence
  Description of Artificial Sequence: Synthetic oligonucleotide
agugagggguuggccuaag

SEQ ID NO: 2269142 - RNA, 19 nt, Artificial Sequence
  Description of Artificial Sequence: Synthetic oligonucleotide
caacaaacauggugguuau

SEQ ID NO: 2269143 - RNA, 19 nt, Artificial Sequence
  Description of Artificial Sequence: Synthetic oligonucleotide
ggcucagaaauagaaaauu

SEQ ID NO: 2269144 - RNA, 19 nt, Artificial Sequence
  Description of Artificial Sequence: Synthetic oligonucleotide
cccagugguucuccuuugg

SEQ ID NO: 2269145 - RNA, 19 nt, Artificial Sequence
  Description of Artificial Sequence: Synthetic oligonucleotide
agccaauauacaggauaua

SEQ ID NO: 2269146 - RNA, 19 nt, Artificial Sequence
  Description of Artificial Sequence: Synthetic oligonucleotide
cugaaaguaugcugcugau

SEQ ID NO: 2269147 - RNA, 19 nt, Artificial Sequence
  Description of Artificial Sequence: Synthetic oligonucleotide
guacaguaaacagguuggu

SEQ ID NO: 2269148 - RNA, 19 nt, Artificial Sequence
  Description of Artificial Sequence: Synthetic oligonucleotide
caccacaacggccuauccu

SEQ ID NO: 2269149 - RNA, 19 nt, Artificial Sequence
  Description of Artificial Sequence: Synthetic oligonucleotide
gacaccgggcucagaaaua

SEQ ID NO: 2269150 - RNA, 19 nt, Artificial Sequence
  Description of Artificial Sequence: Synthetic oligonucleotide
gcuauacaccccgagucaa

SEQ ID NO: 2269151 - RNA, 19 nt, Artificial Sequence
  Description of Artificial Sequence: Synthetic oligonucleotide
ggguacugauugcuauaca

SEQ ID NO: 2269152 - RNA, 19 nt, Artificial Sequence
  Description of Artificial Sequence: Synthetic oligonucleotide
ccggugauuuuagacccag

SEQ ID NO: 2269153 - RNA, 19 nt, Artificial Sequence
  Description of Artificial Sequence: Synthetic oligonucleotide
ccugaaacaccagugucaa

SEQ ID NO: 2269154 - RNA, 19 nt, Artificial Sequence
  Description of Artificial Sequence: Synthetic oligonucleotide
gugagggguuggccuaaga

SEQ ID NO: 2269155 - RNA, 19 nt, Artificial Sequence
  Description of Artificial Sequence: Synthetic oligonucleotide
ccacaacggccuauccuac

SEQ ID NO: 2269156 - RNA, 19 nt, Artificial Sequence
  Description of Artificial Sequence: Synthetic oligonucleotide
caagggcaacacggagagc

SEQ ID NO: 2269157 - RNA, 19 nt, Artificial Sequence
  Description of Artificial Sequence: Synthetic oligonucleotide
ccaaaguggacaggccuuc

SEQ ID NO: 2269158 - RNA, 19 nt, Artificial Sequence
  Description of Artificial Sequence: Synthetic oligonucleotide
cccaaaguaggagcaugac

SEQ ID NO: 2269159 - RNA, 19 nt, Artificial Sequence
  Description of Artificial Sequence: Synthetic oligonucleotide
cacacgcagcccacacuga

SEQ ID NO: 2269160 - RNA, 19 nt, Artificial Sequence
  Description of Artificial Sequence: Synthetic oligonucleotide
acacagcaaccguggggua

SEQ ID NO: 2269161 - RNA, 19 nt, Artificial Sequence
  Description of Artificial Sequence: Synthetic oligonucleotide
ugauucccugcugcaccua

SEQ ID NO: 2269162 - RNA, 19 nt, Artificial Sequence
  Description of Artificial Sequence: Synthetic oligonucleotide
guagggucaguagucuuuu

SEQ ID NO: 2269163 - RNA, 19 nt, Artificial Sequence
  Description of Artificial Sequence: Synthetic oligonucleotide
gugggguagggugggacua

SEQ ID NO: 2269164 - RNA, 19 nt, Artificial Sequence
  Description of Artificial Sequence: Synthetic oligonucleotide
acggccuauccuacauuaa

SEQ ID NO: 2269165 - RNA, 19 nt, Artificial Sequence
  Description of Artificial Sequence: Synthetic oligonucleotide
ggagcaugaccaagggcaa

SEQ ID NO: 2269166 - RNA, 19 nt, Artificial Sequence
  Description of Artificial Sequence: Synthetic oligonucleotide
ccaccacaacggccuaucc

SEQ ID NO: 2269167 - RNA, 19 nt, Artificial Sequence
  Description of Artificial Sequence: Synthetic oligonucleotide
gcguuguggggaguucacc

SEQ ID NO: 2269168 - RNA, 19 nt, Artificial Sequence
  Description of Artificial Sequence: Synthetic oligonucleotide
auaugacaccgggcucaga

SEQ ID NO: 2269169 - RNA, 19 nt, Artificial Sequence
  Description of Artificial Sequence: Synthetic oligonucleotide
caccgggcucagaaauaga

SEQ ID NO: 2269170 - RNA, 19 nt, Artificial Sequence
  Description of Artificial Sequence: Synthetic oligonucleotide
cugguagggucaguagucu

SEQ ID NO: 2269171 - RNA, 19 nt, Artificial Sequence
  Description of Artificial Sequence: Synthetic oligonucleotide
auaggucaucugagcucca

SEQ ID NO: 2269172 - RNA, 19 nt, Artificial Sequence
  Description of Artificial Sequence: Synthetic oligonucleotide
ccagugguucuccuuugga

SEQ ID NO: 2269173 - RNA, 19 nt, Artificial Sequence
  Description of Artificial Sequence: Synthetic oligonucleotide
aaccgacuucccagugguu

SEQ ID NO: 2269174 - RNA, 19 nt, Artificial Sequence
  Description of Artificial Sequence: Synthetic oligonucleotide
gucaacaaacauggugguu

SEQ ID NO: 2269175 - RNA, 19 nt, Artificial Sequence
  Description of Artificial Sequence: Synthetic oligonucleotide
cucacacgcagcccacacu

SEQ ID NO: 2269176 - RNA, 19 nt, Artificial Sequence
  Description of Artificial Sequence: Synthetic oligonucleotide
ggcguuguggggaguucac

SEQ ID NO: 2269177 - RNA, 19 nt, Artificial Sequence
  Description of Artificial Sequence: Synthetic oligonucleotide
gguagggucaguagucuuu

SEQ ID NO: 2269178 - RNA, 19 nt, Artificial Sequence
  Description of Artificial Sequence: Synthetic oligonucleotide
gccaccacaacggccuauc

SEQ ID NO: 2269179 - RNA, 19 nt, Artificial Sequence
  Description of Artificial Sequence: Synthetic oligonucleotide
augcuacacugugcguaaa

SEQ ID NO: 2269180 - RNA, 19 nt, Artificial Sequence
  Description of Artificial Sequence: Synthetic oligonucleotide
cccagcugacagacacagc

SEQ ID NO: 2269181 - RNA, 19 nt, Artificial Sequence
  Description of Artificial Sequence: Synthetic oligonucleotide
gggcguuguggggaguuca

SEQ ID NO: 2269182 - RNA, 19 nt, Artificial Sequence
  Description of Artificial Sequence: Synthetic oligonucleotide
gggcucagaaauagaaaau

SEQ ID NO: 2269183 - RNA, 19 nt, Artificial Sequence
  Description of Artificial Sequence: Synthetic oligonucleotide
cuucccagugguucuccuu

SEQ ID NO: 2269184 - RNA, 19 nt, Artificial Sequence
  Description of Artificial Sequence: Synthetic oligonucleotide
ggccuaagacucacacgca

SEQ ID NO: 2269185 - RNA, 19 nt, Artificial Sequence
  Description of Artificial Sequence: Synthetic oligonucleotide
cacaaccaaccagggaccu

SEQ ID NO: 2269186 - RNA, 19 nt, Artificial Sequence
  Description of Artificial Sequence: Synthetic oligonucleotide
caggccuuccagacacacu

SEQ ID NO: 2269187 - RNA, 19 nt, Artificial Sequence
  Description of Artificial Sequence: Synthetic oligonucleotide
gcccaucugagaagcccug

SEQ ID NO: 2269188 - RNA, 19 nt, Artificial Sequence
  Description of Artificial Sequence: Synthetic oligonucleotide
gcacgguauuuacaacagu

SEQ ID NO: 2269189 - RNA, 19 nt, Artificial Sequence
  Description of Artificial Sequence: Synthetic oligonucleotide
cugcugcaccuauguaugu

SEQ ID NO: 2269190 - RNA, 19 nt, Artificial Sequence
  Description of Artificial Sequence: Synthetic oligonucleotide
ccccucccggugauuuuag

SEQ ID NO: 2269191 - RNA, 19 nt, Artificial Sequence
  Description of Artificial Sequence: Synthetic oligonucleotide
cggccuauccuacauuaaa

SEQ ID NO: 2269192 - RNA, 19 nt, Artificial Sequence
  Description of Artificial Sequence: Synthetic oligonucleotide
gcaacacggagagcccauc

SEQ ID NO: 2269193 - RNA, 19 nt, Artificial Sequence
  Description of Artificial Sequence: Synthetic oligonucleotide
gggguuggccuaagacuca

SEQ ID NO: 2269194 - RNA, 19 nt, Artificial Sequence
  Description of Artificial Sequence: Synthetic oligonucleotide
cugaaacaccagugucaau

SEQ ID NO: 2269195 - RNA, 19 nt, Artificial Sequence
  Description of Artificial Sequence: Synthetic oligonucleotide
ccgugggguagggugggac

SEQ ID NO: 2269196 - RNA, 19 nt, Artificial Sequence
  Description of Artificial Sequence: Synthetic oligonucleotide
ccgacuucccagugguucu

SEQ ID NO: 2269197 - RNA, 19 nt, Artificial Sequence
  Description of Artificial Sequence: Synthetic oligonucleotide
ggguagggugggacuaaaa

SEQ ID NO: 2269198 - RNA, 19 nt, Artificial Sequence
  Description of Artificial Sequence: Synthetic oligonucleotide
caacggccuauccuacauu

SEQ ID NO: 2269199 - RNA, 19 nt, Artificial Sequence
  Description of Artificial Sequence: Synthetic oligonucleotide
cccggugauuuuagaccca

SEQ ID NO: 2269200 - RNA, 19 nt, Artificial Sequence
  Description of Artificial Sequence: Synthetic oligonucleotide
gggguagggugggacuaaa

SEQ ID NO: 2269201 - RNA, 19 nt, Artificial Sequence
  Description of Artificial Sequence: Synthetic oligonucleotide
ggggcguuguggggaguuc

SEQ ID NO: 2269202 - RNA, 19 nt, Artificial Sequence
  Description of Artificial Sequence: Synthetic oligonucleotide
ccgagucaacaaacauggu

SEQ ID NO: 2269203 - RNA, 19 nt, Artificial Sequence
  Description of Artificial Sequence: Synthetic oligonucleotide
caaaccccucccggugauu

SEQ ID NO: 2269204 - RNA, 19 nt, Artificial Sequence
  Description of Artificial Sequence: Synthetic oligonucleotide
aaagacucaaauauggugg

SEQ ID NO: 2269205 - RNA, 19 nt, Artificial Sequence
  Description of Artificial Sequence: Synthetic oligonucleotide
aagucuaagccgcuguucc

SEQ ID NO: 2269206 - RNA, 19 nt, Artificial Sequence
  Description of Artificial Sequence: Synthetic oligonucleotide
aaggcugggcacuacagcc

SEQ ID NO: 2269207 - RNA, 19 nt, Artificial Sequence
  Description of Artificial Sequence: Synthetic oligonucleotide
uguacaugguccuucaggg

SEQ ID NO: 2269208 - RNA, 19 nt, Artificial Sequence
  Description of Artificial Sequence: Synthetic oligonucleotide
uggagaaagacucaaauau

SEQ ID NO: 2269209 - RNA, 19 nt, Artificial Sequence
  Description of Artificial Sequence: Synthetic oligonucleotide
caugcuauugcucagcugc

SEQ ID NO: 2269210 - RNA, 19 nt, Artificial Sequence
  Description of Artificial Sequence: Synthetic oligonucleotide
aaaacaggguugugggucc

SEQ ID NO: 2269211 - RNA, 19 nt, Artificial Sequence
  Description of Artificial Sequence: Synthetic oligonucleotide
gagaaagacucaaauaugg

SEQ ID NO: 2269212 - RNA, 19 nt, Artificial Sequence
  Description of Artificial Sequence: Synthetic oligonucleotide
ugaggcuucuuccacaggg

SEQ ID NO: 2269213 - RNA, 19 nt, Artificial Sequence
  Description of Artificial Sequence: Synthetic oligonucleotide
gaaagacucaaauauggug

SEQ ID NO: 2269214 - RNA, 19 nt, Artificial Sequence
  Description of Artificial Sequence: Synthetic oligonucleotide
aaguagauguacucagagg

SEQ ID NO: 2269215 - RNA, 19 nt, Artificial Sequence
  Description of Artificial Sequence: Synthetic oligonucleotide
aagacucaaauaugguggg

SEQ ID NO: 2269216 - RNA, 19 nt, Artificial Sequence
  Description of Artificial Sequence: Synthetic oligonucleotide
ucagucgaagucuaagccg

SEQ ID NO: 2269217 - RNA, 19 nt, Artificial Sequence
  Description of Artificial Sequence: Synthetic oligonucleotide
gaaguagauguacucagag

SEQ ID NO: 2269218 - RNA, 19 nt, Artificial Sequence
  Description of Artificial Sequence: Synthetic oligonucleotide
agcgaaguccuguacaugg

SEQ ID NO: 2269219 - RNA, 19 nt, Artificial Sequence
  Description of Artificial Sequence: Synthetic oligonucleotide
gcaacauguaagcagaugg

SEQ ID NO: 2269220 - RNA, 19 nt, Artificial Sequence
  Description of Artificial Sequence: Synthetic oligonucleotide
agaaggggcuguuaaggcc

SEQ ID NO: 2269221 - RNA, 19 nt, Artificial Sequence
  Description of Artificial Sequence: Synthetic oligonucleotide
aaggagaugccgcgguugc

SEQ ID NO: 2269222 - RNA, 19 nt, Artificial Sequence
  Description of Artificial Sequence: Synthetic oligonucleotide
aaauaugguggggacugcc

SEQ ID NO: 2269223 - RNA, 19 nt, Artificial Sequence
  Description of Artificial Sequence: Synthetic oligonucleotide
uguucgacguaacuuggag

SEQ ID NO: 2269224 - RNA, 19 nt, Artificial Sequence
  Description of Artificial Sequence: Synthetic oligonucleotide
uaagcagauggggagauag

SEQ ID NO: 2269225 - RNA, 19 nt, Artificial Sequence
  Description of Artificial Sequence: Synthetic oligonucleotide
uucgacguaacuuggagaa

SEQ ID NO: 2269226 - RNA, 19 nt, Artificial Sequence
  Description of Artificial Sequence: Synthetic oligonucleotide
aauaugguggggacugccc

SEQ ID NO: 2269227 - RNA, 19 nt, Artificial Sequence
  Description of Artificial Sequence: Synthetic oligonucleotide
auaugguggggacugcccc

SEQ ID NO: 2269228 - RNA, 19 nt, Artificial Sequence
  Description of Artificial Sequence: Synthetic oligonucleotide
aucaagagcugcuucagcu

SEQ ID NO: 2269229 - RNA, 19 nt, Artificial Sequence
  Description of Artificial Sequence: Synthetic oligonucleotide
aaagcgaaguccuguacau

SEQ ID NO: 2269230 - RNA, 19 nt, Artificial Sequence
  Description of Artificial Sequence: Synthetic oligonucleotide
uguucccuacguuugcagg

SEQ ID NO: 2269231 - RNA, 19 nt, Artificial Sequence
  Description of Artificial Sequence: Synthetic oligonucleotide
aagcaguuuuccucgaagu

SEQ ID NO: 2269232 - RNA, 19 nt, Artificial Sequence
  Description of Artificial Sequence: Synthetic oligonucleotide
cuguacaugguccuucagg

SEQ ID NO: 2269233 - RNA, 19 nt, Artificial Sequence
  Description of Artificial Sequence: Synthetic oligonucleotide
agaugaugucagcaggagg

SEQ ID NO: 2269234 - RNA, 19 nt, Artificial Sequence
  Description of Artificial Sequence: Synthetic oligonucleotide
uggauaaccaugccccuug

SEQ ID NO: 2269235 - RNA, 19 nt, Artificial Sequence
  Description of Artificial Sequence: Synthetic oligonucleotide
agcuuggucagucgaaguc

SEQ ID NO: 2269236 - RNA, 19 nt, Artificial Sequence
  Description of Artificial Sequence: Synthetic oligonucleotide
uaaccaugccccuuggucu

SEQ ID NO: 2269237 - RNA, 19 nt, Artificial Sequence
  Description of Artificial Sequence: Synthetic oligonucleotide
guuaaggccagguuccagc

SEQ ID NO: 2269238 - RNA, 19 nt, Artificial Sequence
  Description of Artificial Sequence: Synthetic oligonucleotide
cagucgaagucuaagccgc

SEQ ID NO: 2269239 - RNA, 19 nt, Artificial Sequence
  Description of Artificial Sequence: Synthetic oligonucleotide
gucagucgaagucuaagcc

SEQ ID NO: 2269240 - RNA, 19 nt, Artificial Sequence
  Description of Artificial Sequence: Synthetic oligonucleotide
uguuuggagcagaaguaga

SEQ ID NO: 2269241 - RNA, 19 nt, Artificial Sequence
  Description of Artificial Sequence: Synthetic oligonucleotide
gguuguucgacguaacuug

SEQ ID NO: 2269242 - RNA, 19 nt, Artificial Sequence
  Description of Artificial Sequence: Synthetic oligonucleotide
uugggaagucuguggaagg

SEQ ID NO: 2269243 - RNA, 19 nt, Artificial Sequence
  Description of Artificial Sequence: Synthetic oligonucleotide
uggucuugguuguucgacg

SEQ ID NO: 2269244 - RNA, 19 nt, Artificial Sequence
  Description of Artificial Sequence: Synthetic oligonucleotide
agucuaagccgcuguuccc

SEQ ID NO: 2269245 - RNA, 19 nt, Artificial Sequence
  Description of Artificial Sequence: Synthetic oligonucleotide
uauugcucagcugcaaagc

SEQ ID NO: 2269246 - RNA, 19 nt, Artificial Sequence
  Description of Artificial Sequence: Synthetic oligonucleotide
acuacagccugcuuccucu

SEQ ID NO: 2269247 - RNA, 19 nt, Artificial Sequence
  Description of Artificial Sequence: Synthetic oligonucleotide
caugccaugcuauugcuca

SEQ ID NO: 2269248 - RNA, 19 nt, Artificial Sequence
  Description of Artificial Sequence: Synthetic oligonucleotide
gaugaugucagcaggaggu

SEQ ID NO: 2269249 - RNA, 19 nt, Artificial Sequence
  Description of Artificial Sequence: Synthetic oligonucleotide
ucuggauguaggcuccagc

SEQ ID NO: 2269250 - RNA, 19 nt, Artificial Sequence
  Description of Artificial Sequence: Synthetic oligonucleotide
uaagccgcuguucccuacg

SEQ ID NO: 2269251 - RNA, 19 nt, Artificial Sequence
  Description of Artificial Sequence: Synthetic oligonucleotide
aaguccuguacaugguccu

SEQ ID NO: 2269252 - RNA, 19 nt, Artificial Sequence
  Description of Artificial Sequence: Synthetic oligonucleotide
gagaaggggcuguuaaggc

SEQ ID NO: 2269253 - RNA, 19 nt, Artificial Sequence
  Description of Artificial Sequence: Synthetic oligonucleotide
uacguuugcaggccugcag

SEQ ID NO: 2269254 - RNA, 19 nt, Artificial Sequence
  Description of Artificial Sequence: Synthetic oligonucleotide
cauucuggauguaggcucc

SEQ ID NO: 2269255 - RNA, 19 nt, Artificial Sequence
  Description of Artificial Sequence: Synthetic oligonucleotide
cugacaguuggccagccac

SEQ ID NO: 2269256 - RNA, 19 nt, Artificial Sequence
  Description of Artificial Sequence: Synthetic oligonucleotide
uugguagcugugcucauuc

SEQ ID NO: 2269257 - RNA, 19 nt, Artificial Sequence
  Description of Artificial Sequence: Synthetic oligonucleotide
acguaacuuggagaaagac

SEQ ID NO: 2269258 - RNA, 19 nt, Artificial Sequence
  Description of Artificial Sequence: Synthetic oligonucleotide
aggguuguggguccuugac

SEQ ID NO: 2269259 - RNA, 19 nt, Artificial Sequence
  Description of Artificial Sequence: Synthetic oligonucleotide
uaucccgugugcagcagcc

SEQ ID NO: 2269260 - RNA, 19 nt, Artificial Sequence
  Description of Artificial Sequence: Synthetic oligonucleotide
uacccacugauucccacca

SEQ ID NO: 2269261 - RNA, 19 nt, Artificial Sequence
  Description of Artificial Sequence: Synthetic oligonucleotide
uaacuuggagaaagacuca

SEQ ID NO: 2269262 - RNA, 19 nt, Artificial Sequence
  Description of Artificial Sequence: Synthetic oligonucleotide
gacucaaauauggugggga

SEQ ID NO: 2269263 - RNA, 19 nt, Artificial Sequence
  Description of Artificial Sequence: Synthetic oligonucleotide
ucgaagucuaagccgcugu

SEQ ID NO: 2269264 - RNA, 19 nt, Artificial Sequence
  Description of Artificial Sequence: Synthetic oligonucleotide
gagucucgcgcguaucccg

SEQ ID NO: 2269265 - RNA, 19 nt, Artificial Sequence
  Description of Artificial Sequence: Synthetic oligonucleotide
uugaccuucagagcagcgc

SEQ ID NO: 2269266 - RNA, 19 nt, Artificial Sequence
  Description of Artificial Sequence: Synthetic oligonucleotide
cuuguccagagcaucaaga

SEQ ID NO: 2269267 - RNA, 19 nt, Artificial Sequence
  Description of Artificial Sequence: Synthetic oligonucleotide
uugguuguucgacguaacu

SEQ ID NO: 2269268 - RNA, 19 nt, Artificial Sequence
  Description of Artificial Sequence: Synthetic oligonucleotide
guuguucgacguaacuugg

SEQ ID NO: 2269269 - RNA, 19 nt, Artificial Sequence
  Description of Artificial Sequence: Synthetic oligonucleotide
uaccgggcccagaagaucu

SEQ ID NO: 2269270 - RNA, 19 nt, Artificial Sequence
  Description of Artificial Sequence: Synthetic oligonucleotide
guguuuggagcagaaguag

SEQ ID NO: 2269271 - RNA, 19 nt, Artificial Sequence
  Description of Artificial Sequence: Synthetic oligonucleotide
ucuugguuguucgacguaa

SEQ ID NO: 2269272 - RNA, 19 nt, Artificial Sequence
  Description of Artificial Sequence: Synthetic oligonucleotide
ugacaguuggccagccaca

SEQ ID NO: 2269273 - RNA, 19 nt, Artificial Sequence
  Description of Artificial Sequence: Synthetic oligonucleotide
agaaaacaggguugugggu

SEQ ID NO: 2269274 - RNA, 19 nt, Artificial Sequence
  Description of Artificial Sequence: Synthetic oligonucleotide
gugauacccacugauuccc

SEQ ID NO: 2269275 - RNA, 19 nt, Artificial Sequence
  Description of Artificial Sequence: Synthetic oligonucleotide
guagauguacucagaggcc

SEQ ID NO: 2269276 - RNA, 19 nt, Artificial Sequence
  Description of Artificial Sequence: Synthetic oligonucleotide
gaaggggcuguuaaggcca

SEQ ID NO: 2269277 - RNA, 19 nt, Artificial Sequence
  Description of Artificial Sequence: Synthetic oligonucleotide
cccagaagaucugagaagg

SEQ ID NO: 2269278 - RNA, 19 nt, Artificial Sequence
  Description of Artificial Sequence: Synthetic oligonucleotide
gauacccacugauucccac

SEQ ID NO: 2269279 - RNA, 19 nt, Artificial Sequence
  Description of Artificial Sequence: Synthetic oligonucleotide
aagaucugagaaggggcug

SEQ ID NO: 2269280 - RNA, 19 nt, Artificial Sequence
  Description of Artificial Sequence: Synthetic oligonucleotide
acauguaagcagaugggga

SEQ ID NO: 2269281 - RNA, 19 nt, Artificial Sequence
  Description of Artificial Sequence: Synthetic oligonucleotide
cuugaccuucagagcagcg

SEQ ID NO: 2269282 - RNA, 19 nt, Artificial Sequence
  Description of Artificial Sequence: Synthetic oligonucleotide
caaagcgaaguccuguaca

SEQ ID NO: 2269283 - RNA, 19 nt, Artificial Sequence
  Description of Artificial Sequence: Synthetic oligonucleotide
uugggcaccuaccgggccc

SEQ ID NO: 2269284 - RNA, 19 nt, Artificial Sequence
  Description of Artificial Sequence: Synthetic oligonucleotide
cugagaaggggcuguuaag

SEQ ID NO: 2269285 - RNA, 19 nt, Artificial Sequence
  Description of Artificial Sequence: Synthetic oligonucleotide
uuguucgacguaacuugga

SEQ ID NO: 2269286 - RNA, 19 nt, Artificial Sequence
  Description of Artificial Sequence: Synthetic oligonucleotide
agaaagacucaaauauggu

SEQ ID NO: 2269287 - RNA, 19 nt, Artificial Sequence
  Description of Artificial Sequence: Synthetic oligonucleotide
ggucagucgaagucuaagc

SEQ ID NO: 2269288 - RNA, 19 nt, Artificial Sequence
  Description of Artificial Sequence: Synthetic oligonucleotide
ggcacuacagccugcuucc

SEQ ID NO: 2269289 - RNA, 19 nt, Artificial Sequence
  Description of Artificial Sequence: Synthetic oligonucleotide
accuaccgggcccagaaga

SEQ ID NO: 2269290 - RNA, 19 nt, Artificial Sequence
  Description of Artificial Sequence: Synthetic oligonucleotide
ggagaaagacucaaauaug

SEQ ID NO: 2269291 - RNA, 19 nt, Artificial Sequence
  Description of Artificial Sequence: Synthetic oligonucleotide
ggcuguuaaggccagguuc

SEQ ID NO: 2269292 - RNA, 19 nt, Artificial Sequence
  Description of Artificial Sequence: Synthetic oligonucleotide
uuuccucgaaguguuugga

SEQ ID NO: 2269293 - RNA, 19 nt, Artificial Sequence
  Description of Artificial Sequence: Synthetic oligonucleotide
agcgcuuccugcaucgccg

SEQ ID NO: 2269294 - RNA, 19 nt, Artificial Sequence
  Description of Artificial Sequence: Synthetic oligonucleotide
uguuaaggccagguuccag

SEQ ID NO: 2269295 - RNA, 19 nt, Artificial Sequence
  Description of Artificial Sequence: Synthetic oligonucleotide
gcuguuaaggccagguucc

SEQ ID NO: 2269296 - RNA, 19 nt, Artificial Sequence
  Description of Artificial Sequence: Synthetic oligonucleotide
ucaugccaugcuauugcuc

SEQ ID NO: 2269297 - RNA, 19 nt, Artificial Sequence
  Description of Artificial Sequence: Synthetic oligonucleotide
ugcaaagcgaaguccugua

SEQ ID NO: 2269298 - RNA, 19 nt, Artificial Sequence
  Description of Artificial Sequence: Synthetic oligonucleotide
ugguuguucgacguaacuu

SEQ ID NO: 2269299 - RNA, 19 nt, Artificial Sequence
  Description of Artificial Sequence: Synthetic oligonucleotide
cuugguuguucgacguaac

SEQ ID NO: 2269300 - RNA, 19 nt, Artificial Sequence
  Description of Artificial Sequence: Synthetic oligonucleotide
agacucaaauauggugggg

SEQ ID NO: 2269301 - RNA, 19 nt, Artificial Sequence
  Description of Artificial Sequence: Synthetic oligonucleotide
uaugguggggacugccccu

SEQ ID NO: 2269302 - RNA, 19 nt, Artificial Sequence
  Description of Artificial Sequence: Synthetic oligonucleotide
ggcacuccccacuugguag

SEQ ID NO: 2269303 - RNA, 19 nt, Artificial Sequence
  Description of Artificial Sequence: Synthetic oligonucleotide
guucgacguaacuuggaga

SEQ ID NO: 2269304 - RNA, 19 nt, Artificial Sequence
  Description of Artificial Sequence: Synthetic oligonucleotide
ucagccugugauacccacu

SEQ ID NO: 2269305 - RNA, 19 nt, Artificial Sequence
  Description of Artificial Sequence: Synthetic oligonucleotide
cagcucaaagcaguuuucc

SEQ ID NO: 2269306 - RNA, 19 nt, Artificial Sequence
  Description of Artificial Sequence: Synthetic oligonucleotide
gguggagaaaacaggguug

SEQ ID NO: 2269307 - RNA, 19 nt, Artificial Sequence
  Description of Artificial Sequence: Synthetic oligonucleotide
uguaagcagauggggagau

SEQ ID NO: 2269308 - RNA, 19 nt, Artificial Sequence
  Description of Artificial Sequence: Synthetic oligonucleotide
auaggccguggcucaagag

SEQ ID NO: 2269309 - RNA, 19 nt, Artificial Sequence
  Description of Artificial Sequence: Synthetic oligonucleotide
gaagucuaagccgcuguuc

SEQ ID NO: 2269310 - RNA, 19 nt, Artificial Sequence
  Description of Artificial Sequence: Synthetic oligonucleotide
gaugccgcgguugcgaguc

SEQ ID NO: 2269311 - RNA, 19 nt, Artificial Sequence
  Description of Artificial Sequence: Synthetic oligonucleotide
gcagccgcaacauguaagc

SEQ ID NO: 2269312 - RNA, 19 nt, Artificial Sequence
  Description of Artificial Sequence: Synthetic oligonucleotide
cuguucccuacguuugcag

SEQ ID NO: 2269313 - RNA, 19 nt, Artificial Sequence
  Description of Artificial Sequence: Synthetic oligonucleotide
aguguuuggagcagaagua

SEQ ID NO: 2269314 - RNA, 19 nt, Artificial Sequence
  Description of Artificial Sequence: Synthetic oligonucleotide
ugauacccacugauuccca

SEQ ID NO: 2269315 - RNA, 19 nt, Artificial Sequence
  Description of Artificial Sequence: Synthetic oligonucleotide
aaccaugccccuuggucuu

SEQ ID NO: 2269316 - RNA, 19 nt, Artificial Sequence
  Description of Artificial Sequence: Synthetic oligonucleotide
cuuccugcaucgccggagc

SEQ ID NO: 2269317 - RNA, 19 nt, Artificial Sequence
  Description of Artificial Sequence: Synthetic oligonucleotide
uucccuacguuugcaggcc

SEQ ID NO: 2269318 - RNA, 19 nt, Artificial Sequence
  Description of Artificial Sequence: Synthetic oligonucleotide
agcugcaaagcgaaguccu

SEQ ID NO: 2269319 - RNA, 19 nt, Artificial Sequence
  Description of Artificial Sequence: Synthetic oligonucleotide
cagaugaugucagcaggag

SEQ ID NO: 2269320 - RNA, 19 nt, Artificial Sequence
  Description of Artificial Sequence: Synthetic oligonucleotide
agaaguagauguacucaga

SEQ ID NO: 2269321 - RNA, 19 nt, Artificial Sequence
  Description of Artificial Sequence: Synthetic oligonucleotide
accuucagagcagcgcuuc

SEQ ID NO: 2269322 - RNA, 19 nt, Artificial Sequence
  Description of Artificial Sequence: Synthetic oligonucleotide
gagaugccgcgguugcgag

SEQ ID NO: 2269323 - RNA, 19 nt, Artificial Sequence
  Description of Artificial Sequence: Synthetic oligonucleotide
aagcgaaguccuguacaug

SEQ ID NO: 2269324 - RNA, 19 nt, Artificial Sequence
  Description of Artificial Sequence: Synthetic oligonucleotide
ugugcccucuucucucgug

SEQ ID NO: 2269325 - RNA, 19 nt, Artificial Sequence
  Description of Artificial Sequence: Synthetic oligonucleotide
gauaggccguggcucaaga

SEQ ID NO: 2269326 - RNA, 19 nt, Artificial Sequence
  Description of Artificial Sequence: Synthetic oligonucleotide
cucucgugcccguuccugc

SEQ ID NO: 2269327 - RNA, 19 nt, Artificial Sequence
  Description of Artificial Sequence: Synthetic oligonucleotide
ggagcagaaguagauguac

SEQ ID NO: 2269328 - RNA, 19 nt, Artificial Sequence
  Description of Artificial Sequence: Synthetic oligonucleotide
uacucagaggccggguccc

SEQ ID NO: 2269329 - RNA, 19 nt, Artificial Sequence
  Description of Artificial Sequence: Synthetic oligonucleotide
uaaggccagguuccagccu

SEQ ID NO: 2269330 - RNA, 19 nt, Artificial Sequence
  Description of Artificial Sequence: Synthetic oligonucleotide
uuccagagcaaggcacucc

SEQ ID NO: 2269331 - RNA, 19 nt, Artificial Sequence
  Description of Artificial Sequence: Synthetic oligonucleotide
ugccaugcuauugcucagc

SEQ ID NO: 2269332 - RNA, 19 nt, Artificial Sequence
  Description of Artificial Sequence: Synthetic oligonucleotide
aagccgcuguucccuacgu

SEQ ID NO: 2269333 - RNA, 19 nt, Artificial Sequence
  Description of Artificial Sequence: Synthetic oligonucleotide
acaguuggccagccacaag

SEQ ID NO: 2269334 - RNA, 19 nt, Artificial Sequence
  Description of Artificial Sequence: Synthetic oligonucleotide
auguaagcagauggggaga

SEQ ID NO: 2269335 - RNA, 19 nt, Artificial Sequence
  Description of Artificial Sequence: Synthetic oligonucleotide
guaucccgugugcagcagc

SEQ ID NO: 2269336 - RNA, 19 nt, Artificial Sequence
  Description of Artificial Sequence: Synthetic oligonucleotide
gguuguggguccuugaccu

SEQ ID NO: 2269337 - RNA, 19 nt, Artificial Sequence
  Description of Artificial Sequence: Synthetic oligonucleotide
cagguuccagccucacagc

SEQ ID NO: 2269338 - RNA, 19 nt, Artificial Sequence
  Description of Artificial Sequence: Synthetic oligonucleotide
ugucgcggcauggucuugc

SEQ ID NO: 2269339 - RNA, 19 nt, Artificial Sequence
  Description of Artificial Sequence: Synthetic oligonucleotide
ccuuggucuugguuguucg

SEQ ID NO: 2269340 - RNA, 19 nt, Artificial Sequence
  Description of Artificial Sequence: Synthetic oligonucleotide
gauggggagauaggccgug

SEQ ID NO: 2269341 - RNA, 19 nt, Artificial Sequence
  Description of Artificial Sequence: Synthetic oligonucleotide
ucucucgugcccguuccug

SEQ ID NO: 2269342 - RNA, 19 nt, Artificial Sequence
  Description of Artificial Sequence: Synthetic oligonucleotide
uuguggguccuugaccuuc

SEQ ID NO: 2269343 - RNA, 19 nt, Artificial Sequence
  Description of Artificial Sequence: Synthetic oligonucleotide
cacuugguagcugugcuca

SEQ ID NO: 2269344 - RNA, 19 nt, Artificial Sequence
  Description of Artificial Sequence: Synthetic oligonucleotide
cugcuugggcaccuaccgg

SEQ ID NO: 2269345 - RNA, 19 nt, Artificial Sequence
  Description of Artificial Sequence: Synthetic oligonucleotide
cagagcaaggcacucccca

SEQ ID NO: 2269346 - RNA, 19 nt, Artificial Sequence
  Description of Artificial Sequence: Synthetic oligonucleotide
ggagccggcugacaucagg

SEQ ID NO: 2269347 - RNA, 19 nt, Artificial Sequence
  Description of Artificial Sequence: Synthetic oligonucleotide
gcgguugcgagucucgcgc

SEQ ID NO: 2269348 - RNA, 19 nt, Artificial Sequence
  Description of Artificial Sequence: Synthetic oligonucleotide
ucucgcgcguaucccgugu

SEQ ID NO: 2269349 - RNA, 19 nt, Artificial Sequence
  Description of Artificial Sequence: Synthetic oligonucleotide
gccgcugacaguuggccag

SEQ ID NO: 2269350 - RNA, 19 nt, Artificial Sequence
  Description of Artificial Sequence: Synthetic oligonucleotide
cucgaaguguuuggagcag

SEQ ID NO: 2269351 - RNA, 19 nt, Artificial Sequence
  Description of Artificial Sequence: Synthetic oligonucleotide
agugucgcggcauggucuu

SEQ ID NO: 2269352 - RNA, 19 nt, Artificial Sequence
  Description of Artificial Sequence: Synthetic oligonucleotide
gcagaaguagauguacuca

SEQ ID NO: 2269353 - RNA, 19 nt, Artificial Sequence
  Description of Artificial Sequence: Synthetic oligonucleotide
gacguaacuuggagaaaga

SEQ ID NO: 2269354 - RNA, 19 nt, Artificial Sequence
  Description of Artificial Sequence: Synthetic oligonucleotide
ggauaaccaugccccuugg

SEQ ID NO: 2269355 - RNA, 19 nt, Artificial Sequence
  Description of Artificial Sequence: Synthetic oligonucleotide
ucgcgcguaucccgugugc

SEQ ID NO: 2269356 - RNA, 19 nt, Artificial Sequence
  Description of Artificial Sequence: Synthetic oligonucleotide
ccggcugacaucaggcagg

SEQ ID NO: 2269357 - RNA, 19 nt, Artificial Sequence
  Description of Artificial Sequence: Synthetic oligonucleotide
gggguugucuuucuuggga

SEQ ID NO: 2269358 - RNA, 19 nt, Artificial Sequence
  Description of Artificial Sequence: Synthetic oligonucleotide
ggaagcagaugaugucagc

SEQ ID NO: 2269359 - RNA, 19 nt, Artificial Sequence
  Description of Artificial Sequence: Synthetic oligonucleotide
caaauaugguggggacugc

SEQ ID NO: 2269360 - RNA, 19 nt, Artificial Sequence
  Description of Artificial Sequence: Synthetic oligonucleotide
agagcagcgcuuccugcau

SEQ ID NO: 2269361 - RNA, 19 nt, Artificial Sequence
  Description of Artificial Sequence: Synthetic oligonucleotide
uuggucagucgaagucuaa

SEQ ID NO: 2269362 - RNA, 19 nt, Artificial Sequence
  Description of Artificial Sequence: Synthetic oligonucleotide
agcaaggcacuccccacuu

SEQ ID NO: 2269363 - RNA, 19 nt, Artificial Sequence
  Description of Artificial Sequence: Synthetic oligonucleotide
ucuaagccgcuguucccua

SEQ ID NO: 2269364 - RNA, 19 nt, Artificial Sequence
  Description of Artificial Sequence: Synthetic oligonucleotide
agagcaucaagagcugcuu

SEQ ID NO: 2269365 - RNA, 19 nt, Artificial Sequence
  Description of Artificial Sequence: Synthetic oligonucleotide
cuuccuucagccugugaua

SEQ ID NO: 2269366 - RNA, 19 nt, Artificial Sequence
  Description of Artificial Sequence: Synthetic oligonucleotide
gcgggcaucugccugugcc

SEQ ID NO: 2269367 - RNA, 19 nt, Artificial Sequence
  Description of Artificial Sequence: Synthetic oligonucleotide
agaggccgggucccacagg

SEQ ID NO: 2269368 - RNA, 19 nt, Artificial Sequence
  Description of Artificial Sequence: Synthetic oligonucleotide
uugcaggccugcagcuggc

SEQ ID NO: 2269369 - RNA, 19 nt, Artificial Sequence
  Description of Artificial Sequence: Synthetic oligonucleotide
ucccuacguuugcaggccu

SEQ ID NO: 2269370 - RNA, 19 nt, Artificial Sequence
  Description of Artificial Sequence: Synthetic oligonucleotide
uggcagccgcaacauguaa

SEQ ID NO: 2269371 - RNA, 19 nt, Artificial Sequence
  Description of Artificial Sequence: Synthetic oligonucleotide
agccgcugacaguuggcca

SEQ ID NO: 2269372 - RNA, 19 nt, Artificial Sequence
  Description of Artificial Sequence: Synthetic oligonucleotide
cuuggucagucgaagucua

SEQ ID NO: 2269373 - RNA, 19 nt, Artificial Sequence
  Description of Artificial Sequence: Synthetic oligonucleotide
gggaagucuguggaaggag

SEQ ID NO: 2269374 - RNA, 19 nt, Artificial Sequence
  Description of Artificial Sequence: Synthetic oligonucleotide
agccucacagcuggggaug

SEQ ID NO: 2269375 - RNA, 19 nt, Artificial Sequence
  Description of Artificial Sequence: Synthetic oligonucleotide
ggggaugcaggcagagugg

SEQ ID NO: 2269376 - RNA, 19 nt, Artificial Sequence
  Description of Artificial Sequence: Synthetic oligonucleotide
cgacguaacuuggagaaag

SEQ ID NO: 2269377 - RNA, 19 nt, Artificial Sequence
  Description of Artificial Sequence: Synthetic oligonucleotide
aaacaggguuguggguccu

SEQ ID NO: 2269378 - RNA, 19 nt, Artificial Sequence
  Description of Artificial Sequence: Synthetic oligonucleotide
gauaaccaugccccuuggu

SEQ ID NO: 2269379 - RNA, 19 nt, Artificial Sequence
  Description of Artificial Sequence: Synthetic oligonucleotide
gcaaagcgaaguccuguac

SEQ ID NO: 2269380 - RNA, 19 nt, Artificial Sequence
  Description of Artificial Sequence: Synthetic oligonucleotide
ggcagccgcaacauguaag

SEQ ID NO: 2269381 - RNA, 19 nt, Artificial Sequence
  Description of Artificial Sequence: Synthetic oligonucleotide
guuuggagcagaaguagau

SEQ ID NO: 2269382 - RNA, 19 nt, Artificial Sequence
  Description of Artificial Sequence: Synthetic oligonucleotide
gggucuggcgggcaucugc

SEQ ID NO: 2269383 - RNA, 19 nt, Artificial Sequence
  Description of Artificial Sequence: Synthetic oligonucleotide
gccgcugggguccagccgc

SEQ ID NO: 2269384 - RNA, 19 nt, Artificial Sequence
  Description of Artificial Sequence: Synthetic oligonucleotide
uggccgcugggguccagcc

SEQ ID NO: 2269385 - RNA, 19 nt, Artificial Sequence
  Description of Artificial Sequence: Synthetic oligonucleotide
uugcgagucucgcgcguau

SEQ ID NO: 2269386 - RNA, 19 nt, Artificial Sequence
  Description of Artificial Sequence: Synthetic oligonucleotide
gcgagucucgcgcguaucc

SEQ ID NO: 2269387 - RNA, 19 nt, Artificial Sequence
  Description of Artificial Sequence: Synthetic oligonucleotide
agcagugucgcggcauggu

SEQ ID NO: 2269388 - RNA, 19 nt, Artificial Sequence
  Description of Artificial Sequence: Synthetic oligonucleotide
ucgacguaacuuggagaaa

SEQ ID NO: 2269389 - RNA, 19 nt, Artificial Sequence
  Description of Artificial Sequence: Synthetic oligonucleotide
gccgcaacauguaagcaga

SEQ ID NO: 2269390 - RNA, 19 nt, Artificial Sequence
  Description of Artificial Sequence: Synthetic oligonucleotide
ucgcggcauggucuugcca

SEQ ID NO: 2269391 - RNA, 19 nt, Artificial Sequence
  Description of Artificial Sequence: Synthetic oligonucleotide
aggcacuccccacuuggua

SEQ ID NO: 2269392 - RNA, 19 nt, Artificial Sequence
  Description of Artificial Sequence: Synthetic oligonucleotide
ugcaucgccggagccggcu

SEQ ID NO: 2269393 - RNA, 19 nt, Artificial Sequence
  Description of Artificial Sequence: Synthetic oligonucleotide
cuucagcucuccucuucca

SEQ ID NO: 2269394 - RNA, 19 nt, Artificial Sequence
  Description of Artificial Sequence: Synthetic oligonucleotide
gagcaaggcacuccccacu

SEQ ID NO: 2269395 - RNA, 19 nt, Artificial Sequence
  Description of Artificial Sequence: Synthetic oligonucleotide
gggacugccccuuccuuca

SEQ ID NO: 2269396 - RNA, 19 nt, Artificial Sequence
  Description of Artificial Sequence: Synthetic oligonucleotide
caagccgcgccugggguug

SEQ ID NO: 2269397 - RNA, 19 nt, Artificial Sequence
  Description of Artificial Sequence: Synthetic oligonucleotide
gcuauugcucagcugcaaa

SEQ ID NO: 2269398 - RNA, 19 nt, Artificial Sequence
  Description of Artificial Sequence: Synthetic oligonucleotide
agaugccgcgguugcgagu

SEQ ID NO: 2269399 - RNA, 19 nt, Artificial Sequence
  Description of Artificial Sequence: Synthetic oligonucleotide
gcagaugaugucagcagga

SEQ ID NO: 2269400 - RNA, 19 nt, Artificial Sequence
  Description of Artificial Sequence: Synthetic oligonucleotide
acaagccgcgccugggguu

SEQ ID NO: 2269401 - RNA, 19 nt, Artificial Sequence
  Description of Artificial Sequence: Synthetic oligonucleotide
agauggggagauaggccgu

SEQ ID NO: 2269402 - RNA, 19 nt, Artificial Sequence
  Description of Artificial Sequence: Synthetic oligonucleotide
cucagcugcaaagcgaagu

SEQ ID NO: 2269403 - RNA, 19 nt, Artificial Sequence
  Description of Artificial Sequence: Synthetic oligonucleotide
agccugugauacccacuga

SEQ ID NO: 2269404 - RNA, 19 nt, Artificial Sequence
  Description of Artificial Sequence: Synthetic oligonucleotide
acuugguagcugugcucau

SEQ ID NO: 2269405 - RNA, 19 nt, Artificial Sequence
  Description of Artificial Sequence: Synthetic oligonucleotide
ccugcaucgccggagccgg

SEQ ID NO: 2269406 - RNA, 19 nt, Artificial Sequence
  Description of Artificial Sequence: Synthetic oligonucleotide
gucgcggcauggucuugcc

SEQ ID NO: 2269407 - RNA, 19 nt, Artificial Sequence
  Description of Artificial Sequence: Synthetic oligonucleotide
cuaccgggcccagaagauc

SEQ ID NO: 2269408 - RNA, 19 nt, Artificial Sequence
  Description of Artificial Sequence: Synthetic oligonucleotide
cucgcgcguaucccgugug

SEQ ID NO: 2269409 - RNA, 19 nt, Artificial Sequence
  Description of Artificial Sequence: Synthetic oligonucleotide
gagcagcgcuuccugcauc

SEQ ID NO: 2269410 - RNA, 19 nt, Artificial Sequence
  Description of Artificial Sequence: Synthetic oligonucleotide
guacaugguccuucagggu

SEQ ID NO: 2269411 - RNA, 19 nt, Artificial Sequence
  Description of Artificial Sequence: Synthetic oligonucleotide
gguggcagccgcaacaugu

SEQ ID NO: 2269412 - RNA, 19 nt, Artificial Sequence
  Description of Artificial Sequence: Synthetic oligonucleotide
cucaaauaugguggggacu

SEQ ID NO: 2269413 - RNA, 19 nt, Artificial Sequence
  Description of Artificial Sequence: Synthetic oligonucleotide
cucgugcccguuccugcug

SEQ ID NO: 2269414 - RNA, 19 nt, Artificial Sequence
  Description of Artificial Sequence: Synthetic oligonucleotide
ggagaugccgcgguugcga

SEQ ID NO: 2269415 - RNA, 19 nt, Artificial Sequence
  Description of Artificial Sequence: Synthetic oligonucleotide
ggggacugccccuuccuuc

SEQ ID NO: 2269416 - RNA, 19 nt, Artificial Sequence
  Description of Artificial Sequence: Synthetic oligonucleotide
gucuaagccgcuguucccu

SEQ ID NO: 2269417 - RNA, 19 nt, Artificial Sequence
  Description of Artificial Sequence: Synthetic oligonucleotide
cacaggcccuggccgcugg

SEQ ID NO: 2269418 - RNA, 19 nt, Artificial Sequence
  Description of Artificial Sequence: Synthetic oligonucleotide
ccuacguuugcaggccugc

SEQ ID NO: 2269419 - RNA, 19 nt, Artificial Sequence
  Description of Artificial Sequence: Synthetic oligonucleotide
cucaugccaugcuauugcu

SEQ ID NO: 2269420 - RNA, 19 nt, Artificial Sequence
  Description of Artificial Sequence: Synthetic oligonucleotide
agucucgcgcguaucccgu

SEQ ID NO: 2269421 - RNA, 19 nt, Artificial Sequence
  Description of Artificial Sequence: Synthetic oligonucleotide
cguaacuuggagaaagacu

SEQ ID NO: 2269422 - RNA, 19 nt, Artificial Sequence
  Description of Artificial Sequence: Synthetic oligonucleotide
auucuggauguaggcucca

SEQ ID NO: 2269423 - RNA, 19 nt, Artificial Sequence
  Description of Artificial Sequence: Synthetic oligonucleotide
ggucuugguuguucgacgu

SEQ ID NO: 2269424 - RNA, 19 nt, Artificial Sequence
  Description of Artificial Sequence: Synthetic oligonucleotide
augccccuuggucuugguu

SEQ ID NO: 2269425 - RNA, 19 nt, Artificial Sequence
  Description of Artificial Sequence: Synthetic oligonucleotide
cagugucgcggcauggucu

SEQ ID NO: 2269426 - RNA, 19 nt, Artificial Sequence
  Description of Artificial Sequence: Synthetic oligonucleotide
gcgcguaucccgugugcag

SEQ ID NO: 2269427 - RNA, 19 nt, Artificial Sequence
  Description of Artificial Sequence: Synthetic oligonucleotide
gucucgcgcguaucccgug

SEQ ID NO: 2269428 - RNA, 19 nt, Artificial Sequence
  Description of Artificial Sequence: Synthetic oligonucleotide
agucgaagucuaagccgcu

SEQ ID NO: 2269429 - RNA, 19 nt, Artificial Sequence
  Description of Artificial Sequence: Synthetic oligonucleotide
uggcaggcgcugaggcuuc

SEQ ID NO: 2269430 - RNA, 19 nt, Artificial Sequence
  Description of Artificial Sequence: Synthetic oligonucleotide
cuccccacuugguagcugu

SEQ ID NO: 2269431 - RNA, 19 nt, Artificial Sequence
  Description of Artificial Sequence: Synthetic oligonucleotide
aacaggguuguggguccuu

SEQ ID NO: 2269432 - RNA, 19 nt, Artificial Sequence
  Description of Artificial Sequence: Synthetic oligonucleotide
gcagugucgcggcaugguc

SEQ ID NO: 2269433 - RNA, 19 nt, Artificial Sequence
  Description of Artificial Sequence: Synthetic oligonucleotide
ccgcuguucccuacguuug

SEQ ID NO: 2269434 - RNA, 19 nt, Artificial Sequence
  Description of Artificial Sequence: Synthetic oligonucleotide
ugcgagucucgcgcguauc

SEQ ID NO: 2269435 - RNA, 19 nt, Artificial Sequence
  Description of Artificial Sequence: Synthetic oligonucleotide
caggguuguggguccuuga

SEQ ID NO: 2269436 - RNA, 19 nt, Artificial Sequence
  Description of Artificial Sequence: Synthetic oligonucleotide
gucuugguuguucgacgua

SEQ ID NO: 2269437 - RNA, 19 nt, Artificial Sequence
  Description of Artificial Sequence: Synthetic oligonucleotide
gcuggggaugcaggcagag

SEQ ID NO: 2269438 - RNA, 19 nt, Artificial Sequence
  Description of Artificial Sequence: Synthetic oligonucleotide
uggugaaggcugggcacua

SEQ ID NO: 2269439 - RNA, 19 nt, Artificial Sequence
  Description of Artificial Sequence: Synthetic oligonucleotide
ugggcacuacagccugcuu

SEQ ID NO: 2269440 - RNA, 19 nt, Artificial Sequence
  Description of Artificial Sequence: Synthetic oligonucleotide
cguggcucaagaggggagg

SEQ ID NO: 2269441 - RNA, 19 nt, Artificial Sequence
  Description of Artificial Sequence: Synthetic oligonucleotide
ccacuugguagcugugcuc

SEQ ID NO: 2269442 - RNA, 19 nt, Artificial Sequence
  Description of Artificial Sequence: Synthetic oligonucleotide
cucagaggccgggucccac

SEQ ID NO: 2269443 - RNA, 19 nt, Artificial Sequence
  Description of Artificial Sequence: Synthetic oligonucleotide
gcucaagaggggaggggug

SEQ ID NO: 2269444 - RNA, 19 nt, Artificial Sequence
  Description of Artificial Sequence: Synthetic oligonucleotide
cuacguuugcaggccugca

SEQ ID NO: 2269445 - RNA, 19 nt, Artificial Sequence
  Description of Artificial Sequence: Synthetic oligonucleotide
ggccgcugggguccagccg

SEQ ID NO: 2269446 - RNA, 19 nt, Artificial Sequence
  Description of Artificial Sequence: Synthetic oligonucleotide
cuggccgcugggguccagc

SEQ ID NO: 2269447 - RNA, 19 nt, Artificial Sequence
  Description of Artificial Sequence: Synthetic oligonucleotide
cuguuaaggccagguucca

SEQ ID NO: 2269448 - RNA, 19 nt, Artificial Sequence
  Description of Artificial Sequence: Synthetic oligonucleotide
cuucagagcagcgcuuccu

SEQ ID NO: 2269449 - RNA, 19 nt, Artificial Sequence
  Description of Artificial Sequence: Synthetic oligonucleotide
agccgcuguucccuacguu

SEQ ID NO: 2269450 - RNA, 19 nt, Artificial Sequence
  Description of Artificial Sequence: Synthetic oligonucleotide
ccguggcucaagaggggag

SEQ ID NO: 2269451 - RNA, 19 nt, Artificial Sequence
  Description of Artificial Sequence: Synthetic oligonucleotide
ggcggcggagcagugucgc

SEQ ID NO: 2269452 - RNA, 19 nt, Artificial Sequence
  Description of Artificial Sequence: Synthetic oligonucleotide
gcguaucccgugugcagca

SEQ ID NO: 2269453 - RNA, 19 nt, Artificial Sequence
  Description of Artificial Sequence: Synthetic oligonucleotide
gagauaggccguggcucaa

SEQ ID NO: 2269454 - RNA, 19 nt, Artificial Sequence
  Description of Artificial Sequence: Synthetic oligonucleotide
ugccgcgguugcgagucuc

SEQ ID NO: 2269455 - RNA, 19 nt, Artificial Sequence
  Description of Artificial Sequence: Synthetic oligonucleotide
uggcgggcaucugccugug

SEQ ID NO: 2269456 - RNA, 19 nt, Artificial Sequence
  Description of Artificial Sequence: Synthetic oligonucleotide
cagccgcaacauguaagca

SEQ ID NO: 2269457 - RNA, 19 nt, Artificial Sequence
  Description of Artificial Sequence: Synthetic oligonucleotide
ggcucaagaggggaggggu

SEQ ID NO: 2269458 - RNA, 19 nt, Artificial Sequence
  Description of Artificial Sequence: Synthetic oligonucleotide
guugcgagucucgcgcgua

SEQ ID NO: 2269459 - RNA, 19 nt, Artificial Sequence
  Description of Artificial Sequence: Synthetic oligonucleotide
ccccacuugguagcugugc

SEQ ID NO: 2269460 - RNA, 19 nt, Artificial Sequence
  Description of Artificial Sequence: Synthetic oligonucleotide
cagcuuggucagucgaagu

SEQ ID NO: 2269461 - RNA, 19 nt, Artificial Sequence
  Description of Artificial Sequence: Synthetic oligonucleotide
caucgccggagccggcuga

SEQ ID NO: 2269462 - RNA, 19 nt, Artificial Sequence
  Description of Artificial Sequence: Synthetic oligonucleotide
cccuacguuugcaggccug

SEQ ID NO: 2269463 - RNA, 19 nt, Artificial Sequence
  Description of Artificial Sequence: Synthetic oligonucleotide
cgcaacauguaagcagaug

SEQ ID NO: 2269464 - RNA, 19 nt, Artificial Sequence
  Description of Artificial Sequence: Synthetic oligonucleotide
cuggugaaggcugggcacu

SEQ ID NO: 2269465 - RNA, 19 nt, Artificial Sequence
  Description of Artificial Sequence: Synthetic oligonucleotide
gccgcuguucccuacguuu

SEQ ID NO: 2269466 - RNA, 19 nt, Artificial Sequence
  Description of Artificial Sequence: Synthetic oligonucleotide
gcugacaguuggccagcca

SEQ ID NO: 2269467 - RNA, 19 nt, Artificial Sequence
  Description of Artificial Sequence: Synthetic oligonucleotide
gccgcgguugcgagucucg

SEQ ID NO: 2269468 - RNA, 19 nt, Artificial Sequence
  Description of Artificial Sequence: Synthetic oligonucleotide
gccaugcuauugcucagcu

SEQ ID NO: 2269469 - RNA, 19 nt, Artificial Sequence
  Description of Artificial Sequence: Synthetic oligonucleotide
cgcguaucccgugugcagc

SEQ ID NO: 2269470 - RNA, 19 nt, Artificial Sequence
  Description of Artificial Sequence: Synthetic oligonucleotide
cacaagccgcgccuggggu

SEQ ID NO: 2269471 - RNA, 19 nt, Artificial Sequence
  Description of Artificial Sequence: Synthetic oligonucleotide
cugcaucgccggagccggc

SEQ ID NO: 2269472 - RNA, 19 nt, Artificial Sequence
  Description of Artificial Sequence: Synthetic oligonucleotide
ggugaaggcugggcacuac

SEQ ID NO: 2269473 - RNA, 19 nt, Artificial Sequence
  Description of Artificial Sequence: Synthetic oligonucleotide
ccacugauucccaccagcu

SEQ ID NO: 2269474 - RNA, 19 nt, Artificial Sequence
  Description of Artificial Sequence: Synthetic oligonucleotide
gcaucgccggagccggcug

SEQ ID NO: 2269475 - RNA, 19 nt, Artificial Sequence
  Description of Artificial Sequence: Synthetic oligonucleotide
gcggcggagcagugucgcg

SEQ ID NO: 2269476 - RNA, 19 nt, Artificial Sequence
  Description of Artificial Sequence: Synthetic oligonucleotide
cgcuguucccuacguuugc

SEQ ID NO: 2269477 - RNA, 19 nt, Artificial Sequence
  Description of Artificial Sequence: Synthetic oligonucleotide
ggggcuguuaaggccaggu

SEQ ID NO: 2269478 - RNA, 19 nt, Artificial Sequence
  Description of Artificial Sequence: Synthetic oligonucleotide
gaucugagaaggggcuguu

SEQ ID NO: 2269479 - RNA, 19 nt, Artificial Sequence
  Description of Artificial Sequence: Synthetic oligonucleotide
cgagucucgcgcguauccc

SEQ ID NO: 2269480 - RNA, 19 nt, Artificial Sequence
  Description of Artificial Sequence: Synthetic oligonucleotide
guggauaaccaugccccuu

SEQ ID NO: 2269481 - RNA, 19 nt, Artificial Sequence
  Description of Artificial Sequence: Synthetic oligonucleotide
ucgccggagccggcugaca

SEQ ID NO: 2269482 - RNA, 19 nt, Artificial Sequence
  Description of Artificial Sequence: Synthetic oligonucleotide
cgguugcgagucucgcgcg

SEQ ID NO: 2269483 - RNA, 19 nt, Artificial Sequence
  Description of Artificial Sequence: Synthetic oligonucleotide
ggcaucugccugugcccuc

SEQ ID NO: 2269484 - RNA, 19 nt, Artificial Sequence
  Description of Artificial Sequence: Synthetic oligonucleotide
gccguggcucaagagggga

SEQ ID NO: 2269485 - RNA, 19 nt, Artificial Sequence
  Description of Artificial Sequence: Synthetic oligonucleotide
cggcggagcagugucgcgg

SEQ ID NO: 2269486 - RNA, 19 nt, Artificial Sequence
  Description of Artificial Sequence: Synthetic oligonucleotide
augccgcgguugcgagucu

SEQ ID NO: 2269487 - RNA, 19 nt, Artificial Sequence
  Description of Artificial Sequence: Synthetic oligonucleotide
cuugguagcugugcucauu

SEQ ID NO: 2269488 - RNA, 19 nt, Artificial Sequence
  Description of Artificial Sequence: Synthetic oligonucleotide
aagccgcgccugggguugu

SEQ ID NO: 2269489 - RNA, 19 nt, Artificial Sequence
  Description of Artificial Sequence: Synthetic oligonucleotide
gguugcgagucucgcgcgu

SEQ ID NO: 2269490 - RNA, 19 nt, Artificial Sequence
  Description of Artificial Sequence: Synthetic oligonucleotide
gaccuucagagcagcgcuu

SEQ ID NO: 2269491 - RNA, 19 nt, Artificial Sequence
  Description of Artificial Sequence: Synthetic oligonucleotide
gugucgcggcauggucuug

SEQ ID NO: 2269492 - RNA, 19 nt, Artificial Sequence
  Description of Artificial Sequence: Synthetic oligonucleotide
ccgcugacaguuggccagc

SEQ ID NO: 2269493 - RNA, 19 nt, Artificial Sequence
  Description of Artificial Sequence: Synthetic oligonucleotide
ggaaggagaugccgcgguu

SEQ ID NO: 2269494 - RNA, 19 nt, Artificial Sequence
  Description of Artificial Sequence: Synthetic oligonucleotide
gcagcgcuuccugcaucgc

SEQ ID NO: 2269495 - RNA, 19 nt, Artificial Sequence
  Description of Artificial Sequence: Synthetic oligonucleotide
agccgcgccugggguuguc

SEQ ID NO: 2269496 - RNA, 19 nt, Artificial Sequence
  Description of Artificial Sequence: Synthetic oligonucleotide
cgcugaggcuucuuccaca

SEQ ID NO: 2269497 - RNA, 19 nt, Artificial Sequence
  Description of Artificial Sequence: Synthetic oligonucleotide
ggcgggcaucugccugugc

SEQ ID NO: 2269498 - RNA, 19 nt, Artificial Sequence
  Description of Artificial Sequence: Synthetic oligonucleotide
gcaucugccugugcccucu

SEQ ID NO: 2269499 - RNA, 19 nt, Artificial Sequence
  Description of Artificial Sequence: Synthetic oligonucleotide
ccgcgguugcgagucucgc

SEQ ID NO: 2269500 - RNA, 19 nt, Artificial Sequence
  Description of Artificial Sequence: Synthetic oligonucleotide
gcgaaguccuguacauggu

SEQ ID NO: 2269501 - RNA, 19 nt, Artificial Sequence
  Description of Artificial Sequence: Synthetic oligonucleotide
ccuaccgggcccagaagau

SEQ ID NO: 2269502 - RNA, 19 nt, Artificial Sequence
  Description of Artificial Sequence: Synthetic oligonucleotide
cguaucccgugugcagcag

SEQ ID NO: 2269503 - RNA, 19 nt, Artificial Sequence
  Description of Artificial Sequence: Synthetic oligonucleotide
gggcuguuaaggccagguu

SEQ ID NO: 2269504 - RNA, 19 nt, Artificial Sequence
  Description of Artificial Sequence: Synthetic oligonucleotide
caugccccuuggucuuggu

SEQ ID NO: 2269505 - RNA, 19 nt, Artificial Sequence
  Description of Artificial Sequence: Synthetic oligonucleotide
ggguccagccgcugacagu

SEQ ID NO: 2269506 - RNA, 19 nt, Artificial Sequence
  Description of Artificial Sequence: Synthetic oligonucleotide
ggccagguuccagccucac

SEQ ID NO: 2269507 - RNA, 19 nt, Artificial Sequence
  Description of Artificial Sequence: Synthetic oligonucleotide
cguuugcaggccugcagcu

SEQ ID NO: 2269508 - RNA, 19 nt, Artificial Sequence
  Description of Artificial Sequence: Synthetic oligonucleotide
cggcggcggagcagugucg

SEQ ID NO: 2269509 - RNA, 19 nt, Artificial Sequence
  Description of Artificial Sequence: Synthetic oligonucleotide
caccagcucaaagcaguuu

SEQ ID NO: 2269510 - RNA, 19 nt, Artificial Sequence
  Description of Artificial Sequence: Synthetic oligonucleotide
ggcaccuaccgggcccaga

SEQ ID NO: 2269511 - RNA, 19 nt, Artificial Sequence
  Description of Artificial Sequence: Synthetic oligonucleotide
gcggagcagugucgcggca

SEQ ID NO: 2269512 - RNA, 19 nt, Artificial Sequence
  Description of Artificial Sequence: Synthetic oligonucleotide
ccgggucccacaggcccug

SEQ ID NO: 2269513 - RNA, 19 nt, Artificial Sequence
  Description of Artificial Sequence: Synthetic oligonucleotide
cgcgcguaucccgugugca

SEQ ID NO: 2269514 - RNA, 19 nt, Artificial Sequence
  Description of Artificial Sequence: Synthetic oligonucleotide
gggcaccuaccgggcccag

SEQ ID NO: 2269515 - RNA, 19 nt, Artificial Sequence
  Description of Artificial Sequence: Synthetic oligonucleotide
ccucacagcuggggaugca

SEQ ID NO: 2269516 - RNA, 19 nt, Artificial Sequence
  Description of Artificial Sequence: Synthetic oligonucleotide
ccucuucucucgugcccgu

SEQ ID NO: 2269517 - RNA, 19 nt, Artificial Sequence
  Description of Artificial Sequence: Synthetic oligonucleotide
ccgcaacauguaagcagau

SEQ ID NO: 2269518 - RNA, 19 nt, Artificial Sequence
  Description of Artificial Sequence: Synthetic oligonucleotide
cggagccggcugacaucag

SEQ ID NO: 2269519 - RNA, 19 nt, Artificial Sequence
  Description of Artificial Sequence: Synthetic oligonucleotide
ccccuuccuucagccugug

SEQ ID NO: 2269520 - RNA, 19 nt, Artificial Sequence
  Description of Artificial Sequence: Synthetic oligonucleotide
gccgggucccacaggcccu

SEQ ID NO: 2269521 - RNA, 19 nt, Artificial Sequence
  Description of Artificial Sequence: Synthetic oligonucleotide
caucugccugugcccucuu

SEQ ID NO: 2269522 - RNA, 19 nt, Artificial Sequence
  Description of Artificial Sequence: Synthetic oligonucleotide
cgcuuccugcaucgccgga

SEQ ID NO: 2269523 - RNA, 19 nt, Artificial Sequence
  Description of Artificial Sequence: Synthetic oligonucleotide
gccgcgccugggguugucu

SEQ ID NO: 2269524 - RNA, 19 nt, Artificial Sequence
  Description of Artificial Sequence: Synthetic oligonucleotide
cgcgccugggguugucuuu

SEQ ID NO: 2269525 - RNA, 19 nt, Artificial Sequence
  Description of Artificial Sequence: Synthetic oligonucleotide
ccgcgccugggguugucuu

SEQ ID NO: 2269526 - RNA, 19 nt, Artificial Sequence
  Description of Artificial Sequence: Synthetic oligonucleotide
cccuggccgcuggggucca

SEQ ID NO: 2269527 - RNA, 19 nt, Artificial Sequence
  Description of Artificial Sequence: Synthetic oligonucleotide
ccccuuggucuugguuguu

SEQ ID NO: 2269528 - RNA, 19 nt, Artificial Sequence
  Description of Artificial Sequence: Synthetic oligonucleotide
aggaaugucagccagaggc

SEQ ID NO: 2269529 - RNA, 19 nt, Artificial Sequence
  Description of Artificial Sequence: Synthetic oligonucleotide
uuuaacauauucaaacugg

SEQ ID NO: 2269530 - RNA, 19 nt, Artificial Sequence
  Description of Artificial Sequence: Synthetic oligonucleotide
caaaguacaaucuaauggg

SEQ ID NO: 2269531 - RNA, 19 nt, Artificial Sequence
  Description of Artificial Sequence: Synthetic oligonucleotide
agucccgugagcuagagcc

SEQ ID NO: 2269532 - RNA, 19 nt, Artificial Sequence
  Description of Artificial Sequence: Synthetic oligonucleotide
ugcuauuucaaaaugcuag

SEQ ID NO: 2269533 - RNA, 19 nt, Artificial Sequence
  Description of Artificial Sequence: Synthetic oligonucleotide
ucagauacgcaauacagag

SEQ ID NO: 2269534 - RNA, 19 nt, Artificial Sequence
  Description of Artificial Sequence: Synthetic oligonucleotide
uuaacauauucaaacuggg

SEQ ID NO: 2269535 - RNA, 19 nt, Artificial Sequence
  Description of Artificial Sequence: Synthetic oligonucleotide
agauacgcaauacagagag

SEQ ID NO: 2269536 - RNA, 19 nt, Artificial Sequence
  Description of Artificial Sequence: Synthetic oligonucleotide
uguagaaacacucucggga

SEQ ID NO: 2269537 - RNA, 19 nt, Artificial Sequence
  Description of Artificial Sequence: Synthetic oligonucleotide
ugucucuuaaaccugaaca

SEQ ID NO: 2269538 - RNA, 19 nt, Artificial Sequence
  Description of Artificial Sequence: Synthetic oligonucleotide
gucuguaccaucuuaaccg

SEQ ID NO: 2269539 - RNA, 19 nt, Artificial Sequence
  Description of Artificial Sequence: Synthetic oligonucleotide
uggaauuucaucagauacg

SEQ ID NO: 2269540 - RNA, 19 nt, Artificial Sequence
  Description of Artificial Sequence: Synthetic oligonucleotide
uguaccaucuuaaccgucg

SEQ ID NO: 2269541 - RNA, 19 nt, Artificial Sequence
  Description of Artificial Sequence: Synthetic oligonucleotide
acagugucaaaguacaauc

SEQ ID NO: 2269542 - RNA, 19 nt, Artificial Sequence
  Description of Artificial Sequence: Synthetic oligonucleotide
uuugcuauuucaaaaugcu

SEQ ID NO: 2269543 - RNA, 19 nt, Artificial Sequence
  Description of Artificial Sequence: Synthetic oligonucleotide
agggauucaagacugcagc

SEQ ID NO: 2269544 - RNA, 19 nt, Artificial Sequence
  Description of Artificial Sequence: Synthetic oligonucleotide
cucauaaacaucuggaaug

SEQ ID NO: 2269545 - RNA, 19 nt, Artificial Sequence
  Description of Artificial Sequence: Synthetic oligonucleotide
uguggcagcacuaaauccc

SEQ ID NO: 2269546 - RNA, 19 nt, Artificial Sequence
  Description of Artificial Sequence: Synthetic oligonucleotide
uuguaugccuccaacaggc

SEQ ID NO: 2269547 - RNA, 19 nt, Artificial Sequence
  Description of Artificial Sequence: Synthetic oligonucleotide
aacaccaguguagaaacac

SEQ ID NO: 2269548 - RNA, 19 nt, Artificial Sequence
  Description of Artificial Sequence: Synthetic oligonucleotide
aguguagaaacacucucgg

SEQ ID NO: 2269549 - RNA, 19 nt, Artificial Sequence
  Description of Artificial Sequence: Synthetic oligonucleotide
uaacauauucaaacugggg

SEQ ID NO: 2269550 - RNA, 19 nt, Artificial Sequence
  Description of Artificial Sequence: Synthetic oligonucleotide
acauuguggaauuucauca

SEQ ID NO: 2269551 - RNA, 19 nt, Artificial Sequence
  Description of Artificial Sequence: Synthetic oligonucleotide
agaaugguagaguccgucc

SEQ ID NO: 2269552 - RNA, 19 nt, Artificial Sequence
  Description of Artificial Sequence: Synthetic oligonucleotide
aguuguaugccuccaacag

SEQ ID NO: 2269553 - RNA, 19 nt, Artificial Sequence
  Description of Artificial Sequence: Synthetic oligonucleotide
agugcaccaagguagcccc

SEQ ID NO: 2269554 - RNA, 19 nt, Artificial Sequence
  Description of Artificial Sequence: Synthetic oligonucleotide
auaaacaucuggaaugacg

SEQ ID NO: 2269555 - RNA, 19 nt, Artificial Sequence
  Description of Artificial Sequence: Synthetic oligonucleotide
aucuuaaccgucgacuucc

SEQ ID NO: 2269556 - RNA, 19 nt, Artificial Sequence
  Description of Artificial Sequence: Synthetic oligonucleotide
acaggagaaugguagaguc

SEQ ID NO: 2269557 - RNA, 19 nt, Artificial Sequence
  Description of Artificial Sequence: Synthetic oligonucleotide
ucaaacuggggccaguuga

SEQ ID NO: 2269558 - RNA, 19 nt, Artificial Sequence
  Description of Artificial Sequence: Synthetic oligonucleotide
uguuugcuauuucaaaaug

SEQ ID NO: 2269559 - RNA, 19 nt, Artificial Sequence
  Description of Artificial Sequence: Synthetic oligonucleotide
guagcauucacgaugcagg

SEQ ID NO: 2269560 - RNA, 19 nt, Artificial Sequence
  Description of Artificial Sequence: Synthetic oligonucleotide
ucggaaaucauccgaggag

SEQ ID NO: 2269561 - RNA, 19 nt, Artificial Sequence
  Description of Artificial Sequence: Synthetic oligonucleotide
guggaauuucaucagauac

SEQ ID NO: 2269562 - RNA, 19 nt, Artificial Sequence
  Description of Artificial Sequence: Synthetic oligonucleotide
ugaacaccaguguagaaac

SEQ ID NO: 2269563 - RNA, 19 nt, Artificial Sequence
  Description of Artificial Sequence: Synthetic oligonucleotide
ucucccucggaaaucaucc

SEQ ID NO: 2269564 - RNA, 19 nt, Artificial Sequence
  Description of Artificial Sequence: Synthetic oligonucleotide
auguauguauuuccccucc

SEQ ID NO: 2269565 - RNA, 19 nt, Artificial Sequence
  Description of Artificial Sequence: Synthetic oligonucleotide
aaugccuccuaugucuccc

SEQ ID NO: 2269566 - RNA, 19 nt, Artificial Sequence
  Description of Artificial Sequence: Synthetic oligonucleotide
uagucuaucagcugccucc

SEQ ID NO: 2269567 - RNA, 19 nt, Artificial Sequence
  Description of Artificial Sequence: Synthetic oligonucleotide
ugucuguaccaucuuaacc

SEQ ID NO: 2269568 - RNA, 19 nt, Artificial Sequence
  Description of Artificial Sequence: Synthetic oligonucleotide
ucucauaaacaucuggaau

SEQ ID NO: 2269569 - RNA, 19 nt, Artificial Sequence
  Description of Artificial Sequence: Synthetic oligonucleotide
ucgaugguagcauucacga

SEQ ID NO: 2269570 - RNA, 19 nt, Artificial Sequence
  Description of Artificial Sequence: Synthetic oligonucleotide
auacgcaauacagagagug

SEQ ID NO: 2269571 - RNA, 19 nt, Artificial Sequence
  Description of Artificial Sequence: Synthetic oligonucleotide
aaacacucucgggagaacg

SEQ ID NO: 2269572 - RNA, 19 nt, Artificial Sequence
  Description of Artificial Sequence: Synthetic oligonucleotide
aacguuacuagcaauguau

SEQ ID NO: 2269573 - RNA, 19 nt, Artificial Sequence
  Description of Artificial Sequence: Synthetic oligonucleotide
uucacgaugcaggugaugc

SEQ ID NO: 2269574 - RNA, 19 nt, Artificial Sequence
  Description of Artificial Sequence: Synthetic oligonucleotide
guagaaacacucucgggag

SEQ ID NO: 2269575 - RNA, 19 nt, Artificial Sequence
  Description of Artificial Sequence: Synthetic oligonucleotide
aacaggcacacauugugga

SEQ ID NO: 2269576 - RNA, 19 nt, Artificial Sequence
  Description of Artificial Sequence: Synthetic oligonucleotide
uggaaugacgccauagggu

SEQ ID NO: 2269577 - RNA, 19 nt, Artificial Sequence
  Description of Artificial Sequence: Synthetic oligonucleotide
ucuuaaaccugaacaccag

SEQ ID NO: 2269578 - RNA, 19 nt, Artificial Sequence
  Description of Artificial Sequence: Synthetic oligonucleotide
cuuucacccaguuguaugc

SEQ ID NO: 2269579 - RNA, 19 nt, Artificial Sequence
  Description of Artificial Sequence: Synthetic oligonucleotide
acgagagagaggaagaggg

SEQ ID NO: 2269580 - RNA, 19 nt, Artificial Sequence
  Description of Artificial Sequence: Synthetic oligonucleotide
gagaacgagagagaggaag

SEQ ID NO: 2269581 - RNA, 19 nt, Artificial Sequence
  Description of Artificial Sequence: Synthetic oligonucleotide
uuacuagcaauguauguau

SEQ ID NO: 2269582 - RNA, 19 nt, Artificial Sequence
  Description of Artificial Sequence: Synthetic oligonucleotide
aaaacguuacuagcaaugu

SEQ ID NO: 2269583 - RNA, 19 nt, Artificial Sequence
  Description of Artificial Sequence: Synthetic oligonucleotide
uacgcaauacagagagugg

SEQ ID NO: 2269584 - RNA, 19 nt, Artificial Sequence
  Description of Artificial Sequence: Synthetic oligonucleotide
agauuuucauguuugcuau

SEQ ID NO: 2269585 - RNA, 19 nt, Artificial Sequence
  Description of Artificial Sequence: Synthetic oligonucleotide
aagagagaggaggugaucu

SEQ ID NO: 2269586 - RNA, 19 nt, Artificial Sequence
  Description of Artificial Sequence: Synthetic oligonucleotide
caguguagaaacacucucg

SEQ ID NO: 2269587 - RNA, 19 nt, Artificial Sequence
  Description of Artificial Sequence: Synthetic oligonucleotide
acgcaauacagagaguggc

SEQ ID NO: 2269588 - RNA, 19 nt, Artificial Sequence
  Description of Artificial Sequence: Synthetic oligonucleotide
aauacagagaguggccgag

SEQ ID NO: 2269589 - RNA, 19 nt, Artificial Sequence
  Description of Artificial Sequence: Synthetic oligonucleotide
ugagcuagagcccuugguc

SEQ ID NO: 2269590 - RNA, 19 nt, Artificial Sequence
  Description of Artificial Sequence: Synthetic oligonucleotide
aaugacgccauaggguguc

SEQ ID NO: 2269591 - RNA, 19 nt, Artificial Sequence
  Description of Artificial Sequence: Synthetic oligonucleotide
ucuggauccagacagucuu

SEQ ID NO: 2269592 - RNA, 19 nt, Artificial Sequence
  Description of Artificial Sequence: Synthetic oligonucleotide
uuaaccgucgacuucccaa

SEQ ID NO: 2269593 - RNA, 19 nt, Artificial Sequence
  Description of Artificial Sequence: Synthetic oligonucleotide
ucucuuaaaccugaacacc

SEQ ID NO: 2269594 - RNA, 19 nt, Artificial Sequence
  Description of Artificial Sequence: Synthetic oligonucleotide
gucucuuaaaccugaacac

SEQ ID NO: 2269595 - RNA, 19 nt, Artificial Sequence
  Description of Artificial Sequence: Synthetic oligonucleotide
uguggaucuugucagccac

SEQ ID NO: 2269596 - RNA, 19 nt, Artificial Sequence
  Description of Artificial Sequence: Synthetic oligonucleotide
ggaaugacgccauagggug

SEQ ID NO: 2269597 - RNA, 19 nt, Artificial Sequence
  Description of Artificial Sequence: Synthetic oligonucleotide
ucuaucagcugccuccaga

SEQ ID NO: 2269598 - RNA, 19 nt, Artificial Sequence
  Description of Artificial Sequence: Synthetic oligonucleotide
ucauguuugcuauuucaaa

SEQ ID NO: 2269599 - RNA, 19 nt, Artificial Sequence
  Description of Artificial Sequence: Synthetic oligonucleotide
uugaaguuggggaucucga

SEQ ID NO: 2269600 - RNA, 19 nt, Artificial Sequence
  Description of Artificial Sequence: Synthetic oligonucleotide
accucuggagcucaugaag

SEQ ID NO: 2269601 - RNA, 19 nt, Artificial Sequence
  Description of Artificial Sequence: Synthetic oligonucleotide
ggaauuucaucagauacgc

SEQ ID NO: 2269602 - RNA, 19 nt, Artificial Sequence
  Description of Artificial Sequence: Synthetic oligonucleotide
augcugguacugcugaggg

SEQ ID NO: 2269603 - RNA, 19 nt, Artificial Sequence
  Description of Artificial Sequence: Synthetic oligonucleotide
uagggugucuguaccaucu

SEQ ID NO: 2269604 - RNA, 19 nt, Artificial Sequence
  Description of Artificial Sequence: Synthetic oligonucleotide
gaugcugguacugcugagg

SEQ ID NO: 2269605 - RNA, 19 nt, Artificial Sequence
  Description of Artificial Sequence: Synthetic oligonucleotide
ugaccucuggagcucauga

SEQ ID NO: 2269606 - RNA, 19 nt, Artificial Sequence
  Description of Artificial Sequence: Synthetic oligonucleotide
auuguggaauuucaucaga

SEQ ID NO: 2269607 - RNA, 19 nt, Artificial Sequence
  Description of Artificial Sequence: Synthetic oligonucleotide
caagguagccccaugcuuc

SEQ ID NO: 2269608 - RNA, 19 nt, Artificial Sequence
  Description of Artificial Sequence: Synthetic oligonucleotide
uuguggaauuucaucagau

SEQ ID NO: 2269609 - RNA, 19 nt, Artificial Sequence
  Description of Artificial Sequence: Synthetic oligonucleotide
uccuaugucucccucggaa

SEQ ID NO: 2269610 - RNA, 19 nt, Artificial Sequence
  Description of Artificial Sequence: Synthetic oligonucleotide
cauguuugcuauuucaaaa

SEQ ID NO: 2269611 - RNA, 19 nt, Artificial Sequence
  Description of Artificial Sequence: Synthetic oligonucleotide
agcggcucacuccugcagc

SEQ ID NO: 2269612 - RNA, 19 nt, Artificial Sequence
  Description of Artificial Sequence: Synthetic oligonucleotide
acuagcaauguauguauuu

SEQ ID NO: 2269613 - RNA, 19 nt, Artificial Sequence
  Description of Artificial Sequence: Synthetic oligonucleotide
cuagcaauguauguauuuc

SEQ ID NO: 2269614 - RNA, 19 nt, Artificial Sequence
  Description of Artificial Sequence: Synthetic oligonucleotide
ggcacuuuaacauauucaa

SEQ ID NO: 2269615 - RNA, 19 nt, Artificial Sequence
  Description of Artificial Sequence: Synthetic oligonucleotide
aaacguuacuagcaaugua

SEQ ID NO: 2269616 - RNA, 19 nt, Artificial Sequence
  Description of Artificial Sequence: Synthetic oligonucleotide
uuucaucagauacgcaaua

SEQ ID NO: 2269617 - RNA, 19 nt, Artificial Sequence
  Description of Artificial Sequence: Synthetic oligonucleotide
ucgggagaacgagagagag

SEQ ID NO: 2269618 - RNA, 19 nt, Artificial Sequence
  Description of Artificial Sequence: Synthetic oligonucleotide
ucuguaccaucuuaaccgu

SEQ ID NO: 2269619 - RNA, 19 nt, Artificial Sequence
  Description of Artificial Sequence: Synthetic oligonucleotide
cucaugaagaagccagcag

SEQ ID NO: 2269620 - RNA, 19 nt, Artificial Sequence
  Description of Artificial Sequence: Synthetic oligonucleotide
augagaguccgugggagcg

SEQ ID NO: 2269621 - RNA, 19 nt, Artificial Sequence
  Description of Artificial Sequence: Synthetic oligonucleotide
cuguggcagcacuaaaucc

SEQ ID NO: 2269622 - RNA, 19 nt, Artificial Sequence
  Description of Artificial Sequence: Synthetic oligonucleotide
accaucuuaaccgucgacu

SEQ ID NO: 2269623 - RNA, 19 nt, Artificial Sequence
  Description of Artificial Sequence: Synthetic oligonucleotide
guguagaaacacucucggg

SEQ ID NO: 2269624 - RNA, 19 nt, Artificial Sequence
  Description of Artificial Sequence: Synthetic oligonucleotide
uguggaauuucaucagaua

SEQ ID NO: 2269625 - RNA, 19 nt, Artificial Sequence
  Description of Artificial Sequence: Synthetic oligonucleotide
caagacugcagccuucuuc

SEQ ID NO: 2269626 - RNA, 19 nt, Artificial Sequence
  Description of Artificial Sequence: Synthetic oligonucleotide
ucguagucuaucagcugcc

SEQ ID NO: 2269627 - RNA, 19 nt, Artificial Sequence
  Description of Artificial Sequence: Synthetic oligonucleotide
guuacuagcaauguaugua

SEQ ID NO: 2269628 - RNA, 19 nt, Artificial Sequence
  Description of Artificial Sequence: Synthetic oligonucleotide
uugcuauuucaaaaugcua

SEQ ID NO: 2269629 - RNA, 19 nt, Artificial Sequence
  Description of Artificial Sequence: Synthetic oligonucleotide
cagggauucaagacugcag

SEQ ID NO: 2269630 - RNA, 19 nt, Artificial Sequence
  Description of Artificial Sequence: Synthetic oligonucleotide
caccaguguagaaacacuc

SEQ ID NO: 2269631 - RNA, 19 nt, Artificial Sequence
  Description of Artificial Sequence: Synthetic oligonucleotide
auagggugucuguaccauc

SEQ ID NO: 2269632 - RNA, 19 nt, Artificial Sequence
  Description of Artificial Sequence: Synthetic oligonucleotide
caccagggauucaagacug

SEQ ID NO: 2269633 - RNA, 19 nt, Artificial Sequence
  Description of Artificial Sequence: Synthetic oligonucleotide
cuccaacaggcacacauug

SEQ ID NO: 2269634 - RNA, 19 nt, Artificial Sequence
  Description of Artificial Sequence: Synthetic oligonucleotide
ucgacuucccaaagagcug

SEQ ID NO: 2269635 - RNA, 19 nt, Artificial Sequence
  Description of Artificial Sequence: Synthetic oligonucleotide
aaggcaucaggugucggga

SEQ ID NO: 2269636 - RNA, 19 nt, Artificial Sequence
  Description of Artificial Sequence: Synthetic oligonucleotide
auuuucauguuugcuauuu

SEQ ID NO: 2269637 - RNA, 19 nt, Artificial Sequence
  Description of Artificial Sequence: Synthetic oligonucleotide
ucccucggaaaucauccga

SEQ ID NO: 2269638 - RNA, 19 nt, Artificial Sequence
  Description of Artificial Sequence: Synthetic oligonucleotide
gaggagucccgugagcuag

SEQ ID NO: 2269639 - RNA, 19 nt, Artificial Sequence
  Description of Artificial Sequence: Synthetic oligonucleotide
aagguagccccaugcuucu

SEQ ID NO: 2269640 - RNA, 19 nt, Artificial Sequence
  Description of Artificial Sequence: Synthetic oligonucleotide
cuucccaaagagcuggcuc

SEQ ID NO: 2269641 - RNA, 19 nt, Artificial Sequence
  Description of Artificial Sequence: Synthetic oligonucleotide
uggggccaguugaaguugg

SEQ ID NO: 2269642 - RNA, 19 nt, Artificial Sequence
  Description of Artificial Sequence: Synthetic oligonucleotide
gagccaugagaguccgugg

SEQ ID NO: 2269643 - RNA, 19 nt, Artificial Sequence
  Description of Artificial Sequence: Synthetic oligonucleotide
cacgaugcaggugaugccc

SEQ ID NO: 2269644 - RNA, 19 nt, Artificial Sequence
  Description of Artificial Sequence: Synthetic oligonucleotide
gggagaacgagagagagga

SEQ ID NO: 2269645 - RNA, 19 nt, Artificial Sequence
  Description of Artificial Sequence: Synthetic oligonucleotide
uaucagcugccuccagaag

SEQ ID NO: 2269646 - RNA, 19 nt, Artificial Sequence
  Description of Artificial Sequence: Synthetic oligonucleotide
ucgggacuccuucucauaa

SEQ ID NO: 2269647 - RNA, 19 nt, Artificial Sequence
  Description of Artificial Sequence: Synthetic oligonucleotide
uaaccgucgacuucccaaa

SEQ ID NO: 2269648 - RNA, 19 nt, Artificial Sequence
  Description of Artificial Sequence: Synthetic oligonucleotide
gcacagugcaccaagguag

SEQ ID NO: 2269649 - RNA, 19 nt, Artificial Sequence
  Description of Artificial Sequence: Synthetic oligonucleotide
ggaggugccgguuggaagc

SEQ ID NO: 2269650 - RNA, 19 nt, Artificial Sequence
  Description of Artificial Sequence: Synthetic oligonucleotide
ccuucucauaaacaucugg

SEQ ID NO: 2269651 - RNA, 19 nt, Artificial Sequence
  Description of Artificial Sequence: Synthetic oligonucleotide
aagacuguguguggcagau

SEQ ID NO: 2269652 - RNA, 19 nt, Artificial Sequence
  Description of Artificial Sequence: Synthetic oligonucleotide
uucuucgugcugaggaguc

SEQ ID NO: 2269653 - RNA, 19 nt, Artificial Sequence
  Description of Artificial Sequence: Synthetic oligonucleotide
uagaguccguccuccacca

SEQ ID NO: 2269654 - RNA, 19 nt, Artificial Sequence
  Description of Artificial Sequence: Synthetic oligonucleotide
ucauccgaggagccaugag

SEQ ID NO: 2269655 - RNA, 19 nt, Artificial Sequence
  Description of Artificial Sequence: Synthetic oligonucleotide
agcucaugaagaagccagc

SEQ ID NO: 2269656 - RNA, 19 nt, Artificial Sequence
  Description of Artificial Sequence: Synthetic oligonucleotide
aaccgucgacuucccaaag

SEQ ID NO: 2269657 - RNA, 19 nt, Artificial Sequence
  Description of Artificial Sequence: Synthetic oligonucleotide
agaacgagagagaggaaga

SEQ ID NO: 2269658 - RNA, 19 nt, Artificial Sequence
  Description of Artificial Sequence: Synthetic oligonucleotide
cugcccaagaagagagagg

SEQ ID NO: 2269659 - RNA, 19 nt, Artificial Sequence
  Description of Artificial Sequence: Synthetic oligonucleotide
uucgugcugaggagucccg

SEQ ID NO: 2269660 - RNA, 19 nt, Artificial Sequence
  Description of Artificial Sequence: Synthetic oligonucleotide
auacagagaguggccgagc

SEQ ID NO: 2269661 - RNA, 19 nt, Artificial Sequence
  Description of Artificial Sequence: Synthetic oligonucleotide
aaacuggggccaguugaag

SEQ ID NO: 2269662 - RNA, 19 nt, Artificial Sequence
  Description of Artificial Sequence: Synthetic oligonucleotide
gguagcauucacgaugcag

SEQ ID NO: 2269663 - RNA, 19 nt, Artificial Sequence
  Description of Artificial Sequence: Synthetic oligonucleotide
gguuggaagccacacugcc

SEQ ID NO: 2269664 - RNA, 19 nt, Artificial Sequence
  Description of Artificial Sequence: Synthetic oligonucleotide
caccaagguagccccaugc

SEQ ID NO: 2269665 - RNA, 19 nt, Artificial Sequence
  Description of Artificial Sequence: Synthetic oligonucleotide
uguggcagaugcugguacu

SEQ ID NO: 2269666 - RNA, 19 nt, Artificial Sequence
  Description of Artificial Sequence: Synthetic oligonucleotide
ugcggaugccagcuguggc

SEQ ID NO: 2269667 - RNA, 19 nt, Artificial Sequence
  Description of Artificial Sequence: Synthetic oligonucleotide
uacguugggccugaugaca

SEQ ID NO: 2269668 - RNA, 19 nt, Artificial Sequence
  Description of Artificial Sequence: Synthetic oligonucleotide
auuucaucagauacgcaau

SEQ ID NO: 2269669 - RNA, 19 nt, Artificial Sequence
  Description of Artificial Sequence: Synthetic oligonucleotide
gcugguacugcugaggggc

SEQ ID NO: 2269670 - RNA, 19 nt, Artificial Sequence
  Description of Artificial Sequence: Synthetic oligonucleotide
acucucgggagaacgagag

SEQ ID NO: 2269671 - RNA, 19 nt, Artificial Sequence
  Description of Artificial Sequence: Synthetic oligonucleotide
cugagcaaugccuccuaug

SEQ ID NO: 2269672 - RNA, 19 nt, Artificial Sequence
  Description of Artificial Sequence: Synthetic oligonucleotide
uucaagacugcagccuucu

SEQ ID NO: 2269673 - RNA, 19 nt, Artificial Sequence
  Description of Artificial Sequence: Synthetic oligonucleotide
agcuagagcccuuggucug

SEQ ID NO: 2269674 - RNA, 19 nt, Artificial Sequence
  Description of Artificial Sequence: Synthetic oligonucleotide
ucuuaaccgucgacuuccc

SEQ ID NO: 2269675 - RNA, 19 nt, Artificial Sequence
  Description of Artificial Sequence: Synthetic oligonucleotide
uucacccaguuguaugccu

SEQ ID NO: 2269676 - RNA, 19 nt, Artificial Sequence
  Description of Artificial Sequence: Synthetic oligonucleotide
uuucacccaguuguaugcc

SEQ ID NO: 2269677 - RNA, 19 nt, Artificial Sequence
  Description of Artificial Sequence: Synthetic oligonucleotide
ugccucugcccaagaagag

SEQ ID NO: 2269678 - RNA, 19 nt, Artificial Sequence
  Description of Artificial Sequence: Synthetic oligonucleotide
gucgacuucccaaagagcu

SEQ ID NO: 2269679 - RNA, 19 nt, Artificial Sequence
  Description of Artificial Sequence: Synthetic oligonucleotide
ccaacaggcacacauugug

SEQ ID NO: 2269680 - RNA, 19 nt, Artificial Sequence
  Description of Artificial Sequence: Synthetic oligonucleotide
gcucucguagucuaucagc

SEQ ID NO: 2269681 - RNA, 19 nt, Artificial Sequence
  Description of Artificial Sequence: Synthetic oligonucleotide
agaaacacucucgggagaa

SEQ ID NO: 2269682 - RNA, 19 nt, Artificial Sequence
  Description of Artificial Sequence: Synthetic oligonucleotide
gagaaugguagaguccguc

SEQ ID NO: 2269683 - RNA, 19 nt, Artificial Sequence
  Description of Artificial Sequence: Synthetic oligonucleotide
aacacucucgggagaacga

SEQ ID NO: 2269684 - RNA, 19 nt, Artificial Sequence
  Description of Artificial Sequence: Synthetic oligonucleotide
cauauucaaacuggggcca

SEQ ID NO: 2269685 - RNA, 19 nt, Artificial Sequence
  Description of Artificial Sequence: Synthetic oligonucleotide
aguccguccuccaccaggg

SEQ ID NO: 2269686 - RNA, 19 nt, Artificial Sequence
  Description of Artificial Sequence: Synthetic oligonucleotide
cuaucagcugccuccagaa

SEQ ID NO: 2269687 - RNA, 19 nt, Artificial Sequence
  Description of Artificial Sequence: Synthetic oligonucleotide
cucggaaaucauccgagga

SEQ ID NO: 2269688 - RNA, 19 nt, Artificial Sequence
  Description of Artificial Sequence: Synthetic oligonucleotide
aaugucagccagaggcacu

SEQ ID NO: 2269689 - RNA, 19 nt, Artificial Sequence
  Description of Artificial Sequence: Synthetic oligonucleotide
gaagccuacguugggccug

SEQ ID NO: 2269690 - RNA, 19 nt, Artificial Sequence
  Description of Artificial Sequence: Synthetic oligonucleotide
gugucuguaccaucuuaac

SEQ ID NO: 2269691 - RNA, 19 nt, Artificial Sequence
  Description of Artificial Sequence: Synthetic oligonucleotide
gggauucaagacugcagcc

SEQ ID NO: 2269692 - RNA, 19 nt, Artificial Sequence
  Description of Artificial Sequence: Synthetic oligonucleotide
acguuacuagcaauguaug

SEQ ID NO: 2269693 - RNA, 19 nt, Artificial Sequence
  Description of Artificial Sequence: Synthetic oligonucleotide
caagaagagagaggaggug

SEQ ID NO: 2269694 - RNA, 19 nt, Artificial Sequence
  Description of Artificial Sequence: Synthetic oligonucleotide
caucuuaaccgucgacuuc

SEQ ID NO: 2269695 - RNA, 19 nt, Artificial Sequence
  Description of Artificial Sequence: Synthetic oligonucleotide
acgaugcaggugaugcccc

SEQ ID NO: 2269696 - RNA, 19 nt, Artificial Sequence
  Description of Artificial Sequence: Synthetic oligonucleotide
ucgggcuuucacccaguug

SEQ ID NO: 2269697 - RNA, 19 nt, Artificial Sequence
  Description of Artificial Sequence: Synthetic oligonucleotide
gaggagccaugagaguccg

SEQ ID NO: 2269698 - RNA, 19 nt, Artificial Sequence
  Description of Artificial Sequence: Synthetic oligonucleotide
cugaacaccaguguagaaa

SEQ ID NO: 2269699 - RNA, 19 nt, Artificial Sequence
  Description of Artificial Sequence: Synthetic oligonucleotide
auauucaaacuggggccag

SEQ ID NO: 2269700 - RNA, 19 nt, Artificial Sequence
  Description of Artificial Sequence: Synthetic oligonucleotide
cuacguugggccugaugac

SEQ ID NO: 2269701 - RNA, 19 nt, Artificial Sequence
  Description of Artificial Sequence: Synthetic oligonucleotide
uggcucucguagucuauca

SEQ ID NO: 2269702 - RNA, 19 nt, Artificial Sequence
  Description of Artificial Sequence: Synthetic oligonucleotide
guugggccugaugacaggc

SEQ ID NO: 2269703 - RNA, 19 nt, Artificial Sequence
  Description of Artificial Sequence: Synthetic oligonucleotide
uacuagcaauguauguauu

SEQ ID NO: 2269704 - RNA, 19 nt, Artificial Sequence
  Description of Artificial Sequence: Synthetic oligonucleotide
gugucaaaguacaaucuaa

SEQ ID NO: 2269705 - RNA, 19 nt, Artificial Sequence
  Description of Artificial Sequence: Synthetic oligonucleotide
ccuccagaagccuacguug

SEQ ID NO: 2269706 - RNA, 19 nt, Artificial Sequence
  Description of Artificial Sequence: Synthetic oligonucleotide
gagagaggaggugaucuga

SEQ ID NO: 2269707 - RNA, 19 nt, Artificial Sequence
  Description of Artificial Sequence: Synthetic oligonucleotide
caguuguaugccuccaaca

SEQ ID NO: 2269708 - RNA, 19 nt, Artificial Sequence
  Description of Artificial Sequence: Synthetic oligonucleotide
gaagacuguguguggcaga

SEQ ID NO: 2269709 - RNA, 19 nt, Artificial Sequence
  Description of Artificial Sequence: Synthetic oligonucleotide
cucccucggaaaucauccg

SEQ ID NO: 2269710 - RNA, 19 nt, Artificial Sequence
  Description of Artificial Sequence: Synthetic oligonucleotide
uaugucucccucggaaauc

SEQ ID NO: 2269711 - RNA, 19 nt, Artificial Sequence
  Description of Artificial Sequence: Synthetic oligonucleotide
gagcuagagcccuuggucu

SEQ ID NO: 2269712 - RNA, 19 nt, Artificial Sequence
  Description of Artificial Sequence: Synthetic oligonucleotide
gaucucgaugguagcauuc

SEQ ID NO: 2269713 - RNA, 19 nt, Artificial Sequence
  Description of Artificial Sequence: Synthetic oligonucleotide
acacucucgggagaacgag

SEQ ID NO: 2269714 - RNA, 19 nt, Artificial Sequence
  Description of Artificial Sequence: Synthetic oligonucleotide
accaguguagaaacacucu

SEQ ID NO: 2269715 - RNA, 19 nt, Artificial Sequence
  Description of Artificial Sequence: Synthetic oligonucleotide
gggacuccuucucauaaac

SEQ ID NO: 2269716 - RNA, 19 nt, Artificial Sequence
  Description of Artificial Sequence: Synthetic oligonucleotide
acaggcacacauuguggaa

SEQ ID NO: 2269717 - RNA, 19 nt, Artificial Sequence
  Description of Artificial Sequence: Synthetic oligonucleotide
caaugccuccuaugucucc

SEQ ID NO: 2269718 - RNA, 19 nt, Artificial Sequence
  Description of Artificial Sequence: Synthetic oligonucleotide
guagucuaucagcugccuc

SEQ ID NO: 2269719 - RNA, 19 nt, Artificial Sequence
  Description of Artificial Sequence: Synthetic oligonucleotide
caauacagagaguggccga

SEQ ID NO: 2269720 - RNA, 19 nt, Artificial Sequence
  Description of Artificial Sequence: Synthetic oligonucleotide
guggcagcacuaaaucccc

SEQ ID NO: 2269721 - RNA, 19 nt, Artificial Sequence
  Description of Artificial Sequence: Synthetic oligonucleotide
guguggcagaugcugguac

SEQ ID NO: 2269722 - RNA, 19 nt, Artificial Sequence
  Description of Artificial Sequence: Synthetic oligonucleotide
accgucgacuucccaaaga

SEQ ID NO: 2269723 - RNA, 19 nt, Artificial Sequence
  Description of Artificial Sequence: Synthetic oligonucleotide
cucucguagucuaucagcu

SEQ ID NO: 2269724 - RNA, 19 nt, Artificial Sequence
  Description of Artificial Sequence: Synthetic oligonucleotide
ccgguuggaagccacacug

SEQ ID NO: 2269725 - RNA, 19 nt, Artificial Sequence
  Description of Artificial Sequence: Synthetic oligonucleotide
agaguggccgagcggcuca

SEQ ID NO: 2269726 - RNA, 19 nt, Artificial Sequence
  Description of Artificial Sequence: Synthetic oligonucleotide
uauucaaacuggggccagu

SEQ ID NO: 2269727 - RNA, 19 nt, Artificial Sequence
  Description of Artificial Sequence: Synthetic oligonucleotide
cagccagaggcacuuuaac

SEQ ID NO: 2269728 - RNA, 19 nt, Artificial Sequence
  Description of Artificial Sequence: Synthetic oligonucleotide
ucuucgugcugaggagucc

SEQ ID NO: 2269729 - RNA, 19 nt, Artificial Sequence
  Description of Artificial Sequence: Synthetic oligonucleotide
ccaguguagaaacacucuc

SEQ ID NO: 2269730 - RNA, 19 nt, Artificial Sequence
  Description of Artificial Sequence: Synthetic oligonucleotide
cagauacgcaauacagaga

SEQ ID NO: 2269731 - RNA, 19 nt, Artificial Sequence
  Description of Artificial Sequence: Synthetic oligonucleotide
gaagagagaggaggugauc

SEQ ID NO: 2269732 - RNA, 19 nt, Artificial Sequence
  Description of Artificial Sequence: Synthetic oligonucleotide
gccauagggugucuguacc

SEQ ID NO: 2269733 - RNA, 19 nt, Artificial Sequence
  Description of Artificial Sequence: Synthetic oligonucleotide
ggggcaagacaggagaaug

SEQ ID NO: 2269734 - RNA, 19 nt, Artificial Sequence
  Description of Artificial Sequence: Synthetic oligonucleotide
ccgucgacuucccaaagag

SEQ ID NO: 2269735 - RNA, 19 nt, Artificial Sequence
  Description of Artificial Sequence: Synthetic oligonucleotide
ugggagcgugcugugaccu

SEQ ID NO: 2269736 - RNA, 19 nt, Artificial Sequence
  Description of Artificial Sequence: Synthetic oligonucleotide
gaauuucaucagauacgca

SEQ ID NO: 2269737 - RNA, 19 nt, Artificial Sequence
  Description of Artificial Sequence: Synthetic oligonucleotide
ggccuucgggcuuucaccc

SEQ ID NO: 2269738 - RNA, 19 nt, Artificial Sequence
  Description of Artificial Sequence: Synthetic oligonucleotide
caggccuucgggcuuucac

SEQ ID NO: 2269739 - RNA, 19 nt, Artificial Sequence
  Description of Artificial Sequence: Synthetic oligonucleotide
agcauucacgaugcaggug

SEQ ID NO: 2269740 - RNA, 19 nt, Artificial Sequence
  Description of Artificial Sequence: Synthetic oligonucleotide
ucacacuguggaucuuguc

SEQ ID NO: 2269741 - RNA, 19 nt, Artificial Sequence
  Description of Artificial Sequence: Synthetic oligonucleotide
cuguaccaucuuaaccguc

SEQ ID NO: 2269742 - RNA, 19 nt, Artificial Sequence
  Description of Artificial Sequence: Synthetic oligonucleotide
aggcacacauuguggaauu

SEQ ID NO: 2269743 - RNA, 19 nt, Artificial Sequence
  Description of Artificial Sequence: Synthetic oligonucleotide
caggugucgggacuccuuc

SEQ ID NO: 2269744 - RNA, 19 nt, Artificial Sequence
  Description of Artificial Sequence: Synthetic oligonucleotide
guaaggcaucaggugucgg

SEQ ID NO: 2269745 - RNA, 19 nt, Artificial Sequence
  Description of Artificial Sequence: Synthetic oligonucleotide
caaacuggggccaguugaa

SEQ ID NO: 2269746 - RNA, 19 nt, Artificial Sequence
  Description of Artificial Sequence: Synthetic oligonucleotide
uccgaggagccaugagagu

SEQ ID NO: 2269747 - RNA, 19 nt, Artificial Sequence
  Description of Artificial Sequence: Synthetic oligonucleotide
agcuguggcagcacuaaau

SEQ ID NO: 2269748 - RNA, 19 nt, Artificial Sequence
  Description of Artificial Sequence: Synthetic oligonucleotide
cccucggaaaucauccgag

SEQ ID NO: 2269749 - RNA, 19 nt, Artificial Sequence
  Description of Artificial Sequence: Synthetic oligonucleotide
guaccaucuuaaccgucga

SEQ ID NO: 2269750 - RNA, 19 nt, Artificial Sequence
  Description of Artificial Sequence: Synthetic oligonucleotide
gaaacacucucgggagaac

SEQ ID NO: 2269751 - RNA, 19 nt, Artificial Sequence
  Description of Artificial Sequence: Synthetic oligonucleotide
gacaggagaaugguagagu

SEQ ID NO: 2269752 - RNA, 19 nt, Artificial Sequence
  Description of Artificial Sequence: Synthetic oligonucleotide
gccuccuaugucucccucg

SEQ ID NO: 2269753 - RNA, 19 nt, Artificial Sequence
  Description of Artificial Sequence: Synthetic oligonucleotide
ucccgugagcuagagcccu

SEQ ID NO: 2269754 - RNA, 19 nt, Artificial Sequence
  Description of Artificial Sequence: Synthetic oligonucleotide
ccaguuguaugccuccaac

SEQ ID NO: 2269755 - RNA, 19 nt, Artificial Sequence
  Description of Artificial Sequence: Synthetic oligonucleotide
cuccaccagggauucaaga

SEQ ID NO: 2269756 - RNA, 19 nt, Artificial Sequence
  Description of Artificial Sequence: Synthetic oligonucleotide
gagaguccgugggagcgug

SEQ ID NO: 2269757 - RNA, 19 nt, Artificial Sequence
  Description of Artificial Sequence: Synthetic oligonucleotide
uguguggcagaugcuggua

SEQ ID NO: 2269758 - RNA, 19 nt, Artificial Sequence
  Description of Artificial Sequence: Synthetic oligonucleotide
ccucggaaaucauccgagg

SEQ ID NO: 2269759 - RNA, 19 nt, Artificial Sequence
  Description of Artificial Sequence: Synthetic oligonucleotide
cacacugccucugcccaag

SEQ ID NO: 2269760 - RNA, 19 nt, Artificial Sequence
  Description of Artificial Sequence: Synthetic oligonucleotide
cgcaauacagagaguggcc

SEQ ID NO: 2269761 - RNA, 19 nt, Artificial Sequence
  Description of Artificial Sequence: Synthetic oligonucleotide
gugggagcgugcugugacc

SEQ ID NO: 2269762 - RNA, 19 nt, Artificial Sequence
  Description of Artificial Sequence: Synthetic oligonucleotide
uacugcugaggggcugcgg

SEQ ID NO: 2269763 - RNA, 19 nt, Artificial Sequence
  Description of Artificial Sequence: Synthetic oligonucleotide
ugccgguuggaagccacac

SEQ ID NO: 2269764 - RNA, 19 nt, Artificial Sequence
  Description of Artificial Sequence: Synthetic oligonucleotide
gagucccgugagcuagagc

SEQ ID NO: 2269765 - RNA, 19 nt, Artificial Sequence
  Description of Artificial Sequence: Synthetic oligonucleotide
augacaggccuucgggcuu

SEQ ID NO: 2269766 - RNA, 19 nt, Artificial Sequence
  Description of Artificial Sequence: Synthetic oligonucleotide
gaccucuggagcucaugaa

SEQ ID NO: 2269767 - RNA, 19 nt, Artificial Sequence
  Description of Artificial Sequence: Synthetic oligonucleotide
ugagaguccgugggagcgu

SEQ ID NO: 2269768 - RNA, 19 nt, Artificial Sequence
  Description of Artificial Sequence: Synthetic oligonucleotide
cucgggagaacgagagaga

SEQ ID NO: 2269769 - RNA, 19 nt, Artificial Sequence
  Description of Artificial Sequence: Synthetic oligonucleotide
aggugucgggacuccuucu

SEQ ID NO: 2269770 - RNA, 19 nt, Artificial Sequence
  Description of Artificial Sequence: Synthetic oligonucleotide
gaggugccgguuggaagcc

SEQ ID NO: 2269771 - RNA, 19 nt, Artificial Sequence
  Description of Artificial Sequence: Synthetic oligonucleotide
gacgccauagggugucugu

SEQ ID NO: 2269772 - RNA, 19 nt, Artificial Sequence
  Description of Artificial Sequence: Synthetic oligonucleotide
ugcaccaagguagccccau

SEQ ID NO: 2269773 - RNA, 19 nt, Artificial Sequence
  Description of Artificial Sequence: Synthetic oligonucleotide
gggccaguugaaguugggg

SEQ ID NO: 2269774 - RNA, 19 nt, Artificial Sequence
  Description of Artificial Sequence: Synthetic oligonucleotide
ugacgccauagggugucug

SEQ ID NO: 2269775 - RNA, 19 nt, Artificial Sequence
  Description of Artificial Sequence: Synthetic oligonucleotide
aagccuacguugggccuga

SEQ ID NO: 2269776 - RNA, 19 nt, Artificial Sequence
  Description of Artificial Sequence: Synthetic oligonucleotide
ucaagacugcagccuucuu

SEQ ID NO: 2269777 - RNA, 19 nt, Artificial Sequence
  Description of Artificial Sequence: Synthetic oligonucleotide
caucaggggcaagacagga

SEQ ID NO: 2269778 - RNA, 19 nt, Artificial Sequence
  Description of Artificial Sequence: Synthetic oligonucleotide
cgacuucccaaagagcugg

SEQ ID NO: 2269779 - RNA, 19 nt, Artificial Sequence
  Description of Artificial Sequence: Synthetic oligonucleotide
ugguacugcugaggggcug

SEQ ID NO: 2269780 - RNA, 19 nt, Artificial Sequence
  Description of Artificial Sequence: Synthetic oligonucleotide
uucgggcuuucacccaguu

SEQ ID NO: 2269781 - RNA, 19 nt, Artificial Sequence
  Description of Artificial Sequence: Synthetic oligonucleotide
ccaugagaguccgugggag

SEQ ID NO: 2269782 - RNA, 19 nt, Artificial Sequence
  Description of Artificial Sequence: Synthetic oligonucleotide
gugucgggacuccuucuca

SEQ ID NO: 2269783 - RNA, 19 nt, Artificial Sequence
  Description of Artificial Sequence: Synthetic oligonucleotide
cacucucgggagaacgaga

SEQ ID NO: 2269784 - RNA, 19 nt, Artificial Sequence
  Description of Artificial Sequence: Synthetic oligonucleotide
ugccuccuaugucucccuc

SEQ ID NO: 2269785 - RNA, 19 nt, Artificial Sequence
  Description of Artificial Sequence: Synthetic oligonucleotide
agaguccguccuccaccag

SEQ ID NO: 2269786 - RNA, 19 nt, Artificial Sequence
  Description of Artificial Sequence: Synthetic oligonucleotide
gggcaugaggaaugucagc

SEQ ID NO: 2269787 - RNA, 19 nt, Artificial Sequence
  Description of Artificial Sequence: Synthetic oligonucleotide
caaagagcuggcucucgua

SEQ ID NO: 2269788 - RNA, 19 nt, Artificial Sequence
  Description of Artificial Sequence: Synthetic oligonucleotide
ggugucgggacuccuucuc

SEQ ID NO: 2269789 - RNA, 19 nt, Artificial Sequence
  Description of Artificial Sequence: Synthetic oligonucleotide
caucaggugucgggacucc

SEQ ID NO: 2269790 - RNA, 19 nt, Artificial Sequence
  Description of Artificial Sequence: Synthetic oligonucleotide
cagaggcacuuuaacauau

SEQ ID NO: 2269791 - RNA, 19 nt, Artificial Sequence
  Description of Artificial Sequence: Synthetic oligonucleotide
gaagaggggagaagacugu

SEQ ID NO: 2269792 - RNA, 19 nt, Artificial Sequence
  Description of Artificial Sequence: Synthetic oligonucleotide
agacugcagccuucuucgu

SEQ ID NO: 2269793 - RNA, 19 nt, Artificial Sequence
  Description of Artificial Sequence: Synthetic oligonucleotide
ugugaccucuggagcucau

SEQ ID NO: 2269794 - RNA, 19 nt, Artificial Sequence
  Description of Artificial Sequence: Synthetic oligonucleotide
cuuaaccgucgacuuccca

SEQ ID NO: 2269795 - RNA, 19 nt, Artificial Sequence
  Description of Artificial Sequence: Synthetic oligonucleotide
aggggcaagacaggagaau

SEQ ID NO: 2269796 - RNA, 19 nt, Artificial Sequence
  Description of Artificial Sequence: Synthetic oligonucleotide
cacagugucaaaguacaau

SEQ ID NO: 2269797 - RNA, 19 nt, Artificial Sequence
  Description of Artificial Sequence: Synthetic oligonucleotide
ccuucgggcuuucacccag

SEQ ID NO: 2269798 - RNA, 19 nt, Artificial Sequence
  Description of Artificial Sequence: Synthetic oligonucleotide
gugagcuagagcccuuggu

SEQ ID NO: 2269799 - RNA, 19 nt, Artificial Sequence
  Description of Artificial Sequence: Synthetic oligonucleotide
agaguccgugggagcgugc

SEQ ID NO: 2269800 - RNA, 19 nt, Artificial Sequence
  Description of Artificial Sequence: Synthetic oligonucleotide
cuauuucaaaaugcuaguu

SEQ ID NO: 2269801 - RNA, 19 nt, Artificial Sequence
  Description of Artificial Sequence: Synthetic oligonucleotide
gcucaugaagaagccagca

SEQ ID NO: 2269802 - RNA, 19 nt, Artificial Sequence
  Description of Artificial Sequence: Synthetic oligonucleotide
ucgugcugaggagucccgu

SEQ ID NO: 2269803 - RNA, 19 nt, Artificial Sequence
  Description of Artificial Sequence: Synthetic oligonucleotide
gcggaugccagcuguggca

SEQ ID NO: 2269804 - RNA, 19 nt, Artificial Sequence
  Description of Artificial Sequence: Synthetic oligonucleotide
ggauucaagacugcagccu

SEQ ID NO: 2269805 - RNA, 19 nt, Artificial Sequence
  Description of Artificial Sequence: Synthetic oligonucleotide
cugaggagucccgugagcu

SEQ ID NO: 2269806 - RNA, 19 nt, Artificial Sequence
  Description of Artificial Sequence: Synthetic oligonucleotide
gucccgugagcuagagccc

SEQ ID NO: 2269807 - RNA, 19 nt, Artificial Sequence
  Description of Artificial Sequence: Synthetic oligonucleotide
ggucuggauccagacaguc

SEQ ID NO: 2269808 - RNA, 19 nt, Artificial Sequence
  Description of Artificial Sequence: Synthetic oligonucleotide
ggaggugaucugagcaaug

SEQ ID NO: 2269809 - RNA, 19 nt, Artificial Sequence
  Description of Artificial Sequence: Synthetic oligonucleotide
uuuccccucccugucucuu

SEQ ID NO: 2269810 - RNA, 19 nt, Artificial Sequence
  Description of Artificial Sequence: Synthetic oligonucleotide
uuccccucccugucucuua

SEQ ID NO: 2269811 - RNA, 19 nt, Artificial Sequence
  Description of Artificial Sequence: Synthetic oligonucleotide
gauacgcaauacagagagu

SEQ ID NO: 2269812 - RNA, 19 nt, Artificial Sequence
  Description of Artificial Sequence: Synthetic oligonucleotide
cugccuccagaagccuacg

SEQ ID NO: 2269813 - RNA, 19 nt, Artificial Sequence
  Description of Artificial Sequence: Synthetic oligonucleotide
aucaggugucgggacuccu

SEQ ID NO: 2269814 - RNA, 19 nt, Artificial Sequence
  Description of Artificial Sequence: Synthetic oligonucleotide
caggggcaagacaggagaa

SEQ ID NO: 2269815 - RNA, 19 nt, Artificial Sequence
  Description of Artificial Sequence: Synthetic oligonucleotide
cgucgacuucccaaagagc

SEQ ID NO: 2269816 - RNA, 19 nt, Artificial Sequence
  Description of Artificial Sequence: Synthetic oligonucleotide
ggacuccuucucauaaaca

SEQ ID NO: 2269817 - RNA, 19 nt, Artificial Sequence
  Description of Artificial Sequence: Synthetic oligonucleotide
ccaguugaaguuggggauc

SEQ ID NO: 2269818 - RNA, 19 nt, Artificial Sequence
  Description of Artificial Sequence: Synthetic oligonucleotide
gaaugacgccauagggugu

SEQ ID NO: 2269819 - RNA, 19 nt, Artificial Sequence
  Description of Artificial Sequence: Synthetic oligonucleotide
cgggcuuucacccaguugu

SEQ ID NO: 2269820 - RNA, 19 nt, Artificial Sequence
  Description of Artificial Sequence: Synthetic oligonucleotide
agacuguguguggcagaug

SEQ ID NO: 2269821 - RNA, 19 nt, Artificial Sequence
  Description of Artificial Sequence: Synthetic oligonucleotide
gccaguugaaguuggggau

SEQ ID NO: 2269822 - RNA, 19 nt, Artificial Sequence
  Description of Artificial Sequence: Synthetic oligonucleotide
cgggagaacgagagagagg

SEQ ID NO: 2269823 - RNA, 19 nt, Artificial Sequence
  Description of Artificial Sequence: Synthetic oligonucleotide
agaggcacuuuaacauauu

SEQ ID NO: 2269824 - RNA, 19 nt, Artificial Sequence
  Description of Artificial Sequence: Synthetic oligonucleotide
ggggaucucgaugguagca

SEQ ID NO: 2269825 - RNA, 19 nt, Artificial Sequence
  Description of Artificial Sequence: Synthetic oligonucleotide
acacugccucugcccaaga

SEQ ID NO: 2269826 - RNA, 19 nt, Artificial Sequence
  Description of Artificial Sequence: Synthetic oligonucleotide
ccuaugucucccucggaaa

SEQ ID NO: 2269827 - RNA, 19 nt, Artificial Sequence
  Description of Artificial Sequence: Synthetic oligonucleotide
cucucgggagaacgagaga

SEQ ID NO: 2269828 - RNA, 19 nt, Artificial Sequence
  Description of Artificial Sequence: Synthetic oligonucleotide
cgugggagcgugcugugac

SEQ ID NO: 2269829 - RNA, 19 nt, Artificial Sequence
  Description of Artificial Sequence: Synthetic oligonucleotide
gggugucuguaccaucuua

SEQ ID NO: 2269830 - RNA, 19 nt, Artificial Sequence
  Description of Artificial Sequence: Synthetic oligonucleotide
ggagucccgugagcuagag

SEQ ID NO: 2269831 - RNA, 19 nt, Artificial Sequence
  Description of Artificial Sequence: Synthetic oligonucleotide
cccugucucuuaaaccuga

SEQ ID NO: 2269832 - RNA, 19 nt, Artificial Sequence
  Description of Artificial Sequence: Synthetic oligonucleotide
uagagcccuuggucuggau

SEQ ID NO: 2269833 - RNA, 19 nt, Artificial Sequence
  Description of Artificial Sequence: Synthetic oligonucleotide
ggugccgguuggaagccac

SEQ ID NO: 2269834 - RNA, 19 nt, Artificial Sequence
  Description of Artificial Sequence: Synthetic oligonucleotide
ggccugaugacaggccuuc

SEQ ID NO: 2269835 - RNA, 19 nt, Artificial Sequence
  Description of Artificial Sequence: Synthetic oligonucleotide
ccgagcggcucacuccugc

SEQ ID NO: 2269836 - RNA, 19 nt, Artificial Sequence
  Description of Artificial Sequence: Synthetic oligonucleotide
caggcacacauuguggaau

SEQ ID NO: 2269837 - RNA, 19 nt, Artificial Sequence
  Description of Artificial Sequence: Synthetic oligonucleotide
gccuacguugggccugaug

SEQ ID NO: 2269838 - RNA, 19 nt, Artificial Sequence
  Description of Artificial Sequence: Synthetic oligonucleotide
gcaccaagguagccccaug

SEQ ID NO: 2269839 - RNA, 19 nt, Artificial Sequence
  Description of Artificial Sequence: Synthetic oligonucleotide
cgugagcuagagcccuugg

SEQ ID NO: 2269840 - RNA, 19 nt, Artificial Sequence
  Description of Artificial Sequence: Synthetic oligonucleotide
cgaugcaggugaugccccg

SEQ ID NO: 2269841 - RNA, 19 nt, Artificial Sequence
  Description of Artificial Sequence: Synthetic oligonucleotide
cgccauagggugucuguac

SEQ ID NO: 2269842 - RNA, 19 nt, Artificial Sequence
  Description of Artificial Sequence: Synthetic oligonucleotide
gccucugcccaagaagaga

SEQ ID NO: 2269843 - RNA, 19 nt, Artificial Sequence
  Description of Artificial Sequence: Synthetic oligonucleotide
ccaccagggauucaagacu

SEQ ID NO: 2269844 - RNA, 19 nt, Artificial Sequence
  Description of Artificial Sequence: Synthetic oligonucleotide
cgugcugaggagucccgug

SEQ ID NO: 2269845 - RNA, 19 nt, Artificial Sequence
  Description of Artificial Sequence: Synthetic oligonucleotide
ggggccaguugaaguuggg

SEQ ID NO: 2269846 - RNA, 19 nt, Artificial Sequence
  Description of Artificial Sequence: Synthetic oligonucleotide
ggcaucaggugucgggacu

SEQ ID NO: 2269847 - RNA, 19 nt, Artificial Sequence
  Description of Artificial Sequence: Synthetic oligonucleotide
cuccuaugucucccucgga

SEQ ID NO: 2269848 - RNA, 19 nt, Artificial Sequence
  Description of Artificial Sequence: Synthetic oligonucleotide
gcggcucacuccugcagca

SEQ ID NO: 2269849 - RNA, 19 nt, Artificial Sequence
  Description of Artificial Sequence: Synthetic oligonucleotide
gcaagacaggagaauggua

SEQ ID NO: 2269850 - RNA, 19 nt, Artificial Sequence
  Description of Artificial Sequence: Synthetic oligonucleotide
ccagggauucaagacugca

SEQ ID NO: 2269851 - RNA, 19 nt, Artificial Sequence
  Description of Artificial Sequence: Synthetic oligonucleotide
augacgccauagggugucu

SEQ ID NO: 2269852 - RNA, 19 nt, Artificial Sequence
  Description of Artificial Sequence: Synthetic oligonucleotide
cuagagcccuuggucugga

SEQ ID NO: 2269853 - RNA, 19 nt, Artificial Sequence
  Description of Artificial Sequence: Synthetic oligonucleotide
aggagucccgugagcuaga

SEQ ID NO: 2269854 - RNA, 19 nt, Artificial Sequence
  Description of Artificial Sequence: Synthetic oligonucleotide
gaguggccgagcggcucac

SEQ ID NO: 2269855 - RNA, 19 nt, Artificial Sequence
  Description of Artificial Sequence: Synthetic oligonucleotide
gccugaugacaggccuucg

SEQ ID NO: 2269856 - RNA, 19 nt, Artificial Sequence
  Description of Artificial Sequence: Synthetic oligonucleotide
gagcuggcucucguagucu

SEQ ID NO: 2269857 - RNA, 19 nt, Artificial Sequence
  Description of Artificial Sequence: Synthetic oligonucleotide
cguuacuagcaauguaugu

SEQ ID NO: 2269858 - RNA, 19 nt, Artificial Sequence
  Description of Artificial Sequence: Synthetic oligonucleotide
ccaucuuaaccgucgacuu

SEQ ID NO: 2269859 - RNA, 19 nt, Artificial Sequence
  Description of Artificial Sequence: Synthetic oligonucleotide
cugguacugcugaggggcu

SEQ ID NO: 2269860 - RNA, 19 nt, Artificial Sequence
  Description of Artificial Sequence: Synthetic oligonucleotide
ggcugcggaugccagcugu

SEQ ID NO: 2269861 - RNA, 19 nt, Artificial Sequence
  Description of Artificial Sequence: Synthetic oligonucleotide
ccccaugcuucuugcucac

SEQ ID NO: 2269862 - RNA, 19 nt, Artificial Sequence
  Description of Artificial Sequence: Synthetic oligonucleotide
ggagcgugcugugaccucu

SEQ ID NO: 2269863 - RNA, 19 nt, Artificial Sequence
  Description of Artificial Sequence: Synthetic oligonucleotide
caucuggaaugacgccaua

SEQ ID NO: 2269864 - RNA, 19 nt, Artificial Sequence
  Description of Artificial Sequence: Synthetic oligonucleotide
gggaucucgaugguagcau

SEQ ID NO: 2269865 - RNA, 19 nt, Artificial Sequence
  Description of Artificial Sequence: Synthetic oligonucleotide
gggagcgugcugugaccuc

SEQ ID NO: 2269866 - RNA, 19 nt, Artificial Sequence
  Description of Artificial Sequence: Synthetic oligonucleotide
acaggccuucgggcuuuca

SEQ ID NO: 2269867 - RNA, 19 nt, Artificial Sequence
  Description of Artificial Sequence: Synthetic oligonucleotide
cuucgggcuuucacccagu

SEQ ID NO: 2269868 - RNA, 19 nt, Artificial Sequence
  Description of Artificial Sequence: Synthetic oligonucleotide
gccuucgggcuuucaccca

SEQ ID NO: 2269869 - RNA, 19 nt, Artificial Sequence
  Description of Artificial Sequence: Synthetic oligonucleotide
ugccuccaacaggcacaca

SEQ ID NO: 2269870 - RNA, 19 nt, Artificial Sequence
  Description of Artificial Sequence: Synthetic oligonucleotide
ccacagugucaaaguacaa

SEQ ID NO: 2269871 - RNA, 19 nt, Artificial Sequence
  Description of Artificial Sequence: Synthetic oligonucleotide
gugcaccaagguagcccca

SEQ ID NO: 2269872 - RNA, 19 nt, Artificial Sequence
  Description of Artificial Sequence: Synthetic oligonucleotide
ccgugagcuagagcccuug

SEQ ID NO: 2269873 - RNA, 19 nt, Artificial Sequence
  Description of Artificial Sequence: Synthetic oligonucleotide
gacaggccuucgggcuuuc

SEQ ID NO: 2269874 - RNA, 19 nt, Artificial Sequence
  Description of Artificial Sequence: Synthetic oligonucleotide
ggagaacgagagagaggaa

SEQ ID NO: 2269875 - RNA, 19 nt, Artificial Sequence
  Description of Artificial Sequence: Synthetic oligonucleotide
gccgguuggaagccacacu

SEQ ID NO: 2269876 - RNA, 19 nt, Artificial Sequence
  Description of Artificial Sequence: Synthetic oligonucleotide
ggagaaugguagaguccgu

SEQ ID NO: 2269877 - RNA, 19 nt, Artificial Sequence
  Description of Artificial Sequence: Synthetic oligonucleotide
ggcuuucacccaguuguau

SEQ ID NO: 2269878 - RNA, 19 nt, Artificial Sequence
  Description of Artificial Sequence: Synthetic oligonucleotide
cgagcggcucacuccugca

SEQ ID NO: 2269879 - RNA, 19 nt, Artificial Sequence
  Description of Artificial Sequence: Synthetic oligonucleotide
cgaugguagcauucacgau

SEQ ID NO: 2269880 - RNA, 19 nt, Artificial Sequence
  Description of Artificial Sequence: Synthetic oligonucleotide
cguagucuaucagcugccu

SEQ ID NO: 2269881 - RNA, 19 nt, Artificial Sequence
  Description of Artificial Sequence: Synthetic oligonucleotide
agccuacguugggccugau

SEQ ID NO: 2269882 - RNA, 19 nt, Artificial Sequence
  Description of Artificial Sequence: Synthetic oligonucleotide
ccgugggagcgugcuguga

SEQ ID NO: 2269883 - RNA, 19 nt, Artificial Sequence
  Description of Artificial Sequence: Synthetic oligonucleotide
cccgggccuggaggaggug

SEQ ID NO: 2269884 - RNA, 19 nt, Artificial Sequence
  Description of Artificial Sequence: Synthetic oligonucleotide
cccgugagcuagagcccuu

SEQ ID NO: 2269885 - RNA, 19 nt, Artificial Sequence
  Description of Artificial Sequence: Synthetic oligonucleotide
auaacuuagagacagagug

SEQ ID NO: 2269886 - RNA, 19 nt, Artificial Sequence
  Description of Artificial Sequence: Synthetic oligonucleotide
uuaaauaacuuagagacag

SEQ ID NO: 2269887 - RNA, 19 nt, Artificial Sequence
  Description of Artificial Sequence: Synthetic oligonucleotide
agcacguugacacagaucu

SEQ ID NO: 2269888 - RNA, 19 nt, Artificial Sequence
  Description of Artificial Sequence: Synthetic oligonucleotide
gaguucaugacuucggccg

SEQ ID NO: 2269889 - RNA, 19 nt, Artificial Sequence
  Description of Artificial Sequence: Synthetic oligonucleotide
aacuuagagacagaguggg

SEQ ID NO: 2269890 - RNA, 19 nt, Artificial Sequence
  Description of Artificial Sequence: Synthetic oligonucleotide
ucuucgucaggaaauagcc

SEQ ID NO: 2269891 - RNA, 19 nt, Artificial Sequence
  Description of Artificial Sequence: Synthetic oligonucleotide
uaacuuagagacagagugg

SEQ ID NO: 2269892 - RNA, 19 nt, Artificial Sequence
  Description of Artificial Sequence: Synthetic oligonucleotide
gagucauagggucaguggg

SEQ ID NO: 2269893 - RNA, 19 nt, Artificial Sequence
  Description of Artificial Sequence: Synthetic oligonucleotide
aaagcaggcggccugccuc

SEQ ID NO: 2269894 - RNA, 19 nt, Artificial Sequence
  Description of Artificial Sequence: Synthetic oligonucleotide
cuuagagacagagugggcg

SEQ ID NO: 2269895 - RNA, 19 nt, Artificial Sequence
  Description of Artificial Sequence: Synthetic oligonucleotide
uuggaguucaugacuucgg

SEQ ID NO: 2269896 - RNA, 19 nt, Artificial Sequence
  Description of Artificial Sequence: Synthetic oligonucleotide
ggaaauagcccuugggugg

SEQ ID NO: 2269897 - RNA, 19 nt, Artificial Sequence
  Description of Artificial Sequence: Synthetic oligonucleotide
uuguacacgaggcggauga

SEQ ID NO: 2269898 - RNA, 19 nt, Artificial Sequence
  Description of Artificial Sequence: Synthetic oligonucleotide
uuaggguggaucagcaggc

SEQ ID NO: 2269899 - RNA, 19 nt, Artificial Sequence
  Description of Artificial Sequence: Synthetic oligonucleotide
ugagauccuccucauuggg

SEQ ID NO: 2269900 - RNA, 19 nt, Artificial Sequence
  Description of Artificial Sequence: Synthetic oligonucleotide
acuacaggcgucugagcgc

SEQ ID NO: 2269901 - RNA, 19 nt, Artificial Sequence
  Description of Artificial Sequence: Synthetic oligonucleotide
cagaccuccagcauagggg

SEQ ID NO: 2269902 - RNA, 19 nt, Artificial Sequence
  Description of Artificial Sequence: Synthetic oligonucleotide
agauucucuacguuggagu

SEQ ID NO: 2269903 - RNA, 19 nt, Artificial Sequence
  Description of Artificial Sequence: Synthetic oligonucleotide
cacuacaggcgucugagcg

SEQ ID NO: 2269904 - RNA, 19 nt, Artificial Sequence
  Description of Artificial Sequence: Synthetic oligonucleotide
uacguuggaguucaugacu

SEQ ID NO: 2269905 - RNA, 19 nt, Artificial Sequence
  Description of Artificial Sequence: Synthetic oligonucleotide
uacacgaggcggaugaugu

SEQ ID NO: 2269906 - RNA, 19 nt, Artificial Sequence
  Description of Artificial Sequence: Synthetic oligonucleotide
aggagcuucauccggaaca

SEQ ID NO: 2269907 - RNA, 19 nt, Artificial Sequence
  Description of Artificial Sequence: Synthetic oligonucleotide
aucuucgucaggaaauagc

SEQ ID NO: 2269908 - RNA, 19 nt, Artificial Sequence
  Description of Artificial Sequence: Synthetic oligonucleotide
auaguucuccaaaagcagg

SEQ ID NO: 2269909 - RNA, 19 nt, Artificial Sequence
  Description of Artificial Sequence: Synthetic oligonucleotide
acuuugaugccauccggag

SEQ ID NO: 2269910 - RNA, 19 nt, Artificial Sequence
  Description of Artificial Sequence: Synthetic oligonucleotide
acagaccuccagcauaggg

SEQ ID NO: 2269911 - RNA, 19 nt, Artificial Sequence
  Description of Artificial Sequence: Synthetic oligonucleotide
auaauuuaaauaacuuaga

SEQ ID NO: 2269912 - RNA, 19 nt, Artificial Sequence
  Description of Artificial Sequence: Synthetic oligonucleotide
agacuuugaugccauccgg

SEQ ID NO: 2269913 - RNA, 19 nt, Artificial Sequence
  Description of Artificial Sequence: Synthetic oligonucleotide
cagacucuggguuagggug

SEQ ID NO: 2269914 - RNA, 19 nt, Artificial Sequence
  Description of Artificial Sequence: Synthetic oligonucleotide
uccaacuuuuauuuagaaa

SEQ ID NO: 2269915 - RNA, 19 nt, Artificial Sequence
  Description of Artificial Sequence: Synthetic oligonucleotide
auugagcgcagacucuggg

SEQ ID NO: 2269916 - RNA, 19 nt, Artificial Sequence
  Description of Artificial Sequence: Synthetic oligonucleotide
gaugugcggaggcagauuc

SEQ ID NO: 2269917 - RNA, 19 nt, Artificial Sequence
  Description of Artificial Sequence: Synthetic oligonucleotide
ugacuugcagguccgugag

SEQ ID NO: 2269918 - RNA, 19 nt, Artificial Sequence
  Description of Artificial Sequence: Synthetic oligonucleotide
uccggaacagaccuccagc

SEQ ID NO: 2269919 - RNA, 19 nt, Artificial Sequence
  Description of Artificial Sequence: Synthetic oligonucleotide
aggcagggaagucuuugcc

SEQ ID NO: 2269920 - RNA, 19 nt, Artificial Sequence
  Description of Artificial Sequence: Synthetic oligonucleotide
uggaguucaugacuucggc

SEQ ID NO: 2269921 - RNA, 19 nt, Artificial Sequence
  Description of Artificial Sequence: Synthetic oligonucleotide
augacuucggccgaccggg

SEQ ID NO: 2269922 - RNA, 19 nt, Artificial Sequence
  Description of Artificial Sequence: Synthetic oligonucleotide
uucucuacguuggaguuca

SEQ ID NO: 2269923 - RNA, 19 nt, Artificial Sequence
  Description of Artificial Sequence: Synthetic oligonucleotide
gaugccauccggagggucg

SEQ ID NO: 2269924 - RNA, 19 nt, Artificial Sequence
  Description of Artificial Sequence: Synthetic oligonucleotide
agcguugucaccuccuugu

SEQ ID NO: 2269925 - RNA, 19 nt, Artificial Sequence
  Description of Artificial Sequence: Synthetic oligonucleotide
ucauccggaacagaccucc

SEQ ID NO: 2269926 - RNA, 19 nt, Artificial Sequence
  Description of Artificial Sequence: Synthetic oligonucleotide
ucggaugcccagcucagcc

SEQ ID NO: 2269927 - RNA, 19 nt, Artificial Sequence
  Description of Artificial Sequence: Synthetic oligonucleotide
aggcagauucucuacguug

SEQ ID NO: 2269928 - RNA, 19 nt, Artificial Sequence
  Description of Artificial Sequence: Synthetic oligonucleotide
ccagccauaauuuaaauaa

SEQ ID NO: 2269929 - RNA, 19 nt, Artificial Sequence
  Description of Artificial Sequence: Synthetic oligonucleotide
ucaugacuucggccgaccg

SEQ ID NO: 2269930 - RNA, 19 nt, Artificial Sequence
  Description of Artificial Sequence: Synthetic oligonucleotide
guuucuuggccaugggacc

SEQ ID NO: 2269931 - RNA, 19 nt, Artificial Sequence
  Description of Artificial Sequence: Synthetic oligonucleotide
cagaucucaccauuggcac

SEQ ID NO: 2269932 - RNA, 19 nt, Artificial Sequence
  Description of Artificial Sequence: Synthetic oligonucleotide
auuggcacccacauuuggg

SEQ ID NO: 2269933 - RNA, 19 nt, Artificial Sequence
  Description of Artificial Sequence: Synthetic oligonucleotide
gaagaucuucgucaggaaa

SEQ ID NO: 2269934 - RNA, 19 nt, Artificial Sequence
  Description of Artificial Sequence: Synthetic oligonucleotide
ucgccugcguguuucuugg

SEQ ID NO: 2269935 - RNA, 19 nt, Artificial Sequence
  Description of Artificial Sequence: Synthetic oligonucleotide
cuucgucaggaaauagccc

SEQ ID NO: 2269936 - RNA, 19 nt, Artificial Sequence
  Description of Artificial Sequence: Synthetic oligonucleotide
ggagucauagggucagugg

SEQ ID NO: 2269937 - RNA, 19 nt, Artificial Sequence
  Description of Artificial Sequence: Synthetic oligonucleotide
ucuugucucgcucgccugc

SEQ ID NO: 2269938 - RNA, 19 nt, Artificial Sequence
  Description of Artificial Sequence: Synthetic oligonucleotide
augucggaugcccagcuca

SEQ ID NO: 2269939 - RNA, 19 nt, Artificial Sequence
  Description of Artificial Sequence: Synthetic oligonucleotide
aauccagguucuggugccc

SEQ ID NO: 2269940 - RNA, 19 nt, Artificial Sequence
  Description of Artificial Sequence: Synthetic oligonucleotide
cuccuuguacacgaggcgg

SEQ ID NO: 2269941 - RNA, 19 nt, Artificial Sequence
  Description of Artificial Sequence: Synthetic oligonucleotide
aguucuccaaaagcaggcg

SEQ ID NO: 2269942 - RNA, 19 nt, Artificial Sequence
  Description of Artificial Sequence: Synthetic oligonucleotide
uuccaacuuuuauuuagaa

SEQ ID NO: 2269943 - RNA, 19 nt, Artificial Sequence
  Description of Artificial Sequence: Synthetic oligonucleotide
cuacguuggaguucaugac

SEQ ID NO: 2269944 - RNA, 19 nt, Artificial Sequence
  Description of Artificial Sequence: Synthetic oligonucleotide
ugagcgcagacucuggguu

SEQ ID NO: 2269945 - RNA, 19 nt, Artificial Sequence
  Description of Artificial Sequence: Synthetic oligonucleotide
caugacuucggccgaccgg

SEQ ID NO: 2269946 - RNA, 19 nt, Artificial Sequence
  Description of Artificial Sequence: Synthetic oligonucleotide
gacacagaucucaccauug

SEQ ID NO: 2269947 - RNA, 19 nt, Artificial Sequence
  Description of Artificial Sequence: Synthetic oligonucleotide
aacugccggccgcuguggc

SEQ ID NO: 2269948 - RNA, 19 nt, Artificial Sequence
  Description of Artificial Sequence: Synthetic oligonucleotide
agucauagggucagugggg

SEQ ID NO: 2269949 - RNA, 19 nt, Artificial Sequence
  Description of Artificial Sequence: Synthetic oligonucleotide
aggguggaucagcaggcac

SEQ ID NO: 2269950 - RNA, 19 nt, Artificial Sequence
  Description of Artificial Sequence: Synthetic oligonucleotide
cauuggcacccacauuugg

SEQ ID NO: 2269951 - RNA, 19 nt, Artificial Sequence
  Description of Artificial Sequence: Synthetic oligonucleotide
aagggagagcccacuacag

SEQ ID NO: 2269952 - RNA, 19 nt, Artificial Sequence
  Description of Artificial Sequence: Synthetic oligonucleotide
ugucggaugcccagcucag

SEQ ID NO: 2269953 - RNA, 19 nt, Artificial Sequence
  Description of Artificial Sequence: Synthetic oligonucleotide
gggagagcccacuacaggc

SEQ ID NO: 2269954 - RNA, 19 nt, Artificial Sequence
  Description of Artificial Sequence: Synthetic oligonucleotide
ugacacagaucucaccauu

SEQ ID NO: 2269955 - RNA, 19 nt, Artificial Sequence
  Description of Artificial Sequence: Synthetic oligonucleotide
auucucuacguuggaguuc

SEQ ID NO: 2269956 - RNA, 19 nt, Artificial Sequence
  Description of Artificial Sequence: Synthetic oligonucleotide
uggguuaggguggaucagc

SEQ ID NO: 2269957 - RNA, 19 nt, Artificial Sequence
  Description of Artificial Sequence: Synthetic oligonucleotide
acuuagagacagagugggc

SEQ ID NO: 2269958 - RNA, 19 nt, Artificial Sequence
  Description of Artificial Sequence: Synthetic oligonucleotide
ucggccgucagcguuguca

SEQ ID NO: 2269959 - RNA, 19 nt, Artificial Sequence
  Description of Artificial Sequence: Synthetic oligonucleotide
caggaggagcuucauccgg

SEQ ID NO: 2269960 - RNA, 19 nt, Artificial Sequence
  Description of Artificial Sequence: Synthetic oligonucleotide
cauugagcgcagacucugg

SEQ ID NO: 2269961 - RNA, 19 nt, Artificial Sequence
  Description of Artificial Sequence: Synthetic oligonucleotide
acugccggccgcuguggcc

SEQ ID NO: 2269962 - RNA, 19 nt, Artificial Sequence
  Description of Artificial Sequence: Synthetic oligonucleotide
ugagcacguugacacagau

SEQ ID NO: 2269963 - RNA, 19 nt, Artificial Sequence
  Description of Artificial Sequence: Synthetic oligonucleotide
uguggcccuagcgaggccc

SEQ ID NO: 2269964 - RNA, 19 nt, Artificial Sequence
  Description of Artificial Sequence: Synthetic oligonucleotide
auccggaacagaccuccag

SEQ ID NO: 2269965 - RNA, 19 nt, Artificial Sequence
  Description of Artificial Sequence: Synthetic oligonucleotide
uugagcgcagacucugggu

SEQ ID NO: 2269966 - RNA, 19 nt, Artificial Sequence
  Description of Artificial Sequence: Synthetic oligonucleotide
cuacaggcgucugagcgcc

SEQ ID NO: 2269967 - RNA, 19 nt, Artificial Sequence
  Description of Artificial Sequence: Synthetic oligonucleotide
aguucaugacuucggccga

SEQ ID NO: 2269968 - RNA, 19 nt, Artificial Sequence
  Description of Artificial Sequence: Synthetic oligonucleotide
ggaguucaugacuucggcc

SEQ ID NO: 2269969 - RNA, 19 nt, Artificial Sequence
  Description of Artificial Sequence: Synthetic oligonucleotide
acuugcagguccgugagau

SEQ ID NO: 2269970 - RNA, 19 nt, Artificial Sequence
  Description of Artificial Sequence: Synthetic oligonucleotide
cacgaggcggaugaugugc

SEQ ID NO: 2269971 - RNA, 19 nt, Artificial Sequence
  Description of Artificial Sequence: Synthetic oligonucleotide
gcggggacggagcagaggg

SEQ ID NO: 2269972 - RNA, 19 nt, Artificial Sequence
  Description of Artificial Sequence: Synthetic oligonucleotide
ugucucgcucgccugcgug

SEQ ID NO: 2269973 - RNA, 19 nt, Artificial Sequence
  Description of Artificial Sequence: Synthetic oligonucleotide
aggcacuugauggucagca

SEQ ID NO: 2269974 - RNA, 19 nt, Artificial Sequence
  Description of Artificial Sequence: Synthetic oligonucleotide
cacguugacacagaucuca

SEQ ID NO: 2269975 - RNA, 19 nt, Artificial Sequence
  Description of Artificial Sequence: Synthetic oligonucleotide
aggcggaugaugugcggag

SEQ ID NO: 2269976 - RNA, 19 nt, Artificial Sequence
  Description of Artificial Sequence: Synthetic oligonucleotide
gugacuugcagguccguga

SEQ ID NO: 2269977 - RNA, 19 nt, Artificial Sequence
  Description of Artificial Sequence: Synthetic oligonucleotide
uugagcacguugacacaga

SEQ ID NO: 2269978 - RNA, 19 nt, Artificial Sequence
  Description of Artificial Sequence: Synthetic oligonucleotide
cucugugagcagacgggcc

SEQ ID NO: 2269979 - RNA, 19 nt, Artificial Sequence
  Description of Artificial Sequence: Synthetic oligonucleotide
uucuugucucgcucgccug

SEQ ID NO: 2269980 - RNA, 19 nt, Artificial Sequence
  Description of Artificial Sequence: Synthetic oligonucleotide
gacuuugaugccauccgga

SEQ ID NO: 2269981 - RNA, 19 nt, Artificial Sequence
  Description of Artificial Sequence: Synthetic oligonucleotide
ggagggucggccgucagcg

SEQ ID NO: 2269982 - RNA, 19 nt, Artificial Sequence
  Description of Artificial Sequence: Synthetic oligonucleotide
ugccugcacuccucgaacc

SEQ ID NO: 2269983 - RNA, 19 nt, Artificial Sequence
  Description of Artificial Sequence: Synthetic oligonucleotide
ggcagggaagucuuugccc

SEQ ID NO: 2269984 - RNA, 19 nt, Artificial Sequence
  Description of Artificial Sequence: Synthetic oligonucleotide
cuugauggucagcagcaca

SEQ ID NO: 2269985 - RNA, 19 nt, Artificial Sequence
  Description of Artificial Sequence: Synthetic oligonucleotide
cgugagauccuccucauug

SEQ ID NO: 2269986 - RNA, 19 nt, Artificial Sequence
  Description of Artificial Sequence: Synthetic oligonucleotide
acuccucgaaccgccggcc

SEQ ID NO: 2269987 - RNA, 19 nt, Artificial Sequence
  Description of Artificial Sequence: Synthetic oligonucleotide
gauggucagcagcacaugu

SEQ ID NO: 2269988 - RNA, 19 nt, Artificial Sequence
  Description of Artificial Sequence: Synthetic oligonucleotide
cuucauccggaacagaccu

SEQ ID NO: 2269989 - RNA, 19 nt, Artificial Sequence
  Description of Artificial Sequence: Synthetic oligonucleotide
agguccgugagauccuccu

SEQ ID NO: 2269990 - RNA, 19 nt, Artificial Sequence
  Description of Artificial Sequence: Synthetic oligonucleotide
caggaaauagcccuugggu

SEQ ID NO: 2269991 - RNA, 19 nt, Artificial Sequence
  Description of Artificial Sequence: Synthetic oligonucleotide
uggcacccacauuugggug

SEQ ID NO: 2269992 - RNA, 19 nt, Artificial Sequence
  Description of Artificial Sequence: Synthetic oligonucleotide
ugugcggaggcagauucuc

SEQ ID NO: 2269993 - RNA, 19 nt, Artificial Sequence
  Description of Artificial Sequence: Synthetic oligonucleotide
cucgccugcguguuucuug

SEQ ID NO: 2269994 - RNA, 19 nt, Artificial Sequence
  Description of Artificial Sequence: Synthetic oligonucleotide
ugcggaggcagauucucua

SEQ ID NO: 2269995 - RNA, 19 nt, Artificial Sequence
  Description of Artificial Sequence: Synthetic oligonucleotide
acguugacacagaucucac

SEQ ID NO: 2269996 - RNA, 19 nt, Artificial Sequence
  Description of Artificial Sequence: Synthetic oligonucleotide
ucugagcgcccgcuucuug

SEQ ID NO: 2269997 - RNA, 19 nt, Artificial Sequence
  Description of Artificial Sequence: Synthetic oligonucleotide
uucaugacuucggccgacc

SEQ ID NO: 2269998 - RNA, 19 nt, Artificial Sequence
  Description of Artificial Sequence: Synthetic oligonucleotide
cagcacaugucggaugccc

SEQ ID NO: 2269999 - RNA, 19 nt, Artificial Sequence
  Description of Artificial Sequence: Synthetic oligonucleotide
gauucucuacguuggaguu

SEQ ID NO: 2270000 - RNA, 19 nt, Artificial Sequence
  Description of Artificial Sequence: Synthetic oligonucleotide
cucucuugagcacguugac

SEQ ID NO: 2270001 - RNA, 19 nt, Artificial Sequence
  Description of Artificial Sequence: Synthetic oligonucleotide
aauagcccuugggugggga

SEQ ID NO: 2270002 - RNA, 19 nt, Artificial Sequence
  Description of Artificial Sequence: Synthetic oligonucleotide
uggugcccuccccuguucc

SEQ ID NO: 2270003 - RNA, 19 nt, Artificial Sequence
  Description of Artificial Sequence: Synthetic oligonucleotide
gaugaugugcggaggcaga

SEQ ID NO: 2270004 - RNA, 19 nt, Artificial Sequence
  Description of Artificial Sequence: Synthetic oligonucleotide
cacuccucgaaccgccggc

SEQ ID NO: 2270005 - RNA, 19 nt, Artificial Sequence
  Description of Artificial Sequence: Synthetic oligonucleotide
ugacuucggccgaccgggg

SEQ ID NO: 2270006 - RNA, 19 nt, Artificial Sequence
  Description of Artificial Sequence: Synthetic oligonucleotide
uucauccggaacagaccuc

SEQ ID NO: 2270007 - RNA, 19 nt, Artificial Sequence
  Description of Artificial Sequence: Synthetic oligonucleotide
cuugucucgcucgccugcg

SEQ ID NO: 2270008 - RNA, 19 nt, Artificial Sequence
  Description of Artificial Sequence: Synthetic oligonucleotide
guacacgaggcggaugaug

SEQ ID NO: 2270009 - RNA, 19 nt, Artificial Sequence
  Description of Artificial Sequence: Synthetic oligonucleotide
ucagcguugucaccuccuu

SEQ ID NO: 2270010 - RNA, 19 nt, Artificial Sequence
  Description of Artificial Sequence: Synthetic oligonucleotide
ccaugggacccucagcucc

SEQ ID NO: 2270011 - RNA, 19 nt, Artificial Sequence
  Description of Artificial Sequence: Synthetic oligonucleotide
acccacauuuggguggaag

SEQ ID NO: 2270012 - RNA, 19 nt, Artificial Sequence
  Description of Artificial Sequence: Synthetic oligonucleotide
ugggcggugggcggggacg

SEQ ID NO: 2270013 - RNA, 19 nt, Artificial Sequence
  Description of Artificial Sequence: Synthetic oligonucleotide
gagcagacgggcccgggca

SEQ ID NO: 2270014 - RNA, 19 nt, Artificial Sequence
  Description of Artificial Sequence: Synthetic oligonucleotide
cccucugggcccucgaugg

SEQ ID NO: 2270015 - RNA, 19 nt, Artificial Sequence
  Description of Artificial Sequence: Synthetic oligonucleotide
ggagcuucauccggaacag

SEQ ID NO: 2270016 - RNA, 19 nt, Artificial Sequence
  Description of Artificial Sequence: Synthetic oligonucleotide
ucgucaggaaauagcccuu

SEQ ID NO: 2270017 - RNA, 19 nt, Artificial Sequence
  Description of Artificial Sequence: Synthetic oligonucleotide
acgaggcggaugaugugcg

SEQ ID NO: 2270018 - RNA, 19 nt, Artificial Sequence
  Description of Artificial Sequence: Synthetic oligonucleotide
ggaacagaccuccagcaua

SEQ ID NO: 2270019 - RNA, 19 nt, Artificial Sequence
  Description of Artificial Sequence: Synthetic oligonucleotide
cagagugggcggugggcgg

SEQ ID NO: 2270020 - RNA, 19 nt, Artificial Sequence
  Description of Artificial Sequence: Synthetic oligonucleotide
gaggagcuucauccggaac

SEQ ID NO: 2270021 - RNA, 19 nt, Artificial Sequence
  Description of Artificial Sequence: Synthetic oligonucleotide
agcgcagacucuggguuag

SEQ ID NO: 2270022 - RNA, 19 nt, Artificial Sequence
  Description of Artificial Sequence: Synthetic oligonucleotide
cucuacguuggaguucaug

SEQ ID NO: 2270023 - RNA, 19 nt, Artificial Sequence
  Description of Artificial Sequence: Synthetic oligonucleotide
acaggcgucugagcgcccg

SEQ ID NO: 2270024 - RNA, 19 nt, Artificial Sequence
  Description of Artificial Sequence: Synthetic oligonucleotide
agcagacgggcccgggcag

SEQ ID NO: 2270025 - RNA, 19 nt, Artificial Sequence
  Description of Artificial Sequence: Synthetic oligonucleotide
gguuaggguggaucagcag

SEQ ID NO: 2270026 - RNA, 19 nt, Artificial Sequence
  Description of Artificial Sequence: Synthetic oligonucleotide
agaucuucgucaggaaaua

SEQ ID NO: 2270027 - RNA, 19 nt, Artificial Sequence
  Description of Artificial Sequence: Synthetic oligonucleotide
cacaugucggaugcccagc

SEQ ID NO: 2270028 - RNA, 19 nt, Artificial Sequence
  Description of Artificial Sequence: Synthetic oligonucleotide
agagugggcggugggcggg

SEQ ID NO: 2270029 - RNA, 19 nt, Artificial Sequence
  Description of Artificial Sequence: Synthetic oligonucleotide
cucuggguuaggguggauc

SEQ ID NO: 2270030 - RNA, 19 nt, Artificial Sequence
  Description of Artificial Sequence: Synthetic oligonucleotide
ugagcgcccgcuucuuguc

SEQ ID NO: 2270031 - RNA, 19 nt, Artificial Sequence
  Description of Artificial Sequence: Synthetic oligonucleotide
augccauccggagggucgg

SEQ ID NO: 2270032 - RNA, 19 nt, Artificial Sequence
  Description of Artificial Sequence: Synthetic oligonucleotide
cuuguacacgaggcggaug

SEQ ID NO: 2270033 - RNA, 19 nt, Artificial Sequence
  Description of Artificial Sequence: Synthetic oligonucleotide
ccaggaggagcuucauccg

SEQ ID NO: 2270034 - RNA, 19 nt, Artificial Sequence
  Description of Artificial Sequence: Synthetic oligonucleotide
aggccuccuggagucauag

SEQ ID NO: 2270035 - RNA, 19 nt, Artificial Sequence
  Description of Artificial Sequence: Synthetic oligonucleotide
gaggcggaugaugugcgga

SEQ ID NO: 2270036 - RNA, 19 nt, Artificial Sequence
  Description of Artificial Sequence: Synthetic oligonucleotide
gagcgcccgcuucuugucc

SEQ ID NO: 2270037 - RNA, 19 nt, Artificial Sequence
  Description of Artificial Sequence: Synthetic oligonucleotide
gcagccucagcccucccgc

SEQ ID NO: 2270038 - RNA, 19 nt, Artificial Sequence
  Description of Artificial Sequence: Synthetic oligonucleotide
caccccagccauaauuuaa

SEQ ID NO: 2270039 - RNA, 19 nt, Artificial Sequence
  Description of Artificial Sequence: Synthetic oligonucleotide
cuccucgaaccgccggccg

SEQ ID NO: 2270040 - RNA, 19 nt, Artificial Sequence
  Description of Artificial Sequence: Synthetic oligonucleotide
gcggaugaugugcggaggc

SEQ ID NO: 2270041 - RNA, 19 nt, Artificial Sequence
  Description of Artificial Sequence: Synthetic oligonucleotide
cuggguuaggguggaucag

SEQ ID NO: 2270042 - RNA, 19 nt, Artificial Sequence
  Description of Artificial Sequence: Synthetic oligonucleotide
gccugcguguuucuuggcc

SEQ ID NO: 2270043 - RNA, 19 nt, Artificial Sequence
  Description of Artificial Sequence: Synthetic oligonucleotide
cagguccgugagauccucc

SEQ ID NO: 2270044 - RNA, 19 nt, Artificial Sequence
  Description of Artificial Sequence: Synthetic oligonucleotide
cagcguugucaccuccuug

SEQ ID NO: 2270045 - RNA, 19 nt, Artificial Sequence
  Description of Artificial Sequence: Synthetic oligonucleotide
cccacuacaggcgucugag

SEQ ID NO: 2270046 - RNA, 19 nt, Artificial Sequence
  Description of Artificial Sequence: Synthetic oligonucleotide
augaugugcggaggcagau

SEQ ID NO: 2270047 - RNA, 19 nt, Artificial Sequence
  Description of Artificial Sequence: Synthetic oligonucleotide
cuucuugucucgcucgccu

SEQ ID NO: 2270048 - RNA, 19 nt, Artificial Sequence
  Description of Artificial Sequence: Synthetic oligonucleotide
ggaucucugugagcagacg

SEQ ID NO: 2270049 - RNA, 19 nt, Artificial Sequence
  Description of Artificial Sequence: Synthetic oligonucleotide
gagcacguugacacagauc

SEQ ID NO: 2270050 - RNA, 19 nt, Artificial Sequence
  Description of Artificial Sequence: Synthetic oligonucleotide
ugcguguuucuuggccaug

SEQ ID NO: 2270051 - RNA, 19 nt, Artificial Sequence
  Description of Artificial Sequence: Synthetic oligonucleotide
cucugggcccucgauggug

SEQ ID NO: 2270052 - RNA, 19 nt, Artificial Sequence
  Description of Artificial Sequence: Synthetic oligonucleotide
ggccaugggacccucagcu

SEQ ID NO: 2270053 - RNA, 19 nt, Artificial Sequence
  Description of Artificial Sequence: Synthetic oligonucleotide
gcggccugccuccucauug

SEQ ID NO: 2270054 - RNA, 19 nt, Artificial Sequence
  Description of Artificial Sequence: Synthetic oligonucleotide
agcaggcacuugaugguca

SEQ ID NO: 2270055 - RNA, 19 nt, Artificial Sequence
  Description of Artificial Sequence: Synthetic oligonucleotide
gagagcccacuacaggcgu

SEQ ID NO: 2270056 - RNA, 19 nt, Artificial Sequence
  Description of Artificial Sequence: Synthetic oligonucleotide
agggucggccgucagcguu

SEQ ID NO: 2270057 - RNA, 19 nt, Artificial Sequence
  Description of Artificial Sequence: Synthetic oligonucleotide
uugucucgcucgccugcgu

SEQ ID NO: 2270058 - RNA, 19 nt, Artificial Sequence
  Description of Artificial Sequence: Synthetic oligonucleotide
gaaccgccggccggggcgg

SEQ ID NO: 2270059 - RNA, 19 nt, Artificial Sequence
  Description of Artificial Sequence: Synthetic oligonucleotide
ggugacuugcagguccgug

SEQ ID NO: 2270060 - RNA, 19 nt, Artificial Sequence
  Description of Artificial Sequence: Synthetic oligonucleotide
ucgaaccgccggccggggc

SEQ ID NO: 2270061 - RNA, 19 nt, Artificial Sequence
  Description of Artificial Sequence: Synthetic oligonucleotide
gccgcuguggcccuagcga

SEQ ID NO: 2270062 - RNA, 19 nt, Artificial Sequence
  Description of Artificial Sequence: Synthetic oligonucleotide
ccccauggaucucugugag

SEQ ID NO: 2270063 - RNA, 19 nt, Artificial Sequence
  Description of Artificial Sequence: Synthetic oligonucleotide
cccacauuuggguggaaga

SEQ ID NO: 2270064 - RNA, 19 nt, Artificial Sequence
  Description of Artificial Sequence: Synthetic oligonucleotide
ggggaagacuuugaugcca

SEQ ID NO: 2270065 - RNA, 19 nt, Artificial Sequence
  Description of Artificial Sequence: Synthetic oligonucleotide
caacugccggccgcugugg

SEQ ID NO: 2270066 - RNA, 19 nt, Artificial Sequence
  Description of Artificial Sequence: Synthetic oligonucleotide
ugaugugcggaggcagauu

SEQ ID NO: 2270067 - RNA, 19 nt, Artificial Sequence
  Description of Artificial Sequence: Synthetic oligonucleotide
gagcgcagacucuggguua

SEQ ID NO: 2270068 - RNA, 19 nt, Artificial Sequence
  Description of Artificial Sequence: Synthetic oligonucleotide
ccauccggagggucggccg

SEQ ID NO: 2270069 - RNA, 19 nt, Artificial Sequence
  Description of Artificial Sequence: Synthetic oligonucleotide
cguugacacagaucucacc

SEQ ID NO: 2270070 - RNA, 19 nt, Artificial Sequence
  Description of Artificial Sequence: Synthetic oligonucleotide
ggcggaugaugugcggagg

SEQ ID NO: 2270071 - RNA, 19 nt, Artificial Sequence
  Description of Artificial Sequence: Synthetic oligonucleotide
ggccgcuguggcccuagcg

SEQ ID NO: 2270072 - RNA, 19 nt, Artificial Sequence
  Description of Artificial Sequence: Synthetic oligonucleotide
uguacacgaggcggaugau

SEQ ID NO: 2270073 - RNA, 19 nt, Artificial Sequence
  Description of Artificial Sequence: Synthetic oligonucleotide
ggaggcagauucucuacgu

SEQ ID NO: 2270074 - RNA, 19 nt, Artificial Sequence
  Description of Artificial Sequence: Synthetic oligonucleotide
ucgcucgccugcguguuuc

SEQ ID NO: 2270075 - RNA, 19 nt, Artificial Sequence
  Description of Artificial Sequence: Synthetic oligonucleotide
gccauaauuuaaauaacuu

SEQ ID NO: 2270076 - RNA, 19 nt, Artificial Sequence
  Description of Artificial Sequence: Synthetic oligonucleotide
acgggcccgggcagcauac

SEQ ID NO: 2270077 - RNA, 19 nt, Artificial Sequence
  Description of Artificial Sequence: Synthetic oligonucleotide
ccauuggcacccacauuug

SEQ ID NO: 2270078 - RNA, 19 nt, Artificial Sequence
  Description of Artificial Sequence: Synthetic oligonucleotide
ccugcguguuucuuggcca

SEQ ID NO: 2270079 - RNA, 19 nt, Artificial Sequence
  Description of Artificial Sequence: Synthetic oligonucleotide
gaggcagauucucuacguu

SEQ ID NO: 2270080 - RNA, 19 nt, Artificial Sequence
  Description of Artificial Sequence: Synthetic oligonucleotide
gcggaggcagauucucuac

SEQ ID NO: 2270081 - RNA, 19 nt, Artificial Sequence
  Description of Artificial Sequence: Synthetic oligonucleotide
gagugggcggugggcgggg

SEQ ID NO: 2270082 - RNA, 19 nt, Artificial Sequence
  Description of Artificial Sequence: Synthetic oligonucleotide
cggaggcagauucucuacg

SEQ ID NO: 2270083 - RNA, 19 nt, Artificial Sequence
  Description of Artificial Sequence: Synthetic oligonucleotide
ccggaacagaccuccagca

SEQ ID NO: 2270084 - RNA, 19 nt, Artificial Sequence
  Description of Artificial Sequence: Synthetic oligonucleotide
ccgcuguggcccuagcgag

SEQ ID NO: 2270085 - RNA, 19 nt, Artificial Sequence
  Description of Artificial Sequence: Synthetic oligonucleotide
gugagcagacgggcccggg

SEQ ID NO: 2270086 - RNA, 19 nt, Artificial Sequence
  Description of Artificial Sequence: Synthetic oligonucleotide
ugggcccucgauggugacu

SEQ ID NO: 2270087 - RNA, 19 nt, Artificial Sequence
  Description of Artificial Sequence: Synthetic oligonucleotide
ccaacugccggccgcugug

SEQ ID NO: 2270088 - RNA, 19 nt, Artificial Sequence
  Description of Artificial Sequence: Synthetic oligonucleotide
gucggaugcccagcucagc

SEQ ID NO: 2270089 - RNA, 19 nt, Artificial Sequence
  Description of Artificial Sequence: Synthetic oligonucleotide
gguucuggugcccuccccu

SEQ ID NO: 2270090 - RNA, 19 nt, Artificial Sequence
  Description of Artificial Sequence: Synthetic oligonucleotide
gggacggagcagagggagg

SEQ ID NO: 2270091 - RNA, 19 nt, Artificial Sequence
  Description of Artificial Sequence: Synthetic oligonucleotide
cgaaccgccggccggggcg

SEQ ID NO: 2270092 - RNA, 19 nt, Artificial Sequence
  Description of Artificial Sequence: Synthetic oligonucleotide
cugagcgcccgcuucuugu

SEQ ID NO: 2270093 - RNA, 19 nt, Artificial Sequence
  Description of Artificial Sequence: Synthetic oligonucleotide
caggcggccugccuccuca

SEQ ID NO: 2270094 - RNA, 19 nt, Artificial Sequence
  Description of Artificial Sequence: Synthetic oligonucleotide
caggcgucugagcgcccgc

SEQ ID NO: 2270095 - RNA, 19 nt, Artificial Sequence
  Description of Artificial Sequence: Synthetic oligonucleotide
cuggugcccuccccuguuc

SEQ ID NO: 2270096 - RNA, 19 nt, Artificial Sequence
  Description of Artificial Sequence: Synthetic oligonucleotide
augugcggaggcagauucu

SEQ ID NO: 2270097 - RNA, 19 nt, Artificial Sequence
  Description of Artificial Sequence: Synthetic oligonucleotide
gagcccacuacaggcgucu

SEQ ID NO: 2270098 - RNA, 19 nt, Artificial Sequence
  Description of Artificial Sequence: Synthetic oligonucleotide
gguccgugagauccuccuc

SEQ ID NO: 2270099 - RNA, 19 nt, Artificial Sequence
  Description of Artificial Sequence: Synthetic oligonucleotide
cguguuucuuggccauggg

SEQ ID NO: 2270100 - RNA, 19 nt, Artificial Sequence
  Description of Artificial Sequence: Synthetic oligonucleotide
ccacuacaggcgucugagc

SEQ ID NO: 2270101 - RNA, 19 nt, Artificial Sequence
  Description of Artificial Sequence: Synthetic oligonucleotide
guggcccuagcgaggcccc

SEQ ID NO: 2270102 - RNA, 19 nt, Artificial Sequence
  Description of Artificial Sequence: Synthetic oligonucleotide
cucgaaccgccggccgggg

SEQ ID NO: 2270103 - RNA, 19 nt, Artificial Sequence
  Description of Artificial Sequence: Synthetic oligonucleotide
gucucgcucgccugcgugu

SEQ ID NO: 2270104 - RNA, 19 nt, Artificial Sequence
  Description of Artificial Sequence: Synthetic oligonucleotide
ucucuacguuggaguucau

SEQ ID NO: 2270105 - RNA, 19 nt, Artificial Sequence
  Description of Artificial Sequence: Synthetic oligonucleotide
guggaucagcaggcacuug

SEQ ID NO: 2270106 - RNA, 19 nt, Artificial Sequence
  Description of Artificial Sequence: Synthetic oligonucleotide
ccguccagucucucuugag

SEQ ID NO: 2270107 - RNA, 19 nt, Artificial Sequence
  Description of Artificial Sequence: Synthetic oligonucleotide
gcccucgauggugacuugc

SEQ ID NO: 2270108 - RNA, 19 nt, Artificial Sequence
  Description of Artificial Sequence: Synthetic oligonucleotide
gggcccaacugccggccgc

SEQ ID NO: 2270109 - RNA, 19 nt, Artificial Sequence
  Description of Artificial Sequence: Synthetic oligonucleotide
aggcgucugagcgcccgcu

SEQ ID NO: 2270110 - RNA, 19 nt, Artificial Sequence
  Description of Artificial Sequence: Synthetic oligonucleotide
ggguggaucagcaggcacu

SEQ ID NO: 2270111 - RNA, 19 nt, Artificial Sequence
  Description of Artificial Sequence: Synthetic oligonucleotide
gacggagcagagggaggaa

SEQ ID NO: 2270112 - RNA, 19 nt, Artificial Sequence
  Description of Artificial Sequence: Synthetic oligonucleotide
ugccauccggagggucggc

SEQ ID NO: 2270113 - RNA, 19 nt, Artificial Sequence
  Description of Artificial Sequence: Synthetic oligonucleotide
ggcggggacggagcagagg

SEQ ID NO: 2270114 - RNA, 19 nt, Artificial Sequence
  Description of Artificial Sequence: Synthetic oligonucleotide
cagucucucuugagcacgu

SEQ ID NO: 2270115 - RNA, 19 nt, Artificial Sequence
  Description of Artificial Sequence: Synthetic oligonucleotide
cgcagacucuggguuaggg

SEQ ID NO: 2270116 - RNA, 19 nt, Artificial Sequence
  Description of Artificial Sequence: Synthetic oligonucleotide
gucagcguugucaccuccu

SEQ ID NO: 2270117 - RNA, 19 nt, Artificial Sequence
  Description of Artificial Sequence: Synthetic oligonucleotide
gugggcggggacggagcag

SEQ ID NO: 2270118 - RNA, 19 nt, Artificial Sequence
  Description of Artificial Sequence: Synthetic oligonucleotide
gccaugggacccucagcuc

SEQ ID NO: 2270119 - RNA, 19 nt, Artificial Sequence
  Description of Artificial Sequence: Synthetic oligonucleotide
gccgucagcguugucaccu

SEQ ID NO: 2270120 - RNA, 19 nt, Artificial Sequence
  Description of Artificial Sequence: Synthetic oligonucleotide
ccccucugggcccucgaug

SEQ ID NO: 2270121 - RNA, 19 nt, Artificial Sequence
  Description of Artificial Sequence: Synthetic oligonucleotide
agcccacuacaggcgucug

SEQ ID NO: 2270122 - RNA, 19 nt, Artificial Sequence
  Description of Artificial Sequence: Synthetic oligonucleotide
cgaggcggaugaugugcgg

SEQ ID NO: 2270123 - RNA, 19 nt, Artificial Sequence
  Description of Artificial Sequence: Synthetic oligonucleotide
gccauccggagggucggcc

SEQ ID NO: 2270124 - RNA, 19 nt, Artificial Sequence
  Description of Artificial Sequence: Synthetic oligonucleotide
cggccgucagcguugucac

SEQ ID NO: 2270125 - RNA, 19 nt, Artificial Sequence
  Description of Artificial Sequence: Synthetic oligonucleotide
gggcagcauacucuucaua

SEQ ID NO: 2270126 - RNA, 19 nt, Artificial Sequence
  Description of Artificial Sequence: Synthetic oligonucleotide
cucagccguccagucucuc

SEQ ID NO: 2270127 - RNA, 19 nt, Artificial Sequence
  Description of Artificial Sequence: Synthetic oligonucleotide
gcccacuacaggcgucuga

SEQ ID NO: 2270128 - RNA, 19 nt, Artificial Sequence
  Description of Artificial Sequence: Synthetic oligonucleotide
ggccgucagcguugucacc

SEQ ID NO: 2270129 - RNA, 19 nt, Artificial Sequence
  Description of Artificial Sequence: Synthetic oligonucleotide
gggaagacuuugaugccau

SEQ ID NO: 2270130 - RNA, 19 nt, Artificial Sequence
  Description of Artificial Sequence: Synthetic oligonucleotide
cgucagcguugucaccucc

SEQ ID NO: 2270131 - RNA, 19 nt, Artificial Sequence
  Description of Artificial Sequence: Synthetic oligonucleotide
cauccggagggucggccgu

SEQ ID NO: 2270132 - RNA, 19 nt, Artificial Sequence
  Description of Artificial Sequence: Synthetic oligonucleotide
cgaggccccgcuccgcucc

SEQ ID NO: 2270133 - RNA, 19 nt, Artificial Sequence
  Description of Artificial Sequence: Synthetic oligonucleotide
guccccucugggcccucga

SEQ ID NO: 2270134 - RNA, 19 nt, Artificial Sequence
  Description of Artificial Sequence: Synthetic oligonucleotide
gcagacgggcccgggcagc

SEQ ID NO: 2270135 - RNA, 19 nt, Artificial Sequence
  Description of Artificial Sequence: Synthetic oligonucleotide
gguccccucugggcccucg

SEQ ID NO: 2270136 - RNA, 19 nt, Artificial Sequence
  Description of Artificial Sequence: Synthetic oligonucleotide
gcagguccgugagauccuc

SEQ ID NO: 2270137 - RNA, 19 nt, Artificial Sequence
  Description of Artificial Sequence: Synthetic oligonucleotide
ugccggccgcuguggcccu

SEQ ID NO: 2270138 - RNA, 19 nt, Artificial Sequence
  Description of Artificial Sequence: Synthetic oligonucleotide
aggcggccugccuccucau

SEQ ID NO: 2270139 - RNA, 19 nt, Artificial Sequence
  Description of Artificial Sequence: Synthetic oligonucleotide
gugcggaggcagauucucu

SEQ ID NO: 2270140 - RNA, 19 nt, Artificial Sequence
  Description of Artificial Sequence: Synthetic oligonucleotide
gcacguugacacagaucuc

SEQ ID NO: 2270141 - RNA, 19 nt, Artificial Sequence
  Description of Artificial Sequence: Synthetic oligonucleotide
cggagggucggccgucagc

SEQ ID NO: 2270142 - RNA, 19 nt, Artificial Sequence
  Description of Artificial Sequence: Synthetic oligonucleotide
gcccuccccuguucccucc

SEQ ID NO: 2270143 - RNA, 19 nt, Artificial Sequence
  Description of Artificial Sequence: Synthetic oligonucleotide
gcguugucaccuccuugua

SEQ ID NO: 2270144 - RNA, 19 nt, Artificial Sequence
  Description of Artificial Sequence: Synthetic oligonucleotide
ccgucagcguugucaccuc

SEQ ID NO: 2270145 - RNA, 19 nt, Artificial Sequence
  Description of Artificial Sequence: Synthetic oligonucleotide
gcgcagacucuggguuagg

SEQ ID NO: 2270146 - RNA, 19 nt, Artificial Sequence
  Description of Artificial Sequence: Synthetic oligonucleotide
ccuugccugcacuccucga

SEQ ID NO: 2270147 - RNA, 19 nt, Artificial Sequence
  Description of Artificial Sequence: Synthetic oligonucleotide
ccaccccagccauaauuua

SEQ ID NO: 2270148 - RNA, 19 nt, Artificial Sequence
  Description of Artificial Sequence: Synthetic oligonucleotide
agacgggcccgggcagcau

SEQ ID NO: 2270149 - RNA, 19 nt, Artificial Sequence
  Description of Artificial Sequence: Synthetic oligonucleotide
cagccucagcccucccgcu

SEQ ID NO: 2270150 - RNA, 19 nt, Artificial Sequence
  Description of Artificial Sequence: Synthetic oligonucleotide
cccgcugcuggagccacca

SEQ ID NO: 2270151 - RNA, 19 nt, Artificial Sequence
  Description of Artificial Sequence: Synthetic oligonucleotide
cccgggcagcauacucuuc

SEQ ID NO: 2270152 - RNA, 19 nt, Artificial Sequence
  Description of Artificial Sequence: Synthetic oligonucleotide
cggaugaugugcggaggca

SEQ ID NO: 2270153 - RNA, 19 nt, Artificial Sequence
  Description of Artificial Sequence: Synthetic oligonucleotide
ccggagggucggccgucag

SEQ ID NO: 2270154 - RNA, 19 nt, Artificial Sequence
  Description of Artificial Sequence: Synthetic oligonucleotide
cggccugccuccucauuga

SEQ ID NO: 2270155 - RNA, 19 nt, Artificial Sequence
  Description of Artificial Sequence: Synthetic oligonucleotide
gcccgggcagcauacucuu

SEQ ID NO: 2270156 - RNA, 19 nt, Artificial Sequence
  Description of Artificial Sequence: Synthetic oligonucleotide
ccccagccauaauuuaaau

SEQ ID NO: 2270157 - RNA, 19 nt, Artificial Sequence
  Description of Artificial Sequence: Synthetic oligonucleotide
gucggccgucagcguuguc

SEQ ID NO: 2270158 - RNA, 19 nt, Artificial Sequence
  Description of Artificial Sequence: Synthetic oligonucleotide
cgccugcguguuucuuggc

SEQ ID NO: 2270159 - RNA, 19 nt, Artificial Sequence
  Description of Artificial Sequence: Synthetic oligonucleotide
gcccaacugccggccgcug

SEQ ID NO: 2270160 - RNA, 19 nt, Artificial Sequence
  Description of Artificial Sequence: Synthetic oligonucleotide
ccggccgcuguggcccuag

SEQ ID NO: 2270161 - RNA, 19 nt, Artificial Sequence
  Description of Artificial Sequence: Synthetic oligonucleotide
ccuuguacacgaggcggau

SEQ ID NO: 2270162 - RNA, 19 nt, Artificial Sequence
  Description of Artificial Sequence: Synthetic oligonucleotide
cgucugagcgcccgcuucu

SEQ ID NO: 2270163 - RNA, 19 nt, Artificial Sequence
  Description of Artificial Sequence: Synthetic oligonucleotide
cacccacauuuggguggaa

SEQ ID NO: 2270164 - RNA, 19 nt, Artificial Sequence
  Description of Artificial Sequence: Synthetic oligonucleotide
ggucggccgucagcguugu

SEQ ID NO: 2270165 - RNA, 19 nt, Artificial Sequence
  Description of Artificial Sequence: Synthetic oligonucleotide
gcucagccguccagucucu

SEQ ID NO: 2270166 - RNA, 19 nt, Artificial Sequence
  Description of Artificial Sequence: Synthetic oligonucleotide
ccucugggcccucgauggu

SEQ ID NO: 2270167 - RNA, 19 nt, Artificial Sequence
  Description of Artificial Sequence: Synthetic oligonucleotide
ggcggccugccuccucauu

SEQ ID NO: 2270168 - RNA, 19 nt, Artificial Sequence
  Description of Artificial Sequence: Synthetic oligonucleotide
ccgugagauccuccucauu

SEQ ID NO: 2270169 - RNA, 19 nt, Artificial Sequence
  Description of Artificial Sequence: Synthetic oligonucleotide
ggguccccucugggcccuc

SEQ ID NO: 2270170 - RNA, 19 nt, Artificial Sequence
  Description of Artificial Sequence: Synthetic oligonucleotide
cgcucgccugcguguuucu

SEQ ID NO: 2270171 - RNA, 19 nt, Artificial Sequence
  Description of Artificial Sequence: Synthetic oligonucleotide
gccggccgcuguggcccua

SEQ ID NO: 2270172 - RNA, 19 nt, Artificial Sequence
  Description of Artificial Sequence: Synthetic oligonucleotide
uauaguagaauucaucugg

SEQ ID NO: 2270173 - RNA, 19 nt, Artificial Sequence
  Description of Artificial Sequence: Synthetic oligonucleotide
uacuuuucaauguagaacg

SEQ ID NO: 2270174 - RNA, 19 nt, Artificial Sequence
  Description of Artificial Sequence: Synthetic oligonucleotide
gaagauaugaacuccaucc

SEQ ID NO: 2270175 - RNA, 19 nt, Artificial Sequence
  Description of Artificial Sequence: Synthetic oligonucleotide
aacaauaagaccaagauau

SEQ ID NO: 2270176 - RNA, 19 nt, Artificial Sequence
  Description of Artificial Sequence: Synthetic oligonucleotide
uuuauaguagaauucaucu

SEQ ID NO: 2270177 - RNA, 19 nt, Artificial Sequence
  Description of Artificial Sequence: Synthetic oligonucleotide
aaaacaauaagaccaagau

SEQ ID NO: 2270178 - RNA, 19 nt, Artificial Sequence
  Description of Artificial Sequence: Synthetic oligonucleotide
uuuuaugauagucauuugc

SEQ ID NO: 2270179 - RNA, 19 nt, Artificial Sequence
  Description of Artificial Sequence: Synthetic oligonucleotide
acuaaugaaauacugaagu

SEQ ID NO: 2270180 - RNA, 19 nt, Artificial Sequence
  Description of Artificial Sequence: Synthetic oligonucleotide
uucaccuucaccuuguuag

SEQ ID NO: 2270181 - RNA, 19 nt, Artificial Sequence
  Description of Artificial Sequence: Synthetic oligonucleotide
aauaucaaaccguucaacu

SEQ ID NO: 2270182 - RNA, 19 nt, Artificial Sequence
  Description of Artificial Sequence: Synthetic oligonucleotide
aaucauacugcuuuugucu

SEQ ID NO: 2270183 - RNA, 19 nt, Artificial Sequence
  Description of Artificial Sequence: Synthetic oligonucleotide
aagaaguuacuuuucaaug

SEQ ID NO: 2270184 - RNA, 19 nt, Artificial Sequence
  Description of Artificial Sequence: Synthetic oligonucleotide
augaacuccauccuggagc

SEQ ID NO: 2270185 - RNA, 19 nt, Artificial Sequence
  Description of Artificial Sequence: Synthetic oligonucleotide
uuuaugauagucauuugca

SEQ ID NO: 2270186 - RNA, 19 nt, Artificial Sequence
  Description of Artificial Sequence: Synthetic oligonucleotide
augauuacaaaacaauaag

SEQ ID NO: 2270187 - RNA, 19 nt, Artificial Sequence
  Description of Artificial Sequence: Synthetic oligonucleotide
uauauauuugauauccuga

SEQ ID NO: 2270188 - RNA, 19 nt, Artificial Sequence
  Description of Artificial Sequence: Synthetic oligonucleotide
ugugcaaccacgaacagcu

SEQ ID NO: 2270189 - RNA, 19 nt, Artificial Sequence
  Description of Artificial Sequence: Synthetic oligonucleotide
cuugagucgagucugaggg

SEQ ID NO: 2270190 - RNA, 19 nt, Artificial Sequence
  Description of Artificial Sequence: Synthetic oligonucleotide
ugaaguuauuacaaaagga

SEQ ID NO: 2270191 - RNA, 19 nt, Artificial Sequence
  Description of Artificial Sequence: Synthetic oligonucleotide
auccauaagaucuuugcgg

SEQ ID NO: 2270192 - RNA, 19 nt, Artificial Sequence
  Description of Artificial Sequence: Synthetic oligonucleotide
ugauuacaaaacaauaaga

SEQ ID NO: 2270193 - RNA, 19 nt, Artificial Sequence
  Description of Artificial Sequence: Synthetic oligonucleotide
aagauaucugaacuaauga

SEQ ID NO: 2270194 - RNA, 19 nt, Artificial Sequence
  Description of Artificial Sequence: Synthetic oligonucleotide
uuuucaagagccuucuucc

SEQ ID NO: 2270195 - RNA, 19 nt, Artificial Sequence
  Description of Artificial Sequence: Synthetic oligonucleotide
uuaguuuuauccauaagau

SEQ ID NO: 2270196 - RNA, 19 nt, Artificial Sequence
  Description of Artificial Sequence: Synthetic oligonucleotide
aaguuauuacaaaaggagg

SEQ ID NO: 2270197 - RNA, 19 nt, Artificial Sequence
  Description of Artificial Sequence: Synthetic oligonucleotide
ugaacuaaugaaauacuga

SEQ ID NO: 2270198 - RNA, 19 nt, Artificial Sequence
  Description of Artificial Sequence: Synthetic oligonucleotide
uauccauaagaucuuugcg

SEQ ID NO: 2270199 - RNA, 19 nt, Artificial Sequence
  Description of Artificial Sequence: Synthetic oligonucleotide
uuuucgaaagccaggcugg

SEQ ID NO: 2270200 - RNA, 19 nt, Artificial Sequence
  Description of Artificial Sequence: Synthetic oligonucleotide
uccauaagaucuuugcggg

SEQ ID NO: 2270201 - RNA, 19 nt, Artificial Sequence
  Description of Artificial Sequence: Synthetic oligonucleotide
uaacacaucaacguuuucg

SEQ ID NO: 2270202 - RNA, 19 nt, Artificial Sequence
  Description of Artificial Sequence: Synthetic oligonucleotide
aaggucucuauccuggguc

SEQ ID NO: 2270203 - RNA, 19 nt, Artificial Sequence
  Description of Artificial Sequence: Synthetic oligonucleotide
ucuggaaucuguaaauagc

SEQ ID NO: 2270204 - RNA, 19 nt, Artificial Sequence
  Description of Artificial Sequence: Synthetic oligonucleotide
uuauccauaagaucuuugc

SEQ ID NO: 2270205 - RNA, 19 nt, Artificial Sequence
  Description of Artificial Sequence: Synthetic oligonucleotide
ucaauguagaacgacgagg

SEQ ID NO: 2270206 - RNA, 19 nt, Artificial Sequence
  Description of Artificial Sequence: Synthetic oligonucleotide
ucuauuaaagacccugucu

SEQ ID NO: 2270207 - RNA, 19 nt, Artificial Sequence
  Description of Artificial Sequence: Synthetic oligonucleotide
cugaaguuauuacaaaagg

SEQ ID NO: 2270208 - RNA, 19 nt, Artificial Sequence
  Description of Artificial Sequence: Synthetic oligonucleotide
uugacaauaagucaugauu

SEQ ID NO: 2270209 - RNA, 19 nt, Artificial Sequence
  Description of Artificial Sequence: Synthetic oligonucleotide
ucuguaaauagcuggggag

SEQ ID NO: 2270210 - RNA, 19 nt, Artificial Sequence
  Description of Artificial Sequence: Synthetic oligonucleotide
ucugcaacccuuuucaucu

SEQ ID NO: 2270211 - RNA, 19 nt, Artificial Sequence
  Description of Artificial Sequence: Synthetic oligonucleotide
uuuuauaguagaauucauc

SEQ ID NO: 2270212 - RNA, 19 nt, Artificial Sequence
  Description of Artificial Sequence: Synthetic oligonucleotide
caauguagaacgacgaggc

SEQ ID NO: 2270213 - RNA, 19 nt, Artificial Sequence
  Description of Artificial Sequence: Synthetic oligonucleotide
aauaagaccaagauaucug

SEQ ID NO: 2270214 - RNA, 19 nt, Artificial Sequence
  Description of Artificial Sequence: Synthetic oligonucleotide
ugacaauaagucaugauua

SEQ ID NO: 2270215 - RNA, 19 nt, Artificial Sequence
  Description of Artificial Sequence: Synthetic oligonucleotide
aauacugaaguuauuacaa

SEQ ID NO: 2270216 - RNA, 19 nt, Artificial Sequence
  Description of Artificial Sequence: Synthetic oligonucleotide
ugucaagcaaucauacugc

SEQ ID NO: 2270217 - RNA, 19 nt, Artificial Sequence
  Description of Artificial Sequence: Synthetic oligonucleotide
auauuugauauccugaguu

SEQ ID NO: 2270218 - RNA, 19 nt, Artificial Sequence
  Description of Artificial Sequence: Synthetic oligonucleotide
uucugugcaaccacgaaca

SEQ ID NO: 2270219 - RNA, 19 nt, Artificial Sequence
  Description of Artificial Sequence: Synthetic oligonucleotide
aagucaugauuacaaaaca

SEQ ID NO: 2270220 - RNA, 19 nt, Artificial Sequence
  Description of Artificial Sequence: Synthetic oligonucleotide
gugucaagcaaucauacug

SEQ ID NO: 2270221 - RNA, 19 nt, Artificial Sequence
  Description of Artificial Sequence: Synthetic oligonucleotide
ggaaucuguaaauagcugg

SEQ ID NO: 2270222 - RNA, 19 nt, Artificial Sequence
  Description of Artificial Sequence: Synthetic oligonucleotide
uuucaauguagaacgacga

SEQ ID NO: 2270223 - RNA, 19 nt, Artificial Sequence
  Description of Artificial Sequence: Synthetic oligonucleotide
uauccugggucuauuaaag

SEQ ID NO: 2270224 - RNA, 19 nt, Artificial Sequence
  Description of Artificial Sequence: Synthetic oligonucleotide
ugcaaggucucuauccugg

SEQ ID NO: 2270225 - RNA, 19 nt, Artificial Sequence
  Description of Artificial Sequence: Synthetic oligonucleotide
uaucaaaccguucaacuuc

SEQ ID NO: 2270226 - RNA, 19 nt, Artificial Sequence
  Description of Artificial Sequence: Synthetic oligonucleotide
gaacuaaugaaauacugaa

SEQ ID NO: 2270227 - RNA, 19 nt, Artificial Sequence
  Description of Artificial Sequence: Synthetic oligonucleotide
aagaacacgugcuuauucu

SEQ ID NO: 2270228 - RNA, 19 nt, Artificial Sequence
  Description of Artificial Sequence: Synthetic oligonucleotide
ucuucucccgaucaauccg

SEQ ID NO: 2270229 - RNA, 19 nt, Artificial Sequence
  Description of Artificial Sequence: Synthetic oligonucleotide
uuauaguagaauucaucug

SEQ ID NO: 2270230 - RNA, 19 nt, Artificial Sequence
  Description of Artificial Sequence: Synthetic oligonucleotide
cuggaaauccagcaggugg

SEQ ID NO: 2270231 - RNA, 19 nt, Artificial Sequence
  Description of Artificial Sequence: Synthetic oligonucleotide
agaaguuacuuuucaaugu

SEQ ID NO: 2270232 - RNA, 19 nt, Artificial Sequence
  Description of Artificial Sequence: Synthetic oligonucleotide
ugagucgcaauaucaaacc

SEQ ID NO: 2270233 - RNA, 19 nt, Artificial Sequence
  Description of Artificial Sequence: Synthetic oligonucleotide
aaacaauaagaccaagaua

SEQ ID NO: 2270234 - RNA, 19 nt, Artificial Sequence
  Description of Artificial Sequence: Synthetic oligonucleotide
ucuuuagcuauccucuuga

SEQ ID NO: 2270235 - RNA, 19 nt, Artificial Sequence
  Description of Artificial Sequence: Synthetic oligonucleotide
aauaagucaugauuacaaa

SEQ ID NO: 2270236 - RNA, 19 nt, Artificial Sequence
  Description of Artificial Sequence: Synthetic oligonucleotide
augauagucauuugcacga

SEQ ID NO: 2270237 - RNA, 19 nt, Artificial Sequence
  Description of Artificial Sequence: Synthetic oligonucleotide
aagauaugaacuccauccu

SEQ ID NO: 2270238 - RNA, 19 nt, Artificial Sequence
  Description of Artificial Sequence: Synthetic oligonucleotide
guuuucgaaagccaggcug

SEQ ID NO: 2270239 - RNA, 19 nt, Artificial Sequence
  Description of Artificial Sequence: Synthetic oligonucleotide
ucugaacuaaugaaauacu

SEQ ID NO: 2270240 - RNA, 19 nt, Artificial Sequence
  Description of Artificial Sequence: Synthetic oligonucleotide
ucuccuugaagauaugaac

SEQ ID NO: 2270241 - RNA, 19 nt, Artificial Sequence
  Description of Artificial Sequence: Synthetic oligonucleotide
aggcucaccaaacucgacc

SEQ ID NO: 2270242 - RNA, 19 nt, Artificial Sequence
  Description of Artificial Sequence: Synthetic oligonucleotide
aaaccguucaacuuccuuu

SEQ ID NO: 2270243 - RNA, 19 nt, Artificial Sequence
  Description of Artificial Sequence: Synthetic oligonucleotide
uucaauguagaacgacgag

SEQ ID NO: 2270244 - RNA, 19 nt, Artificial Sequence
  Description of Artificial Sequence: Synthetic oligonucleotide
aacguuuucggcgagucug

SEQ ID NO: 2270245 - RNA, 19 nt, Artificial Sequence
  Description of Artificial Sequence: Synthetic oligonucleotide
ucuuucuuuagcuauccuc

SEQ ID NO: 2270246 - RNA, 19 nt, Artificial Sequence
  Description of Artificial Sequence: Synthetic oligonucleotide
aguuauuacaaaaggagga

SEQ ID NO: 2270247 - RNA, 19 nt, Artificial Sequence
  Description of Artificial Sequence: Synthetic oligonucleotide
cugaacuaaugaaauacug

SEQ ID NO: 2270248 - RNA, 19 nt, Artificial Sequence
  Description of Artificial Sequence: Synthetic oligonucleotide
auaagaccaagauaucuga

SEQ ID NO: 2270249 - RNA, 19 nt, Artificial Sequence
  Description of Artificial Sequence: Synthetic oligonucleotide
uuaugauagucauuugcac

SEQ ID NO: 2270250 - RNA, 19 nt, Artificial Sequence
  Description of Artificial Sequence: Synthetic oligonucleotide
aaucuguaaauagcugggg

SEQ ID NO: 2270251 - RNA, 19 nt, Artificial Sequence
  Description of Artificial Sequence: Synthetic oligonucleotide
ugucuacuagcucuggggc

SEQ ID NO: 2270252 - RNA, 19 nt, Artificial Sequence
  Description of Artificial Sequence: Synthetic oligonucleotide
agauaucugaacuaaugaa

SEQ ID NO: 2270253 - RNA, 19 nt, Artificial Sequence
  Description of Artificial Sequence: Synthetic oligonucleotide
cugggucuauuaaagaccc

SEQ ID NO: 2270254 - RNA, 19 nt, Artificial Sequence
  Description of Artificial Sequence: Synthetic oligonucleotide
caugauuacaaaacaauaa

SEQ ID NO: 2270255 - RNA, 19 nt, Artificial Sequence
  Description of Artificial Sequence: Synthetic oligonucleotide
uuuucggcgagucuggaau

SEQ ID NO: 2270256 - RNA, 19 nt, Artificial Sequence
  Description of Artificial Sequence: Synthetic oligonucleotide
uuuaacacaucaacguuuu

SEQ ID NO: 2270257 - RNA, 19 nt, Artificial Sequence
  Description of Artificial Sequence: Synthetic oligonucleotide
ucuccagcaaacccagccg

SEQ ID NO: 2270258 - RNA, 19 nt, Artificial Sequence
  Description of Artificial Sequence: Synthetic oligonucleotide
uuugcgaaaagccgccgcc

SEQ ID NO: 2270259 - RNA, 19 nt, Artificial Sequence
  Description of Artificial Sequence: Synthetic oligonucleotide
ucuugagucgagucugagg

SEQ ID NO: 2270260 - RNA, 19 nt, Artificial Sequence
  Description of Artificial Sequence: Synthetic oligonucleotide
uacugaaguuauuacaaaa

SEQ ID NO: 2270261 - RNA, 19 nt, Artificial Sequence
  Description of Artificial Sequence: Synthetic oligonucleotide
aguuuguaaucuuucuucu

SEQ ID NO: 2270262 - RNA, 19 nt, Artificial Sequence
  Description of Artificial Sequence: Synthetic oligonucleotide
gucauuugcacgaaguuug

SEQ ID NO: 2270263 - RNA, 19 nt, Artificial Sequence
  Description of Artificial Sequence: Synthetic oligonucleotide
uguuaguuuuauccauaag

SEQ ID NO: 2270264 - RNA, 19 nt, Artificial Sequence
  Description of Artificial Sequence: Synthetic oligonucleotide
ucuauauauuugauauccu

SEQ ID NO: 2270265 - RNA, 19 nt, Artificial Sequence
  Description of Artificial Sequence: Synthetic oligonucleotide
agaacgacgaggcuuauuu

SEQ ID NO: 2270266 - RNA, 19 nt, Artificial Sequence
  Description of Artificial Sequence: Synthetic oligonucleotide
uauuugauauccugaguuc

SEQ ID NO: 2270267 - RNA, 19 nt, Artificial Sequence
  Description of Artificial Sequence: Synthetic oligonucleotide
agauaugaacuccauccug

SEQ ID NO: 2270268 - RNA, 19 nt, Artificial Sequence
  Description of Artificial Sequence: Synthetic oligonucleotide
gagucgcaauaucaaaccg

SEQ ID NO: 2270269 - RNA, 19 nt, Artificial Sequence
  Description of Artificial Sequence: Synthetic oligonucleotide
caauaagucaugauuacaa

SEQ ID NO: 2270270 - RNA, 19 nt, Artificial Sequence
  Description of Artificial Sequence: Synthetic oligonucleotide
uaaagacccugucuacuag

SEQ ID NO: 2270271 - RNA, 19 nt, Artificial Sequence
  Description of Artificial Sequence: Synthetic oligonucleotide
uguagaacgacgaggcuua

SEQ ID NO: 2270272 - RNA, 19 nt, Artificial Sequence
  Description of Artificial Sequence: Synthetic oligonucleotide
uccugggucuauuaaagac

SEQ ID NO: 2270273 - RNA, 19 nt, Artificial Sequence
  Description of Artificial Sequence: Synthetic oligonucleotide
aucuuugcggguuugaauu

SEQ ID NO: 2270274 - RNA, 19 nt, Artificial Sequence
  Description of Artificial Sequence: Synthetic oligonucleotide
gucuggaaucuguaaauag

SEQ ID NO: 2270275 - RNA, 19 nt, Artificial Sequence
  Description of Artificial Sequence: Synthetic oligonucleotide
uggaaucuguaaauagcug

SEQ ID NO: 2270276 - RNA, 19 nt, Artificial Sequence
  Description of Artificial Sequence: Synthetic oligonucleotide
ugaagauaugaacuccauc

SEQ ID NO: 2270277 - RNA, 19 nt, Artificial Sequence
  Description of Artificial Sequence: Synthetic oligonucleotide
uuugcacgaaguuuguaau

SEQ ID NO: 2270278 - RNA, 19 nt, Artificial Sequence
  Description of Artificial Sequence: Synthetic oligonucleotide
aucaaaccguucaacuucc

SEQ ID NO: 2270279 - RNA, 19 nt, Artificial Sequence
  Description of Artificial Sequence: Synthetic oligonucleotide
uccuugaagauaugaacuc

SEQ ID NO: 2270280 - RNA, 19 nt, Artificial Sequence
  Description of Artificial Sequence: Synthetic oligonucleotide
aaguuacuuuucaauguag

SEQ ID NO: 2270281 - RNA, 19 nt, Artificial Sequence
  Description of Artificial Sequence: Synthetic oligonucleotide
uuugauauccugaguucuc

SEQ ID NO: 2270282 - RNA, 19 nt, Artificial Sequence
  Description of Artificial Sequence: Synthetic oligonucleotide
cuguuugcaagugagucgc

SEQ ID NO: 2270283 - RNA, 19 nt, Artificial Sequence
  Description of Artificial Sequence: Synthetic oligonucleotide
uagcuauccucuugagucg

SEQ ID NO: 2270284 - RNA, 19 nt, Artificial Sequence
  Description of Artificial Sequence: Synthetic oligonucleotide
cuauuaaagacccugucua

SEQ ID NO: 2270285 - RNA, 19 nt, Artificial Sequence
  Description of Artificial Sequence: Synthetic oligonucleotide
aucuguaaauagcugggga

SEQ ID NO: 2270286 - RNA, 19 nt, Artificial Sequence
  Description of Artificial Sequence: Synthetic oligonucleotide
ucuuccgaagagcucugag

SEQ ID NO: 2270287 - RNA, 19 nt, Artificial Sequence
  Description of Artificial Sequence: Synthetic oligonucleotide
aagagcucugaggaaaucu

SEQ ID NO: 2270288 - RNA, 19 nt, Artificial Sequence
  Description of Artificial Sequence: Synthetic oligonucleotide
cugcuuugcgaaaagccgc

SEQ ID NO: 2270289 - RNA, 19 nt, Artificial Sequence
  Description of Artificial Sequence: Synthetic oligonucleotide
uuaaagacccugucuacua

SEQ ID NO: 2270290 - RNA, 19 nt, Artificial Sequence
  Description of Artificial Sequence: Synthetic oligonucleotide
auuugauauccugaguucu

SEQ ID NO: 2270291 - RNA, 19 nt, Artificial Sequence
  Description of Artificial Sequence: Synthetic oligonucleotide
aauguagaacgacgaggcu

SEQ ID NO: 2270292 - RNA, 19 nt, Artificial Sequence
  Description of Artificial Sequence: Synthetic oligonucleotide
auaucaaaccguucaacuu

SEQ ID NO: 2270293 - RNA, 19 nt, Artificial Sequence
  Description of Artificial Sequence: Synthetic oligonucleotide
uuauuacaaaaggaggaaa

SEQ ID NO: 2270294 - RNA, 19 nt, Artificial Sequence
  Description of Artificial Sequence: Synthetic oligonucleotide
cacuguuucuuucuucacc

SEQ ID NO: 2270295 - RNA, 19 nt, Artificial Sequence
  Description of Artificial Sequence: Synthetic oligonucleotide
agaacacgugcuuauucug

SEQ ID NO: 2270296 - RNA, 19 nt, Artificial Sequence
  Description of Artificial Sequence: Synthetic oligonucleotide
agggguaacgccuuucacu

SEQ ID NO: 2270297 - RNA, 19 nt, Artificial Sequence
  Description of Artificial Sequence: Synthetic oligonucleotide
cugugucaagcaaucauac

SEQ ID NO: 2270298 - RNA, 19 nt, Artificial Sequence
  Description of Artificial Sequence: Synthetic oligonucleotide
cuugaagauaugaacucca

SEQ ID NO: 2270299 - RNA, 19 nt, Artificial Sequence
  Description of Artificial Sequence: Synthetic oligonucleotide
uggagcucugauuucaguc

SEQ ID NO: 2270300 - RNA, 19 nt, Artificial Sequence
  Description of Artificial Sequence: Synthetic oligonucleotide
ucuauccugggucuauuaa

SEQ ID NO: 2270301 - RNA, 19 nt, Artificial Sequence
  Description of Artificial Sequence: Synthetic oligonucleotide
auucuguugcuuccccugg

SEQ ID NO: 2270302 - RNA, 19 nt, Artificial Sequence
  Description of Artificial Sequence: Synthetic oligonucleotide
gagucugagggguaacgcc

SEQ ID NO: 2270303 - RNA, 19 nt, Artificial Sequence
  Description of Artificial Sequence: Synthetic oligonucleotide
uuguuaguuuuauccauaa

SEQ ID NO: 2270304 - RNA, 19 nt, Artificial Sequence
  Description of Artificial Sequence: Synthetic oligonucleotide
gaaguuacuuuucaaugua

SEQ ID NO: 2270305 - RNA, 19 nt, Artificial Sequence
  Description of Artificial Sequence: Synthetic oligonucleotide
uguugcuuccccuggaaau

SEQ ID NO: 2270306 - RNA, 19 nt, Artificial Sequence
  Description of Artificial Sequence: Synthetic oligonucleotide
ugucacuucuuccuugguc

SEQ ID NO: 2270307 - RNA, 19 nt, Artificial Sequence
  Description of Artificial Sequence: Synthetic oligonucleotide
guuacuuuucaauguagaa

SEQ ID NO: 2270308 - RNA, 19 nt, Artificial Sequence
  Description of Artificial Sequence: Synthetic oligonucleotide
uucguucucgauguucccg

SEQ ID NO: 2270309 - RNA, 19 nt, Artificial Sequence
  Description of Artificial Sequence: Synthetic oligonucleotide
ugcuuugcgaaaagccgcc

SEQ ID NO: 2270310 - RNA, 19 nt, Artificial Sequence
  Description of Artificial Sequence: Synthetic oligonucleotide
gauauccugaguucucauc

SEQ ID NO: 2270311 - RNA, 19 nt, Artificial Sequence
  Description of Artificial Sequence: Synthetic oligonucleotide
aaccguucaacuuccuuuu

SEQ ID NO: 2270312 - RNA, 19 nt, Artificial Sequence
  Description of Artificial Sequence: Synthetic oligonucleotide
aacccagccguuuucgaaa

SEQ ID NO: 2270313 - RNA, 19 nt, Artificial Sequence
  Description of Artificial Sequence: Synthetic oligonucleotide
ugagggguaacgccuuuca

SEQ ID NO: 2270314 - RNA, 19 nt, Artificial Sequence
  Description of Artificial Sequence: Synthetic oligonucleotide
ugcaaccacgaacagcuuc

SEQ ID NO: 2270315 - RNA, 19 nt, Artificial Sequence
  Description of Artificial Sequence: Synthetic oligonucleotide
acgaaguuuguaaucuuuc

SEQ ID NO: 2270316 - RNA, 19 nt, Artificial Sequence
  Description of Artificial Sequence: Synthetic oligonucleotide
cuuuucaauguagaacgac

SEQ ID NO: 2270317 - RNA, 19 nt, Artificial Sequence
  Description of Artificial Sequence: Synthetic oligonucleotide
cacgugcuuauucuguugc

SEQ ID NO: 2270318 - RNA, 19 nt, Artificial Sequence
  Description of Artificial Sequence: Synthetic oligonucleotide
ugucuuucuuuagcuaucc

SEQ ID NO: 2270319 - RNA, 19 nt, Artificial Sequence
  Description of Artificial Sequence: Synthetic oligonucleotide
aaacccagccguuuucgaa

SEQ ID NO: 2270320 - RNA, 19 nt, Artificial Sequence
  Description of Artificial Sequence: Synthetic oligonucleotide
auagucauuugcacgaagu

SEQ ID NO: 2270321 - RNA, 19 nt, Artificial Sequence
  Description of Artificial Sequence: Synthetic oligonucleotide
aauagcuggggaguucacu

SEQ ID NO: 2270322 - RNA, 19 nt, Artificial Sequence
  Description of Artificial Sequence: Synthetic oligonucleotide
ugugucaagcaaucauacu

SEQ ID NO: 2270323 - RNA, 19 nt, Artificial Sequence
  Description of Artificial Sequence: Synthetic oligonucleotide
ucguucucgauguucccgc

SEQ ID NO: 2270324 - RNA, 19 nt, Artificial Sequence
  Description of Artificial Sequence: Synthetic oligonucleotide
cuucucccgaucaauccgc

SEQ ID NO: 2270325 - RNA, 19 nt, Artificial Sequence
  Description of Artificial Sequence: Synthetic oligonucleotide
uugcaagugagucgcaaua

SEQ ID NO: 2270326 - RNA, 19 nt, Artificial Sequence
  Description of Artificial Sequence: Synthetic oligonucleotide
ugcggguuugaauuuucug

SEQ ID NO: 2270327 - RNA, 19 nt, Artificial Sequence
  Description of Artificial Sequence: Synthetic oligonucleotide
ucgaaagccaggcuggcuu

SEQ ID NO: 2270328 - RNA, 19 nt, Artificial Sequence
  Description of Artificial Sequence: Synthetic oligonucleotide
uugaagauaugaacuccau

SEQ ID NO: 2270329 - RNA, 19 nt, Artificial Sequence
  Description of Artificial Sequence: Synthetic oligonucleotide
acaauaagucaugauuaca

SEQ ID NO: 2270330 - RNA, 19 nt, Artificial Sequence
  Description of Artificial Sequence: Synthetic oligonucleotide
gcuguuugcaagugagucg

SEQ ID NO: 2270331 - RNA, 19 nt, Artificial Sequence
  Description of Artificial Sequence: Synthetic oligonucleotide
uugauauccugaguucuca

SEQ ID NO: 2270332 - RNA, 19 nt, Artificial Sequence
  Description of Artificial Sequence: Synthetic oligonucleotide
uucugcaacccuuuucauc

SEQ ID NO: 2270333 - RNA, 19 nt, Artificial Sequence
  Description of Artificial Sequence: Synthetic oligonucleotide
uuauucuguugcuuccccu

SEQ ID NO: 2270334 - RNA, 19 nt, Artificial Sequence
  Description of Artificial Sequence: Synthetic oligonucleotide
uuucuucgcuucugcaacc

SEQ ID NO: 2270335 - RNA, 19 nt, Artificial Sequence
  Description of Artificial Sequence: Synthetic oligonucleotide
ugaguucucaucagcuuua

SEQ ID NO: 2270336 - RNA, 19 nt, Artificial Sequence
  Description of Artificial Sequence: Synthetic oligonucleotide
aaaagccgccgccaugccu

SEQ ID NO: 2270337 - RNA, 19 nt, Artificial Sequence
  Description of Artificial Sequence: Synthetic oligonucleotide
aacacgugcuuauucuguu

SEQ ID NO: 2270338 - RNA, 19 nt, Artificial Sequence
  Description of Artificial Sequence: Synthetic oligonucleotide
caauaucaaaccguucaac

SEQ ID NO: 2270339 - RNA, 19 nt, Artificial Sequence
  Description of Artificial Sequence: Synthetic oligonucleotide
uuugcaagugagucgcaau

SEQ ID NO: 2270340 - RNA, 19 nt, Artificial Sequence
  Description of Artificial Sequence: Synthetic oligonucleotide
agcaaacccagccguuuuc

SEQ ID NO: 2270341 - RNA, 19 nt, Artificial Sequence
  Description of Artificial Sequence: Synthetic oligonucleotide
uugucuuucuuuagcuauc

SEQ ID NO: 2270342 - RNA, 19 nt, Artificial Sequence
  Description of Artificial Sequence: Synthetic oligonucleotide
auacugaaguuauuacaaa

SEQ ID NO: 2270343 - RNA, 19 nt, Artificial Sequence
  Description of Artificial Sequence: Synthetic oligonucleotide
uauccucuugagucgaguc

SEQ ID NO: 2270344 - RNA, 19 nt, Artificial Sequence
  Description of Artificial Sequence: Synthetic oligonucleotide
auaugaacuccauccugga

SEQ ID NO: 2270345 - RNA, 19 nt, Artificial Sequence
  Description of Artificial Sequence: Synthetic oligonucleotide
ccugggucuauuaaagacc

SEQ ID NO: 2270346 - RNA, 19 nt, Artificial Sequence
  Description of Artificial Sequence: Synthetic oligonucleotide
aacccuuuucaucucuaua

SEQ ID NO: 2270347 - RNA, 19 nt, Artificial Sequence
  Description of Artificial Sequence: Synthetic oligonucleotide
cuuugcgaaaagccgccgc

SEQ ID NO: 2270348 - RNA, 19 nt, Artificial Sequence
  Description of Artificial Sequence: Synthetic oligonucleotide
uacugggguccagaaaagg

SEQ ID NO: 2270349 - RNA, 19 nt, Artificial Sequence
  Description of Artificial Sequence: Synthetic oligonucleotide
ucugugcaaccacgaacag

SEQ ID NO: 2270350 - RNA, 19 nt, Artificial Sequence
  Description of Artificial Sequence: Synthetic oligonucleotide
guccagaaaaggcucacca

SEQ ID NO: 2270351 - RNA, 19 nt, Artificial Sequence
  Description of Artificial Sequence: Synthetic oligonucleotide
cuuuagcuauccucuugag

SEQ ID NO: 2270352 - RNA, 19 nt, Artificial Sequence
  Description of Artificial Sequence: Synthetic oligonucleotide
ucauuugcacgaaguuugu

SEQ ID NO: 2270353 - RNA, 19 nt, Artificial Sequence
  Description of Artificial Sequence: Synthetic oligonucleotide
ucgagucugagggguaacg

SEQ ID NO: 2270354 - RNA, 19 nt, Artificial Sequence
  Description of Artificial Sequence: Synthetic oligonucleotide
aauccgcugugucaagcaa

SEQ ID NO: 2270355 - RNA, 19 nt, Artificial Sequence
  Description of Artificial Sequence: Synthetic oligonucleotide
cucaccaaacucgaccacc

SEQ ID NO: 2270356 - RNA, 19 nt, Artificial Sequence
  Description of Artificial Sequence: Synthetic oligonucleotide
ggugucacuucuuccuugg

SEQ ID NO: 2270357 - RNA, 19 nt, Artificial Sequence
  Description of Artificial Sequence: Synthetic oligonucleotide
cuagcucuggggcuguuug

SEQ ID NO: 2270358 - RNA, 19 nt, Artificial Sequence
  Description of Artificial Sequence: Synthetic oligonucleotide
gucuauuaaagacccuguc

SEQ ID NO: 2270359 - RNA, 19 nt, Artificial Sequence
  Description of Artificial Sequence: Synthetic oligonucleotide
uccgcugugucaagcaauc

SEQ ID NO: 2270360 - RNA, 19 nt, Artificial Sequence
  Description of Artificial Sequence: Synthetic oligonucleotide
uuugcggguuugaauuuuc

SEQ ID NO: 2270361 - RNA, 19 nt, Artificial Sequence
  Description of Artificial Sequence: Synthetic oligonucleotide
agcccgggucauuuuauag

SEQ ID NO: 2270362 - RNA, 19 nt, Artificial Sequence
  Description of Artificial Sequence: Synthetic oligonucleotide
aagugagucgcaauaucaa

SEQ ID NO: 2270363 - RNA, 19 nt, Artificial Sequence
  Description of Artificial Sequence: Synthetic oligonucleotide
gacccugucuacuagcucu

SEQ ID NO: 2270364 - RNA, 19 nt, Artificial Sequence
  Description of Artificial Sequence: Synthetic oligonucleotide
cuggaaucuguaaauagcu

SEQ ID NO: 2270365 - RNA, 19 nt, Artificial Sequence
  Description of Artificial Sequence: Synthetic oligonucleotide
gaucaauccgcugugucaa

SEQ ID NO: 2270366 - RNA, 19 nt, Artificial Sequence
  Description of Artificial Sequence: Synthetic oligonucleotide
agucgcaauaucaaaccgu

SEQ ID NO: 2270367 - RNA, 19 nt, Artificial Sequence
  Description of Artificial Sequence: Synthetic oligonucleotide
ucaauccgcugugucaagc

SEQ ID NO: 2270368 - RNA, 19 nt, Artificial Sequence
  Description of Artificial Sequence: Synthetic oligonucleotide
ucaagcaaucauacugcuu

SEQ ID NO: 2270369 - RNA, 19 nt, Artificial Sequence
  Description of Artificial Sequence: Synthetic oligonucleotide
uguaaauagcuggggaguu

SEQ ID NO: 2270370 - RNA, 19 nt, Artificial Sequence
  Description of Artificial Sequence: Synthetic oligonucleotide
cuuccccuggaaauccagc

SEQ ID NO: 2270371 - RNA, 19 nt, Artificial Sequence
  Description of Artificial Sequence: Synthetic oligonucleotide
gguuugaauuuucugugca

SEQ ID NO: 2270372 - RNA, 19 nt, Artificial Sequence
  Description of Artificial Sequence: Synthetic oligonucleotide
ucaacguuuucggcgaguc

SEQ ID NO: 2270373 - RNA, 19 nt, Artificial Sequence
  Description of Artificial Sequence: Synthetic oligonucleotide
aaaagaacacgugcuuauu

SEQ ID NO: 2270374 - RNA, 19 nt, Artificial Sequence
  Description of Artificial Sequence: Synthetic oligonucleotide
agucauuugcacgaaguuu

SEQ ID NO: 2270375 - RNA, 19 nt, Artificial Sequence
  Description of Artificial Sequence: Synthetic oligonucleotide
uggugucacuucuuccuug

SEQ ID NO: 2270376 - RNA, 19 nt, Artificial Sequence
  Description of Artificial Sequence: Synthetic oligonucleotide
aagacccugucuacuagcu

SEQ ID NO: 2270377 - RNA, 19 nt, Artificial Sequence
  Description of Artificial Sequence: Synthetic oligonucleotide
auuuuauaguagaauucau

SEQ ID NO: 2270378 - RNA, 19 nt, Artificial Sequence
  Description of Artificial Sequence: Synthetic oligonucleotide
auguagaacgacgaggcuu

SEQ ID NO: 2270379 - RNA, 19 nt, Artificial Sequence
  Description of Artificial Sequence: Synthetic oligonucleotide
cucuggugucacuucuucc

SEQ ID NO: 2270380 - RNA, 19 nt, Artificial Sequence
  Description of Artificial Sequence: Synthetic oligonucleotide
acacgugcuuauucuguug

SEQ ID NO: 2270381 - RNA, 19 nt, Artificial Sequence
  Description of Artificial Sequence: Synthetic oligonucleotide
agacccugucuacuagcuc

SEQ ID NO: 2270382 - RNA, 19 nt, Artificial Sequence
  Description of Artificial Sequence: Synthetic oligonucleotide
gguaacgccuuucacuuuc

SEQ ID NO: 2270383 - RNA, 19 nt, Artificial Sequence
  Description of Artificial Sequence: Synthetic oligonucleotide
gggacuuagcugcuuugcg

SEQ ID NO: 2270384 - RNA, 19 nt, Artificial Sequence
  Description of Artificial Sequence: Synthetic oligonucleotide
cuauccugggucuauuaaa

SEQ ID NO: 2270385 - RNA, 19 nt, Artificial Sequence
  Description of Artificial Sequence: Synthetic oligonucleotide
ucccgaucaauccgcugug

SEQ ID NO: 2270386 - RNA, 19 nt, Artificial Sequence
  Description of Artificial Sequence: Synthetic oligonucleotide
cuuguuaguuuuauccaua

SEQ ID NO: 2270387 - RNA, 19 nt, Artificial Sequence
  Description of Artificial Sequence: Synthetic oligonucleotide
uuagcccgggucauuuuau

SEQ ID NO: 2270388 - RNA, 19 nt, Artificial Sequence
  Description of Artificial Sequence: Synthetic oligonucleotide
gaccaagauaucugaacua

SEQ ID NO: 2270389 - RNA, 19 nt, Artificial Sequence
  Description of Artificial Sequence: Synthetic oligonucleotide
aaagccgccgccaugccua

SEQ ID NO: 2270390 - RNA, 19 nt, Artificial Sequence
  Description of Artificial Sequence: Synthetic oligonucleotide
uuaacacaucaacguuuuc

SEQ ID NO: 2270391 - RNA, 19 nt, Artificial Sequence
  Description of Artificial Sequence: Synthetic oligonucleotide
uaagaucuuugcggguuug

SEQ ID NO: 2270392 - RNA, 19 nt, Artificial Sequence
  Description of Artificial Sequence: Synthetic oligonucleotide
gaaagccaggcuggcuucg

SEQ ID NO: 2270393 - RNA, 19 nt, Artificial Sequence
  Description of Artificial Sequence: Synthetic oligonucleotide
ugauauccugaguucucau

SEQ ID NO: 2270394 - RNA, 19 nt, Artificial Sequence
  Description of Artificial Sequence: Synthetic oligonucleotide
cagguugacaauaagucau

SEQ ID NO: 2270395 - RNA, 19 nt, Artificial Sequence
  Description of Artificial Sequence: Synthetic oligonucleotide
ugcaagugagucgcaauau

SEQ ID NO: 2270396 - RNA, 19 nt, Artificial Sequence
  Description of Artificial Sequence: Synthetic oligonucleotide
auaagaucuuugcggguuu

SEQ ID NO: 2270397 - RNA, 19 nt, Artificial Sequence
  Description of Artificial Sequence: Synthetic oligonucleotide
uugcuuccccuggaaaucc

SEQ ID NO: 2270398 - RNA, 19 nt, Artificial Sequence
  Description of Artificial Sequence: Synthetic oligonucleotide
uugcggguuugaauuuucu

SEQ ID NO: 2270399 - RNA, 19 nt, Artificial Sequence
  Description of Artificial Sequence: Synthetic oligonucleotide
aagaucuuugcggguuuga

SEQ ID NO: 2270400 - RNA, 19 nt, Artificial Sequence
  Description of Artificial Sequence: Synthetic oligonucleotide
aaggcucaccaaacucgac

SEQ ID NO: 2270401 - RNA, 19 nt, Artificial Sequence
  Description of Artificial Sequence: Synthetic oligonucleotide
cuucguucucgauguuccc

SEQ ID NO: 2270402 - RNA, 19 nt, Artificial Sequence
  Description of Artificial Sequence: Synthetic oligonucleotide
cugugcaaccacgaacagc

SEQ ID NO: 2270403 - RNA, 19 nt, Artificial Sequence
  Description of Artificial Sequence: Synthetic oligonucleotide
agccguuuucgaaagccag

SEQ ID NO: 2270404 - RNA, 19 nt, Artificial Sequence
  Description of Artificial Sequence: Synthetic oligonucleotide
gucuuucaauuuucuucgc

SEQ ID NO: 2270405 - RNA, 19 nt, Artificial Sequence
  Description of Artificial Sequence: Synthetic oligonucleotide
ucuucgcuucugcaacccu

SEQ ID NO: 2270406 - RNA, 19 nt, Artificial Sequence
  Description of Artificial Sequence: Synthetic oligonucleotide
gagucuggaaucuguaaau

SEQ ID NO: 2270407 - RNA, 19 nt, Artificial Sequence
  Description of Artificial Sequence: Synthetic oligonucleotide
uuucgaaagccaggcuggc

SEQ ID NO: 2270408 - RNA, 19 nt, Artificial Sequence
  Description of Artificial Sequence: Synthetic oligonucleotide
uuucuccuucugcaagguc

SEQ ID NO: 2270409 - RNA, 19 nt, Artificial Sequence
  Description of Artificial Sequence: Synthetic oligonucleotide
acccagccguuuucgaaag

SEQ ID NO: 2270410 - RNA, 19 nt, Artificial Sequence
  Description of Artificial Sequence: Synthetic oligonucleotide
accuucaccuuguuaguuu

SEQ ID NO: 2270411 - RNA, 19 nt, Artificial Sequence
  Description of Artificial Sequence: Synthetic oligonucleotide
ucuuugcggguuugaauuu

SEQ ID NO: 2270412 - RNA, 19 nt, Artificial Sequence
  Description of Artificial Sequence: Synthetic oligonucleotide
ugcgaaaagccgccgccau

SEQ ID NO: 2270413 - RNA, 19 nt, Artificial Sequence
  Description of Artificial Sequence: Synthetic oligonucleotide
uuucggcgagucuggaauc

SEQ ID NO: 2270414 - RNA, 19 nt, Artificial Sequence
  Description of Artificial Sequence: Synthetic oligonucleotide
ucucgauguucccgcugcc

SEQ ID NO: 2270415 - RNA, 19 nt, Artificial Sequence
  Description of Artificial Sequence: Synthetic oligonucleotide
ccuugaagauaugaacucc

SEQ ID NO: 2270416 - RNA, 19 nt, Artificial Sequence
  Description of Artificial Sequence: Synthetic oligonucleotide
ucgcaauaucaaaccguuc

SEQ ID NO: 2270417 - RNA, 19 nt, Artificial Sequence
  Description of Artificial Sequence: Synthetic oligonucleotide
cucgauguucccgcugccg

SEQ ID NO: 2270418 - RNA, 19 nt, Artificial Sequence
  Description of Artificial Sequence: Synthetic oligonucleotide
uguuugcaagugagucgca

SEQ ID NO: 2270419 - RNA, 19 nt, Artificial Sequence
  Description of Artificial Sequence: Synthetic oligonucleotide
agguugacaauaagucaug

SEQ ID NO: 2270420 - RNA, 19 nt, Artificial Sequence
  Description of Artificial Sequence: Synthetic oligonucleotide
aucaauccgcugugucaag

SEQ ID NO: 2270421 - RNA, 19 nt, Artificial Sequence
  Description of Artificial Sequence: Synthetic oligonucleotide
gagggguaacgccuuucac

SEQ ID NO: 2270422 - RNA, 19 nt, Artificial Sequence
  Description of Artificial Sequence: Synthetic oligonucleotide
cuaaugaaauacugaaguu

SEQ ID NO: 2270423 - RNA, 19 nt, Artificial Sequence
  Description of Artificial Sequence: Synthetic oligonucleotide
cuggggaguucacuguuuc

SEQ ID NO: 2270424 - RNA, 19 nt, Artificial Sequence
  Description of Artificial Sequence: Synthetic oligonucleotide
ucaaaccguucaacuuccu

SEQ ID NO: 2270425 - RNA, 19 nt, Artificial Sequence
  Description of Artificial Sequence: Synthetic oligonucleotide
cugcaaggucucuauccug

SEQ ID NO: 2270426 - RNA, 19 nt, Artificial Sequence
  Description of Artificial Sequence: Synthetic oligonucleotide
gaaaagccgccgccaugcc

SEQ ID NO: 2270427 - RNA, 19 nt, Artificial Sequence
  Description of Artificial Sequence: Synthetic oligonucleotide
cgcaauaucaaaccguuca

SEQ ID NO: 2270428 - RNA, 19 nt, Artificial Sequence
  Description of Artificial Sequence: Synthetic oligonucleotide
gaucuuugcggguuugaau

SEQ ID NO: 2270429 - RNA, 19 nt, Artificial Sequence
  Description of Artificial Sequence: Synthetic oligonucleotide
uugcgaaaagccgccgcca

SEQ ID NO: 2270430 - RNA, 19 nt, Artificial Sequence
  Description of Artificial Sequence: Synthetic oligonucleotide
uccgaagagcucugaggaa

SEQ ID NO: 2270431 - RNA, 19 nt, Artificial Sequence
  Description of Artificial Sequence: Synthetic oligonucleotide
uagcucuggggcuguuugc

SEQ ID NO: 2270432 - RNA, 19 nt, Artificial Sequence
  Description of Artificial Sequence: Synthetic oligonucleotide
cuggcuucguucucgaugu

SEQ ID NO: 2270433 - RNA, 19 nt, Artificial Sequence
  Description of Artificial Sequence: Synthetic oligonucleotide
acguuuucggcgagucugg

SEQ ID NO: 2270434 - RNA, 19 nt, Artificial Sequence
  Description of Artificial Sequence: Synthetic oligonucleotide
uucucccgaucaauccgcu

SEQ ID NO: 2270435 - RNA, 19 nt, Artificial Sequence
  Description of Artificial Sequence: Synthetic oligonucleotide
ucucccgaucaauccgcug

SEQ ID NO: 2270436 - RNA, 19 nt, Artificial Sequence
  Description of Artificial Sequence: Synthetic oligonucleotide
aagccgccgccaugccuac

SEQ ID NO: 2270437 - RNA, 19 nt, Artificial Sequence
  Description of Artificial Sequence: Synthetic oligonucleotide
acgugcuuauucuguugcu

SEQ ID NO: 2270438 - RNA, 19 nt, Artificial Sequence
  Description of Artificial Sequence: Synthetic oligonucleotide
guaaauagcuggggaguuc

SEQ ID NO: 2270439 - RNA, 19 nt, Artificial Sequence
  Description of Artificial Sequence: Synthetic oligonucleotide
ggcuguuugcaagugaguc

SEQ ID NO: 2270440 - RNA, 19 nt, Artificial Sequence
  Description of Artificial Sequence: Synthetic oligonucleotide
acuuuucaauguagaacga

SEQ ID NO: 2270441 - RNA, 19 nt, Artificial Sequence
  Description of Artificial Sequence: Synthetic oligonucleotide
ugauagucauuugcacgaa

SEQ ID NO: 2270442 - RNA, 19 nt, Artificial Sequence
  Description of Artificial Sequence: Synthetic oligonucleotide
caauccgcugugucaagca

SEQ ID NO: 2270443 - RNA, 19 nt, Artificial Sequence
  Description of Artificial Sequence: Synthetic oligonucleotide
guugacaauaagucaugau

SEQ ID NO: 2270444 - RNA, 19 nt, Artificial Sequence
  Description of Artificial Sequence: Synthetic oligonucleotide
gcaaacccagccguuuucg

SEQ ID NO: 2270445 - RNA, 19 nt, Artificial Sequence
  Description of Artificial Sequence: Synthetic oligonucleotide
uucggcgagucuggaaucu

SEQ ID NO: 2270446 - RNA, 19 nt, Artificial Sequence
  Description of Artificial Sequence: Synthetic oligonucleotide
agccuucuuccgaagagcu

SEQ ID NO: 2270447 - RNA, 19 nt, Artificial Sequence
  Description of Artificial Sequence: Synthetic oligonucleotide
ugggucuauuaaagacccu

SEQ ID NO: 2270448 - RNA, 19 nt, Artificial Sequence
  Description of Artificial Sequence: Synthetic oligonucleotide
ugcuuccccuggaaaucca

SEQ ID NO: 2270449 - RNA, 19 nt, Artificial Sequence
  Description of Artificial Sequence: Synthetic oligonucleotide
uaacgccuuucacuuucuc

SEQ ID NO: 2270450 - RNA, 19 nt, Artificial Sequence
  Description of Artificial Sequence: Synthetic oligonucleotide
cuuagcugcuuugcgaaaa

SEQ ID NO: 2270451 - RNA, 19 nt, Artificial Sequence
  Description of Artificial Sequence: Synthetic oligonucleotide
gcggguuugaauuuucugu

SEQ ID NO: 2270452 - RNA, 19 nt, Artificial Sequence
  Description of Artificial Sequence: Synthetic oligonucleotide
uucgaaagccaggcuggcu

SEQ ID NO: 2270453 - RNA, 19 nt, Artificial Sequence
  Description of Artificial Sequence: Synthetic oligonucleotide
gcaauaucaaaccguucaa

SEQ ID NO: 2270454 - RNA, 19 nt, Artificial Sequence
  Description of Artificial Sequence: Synthetic oligonucleotide
auguucccgcugccgggac

SEQ ID NO: 2270455 - RNA, 19 nt, Artificial Sequence
  Description of Artificial Sequence: Synthetic oligonucleotide
ccagccguuuucgaaagcc

SEQ ID NO: 2270456 - RNA, 19 nt, Artificial Sequence
  Description of Artificial Sequence: Synthetic oligonucleotide
gaacacgugcuuauucugu

SEQ ID NO: 2270457 - RNA, 19 nt, Artificial Sequence
  Description of Artificial Sequence: Synthetic oligonucleotide
cggguuugaauuuucugug

SEQ ID NO: 2270458 - RNA, 19 nt, Artificial Sequence
  Description of Artificial Sequence: Synthetic oligonucleotide
gcaagugagucgcaauauc

SEQ ID NO: 2270459 - RNA, 19 nt, Artificial Sequence
  Description of Artificial Sequence: Synthetic oligonucleotide
agcuauccucuugagucga

SEQ ID NO: 2270460 - RNA, 19 nt, Artificial Sequence
  Description of Artificial Sequence: Synthetic oligonucleotide
ccguuuucgaaagccaggc

SEQ ID NO: 2270461 - RNA, 19 nt, Artificial Sequence
  Description of Artificial Sequence: Synthetic oligonucleotide
uccagcagguggagcucug

SEQ ID NO: 2270462 - RNA, 19 nt, Artificial Sequence
  Description of Artificial Sequence: Synthetic oligonucleotide
gauguucccgcugccggga

SEQ ID NO: 2270463 - RNA, 19 nt, Artificial Sequence
  Description of Artificial Sequence: Synthetic oligonucleotide
gaagagcucugaggaaauc

SEQ ID NO: 2270464 - RNA, 19 nt, Artificial Sequence
  Description of Artificial Sequence: Synthetic oligonucleotide
ccugucuacuagcucuggg

SEQ ID NO: 2270465 - RNA, 19 nt, Artificial Sequence
  Description of Artificial Sequence: Synthetic oligonucleotide
uguucccgcugccgggacu

SEQ ID NO: 2270466 - RNA, 19 nt, Artificial Sequence
  Description of Artificial Sequence: Synthetic oligonucleotide
ugccuacugggguccagaa

SEQ ID NO: 2270467 - RNA, 19 nt, Artificial Sequence
  Description of Artificial Sequence: Synthetic oligonucleotide
cucuugagucgagucugag

SEQ ID NO: 2270468 - RNA, 19 nt, Artificial Sequence
  Description of Artificial Sequence: Synthetic oligonucleotide
cuguaaauagcuggggagu

SEQ ID NO: 2270469 - RNA, 19 nt, Artificial Sequence
  Description of Artificial Sequence: Synthetic oligonucleotide
cucccgaucaauccgcugu

SEQ ID NO: 2270470 - RNA, 19 nt, Artificial Sequence
  Description of Artificial Sequence: Synthetic oligonucleotide
cuuagcccgggucauuuua

SEQ ID NO: 2270471 - RNA, 19 nt, Artificial Sequence
  Description of Artificial Sequence: Synthetic oligonucleotide
guuugcaagugagucgcaa

SEQ ID NO: 2270472 - RNA, 19 nt, Artificial Sequence
  Description of Artificial Sequence: Synthetic oligonucleotide
caucaacguuuucggcgag

SEQ ID NO: 2270473 - RNA, 19 nt, Artificial Sequence
  Description of Artificial Sequence: Synthetic oligonucleotide
guuuucggcgagucuggaa

SEQ ID NO: 2270474 - RNA, 19 nt, Artificial Sequence
  Description of Artificial Sequence: Synthetic oligonucleotide
gguugacaauaagucauga

SEQ ID NO: 2270475 - RNA, 19 nt, Artificial Sequence
  Description of Artificial Sequence: Synthetic oligonucleotide
aucaacguuuucggcgagu

SEQ ID NO: 2270476 - RNA, 19 nt, Artificial Sequence
  Description of Artificial Sequence: Synthetic oligonucleotide
cagccguuuucgaaagcca

SEQ ID NO: 2270477 - RNA, 19 nt, Artificial Sequence
  Description of Artificial Sequence: Synthetic oligonucleotide
caaacccagccguuuucga

SEQ ID NO: 2270478 - RNA, 19 nt, Artificial Sequence
  Description of Artificial Sequence: Synthetic oligonucleotide
cugaguucucaucagcuuu

SEQ ID NO: 2270479 - RNA, 19 nt, Artificial Sequence
  Description of Artificial Sequence: Synthetic oligonucleotide
ggucuccuugaagauauga

SEQ ID NO: 2270480 - RNA, 19 nt, Artificial Sequence
  Description of Artificial Sequence: Synthetic oligonucleotide
ucggcgagucuggaaucug

SEQ ID NO: 2270481 - RNA, 19 nt, Artificial Sequence
  Description of Artificial Sequence: Synthetic oligonucleotide
cauaagaucuuugcggguu

SEQ ID NO: 2270482 - RNA, 19 nt, Artificial Sequence
  Description of Artificial Sequence: Synthetic oligonucleotide
gucuacuagcucuggggcu

SEQ ID NO: 2270483 - RNA, 19 nt, Artificial Sequence
  Description of Artificial Sequence: Synthetic oligonucleotide
augaaauacugaaguuauu

SEQ ID NO: 2270484 - RNA, 19 nt, Artificial Sequence
  Description of Artificial Sequence: Synthetic oligonucleotide
gucgcaauaucaaaccguu

SEQ ID NO: 2270485 - RNA, 19 nt, Artificial Sequence
  Description of Artificial Sequence: Synthetic oligonucleotide
cacgaaguuuguaaucuuu

SEQ ID NO: 2270486 - RNA, 19 nt, Artificial Sequence
  Description of Artificial Sequence: Synthetic oligonucleotide
acuccauccuggagcuuag

SEQ ID NO: 2270487 - RNA, 19 nt, Artificial Sequence
  Description of Artificial Sequence: Synthetic oligonucleotide
ucucuauccugggucuauu

SEQ ID NO: 2270488 - RNA, 19 nt, Artificial Sequence
  Description of Artificial Sequence: Synthetic oligonucleotide
gcugugucaagcaaucaua

SEQ ID NO: 2270489 - RNA, 19 nt, Artificial Sequence
  Description of Artificial Sequence: Synthetic oligonucleotide
augccuacugggguccaga

SEQ ID NO: 2270490 - RNA, 19 nt, Artificial Sequence
  Description of Artificial Sequence: Synthetic oligonucleotide
auccgcugugucaagcaau

SEQ ID NO: 2270491 - RNA, 19 nt, Artificial Sequence
  Description of Artificial Sequence: Synthetic oligonucleotide
gguccagaaaaggcucacc

SEQ ID NO: 2270492 - RNA, 19 nt, Artificial Sequence
  Description of Artificial Sequence: Synthetic oligonucleotide
cucuauccugggucuauua

SEQ ID NO: 2270493 - RNA, 19 nt, Artificial Sequence
  Description of Artificial Sequence: Synthetic oligonucleotide
gggguaacgccuuucacuu

SEQ ID NO: 2270494 - RNA, 19 nt, Artificial Sequence
  Description of Artificial Sequence: Synthetic oligonucleotide
cugcaacccuuuucaucuc

SEQ ID NO: 2270495 - RNA, 19 nt, Artificial Sequence
  Description of Artificial Sequence: Synthetic oligonucleotide
uagaacgacgaggcuuauu

SEQ ID NO: 2270496 - RNA, 19 nt, Artificial Sequence
  Description of Artificial Sequence: Synthetic oligonucleotide
gcuuugcgaaaagccgccg

SEQ ID NO: 2270497 - RNA, 19 nt, Artificial Sequence
  Description of Artificial Sequence: Synthetic oligonucleotide
cuguugcuuccccuggaaa

SEQ ID NO: 2270498 - RNA, 19 nt, Artificial Sequence
  Description of Artificial Sequence: Synthetic oligonucleotide
ucccgcugccgggacuuag

SEQ ID NO: 2270499 - RNA, 19 nt, Artificial Sequence
  Description of Artificial Sequence: Synthetic oligonucleotide
cgggucauuuuauaguaga

SEQ ID NO: 2270500 - RNA, 19 nt, Artificial Sequence
  Description of Artificial Sequence: Synthetic oligonucleotide
gggucauuuuauaguagaa

SEQ ID NO: 2270501 - RNA, 19 nt, Artificial Sequence
  Description of Artificial Sequence: Synthetic oligonucleotide
caugccuacugggguccag

SEQ ID NO: 2270502 - RNA, 19 nt, Artificial Sequence
  Description of Artificial Sequence: Synthetic oligonucleotide
cgaucaauccgcuguguca

SEQ ID NO: 2270503 - RNA, 19 nt, Artificial Sequence
  Description of Artificial Sequence: Synthetic oligonucleotide
ggucuauuaaagacccugu

SEQ ID NO: 2270504 - RNA, 19 nt, Artificial Sequence
  Description of Artificial Sequence: Synthetic oligonucleotide
gaacgacgaggcuuauuuu

SEQ ID NO: 2270505 - RNA, 19 nt, Artificial Sequence
  Description of Artificial Sequence: Synthetic oligonucleotide
ccgaucaauccgcuguguc

SEQ ID NO: 2270506 - RNA, 19 nt, Artificial Sequence
  Description of Artificial Sequence: Synthetic oligonucleotide
gcgaaaagccgccgccaug

SEQ ID NO: 2270507 - RNA, 19 nt, Artificial Sequence
  Description of Artificial Sequence: Synthetic oligonucleotide
gcaaccacgaacagcuucu

SEQ ID NO: 2270508 - RNA, 19 nt, Artificial Sequence
  Description of Artificial Sequence: Synthetic oligonucleotide
cgauguucccgcugccggg

SEQ ID NO: 2270509 - RNA, 19 nt, Artificial Sequence
  Description of Artificial Sequence: Synthetic oligonucleotide
cgagucuggaaucuguaaa

SEQ ID NO: 2270510 - RNA, 19 nt, Artificial Sequence
  Description of Artificial Sequence: Synthetic oligonucleotide
gcgagucuggaaucuguaa

SEQ ID NO: 2270511 - RNA, 19 nt, Artificial Sequence
  Description of Artificial Sequence: Synthetic oligonucleotide
ccuuguuaguuuuauccau

SEQ ID NO: 2270512 - RNA, 19 nt, Artificial Sequence
  Description of Artificial Sequence: Synthetic oligonucleotide
gccaugccuacuggggucc

SEQ ID NO: 2270513 - RNA, 19 nt, Artificial Sequence
  Description of Artificial Sequence: Synthetic oligonucleotide
caaaccguucaacuuccuu

SEQ ID NO: 2270514 - RNA, 19 nt, Artificial Sequence
  Description of Artificial Sequence: Synthetic oligonucleotide
cauuugcacgaaguuugua

SEQ ID NO: 2270515 - RNA, 19 nt, Artificial Sequence
  Description of Artificial Sequence: Synthetic oligonucleotide
gcccgggucauuuuauagu

SEQ ID NO: 2270516 - RNA, 19 nt, Artificial Sequence
  Description of Artificial Sequence: Synthetic oligonucleotide
ccgaagagcucugaggaaa

SEQ ID NO: 2270517 - RNA, 19 nt, Artificial Sequence
  Description of Artificial Sequence: Synthetic oligonucleotide
ggguccagaaaaggcucac

SEQ ID NO: 2270518 - RNA, 19 nt, Artificial Sequence
  Description of Artificial Sequence: Synthetic oligonucleotide
gcuauccucuugagucgag

SEQ ID NO: 2270519 - RNA, 19 nt, Artificial Sequence
  Description of Artificial Sequence: Synthetic oligonucleotide
cgggacuuagcugcuuugc

SEQ ID NO: 2270520 - RNA, 19 nt, Artificial Sequence
  Description of Artificial Sequence: Synthetic oligonucleotide
ccgggacuuagcugcuuug

SEQ ID NO: 2270521 - RNA, 19 nt, Artificial Sequence
  Description of Artificial Sequence: Synthetic oligonucleotide
caacguuuucggcgagucu

SEQ ID NO: 2270522 - RNA, 19 nt, Artificial Sequence
  Description of Artificial Sequence: Synthetic oligonucleotide
ggggaguucacuguuucuu

SEQ ID NO: 2270523 - RNA, 19 nt, Artificial Sequence
  Description of Artificial Sequence: Synthetic oligonucleotide
guaacgccuuucacuuucu

SEQ ID NO: 2270524 - RNA, 19 nt, Artificial Sequence
  Description of Artificial Sequence: Synthetic oligonucleotide
uggcuucguucucgauguu

SEQ ID NO: 2270525 - RNA, 19 nt, Artificial Sequence
  Description of Artificial Sequence: Synthetic oligonucleotide
cuuugcggguuugaauuuu

SEQ ID NO: 2270526 - RNA, 19 nt, Artificial Sequence
  Description of Artificial Sequence: Synthetic oligonucleotide
gucucuauccugggucuau

SEQ ID NO: 2270527 - RNA, 19 nt, Artificial Sequence
  Description of Artificial Sequence: Synthetic oligonucleotide
gccuacugggguccagaaa

SEQ ID NO: 2270528 - RNA, 19 nt, Artificial Sequence
  Description of Artificial Sequence: Synthetic oligonucleotide
ggcgagucuggaaucugua

SEQ ID NO: 2270529 - RNA, 19 nt, Artificial Sequence
  Description of Artificial Sequence: Synthetic oligonucleotide
cccagccguuuucgaaagc

SEQ ID NO: 2270530 - RNA, 19 nt, Artificial Sequence
  Description of Artificial Sequence: Synthetic oligonucleotide
cgccaugccuacugggguc

SEQ ID NO: 2270531 - RNA, 19 nt, Artificial Sequence
  Description of Artificial Sequence: Synthetic oligonucleotide
ccauaagaucuuugcgggu

SEQ ID NO: 2270532 - RNA, 19 nt, Artificial Sequence
  Description of Artificial Sequence: Synthetic oligonucleotide
cagcaaacccagccguuuu

SEQ ID NO: 2270533 - RNA, 19 nt, Artificial Sequence
  Description of Artificial Sequence: Synthetic oligonucleotide
gcaacccuuuucaucucua

SEQ ID NO: 2270534 - RNA, 19 nt, Artificial Sequence
  Description of Artificial Sequence: Synthetic oligonucleotide
uacuagcucuggggcuguu

SEQ ID NO: 2270535 - RNA, 19 nt, Artificial Sequence
  Description of Artificial Sequence: Synthetic oligonucleotide
guucccgcugccgggacuu

SEQ ID NO: 2270536 - RNA, 19 nt, Artificial Sequence
  Description of Artificial Sequence: Synthetic oligonucleotide
gcacgaaguuuguaaucuu

SEQ ID NO: 2270537 - RNA, 19 nt, Artificial Sequence
  Description of Artificial Sequence: Synthetic oligonucleotide
caccuucaccuuguuaguu

SEQ ID NO: 2270538 - RNA, 19 nt, Artificial Sequence
  Description of Artificial Sequence: Synthetic oligonucleotide
ggucucuauccugggucua

SEQ ID NO: 2270539 - RNA, 19 nt, Artificial Sequence
  Description of Artificial Sequence: Synthetic oligonucleotide
cuacuagcucuggggcugu

SEQ ID NO: 2270540 - RNA, 19 nt, Artificial Sequence
  Description of Artificial Sequence: Synthetic oligonucleotide
uucccgcugccgggacuua

SEQ ID NO: 2270541 - RNA, 19 nt, Artificial Sequence
  Description of Artificial Sequence: Synthetic oligonucleotide
gggcuguuugcaagugagu

SEQ ID NO: 2270542 - RNA, 19 nt, Artificial Sequence
  Description of Artificial Sequence: Synthetic oligonucleotide
guagaacgacgaggcuuau

SEQ ID NO: 2270543 - RNA, 19 nt, Artificial Sequence
  Description of Artificial Sequence: Synthetic oligonucleotide
gccgggacuuagcugcuuu

SEQ ID NO: 2270544 - RNA, 19 nt, Artificial Sequence
  Description of Artificial Sequence: Synthetic oligonucleotide
cgaagagcucugaggaaau

SEQ ID NO: 2270545 - RNA, 19 nt, Artificial Sequence
  Description of Artificial Sequence: Synthetic oligonucleotide
ggguaacgccuuucacuuu

SEQ ID NO: 2270546 - RNA, 19 nt, Artificial Sequence
  Description of Artificial Sequence: Synthetic oligonucleotide
ccgccaugccuacuggggu

SEQ ID NO: 2270547 - RNA, 19 nt, Artificial Sequence
  Description of Artificial Sequence: Synthetic oligonucleotide
gcuuagcccgggucauuuu

SEQ ID NO: 2270548 - RNA, 19 nt, Artificial Sequence
  Description of Artificial Sequence: Synthetic oligonucleotide
gaacuccauccuggagcuu

SEQ ID NO: 2270549 - RNA, 19 nt, Artificial Sequence
  Description of Artificial Sequence: Synthetic oligonucleotide
ccgcugugucaagcaauca

SEQ ID NO: 2270550 - RNA, 19 nt, Artificial Sequence
  Description of Artificial Sequence: Synthetic oligonucleotide
cguuuucggcgagucugga

SEQ ID NO: 2270551 - RNA, 19 nt, Artificial Sequence
  Description of Artificial Sequence: Synthetic oligonucleotide
cggcgagucuggaaucugu

SEQ ID NO: 2270552 - RNA, 19 nt, Artificial Sequence
  Description of Artificial Sequence: Synthetic oligonucleotide
gugcaaccacgaacagcuu

SEQ ID NO: 2270553 - RNA, 19 nt, Artificial Sequence
  Description of Artificial Sequence: Synthetic oligonucleotide
cguucucgauguucccgcu

SEQ ID NO: 2270554 - RNA, 19 nt, Artificial Sequence
  Description of Artificial Sequence: Synthetic oligonucleotide
ccaugccuacuggggucca

SEQ ID NO: 2270555 - RNA, 19 nt, Artificial Sequence
  Description of Artificial Sequence: Synthetic oligonucleotide
cccgaucaauccgcugugu

SEQ ID NO: 2270556 - RNA, 19 nt, Artificial Sequence
  Description of Artificial Sequence: Synthetic oligonucleotide
uucggauaaaccaagaugg

SEQ ID NO: 2270557 - RNA, 19 nt, Artificial Sequence
  Description of Artificial Sequence: Synthetic oligonucleotide
aaugauuagagacuucagg

SEQ ID NO: 2270558 - RNA, 19 nt, Artificial Sequence
  Description of Artificial Sequence: Synthetic oligonucleotide
uauuggaaaaucuucaucc

SEQ ID NO: 2270559 - RNA, 19 nt, Artificial Sequence
  Description of Artificial Sequence: Synthetic oligonucleotide
ucgucuaucaaucugcugg

SEQ ID NO: 2270560 - RNA, 19 nt, Artificial Sequence
  Description of Artificial Sequence: Synthetic oligonucleotide
aaaucauccgaccacacag

SEQ ID NO: 2270561 - RNA, 19 nt, Artificial Sequence
  Description of Artificial Sequence: Synthetic oligonucleotide
ucuuguaacagcuaaaagu

SEQ ID NO: 2270562 - RNA, 19 nt, Artificial Sequence
  Description of Artificial Sequence: Synthetic oligonucleotide
uaaguaaaugaucauguag

SEQ ID NO: 2270563 - RNA, 19 nt, Artificial Sequence
  Description of Artificial Sequence: Synthetic oligonucleotide
uaaagugccaauaacauau

SEQ ID NO: 2270564 - RNA, 19 nt, Artificial Sequence
  Description of Artificial Sequence: Synthetic oligonucleotide
gauaucuauaguuaggcug

SEQ ID NO: 2270565 - RNA, 19 nt, Artificial Sequence
  Description of Artificial Sequence: Synthetic oligonucleotide
uauuuaaagagauugucca

SEQ ID NO: 2270566 - RNA, 19 nt, Artificial Sequence
  Description of Artificial Sequence: Synthetic oligonucleotide
aaauuaaagacguaucuaa

SEQ ID NO: 2270567 - RNA, 19 nt, Artificial Sequence
  Description of Artificial Sequence: Synthetic oligonucleotide
aguauaucugcuucaauac

SEQ ID NO: 2270568 - RNA, 19 nt, Artificial Sequence
  Description of Artificial Sequence: Synthetic oligonucleotide
cuuguaacagcuaaaagug

SEQ ID NO: 2270569 - RNA, 19 nt, Artificial Sequence
  Description of Artificial Sequence: Synthetic oligonucleotide
ucuauaguuaggcugacca

SEQ ID NO: 2270570 - RNA, 19 nt, Artificial Sequence
  Description of Artificial Sequence: Synthetic oligonucleotide
aaaaucuucauccugccau

SEQ ID NO: 2270571 - RNA, 19 nt, Artificial Sequence
  Description of Artificial Sequence: Synthetic oligonucleotide
ucugacugaauuuugaacu

SEQ ID NO: 2270572 - RNA, 19 nt, Artificial Sequence
  Description of Artificial Sequence: Synthetic oligonucleotide
uuaacuucuaaugagccag

SEQ ID NO: 2270573 - RNA, 19 nt, Artificial Sequence
  Description of Artificial Sequence: Synthetic oligonucleotide
ugauaaauggucuuguaac

SEQ ID NO: 2270574 - RNA, 19 nt, Artificial Sequence
  Description of Artificial Sequence: Synthetic oligonucleotide
uauaucugcuucaauacug

SEQ ID NO: 2270575 - RNA, 19 nt, Artificial Sequence
  Description of Artificial Sequence: Synthetic oligonucleotide
aggcugaccacuuucaggc

SEQ ID NO: 2270576 - RNA, 19 nt, Artificial Sequence
  Description of Artificial Sequence: Synthetic oligonucleotide
cuucuaaugagccagguug

SEQ ID NO: 2270577 - RNA, 19 nt, Artificial Sequence
  Description of Artificial Sequence: Synthetic oligonucleotide
uuuggguuugggaagauca

SEQ ID NO: 2270578 - RNA, 19 nt, Artificial Sequence
  Description of Artificial Sequence: Synthetic oligonucleotide
uaaaccauccccauaauau

SEQ ID NO: 2270579 - RNA, 19 nt, Artificial Sequence
  Description of Artificial Sequence: Synthetic oligonucleotide
gauaaaccaagaugggugg

SEQ ID NO: 2270580 - RNA, 19 nt, Artificial Sequence
  Description of Artificial Sequence: Synthetic oligonucleotide
uucacuaggauccaggguc

SEQ ID NO: 2270581 - RNA, 19 nt, Artificial Sequence
  Description of Artificial Sequence: Synthetic oligonucleotide
acagacagcaaauacaaca

SEQ ID NO: 2270582 - RNA, 19 nt, Artificial Sequence
  Description of Artificial Sequence: Synthetic oligonucleotide
ucugccaaauuaaagacgu

SEQ ID NO: 2270583 - RNA, 19 nt, Artificial Sequence
  Description of Artificial Sequence: Synthetic oligonucleotide
ucaaauucaucacuguucu

SEQ ID NO: 2270584 - RNA, 19 nt, Artificial Sequence
  Description of Artificial Sequence: Synthetic oligonucleotide
uccauuaacuucuaaugag

SEQ ID NO: 2270585 - RNA, 19 nt, Artificial Sequence
  Description of Artificial Sequence: Synthetic oligonucleotide
ucuccaauccugaacaugc

SEQ ID NO: 2270586 - RNA, 19 nt, Artificial Sequence
  Description of Artificial Sequence: Synthetic oligonucleotide
uaaucgucuaucaaucugc

SEQ ID NO: 2270587 - RNA, 19 nt, Artificial Sequence
  Description of Artificial Sequence: Synthetic oligonucleotide
aaaccauccccauaauauc

SEQ ID NO: 2270588 - RNA, 19 nt, Artificial Sequence
  Description of Artificial Sequence: Synthetic oligonucleotide
uggaaaaucuucauccugc

SEQ ID NO: 2270589 - RNA, 19 nt, Artificial Sequence
  Description of Artificial Sequence: Synthetic oligonucleotide
uucauauccacccuguggu

SEQ ID NO: 2270590 - RNA, 19 nt, Artificial Sequence
  Description of Artificial Sequence: Synthetic oligonucleotide
uuccuaaugacuucaguag

SEQ ID NO: 2270591 - RNA, 19 nt, Artificial Sequence
  Description of Artificial Sequence: Synthetic oligonucleotide
guaucuaauuuucugacug

SEQ ID NO: 2270592 - RNA, 19 nt, Artificial Sequence
  Description of Artificial Sequence: Synthetic oligonucleotide
aaagacguaucuaauuuuc

SEQ ID NO: 2270593 - RNA, 19 nt, Artificial Sequence
  Description of Artificial Sequence: Synthetic oligonucleotide
gccaauaacauauuuaaag

SEQ ID NO: 2270594 - RNA, 19 nt, Artificial Sequence
  Description of Artificial Sequence: Synthetic oligonucleotide
augauuagagacuucaggu

SEQ ID NO: 2270595 - RNA, 19 nt, Artificial Sequence
  Description of Artificial Sequence: Synthetic oligonucleotide
uuaaagacguaucuaauuu

SEQ ID NO: 2270596 - RNA, 19 nt, Artificial Sequence
  Description of Artificial Sequence: Synthetic oligonucleotide
ucuucuuugagcuccacac

SEQ ID NO: 2270597 - RNA, 19 nt, Artificial Sequence
  Description of Artificial Sequence: Synthetic oligonucleotide
ucuaucaaucugcugguag

SEQ ID NO: 2270598 - RNA, 19 nt, Artificial Sequence
  Description of Artificial Sequence: Synthetic oligonucleotide
uuugaacugauaaaugguc

SEQ ID NO: 2270599 - RNA, 19 nt, Artificial Sequence
  Description of Artificial Sequence: Synthetic oligonucleotide
ugguaugccaacauacucc

SEQ ID NO: 2270600 - RNA, 19 nt, Artificial Sequence
  Description of Artificial Sequence: Synthetic oligonucleotide
uucugccaaauuaaagacg

SEQ ID NO: 2270601 - RNA, 19 nt, Artificial Sequence
  Description of Artificial Sequence: Synthetic oligonucleotide
cauuaacuucuaaugagcc

SEQ ID NO: 2270602 - RNA, 19 nt, Artificial Sequence
  Description of Artificial Sequence: Synthetic oligonucleotide
acguaucuaauuuucugac

SEQ ID NO: 2270603 - RNA, 19 nt, Artificial Sequence
  Description of Artificial Sequence: Synthetic oligonucleotide
uuccauuaacuucuaauga

SEQ ID NO: 2270604 - RNA, 19 nt, Artificial Sequence
  Description of Artificial Sequence: Synthetic oligonucleotide
acagcaaauacaacaaugg

SEQ ID NO: 2270605 - RNA, 19 nt, Artificial Sequence
  Description of Artificial Sequence: Synthetic oligonucleotide
uucuaaugagccagguugg

SEQ ID NO: 2270606 - RNA, 19 nt, Artificial Sequence
  Description of Artificial Sequence: Synthetic oligonucleotide
uaaagguauuggaaaaucu

SEQ ID NO: 2270607 - RNA, 19 nt, Artificial Sequence
  Description of Artificial Sequence: Synthetic oligonucleotide
uaaguucuugaucaacuug

SEQ ID NO: 2270608 - RNA, 19 nt, Artificial Sequence
  Description of Artificial Sequence: Synthetic oligonucleotide
ugaauuuugaacugauaaa

SEQ ID NO: 2270609 - RNA, 19 nt, Artificial Sequence
  Description of Artificial Sequence: Synthetic oligonucleotide
uuaaagagauuguccauca

SEQ ID NO: 2270610 - RNA, 19 nt, Artificial Sequence
  Description of Artificial Sequence: Synthetic oligonucleotide
uuuccuaaugacuucagua

SEQ ID NO: 2270611 - RNA, 19 nt, Artificial Sequence
  Description of Artificial Sequence: Synthetic oligonucleotide
aacagcuaaaaguguucgg

SEQ ID NO: 2270612 - RNA, 19 nt, Artificial Sequence
  Description of Artificial Sequence: Synthetic oligonucleotide
ucuuacgcacuuuauuucc

SEQ ID NO: 2270613 - RNA, 19 nt, Artificial Sequence
  Description of Artificial Sequence: Synthetic oligonucleotide
guucggauaaaccaagaug

SEQ ID NO: 2270614 - RNA, 19 nt, Artificial Sequence
  Description of Artificial Sequence: Synthetic oligonucleotide
acuuguuugaugcacucug

SEQ ID NO: 2270615 - RNA, 19 nt, Artificial Sequence
  Description of Artificial Sequence: Synthetic oligonucleotide
cauccgaccacacagaguc

SEQ ID NO: 2270616 - RNA, 19 nt, Artificial Sequence
  Description of Artificial Sequence: Synthetic oligonucleotide
uaaauggucuuguaacagc

SEQ ID NO: 2270617 - RNA, 19 nt, Artificial Sequence
  Description of Artificial Sequence: Synthetic oligonucleotide
ugucgcaccauuuaaguaa

SEQ ID NO: 2270618 - RNA, 19 nt, Artificial Sequence
  Description of Artificial Sequence: Synthetic oligonucleotide
uuucuuacgcacuuuauuu

SEQ ID NO: 2270619 - RNA, 19 nt, Artificial Sequence
  Description of Artificial Sequence: Synthetic oligonucleotide
ugaacaugcgccagcggcg

SEQ ID NO: 2270620 - RNA, 19 nt, Artificial Sequence
  Description of Artificial Sequence: Synthetic oligonucleotide
caacaauggcauuuaaacc

SEQ ID NO: 2270621 - RNA, 19 nt, Artificial Sequence
  Description of Artificial Sequence: Synthetic oligonucleotide
uugaacugauaaauggucu

SEQ ID NO: 2270622 - RNA, 19 nt, Artificial Sequence
  Description of Artificial Sequence: Synthetic oligonucleotide
accacuuucaggcauaaaa

SEQ ID NO: 2270623 - RNA, 19 nt, Artificial Sequence
  Description of Artificial Sequence: Synthetic oligonucleotide
uuguccaucagauaucuau

SEQ ID NO: 2270624 - RNA, 19 nt, Artificial Sequence
  Description of Artificial Sequence: Synthetic oligonucleotide
uaacagcuaaaaguguucg

SEQ ID NO: 2270625 - RNA, 19 nt, Artificial Sequence
  Description of Artificial Sequence: Synthetic oligonucleotide
uucuuguuuuccauuaagu

SEQ ID NO: 2270626 - RNA, 19 nt, Artificial Sequence
  Description of Artificial Sequence: Synthetic oligonucleotide
aacugagucuuuccuaaug

SEQ ID NO: 2270627 - RNA, 19 nt, Artificial Sequence
  Description of Artificial Sequence: Synthetic oligonucleotide
ucauguaguucucugcuac

SEQ ID NO: 2270628 - RNA, 19 nt, Artificial Sequence
  Description of Artificial Sequence: Synthetic oligonucleotide
uguaacagcuaaaaguguu

SEQ ID NO: 2270629 - RNA, 19 nt, Artificial Sequence
  Description of Artificial Sequence: Synthetic oligonucleotide
ugagucuuuccuaaugacu

SEQ ID NO: 2270630 - RNA, 19 nt, Artificial Sequence
  Description of Artificial Sequence: Synthetic oligonucleotide
cuucauauccacccugugg

SEQ ID NO: 2270631 - RNA, 19 nt, Artificial Sequence
  Description of Artificial Sequence: Synthetic oligonucleotide
aaauacaacaauggcauuu

SEQ ID NO: 2270632 - RNA, 19 nt, Artificial Sequence
  Description of Artificial Sequence: Synthetic oligonucleotide
uuuaaagagauuguccauc

SEQ ID NO: 2270633 - RNA, 19 nt, Artificial Sequence
  Description of Artificial Sequence: Synthetic oligonucleotide
uauaguuaggcugaccacu

SEQ ID NO: 2270634 - RNA, 19 nt, Artificial Sequence
  Description of Artificial Sequence: Synthetic oligonucleotide
cuaucaaucugcugguagc

SEQ ID NO: 2270635 - RNA, 19 nt, Artificial Sequence
  Description of Artificial Sequence: Synthetic oligonucleotide
aucaacuuguuugaugcac

SEQ ID NO: 2270636 - RNA, 19 nt, Artificial Sequence
  Description of Artificial Sequence: Synthetic oligonucleotide
aguuaggcugaccacuuuc

SEQ ID NO: 2270637 - RNA, 19 nt, Artificial Sequence
  Description of Artificial Sequence: Synthetic oligonucleotide
auuaaagacguaucuaauu

SEQ ID NO: 2270638 - RNA, 19 nt, Artificial Sequence
  Description of Artificial Sequence: Synthetic oligonucleotide
accaguuacaucuaguaua

SEQ ID NO: 2270639 - RNA, 19 nt, Artificial Sequence
  Description of Artificial Sequence: Synthetic oligonucleotide
aguaguuuuggguuuggga

SEQ ID NO: 2270640 - RNA, 19 nt, Artificial Sequence
  Description of Artificial Sequence: Synthetic oligonucleotide
cagauaucuauaguuaggc

SEQ ID NO: 2270641 - RNA, 19 nt, Artificial Sequence
  Description of Artificial Sequence: Synthetic oligonucleotide
guaguuuuggguuugggaa

SEQ ID NO: 2270642 - RNA, 19 nt, Artificial Sequence
  Description of Artificial Sequence: Synthetic oligonucleotide
gacguaucuaauuuucuga

SEQ ID NO: 2270643 - RNA, 19 nt, Artificial Sequence
  Description of Artificial Sequence: Synthetic oligonucleotide
ugcguaaucgucuaucaau

SEQ ID NO: 2270644 - RNA, 19 nt, Artificial Sequence
  Description of Artificial Sequence: Synthetic oligonucleotide
agacguaucuaauuuucug

SEQ ID NO: 2270645 - RNA, 19 nt, Artificial Sequence
  Description of Artificial Sequence: Synthetic oligonucleotide
uugaucaacuuguuugaug

SEQ ID NO: 2270646 - RNA, 19 nt, Artificial Sequence
  Description of Artificial Sequence: Synthetic oligonucleotide
auaaauggucuuguaacag

SEQ ID NO: 2270647 - RNA, 19 nt, Artificial Sequence
  Description of Artificial Sequence: Synthetic oligonucleotide
acuucaguaguuuuggguu

SEQ ID NO: 2270648 - RNA, 19 nt, Artificial Sequence
  Description of Artificial Sequence: Synthetic oligonucleotide
uuugcguaaucgucuauca

SEQ ID NO: 2270649 - RNA, 19 nt, Artificial Sequence
  Description of Artificial Sequence: Synthetic oligonucleotide
ucggauaaaccaagauggg

SEQ ID NO: 2270650 - RNA, 19 nt, Artificial Sequence
  Description of Artificial Sequence: Synthetic oligonucleotide
guaaucgucuaucaaucug

SEQ ID NO: 2270651 - RNA, 19 nt, Artificial Sequence
  Description of Artificial Sequence: Synthetic oligonucleotide
gagccauuaguuucuuacg

SEQ ID NO: 2270652 - RNA, 19 nt, Artificial Sequence
  Description of Artificial Sequence: Synthetic oligonucleotide
uaguuuuggguuugggaag

SEQ ID NO: 2270653 - RNA, 19 nt, Artificial Sequence
  Description of Artificial Sequence: Synthetic oligonucleotide
auuaacuucuaaugagcca

SEQ ID NO: 2270654 - RNA, 19 nt, Artificial Sequence
  Description of Artificial Sequence: Synthetic oligonucleotide
cugaacaugcgccagcggc

SEQ ID NO: 2270655 - RNA, 19 nt, Artificial Sequence
  Description of Artificial Sequence: Synthetic oligonucleotide
uucugacugaauuuugaac

SEQ ID NO: 2270656 - RNA, 19 nt, Artificial Sequence
  Description of Artificial Sequence: Synthetic oligonucleotide
guuacaucuaguauaucug

SEQ ID NO: 2270657 - RNA, 19 nt, Artificial Sequence
  Description of Artificial Sequence: Synthetic oligonucleotide
caugggaacaagcuccgcg

SEQ ID NO: 2270658 - RNA, 19 nt, Artificial Sequence
  Description of Artificial Sequence: Synthetic oligonucleotide
cucugguaugccaacauac

SEQ ID NO: 2270659 - RNA, 19 nt, Artificial Sequence
  Description of Artificial Sequence: Synthetic oligonucleotide
gagauuguccaucagauau

SEQ ID NO: 2270660 - RNA, 19 nt, Artificial Sequence
  Description of Artificial Sequence: Synthetic oligonucleotide
uuccauuaaguucuugauc

SEQ ID NO: 2270661 - RNA, 19 nt, Artificial Sequence
  Description of Artificial Sequence: Synthetic oligonucleotide
uacaacaauggcauuuaaa

SEQ ID NO: 2270662 - RNA, 19 nt, Artificial Sequence
  Description of Artificial Sequence: Synthetic oligonucleotide
ucaacuuguuugaugcacu

SEQ ID NO: 2270663 - RNA, 19 nt, Artificial Sequence
  Description of Artificial Sequence: Synthetic oligonucleotide
uccuaaugacuucaguagu

SEQ ID NO: 2270664 - RNA, 19 nt, Artificial Sequence
  Description of Artificial Sequence: Synthetic oligonucleotide
acugagucuuuccuaauga

SEQ ID NO: 2270665 - RNA, 19 nt, Artificial Sequence
  Description of Artificial Sequence: Synthetic oligonucleotide
ucauccaaaucauccgacc

SEQ ID NO: 2270666 - RNA, 19 nt, Artificial Sequence
  Description of Artificial Sequence: Synthetic oligonucleotide
auaucuauaguuaggcuga

SEQ ID NO: 2270667 - RNA, 19 nt, Artificial Sequence
  Description of Artificial Sequence: Synthetic oligonucleotide
uucugguaaagguauugga

SEQ ID NO: 2270668 - RNA, 19 nt, Artificial Sequence
  Description of Artificial Sequence: Synthetic oligonucleotide
uaacuucuaaugagccagg

SEQ ID NO: 2270669 - RNA, 19 nt, Artificial Sequence
  Description of Artificial Sequence: Synthetic oligonucleotide
uccaauccugaacaugcgc

SEQ ID NO: 2270670 - RNA, 19 nt, Artificial Sequence
  Description of Artificial Sequence: Synthetic oligonucleotide
uuaaaccauccccauaaua

SEQ ID NO: 2270671 - RNA, 19 nt, Artificial Sequence
  Description of Artificial Sequence: Synthetic oligonucleotide
aaagguauuggaaaaucuu

SEQ ID NO: 2270672 - RNA, 19 nt, Artificial Sequence
  Description of Artificial Sequence: Synthetic oligonucleotide
uaucuaauuuucugacuga

SEQ ID NO: 2270673 - RNA, 19 nt, Artificial Sequence
  Description of Artificial Sequence: Synthetic oligonucleotide
augaucauguaguucucug

SEQ ID NO: 2270674 - RNA, 19 nt, Artificial Sequence
  Description of Artificial Sequence: Synthetic oligonucleotide
aauuaaagacguaucuaau

SEQ ID NO: 2270675 - RNA, 19 nt, Artificial Sequence
  Description of Artificial Sequence: Synthetic oligonucleotide
cccauaauauccuccaugg

SEQ ID NO: 2270676 - RNA, 19 nt, Artificial Sequence
  Description of Artificial Sequence: Synthetic oligonucleotide
ggauaaaccaagaugggug

SEQ ID NO: 2270677 - RNA, 19 nt, Artificial Sequence
  Description of Artificial Sequence: Synthetic oligonucleotide
cagcaaauacaacaauggc

SEQ ID NO: 2270678 - RNA, 19 nt, Artificial Sequence
  Description of Artificial Sequence: Synthetic oligonucleotide
uuaggcugaccacuuucag

SEQ ID NO: 2270679 - RNA, 19 nt, Artificial Sequence
  Description of Artificial Sequence: Synthetic oligonucleotide
uguucggauaaaccaagau

SEQ ID NO: 2270680 - RNA, 19 nt, Artificial Sequence
  Description of Artificial Sequence: Synthetic oligonucleotide
aucugcugguagcaucucc

SEQ ID NO: 2270681 - RNA, 19 nt, Artificial Sequence
  Description of Artificial Sequence: Synthetic oligonucleotide
aucacuguucucugauggg

SEQ ID NO: 2270682 - RNA, 19 nt, Artificial Sequence
  Description of Artificial Sequence: Synthetic oligonucleotide
acagcuaaaaguguucgga

SEQ ID NO: 2270683 - RNA, 19 nt, Artificial Sequence
  Description of Artificial Sequence: Synthetic oligonucleotide
ucuaauuuucugacugaau

SEQ ID NO: 2270684 - RNA, 19 nt, Artificial Sequence
  Description of Artificial Sequence: Synthetic oligonucleotide
aacugauaaauggucuugu

SEQ ID NO: 2270685 - RNA, 19 nt, Artificial Sequence
  Description of Artificial Sequence: Synthetic oligonucleotide
auuuaaagagauuguccau

SEQ ID NO: 2270686 - RNA, 19 nt, Artificial Sequence
  Description of Artificial Sequence: Synthetic oligonucleotide
ugauuagagacuucagguu

SEQ ID NO: 2270687 - RNA, 19 nt, Artificial Sequence
  Description of Artificial Sequence: Synthetic oligonucleotide
ugccaaauuaaagacguau

SEQ ID NO: 2270688 - RNA, 19 nt, Artificial Sequence
  Description of Artificial Sequence: Synthetic oligonucleotide
caauacugucaucuucugg

SEQ ID NO: 2270689 - RNA, 19 nt, Artificial Sequence
  Description of Artificial Sequence: Synthetic oligonucleotide
agauaucuauaguuaggcu

SEQ ID NO: 2270690 - RNA, 19 nt, Artificial Sequence
  Description of Artificial Sequence: Synthetic oligonucleotide
uccaucagauaucuauagu

SEQ ID NO: 2270691 - RNA, 19 nt, Artificial Sequence
  Description of Artificial Sequence: Synthetic oligonucleotide
uccauggcuaauaacuuuu

SEQ ID NO: 2270692 - RNA, 19 nt, Artificial Sequence
  Description of Artificial Sequence: Synthetic oligonucleotide
uaaagacguaucuaauuuu

SEQ ID NO: 2270693 - RNA, 19 nt, Artificial Sequence
  Description of Artificial Sequence: Synthetic oligonucleotide
agucuuuccuaaugacuuc

SEQ ID NO: 2270694 - RNA, 19 nt, Artificial Sequence
  Description of Artificial Sequence: Synthetic oligonucleotide
gucuggaccaguuacaucu

SEQ ID NO: 2270695 - RNA, 19 nt, Artificial Sequence
  Description of Artificial Sequence: Synthetic oligonucleotide
uuguaacagcuaaaagugu

SEQ ID NO: 2270696 - RNA, 19 nt, Artificial Sequence
  Description of Artificial Sequence: Synthetic oligonucleotide
guauuggaaaaucuucauc

SEQ ID NO: 2270697 - RNA, 19 nt, Artificial Sequence
  Description of Artificial Sequence: Synthetic oligonucleotide
caucuaguauaucugcuuc

SEQ ID NO: 2270698 - RNA, 19 nt, Artificial Sequence
  Description of Artificial Sequence: Synthetic oligonucleotide
uucuuacgcacuuuauuuc

SEQ ID NO: 2270699 - RNA, 19 nt, Artificial Sequence
  Description of Artificial Sequence: Synthetic oligonucleotide
uuaaguucuugaucaacuu

SEQ ID NO: 2270700 - RNA, 19 nt, Artificial Sequence
  Description of Artificial Sequence: Synthetic oligonucleotide
aaaugaucauguaguucuc

SEQ ID NO: 2270701 - RNA, 19 nt, Artificial Sequence
  Description of Artificial Sequence: Synthetic oligonucleotide
cuucugguaaagguauugg

SEQ ID NO: 2270702 - RNA, 19 nt, Artificial Sequence
  Description of Artificial Sequence: Synthetic oligonucleotide
caaugauuagagacuucag

SEQ ID NO: 2270703 - RNA, 19 nt, Artificial Sequence
  Description of Artificial Sequence: Synthetic oligonucleotide
gaguucugccaaauuaaag

SEQ ID NO: 2270704 - RNA, 19 nt, Artificial Sequence
  Description of Artificial Sequence: Synthetic oligonucleotide
guaacugagucuuuccuaa

SEQ ID NO: 2270705 - RNA, 19 nt, Artificial Sequence
  Description of Artificial Sequence: Synthetic oligonucleotide
uguccaucagauaucuaua

SEQ ID NO: 2270706 - RNA, 19 nt, Artificial Sequence
  Description of Artificial Sequence: Synthetic oligonucleotide
uuuugcguaaucgucuauc

SEQ ID NO: 2270707 - RNA, 19 nt, Artificial Sequence
  Description of Artificial Sequence: Synthetic oligonucleotide
ccauuaacuucuaaugagc

SEQ ID NO: 2270708 - RNA, 19 nt, Artificial Sequence
  Description of Artificial Sequence: Synthetic oligonucleotide
auccugaacaugcgccagc

SEQ ID NO: 2270709 - RNA, 19 nt, Artificial Sequence
  Description of Artificial Sequence: Synthetic oligonucleotide
ugacuucaguaguuuuggg

SEQ ID NO: 2270710 - RNA, 19 nt, Artificial Sequence
  Description of Artificial Sequence: Synthetic oligonucleotide
aguaacugagucuuuccua

SEQ ID NO: 2270711 - RNA, 19 nt, Artificial Sequence
  Description of Artificial Sequence: Synthetic oligonucleotide
ugggcauuuuccuucgagu

SEQ ID NO: 2270712 - RNA, 19 nt, Artificial Sequence
  Description of Artificial Sequence: Synthetic oligonucleotide
ucuaguauaucugcuucaa

SEQ ID NO: 2270713 - RNA, 19 nt, Artificial Sequence
  Description of Artificial Sequence: Synthetic oligonucleotide
uaucaaucugcugguagca

SEQ ID NO: 2270714 - RNA, 19 nt, Artificial Sequence
  Description of Artificial Sequence: Synthetic oligonucleotide
uccaaaucauccgaccaca

SEQ ID NO: 2270715 - RNA, 19 nt, Artificial Sequence
  Description of Artificial Sequence: Synthetic oligonucleotide
cuauaguuaggcugaccac

SEQ ID NO: 2270716 - RNA, 19 nt, Artificial Sequence
  Description of Artificial Sequence: Synthetic oligonucleotide
uaacauauuuaaagagauu

SEQ ID NO: 2270717 - RNA, 19 nt, Artificial Sequence
  Description of Artificial Sequence: Synthetic oligonucleotide
agcucuaaagugccaauaa

SEQ ID NO: 2270718 - RNA, 19 nt, Artificial Sequence
  Description of Artificial Sequence: Synthetic oligonucleotide
cauccccauaauauccucc

SEQ ID NO: 2270719 - RNA, 19 nt, Artificial Sequence
  Description of Artificial Sequence: Synthetic oligonucleotide
guaaagguauuggaaaauc

SEQ ID NO: 2270720 - RNA, 19 nt, Artificial Sequence
  Description of Artificial Sequence: Synthetic oligonucleotide
aagcuccgcgaguucugcc

SEQ ID NO: 2270721 - RNA, 19 nt, Artificial Sequence
  Description of Artificial Sequence: Synthetic oligonucleotide
caacauacuccaugggaac

SEQ ID NO: 2270722 - RNA, 19 nt, Artificial Sequence
  Description of Artificial Sequence: Synthetic oligonucleotide
gaucauguaguucucugcu

SEQ ID NO: 2270723 - RNA, 19 nt, Artificial Sequence
  Description of Artificial Sequence: Synthetic oligonucleotide
ccaauaacauauuuaaaga

SEQ ID NO: 2270724 - RNA, 19 nt, Artificial Sequence
  Description of Artificial Sequence: Synthetic oligonucleotide
uccugaacaugcgccagcg

SEQ ID NO: 2270725 - RNA, 19 nt, Artificial Sequence
  Description of Artificial Sequence: Synthetic oligonucleotide
augggaacaagcuccgcga

SEQ ID NO: 2270726 - RNA, 19 nt, Artificial Sequence
  Description of Artificial Sequence: Synthetic oligonucleotide
aacagcucuaaagugccaa

SEQ ID NO: 2270727 - RNA, 19 nt, Artificial Sequence
  Description of Artificial Sequence: Synthetic oligonucleotide
aaaccaagauggguggaca

SEQ ID NO: 2270728 - RNA, 19 nt, Artificial Sequence
  Description of Artificial Sequence: Synthetic oligonucleotide
uccuuuucuucuguggcug

SEQ ID NO: 2270729 - RNA, 19 nt, Artificial Sequence
  Description of Artificial Sequence: Synthetic oligonucleotide
auaauauccuccauggcua

SEQ ID NO: 2270730 - RNA, 19 nt, Artificial Sequence
  Description of Artificial Sequence: Synthetic oligonucleotide
guaguucucugcuaccaac

SEQ ID NO: 2270731 - RNA, 19 nt, Artificial Sequence
  Description of Artificial Sequence: Synthetic oligonucleotide
aaguguucggauaaaccaa

SEQ ID NO: 2270732 - RNA, 19 nt, Artificial Sequence
  Description of Artificial Sequence: Synthetic oligonucleotide
ugguccuguucuccaaucc

SEQ ID NO: 2270733 - RNA, 19 nt, Artificial Sequence
  Description of Artificial Sequence: Synthetic oligonucleotide
uaaaccaagauggguggac

SEQ ID NO: 2270734 - RNA, 19 nt, Artificial Sequence
  Description of Artificial Sequence: Synthetic oligonucleotide
aguguucggauaaaccaag

SEQ ID NO: 2270735 - RNA, 19 nt, Artificial Sequence
  Description of Artificial Sequence: Synthetic oligonucleotide
cacuuuauuuccauuaacu

SEQ ID NO: 2270736 - RNA, 19 nt, Artificial Sequence
  Description of Artificial Sequence: Synthetic oligonucleotide
aagauggguggacaaugau

SEQ ID NO: 2270737 - RNA, 19 nt, Artificial Sequence
  Description of Artificial Sequence: Synthetic oligonucleotide
agguauuggaaaaucuuca

SEQ ID NO: 2270738 - RNA, 19 nt, Artificial Sequence
  Description of Artificial Sequence: Synthetic oligonucleotide
ugccaacauacuccauggg

SEQ ID NO: 2270739 - RNA, 19 nt, Artificial Sequence
  Description of Artificial Sequence: Synthetic oligonucleotide
cauguaguucucugcuacc

SEQ ID NO: 2270740 - RNA, 19 nt, Artificial Sequence
  Description of Artificial Sequence: Synthetic oligonucleotide
ugccaauaacauauuuaaa

SEQ ID NO: 2270741 - RNA, 19 nt, Artificial Sequence
  Description of Artificial Sequence: Synthetic oligonucleotide
uucaguaacugagucuuuc

SEQ ID NO: 2270742 - RNA, 19 nt, Artificial Sequence
  Description of Artificial Sequence: Synthetic oligonucleotide
ucacuaggauccaggguca

SEQ ID NO: 2270743 - RNA, 19 nt, Artificial Sequence
  Description of Artificial Sequence: Synthetic oligonucleotide
uguaguucucugcuaccaa

SEQ ID NO: 2270744 - RNA, 19 nt, Artificial Sequence
  Description of Artificial Sequence: Synthetic oligonucleotide
cugagucuuuccuaaugac

SEQ ID NO: 2270745 - RNA, 19 nt, Artificial Sequence
  Description of Artificial Sequence: Synthetic oligonucleotide
cugguaugccaacauacuc

SEQ ID NO: 2270746 - RNA, 19 nt, Artificial Sequence
  Description of Artificial Sequence: Synthetic oligonucleotide
aagacguaucuaauuuucu

SEQ ID NO: 2270747 - RNA, 19 nt, Artificial Sequence
  Description of Artificial Sequence: Synthetic oligonucleotide
guaaaugaucauguaguuc

SEQ ID NO: 2270748 - RNA, 19 nt, Artificial Sequence
  Description of Artificial Sequence: Synthetic oligonucleotide
acuguuuggugguucuugu

SEQ ID NO: 2270749 - RNA, 19 nt, Artificial Sequence
  Description of Artificial Sequence: Synthetic oligonucleotide
uccucagccaucccagacu

SEQ ID NO: 2270750 - RNA, 19 nt, Artificial Sequence
  Description of Artificial Sequence: Synthetic oligonucleotide
auacuccaugggaacaagc

SEQ ID NO: 2270751 - RNA, 19 nt, Artificial Sequence
  Description of Artificial Sequence: Synthetic oligonucleotide
ugggaacaagcuccgcgag

SEQ ID NO: 2270752 - RNA, 19 nt, Artificial Sequence
  Description of Artificial Sequence: Synthetic oligonucleotide
gaugcacucugguaugcca

SEQ ID NO: 2270753 - RNA, 19 nt, Artificial Sequence
  Description of Artificial Sequence: Synthetic oligonucleotide
aucuauaguuaggcugacc

SEQ ID NO: 2270754 - RNA, 19 nt, Artificial Sequence
  Description of Artificial Sequence: Synthetic oligonucleotide
ccaauccugaacaugcgcc

SEQ ID NO: 2270755 - RNA, 19 nt, Artificial Sequence
  Description of Artificial Sequence: Synthetic oligonucleotide
gucuggagccauuaguuuc

SEQ ID NO: 2270756 - RNA, 19 nt, Artificial Sequence
  Description of Artificial Sequence: Synthetic oligonucleotide
ugggaagaucaucuuccca

SEQ ID NO: 2270757 - RNA, 19 nt, Artificial Sequence
  Description of Artificial Sequence: Synthetic oligonucleotide
aaccaagauggguggacaa

SEQ ID NO: 2270758 - RNA, 19 nt, Artificial Sequence
  Description of Artificial Sequence: Synthetic oligonucleotide
agauuguccaucagauauc

SEQ ID NO: 2270759 - RNA, 19 nt, Artificial Sequence
  Description of Artificial Sequence: Synthetic oligonucleotide
uggaccaguuacaucuagu

SEQ ID NO: 2270760 - RNA, 19 nt, Artificial Sequence
  Description of Artificial Sequence: Synthetic oligonucleotide
uggguggacaaugauuaga

SEQ ID NO: 2270761 - RNA, 19 nt, Artificial Sequence
  Description of Artificial Sequence: Synthetic oligonucleotide
uuuaaaccauccccauaau

SEQ ID NO: 2270762 - RNA, 19 nt, Artificial Sequence
  Description of Artificial Sequence: Synthetic oligonucleotide
ugguagcaucuccucagcc

SEQ ID NO: 2270763 - RNA, 19 nt, Artificial Sequence
  Description of Artificial Sequence: Synthetic oligonucleotide
uucaguaguuuuggguuug

SEQ ID NO: 2270764 - RNA, 19 nt, Artificial Sequence
  Description of Artificial Sequence: Synthetic oligonucleotide
aguugucgcaccauuuaag

SEQ ID NO: 2270765 - RNA, 19 nt, Artificial Sequence
  Description of Artificial Sequence: Synthetic oligonucleotide
aacuuguuugaugcacucu

SEQ ID NO: 2270766 - RNA, 19 nt, Artificial Sequence
  Description of Artificial Sequence: Synthetic oligonucleotide
gacuucaguaguuuugggu

SEQ ID NO: 2270767 - RNA, 19 nt, Artificial Sequence
  Description of Artificial Sequence: Synthetic oligonucleotide
agcuaaaaguguucggaua

SEQ ID NO: 2270768 - RNA, 19 nt, Artificial Sequence
  Description of Artificial Sequence: Synthetic oligonucleotide
ucuaaugagccagguuggc

SEQ ID NO: 2270769 - RNA, 19 nt, Artificial Sequence
  Description of Artificial Sequence: Synthetic oligonucleotide
acgcacuuuauuuccauua

SEQ ID NO: 2270770 - RNA, 19 nt, Artificial Sequence
  Description of Artificial Sequence: Synthetic oligonucleotide
aaucgucuaucaaucugcu

SEQ ID NO: 2270771 - RNA, 19 nt, Artificial Sequence
  Description of Artificial Sequence: Synthetic oligonucleotide
gcuaaaaguguucggauaa

SEQ ID NO: 2270772 - RNA, 19 nt, Artificial Sequence
  Description of Artificial Sequence: Synthetic oligonucleotide
uguaggguucgauugccuu

SEQ ID NO: 2270773 - RNA, 19 nt, Artificial Sequence
  Description of Artificial Sequence: Synthetic oligonucleotide
uaggguucgauugccuuca

SEQ ID NO: 2270774 - RNA, 19 nt, Artificial Sequence
  Description of Artificial Sequence: Synthetic oligonucleotide
agccaucccagacugggca

SEQ ID NO: 2270775 - RNA, 19 nt, Artificial Sequence
  Description of Artificial Sequence: Synthetic oligonucleotide
guaacagcuaaaaguguuc

SEQ ID NO: 2270776 - RNA, 19 nt, Artificial Sequence
  Description of Artificial Sequence: Synthetic oligonucleotide
cuccaauccugaacaugcg

SEQ ID NO: 2270777 - RNA, 19 nt, Artificial Sequence
  Description of Artificial Sequence: Synthetic oligonucleotide
acaugcgccagcggcgucc

SEQ ID NO: 2270778 - RNA, 19 nt, Artificial Sequence
  Description of Artificial Sequence: Synthetic oligonucleotide
ccacuuucaggcauaaaac

SEQ ID NO: 2270779 - RNA, 19 nt, Artificial Sequence
  Description of Artificial Sequence: Synthetic oligonucleotide
uuggugguucuuguuuucc

SEQ ID NO: 2270780 - RNA, 19 nt, Artificial Sequence
  Description of Artificial Sequence: Synthetic oligonucleotide
ggguggacaaugauuagag

SEQ ID NO: 2270781 - RNA, 19 nt, Artificial Sequence
  Description of Artificial Sequence: Synthetic oligonucleotide
auauccacccugugguccu

SEQ ID NO: 2270782 - RNA, 19 nt, Artificial Sequence
  Description of Artificial Sequence: Synthetic oligonucleotide
uaauauccuccauggcuaa

SEQ ID NO: 2270783 - RNA, 19 nt, Artificial Sequence
  Description of Artificial Sequence: Synthetic oligonucleotide
ccauuaguuucuuacgcac

SEQ ID NO: 2270784 - RNA, 19 nt, Artificial Sequence
  Description of Artificial Sequence: Synthetic oligonucleotide
uugcguaaucgucuaucaa

SEQ ID NO: 2270785 - RNA, 19 nt, Artificial Sequence
  Description of Artificial Sequence: Synthetic oligonucleotide
gguaugccaacauacucca

SEQ ID NO: 2270786 - RNA, 19 nt, Artificial Sequence
  Description of Artificial Sequence: Synthetic oligonucleotide
aguuuuggguuugggaaga

SEQ ID NO: 2270787 - RNA, 19 nt, Artificial Sequence
  Description of Artificial Sequence: Synthetic oligonucleotide
caacuuguuugaugcacuc

SEQ ID NO: 2270788 - RNA, 19 nt, Artificial Sequence
  Description of Artificial Sequence: Synthetic oligonucleotide
uuacgcacuuuauuuccau

SEQ ID NO: 2270789 - RNA, 19 nt, Artificial Sequence
  Description of Artificial Sequence: Synthetic oligonucleotide
acugauaaauggucuugua

SEQ ID NO: 2270790 - RNA, 19 nt, Artificial Sequence
  Description of Artificial Sequence: Synthetic oligonucleotide
guaggguucgauugccuuc

SEQ ID NO: 2270791 - RNA, 19 nt, Artificial Sequence
  Description of Artificial Sequence: Synthetic oligonucleotide
ggcauuuaaaccaucccca

SEQ ID NO: 2270792 - RNA, 19 nt, Artificial Sequence
  Description of Artificial Sequence: Synthetic oligonucleotide
gguucgauugccuucauau

SEQ ID NO: 2270793 - RNA, 19 nt, Artificial Sequence
  Description of Artificial Sequence: Synthetic oligonucleotide
gguguccaagccuuccagg

SEQ ID NO: 2270794 - RNA, 19 nt, Artificial Sequence
  Description of Artificial Sequence: Synthetic oligonucleotide
gaucaacuuguuugaugca

SEQ ID NO: 2270795 - RNA, 19 nt, Artificial Sequence
  Description of Artificial Sequence: Synthetic oligonucleotide
uuggguuugggaagaucau

SEQ ID NO: 2270796 - RNA, 19 nt, Artificial Sequence
  Description of Artificial Sequence: Synthetic oligonucleotide
guugucgcaccauuuaagu

SEQ ID NO: 2270797 - RNA, 19 nt, Artificial Sequence
  Description of Artificial Sequence: Synthetic oligonucleotide
uugucgcaccauuuaagua

SEQ ID NO: 2270798 - RNA, 19 nt, Artificial Sequence
  Description of Artificial Sequence: Synthetic oligonucleotide
gcaaauacaacaauggcau

SEQ ID NO: 2270799 - RNA, 19 nt, Artificial Sequence
  Description of Artificial Sequence: Synthetic oligonucleotide
acuucuaaugagccagguu

SEQ ID NO: 2270800 - RNA, 19 nt, Artificial Sequence
  Description of Artificial Sequence: Synthetic oligonucleotide
ugucuggagccauuaguuu

SEQ ID NO: 2270801 - RNA, 19 nt, Artificial Sequence
  Description of Artificial Sequence: Synthetic oligonucleotide
caccauuuaaguaaaugau

SEQ ID NO: 2270802 - RNA, 19 nt, Artificial Sequence
  Description of Artificial Sequence: Synthetic oligonucleotide
aucgucuaucaaucugcug

SEQ ID NO: 2270803 - RNA, 19 nt, Artificial Sequence
  Description of Artificial Sequence: Synthetic oligonucleotide
auggguggacaaugauuag

SEQ ID NO: 2270804 - RNA, 19 nt, Artificial Sequence
  Description of Artificial Sequence: Synthetic oligonucleotide
uucucugauggggugucca

SEQ ID NO: 2270805 - RNA, 19 nt, Artificial Sequence
  Description of Artificial Sequence: Synthetic oligonucleotide
gaguugucgcaccauuuaa

SEQ ID NO: 2270806 - RNA, 19 nt, Artificial Sequence
  Description of Artificial Sequence: Synthetic oligonucleotide
cuuacgcacuuuauuucca

SEQ ID NO: 2270807 - RNA, 19 nt, Artificial Sequence
  Description of Artificial Sequence: Synthetic oligonucleotide
guucgauugccuucauauc

SEQ ID NO: 2270808 - RNA, 19 nt, Artificial Sequence
  Description of Artificial Sequence: Synthetic oligonucleotide
ucccagacugggcauuuuc

SEQ ID NO: 2270809 - RNA, 19 nt, Artificial Sequence
  Description of Artificial Sequence: Synthetic oligonucleotide
gguagcaucuccucagcca

SEQ ID NO: 2270810 - RNA, 19 nt, Artificial Sequence
  Description of Artificial Sequence: Synthetic oligonucleotide
caauccugaacaugcgcca

SEQ ID NO: 2270811 - RNA, 19 nt, Artificial Sequence
  Description of Artificial Sequence: Synthetic oligonucleotide
guauaucugcuucaauacu

SEQ ID NO: 2270812 - RNA, 19 nt, Artificial Sequence
  Description of Artificial Sequence: Synthetic oligonucleotide
ccacucaaauucaucacug

SEQ ID NO: 2270813 - RNA, 19 nt, Artificial Sequence
  Description of Artificial Sequence: Synthetic oligonucleotide
caaaucauccgaccacaca

SEQ ID NO: 2270814 - RNA, 19 nt, Artificial Sequence
  Description of Artificial Sequence: Synthetic oligonucleotide
agcuccgcgaguucugcca

SEQ ID NO: 2270815 - RNA, 19 nt, Artificial Sequence
  Description of Artificial Sequence: Synthetic oligonucleotide
ucgaguugucgcaccauuu

SEQ ID NO: 2270816 - RNA, 19 nt, Artificial Sequence
  Description of Artificial Sequence: Synthetic oligonucleotide
gccaacauacuccauggga

SEQ ID NO: 2270817 - RNA, 19 nt, Artificial Sequence
  Description of Artificial Sequence: Synthetic oligonucleotide
agagauuguccaucagaua

SEQ ID NO: 2270818 - RNA, 19 nt, Artificial Sequence
  Description of Artificial Sequence: Synthetic oligonucleotide
uccuucgaguugucgcacc

SEQ ID NO: 2270819 - RNA, 19 nt, Artificial Sequence
  Description of Artificial Sequence: Synthetic oligonucleotide
caagauggguggacaauga

SEQ ID NO: 2270820 - RNA, 19 nt, Artificial Sequence
  Description of Artificial Sequence: Synthetic oligonucleotide
cuggaccaguuacaucuag

SEQ ID NO: 2270821 - RNA, 19 nt, Artificial Sequence
  Description of Artificial Sequence: Synthetic oligonucleotide
aucauguaguucucugcua

SEQ ID NO: 2270822 - RNA, 19 nt, Artificial Sequence
  Description of Artificial Sequence: Synthetic oligonucleotide
auacaacaauggcauuuaa

SEQ ID NO: 2270823 - RNA, 19 nt, Artificial Sequence
  Description of Artificial Sequence: Synthetic oligonucleotide
acaauggcauuuaaaccau

SEQ ID NO: 2270824 - RNA, 19 nt, Artificial Sequence
  Description of Artificial Sequence: Synthetic oligonucleotide
augucuggagccauuaguu

SEQ ID NO: 2270825 - RNA, 19 nt, Artificial Sequence
  Description of Artificial Sequence: Synthetic oligonucleotide
aacaugcgccagcggcguc

SEQ ID NO: 2270826 - RNA, 19 nt, Artificial Sequence
  Description of Artificial Sequence: Synthetic oligonucleotide
gcucuaaagugccaauaac

SEQ ID NO: 2270827 - RNA, 19 nt, Artificial Sequence
  Description of Artificial Sequence: Synthetic oligonucleotide
uuuuggguuugggaagauc

SEQ ID NO: 2270828 - RNA, 19 nt, Artificial Sequence
  Description of Artificial Sequence: Synthetic oligonucleotide
cugguagcaucuccucagc

SEQ ID NO: 2270829 - RNA, 19 nt, Artificial Sequence
  Description of Artificial Sequence: Synthetic oligonucleotide
ggcugucuggaccaguuac

SEQ ID NO: 2270830 - RNA, 19 nt, Artificial Sequence
  Description of Artificial Sequence: Synthetic oligonucleotide
cauacuccaugggaacaag

SEQ ID NO: 2270831 - RNA, 19 nt, Artificial Sequence
  Description of Artificial Sequence: Synthetic oligonucleotide
auaaaccaagaugggugga

SEQ ID NO: 2270832 - RNA, 19 nt, Artificial Sequence
  Description of Artificial Sequence: Synthetic oligonucleotide
acagcucuaaagugccaau

SEQ ID NO: 2270833 - RNA, 19 nt, Artificial Sequence
  Description of Artificial Sequence: Synthetic oligonucleotide
auauccuccauggcuaaua

SEQ ID NO: 2270834 - RNA, 19 nt, Artificial Sequence
  Description of Artificial Sequence: Synthetic oligonucleotide
uguucucugaugggguguc

SEQ ID NO: 2270835 - RNA, 19 nt, Artificial Sequence
  Description of Artificial Sequence: Synthetic oligonucleotide
acucugguaugccaacaua

SEQ ID NO: 2270836 - RNA, 19 nt, Artificial Sequence
  Description of Artificial Sequence: Synthetic oligonucleotide
auuagagacuucagguuuu

SEQ ID NO: 2270837 - RNA, 19 nt, Artificial Sequence
  Description of Artificial Sequence: Synthetic oligonucleotide
uaucuauaguuaggcugac

SEQ ID NO: 2270838 - RNA, 19 nt, Artificial Sequence
  Description of Artificial Sequence: Synthetic oligonucleotide
caguaguuuuggguuuggg

SEQ ID NO: 2270839 - RNA, 19 nt, Artificial Sequence
  Description of Artificial Sequence: Synthetic oligonucleotide
aauauccuccauggcuaau

SEQ ID NO: 2270840 - RNA, 19 nt, Artificial Sequence
  Description of Artificial Sequence: Synthetic oligonucleotide
uacgcacuuuauuuccauu

SEQ ID NO: 2270841 - RNA, 19 nt, Artificial Sequence
  Description of Artificial Sequence: Synthetic oligonucleotide
ccaacauacuccaugggaa

SEQ ID NO: 2270842 - RNA, 19 nt, Artificial Sequence
  Description of Artificial Sequence: Synthetic oligonucleotide
ggaccaguuacaucuagua

SEQ ID NO: 2270843 - RNA, 19 nt, Artificial Sequence
  Description of Artificial Sequence: Synthetic oligonucleotide
uaggauccagggucaggcu

SEQ ID NO: 2270844 - RNA, 19 nt, Artificial Sequence
  Description of Artificial Sequence: Synthetic oligonucleotide
gccauuaguuucuuacgca

SEQ ID NO: 2270845 - RNA, 19 nt, Artificial Sequence
  Description of Artificial Sequence: Synthetic oligonucleotide
aaagugccaauaacauauu

SEQ ID NO: 2270846 - RNA, 19 nt, Artificial Sequence
  Description of Artificial Sequence: Synthetic oligonucleotide
cauuaguuucuuacgcacu

SEQ ID NO: 2270847 - RNA, 19 nt, Artificial Sequence
  Description of Artificial Sequence: Synthetic oligonucleotide
gccaaauuaaagacguauc

SEQ ID NO: 2270848 - RNA, 19 nt, Artificial Sequence
  Description of Artificial Sequence: Synthetic oligonucleotide
gaccaguuacaucuaguau

SEQ ID NO: 2270849 - RNA, 19 nt, Artificial Sequence
  Description of Artificial Sequence: Synthetic oligonucleotide
ucuccaccuucauccaaau

SEQ ID NO: 2270850 - RNA, 19 nt, Artificial Sequence
  Description of Artificial Sequence: Synthetic oligonucleotide
ccccauaauauccuccaug

SEQ ID NO: 2270851 - RNA, 19 nt, Artificial Sequence
  Description of Artificial Sequence: Synthetic oligonucleotide
auaguuaggcugaccacuu

SEQ ID NO: 2270852 - RNA, 19 nt, Artificial Sequence
  Description of Artificial Sequence: Synthetic oligonucleotide
uccgaccacacagagucuu

SEQ ID NO: 2270853 - RNA, 19 nt, Artificial Sequence
  Description of Artificial Sequence: Synthetic oligonucleotide
uccccauaauauccuccau

SEQ ID NO: 2270854 - RNA, 19 nt, Artificial Sequence
  Description of Artificial Sequence: Synthetic oligonucleotide
ccauaauauccuccauggc

SEQ ID NO: 2270855 - RNA, 19 nt, Artificial Sequence
  Description of Artificial Sequence: Synthetic oligonucleotide
caagcuccgcgaguucugc

SEQ ID NO: 2270856 - RNA, 19 nt, Artificial Sequence
  Description of Artificial Sequence: Synthetic oligonucleotide
aggucaaccucuccaccuu

SEQ ID NO: 2270857 - RNA, 19 nt, Artificial Sequence
  Description of Artificial Sequence: Synthetic oligonucleotide
uaguuaggcugaccacuuu

SEQ ID NO: 2270858 - RNA, 19 nt, Artificial Sequence
  Description of Artificial Sequence: Synthetic oligonucleotide
gguauuggaaaaucuucau

SEQ ID NO: 2270859 - RNA, 19 nt, Artificial Sequence
  Description of Artificial Sequence: Synthetic oligonucleotide
guuuggugguucuuguuuu

SEQ ID NO: 2270860 - RNA, 19 nt, Artificial Sequence
  Description of Artificial Sequence: Synthetic oligonucleotide
gagccagguuggcugucug

SEQ ID NO: 2270861 - RNA, 19 nt, Artificial Sequence
  Description of Artificial Sequence: Synthetic oligonucleotide
accaagauggguggacaau

SEQ ID NO: 2270862 - RNA, 19 nt, Artificial Sequence
  Description of Artificial Sequence: Synthetic oligonucleotide
accucuccaccuucaucca

SEQ ID NO: 2270863 - RNA, 19 nt, Artificial Sequence
  Description of Artificial Sequence: Synthetic oligonucleotide
ugcuaccaacagcucuaaa

SEQ ID NO: 2270864 - RNA, 19 nt, Artificial Sequence
  Description of Artificial Sequence: Synthetic oligonucleotide
agggucaggcugaugucug

SEQ ID NO: 2270865 - RNA, 19 nt, Artificial Sequence
  Description of Artificial Sequence: Synthetic oligonucleotide
cucugcuaccaacagcucu

SEQ ID NO: 2270866 - RNA, 19 nt, Artificial Sequence
  Description of Artificial Sequence: Synthetic oligonucleotide
ugaccacuuucaggcauaa

SEQ ID NO: 2270867 - RNA, 19 nt, Artificial Sequence
  Description of Artificial Sequence: Synthetic oligonucleotide
ccaucagauaucuauaguu

SEQ ID NO: 2270868 - RNA, 19 nt, Artificial Sequence
  Description of Artificial Sequence: Synthetic oligonucleotide
uccgcgaguucugccaaau

SEQ ID NO: 2270869 - RNA, 19 nt, Artificial Sequence
  Description of Artificial Sequence: Synthetic oligonucleotide
gucgcaccauuuaaguaaa

SEQ ID NO: 2270870 - RNA, 19 nt, Artificial Sequence
  Description of Artificial Sequence: Synthetic oligonucleotide
ccaaaucauccgaccacac

SEQ ID NO: 2270871 - RNA, 19 nt, Artificial Sequence
  Description of Artificial Sequence: Synthetic oligonucleotide
uggcugucuggaccaguua

SEQ ID NO: 2270872 - RNA, 19 nt, Artificial Sequence
  Description of Artificial Sequence: Synthetic oligonucleotide
cuucacuaggauccagggu

SEQ ID NO: 2270873 - RNA, 19 nt, Artificial Sequence
  Description of Artificial Sequence: Synthetic oligonucleotide
guguucggauaaaccaaga

SEQ ID NO: 2270874 - RNA, 19 nt, Artificial Sequence
  Description of Artificial Sequence: Synthetic oligonucleotide
cagcuaaaaguguucggau

SEQ ID NO: 2270875 - RNA, 19 nt, Artificial Sequence
  Description of Artificial Sequence: Synthetic oligonucleotide
cugaccacuuucaggcaua

SEQ ID NO: 2270876 - RNA, 19 nt, Artificial Sequence
  Description of Artificial Sequence: Synthetic oligonucleotide
ucgcaccauuuaaguaaau

SEQ ID NO: 2270877 - RNA, 19 nt, Artificial Sequence
  Description of Artificial Sequence: Synthetic oligonucleotide
cuucaguaguuuuggguuu

SEQ ID NO: 2270878 - RNA, 19 nt, Artificial Sequence
  Description of Artificial Sequence: Synthetic oligonucleotide
gguaaagguauuggaaaau

SEQ ID NO: 2270879 - RNA, 19 nt, Artificial Sequence
  Description of Artificial Sequence: Synthetic oligonucleotide
cuaaugagccagguuggcu

SEQ ID NO: 2270880 - RNA, 19 nt, Artificial Sequence
  Description of Artificial Sequence: Synthetic oligonucleotide
cacuaggauccagggucag

SEQ ID NO: 2270881 - RNA, 19 nt, Artificial Sequence
  Description of Artificial Sequence: Synthetic oligonucleotide
ccaguuacaucuaguauau

SEQ ID NO: 2270882 - RNA, 19 nt, Artificial Sequence
  Description of Artificial Sequence: Synthetic oligonucleotide
gcgccagcggcguccaucc

SEQ ID NO: 2270883 - RNA, 19 nt, Artificial Sequence
  Description of Artificial Sequence: Synthetic oligonucleotide
ccuucauauccacccugug

SEQ ID NO: 2270884 - RNA, 19 nt, Artificial Sequence
  Description of Artificial Sequence: Synthetic oligonucleotide
gaacaugcgccagcggcgu

SEQ ID NO: 2270885 - RNA, 19 nt, Artificial Sequence
  Description of Artificial Sequence: Synthetic oligonucleotide
cuaguauaucugcuucaau

SEQ ID NO: 2270886 - RNA, 19 nt, Artificial Sequence
  Description of Artificial Sequence: Synthetic oligonucleotide
cugaugucuggagccauua

SEQ ID NO: 2270887 - RNA, 19 nt, Artificial Sequence
  Description of Artificial Sequence: Synthetic oligonucleotide
ccugaacaugcgccagcgg

SEQ ID NO: 2270888 - RNA, 19 nt, Artificial Sequence
  Description of Artificial Sequence: Synthetic oligonucleotide
cagcucuaaagugccaaua

SEQ ID NO: 2270889 - RNA, 19 nt, Artificial Sequence
  Description of Artificial Sequence: Synthetic oligonucleotide
ggaacaagcuccgcgaguu

SEQ ID NO: 2270890 - RNA, 19 nt, Artificial Sequence
  Description of Artificial Sequence: Synthetic oligonucleotide
auucaguaacugagucuuu

SEQ ID NO: 2270891 - RNA, 19 nt, Artificial Sequence
  Description of Artificial Sequence: Synthetic oligonucleotide
agcggcguccauccuccuu

SEQ ID NO: 2270892 - RNA, 19 nt, Artificial Sequence
  Description of Artificial Sequence: Synthetic oligonucleotide
caaauacaacaauggcauu

SEQ ID NO: 2270893 - RNA, 19 nt, Artificial Sequence
  Description of Artificial Sequence: Synthetic oligonucleotide
cugccaaauuaaagacgua

SEQ ID NO: 2270894 - RNA, 19 nt, Artificial Sequence
  Description of Artificial Sequence: Synthetic oligonucleotide
guucuccaauccugaacau

SEQ ID NO: 2270895 - RNA, 19 nt, Artificial Sequence
  Description of Artificial Sequence: Synthetic oligonucleotide
cuugaucaacuuguuugau

SEQ ID NO: 2270896 - RNA, 19 nt, Artificial Sequence
  Description of Artificial Sequence: Synthetic oligonucleotide
ccugugguccuguucucca

SEQ ID NO: 2270897 - RNA, 19 nt, Artificial Sequence
  Description of Artificial Sequence: Synthetic oligonucleotide
gccagcggcguccauccuc

SEQ ID NO: 2270898 - RNA, 19 nt, Artificial Sequence
  Description of Artificial Sequence: Synthetic oligonucleotide
ccuaaugacuucaguaguu

SEQ ID NO: 2270899 - RNA, 19 nt, Artificial Sequence
  Description of Artificial Sequence: Synthetic oligonucleotide
uccacccugugguccuguu

SEQ ID NO: 2270900 - RNA, 19 nt, Artificial Sequence
  Description of Artificial Sequence: Synthetic oligonucleotide
ugcucacuguuuggugguu

SEQ ID NO: 2270901 - RNA, 19 nt, Artificial Sequence
  Description of Artificial Sequence: Synthetic oligonucleotide
auuguccaucagauaucua

SEQ ID NO: 2270902 - RNA, 19 nt, Artificial Sequence
  Description of Artificial Sequence: Synthetic oligonucleotide
ccauuaaguucuugaucaa

SEQ ID NO: 2270903 - RNA, 19 nt, Artificial Sequence
  Description of Artificial Sequence: Synthetic oligonucleotide
gcugaccacuuucaggcau

SEQ ID NO: 2270904 - RNA, 19 nt, Artificial Sequence
  Description of Artificial Sequence: Synthetic oligonucleotide
cgauugccuucauauccac

SEQ ID NO: 2270905 - RNA, 19 nt, Artificial Sequence
  Description of Artificial Sequence: Synthetic oligonucleotide
cgcgaguucugccaaauua

SEQ ID NO: 2270906 - RNA, 19 nt, Artificial Sequence
  Description of Artificial Sequence: Synthetic oligonucleotide
aggguucgauugccuucau

SEQ ID NO: 2270907 - RNA, 19 nt, Artificial Sequence
  Description of Artificial Sequence: Synthetic oligonucleotide
ccuucgaguugucgcacca

SEQ ID NO: 2270908 - RNA, 19 nt, Artificial Sequence
  Description of Artificial Sequence: Synthetic oligonucleotide
cgaguucugccaaauuaaa

SEQ ID NO: 2270909 - RNA, 19 nt, Artificial Sequence
  Description of Artificial Sequence: Synthetic oligonucleotide
gggaacaagcuccgcgagu

SEQ ID NO: 2270910 - RNA, 19 nt, Artificial Sequence
  Description of Artificial Sequence: Synthetic oligonucleotide
auccgaccacacagagucu

SEQ ID NO: 2270911 - RNA, 19 nt, Artificial Sequence
  Description of Artificial Sequence: Synthetic oligonucleotide
cguaucuaauuuucugacu

SEQ ID NO: 2270912 - RNA, 19 nt, Artificial Sequence
  Description of Artificial Sequence: Synthetic oligonucleotide
cgcacuuuauuuccauuaa

SEQ ID NO: 2270913 - RNA, 19 nt, Artificial Sequence
  Description of Artificial Sequence: Synthetic oligonucleotide
ccgaccacacagagucuuc

SEQ ID NO: 2270914 - RNA, 19 nt, Artificial Sequence
  Description of Artificial Sequence: Synthetic oligonucleotide
gaccacuuucaggcauaaa

SEQ ID NO: 2270915 - RNA, 19 nt, Artificial Sequence
  Description of Artificial Sequence: Synthetic oligonucleotide
cugcuaccaacagcucuaa

SEQ ID NO: 2270916 - RNA, 19 nt, Artificial Sequence
  Description of Artificial Sequence: Synthetic oligonucleotide
cgaguugucgcaccauuua

SEQ ID NO: 2270917 - RNA, 19 nt, Artificial Sequence
  Description of Artificial Sequence: Synthetic oligonucleotide
ggguucgauugccuucaua

SEQ ID NO: 2270918 - RNA, 19 nt, Artificial Sequence
  Description of Artificial Sequence: Synthetic oligonucleotide
caugcgccagcggcgucca

SEQ ID NO: 2270919 - RNA, 19 nt, Artificial Sequence
  Description of Artificial Sequence: Synthetic oligonucleotide
ccacccugugguccuguuc

SEQ ID NO: 2270920 - RNA, 19 nt, Artificial Sequence
  Description of Artificial Sequence: Synthetic oligonucleotide
cguaaucgucuaucaaucu

SEQ ID NO: 2270921 - RNA, 19 nt, Artificial Sequence
  Description of Artificial Sequence: Synthetic oligonucleotide
gcuccgcgaguucugccaa

SEQ ID NO: 2270922 - RNA, 19 nt, Artificial Sequence
  Description of Artificial Sequence: Synthetic oligonucleotide
ccaugggaacaagcuccgc

SEQ ID NO: 2270923 - RNA, 19 nt, Artificial Sequence
  Description of Artificial Sequence: Synthetic oligonucleotide
cuccgcgaguucugccaaa

SEQ ID NO: 2270924 - RNA, 19 nt, Artificial Sequence
  Description of Artificial Sequence: Synthetic oligonucleotide
aucccagacugggcauuuu

SEQ ID NO: 2270925 - RNA, 19 nt, Artificial Sequence
  Description of Artificial Sequence: Synthetic oligonucleotide
gcggcguccauccuccuuu

SEQ ID NO: 2270926 - RNA, 19 nt, Artificial Sequence
  Description of Artificial Sequence: Synthetic oligonucleotide
guuuuggguuugggaagau

SEQ ID NO: 2270927 - RNA, 19 nt, Artificial Sequence
  Description of Artificial Sequence: Synthetic oligonucleotide
cgucuaucaaucugcuggu

SEQ ID NO: 2270928 - RNA, 19 nt, Artificial Sequence
  Description of Artificial Sequence: Synthetic oligonucleotide
cggauaaaccaagaugggu

SEQ ID NO: 2270929 - RNA, 19 nt, Artificial Sequence
  Description of Artificial Sequence: Synthetic oligonucleotide
cuucgaguugucgcaccau

SEQ ID NO: 2270930 - RNA, 19 nt, Artificial Sequence
  Description of Artificial Sequence: Synthetic oligonucleotide
guaugccaacauacuccau

SEQ ID NO: 2270931 - RNA, 19 nt, Artificial Sequence
  Description of Artificial Sequence: Synthetic oligonucleotide
cuggagccauuaguuucuu

SEQ ID NO: 2270932 - RNA, 19 nt, Artificial Sequence
  Description of Artificial Sequence: Synthetic oligonucleotide
ccaucccagacugggcauu

SEQ ID NO: 2270933 - RNA, 19 nt, Artificial Sequence
  Description of Artificial Sequence: Synthetic oligonucleotide
ccgcgaguucugccaaauu

SEQ ID NO: 2270934 - RNA, 19 nt, Artificial Sequence
  Description of Artificial Sequence: Synthetic oligonucleotide
cgccagcggcguccauccu

SEQ ID NO: 2270935 - RNA, 19 nt, Artificial Sequence
  Description of Artificial Sequence: Synthetic oligonucleotide
gaaagcauuaauuagagcc

SEQ ID NO: 2270936 - RNA, 19 nt, Artificial Sequence
  Description of Artificial Sequence: Synthetic oligonucleotide
aaaacuuaaaaccagguau

SEQ ID NO: 2270937 - RNA, 19 nt, Artificial Sequence
  Description of Artificial Sequence: Synthetic oligonucleotide
cuuaacauucacuagaagg

SEQ ID NO: 2270938 - RNA, 19 nt, Artificial Sequence
  Description of Artificial Sequence: Synthetic oligonucleotide
aagaauuaggaucaccaac

SEQ ID NO: 2270939 - RNA, 19 nt, Artificial Sequence
  Description of Artificial Sequence: Synthetic oligonucleotide
uauuuuaugauacaaucac

SEQ ID NO: 2270940 - RNA, 19 nt, Artificial Sequence
  Description of Artificial Sequence: Synthetic oligonucleotide
uuaacauucacuagaagga

SEQ ID NO: 2270941 - RNA, 19 nt, Artificial Sequence
  Description of Artificial Sequence: Synthetic oligonucleotide
uguaaugucaucucuauac

SEQ ID NO: 2270942 - RNA, 19 nt, Artificial Sequence
  Description of Artificial Sequence: Synthetic oligonucleotide
aaugcgagcaaguucuucg

SEQ ID NO: 2270943 - RNA, 19 nt, Artificial Sequence
  Description of Artificial Sequence: Synthetic oligonucleotide
aagucuuuaauucacugug

SEQ ID NO: 2270944 - RNA, 19 nt, Artificial Sequence
  Description of Artificial Sequence: Synthetic oligonucleotide
acuaucaccaguguuagcc

SEQ ID NO: 2270945 - RNA, 19 nt, Artificial Sequence
  Description of Artificial Sequence: Synthetic oligonucleotide
aaaccagguaucuugguuc

SEQ ID NO: 2270946 - RNA, 19 nt, Artificial Sequence
  Description of Artificial Sequence: Synthetic oligonucleotide
aacaccaucuacaugggcc

SEQ ID NO: 2270947 - RNA, 19 nt, Artificial Sequence
  Description of Artificial Sequence: Synthetic oligonucleotide
auugaacugaacuacaaug

SEQ ID NO: 2270948 - RNA, 19 nt, Artificial Sequence
  Description of Artificial Sequence: Synthetic oligonucleotide
uuuuaugauacaaucacaa

SEQ ID NO: 2270949 - RNA, 19 nt, Artificial Sequence
  Description of Artificial Sequence: Synthetic oligonucleotide
uuaucaagucucuugaaag

SEQ ID NO: 2270950 - RNA, 19 nt, Artificial Sequence
  Description of Artificial Sequence: Synthetic oligonucleotide
aauguuugugaccuacaac

SEQ ID NO: 2270951 - RNA, 19 nt, Artificial Sequence
  Description of Artificial Sequence: Synthetic oligonucleotide
uuugugaccuacaacauga

SEQ ID NO: 2270952 - RNA, 19 nt, Artificial Sequence
  Description of Artificial Sequence: Synthetic oligonucleotide
gacuaagcauuuuagagag

SEQ ID NO: 2270953 - RNA, 19 nt, Artificial Sequence
  Description of Artificial Sequence: Synthetic oligonucleotide
aaccaagugucauaccacc

SEQ ID NO: 2270954 - RNA, 19 nt, Artificial Sequence
  Description of Artificial Sequence: Synthetic oligonucleotide
aaugauuguaaugucaucu

SEQ ID NO: 2270955 - RNA, 19 nt, Artificial Sequence
  Description of Artificial Sequence: Synthetic oligonucleotide
cuuaaaaccagguaucuug

SEQ ID NO: 2270956 - RNA, 19 nt, Artificial Sequence
  Description of Artificial Sequence: Synthetic oligonucleotide
uuuaaguguagcaaaacaa

SEQ ID NO: 2270957 - RNA, 19 nt, Artificial Sequence
  Description of Artificial Sequence: Synthetic oligonucleotide
auguuugugaccuacaaca

SEQ ID NO: 2270958 - RNA, 19 nt, Artificial Sequence
  Description of Artificial Sequence: Synthetic oligonucleotide
uacaaugcgagcaaguucu

SEQ ID NO: 2270959 - RNA, 19 nt, Artificial Sequence
  Description of Artificial Sequence: Synthetic oligonucleotide
uuuuaaguguagcaaaaca

SEQ ID NO: 2270960 - RNA, 19 nt, Artificial Sequence
  Description of Artificial Sequence: Synthetic oligonucleotide
aaaagaauuaggaucacca

SEQ ID NO: 2270961 - RNA, 19 nt, Artificial Sequence
  Description of Artificial Sequence: Synthetic oligonucleotide
ugaacuacaaugauuguaa

SEQ ID NO: 2270962 - RNA, 19 nt, Artificial Sequence
  Description of Artificial Sequence: Synthetic oligonucleotide
aaugaaaugucauuaucaa

SEQ ID NO: 2270963 - RNA, 19 nt, Artificial Sequence
  Description of Artificial Sequence: Synthetic oligonucleotide
uaacugcugaccaagaccc

SEQ ID NO: 2270964 - RNA, 19 nt, Artificial Sequence
  Description of Artificial Sequence: Synthetic oligonucleotide
ucuugaaagcauuaauuag

SEQ ID NO: 2270965 - RNA, 19 nt, Artificial Sequence
  Description of Artificial Sequence: Synthetic oligonucleotide
aggucuauaagcucuugcc

SEQ ID NO: 2270966 - RNA, 19 nt, Artificial Sequence
  Description of Artificial Sequence: Synthetic oligonucleotide
aauuagagccuccuuaaca

SEQ ID NO: 2270967 - RNA, 19 nt, Artificial Sequence
  Description of Artificial Sequence: Synthetic oligonucleotide
uacaacaugagaauugaac

SEQ ID NO: 2270968 - RNA, 19 nt, Artificial Sequence
  Description of Artificial Sequence: Synthetic oligonucleotide
gaaaucaugggugaggaag

SEQ ID NO: 2270969 - RNA, 19 nt, Artificial Sequence
  Description of Artificial Sequence: Synthetic oligonucleotide
aauaaaucuuuucaugaau

SEQ ID NO: 2270970 - RNA, 19 nt, Artificial Sequence
  Description of Artificial Sequence: Synthetic oligonucleotide
acaacaugagaauugaacu

SEQ ID NO: 2270971 - RNA, 19 nt, Artificial Sequence
  Description of Artificial Sequence: Synthetic oligonucleotide
auucucuaaccauagacag

SEQ ID NO: 2270972 - RNA, 19 nt, Artificial Sequence
  Description of Artificial Sequence: Synthetic oligonucleotide
augagaauugaacugaacu

SEQ ID NO: 2270973 - RNA, 19 nt, Artificial Sequence
  Description of Artificial Sequence: Synthetic oligonucleotide
uagaaggauaaauaaaacu

SEQ ID NO: 2270974 - RNA, 19 nt, Artificial Sequence
  Description of Artificial Sequence: Synthetic oligonucleotide
uucauggucauuuauggcu

SEQ ID NO: 2270975 - RNA, 19 nt, Artificial Sequence
  Description of Artificial Sequence: Synthetic oligonucleotide
uuuacuuaacauucacuag

SEQ ID NO: 2270976 - RNA, 19 nt, Artificial Sequence
  Description of Artificial Sequence: Synthetic oligonucleotide
aaguguagcaaaacaaaac

SEQ ID NO: 2270977 - RNA, 19 nt, Artificial Sequence
  Description of Artificial Sequence: Synthetic oligonucleotide
aucuacaugggccacacag

SEQ ID NO: 2270978 - RNA, 19 nt, Artificial Sequence
  Description of Artificial Sequence: Synthetic oligonucleotide
ucuacuaucaccaguguua

SEQ ID NO: 2270979 - RNA, 19 nt, Artificial Sequence
  Description of Artificial Sequence: Synthetic oligonucleotide
cuuaacaucaauaucagcu

SEQ ID NO: 2270980 - RNA, 19 nt, Artificial Sequence
  Description of Artificial Sequence: Synthetic oligonucleotide
auucuggguaucuuuauuc

SEQ ID NO: 2270981 - RNA, 19 nt, Artificial Sequence
  Description of Artificial Sequence: Synthetic oligonucleotide
aacuacaaugauuguaaug

SEQ ID NO: 2270982 - RNA, 19 nt, Artificial Sequence
  Description of Artificial Sequence: Synthetic oligonucleotide
accaguguuagccacgugg

SEQ ID NO: 2270983 - RNA, 19 nt, Artificial Sequence
  Description of Artificial Sequence: Synthetic oligonucleotide
uaauugagaaaagaauuag

SEQ ID NO: 2270984 - RNA, 19 nt, Artificial Sequence
  Description of Artificial Sequence: Synthetic oligonucleotide
agacccaucuucuucuugc

SEQ ID NO: 2270985 - RNA, 19 nt, Artificial Sequence
  Description of Artificial Sequence: Synthetic oligonucleotide
agcaaaacaaaacuucuca

SEQ ID NO: 2270986 - RNA, 19 nt, Artificial Sequence
  Description of Artificial Sequence: Synthetic oligonucleotide
uucaugaauacaaacugaa

SEQ ID NO: 2270987 - RNA, 19 nt, Artificial Sequence
  Description of Artificial Sequence: Synthetic oligonucleotide
cuccuuaacaucaauauca

SEQ ID NO: 2270988 - RNA, 19 nt, Artificial Sequence
  Description of Artificial Sequence: Synthetic oligonucleotide
agugucauaccaccauucc

SEQ ID NO: 2270989 - RNA, 19 nt, Artificial Sequence
  Description of Artificial Sequence: Synthetic oligonucleotide
cauuguggucauuagaaag

SEQ ID NO: 2270990 - RNA, 19 nt, Artificial Sequence
  Description of Artificial Sequence: Synthetic oligonucleotide
uucacuagaaggauaaaua

SEQ ID NO: 2270991 - RNA, 19 nt, Artificial Sequence
  Description of Artificial Sequence: Synthetic oligonucleotide
aauuaggaucaccaacuug

SEQ ID NO: 2270992 - RNA, 19 nt, Artificial Sequence
  Description of Artificial Sequence: Synthetic oligonucleotide
uauggcuuaaaguacugga

SEQ ID NO: 2270993 - RNA, 19 nt, Artificial Sequence
  Description of Artificial Sequence: Synthetic oligonucleotide
aaagcguaacugcugacca

SEQ ID NO: 2270994 - RNA, 19 nt, Artificial Sequence
  Description of Artificial Sequence: Synthetic oligonucleotide
auuaggaucaccaacuuga

SEQ ID NO: 2270995 - RNA, 19 nt, Artificial Sequence
  Description of Artificial Sequence: Synthetic oligonucleotide
uuucagacguucuaguucu

SEQ ID NO: 2270996 - RNA, 19 nt, Artificial Sequence
  Description of Artificial Sequence: Synthetic oligonucleotide
auuaauuagagccuccuua

SEQ ID NO: 2270997 - RNA, 19 nt, Artificial Sequence
  Description of Artificial Sequence: Synthetic oligonucleotide
ucuugcacaccaagcaugg

SEQ ID NO: 2270998 - RNA, 19 nt, Artificial Sequence
  Description of Artificial Sequence: Synthetic oligonucleotide
auugagaaaagaauuagga

SEQ ID NO: 2270999 - RNA, 19 nt, Artificial Sequence
  Description of Artificial Sequence: Synthetic oligonucleotide
cuugaaagcauuaauuaga

SEQ ID NO: 2271000 - RNA, 19 nt, Artificial Sequence
  Description of Artificial Sequence: Synthetic oligonucleotide
uggcuuaaaguacuggacc

SEQ ID NO: 2271001 - RNA, 19 nt, Artificial Sequence
  Description of Artificial Sequence: Synthetic oligonucleotide
aacaugagaauugaacuga

SEQ ID NO: 2271002 - RNA, 19 nt, Artificial Sequence
  Description of Artificial Sequence: Synthetic oligonucleotide
cuaaccauagacagcauuc

SEQ ID NO: 2271003 - RNA, 19 nt, Artificial Sequence
  Description of Artificial Sequence: Synthetic oligonucleotide
ucuucgggaagacuaagca

SEQ ID NO: 2271004 - RNA, 19 nt, Artificial Sequence
  Description of Artificial Sequence: Synthetic oligonucleotide
uaucaagucucuugaaagc

SEQ ID NO: 2271005 - RNA, 19 nt, Artificial Sequence
  Description of Artificial Sequence: Synthetic oligonucleotide
ugagaauugaacugaacua

SEQ ID NO: 2271006 - RNA, 19 nt, Artificial Sequence
  Description of Artificial Sequence: Synthetic oligonucleotide
uuaauuagagccuccuuaa

SEQ ID NO: 2271007 - RNA, 19 nt, Artificial Sequence
  Description of Artificial Sequence: Synthetic oligonucleotide
ugggaagaauauuuuauga

SEQ ID NO: 2271008 - RNA, 19 nt, Artificial Sequence
  Description of Artificial Sequence: Synthetic oligonucleotide
uaaguguagcaaaacaaaa

SEQ ID NO: 2271009 - RNA, 19 nt, Artificial Sequence
  Description of Artificial Sequence: Synthetic oligonucleotide
uuagaaagcguaacugcug

SEQ ID NO: 2271010 - RNA, 19 nt, Artificial Sequence
  Description of Artificial Sequence: Synthetic oligonucleotide
ucuacaugggccacacagg

SEQ ID NO: 2271011 - RNA, 19 nt, Artificial Sequence
  Description of Artificial Sequence: Synthetic oligonucleotide
agacuaagcauuuuagaga

SEQ ID NO: 2271012 - RNA, 19 nt, Artificial Sequence
  Description of Artificial Sequence: Synthetic oligonucleotide
cagcacaucuccaaaagcc

SEQ ID NO: 2271013 - RNA, 19 nt, Artificial Sequence
  Description of Artificial Sequence: Synthetic oligonucleotide
gucuuuaauucacuguggg

SEQ ID NO: 2271014 - RNA, 19 nt, Artificial Sequence
  Description of Artificial Sequence: Synthetic oligonucleotide
agaaggauaaauaaaacua

SEQ ID NO: 2271015 - RNA, 19 nt, Artificial Sequence
  Description of Artificial Sequence: Synthetic oligonucleotide
gucauuaucaagucucuug

SEQ ID NO: 2271016 - RNA, 19 nt, Artificial Sequence
  Description of Artificial Sequence: Synthetic oligonucleotide
aaaucaugggugaggaagg

SEQ ID NO: 2271017 - RNA, 19 nt, Artificial Sequence
  Description of Artificial Sequence: Synthetic oligonucleotide
augauuguaaugucaucuc

SEQ ID NO: 2271018 - RNA, 19 nt, Artificial Sequence
  Description of Artificial Sequence: Synthetic oligonucleotide
auacaaugcgagcaaguuc

SEQ ID NO: 2271019 - RNA, 19 nt, Artificial Sequence
  Description of Artificial Sequence: Synthetic oligonucleotide
uccuuaacaucaauaucag

SEQ ID NO: 2271020 - RNA, 19 nt, Artificial Sequence
  Description of Artificial Sequence: Synthetic oligonucleotide
gagaauugaacugaacuac

SEQ ID NO: 2271021 - RNA, 19 nt, Artificial Sequence
  Description of Artificial Sequence: Synthetic oligonucleotide
aaagaauuaggaucaccaa

SEQ ID NO: 2271022 - RNA, 19 nt, Artificial Sequence
  Description of Artificial Sequence: Synthetic oligonucleotide
uguagaauccuaucuggga

SEQ ID NO: 2271023 - RNA, 19 nt, Artificial Sequence
  Description of Artificial Sequence: Synthetic oligonucleotide
ucucuugaaagcauuaauu

SEQ ID NO: 2271024 - RNA, 19 nt, Artificial Sequence
  Description of Artificial Sequence: Synthetic oligonucleotide
caaugaaaugucauuauca

SEQ ID NO: 2271025 - RNA, 19 nt, Artificial Sequence
  Description of Artificial Sequence: Synthetic oligonucleotide
cuuuaauucacugugggca

SEQ ID NO: 2271026 - RNA, 19 nt, Artificial Sequence
  Description of Artificial Sequence: Synthetic oligonucleotide
gucuauaagcucuugccag

SEQ ID NO: 2271027 - RNA, 19 nt, Artificial Sequence
  Description of Artificial Sequence: Synthetic oligonucleotide
aaagcauuaauuagagccu

SEQ ID NO: 2271028 - RNA, 19 nt, Artificial Sequence
  Description of Artificial Sequence: Synthetic oligonucleotide
aaauguuugugaccuacaa

SEQ ID NO: 2271029 - RNA, 19 nt, Artificial Sequence
  Description of Artificial Sequence: Synthetic oligonucleotide
guaacugcugaccaagacc

SEQ ID NO: 2271030 - RNA, 19 nt, Artificial Sequence
  Description of Artificial Sequence: Synthetic oligonucleotide
cuuuacuuaacauucacua

SEQ ID NO: 2271031 - RNA, 19 nt, Artificial Sequence
  Description of Artificial Sequence: Synthetic oligonucleotide
ucucuauacaaugcgagca

SEQ ID NO: 2271032 - RNA, 19 nt, Artificial Sequence
  Description of Artificial Sequence: Synthetic oligonucleotide
uugagaaaagaauuaggau

SEQ ID NO: 2271033 - RNA, 19 nt, Artificial Sequence
  Description of Artificial Sequence: Synthetic oligonucleotide
auuagagccuccuuaacau

SEQ ID NO: 2271034 - RNA, 19 nt, Artificial Sequence
  Description of Artificial Sequence: Synthetic oligonucleotide
uaagcauuuuagagagacg

SEQ ID NO: 2271035 - RNA, 19 nt, Artificial Sequence
  Description of Artificial Sequence: Synthetic oligonucleotide
ucuuuaauucacugugggc

SEQ ID NO: 2271036 - RNA, 19 nt, Artificial Sequence
  Description of Artificial Sequence: Synthetic oligonucleotide
ugucauaccaccauuccuu

SEQ ID NO: 2271037 - RNA, 19 nt, Artificial Sequence
  Description of Artificial Sequence: Synthetic oligonucleotide
auuaucaagucucuugaaa

SEQ ID NO: 2271038 - RNA, 19 nt, Artificial Sequence
  Description of Artificial Sequence: Synthetic oligonucleotide
ugguucauggucauuuaug

SEQ ID NO: 2271039 - RNA, 19 nt, Artificial Sequence
  Description of Artificial Sequence: Synthetic oligonucleotide
auaagcucuugccaguaag

SEQ ID NO: 2271040 - RNA, 19 nt, Artificial Sequence
  Description of Artificial Sequence: Synthetic oligonucleotide
ugauuguaaugucaucucu

SEQ ID NO: 2271041 - RNA, 19 nt, Artificial Sequence
  Description of Artificial Sequence: Synthetic oligonucleotide
aagcauuaauuagagccuc

SEQ ID NO: 2271042 - RNA, 19 nt, Artificial Sequence
  Description of Artificial Sequence: Synthetic oligonucleotide
auagacagcauucaaccaa

SEQ ID NO: 2271043 - RNA, 19 nt, Artificial Sequence
  Description of Artificial Sequence: Synthetic oligonucleotide
agaauuaggaucaccaacu

SEQ ID NO: 2271044 - RNA, 19 nt, Artificial Sequence
  Description of Artificial Sequence: Synthetic oligonucleotide
uucgggaagacuaagcauu

SEQ ID NO: 2271045 - RNA, 19 nt, Artificial Sequence
  Description of Artificial Sequence: Synthetic oligonucleotide
augucaucucuauacaaug

SEQ ID NO: 2271046 - RNA, 19 nt, Artificial Sequence
  Description of Artificial Sequence: Synthetic oligonucleotide
aaaaccagguaucuugguu

SEQ ID NO: 2271047 - RNA, 19 nt, Artificial Sequence
  Description of Artificial Sequence: Synthetic oligonucleotide
ucuuucauucugagcauug

SEQ ID NO: 2271048 - RNA, 19 nt, Artificial Sequence
  Description of Artificial Sequence: Synthetic oligonucleotide
aguguuagccacguggagg

SEQ ID NO: 2271049 - RNA, 19 nt, Artificial Sequence
  Description of Artificial Sequence: Synthetic oligonucleotide
gaaaugucauuaucaaguc

SEQ ID NO: 2271050 - RNA, 19 nt, Artificial Sequence
  Description of Artificial Sequence: Synthetic oligonucleotide
accaagacccaucuucuuc

SEQ ID NO: 2271051 - RNA, 19 nt, Artificial Sequence
  Description of Artificial Sequence: Synthetic oligonucleotide
uuacacugaggaaaucaug

SEQ ID NO: 2271052 - RNA, 19 nt, Artificial Sequence
  Description of Artificial Sequence: Synthetic oligonucleotide
ucaggcuaaaauaaauguu

SEQ ID NO: 2271053 - RNA, 19 nt, Artificial Sequence
  Description of Artificial Sequence: Synthetic oligonucleotide
cagcauucaaccaaguguc

SEQ ID NO: 2271054 - RNA, 19 nt, Artificial Sequence
  Description of Artificial Sequence: Synthetic oligonucleotide
ucauucugagcauuguggu

SEQ ID NO: 2271055 - RNA, 19 nt, Artificial Sequence
  Description of Artificial Sequence: Synthetic oligonucleotide
acuaagaaccuuuauuguu

SEQ ID NO: 2271056 - RNA, 19 nt, Artificial Sequence
  Description of Artificial Sequence: Synthetic oligonucleotide
uagagagacgcucaugauc

SEQ ID NO: 2271057 - RNA, 19 nt, Artificial Sequence
  Description of Artificial Sequence: Synthetic oligonucleotide
ugaacugaacuacaaugau

SEQ ID NO: 2271058 - RNA, 19 nt, Artificial Sequence
  Description of Artificial Sequence: Synthetic oligonucleotide
aaauaaaacuaagaaccuu

SEQ ID NO: 2271059 - RNA, 19 nt, Artificial Sequence
  Description of Artificial Sequence: Synthetic oligonucleotide
uugcacaccaagcauggcu

SEQ ID NO: 2271060 - RNA, 19 nt, Artificial Sequence
  Description of Artificial Sequence: Synthetic oligonucleotide
auuguaaugucaucucuau

SEQ ID NO: 2271061 - RNA, 19 nt, Artificial Sequence
  Description of Artificial Sequence: Synthetic oligonucleotide
gaaggauaaauaaaacuaa

SEQ ID NO: 2271062 - RNA, 19 nt, Artificial Sequence
  Description of Artificial Sequence: Synthetic oligonucleotide
gaaagcguaacugcugacc

SEQ ID NO: 2271063 - RNA, 19 nt, Artificial Sequence
  Description of Artificial Sequence: Synthetic oligonucleotide
aguagccccagaaaaugcc

SEQ ID NO: 2271064 - RNA, 19 nt, Artificial Sequence
  Description of Artificial Sequence: Synthetic oligonucleotide
agagagacgcucaugauca

SEQ ID NO: 2271065 - RNA, 19 nt, Artificial Sequence
  Description of Artificial Sequence: Synthetic oligonucleotide
aacuuaaaaccagguaucu

SEQ ID NO: 2271066 - RNA, 19 nt, Artificial Sequence
  Description of Artificial Sequence: Synthetic oligonucleotide
uuauggcuuaaaguacugg

SEQ ID NO: 2271067 - RNA, 19 nt, Artificial Sequence
  Description of Artificial Sequence: Synthetic oligonucleotide
ucaacaccaucuacauggg

SEQ ID NO: 2271068 - RNA, 19 nt, Artificial Sequence
  Description of Artificial Sequence: Synthetic oligonucleotide
aaaugccacccgaagcacc

SEQ ID NO: 2271069 - RNA, 19 nt, Artificial Sequence
  Description of Artificial Sequence: Synthetic oligonucleotide
accauagacagcauucaac

SEQ ID NO: 2271070 - RNA, 19 nt, Artificial Sequence
  Description of Artificial Sequence: Synthetic oligonucleotide
uucucuaaccauagacagc

SEQ ID NO: 2271071 - RNA, 19 nt, Artificial Sequence
  Description of Artificial Sequence: Synthetic oligonucleotide
ucaugaauacaaacugaaa

SEQ ID NO: 2271072 - RNA, 19 nt, Artificial Sequence
  Description of Artificial Sequence: Synthetic oligonucleotide
uuuaauucacugugggcau

SEQ ID NO: 2271073 - RNA, 19 nt, Artificial Sequence
  Description of Artificial Sequence: Synthetic oligonucleotide
cagguaucuugguucaugg

SEQ ID NO: 2271074 - RNA, 19 nt, Artificial Sequence
  Description of Artificial Sequence: Synthetic oligonucleotide
gaggaaaucaugggugagg

SEQ ID NO: 2271075 - RNA, 19 nt, Artificial Sequence
  Description of Artificial Sequence: Synthetic oligonucleotide
uucuggguaucuuuauuca

SEQ ID NO: 2271076 - RNA, 19 nt, Artificial Sequence
  Description of Artificial Sequence: Synthetic oligonucleotide
uggguaucuuuauucaaac

SEQ ID NO: 2271077 - RNA, 19 nt, Artificial Sequence
  Description of Artificial Sequence: Synthetic oligonucleotide
ugaaagcauuaauuagagc

SEQ ID NO: 2271078 - RNA, 19 nt, Artificial Sequence
  Description of Artificial Sequence: Synthetic oligonucleotide
ucuauacaaugcgagcaag

SEQ ID NO: 2271079 - RNA, 19 nt, Artificial Sequence
  Description of Artificial Sequence: Synthetic oligonucleotide
gguaucuuuauucaaacua

SEQ ID NO: 2271080 - RNA, 19 nt, Artificial Sequence
  Description of Artificial Sequence: Synthetic oligonucleotide
ucuaguucucuuucauucu

SEQ ID NO: 2271081 - RNA, 19 nt, Artificial Sequence
  Description of Artificial Sequence: Synthetic oligonucleotide
ucuauaagcucuugccagu

SEQ ID NO: 2271082 - RNA, 19 nt, Artificial Sequence
  Description of Artificial Sequence: Synthetic oligonucleotide
auggcuuaaaguacuggac

SEQ ID NO: 2271083 - RNA, 19 nt, Artificial Sequence
  Description of Artificial Sequence: Synthetic oligonucleotide
uaaaaggcaucagcaagcc

SEQ ID NO: 2271084 - RNA, 19 nt, Artificial Sequence
  Description of Artificial Sequence: Synthetic oligonucleotide
ugaccaagacccaucuucu

SEQ ID NO: 2271085 - RNA, 19 nt, Artificial Sequence
  Description of Artificial Sequence: Synthetic oligonucleotide
ugagcauuguggucauuag

SEQ ID NO: 2271086 - RNA, 19 nt, Artificial Sequence
  Description of Artificial Sequence: Synthetic oligonucleotide
aaccagguaucuugguuca

SEQ ID NO: 2271087 - RNA, 19 nt, Artificial Sequence
  Description of Artificial Sequence: Synthetic oligonucleotide
auuuauggcuuaaaguacu

SEQ ID NO: 2271088 - RNA, 19 nt, Artificial Sequence
  Description of Artificial Sequence: Synthetic oligonucleotide
caagccaagcagccgaucc

SEQ ID NO: 2271089 - RNA, 19 nt, Artificial Sequence
  Description of Artificial Sequence: Synthetic oligonucleotide
uagcaaaacaaaacuucuc

SEQ ID NO: 2271090 - RNA, 19 nt, Artificial Sequence
  Description of Artificial Sequence: Synthetic oligonucleotide
gaggucuauaagcucuugc

SEQ ID NO: 2271091 - RNA, 19 nt, Artificial Sequence
  Description of Artificial Sequence: Synthetic oligonucleotide
aauccuaucugggaagaau

SEQ ID NO: 2271092 - RNA, 19 nt, Artificial Sequence
  Description of Artificial Sequence: Synthetic oligonucleotide
ugcacaccaagcauggcuc

SEQ ID NO: 2271093 - RNA, 19 nt, Artificial Sequence
  Description of Artificial Sequence: Synthetic oligonucleotide
aaguucuucgggaagacua

SEQ ID NO: 2271094 - RNA, 19 nt, Artificial Sequence
  Description of Artificial Sequence: Synthetic oligonucleotide
acuuaacauucacuagaag

SEQ ID NO: 2271095 - RNA, 19 nt, Artificial Sequence
  Description of Artificial Sequence: Synthetic oligonucleotide
cuuuggguguuccaguuuc

SEQ ID NO: 2271096 - RNA, 19 nt, Artificial Sequence
  Description of Artificial Sequence: Synthetic oligonucleotide
acgcucaugaucaacagca

SEQ ID NO: 2271097 - RNA, 19 nt, Artificial Sequence
  Description of Artificial Sequence: Synthetic oligonucleotide
gguaucuugguucaugguc

SEQ ID NO: 2271098 - RNA, 19 nt, Artificial Sequence
  Description of Artificial Sequence: Synthetic oligonucleotide
uccaaugaaaugucauuau

SEQ ID NO: 2271099 - RNA, 19 nt, Artificial Sequence
  Description of Artificial Sequence: Synthetic oligonucleotide
uaauuagagccuccuuaac

SEQ ID NO: 2271100 - RNA, 19 nt, Artificial Sequence
  Description of Artificial Sequence: Synthetic oligonucleotide
agaaagcguaacugcugac

SEQ ID NO: 2271101 - RNA, 19 nt, Artificial Sequence
  Description of Artificial Sequence: Synthetic oligonucleotide
cuaguucucuuucauucug

SEQ ID NO: 2271102 - RNA, 19 nt, Artificial Sequence
  Description of Artificial Sequence: Synthetic oligonucleotide
guagaauccuaucugggaa

SEQ ID NO: 2271103 - RNA, 19 nt, Artificial Sequence
  Description of Artificial Sequence: Synthetic oligonucleotide
ugcgagcaaguucuucggg

SEQ ID NO: 2271104 - RNA, 19 nt, Artificial Sequence
  Description of Artificial Sequence: Synthetic oligonucleotide
caguauugaggucuauaag

SEQ ID NO: 2271105 - RNA, 19 nt, Artificial Sequence
  Description of Artificial Sequence: Synthetic oligonucleotide
uauacaaugcgagcaaguu

SEQ ID NO: 2271106 - RNA, 19 nt, Artificial Sequence
  Description of Artificial Sequence: Synthetic oligonucleotide
cagguaauugagaaaagaa

SEQ ID NO: 2271107 - RNA, 19 nt, Artificial Sequence
  Description of Artificial Sequence: Synthetic oligonucleotide
auucacuagaaggauaaau

SEQ ID NO: 2271108 - RNA, 19 nt, Artificial Sequence
  Description of Artificial Sequence: Synthetic oligonucleotide
cugauucuccaguauugag

SEQ ID NO: 2271109 - RNA, 19 nt, Artificial Sequence
  Description of Artificial Sequence: Synthetic oligonucleotide
agucuuuaauucacugugg

SEQ ID NO: 2271110 - RNA, 19 nt, Artificial Sequence
  Description of Artificial Sequence: Synthetic oligonucleotide
uauugaggucuauaagcuc

SEQ ID NO: 2271111 - RNA, 19 nt, Artificial Sequence
  Description of Artificial Sequence: Synthetic oligonucleotide
augaucaacagcacaucuc

SEQ ID NO: 2271112 - RNA, 19 nt, Artificial Sequence
  Description of Artificial Sequence: Synthetic oligonucleotide
aaaagcccuaaaaggcauc

SEQ ID NO: 2271113 - RNA, 19 nt, Artificial Sequence
  Description of Artificial Sequence: Synthetic oligonucleotide
ugggcauucucuaaccaua

SEQ ID NO: 2271114 - RNA, 19 nt, Artificial Sequence
  Description of Artificial Sequence: Synthetic oligonucleotide
caauaucagcugauucucc

SEQ ID NO: 2271115 - RNA, 19 nt, Artificial Sequence
  Description of Artificial Sequence: Synthetic oligonucleotide
uaggaucaccaacuugagc

SEQ ID NO: 2271116 - RNA, 19 nt, Artificial Sequence
  Description of Artificial Sequence: Synthetic oligonucleotide
uguuugugaccuacaacau

SEQ ID NO: 2271117 - RNA, 19 nt, Artificial Sequence
  Description of Artificial Sequence: Synthetic oligonucleotide
uaguucucuuucauucuga

SEQ ID NO: 2271118 - RNA, 19 nt, Artificial Sequence
  Description of Artificial Sequence: Synthetic oligonucleotide
aaccauagacagcauucaa

SEQ ID NO: 2271119 - RNA, 19 nt, Artificial Sequence
  Description of Artificial Sequence: Synthetic oligonucleotide
gucauuuauggcuuaaagu

SEQ ID NO: 2271120 - RNA, 19 nt, Artificial Sequence
  Description of Artificial Sequence: Synthetic oligonucleotide
agguaauugagaaaagaau

SEQ ID NO: 2271121 - RNA, 19 nt, Artificial Sequence
  Description of Artificial Sequence: Synthetic oligonucleotide
ucauggucauuuauggcuu

SEQ ID NO: 2271122 - RNA, 19 nt, Artificial Sequence
  Description of Artificial Sequence: Synthetic oligonucleotide
aucaagucucuugaaagca

SEQ ID NO: 2271123 - RNA, 19 nt, Artificial Sequence
  Description of Artificial Sequence: Synthetic oligonucleotide
aucaacagcacaucuccaa

SEQ ID NO: 2271124 - RNA, 19 nt, Artificial Sequence
  Description of Artificial Sequence: Synthetic oligonucleotide
cucaguuacacugaggaaa

SEQ ID NO: 2271125 - RNA, 19 nt, Artificial Sequence
  Description of Artificial Sequence: Synthetic oligonucleotide
uaaccauagacagcauuca

SEQ ID NO: 2271126 - RNA, 19 nt, Artificial Sequence
  Description of Artificial Sequence: Synthetic oligonucleotide
cauuuuagagagacgcuca

SEQ ID NO: 2271127 - RNA, 19 nt, Artificial Sequence
  Description of Artificial Sequence: Synthetic oligonucleotide
guaauugagaaaagaauua

SEQ ID NO: 2271128 - RNA, 19 nt, Artificial Sequence
  Description of Artificial Sequence: Synthetic oligonucleotide
agcauuaauuagagccucc

SEQ ID NO: 2271129 - RNA, 19 nt, Artificial Sequence
  Description of Artificial Sequence: Synthetic oligonucleotide
aagacccaucuucuucuug

SEQ ID NO: 2271130 - RNA, 19 nt, Artificial Sequence
  Description of Artificial Sequence: Synthetic oligonucleotide
augcgagcaaguucuucgg

SEQ ID NO: 2271131 - RNA, 19 nt, Artificial Sequence
  Description of Artificial Sequence: Synthetic oligonucleotide
gacgcucaugaucaacagc

SEQ ID NO: 2271132 - RNA, 19 nt, Artificial Sequence
  Description of Artificial Sequence: Synthetic oligonucleotide
agaaaagaauuaggaucac

SEQ ID NO: 2271133 - RNA, 19 nt, Artificial Sequence
  Description of Artificial Sequence: Synthetic oligonucleotide
gacguucuaguucucuuuc

SEQ ID NO: 2271134 - RNA, 19 nt, Artificial Sequence
  Description of Artificial Sequence: Synthetic oligonucleotide
cuacuaucaccaguguuag

SEQ ID NO: 2271135 - RNA, 19 nt, Artificial Sequence
  Description of Artificial Sequence: Synthetic oligonucleotide
guguagaauccuaucuggg

SEQ ID NO: 2271136 - RNA, 19 nt, Artificial Sequence
  Description of Artificial Sequence: Synthetic oligonucleotide
uaucaccaguguuagccac

SEQ ID NO: 2271137 - RNA, 19 nt, Artificial Sequence
  Description of Artificial Sequence: Synthetic oligonucleotide
agcauggcucuacuaucac

SEQ ID NO: 2271138 - RNA, 19 nt, Artificial Sequence
  Description of Artificial Sequence: Synthetic oligonucleotide
agcguaacugcugaccaag

SEQ ID NO: 2271139 - RNA, 19 nt, Artificial Sequence
  Description of Artificial Sequence: Synthetic oligonucleotide
caugagaauugaacugaac

SEQ ID NO: 2271140 - RNA, 19 nt, Artificial Sequence
  Description of Artificial Sequence: Synthetic oligonucleotide
aauaaauguuugugaccua

SEQ ID NO: 2271141 - RNA, 19 nt, Artificial Sequence
  Description of Artificial Sequence: Synthetic oligonucleotide
ggaagggcaguguagaauc

SEQ ID NO: 2271142 - RNA, 19 nt, Artificial Sequence
  Description of Artificial Sequence: Synthetic oligonucleotide
acauucacuagaaggauaa

SEQ ID NO: 2271143 - RNA, 19 nt, Artificial Sequence
  Description of Artificial Sequence: Synthetic oligonucleotide
caagcauggcucuacuauc

SEQ ID NO: 2271144 - RNA, 19 nt, Artificial Sequence
  Description of Artificial Sequence: Synthetic oligonucleotide
cuacaaugauuguaauguc

SEQ ID NO: 2271145 - RNA, 19 nt, Artificial Sequence
  Description of Artificial Sequence: Synthetic oligonucleotide
cacacucuuggccucauuc

SEQ ID NO: 2271146 - RNA, 19 nt, Artificial Sequence
  Description of Artificial Sequence: Synthetic oligonucleotide
gaaggaagggcaguguaga

SEQ ID NO: 2271147 - RNA, 19 nt, Artificial Sequence
  Description of Artificial Sequence: Synthetic oligonucleotide
aaugccacccgaagcacca

SEQ ID NO: 2271148 - RNA, 19 nt, Artificial Sequence
  Description of Artificial Sequence: Synthetic oligonucleotide
accuacaacaugagaauug

SEQ ID NO: 2271149 - RNA, 19 nt, Artificial Sequence
  Description of Artificial Sequence: Synthetic oligonucleotide
aacaucaauaucagcugau

SEQ ID NO: 2271150 - RNA, 19 nt, Artificial Sequence
  Description of Artificial Sequence: Synthetic oligonucleotide
agacgcucaugaucaacag

SEQ ID NO: 2271151 - RNA, 19 nt, Artificial Sequence
  Description of Artificial Sequence: Synthetic oligonucleotide
uaagaaccuuuauuguuuu

SEQ ID NO: 2271152 - RNA, 19 nt, Artificial Sequence
  Description of Artificial Sequence: Synthetic oligonucleotide
aggaaaucaugggugagga

SEQ ID NO: 2271153 - RNA, 19 nt, Artificial Sequence
  Description of Artificial Sequence: Synthetic oligonucleotide
uccuaucugggaagaauau

SEQ ID NO: 2271154 - RNA, 19 nt, Artificial Sequence
  Description of Artificial Sequence: Synthetic oligonucleotide
ucccuuuacuuaacauuca

SEQ ID NO: 2271155 - RNA, 19 nt, Artificial Sequence
  Description of Artificial Sequence: Synthetic oligonucleotide
aguuucagacguucuaguu

SEQ ID NO: 2271156 - RNA, 19 nt, Artificial Sequence
  Description of Artificial Sequence: Synthetic oligonucleotide
auuuuagagagacgcucau

SEQ ID NO: 2271157 - RNA, 19 nt, Artificial Sequence
  Description of Artificial Sequence: Synthetic oligonucleotide
aggcaguagccccagaaaa

SEQ ID NO: 2271158 - RNA, 19 nt, Artificial Sequence
  Description of Artificial Sequence: Synthetic oligonucleotide
agaauugaacugaacuaca

SEQ ID NO: 2271159 - RNA, 19 nt, Artificial Sequence
  Description of Artificial Sequence: Synthetic oligonucleotide
uugguucauggucauuuau

SEQ ID NO: 2271160 - RNA, 19 nt, Artificial Sequence
  Description of Artificial Sequence: Synthetic oligonucleotide
aggcuaaaauaaauguuug

SEQ ID NO: 2271161 - RNA, 19 nt, Artificial Sequence
  Description of Artificial Sequence: Synthetic oligonucleotide
caguagccccagaaaaugc

SEQ ID NO: 2271162 - RNA, 19 nt, Artificial Sequence
  Description of Artificial Sequence: Synthetic oligonucleotide
gauuguaaugucaucucua

SEQ ID NO: 2271163 - RNA, 19 nt, Artificial Sequence
  Description of Artificial Sequence: Synthetic oligonucleotide
uguggucauuagaaagcgu

SEQ ID NO: 2271164 - RNA, 19 nt, Artificial Sequence
  Description of Artificial Sequence: Synthetic oligonucleotide
uauaagcucuugccaguaa

SEQ ID NO: 2271165 - RNA, 19 nt, Artificial Sequence
  Description of Artificial Sequence: Synthetic oligonucleotide
gagacgcucaugaucaaca

SEQ ID NO: 2271166 - RNA, 19 nt, Artificial Sequence
  Description of Artificial Sequence: Synthetic oligonucleotide
gagcaaguucuucgggaag

SEQ ID NO: 2271167 - RNA, 19 nt, Artificial Sequence
  Description of Artificial Sequence: Synthetic oligonucleotide
uuuggguguuccaguuuca

SEQ ID NO: 2271168 - RNA, 19 nt, Artificial Sequence
  Description of Artificial Sequence: Synthetic oligonucleotide
cugugggcauucucuaacc

SEQ ID NO: 2271169 - RNA, 19 nt, Artificial Sequence
  Description of Artificial Sequence: Synthetic oligonucleotide
cacguggaggucaacacca

SEQ ID NO: 2271170 - RNA, 19 nt, Artificial Sequence
  Description of Artificial Sequence: Synthetic oligonucleotide
aaggcaucagcaagccaag

SEQ ID NO: 2271171 - RNA, 19 nt, Artificial Sequence
  Description of Artificial Sequence: Synthetic oligonucleotide
aucugggaagaauauuuua

SEQ ID NO: 2271172 - RNA, 19 nt, Artificial Sequence
  Description of Artificial Sequence: Synthetic oligonucleotide
agccgauccugcuucacca

SEQ ID NO: 2271173 - RNA, 19 nt, Artificial Sequence
  Description of Artificial Sequence: Synthetic oligonucleotide
caaugauuguaaugucauc

SEQ ID NO: 2271174 - RNA, 19 nt, Artificial Sequence
  Description of Artificial Sequence: Synthetic oligonucleotide
uuguaaugucaucucuaua

SEQ ID NO: 2271175 - RNA, 19 nt, Artificial Sequence
  Description of Artificial Sequence: Synthetic oligonucleotide
gaauugaacugaacuacaa

SEQ ID NO: 2271176 - RNA, 19 nt, Artificial Sequence
  Description of Artificial Sequence: Synthetic oligonucleotide
acaccaagcauggcucuac

SEQ ID NO: 2271177 - RNA, 19 nt, Artificial Sequence
  Description of Artificial Sequence: Synthetic oligonucleotide
uuagagagacgcucaugau

SEQ ID NO: 2271178 - RNA, 19 nt, Artificial Sequence
  Description of Artificial Sequence: Synthetic oligonucleotide
ccaacuugagccuccaaug

SEQ ID NO: 2271179 - RNA, 19 nt, Artificial Sequence
  Description of Artificial Sequence: Synthetic oligonucleotide
aaucaugggugaggaagga

SEQ ID NO: 2271180 - RNA, 19 nt, Artificial Sequence
  Description of Artificial Sequence: Synthetic oligonucleotide
uggguguuccaguuucaga

SEQ ID NO: 2271181 - RNA, 19 nt, Artificial Sequence
  Description of Artificial Sequence: Synthetic oligonucleotide
acaggcaguagccccagaa

SEQ ID NO: 2271182 - RNA, 19 nt, Artificial Sequence
  Description of Artificial Sequence: Synthetic oligonucleotide
acugaacuacaaugauugu

SEQ ID NO: 2271183 - RNA, 19 nt, Artificial Sequence
  Description of Artificial Sequence: Synthetic oligonucleotide
uacaugggccacacaggca

SEQ ID NO: 2271184 - RNA, 19 nt, Artificial Sequence
  Description of Artificial Sequence: Synthetic oligonucleotide
uaauucacugugggcauuc

SEQ ID NO: 2271185 - RNA, 19 nt, Artificial Sequence
  Description of Artificial Sequence: Synthetic oligonucleotide
cauagacagcauucaacca

SEQ ID NO: 2271186 - RNA, 19 nt, Artificial Sequence
  Description of Artificial Sequence: Synthetic oligonucleotide
ucagacguucuaguucucu

SEQ ID NO: 2271187 - RNA, 19 nt, Artificial Sequence
  Description of Artificial Sequence: Synthetic oligonucleotide
ggucuauaagcucuugcca

SEQ ID NO: 2271188 - RNA, 19 nt, Artificial Sequence
  Description of Artificial Sequence: Synthetic oligonucleotide
guagcaaaacaaaacuucu

SEQ ID NO: 2271189 - RNA, 19 nt, Artificial Sequence
  Description of Artificial Sequence: Synthetic oligonucleotide
cuaagaaccuuuauuguuu

SEQ ID NO: 2271190 - RNA, 19 nt, Artificial Sequence
  Description of Artificial Sequence: Synthetic oligonucleotide
agaauccuaucugggaaga

SEQ ID NO: 2271191 - RNA, 19 nt, Artificial Sequence
  Description of Artificial Sequence: Synthetic oligonucleotide
uuagccacguggaggucaa

SEQ ID NO: 2271192 - RNA, 19 nt, Artificial Sequence
  Description of Artificial Sequence: Synthetic oligonucleotide
guggucauuagaaagcgua

SEQ ID NO: 2271193 - RNA, 19 nt, Artificial Sequence
  Description of Artificial Sequence: Synthetic oligonucleotide
aagcguaacugcugaccaa

SEQ ID NO: 2271194 - RNA, 19 nt, Artificial Sequence
  Description of Artificial Sequence: Synthetic oligonucleotide
uggaggucaacaccaucua

SEQ ID NO: 2271195 - RNA, 19 nt, Artificial Sequence
  Description of Artificial Sequence: Synthetic oligonucleotide
aucaccaguguuagccacg

SEQ ID NO: 2271196 - RNA, 19 nt, Artificial Sequence
  Description of Artificial Sequence: Synthetic oligonucleotide
uccaguauugaggucuaua

SEQ ID NO: 2271197 - RNA, 19 nt, Artificial Sequence
  Description of Artificial Sequence: Synthetic oligonucleotide
caacuugagccuccaauga

SEQ ID NO: 2271198 - RNA, 19 nt, Artificial Sequence
  Description of Artificial Sequence: Synthetic oligonucleotide
acauuucccuuuacuuaac

SEQ ID NO: 2271199 - RNA, 19 nt, Artificial Sequence
  Description of Artificial Sequence: Synthetic oligonucleotide
ucgggaagacuaagcauuu

SEQ ID NO: 2271200 - RNA, 19 nt, Artificial Sequence
  Description of Artificial Sequence: Synthetic oligonucleotide
gaagggcaguguagaaucc

SEQ ID NO: 2271201 - RNA, 19 nt, Artificial Sequence
  Description of Artificial Sequence: Synthetic oligonucleotide
acguucuaguucucuuuca

SEQ ID NO: 2271202 - RNA, 19 nt, Artificial Sequence
  Description of Artificial Sequence: Synthetic oligonucleotide
cugaacuacaaugauugua

SEQ ID NO: 2271203 - RNA, 19 nt, Artificial Sequence
  Description of Artificial Sequence: Synthetic oligonucleotide
agguaucuugguucauggu

SEQ ID NO: 2271204 - RNA, 19 nt, Artificial Sequence
  Description of Artificial Sequence: Synthetic oligonucleotide
caacaccaucuacaugggc

SEQ ID NO: 2271205 - RNA, 19 nt, Artificial Sequence
  Description of Artificial Sequence: Synthetic oligonucleotide
uugaggucuauaagcucuu

SEQ ID NO: 2271206 - RNA, 19 nt, Artificial Sequence
  Description of Artificial Sequence: Synthetic oligonucleotide
caccauuccuuucuuuuca

SEQ ID NO: 2271207 - RNA, 19 nt, Artificial Sequence
  Description of Artificial Sequence: Synthetic oligonucleotide
cuccaaugaaaugucauua

SEQ ID NO: 2271208 - RNA, 19 nt, Artificial Sequence
  Description of Artificial Sequence: Synthetic oligonucleotide
ucaccaguguuagccacgu

SEQ ID NO: 2271209 - RNA, 19 nt, Artificial Sequence
  Description of Artificial Sequence: Synthetic oligonucleotide
uacuaucaccaguguuagc

SEQ ID NO: 2271210 - RNA, 19 nt, Artificial Sequence
  Description of Artificial Sequence: Synthetic oligonucleotide
aauucacugugggcauucu

SEQ ID NO: 2271211 - RNA, 19 nt, Artificial Sequence
  Description of Artificial Sequence: Synthetic oligonucleotide
guguuagccacguggaggu

SEQ ID NO: 2271212 - RNA, 19 nt, Artificial Sequence
  Description of Artificial Sequence: Synthetic oligonucleotide
agucucuugaaagcauuaa

SEQ ID NO: 2271213 - RNA, 19 nt, Artificial Sequence
  Description of Artificial Sequence: Synthetic oligonucleotide
augucauuaucaagucucu

SEQ ID NO: 2271214 - RNA, 19 nt, Artificial Sequence
  Description of Artificial Sequence: Synthetic oligonucleotide
caugaucaacagcacaucu

SEQ ID NO: 2271215 - RNA, 19 nt, Artificial Sequence
  Description of Artificial Sequence: Synthetic oligonucleotide
ugaggucuauaagcucuug

SEQ ID NO: 2271216 - RNA, 19 nt, Artificial Sequence
  Description of Artificial Sequence: Synthetic oligonucleotide
auccuaucugggaagaaua

SEQ ID NO: 2271217 - RNA, 19 nt, Artificial Sequence
  Description of Artificial Sequence: Synthetic oligonucleotide
cauuaucaagucucuugaa

SEQ ID NO: 2271218 - RNA, 19 nt, Artificial Sequence
  Description of Artificial Sequence: Synthetic oligonucleotide
ccaaaagcccuaaaaggca

SEQ ID NO: 2271219 - RNA, 19 nt, Artificial Sequence
  Description of Artificial Sequence: Synthetic oligonucleotide
cagccgauccugcuucacc

SEQ ID NO: 2271220 - RNA, 19 nt, Artificial Sequence
  Description of Artificial Sequence: Synthetic oligonucleotide
acuuaaaaccagguaucuu

SEQ ID NO: 2271221 - RNA, 19 nt, Artificial Sequence
  Description of Artificial Sequence: Synthetic oligonucleotide
aggaagggcaguguagaau

SEQ ID NO: 2271222 - RNA, 19 nt, Artificial Sequence
  Description of Artificial Sequence: Synthetic oligonucleotide
accagguaauugagaaaag

SEQ ID NO: 2271223 - RNA, 19 nt, Artificial Sequence
  Description of Artificial Sequence: Synthetic oligonucleotide
gggaagaauauuuuaugau

SEQ ID NO: 2271224 - RNA, 19 nt, Artificial Sequence
  Description of Artificial Sequence: Synthetic oligonucleotide
ccaguauugaggucuauaa

SEQ ID NO: 2271225 - RNA, 19 nt, Artificial Sequence
  Description of Artificial Sequence: Synthetic oligonucleotide
gggaagacuaagcauuuua

SEQ ID NO: 2271226 - RNA, 19 nt, Artificial Sequence
  Description of Artificial Sequence: Synthetic oligonucleotide
ugucauuaucaagucucuu

SEQ ID NO: 2271227 - RNA, 19 nt, Artificial Sequence
  Description of Artificial Sequence: Synthetic oligonucleotide
uggucauuuauggcuuaaa

SEQ ID NO: 2271228 - RNA, 19 nt, Artificial Sequence
  Description of Artificial Sequence: Synthetic oligonucleotide
ggcaguguagaauccuauc

SEQ ID NO: 2271229 - RNA, 19 nt, Artificial Sequence
  Description of Artificial Sequence: Synthetic oligonucleotide
gcucaugaucaacagcaca

SEQ ID NO: 2271230 - RNA, 19 nt, Artificial Sequence
  Description of Artificial Sequence: Synthetic oligonucleotide
cugcugaccaagacccauc

SEQ ID NO: 2271231 - RNA, 19 nt, Artificial Sequence
  Description of Artificial Sequence: Synthetic oligonucleotide
aguucuucgggaagacuaa

SEQ ID NO: 2271232 - RNA, 19 nt, Artificial Sequence
  Description of Artificial Sequence: Synthetic oligonucleotide
ggcuuaaaguacuggaccu

SEQ ID NO: 2271233 - RNA, 19 nt, Artificial Sequence
  Description of Artificial Sequence: Synthetic oligonucleotide
gaauuaggaucaccaacuu

SEQ ID NO: 2271234 - RNA, 19 nt, Artificial Sequence
  Description of Artificial Sequence: Synthetic oligonucleotide
agccacguggaggucaaca

SEQ ID NO: 2271235 - RNA, 19 nt, Artificial Sequence
  Description of Artificial Sequence: Synthetic oligonucleotide
gugucauaccaccauuccu

SEQ ID NO: 2271236 - RNA, 19 nt, Artificial Sequence
  Description of Artificial Sequence: Synthetic oligonucleotide
cacccgaagcaccagguaa

SEQ ID NO: 2271237 - RNA, 19 nt, Artificial Sequence
  Description of Artificial Sequence: Synthetic oligonucleotide
gaacugaacuacaaugauu

SEQ ID NO: 2271238 - RNA, 19 nt, Artificial Sequence
  Description of Artificial Sequence: Synthetic oligonucleotide
acaugagaauugaacugaa

SEQ ID NO: 2271239 - RNA, 19 nt, Artificial Sequence
  Description of Artificial Sequence: Synthetic oligonucleotide
ggcuaaaauaaauguuugu

SEQ ID NO: 2271240 - RNA, 19 nt, Artificial Sequence
  Description of Artificial Sequence: Synthetic oligonucleotide
accaagugucauaccacca

SEQ ID NO: 2271241 - RNA, 19 nt, Artificial Sequence
  Description of Artificial Sequence: Synthetic oligonucleotide
gaacuacaaugauuguaau

SEQ ID NO: 2271242 - RNA, 19 nt, Artificial Sequence
  Description of Artificial Sequence: Synthetic oligonucleotide
ggucaacaccaucuacaug

SEQ ID NO: 2271243 - RNA, 19 nt, Artificial Sequence
  Description of Artificial Sequence: Synthetic oligonucleotide
gcccuaaaaggcaucagca

SEQ ID NO: 2271244 - RNA, 19 nt, Artificial Sequence
  Description of Artificial Sequence: Synthetic oligonucleotide
cgaagcaccagguaauuga

SEQ ID NO: 2271245 - RNA, 19 nt, Artificial Sequence
  Description of Artificial Sequence: Synthetic oligonucleotide
acaaaacuucucaguuaca

SEQ ID NO: 2271246 - RNA, 19 nt, Artificial Sequence
  Description of Artificial Sequence: Synthetic oligonucleotide
caaugcgagcaaguucuuc

SEQ ID NO: 2271247 - RNA, 19 nt, Artificial Sequence
  Description of Artificial Sequence: Synthetic oligonucleotide
gggcauucucuaaccauag

SEQ ID NO: 2271248 - RNA, 19 nt, Artificial Sequence
  Description of Artificial Sequence: Synthetic oligonucleotide
uucagacguucuaguucuc

SEQ ID NO: 2271249 - RNA, 19 nt, Artificial Sequence
  Description of Artificial Sequence: Synthetic oligonucleotide
auaccaccauuccuuucuu

SEQ ID NO: 2271250 - RNA, 19 nt, Artificial Sequence
  Description of Artificial Sequence: Synthetic oligonucleotide
acaucuccaaaagcccuaa

SEQ ID NO: 2271251 - RNA, 19 nt, Artificial Sequence
  Description of Artificial Sequence: Synthetic oligonucleotide
gcgagcaaguucuucggga

SEQ ID NO: 2271252 - RNA, 19 nt, Artificial Sequence
  Description of Artificial Sequence: Synthetic oligonucleotide
agcauucaaccaaguguca

SEQ ID NO: 2271253 - RNA, 19 nt, Artificial Sequence
  Description of Artificial Sequence: Synthetic oligonucleotide
cuugcacaccaagcauggc

SEQ ID NO: 2271254 - RNA, 19 nt, Artificial Sequence
  Description of Artificial Sequence: Synthetic oligonucleotide
ccacguggaggucaacacc

SEQ ID NO: 2271255 - RNA, 19 nt, Artificial Sequence
  Description of Artificial Sequence: Synthetic oligonucleotide
cuugguucauggucauuua

SEQ ID NO: 2271256 - RNA, 19 nt, Artificial Sequence
  Description of Artificial Sequence: Synthetic oligonucleotide
cacaucuccaaaagcccua

SEQ ID NO: 2271257 - RNA, 19 nt, Artificial Sequence
  Description of Artificial Sequence: Synthetic oligonucleotide
gccacguggaggucaacac

SEQ ID NO: 2271258 - RNA, 19 nt, Artificial Sequence
  Description of Artificial Sequence: Synthetic oligonucleotide
aucaugggugaggaaggaa

SEQ ID NO: 2271259 - RNA, 19 nt, Artificial Sequence
  Description of Artificial Sequence: Synthetic oligonucleotide
gccuccuuaacaucaauau

SEQ ID NO: 2271260 - RNA, 19 nt, Artificial Sequence
  Description of Artificial Sequence: Synthetic oligonucleotide
cuucgggaagacuaagcau

SEQ ID NO: 2271261 - RNA, 19 nt, Artificial Sequence
  Description of Artificial Sequence: Synthetic oligonucleotide
guguagcaaaacaaaacuu

SEQ ID NO: 2271262 - RNA, 19 nt, Artificial Sequence
  Description of Artificial Sequence: Synthetic oligonucleotide
agccuccuuaacaucaaua

SEQ ID NO: 2271263 - RNA, 19 nt, Artificial Sequence
  Description of Artificial Sequence: Synthetic oligonucleotide
ccagguaauugagaaaaga

SEQ ID NO: 2271264 - RNA, 19 nt, Artificial Sequence
  Description of Artificial Sequence: Synthetic oligonucleotide
acuaagcauuuuagagaga

SEQ ID NO: 2271265 - RNA, 19 nt, Artificial Sequence
  Description of Artificial Sequence: Synthetic oligonucleotide
gcauuguggucauuagaaa

SEQ ID NO: 2271266 - RNA, 19 nt, Artificial Sequence
  Description of Artificial Sequence: Synthetic oligonucleotide
ccaguguuagccacgugga

SEQ ID NO: 2271267 - RNA, 19 nt, Artificial Sequence
  Description of Artificial Sequence: Synthetic oligonucleotide
ccaccauuccuuucuuuuc

SEQ ID NO: 2271268 - RNA, 19 nt, Artificial Sequence
  Description of Artificial Sequence: Synthetic oligonucleotide
gaauccuaucugggaagaa

SEQ ID NO: 2271269 - RNA, 19 nt, Artificial Sequence
  Description of Artificial Sequence: Synthetic oligonucleotide
gcugauucuccaguauuga

SEQ ID NO: 2271270 - RNA, 19 nt, Artificial Sequence
  Description of Artificial Sequence: Synthetic oligonucleotide
gugggcauucucuaaccau

SEQ ID NO: 2271271 - RNA, 19 nt, Artificial Sequence
  Description of Artificial Sequence: Synthetic oligonucleotide
cuauaagcucuugccagua

SEQ ID NO: 2271272 - RNA, 19 nt, Artificial Sequence
  Description of Artificial Sequence: Synthetic oligonucleotide
cguaacugcugaccaagac

SEQ ID NO: 2271273 - RNA, 19 nt, Artificial Sequence
  Description of Artificial Sequence: Synthetic oligonucleotide
ccagguaucuugguucaug

SEQ ID NO: 2271274 - RNA, 19 nt, Artificial Sequence
  Description of Artificial Sequence: Synthetic oligonucleotide
agcagccgauccugcuuca

SEQ ID NO: 2271275 - RNA, 19 nt, Artificial Sequence
  Description of Artificial Sequence: Synthetic oligonucleotide
agccuccaaugaaauguca

SEQ ID NO: 2271276 - RNA, 19 nt, Artificial Sequence
  Description of Artificial Sequence: Synthetic oligonucleotide
cuuucauucugagcauugu

SEQ ID NO: 2271277 - RNA, 19 nt, Artificial Sequence
  Description of Artificial Sequence: Synthetic oligonucleotide
agacagcauucaaccaagu

SEQ ID NO: 2271278 - RNA, 19 nt, Artificial Sequence
  Description of Artificial Sequence: Synthetic oligonucleotide
ggguaucuuuauucaaacu

SEQ ID NO: 2271279 - RNA, 19 nt, Artificial Sequence
  Description of Artificial Sequence: Synthetic oligonucleotide
gaccuacaacaugagaauu

SEQ ID NO: 2271280 - RNA, 19 nt, Artificial Sequence
  Description of Artificial Sequence: Synthetic oligonucleotide
ggaucaccaacuugagccu

SEQ ID NO: 2271281 - RNA, 19 nt, Artificial Sequence
  Description of Artificial Sequence: Synthetic oligonucleotide
cauggucauuuauggcuua

SEQ ID NO: 2271282 - RNA, 19 nt, Artificial Sequence
  Description of Artificial Sequence: Synthetic oligonucleotide
ggcauucucuaaccauaga

SEQ ID NO: 2271283 - RNA, 19 nt, Artificial Sequence
  Description of Artificial Sequence: Synthetic oligonucleotide
agggcaguguagaauccua

SEQ ID NO: 2271284 - RNA, 19 nt, Artificial Sequence
  Description of Artificial Sequence: Synthetic oligonucleotide
cucuacuaucaccaguguu

SEQ ID NO: 2271285 - RNA, 19 nt, Artificial Sequence
  Description of Artificial Sequence: Synthetic oligonucleotide
gcaaguucuucgggaagac

SEQ ID NO: 2271286 - RNA, 19 nt, Artificial Sequence
  Description of Artificial Sequence: Synthetic oligonucleotide
ccagaaaaugccacccgaa

SEQ ID NO: 2271287 - RNA, 19 nt, Artificial Sequence
  Description of Artificial Sequence: Synthetic oligonucleotide
caagugucauaccaccauu

SEQ ID NO: 2271288 - RNA, 19 nt, Artificial Sequence
  Description of Artificial Sequence: Synthetic oligonucleotide
uguuagccacguggagguc

SEQ ID NO: 2271289 - RNA, 19 nt, Artificial Sequence
  Description of Artificial Sequence: Synthetic oligonucleotide
gucauaccaccauuccuuu

SEQ ID NO: 2271290 - RNA, 19 nt, Artificial Sequence
  Description of Artificial Sequence: Synthetic oligonucleotide
ggaaaucaugggugaggaa

SEQ ID NO: 2271291 - RNA, 19 nt, Artificial Sequence
  Description of Artificial Sequence: Synthetic oligonucleotide
cgauccugcuucaccacac

SEQ ID NO: 2271292 - RNA, 19 nt, Artificial Sequence
  Description of Artificial Sequence: Synthetic oligonucleotide
ccaagcauggcucuacuau

SEQ ID NO: 2271293 - RNA, 19 nt, Artificial Sequence
  Description of Artificial Sequence: Synthetic oligonucleotide
gcauuaauuagagccuccu

SEQ ID NO: 2271294 - RNA, 19 nt, Artificial Sequence
  Description of Artificial Sequence: Synthetic oligonucleotide
cagacguucuaguucucuu

SEQ ID NO: 2271295 - RNA, 19 nt, Artificial Sequence
  Description of Artificial Sequence: Synthetic oligonucleotide
agcaagccaagcagccgau

SEQ ID NO: 2271296 - RNA, 19 nt, Artificial Sequence
  Description of Artificial Sequence: Synthetic oligonucleotide
ggccucauucuuugggugu

SEQ ID NO: 2271297 - RNA, 19 nt, Artificial Sequence
  Description of Artificial Sequence: Synthetic oligonucleotide
augccacccgaagcaccag

SEQ ID NO: 2271298 - RNA, 19 nt, Artificial Sequence
  Description of Artificial Sequence: Synthetic oligonucleotide
caccaguguuagccacgug

SEQ ID NO: 2271299 - RNA, 19 nt, Artificial Sequence
  Description of Artificial Sequence: Synthetic oligonucleotide
aucuugguucauggucauu

SEQ ID NO: 2271300 - RNA, 19 nt, Artificial Sequence
  Description of Artificial Sequence: Synthetic oligonucleotide
caaguucuucgggaagacu

SEQ ID NO: 2271301 - RNA, 19 nt, Artificial Sequence
  Description of Artificial Sequence: Synthetic oligonucleotide
caucuacaugggccacaca

SEQ ID NO: 2271302 - RNA, 19 nt, Artificial Sequence
  Description of Artificial Sequence: Synthetic oligonucleotide
cgagcaaguucuucgggaa

SEQ ID NO: 2271303 - RNA, 19 nt, Artificial Sequence
  Description of Artificial Sequence: Synthetic oligonucleotide
acaaugcgagcaaguucuu

SEQ ID NO: 2271304 - RNA, 19 nt, Artificial Sequence
  Description of Artificial Sequence: Synthetic oligonucleotide
ccaagugucauaccaccau

SEQ ID NO: 2271305 - RNA, 19 nt, Artificial Sequence
  Description of Artificial Sequence: Synthetic oligonucleotide
gcauucaaccaagugucau

SEQ ID NO: 2271306 - RNA, 19 nt, Artificial Sequence
  Description of Artificial Sequence: Synthetic oligonucleotide
ggcaguagccccagaaaau

SEQ ID NO: 2271307 - RNA, 19 nt, Artificial Sequence
  Description of Artificial Sequence: Synthetic oligonucleotide
ccuccaaugaaaugucauu

SEQ ID NO: 2271308 - RNA, 19 nt, Artificial Sequence
  Description of Artificial Sequence: Synthetic oligonucleotide
cguggaggucaacaccauc

SEQ ID NO: 2271309 - RNA, 19 nt, Artificial Sequence
  Description of Artificial Sequence: Synthetic oligonucleotide
ccgauccugcuucaccaca

SEQ ID NO: 2271310 - RNA, 19 nt, Artificial Sequence
  Description of Artificial Sequence: Synthetic oligonucleotide
caccaagcauggcucuacu

SEQ ID NO: 2271311 - RNA, 19 nt, Artificial Sequence
  Description of Artificial Sequence: Synthetic oligonucleotide
cacaccaagcauggcucua

SEQ ID NO: 2271312 - RNA, 19 nt, Artificial Sequence
  Description of Artificial Sequence: Synthetic oligonucleotide
gccuccaaugaaaugucau

SEQ ID NO: 2271313 - RNA, 19 nt, Artificial Sequence
  Description of Artificial Sequence: Synthetic oligonucleotide
gcucuacuaucaccagugu

SEQ ID NO: 2271314 - RNA, 19 nt, Artificial Sequence
  Description of Artificial Sequence: Synthetic oligonucleotide
gcguaacugcugaccaaga

SEQ ID NO: 2271315 - RNA, 19 nt, Artificial Sequence
  Description of Artificial Sequence: Synthetic oligonucleotide
gcacaccaagcauggcucu

SEQ ID NO: 2271316 - RNA, 19 nt, Artificial Sequence
  Description of Artificial Sequence: Synthetic oligonucleotide
cucuaaccauagacagcau

SEQ ID NO: 2271317 - RNA, 19 nt, Artificial Sequence
  Description of Artificial Sequence: Synthetic oligonucleotide
uagccacguggaggucaac

SEQ ID NO: 2271318 - RNA, 19 nt, Artificial Sequence
  Description of Artificial Sequence: Synthetic oligonucleotide
gcaagccaagcagccgauc

SEQ ID NO: 2271319 - RNA, 19 nt, Artificial Sequence
  Description of Artificial Sequence: Synthetic oligonucleotide
caccaacuugagccuccaa

SEQ ID NO: 2271320 - RNA, 19 nt, Artificial Sequence
  Description of Artificial Sequence: Synthetic oligonucleotide
gcagccgauccugcuucac

SEQ ID NO: 2271321 - RNA, 19 nt, Artificial Sequence
  Description of Artificial Sequence: Synthetic oligonucleotide
cguucuaguucucuuucau

SEQ ID NO: 2271322 - RNA, 19 nt, Artificial Sequence
  Description of Artificial Sequence: Synthetic oligonucleotide
gggcaguguagaauccuau

SEQ ID NO: 2271323 - RNA, 19 nt, Artificial Sequence
  Description of Artificial Sequence: Synthetic oligonucleotide
ccuaucugggaagaauauu

SEQ ID NO: 2271324 - RNA, 19 nt, Artificial Sequence
  Description of Artificial Sequence: Synthetic oligonucleotide
ccacccgaagcaccaggua

SEQ ID NO: 2271325 - RNA, 19 nt, Artificial Sequence
  Description of Artificial Sequence: Synthetic oligonucleotide
gccucauucuuuggguguu

SEQ ID NO: 2271326 - RNA, 19 nt, Artificial Sequence
  Description of Artificial Sequence: Synthetic oligonucleotide
cuccaguauugaggucuau

SEQ ID NO: 2271327 - RNA, 19 nt, Artificial Sequence
  Description of Artificial Sequence: Synthetic oligonucleotide
cccgaagcaccagguaauu

SEQ ID NO: 2271328 - RNA, 19 nt, Artificial Sequence
  Description of Artificial Sequence: Synthetic oligonucleotide
cgggaagacuaagcauuuu

SEQ ID NO: 2271329 - RNA, 19 nt, Artificial Sequence
  Description of Artificial Sequence: Synthetic oligonucleotide
aaaagaaucacagagcggc

SEQ ID NO: 2271330 - RNA, 19 nt, Artificial Sequence
  Description of Artificial Sequence: Synthetic oligonucleotide
uuaagaacuaaauaguagg

SEQ ID NO: 2271331 - RNA, 19 nt, Artificial Sequence
  Description of Artificial Sequence: Synthetic oligonucleotide
uaaauaguaggccagaugc

SEQ ID NO: 2271332 - RNA, 19 nt, Artificial Sequence
  Description of Artificial Sequence: Synthetic oligonucleotide
aaguaaaugacaucagcgc

SEQ ID NO: 2271333 - RNA, 19 nt, Artificial Sequence
  Description of Artificial Sequence: Synthetic oligonucleotide
uuugcaaaagagaaggugg

SEQ ID NO: 2271334 - RNA, 19 nt, Artificial Sequence
  Description of Artificial Sequence: Synthetic oligonucleotide
uaaguaaaugacaucagcg

SEQ ID NO: 2271335 - RNA, 19 nt, Artificial Sequence
  Description of Artificial Sequence: Synthetic oligonucleotide
aauucugcaagcuaaaaga

SEQ ID NO: 2271336 - RNA, 19 nt, Artificial Sequence
  Description of Artificial Sequence: Synthetic oligonucleotide
auuaagaaguuauuguccc

SEQ ID NO: 2271337 - RNA, 19 nt, Artificial Sequence
  Description of Artificial Sequence: Synthetic oligonucleotide
gauuguaagaccuuaacug

SEQ ID NO: 2271338 - RNA, 19 nt, Artificial Sequence
  Description of Artificial Sequence: Synthetic oligonucleotide
aaugagaucaaauucucca

SEQ ID NO: 2271339 - RNA, 19 nt, Artificial Sequence
  Description of Artificial Sequence: Synthetic oligonucleotide
cuaaaagaaucacagagcg

SEQ ID NO: 2271340 - RNA, 19 nt, Artificial Sequence
  Description of Artificial Sequence: Synthetic oligonucleotide
aguaaaugacaucagcgcc

SEQ ID NO: 2271341 - RNA, 19 nt, Artificial Sequence
  Description of Artificial Sequence: Synthetic oligonucleotide
aacauuugacuuaagaaac

SEQ ID NO: 2271342 - RNA, 19 nt, Artificial Sequence
  Description of Artificial Sequence: Synthetic oligonucleotide
aacaugggaauucugauug

SEQ ID NO: 2271343 - RNA, 19 nt, Artificial Sequence
  Description of Artificial Sequence: Synthetic oligonucleotide
agcuaaaagaaucacagag

SEQ ID NO: 2271344 - RNA, 19 nt, Artificial Sequence
  Description of Artificial Sequence: Synthetic oligonucleotide
uuaacugacacauuguucu

SEQ ID NO: 2271345 - RNA, 19 nt, Artificial Sequence
  Description of Artificial Sequence: Synthetic oligonucleotide
aauauguacauccuucuca

SEQ ID NO: 2271346 - RNA, 19 nt, Artificial Sequence
  Description of Artificial Sequence: Synthetic oligonucleotide
aagaacuaaauaguaggcc

SEQ ID NO: 2271347 - RNA, 19 nt, Artificial Sequence
  Description of Artificial Sequence: Synthetic oligonucleotide
aagguaucuuaugagaacc

SEQ ID NO: 2271348 - RNA, 19 nt, Artificial Sequence
  Description of Artificial Sequence: Synthetic oligonucleotide
aacuuuccaaauucugucc

SEQ ID NO: 2271349 - RNA, 19 nt, Artificial Sequence
  Description of Artificial Sequence: Synthetic oligonucleotide
caagcuaaaagaaucacag

SEQ ID NO: 2271350 - RNA, 19 nt, Artificial Sequence
  Description of Artificial Sequence: Synthetic oligonucleotide
uguucuuagaaaccaaugc

SEQ ID NO: 2271351 - RNA, 19 nt, Artificial Sequence
  Description of Artificial Sequence: Synthetic oligonucleotide
gugcuuaagaacuaaauag

SEQ ID NO: 2271352 - RNA, 19 nt, Artificial Sequence
  Description of Artificial Sequence: Synthetic oligonucleotide
uauugucccguucauagcg

SEQ ID NO: 2271353 - RNA, 19 nt, Artificial Sequence
  Description of Artificial Sequence: Synthetic oligonucleotide
ugccaucacauuaacaugg

SEQ ID NO: 2271354 - RNA, 19 nt, Artificial Sequence
  Description of Artificial Sequence: Synthetic oligonucleotide
uuauucacaguaaacugcc

SEQ ID NO: 2271355 - RNA, 19 nt, Artificial Sequence
  Description of Artificial Sequence: Synthetic oligonucleotide
agugcuuuguuccuugagc

SEQ ID NO: 2271356 - RNA, 19 nt, Artificial Sequence
  Description of Artificial Sequence: Synthetic oligonucleotide
ugcuuuguaaauauguaca

SEQ ID NO: 2271357 - RNA, 19 nt, Artificial Sequence
  Description of Artificial Sequence: Synthetic oligonucleotide
guuauugucccguucauag

SEQ ID NO: 2271358 - RNA, 19 nt, Artificial Sequence
  Description of Artificial Sequence: Synthetic oligonucleotide
cuuauucacaguaaacugc

SEQ ID NO: 2271359 - RNA, 19 nt, Artificial Sequence
  Description of Artificial Sequence: Synthetic oligonucleotide
agaaccagaaaacucaucu

SEQ ID NO: 2271360 - RNA, 19 nt, Artificial Sequence
  Description of Artificial Sequence: Synthetic oligonucleotide
ucaacauuugacuuaagaa

SEQ ID NO: 2271361 - RNA, 19 nt, Artificial Sequence
  Description of Artificial Sequence: Synthetic oligonucleotide
cauuaagaaguuauugucc

SEQ ID NO: 2271362 - RNA, 19 nt, Artificial Sequence
  Description of Artificial Sequence: Synthetic oligonucleotide
aaauauguacauccuucuc

SEQ ID NO: 2271363 - RNA, 19 nt, Artificial Sequence
  Description of Artificial Sequence: Synthetic oligonucleotide
ucugcaagcuaaaagaauc

SEQ ID NO: 2271364 - RNA, 19 nt, Artificial Sequence
  Description of Artificial Sequence: Synthetic oligonucleotide
uaucuuaugagaaccagaa

SEQ ID NO: 2271365 - RNA, 19 nt, Artificial Sequence
  Description of Artificial Sequence: Synthetic oligonucleotide
aucguaguggaccuuauuc

SEQ ID NO: 2271366 - RNA, 19 nt, Artificial Sequence
  Description of Artificial Sequence: Synthetic oligonucleotide
ugaaggagaucugugaagg

SEQ ID NO: 2271367 - RNA, 19 nt, Artificial Sequence
  Description of Artificial Sequence: Synthetic oligonucleotide
aucauuaagaaguuauugu

SEQ ID NO: 2271368 - RNA, 19 nt, Artificial Sequence
  Description of Artificial Sequence: Synthetic oligonucleotide
aagaaugagaucaaauucu

SEQ ID NO: 2271369 - RNA, 19 nt, Artificial Sequence
  Description of Artificial Sequence: Synthetic oligonucleotide
acucuaaugcuacuugucg

SEQ ID NO: 2271370 - RNA, 19 nt, Artificial Sequence
  Description of Artificial Sequence: Synthetic oligonucleotide
ugcuuaagaacuaaauagu

SEQ ID NO: 2271371 - RNA, 19 nt, Artificial Sequence
  Description of Artificial Sequence: Synthetic oligonucleotide
uaagaaacucuaaugcuac

SEQ ID NO: 2271372 - RNA, 19 nt, Artificial Sequence
  Description of Artificial Sequence: Synthetic oligonucleotide
ugauuguaagaccuuaacu

SEQ ID NO: 2271373 - RNA, 19 nt, Artificial Sequence
  Description of Artificial Sequence: Synthetic oligonucleotide
guucuuagaaaccaaugcc

SEQ ID NO: 2271374 - RNA, 19 nt, Artificial Sequence
  Description of Artificial Sequence: Synthetic oligonucleotide
aagucagcuccuuaacaac

SEQ ID NO: 2271375 - RNA, 19 nt, Artificial Sequence
  Description of Artificial Sequence: Synthetic oligonucleotide
uuugacuuaagaaacucua

SEQ ID NO: 2271376 - RNA, 19 nt, Artificial Sequence
  Description of Artificial Sequence: Synthetic oligonucleotide
aagaccuuaacugacacau

SEQ ID NO: 2271377 - RNA, 19 nt, Artificial Sequence
  Description of Artificial Sequence: Synthetic oligonucleotide
gacaucagcgccaagaaug

SEQ ID NO: 2271378 - RNA, 19 nt, Artificial Sequence
  Description of Artificial Sequence: Synthetic oligonucleotide
auauguacauccuucucag

SEQ ID NO: 2271379 - RNA, 19 nt, Artificial Sequence
  Description of Artificial Sequence: Synthetic oligonucleotide
aaugcuacuugucgauccg

SEQ ID NO: 2271380 - RNA, 19 nt, Artificial Sequence
  Description of Artificial Sequence: Synthetic oligonucleotide
uaaaagaaucacagagcgg

SEQ ID NO: 2271381 - RNA, 19 nt, Artificial Sequence
  Description of Artificial Sequence: Synthetic oligonucleotide
uuacauaccccugaaaucu

SEQ ID NO: 2271382 - RNA, 19 nt, Artificial Sequence
  Description of Artificial Sequence: Synthetic oligonucleotide
cuaaguaaaugacaucagc

SEQ ID NO: 2271383 - RNA, 19 nt, Artificial Sequence
  Description of Artificial Sequence: Synthetic oligonucleotide
auuguaagaccuuaacuga

SEQ ID NO: 2271384 - RNA, 19 nt, Artificial Sequence
  Description of Artificial Sequence: Synthetic oligonucleotide
ugugaagguaucuucuaag

SEQ ID NO: 2271385 - RNA, 19 nt, Artificial Sequence
  Description of Artificial Sequence: Synthetic oligonucleotide
ucuaaguaaaugacaucag

SEQ ID NO: 2271386 - RNA, 19 nt, Artificial Sequence
  Description of Artificial Sequence: Synthetic oligonucleotide
aaaacuuuccaaauucugu

SEQ ID NO: 2271387 - RNA, 19 nt, Artificial Sequence
  Description of Artificial Sequence: Synthetic oligonucleotide
uuugcuuacauaccccuga

SEQ ID NO: 2271388 - RNA, 19 nt, Artificial Sequence
  Description of Artificial Sequence: Synthetic oligonucleotide
agaaucacagagcggcugc

SEQ ID NO: 2271389 - RNA, 19 nt, Artificial Sequence
  Description of Artificial Sequence: Synthetic oligonucleotide
uuauggaauuucuggagcc

SEQ ID NO: 2271390 - RNA, 19 nt, Artificial Sequence
  Description of Artificial Sequence: Synthetic oligonucleotide
uuggcuucaacauuugacu

SEQ ID NO: 2271391 - RNA, 19 nt, Artificial Sequence
  Description of Artificial Sequence: Synthetic oligonucleotide
aaauaguaggccagaugcc

SEQ ID NO: 2271392 - RNA, 19 nt, Artificial Sequence
  Description of Artificial Sequence: Synthetic oligonucleotide
uuaagaaguuauugucccg

SEQ ID NO: 2271393 - RNA, 19 nt, Artificial Sequence
  Description of Artificial Sequence: Synthetic oligonucleotide
aacuuuggguuggauaugg

SEQ ID NO: 2271394 - RNA, 19 nt, Artificial Sequence
  Description of Artificial Sequence: Synthetic oligonucleotide
aacaacaacuuuggguugg

SEQ ID NO: 2271395 - RNA, 19 nt, Artificial Sequence
  Description of Artificial Sequence: Synthetic oligonucleotide
aauaguaggccagaugcca

SEQ ID NO: 2271396 - RNA, 19 nt, Artificial Sequence
  Description of Artificial Sequence: Synthetic oligonucleotide
gaaguuauugucccguuca

SEQ ID NO: 2271397 - RNA, 19 nt, Artificial Sequence
  Description of Artificial Sequence: Synthetic oligonucleotide
uaaugcuacuugucgaucc

SEQ ID NO: 2271398 - RNA, 19 nt, Artificial Sequence
  Description of Artificial Sequence: Synthetic oligonucleotide
cuuuggguuggauaugggg

SEQ ID NO: 2271399 - RNA, 19 nt, Artificial Sequence
  Description of Artificial Sequence: Synthetic oligonucleotide
uuuacuucuuugcuuacau

SEQ ID NO: 2271400 - RNA, 19 nt, Artificial Sequence
  Description of Artificial Sequence: Synthetic oligonucleotide
ucauagcgaauucugcaag

SEQ ID NO: 2271401 - RNA, 19 nt, Artificial Sequence
  Description of Artificial Sequence: Synthetic oligonucleotide
agcgccaagaaugagauca

SEQ ID NO: 2271402 - RNA, 19 nt, Artificial Sequence
  Description of Artificial Sequence: Synthetic oligonucleotide
uaguggaccuuauucacag

SEQ ID NO: 2271403 - RNA, 19 nt, Artificial Sequence
  Description of Artificial Sequence: Synthetic oligonucleotide
uguaagaccuuaacugaca

SEQ ID NO: 2271404 - RNA, 19 nt, Artificial Sequence
  Description of Artificial Sequence: Synthetic oligonucleotide
cagauacguggaaagaacg

SEQ ID NO: 2271405 - RNA, 19 nt, Artificial Sequence
  Description of Artificial Sequence: Synthetic oligonucleotide
aucacauuaacaugggaau

SEQ ID NO: 2271406 - RNA, 19 nt, Artificial Sequence
  Description of Artificial Sequence: Synthetic oligonucleotide
uguaaauauguacauccuu

SEQ ID NO: 2271407 - RNA, 19 nt, Artificial Sequence
  Description of Artificial Sequence: Synthetic oligonucleotide
ucuccagauacguggaaag

SEQ ID NO: 2271408 - RNA, 19 nt, Artificial Sequence
  Description of Artificial Sequence: Synthetic oligonucleotide
guggaaagaacgauggccg

SEQ ID NO: 2271409 - RNA, 19 nt, Artificial Sequence
  Description of Artificial Sequence: Synthetic oligonucleotide
agaacgauggccgcguccc

SEQ ID NO: 2271410 - RNA, 19 nt, Artificial Sequence
  Description of Artificial Sequence: Synthetic oligonucleotide
uugccuccaguccugacgg

SEQ ID NO: 2271411 - RNA, 19 nt, Artificial Sequence
  Description of Artificial Sequence: Synthetic oligonucleotide
aaggcgacacacaaagaac

SEQ ID NO: 2271412 - RNA, 19 nt, Artificial Sequence
  Description of Artificial Sequence: Synthetic oligonucleotide
uucacaguaaacugccucu

SEQ ID NO: 2271413 - RNA, 19 nt, Artificial Sequence
  Description of Artificial Sequence: Synthetic oligonucleotide
guaaauauguacauccuuc

SEQ ID NO: 2271414 - RNA, 19 nt, Artificial Sequence
  Description of Artificial Sequence: Synthetic oligonucleotide
uuaacaugggaauucugau

SEQ ID NO: 2271415 - RNA, 19 nt, Artificial Sequence
  Description of Artificial Sequence: Synthetic oligonucleotide
aaugccuacuacaaguccu

SEQ ID NO: 2271416 - RNA, 19 nt, Artificial Sequence
  Description of Artificial Sequence: Synthetic oligonucleotide
acugacacauuguucuuag

SEQ ID NO: 2271417 - RNA, 19 nt, Artificial Sequence
  Description of Artificial Sequence: Synthetic oligonucleotide
auccgugauagucacauga

SEQ ID NO: 2271418 - RNA, 19 nt, Artificial Sequence
  Description of Artificial Sequence: Synthetic oligonucleotide
uuggguuggauauggggag

SEQ ID NO: 2271419 - RNA, 19 nt, Artificial Sequence
  Description of Artificial Sequence: Synthetic oligonucleotide
aacucuaaugcuacuuguc

SEQ ID NO: 2271420 - RNA, 19 nt, Artificial Sequence
  Description of Artificial Sequence: Synthetic oligonucleotide
accuuauucacaguaaacu

SEQ ID NO: 2271421 - RNA, 19 nt, Artificial Sequence
  Description of Artificial Sequence: Synthetic oligonucleotide
agaaguuauugucccguuc

SEQ ID NO: 2271422 - RNA, 19 nt, Artificial Sequence
  Description of Artificial Sequence: Synthetic oligonucleotide
uuguaagaccuuaacugac

SEQ ID NO: 2271423 - RNA, 19 nt, Artificial Sequence
  Description of Artificial Sequence: Synthetic oligonucleotide
cuuacauaccccugaaauc

SEQ ID NO: 2271424 - RNA, 19 nt, Artificial Sequence
  Description of Artificial Sequence: Synthetic oligonucleotide
ucguaguggaccuuauuca

SEQ ID NO: 2271425 - RNA, 19 nt, Artificial Sequence
  Description of Artificial Sequence: Synthetic oligonucleotide
cuuaacugacacauuguuc

SEQ ID NO: 2271426 - RNA, 19 nt, Artificial Sequence
  Description of Artificial Sequence: Synthetic oligonucleotide
uccugacggaucuggaugg

SEQ ID NO: 2271427 - RNA, 19 nt, Artificial Sequence
  Description of Artificial Sequence: Synthetic oligonucleotide
caaaagagaagguggcgag

SEQ ID NO: 2271428 - RNA, 19 nt, Artificial Sequence
  Description of Artificial Sequence: Synthetic oligonucleotide
agccacuaugcccacgagc

SEQ ID NO: 2271429 - RNA, 19 nt, Artificial Sequence
  Description of Artificial Sequence: Synthetic oligonucleotide
uccaaauucuguccccaag

SEQ ID NO: 2271430 - RNA, 19 nt, Artificial Sequence
  Description of Artificial Sequence: Synthetic oligonucleotide
acuucuuugcuuacauacc

SEQ ID NO: 2271431 - RNA, 19 nt, Artificial Sequence
  Description of Artificial Sequence: Synthetic oligonucleotide
uaagaaguuauugucccgu

SEQ ID NO: 2271432 - RNA, 19 nt, Artificial Sequence
  Description of Artificial Sequence: Synthetic oligonucleotide
agaaaccaaugccuacuac

SEQ ID NO: 2271433 - RNA, 19 nt, Artificial Sequence
  Description of Artificial Sequence: Synthetic oligonucleotide
ugauagucacaugagcacc

SEQ ID NO: 2271434 - RNA, 19 nt, Artificial Sequence
  Description of Artificial Sequence: Synthetic oligonucleotide
ucuaaugcuacuugucgau

SEQ ID NO: 2271435 - RNA, 19 nt, Artificial Sequence
  Description of Artificial Sequence: Synthetic oligonucleotide
uccgugauagucacaugag

SEQ ID NO: 2271436 - RNA, 19 nt, Artificial Sequence
  Description of Artificial Sequence: Synthetic oligonucleotide
ucucaaggugcuuaagaac

SEQ ID NO: 2271437 - RNA, 19 nt, Artificial Sequence
  Description of Artificial Sequence: Synthetic oligonucleotide
uucauagcgaauucugcaa

SEQ ID NO: 2271438 - RNA, 19 nt, Artificial Sequence
  Description of Artificial Sequence: Synthetic oligonucleotide
agaaugagaucaaauucuc

SEQ ID NO: 2271439 - RNA, 19 nt, Artificial Sequence
  Description of Artificial Sequence: Synthetic oligonucleotide
aagcuaaaagaaucacaga

SEQ ID NO: 2271440 - RNA, 19 nt, Artificial Sequence
  Description of Artificial Sequence: Synthetic oligonucleotide
caucacauuaacaugggaa

SEQ ID NO: 2271441 - RNA, 19 nt, Artificial Sequence
  Description of Artificial Sequence: Synthetic oligonucleotide
cuaaauaguaggccagaug

SEQ ID NO: 2271442 - RNA, 19 nt, Artificial Sequence
  Description of Artificial Sequence: Synthetic oligonucleotide
aaccaaugccuacuacaag

SEQ ID NO: 2271443 - RNA, 19 nt, Artificial Sequence
  Description of Artificial Sequence: Synthetic oligonucleotide
ugaagguaucuucuaagua

SEQ ID NO: 2271444 - RNA, 19 nt, Artificial Sequence
  Description of Artificial Sequence: Synthetic oligonucleotide
ugucgauccgugauaguca

SEQ ID NO: 2271445 - RNA, 19 nt, Artificial Sequence
  Description of Artificial Sequence: Synthetic oligonucleotide
cucaggaucguaguggacc

SEQ ID NO: 2271446 - RNA, 19 nt, Artificial Sequence
  Description of Artificial Sequence: Synthetic oligonucleotide
gugcuuuguaaauauguac

SEQ ID NO: 2271447 - RNA, 19 nt, Artificial Sequence
  Description of Artificial Sequence: Synthetic oligonucleotide
gacacauuguucuuagaaa

SEQ ID NO: 2271448 - RNA, 19 nt, Artificial Sequence
  Description of Artificial Sequence: Synthetic oligonucleotide
ugcaaaagagaagguggcg

SEQ ID NO: 2271449 - RNA, 19 nt, Artificial Sequence
  Description of Artificial Sequence: Synthetic oligonucleotide
cauagcgaauucugcaagc

SEQ ID NO: 2271450 - RNA, 19 nt, Artificial Sequence
  Description of Artificial Sequence: Synthetic oligonucleotide
guucauagcgaauucugca

SEQ ID NO: 2271451 - RNA, 19 nt, Artificial Sequence
  Description of Artificial Sequence: Synthetic oligonucleotide
uagguuggcuucaacauuu

SEQ ID NO: 2271452 - RNA, 19 nt, Artificial Sequence
  Description of Artificial Sequence: Synthetic oligonucleotide
aucucaaggugcuuaagaa

SEQ ID NO: 2271453 - RNA, 19 nt, Artificial Sequence
  Description of Artificial Sequence: Synthetic oligonucleotide
acauuguucuuagaaacca

SEQ ID NO: 2271454 - RNA, 19 nt, Artificial Sequence
  Description of Artificial Sequence: Synthetic oligonucleotide
ugacggaucuggauggugu

SEQ ID NO: 2271455 - RNA, 19 nt, Artificial Sequence
  Description of Artificial Sequence: Synthetic oligonucleotide
agguagguuggcuucaaca

SEQ ID NO: 2271456 - RNA, 19 nt, Artificial Sequence
  Description of Artificial Sequence: Synthetic oligonucleotide
ucugauuguaagaccuuaa

SEQ ID NO: 2271457 - RNA, 19 nt, Artificial Sequence
  Description of Artificial Sequence: Synthetic oligonucleotide
aaaccaaugccuacuacaa

SEQ ID NO: 2271458 - RNA, 19 nt, Artificial Sequence
  Description of Artificial Sequence: Synthetic oligonucleotide
guuugaaggagaucuguga

SEQ ID NO: 2271459 - RNA, 19 nt, Artificial Sequence
  Description of Artificial Sequence: Synthetic oligonucleotide
gugauagucacaugagcac

SEQ ID NO: 2271460 - RNA, 19 nt, Artificial Sequence
  Description of Artificial Sequence: Synthetic oligonucleotide
cugauuguaagaccuuaac

SEQ ID NO: 2271461 - RNA, 19 nt, Artificial Sequence
  Description of Artificial Sequence: Synthetic oligonucleotide
uauguacauccuucucagg

SEQ ID NO: 2271462 - RNA, 19 nt, Artificial Sequence
  Description of Artificial Sequence: Synthetic oligonucleotide
aagaaucacagagcggcug

SEQ ID NO: 2271463 - RNA, 19 nt, Artificial Sequence
  Description of Artificial Sequence: Synthetic oligonucleotide
guuggcuucaacauuugac

SEQ ID NO: 2271464 - RNA, 19 nt, Artificial Sequence
  Description of Artificial Sequence: Synthetic oligonucleotide
aaaccacugccgcgacucc

SEQ ID NO: 2271465 - RNA, 19 nt, Artificial Sequence
  Description of Artificial Sequence: Synthetic oligonucleotide
gguggcgagaggcuuaugg

SEQ ID NO: 2271466 - RNA, 19 nt, Artificial Sequence
  Description of Artificial Sequence: Synthetic oligonucleotide
ugccucuccagcaucauua

SEQ ID NO: 2271467 - RNA, 19 nt, Artificial Sequence
  Description of Artificial Sequence: Synthetic oligonucleotide
guaagaccuuaacugacac

SEQ ID NO: 2271468 - RNA, 19 nt, Artificial Sequence
  Description of Artificial Sequence: Synthetic oligonucleotide
aacuaaauaguaggccaga

SEQ ID NO: 2271469 - RNA, 19 nt, Artificial Sequence
  Description of Artificial Sequence: Synthetic oligonucleotide
ugucccaggguuugaagga

SEQ ID NO: 2271470 - RNA, 19 nt, Artificial Sequence
  Description of Artificial Sequence: Synthetic oligonucleotide
uauggaauuucuggagccc

SEQ ID NO: 2271471 - RNA, 19 nt, Artificial Sequence
  Description of Artificial Sequence: Synthetic oligonucleotide
cacauuaacaugggaauuc

SEQ ID NO: 2271472 - RNA, 19 nt, Artificial Sequence
  Description of Artificial Sequence: Synthetic oligonucleotide
uaacaacaacuuuggguug

SEQ ID NO: 2271473 - RNA, 19 nt, Artificial Sequence
  Description of Artificial Sequence: Synthetic oligonucleotide
ucaggaucguaguggaccu

SEQ ID NO: 2271474 - RNA, 19 nt, Artificial Sequence
  Description of Artificial Sequence: Synthetic oligonucleotide
acuugucgauccgugauag

SEQ ID NO: 2271475 - RNA, 19 nt, Artificial Sequence
  Description of Artificial Sequence: Synthetic oligonucleotide
uaagaccuuaacugacaca

SEQ ID NO: 2271476 - RNA, 19 nt, Artificial Sequence
  Description of Artificial Sequence: Synthetic oligonucleotide
aaagaacgauggccgcguc

SEQ ID NO: 2271477 - RNA, 19 nt, Artificial Sequence
  Description of Artificial Sequence: Synthetic oligonucleotide
uacuacaaguccucccucu

SEQ ID NO: 2271478 - RNA, 19 nt, Artificial Sequence
  Description of Artificial Sequence: Synthetic oligonucleotide
caaugccuacuacaagucc

SEQ ID NO: 2271479 - RNA, 19 nt, Artificial Sequence
  Description of Artificial Sequence: Synthetic oligonucleotide
ccuuauucacaguaaacug

SEQ ID NO: 2271480 - RNA, 19 nt, Artificial Sequence
  Description of Artificial Sequence: Synthetic oligonucleotide
gcuaaaagaaucacagagc

SEQ ID NO: 2271481 - RNA, 19 nt, Artificial Sequence
  Description of Artificial Sequence: Synthetic oligonucleotide
guaaaugacaucagcgcca

SEQ ID NO: 2271482 - RNA, 19 nt, Artificial Sequence
  Description of Artificial Sequence: Synthetic oligonucleotide
uaacaugggaauucugauu

SEQ ID NO: 2271483 - RNA, 19 nt, Artificial Sequence
  Description of Artificial Sequence: Synthetic oligonucleotide
caguaaacugccucuccag

SEQ ID NO: 2271484 - RNA, 19 nt, Artificial Sequence
  Description of Artificial Sequence: Synthetic oligonucleotide
caaggcgacacacaaagaa

SEQ ID NO: 2271485 - RNA, 19 nt, Artificial Sequence
  Description of Artificial Sequence: Synthetic oligonucleotide
uggaccuuauucacaguaa

SEQ ID NO: 2271486 - RNA, 19 nt, Artificial Sequence
  Description of Artificial Sequence: Synthetic oligonucleotide
aaggagaucugugaaggua

SEQ ID NO: 2271487 - RNA, 19 nt, Artificial Sequence
  Description of Artificial Sequence: Synthetic oligonucleotide
uggagcccuaucuccaugc

SEQ ID NO: 2271488 - RNA, 19 nt, Artificial Sequence
  Description of Artificial Sequence: Synthetic oligonucleotide
acagagcagccccugagcu

SEQ ID NO: 2271489 - RNA, 19 nt, Artificial Sequence
  Description of Artificial Sequence: Synthetic oligonucleotide
ugcaagcuaaaagaaucac

SEQ ID NO: 2271490 - RNA, 19 nt, Artificial Sequence
  Description of Artificial Sequence: Synthetic oligonucleotide
guccugacggaucuggaug

SEQ ID NO: 2271491 - RNA, 19 nt, Artificial Sequence
  Description of Artificial Sequence: Synthetic oligonucleotide
cuucuaaguaaaugacauc

SEQ ID NO: 2271492 - RNA, 19 nt, Artificial Sequence
  Description of Artificial Sequence: Synthetic oligonucleotide
agucugccaucacauuaac

SEQ ID NO: 2271493 - RNA, 19 nt, Artificial Sequence
  Description of Artificial Sequence: Synthetic oligonucleotide
aaguuauugucccguucau

SEQ ID NO: 2271494 - RNA, 19 nt, Artificial Sequence
  Description of Artificial Sequence: Synthetic oligonucleotide
uaguaggccagaugccaag

SEQ ID NO: 2271495 - RNA, 19 nt, Artificial Sequence
  Description of Artificial Sequence: Synthetic oligonucleotide
uacauaccccugaaaucug

SEQ ID NO: 2271496 - RNA, 19 nt, Artificial Sequence
  Description of Artificial Sequence: Synthetic oligonucleotide
uggaaagaacgauggccgc

SEQ ID NO: 2271497 - RNA, 19 nt, Artificial Sequence
  Description of Artificial Sequence: Synthetic oligonucleotide
gugcuuuguuccuugagca

SEQ ID NO: 2271498 - RNA, 19 nt, Artificial Sequence
  Description of Artificial Sequence: Synthetic oligonucleotide
acuacaaguccucccucug

SEQ ID NO: 2271499 - RNA, 19 nt, Artificial Sequence
  Description of Artificial Sequence: Synthetic oligonucleotide
auuugacuuaagaaacucu

SEQ ID NO: 2271500 - RNA, 19 nt, Artificial Sequence
  Description of Artificial Sequence: Synthetic oligonucleotide
aucuucuaaguaaaugaca

SEQ ID NO: 2271501 - RNA, 19 nt, Artificial Sequence
  Description of Artificial Sequence: Synthetic oligonucleotide
caagucagcuccuuaacaa

SEQ ID NO: 2271502 - RNA, 19 nt, Artificial Sequence
  Description of Artificial Sequence: Synthetic oligonucleotide
uagaaaccaaugccuacua

SEQ ID NO: 2271503 - RNA, 19 nt, Artificial Sequence
  Description of Artificial Sequence: Synthetic oligonucleotide
uauucacaguaaacugccu

SEQ ID NO: 2271504 - RNA, 19 nt, Artificial Sequence
  Description of Artificial Sequence: Synthetic oligonucleotide
uucaucucaaggugcuuaa

SEQ ID NO: 2271505 - RNA, 19 nt, Artificial Sequence
  Description of Artificial Sequence: Synthetic oligonucleotide
ugccgcgacucccaguugc

SEQ ID NO: 2271506 - RNA, 19 nt, Artificial Sequence
  Description of Artificial Sequence: Synthetic oligonucleotide
cauuaacaugggaauucug

SEQ ID NO: 2271507 - RNA, 19 nt, Artificial Sequence
  Description of Artificial Sequence: Synthetic oligonucleotide
cuugagcagcucugguugg

SEQ ID NO: 2271508 - RNA, 19 nt, Artificial Sequence
  Description of Artificial Sequence: Synthetic oligonucleotide
cuuugcuuacauaccccug

SEQ ID NO: 2271509 - RNA, 19 nt, Artificial Sequence
  Description of Artificial Sequence: Synthetic oligonucleotide
acauuaacaugggaauucu

SEQ ID NO: 2271510 - RNA, 19 nt, Artificial Sequence
  Description of Artificial Sequence: Synthetic oligonucleotide
ucccaguugccuccagucc

SEQ ID NO: 2271511 - RNA, 19 nt, Artificial Sequence
  Description of Artificial Sequence: Synthetic oligonucleotide
auacguggaaagaacgaug

SEQ ID NO: 2271512 - RNA, 19 nt, Artificial Sequence
  Description of Artificial Sequence: Synthetic oligonucleotide
cugccaucacauuaacaug

SEQ ID NO: 2271513 - RNA, 19 nt, Artificial Sequence
  Description of Artificial Sequence: Synthetic oligonucleotide
uaaaugacaucagcgccaa

SEQ ID NO: 2271514 - RNA, 19 nt, Artificial Sequence
  Description of Artificial Sequence: Synthetic oligonucleotide
cucuaaugcuacuugucga

SEQ ID NO: 2271515 - RNA, 19 nt, Artificial Sequence
  Description of Artificial Sequence: Synthetic oligonucleotide
caaaccacugccgcgacuc

SEQ ID NO: 2271516 - RNA, 19 nt, Artificial Sequence
  Description of Artificial Sequence: Synthetic oligonucleotide
agaaacucuaaugcuacuu

SEQ ID NO: 2271517 - RNA, 19 nt, Artificial Sequence
  Description of Artificial Sequence: Synthetic oligonucleotide
auuguucuuagaaaccaau

SEQ ID NO: 2271518 - RNA, 19 nt, Artificial Sequence
  Description of Artificial Sequence: Synthetic oligonucleotide
caucucaaggugcuuaaga

SEQ ID NO: 2271519 - RNA, 19 nt, Artificial Sequence
  Description of Artificial Sequence: Synthetic oligonucleotide
auagcgaauucugcaagcu

SEQ ID NO: 2271520 - RNA, 19 nt, Artificial Sequence
  Description of Artificial Sequence: Synthetic oligonucleotide
ucaaggugcuuaagaacua

SEQ ID NO: 2271521 - RNA, 19 nt, Artificial Sequence
  Description of Artificial Sequence: Synthetic oligonucleotide
gguaucuuaugagaaccag

SEQ ID NO: 2271522 - RNA, 19 nt, Artificial Sequence
  Description of Artificial Sequence: Synthetic oligonucleotide
cucugguuggacaggcuug

SEQ ID NO: 2271523 - RNA, 19 nt, Artificial Sequence
  Description of Artificial Sequence: Synthetic oligonucleotide
gacggaucuggauggugug

SEQ ID NO: 2271524 - RNA, 19 nt, Artificial Sequence
  Description of Artificial Sequence: Synthetic oligonucleotide
agagaugucccaggguuug

SEQ ID NO: 2271525 - RNA, 19 nt, Artificial Sequence
  Description of Artificial Sequence: Synthetic oligonucleotide
aggcgacacacaaagaaca

SEQ ID NO: 2271526 - RNA, 19 nt, Artificial Sequence
  Description of Artificial Sequence: Synthetic oligonucleotide
caacagagcagccccugag

SEQ ID NO: 2271527 - RNA, 19 nt, Artificial Sequence
  Description of Artificial Sequence: Synthetic oligonucleotide
uucugauuguaagaccuua

SEQ ID NO: 2271528 - RNA, 19 nt, Artificial Sequence
  Description of Artificial Sequence: Synthetic oligonucleotide
acauuugacuuaagaaacu

SEQ ID NO: 2271529 - RNA, 19 nt, Artificial Sequence
  Description of Artificial Sequence: Synthetic oligonucleotide
guaucuuaugagaaccaga

SEQ ID NO: 2271530 - RNA, 19 nt, Artificial Sequence
  Description of Artificial Sequence: Synthetic oligonucleotide
agauacguggaaagaacga

SEQ ID NO: 2271531 - RNA, 19 nt, Artificial Sequence
  Description of Artificial Sequence: Synthetic oligonucleotide
uacuugucgauccgugaua

SEQ ID NO: 2271532 - RNA, 19 nt, Artificial Sequence
  Description of Artificial Sequence: Synthetic oligonucleotide
auauggggagguagguugg

SEQ ID NO: 2271533 - RNA, 19 nt, Artificial Sequence
  Description of Artificial Sequence: Synthetic oligonucleotide
cugcaagcuaaaagaauca

SEQ ID NO: 2271534 - RNA, 19 nt, Artificial Sequence
  Description of Artificial Sequence: Synthetic oligonucleotide
acugccgcgacucccaguu

SEQ ID NO: 2271535 - RNA, 19 nt, Artificial Sequence
  Description of Artificial Sequence: Synthetic oligonucleotide
uugcuuacauaccccugaa

SEQ ID NO: 2271536 - RNA, 19 nt, Artificial Sequence
  Description of Artificial Sequence: Synthetic oligonucleotide
gcugcuacagagauguccc

SEQ ID NO: 2271537 - RNA, 19 nt, Artificial Sequence
  Description of Artificial Sequence: Synthetic oligonucleotide
gucgauccgugauagucac

SEQ ID NO: 2271538 - RNA, 19 nt, Artificial Sequence
  Description of Artificial Sequence: Synthetic oligonucleotide
acauaccccugaaaucugg

SEQ ID NO: 2271539 - RNA, 19 nt, Artificial Sequence
  Description of Artificial Sequence: Synthetic oligonucleotide
gucccaaaccacugccgcg

SEQ ID NO: 2271540 - RNA, 19 nt, Artificial Sequence
  Description of Artificial Sequence: Synthetic oligonucleotide
caggguuugaaggagaucu

SEQ ID NO: 2271541 - RNA, 19 nt, Artificial Sequence
  Description of Artificial Sequence: Synthetic oligonucleotide
agucagcuccuuaacaaca

SEQ ID NO: 2271542 - RNA, 19 nt, Artificial Sequence
  Description of Artificial Sequence: Synthetic oligonucleotide
auucugcaagcuaaaagaa

SEQ ID NO: 2271543 - RNA, 19 nt, Artificial Sequence
  Description of Artificial Sequence: Synthetic oligonucleotide
aucagcgccaagaaugaga

SEQ ID NO: 2271544 - RNA, 19 nt, Artificial Sequence
  Description of Artificial Sequence: Synthetic oligonucleotide
augcucuccucauagggua

SEQ ID NO: 2271545 - RNA, 19 nt, Artificial Sequence
  Description of Artificial Sequence: Synthetic oligonucleotide
ggcuuauggaauuucugga

SEQ ID NO: 2271546 - RNA, 19 nt, Artificial Sequence
  Description of Artificial Sequence: Synthetic oligonucleotide
uggauggugugguuugcaa

SEQ ID NO: 2271547 - RNA, 19 nt, Artificial Sequence
  Description of Artificial Sequence: Synthetic oligonucleotide
aacugacacauuguucuua

SEQ ID NO: 2271548 - RNA, 19 nt, Artificial Sequence
  Description of Artificial Sequence: Synthetic oligonucleotide
guggaccuuauucacagua

SEQ ID NO: 2271549 - RNA, 19 nt, Artificial Sequence
  Description of Artificial Sequence: Synthetic oligonucleotide
aucuuaugagaaccagaaa

SEQ ID NO: 2271550 - RNA, 19 nt, Artificial Sequence
  Description of Artificial Sequence: Synthetic oligonucleotide
cucccaguugccuccaguc

SEQ ID NO: 2271551 - RNA, 19 nt, Artificial Sequence
  Description of Artificial Sequence: Synthetic oligonucleotide
ugcuuacauaccccugaaa

SEQ ID NO: 2271552 - RNA, 19 nt, Artificial Sequence
  Description of Artificial Sequence: Synthetic oligonucleotide
auggaauuucuggagcccu

SEQ ID NO: 2271553 - RNA, 19 nt, Artificial Sequence
  Description of Artificial Sequence: Synthetic oligonucleotide
ccuugagcagcucugguug

SEQ ID NO: 2271554 - RNA, 19 nt, Artificial Sequence
  Description of Artificial Sequence: Synthetic oligonucleotide
ucaucucaaggugcuuaag

SEQ ID NO: 2271555 - RNA, 19 nt, Artificial Sequence
  Description of Artificial Sequence: Synthetic oligonucleotide
uccuugagcagcucugguu

SEQ ID NO: 2271556 - RNA, 19 nt, Artificial Sequence
  Description of Artificial Sequence: Synthetic oligonucleotide
agaggcuuauggaauuucu

SEQ ID NO: 2271557 - RNA, 19 nt, Artificial Sequence
  Description of Artificial Sequence: Synthetic oligonucleotide
gugaagguaucuucuaagu

SEQ ID NO: 2271558 - RNA, 19 nt, Artificial Sequence
  Description of Artificial Sequence: Synthetic oligonucleotide
cacagagcggcugcuacag

SEQ ID NO: 2271559 - RNA, 19 nt, Artificial Sequence
  Description of Artificial Sequence: Synthetic oligonucleotide
cagccccugagcuccacgg

SEQ ID NO: 2271560 - RNA, 19 nt, Artificial Sequence
  Description of Artificial Sequence: Synthetic oligonucleotide
aggagaucugugaagguau

SEQ ID NO: 2271561 - RNA, 19 nt, Artificial Sequence
  Description of Artificial Sequence: Synthetic oligonucleotide
cguggaaagaacgauggcc

SEQ ID NO: 2271562 - RNA, 19 nt, Artificial Sequence
  Description of Artificial Sequence: Synthetic oligonucleotide
agaucugugaagguaucuu

SEQ ID NO: 2271563 - RNA, 19 nt, Artificial Sequence
  Description of Artificial Sequence: Synthetic oligonucleotide
aguccugacggaucuggau

SEQ ID NO: 2271564 - RNA, 19 nt, Artificial Sequence
  Description of Artificial Sequence: Synthetic oligonucleotide
accccugaaaucugguaaa

SEQ ID NO: 2271565 - RNA, 19 nt, Artificial Sequence
  Description of Artificial Sequence: Synthetic oligonucleotide
ucaaauucuccaggcgaaa

SEQ ID NO: 2271566 - RNA, 19 nt, Artificial Sequence
  Description of Artificial Sequence: Synthetic oligonucleotide
cuccagcaucauuaagaag

SEQ ID NO: 2271567 - RNA, 19 nt, Artificial Sequence
  Description of Artificial Sequence: Synthetic oligonucleotide
gauacguggaaagaacgau

SEQ ID NO: 2271568 - RNA, 19 nt, Artificial Sequence
  Description of Artificial Sequence: Synthetic oligonucleotide
gcuuacauaccccugaaau

SEQ ID NO: 2271569 - RNA, 19 nt, Artificial Sequence
  Description of Artificial Sequence: Synthetic oligonucleotide
cuccacaacagagcagccc

SEQ ID NO: 2271570 - RNA, 19 nt, Artificial Sequence
  Description of Artificial Sequence: Synthetic oligonucleotide
uggaauuucuggagcccua

SEQ ID NO: 2271571 - RNA, 19 nt, Artificial Sequence
  Description of Artificial Sequence: Synthetic oligonucleotide
acaugggaauucugauugu

SEQ ID NO: 2271572 - RNA, 19 nt, Artificial Sequence
  Description of Artificial Sequence: Synthetic oligonucleotide
ggcugcuacagagaugucc

SEQ ID NO: 2271573 - RNA, 19 nt, Artificial Sequence
  Description of Artificial Sequence: Synthetic oligonucleotide
ugcucuccucauaggguac

SEQ ID NO: 2271574 - RNA, 19 nt, Artificial Sequence
  Description of Artificial Sequence: Synthetic oligonucleotide
aggugcuuaagaacuaaau

SEQ ID NO: 2271575 - RNA, 19 nt, Artificial Sequence
  Description of Artificial Sequence: Synthetic oligonucleotide
gugugguuugcaaaagaga

SEQ ID NO: 2271576 - RNA, 19 nt, Artificial Sequence
  Description of Artificial Sequence: Synthetic oligonucleotide
aaggugcuuaagaacuaaa

SEQ ID NO: 2271577 - RNA, 19 nt, Artificial Sequence
  Description of Artificial Sequence: Synthetic oligonucleotide
cuaaugcuacuugucgauc

SEQ ID NO: 2271578 - RNA, 19 nt, Artificial Sequence
  Description of Artificial Sequence: Synthetic oligonucleotide
acggaucuggauggugugg

SEQ ID NO: 2271579 - RNA, 19 nt, Artificial Sequence
  Description of Artificial Sequence: Synthetic oligonucleotide
cgugauagucacaugagca

SEQ ID NO: 2271580 - RNA, 19 nt, Artificial Sequence
  Description of Artificial Sequence: Synthetic oligonucleotide
auggugugguuugcaaaag

SEQ ID NO: 2271581 - RNA, 19 nt, Artificial Sequence
  Description of Artificial Sequence: Synthetic oligonucleotide
gaugccaaggcgacacaca

SEQ ID NO: 2271582 - RNA, 19 nt, Artificial Sequence
  Description of Artificial Sequence: Synthetic oligonucleotide
gauccgugauagucacaug

SEQ ID NO: 2271583 - RNA, 19 nt, Artificial Sequence
  Description of Artificial Sequence: Synthetic oligonucleotide
uaccagggccauuucuccu

SEQ ID NO: 2271584 - RNA, 19 nt, Artificial Sequence
  Description of Artificial Sequence: Synthetic oligonucleotide
acggcacccaucuccagau

SEQ ID NO: 2271585 - RNA, 19 nt, Artificial Sequence
  Description of Artificial Sequence: Synthetic oligonucleotide
acaucagcgccaagaauga

SEQ ID NO: 2271586 - RNA, 19 nt, Artificial Sequence
  Description of Artificial Sequence: Synthetic oligonucleotide
ucccguucauagcgaauuc

SEQ ID NO: 2271587 - RNA, 19 nt, Artificial Sequence
  Description of Artificial Sequence: Synthetic oligonucleotide
uaugcccacgagcccugug

SEQ ID NO: 2271588 - RNA, 19 nt, Artificial Sequence
  Description of Artificial Sequence: Synthetic oligonucleotide
ggcacccaucuccagauac

SEQ ID NO: 2271589 - RNA, 19 nt, Artificial Sequence
  Description of Artificial Sequence: Synthetic oligonucleotide
auaccccugaaaucuggua

SEQ ID NO: 2271590 - RNA, 19 nt, Artificial Sequence
  Description of Artificial Sequence: Synthetic oligonucleotide
guaguggaccuuauucaca

SEQ ID NO: 2271591 - RNA, 19 nt, Artificial Sequence
  Description of Artificial Sequence: Synthetic oligonucleotide
accuuaacugacacauugu

SEQ ID NO: 2271592 - RNA, 19 nt, Artificial Sequence
  Description of Artificial Sequence: Synthetic oligonucleotide
gaaagaacgauggccgcgu

SEQ ID NO: 2271593 - RNA, 19 nt, Artificial Sequence
  Description of Artificial Sequence: Synthetic oligonucleotide
cagucugccaucacauuaa

SEQ ID NO: 2271594 - RNA, 19 nt, Artificial Sequence
  Description of Artificial Sequence: Synthetic oligonucleotide
ucuccaugcucuccucaua

SEQ ID NO: 2271595 - RNA, 19 nt, Artificial Sequence
  Description of Artificial Sequence: Synthetic oligonucleotide
gagaggcuuauggaauuuc

SEQ ID NO: 2271596 - RNA, 19 nt, Artificial Sequence
  Description of Artificial Sequence: Synthetic oligonucleotide
ccguucauagcgaauucug

SEQ ID NO: 2271597 - RNA, 19 nt, Artificial Sequence
  Description of Artificial Sequence: Synthetic oligonucleotide
agguaucuuaugagaacca

SEQ ID NO: 2271598 - RNA, 19 nt, Artificial Sequence
  Description of Artificial Sequence: Synthetic oligonucleotide
ccuuaacaacaacuuuggg

SEQ ID NO: 2271599 - RNA, 19 nt, Artificial Sequence
  Description of Artificial Sequence: Synthetic oligonucleotide
augggaauucugauuguaa

SEQ ID NO: 2271600 - RNA, 19 nt, Artificial Sequence
  Description of Artificial Sequence: Synthetic oligonucleotide
acuuuggguuggauauggg

SEQ ID NO: 2271601 - RNA, 19 nt, Artificial Sequence
  Description of Artificial Sequence: Synthetic oligonucleotide
cguucauagcgaauucugc

SEQ ID NO: 2271602 - RNA, 19 nt, Artificial Sequence
  Description of Artificial Sequence: Synthetic oligonucleotide
ggaccuuauucacaguaaa

SEQ ID NO: 2271603 - RNA, 19 nt, Artificial Sequence
  Description of Artificial Sequence: Synthetic oligonucleotide
gguaccagggccauuucuc

SEQ ID NO: 2271604 - RNA, 19 nt, Artificial Sequence
  Description of Artificial Sequence: Synthetic oligonucleotide
aggccagaugccaaggcga

SEQ ID NO: 2271605 - RNA, 19 nt, Artificial Sequence
  Description of Artificial Sequence: Synthetic oligonucleotide
gcuuaagaacuaaauagua

SEQ ID NO: 2271606 - RNA, 19 nt, Artificial Sequence
  Description of Artificial Sequence: Synthetic oligonucleotide
ugucccguucauagcgaau

SEQ ID NO: 2271607 - RNA, 19 nt, Artificial Sequence
  Description of Artificial Sequence: Synthetic oligonucleotide
aguuauugucccguucaua

SEQ ID NO: 2271608 - RNA, 19 nt, Artificial Sequence
  Description of Artificial Sequence: Synthetic oligonucleotide
cuaucuccaugcucuccuc

SEQ ID NO: 2271609 - RNA, 19 nt, Artificial Sequence
  Description of Artificial Sequence: Synthetic oligonucleotide
aaucacagagcggcugcua

SEQ ID NO: 2271610 - RNA, 19 nt, Artificial Sequence
  Description of Artificial Sequence: Synthetic oligonucleotide
ccgugauagucacaugagc

SEQ ID NO: 2271611 - RNA, 19 nt, Artificial Sequence
  Description of Artificial Sequence: Synthetic oligonucleotide
cuuuguuccuugagcagcu

SEQ ID NO: 2271612 - RNA, 19 nt, Artificial Sequence
  Description of Artificial Sequence: Synthetic oligonucleotide
gagguagguuggcuucaac

SEQ ID NO: 2271613 - RNA, 19 nt, Artificial Sequence
  Description of Artificial Sequence: Synthetic oligonucleotide
gccuacuacaaguccuccc

SEQ ID NO: 2271614 - RNA, 19 nt, Artificial Sequence
  Description of Artificial Sequence: Synthetic oligonucleotide
aggguaccagggccauuuc

SEQ ID NO: 2271615 - RNA, 19 nt, Artificial Sequence
  Description of Artificial Sequence: Synthetic oligonucleotide
auaguaggccagaugccaa

SEQ ID NO: 2271616 - RNA, 19 nt, Artificial Sequence
  Description of Artificial Sequence: Synthetic oligonucleotide
cagcuccuuaacaacaacu

SEQ ID NO: 2271617 - RNA, 19 nt, Artificial Sequence
  Description of Artificial Sequence: Synthetic oligonucleotide
ucgauccgugauagucaca

SEQ ID NO: 2271618 - RNA, 19 nt, Artificial Sequence
  Description of Artificial Sequence: Synthetic oligonucleotide
agaagguggcgagaggcuu

SEQ ID NO: 2271619 - RNA, 19 nt, Artificial Sequence
  Description of Artificial Sequence: Synthetic oligonucleotide
caacuuuggguuggauaug

SEQ ID NO: 2271620 - RNA, 19 nt, Artificial Sequence
  Description of Artificial Sequence: Synthetic oligonucleotide
aagguggcgagaggcuuau

SEQ ID NO: 2271621 - RNA, 19 nt, Artificial Sequence
  Description of Artificial Sequence: Synthetic oligonucleotide
gcagucugccaucacauua

SEQ ID NO: 2271622 - RNA, 19 nt, Artificial Sequence
  Description of Artificial Sequence: Synthetic oligonucleotide
aggaucguaguggaccuua

SEQ ID NO: 2271623 - RNA, 19 nt, Artificial Sequence
  Description of Artificial Sequence: Synthetic oligonucleotide
caaguccucccucuggucu

SEQ ID NO: 2271624 - RNA, 19 nt, Artificial Sequence
  Description of Artificial Sequence: Synthetic oligonucleotide
ccaagaaugagaucaaauu

SEQ ID NO: 2271625 - RNA, 19 nt, Artificial Sequence
  Description of Artificial Sequence: Synthetic oligonucleotide
ugcagucugccaucacauu

SEQ ID NO: 2271626 - RNA, 19 nt, Artificial Sequence
  Description of Artificial Sequence: Synthetic oligonucleotide
cuggagcccuaucuccaug

SEQ ID NO: 2271627 - RNA, 19 nt, Artificial Sequence
  Description of Artificial Sequence: Synthetic oligonucleotide
gcgacucccaguugccucc

SEQ ID NO: 2271628 - RNA, 19 nt, Artificial Sequence
  Description of Artificial Sequence: Synthetic oligonucleotide
cugacggaucuggauggug

SEQ ID NO: 2271629 - RNA, 19 nt, Artificial Sequence
  Description of Artificial Sequence: Synthetic oligonucleotide
ccuucucaggaucguagug

SEQ ID NO: 2271630 - RNA, 19 nt, Artificial Sequence
  Description of Artificial Sequence: Synthetic oligonucleotide
ccagcuccacaacagagca

SEQ ID NO: 2271631 - RNA, 19 nt, Artificial Sequence
  Description of Artificial Sequence: Synthetic oligonucleotide
gagaucugugaagguaucu

SEQ ID NO: 2271632 - RNA, 19 nt, Artificial Sequence
  Description of Artificial Sequence: Synthetic oligonucleotide
agagcggcugcuacagaga

SEQ ID NO: 2271633 - RNA, 19 nt, Artificial Sequence
  Description of Artificial Sequence: Synthetic oligonucleotide
cuacuugucgauccgugau

SEQ ID NO: 2271634 - RNA, 19 nt, Artificial Sequence
  Description of Artificial Sequence: Synthetic oligonucleotide
ggggagguagguuggcuuc

SEQ ID NO: 2271635 - RNA, 19 nt, Artificial Sequence
  Description of Artificial Sequence: Synthetic oligonucleotide
acgagcccugugccagcac

SEQ ID NO: 2271636 - RNA, 19 nt, Artificial Sequence
  Description of Artificial Sequence: Synthetic oligonucleotide
cacggcacccaucuccaga

SEQ ID NO: 2271637 - RNA, 19 nt, Artificial Sequence
  Description of Artificial Sequence: Synthetic oligonucleotide
caucagcgccaagaaugag

SEQ ID NO: 2271638 - RNA, 19 nt, Artificial Sequence
  Description of Artificial Sequence: Synthetic oligonucleotide
gguuggcuucaacauuuga

SEQ ID NO: 2271639 - RNA, 19 nt, Artificial Sequence
  Description of Artificial Sequence: Synthetic oligonucleotide
caugagcacccagcagggc

SEQ ID NO: 2271640 - RNA, 19 nt, Artificial Sequence
  Description of Artificial Sequence: Synthetic oligonucleotide
acuaugcccacgagcccug

SEQ ID NO: 2271641 - RNA, 19 nt, Artificial Sequence
  Description of Artificial Sequence: Synthetic oligonucleotide
gcggcugcuacagagaugu

SEQ ID NO: 2271642 - RNA, 19 nt, Artificial Sequence
  Description of Artificial Sequence: Synthetic oligonucleotide
ggcgacacacaaagaacac

SEQ ID NO: 2271643 - RNA, 19 nt, Artificial Sequence
  Description of Artificial Sequence: Synthetic oligonucleotide
acgauggccgcgucccaaa

SEQ ID NO: 2271644 - RNA, 19 nt, Artificial Sequence
  Description of Artificial Sequence: Synthetic oligonucleotide
ccaagucagcuccuuaaca

SEQ ID NO: 2271645 - RNA, 19 nt, Artificial Sequence
  Description of Artificial Sequence: Synthetic oligonucleotide
gaagguggcgagaggcuua

SEQ ID NO: 2271646 - RNA, 19 nt, Artificial Sequence
  Description of Artificial Sequence: Synthetic oligonucleotide
cugucuucugugcuuugua

SEQ ID NO: 2271647 - RNA, 19 nt, Artificial Sequence
  Description of Artificial Sequence: Synthetic oligonucleotide
acagagcggcugcuacaga

SEQ ID NO: 2271648 - RNA, 19 nt, Artificial Sequence
  Description of Artificial Sequence: Synthetic oligonucleotide
cugacacauuguucuuaga

SEQ ID NO: 2271649 - RNA, 19 nt, Artificial Sequence
  Description of Artificial Sequence: Synthetic oligonucleotide
cgucccaaaccacugccgc

SEQ ID NO: 2271650 - RNA, 19 nt, Artificial Sequence
  Description of Artificial Sequence: Synthetic oligonucleotide
cccaagucagcuccuuaac

SEQ ID NO: 2271651 - RNA, 19 nt, Artificial Sequence
  Description of Artificial Sequence: Synthetic oligonucleotide
gagcggcugcuacagagau

SEQ ID NO: 2271652 - RNA, 19 nt, Artificial Sequence
  Description of Artificial Sequence: Synthetic oligonucleotide
ccuacuacaaguccucccu

SEQ ID NO: 2271653 - RNA, 19 nt, Artificial Sequence
  Description of Artificial Sequence: Synthetic oligonucleotide
agguuggcuucaacauuug

SEQ ID NO: 2271654 - RNA, 19 nt, Artificial Sequence
  Description of Artificial Sequence: Synthetic oligonucleotide
gaacgauggccgcguccca

SEQ ID NO: 2271655 - RNA, 19 nt, Artificial Sequence
  Description of Artificial Sequence: Synthetic oligonucleotide
gaucguaguggaccuuauu

SEQ ID NO: 2271656 - RNA, 19 nt, Artificial Sequence
  Description of Artificial Sequence: Synthetic oligonucleotide
cugcuacagagauguccca

SEQ ID NO: 2271657 - RNA, 19 nt, Artificial Sequence
  Description of Artificial Sequence: Synthetic oligonucleotide
cacuaugcccacgagcccu

SEQ ID NO: 2271658 - RNA, 19 nt, Artificial Sequence
  Description of Artificial Sequence: Synthetic oligonucleotide
cuggauggugugguuugca

SEQ ID NO: 2271659 - RNA, 19 nt, Artificial Sequence
  Description of Artificial Sequence: Synthetic oligonucleotide
gcagccccugagcuccacg

SEQ ID NO: 2271660 - RNA, 19 nt, Artificial Sequence
  Description of Artificial Sequence: Synthetic oligonucleotide
gucccguucauagcgaauu

SEQ ID NO: 2271661 - RNA, 19 nt, Artificial Sequence
  Description of Artificial Sequence: Synthetic oligonucleotide
caucuccagauacguggaa

SEQ ID NO: 2271662 - RNA, 19 nt, Artificial Sequence
  Description of Artificial Sequence: Synthetic oligonucleotide
cccacgagcccugugccag

SEQ ID NO: 2271663 - RNA, 19 nt, Artificial Sequence
  Description of Artificial Sequence: Synthetic oligonucleotide
agcggcugcuacagagaug

SEQ ID NO: 2271664 - RNA, 19 nt, Artificial Sequence
  Description of Artificial Sequence: Synthetic oligonucleotide
cgcgucccaaaccacugcc

SEQ ID NO: 2271665 - RNA, 19 nt, Artificial Sequence
  Description of Artificial Sequence: Synthetic oligonucleotide
agaccuuaacugacacauu

SEQ ID NO: 2271666 - RNA, 19 nt, Artificial Sequence
  Description of Artificial Sequence: Synthetic oligonucleotide
cucuccucauaggguacca

SEQ ID NO: 2271667 - RNA, 19 nt, Artificial Sequence
  Description of Artificial Sequence: Synthetic oligonucleotide
agcccugugccagcaccca

SEQ ID NO: 2271668 - RNA, 19 nt, Artificial Sequence
  Description of Artificial Sequence: Synthetic oligonucleotide
ggccagaugccaaggcgac

SEQ ID NO: 2271669 - RNA, 19 nt, Artificial Sequence
  Description of Artificial Sequence: Synthetic oligonucleotide
gcuccuuaacaacaacuuu

SEQ ID NO: 2271670 - RNA, 19 nt, Artificial Sequence
  Description of Artificial Sequence: Synthetic oligonucleotide
ccuuaacugacacauuguu

SEQ ID NO: 2271671 - RNA, 19 nt, Artificial Sequence
  Description of Artificial Sequence: Synthetic oligonucleotide
cagaugccaaggcgacaca

SEQ ID NO: 2271672 - RNA, 19 nt, Artificial Sequence
  Description of Artificial Sequence: Synthetic oligonucleotide
ccccaagucagcuccuuaa

SEQ ID NO: 2271673 - RNA, 19 nt, Artificial Sequence
  Description of Artificial Sequence: Synthetic oligonucleotide
cccuaucuccaugcucucc

SEQ ID NO: 2271674 - RNA, 19 nt, Artificial Sequence
  Description of Artificial Sequence: Synthetic oligonucleotide
cuugucgauccgugauagu

SEQ ID NO: 2271675 - RNA, 19 nt, Artificial Sequence
  Description of Artificial Sequence: Synthetic oligonucleotide
cagagaugucccaggguuu

SEQ ID NO: 2271676 - RNA, 19 nt, Artificial Sequence
  Description of Artificial Sequence: Synthetic oligonucleotide
ggguaccagggccauuucu

SEQ ID NO: 2271677 - RNA, 19 nt, Artificial Sequence
  Description of Artificial Sequence: Synthetic oligonucleotide
gcgaauucugcaagcuaaa

SEQ ID NO: 2271678 - RNA, 19 nt, Artificial Sequence
  Description of Artificial Sequence: Synthetic oligonucleotide
gggagguagguuggcuuca

SEQ ID NO: 2271679 - RNA, 19 nt, Artificial Sequence
  Description of Artificial Sequence: Synthetic oligonucleotide
gcaucauuaagaaguuauu

SEQ ID NO: 2271680 - RNA, 19 nt, Artificial Sequence
  Description of Artificial Sequence: Synthetic oligonucleotide
ggcgagaggcuuauggaau

SEQ ID NO: 2271681 - RNA, 19 nt, Artificial Sequence
  Description of Artificial Sequence: Synthetic oligonucleotide
gcuugcagucugccaucac

SEQ ID NO: 2271682 - RNA, 19 nt, Artificial Sequence
  Description of Artificial Sequence: Synthetic oligonucleotide
gccucuccagcaucauuaa

SEQ ID NO: 2271683 - RNA, 19 nt, Artificial Sequence
  Description of Artificial Sequence: Synthetic oligonucleotide
ggaauuucuggagcccuau

SEQ ID NO: 2271684 - RNA, 19 nt, Artificial Sequence
  Description of Artificial Sequence: Synthetic oligonucleotide
cugccgcgacucccaguug

SEQ ID NO: 2271685 - RNA, 19 nt, Artificial Sequence
  Description of Artificial Sequence: Synthetic oligonucleotide
ccaaggcgacacacaaaga

SEQ ID NO: 2271686 - RNA, 19 nt, Artificial Sequence
  Description of Artificial Sequence: Synthetic oligonucleotide
cccaguugccuccaguccu

SEQ ID NO: 2271687 - RNA, 19 nt, Artificial Sequence
  Description of Artificial Sequence: Synthetic oligonucleotide
ggcuugcagucugccauca

SEQ ID NO: 2271688 - RNA, 19 nt, Artificial Sequence
  Description of Artificial Sequence: Synthetic oligonucleotide
cgcgacucccaguugccuc

SEQ ID NO: 2271689 - RNA, 19 nt, Artificial Sequence
  Description of Artificial Sequence: Synthetic oligonucleotide
cacgagcccugugccagca

SEQ ID NO: 2271690 - RNA, 19 nt, Artificial Sequence
  Description of Artificial Sequence: Synthetic oligonucleotide
gagcuccacggcacccauc

SEQ ID NO: 2271691 - RNA, 19 nt, Artificial Sequence
  Description of Artificial Sequence: Synthetic oligonucleotide
cugguuggacaggcuugca

SEQ ID NO: 2271692 - RNA, 19 nt, Artificial Sequence
  Description of Artificial Sequence: Synthetic oligonucleotide
cauaggguaccagggccau

SEQ ID NO: 2271693 - RNA, 19 nt, Artificial Sequence
  Description of Artificial Sequence: Synthetic oligonucleotide
ccaggguuugaaggagauc

SEQ ID NO: 2271694 - RNA, 19 nt, Artificial Sequence
  Description of Artificial Sequence: Synthetic oligonucleotide
gccgcgacucccaguugcc

SEQ ID NO: 2271695 - RNA, 19 nt, Artificial Sequence
  Description of Artificial Sequence: Synthetic oligonucleotide
gcgagaggcuuauggaauu

SEQ ID NO: 2271696 - RNA, 19 nt, Artificial Sequence
  Description of Artificial Sequence: Synthetic oligonucleotide
ccacgagcccugugccagc

SEQ ID NO: 2271697 - RNA, 19 nt, Artificial Sequence
  Description of Artificial Sequence: Synthetic oligonucleotide
ggguuggauauggggaggu

SEQ ID NO: 2271698 - RNA, 19 nt, Artificial Sequence
  Description of Artificial Sequence: Synthetic oligonucleotide
ccagcaucauuaagaaguu

SEQ ID NO: 2271699 - RNA, 19 nt, Artificial Sequence
  Description of Artificial Sequence: Synthetic oligonucleotide
gcccuaucuccaugcucuc

SEQ ID NO: 2271700 - RNA, 19 nt, Artificial Sequence
  Description of Artificial Sequence: Synthetic oligonucleotide
gguuggauauggggaggua

SEQ ID NO: 2271701 - RNA, 19 nt, Artificial Sequence
  Description of Artificial Sequence: Synthetic oligonucleotide
ggagguagguuggcuucaa

SEQ ID NO: 2271702 - RNA, 19 nt, Artificial Sequence
  Description of Artificial Sequence: Synthetic oligonucleotide
agguggcgagaggcuuaug

SEQ ID NO: 2271703 - RNA, 19 nt, Artificial Sequence
  Description of Artificial Sequence: Synthetic oligonucleotide
cgauccgugauagucacau

SEQ ID NO: 2271704 - RNA, 19 nt, Artificial Sequence
  Description of Artificial Sequence: Synthetic oligonucleotide
cgaauucugcaagcuaaaa

SEQ ID NO: 2271705 - RNA, 19 nt, Artificial Sequence
  Description of Artificial Sequence: Synthetic oligonucleotide
ccacggcacccaucuccag

SEQ ID NO: 2271706 - RNA, 19 nt, Artificial Sequence
  Description of Artificial Sequence: Synthetic oligonucleotide
gccagaugccaaggcgaca

SEQ ID NO: 2271707 - RNA, 19 nt, Artificial Sequence
  Description of Artificial Sequence: Synthetic oligonucleotide
gcgccaagaaugagaucaa

SEQ ID NO: 2271708 - RNA, 19 nt, Artificial Sequence
  Description of Artificial Sequence: Synthetic oligonucleotide
cgauggccgcgucccaaac

SEQ ID NO: 2271709 - RNA, 19 nt, Artificial Sequence
  Description of Artificial Sequence: Synthetic oligonucleotide
caacaacuuuggguuggau

SEQ ID NO: 2271710 - RNA, 19 nt, Artificial Sequence
  Description of Artificial Sequence: Synthetic oligonucleotide
cccguucauagcgaauucu

SEQ ID NO: 2271711 - RNA, 19 nt, Artificial Sequence
  Description of Artificial Sequence: Synthetic oligonucleotide
ggaucguaguggaccuuau

SEQ ID NO: 2271712 - RNA, 19 nt, Artificial Sequence
  Description of Artificial Sequence: Synthetic oligonucleotide
gccuccaguccugacggau

SEQ ID NO: 2271713 - RNA, 19 nt, Artificial Sequence
  Description of Artificial Sequence: Synthetic oligonucleotide
cuaugcccacgagcccugu

SEQ ID NO: 2271714 - RNA, 19 nt, Artificial Sequence
  Description of Artificial Sequence: Synthetic oligonucleotide
caggaucguaguggaccuu

SEQ ID NO: 2271715 - RNA, 19 nt, Artificial Sequence
  Description of Artificial Sequence: Synthetic oligonucleotide
ccugacggaucuggauggu

SEQ ID NO: 2271716 - RNA, 19 nt, Artificial Sequence
  Description of Artificial Sequence: Synthetic oligonucleotide
cggcugcuacagagauguc

SEQ ID NO: 2271717 - RNA, 19 nt, Artificial Sequence
  Description of Artificial Sequence: Synthetic oligonucleotide
cgagaggcuuauggaauuu

SEQ ID NO: 2271718 - RNA, 19 nt, Artificial Sequence
  Description of Artificial Sequence: Synthetic oligonucleotide
ccgcgacucccaguugccu

SEQ ID NO: 2271719 - RNA, 19 nt, Artificial Sequence
  Description of Artificial Sequence: Synthetic oligonucleotide
cggcacccaucuccagaua

SEQ ID NO: 2271720 - RNA, 19 nt, Artificial Sequence
  Description of Artificial Sequence: Synthetic oligonucleotide
aguucaaccacacgcaugc

SEQ ID NO: 2271721 - RNA, 19 nt, Artificial Sequence
  Description of Artificial Sequence: Synthetic oligonucleotide
ucuccagugacccugcucg

SEQ ID NO: 2271722 - RNA, 19 nt, Artificial Sequence
  Description of Artificial Sequence: Synthetic oligonucleotide
agccucaagaacuaguggc

SEQ ID NO: 2271723 - RNA, 19 nt, Artificial Sequence
  Description of Artificial Sequence: Synthetic oligonucleotide
cugaaguucaaccacacgc

SEQ ID NO: 2271724 - RNA, 19 nt, Artificial Sequence
  Description of Artificial Sequence: Synthetic oligonucleotide
ucugcaauuguccaaugug

SEQ ID NO: 2271725 - RNA, 19 nt, Artificial Sequence
  Description of Artificial Sequence: Synthetic oligonucleotide
ucugcuaagcaccaacucc

SEQ ID NO: 2271726 - RNA, 19 nt, Artificial Sequence
  Description of Artificial Sequence: Synthetic oligonucleotide
ucuaccagcucuaagguaa

SEQ ID NO: 2271727 - RNA, 19 nt, Artificial Sequence
  Description of Artificial Sequence: Synthetic oligonucleotide
auagcgaucuccugcagac

SEQ ID NO: 2271728 - RNA, 19 nt, Artificial Sequence
  Description of Artificial Sequence: Synthetic oligonucleotide
ucuaagguaauccgcagcu

SEQ ID NO: 2271729 - RNA, 19 nt, Artificial Sequence
  Description of Artificial Sequence: Synthetic oligonucleotide
uuuguuguuccgauucccg

SEQ ID NO: 2271730 - RNA, 19 nt, Artificial Sequence
  Description of Artificial Sequence: Synthetic oligonucleotide
uaagguaauccgcagcugc

SEQ ID NO: 2271731 - RNA, 19 nt, Artificial Sequence
  Description of Artificial Sequence: Synthetic oligonucleotide
agaacuaguggccucgggg

SEQ ID NO: 2271732 - RNA, 19 nt, Artificial Sequence
  Description of Artificial Sequence: Synthetic oligonucleotide
ugaaguucaaccacacgca

SEQ ID NO: 2271733 - RNA, 19 nt, Artificial Sequence
  Description of Artificial Sequence: Synthetic oligonucleotide
ugaaugugagccaugugac

SEQ ID NO: 2271734 - RNA, 19 nt, Artificial Sequence
  Description of Artificial Sequence: Synthetic oligonucleotide
ugagccaugugacugcugc

SEQ ID NO: 2271735 - RNA, 19 nt, Artificial Sequence
  Description of Artificial Sequence: Synthetic oligonucleotide
ugguguugcagcuugcucc

SEQ ID NO: 2271736 - RNA, 19 nt, Artificial Sequence
  Description of Artificial Sequence: Synthetic oligonucleotide
ucuuguccagcuuugggcc

SEQ ID NO: 2271737 - RNA, 19 nt, Artificial Sequence
  Description of Artificial Sequence: Synthetic oligonucleotide
acugggauguagcagaacu

SEQ ID NO: 2271738 - RNA, 19 nt, Artificial Sequence
  Description of Artificial Sequence: Synthetic oligonucleotide
aggauguacaucuugucca

SEQ ID NO: 2271739 - RNA, 19 nt, Artificial Sequence
  Description of Artificial Sequence: Synthetic oligonucleotide
cucucucugaaguucaacc

SEQ ID NO: 2271740 - RNA, 19 nt, Artificial Sequence
  Description of Artificial Sequence: Synthetic oligonucleotide
uguaggagcauagcgaucu

SEQ ID NO: 2271741 - RNA, 19 nt, Artificial Sequence
  Description of Artificial Sequence: Synthetic oligonucleotide
aaccacacgcaugcuaucc

SEQ ID NO: 2271742 - RNA, 19 nt, Artificial Sequence
  Description of Artificial Sequence: Synthetic oligonucleotide
gagggagugagacaggcug

SEQ ID NO: 2271743 - RNA, 19 nt, Artificial Sequence
  Description of Artificial Sequence: Synthetic oligonucleotide
aaugugcaccaccuuacug

SEQ ID NO: 2271744 - RNA, 19 nt, Artificial Sequence
  Description of Artificial Sequence: Synthetic oligonucleotide
aauuguccaaugugcacca

SEQ ID NO: 2271745 - RNA, 19 nt, Artificial Sequence
  Description of Artificial Sequence: Synthetic oligonucleotide
accuuacuggccuauguuc

SEQ ID NO: 2271746 - RNA, 19 nt, Artificial Sequence
  Description of Artificial Sequence: Synthetic oligonucleotide
cauggaaucccucuucagc

SEQ ID NO: 2271747 - RNA, 19 nt, Artificial Sequence
  Description of Artificial Sequence: Synthetic oligonucleotide
ucugaaguucaaccacacg

SEQ ID NO: 2271748 - RNA, 19 nt, Artificial Sequence
  Description of Artificial Sequence: Synthetic oligonucleotide
uuauugcuggccuugcucu

SEQ ID NO: 2271749 - RNA, 19 nt, Artificial Sequence
  Description of Artificial Sequence: Synthetic oligonucleotide
gaagccauagcuucuuuca

SEQ ID NO: 2271750 - RNA, 19 nt, Artificial Sequence
  Description of Artificial Sequence: Synthetic oligonucleotide
acguucaagccuuuguguc

SEQ ID NO: 2271751 - RNA, 19 nt, Artificial Sequence
  Description of Artificial Sequence: Synthetic oligonucleotide
gauguagcagaacuggcuc

SEQ ID NO: 2271752 - RNA, 19 nt, Artificial Sequence
  Description of Artificial Sequence: Synthetic oligonucleotide
ugagcaguguccagacugg

SEQ ID NO: 2271753 - RNA, 19 nt, Artificial Sequence
  Description of Artificial Sequence: Synthetic oligonucleotide
cuugcuccggucaaauucc

SEQ ID NO: 2271754 - RNA, 19 nt, Artificial Sequence
  Description of Artificial Sequence: Synthetic oligonucleotide
auggaaucccucuucagcu

SEQ ID NO: 2271755 - RNA, 19 nt, Artificial Sequence
  Description of Artificial Sequence: Synthetic oligonucleotide
caauuguccaaugugcacc

SEQ ID NO: 2271756 - RNA, 19 nt, Artificial Sequence
  Description of Artificial Sequence: Synthetic oligonucleotide
ucaaccacacgcaugcuau

SEQ ID NO: 2271757 - RNA, 19 nt, Artificial Sequence
  Description of Artificial Sequence: Synthetic oligonucleotide
auugugguguugcagcuug

SEQ ID NO: 2271758 - RNA, 19 nt, Artificial Sequence
  Description of Artificial Sequence: Synthetic oligonucleotide
ucucugaaguucaaccaca

SEQ ID NO: 2271759 - RNA, 19 nt, Artificial Sequence
  Description of Artificial Sequence: Synthetic oligonucleotide
uguccaaugugcaccaccu

SEQ ID NO: 2271760 - RNA, 19 nt, Artificial Sequence
  Description of Artificial Sequence: Synthetic oligonucleotide
caggauguacaucuugucc

SEQ ID NO: 2271761 - RNA, 19 nt, Artificial Sequence
  Description of Artificial Sequence: Synthetic oligonucleotide
gagcauagcgaucuccugc

SEQ ID NO: 2271762 - RNA, 19 nt, Artificial Sequence
  Description of Artificial Sequence: Synthetic oligonucleotide
agacguucaagccuuugug

SEQ ID NO: 2271763 - RNA, 19 nt, Artificial Sequence
  Description of Artificial Sequence: Synthetic oligonucleotide
uccaaugccaacugggcuc

SEQ ID NO: 2271764 - RNA, 19 nt, Artificial Sequence
  Description of Artificial Sequence: Synthetic oligonucleotide
cugacucagggacucaucc

SEQ ID NO: 2271765 - RNA, 19 nt, Artificial Sequence
  Description of Artificial Sequence: Synthetic oligonucleotide
agccauagcuucuuucauc

SEQ ID NO: 2271766 - RNA, 19 nt, Artificial Sequence
  Description of Artificial Sequence: Synthetic oligonucleotide
uccaaugugcaccaccuua

SEQ ID NO: 2271767 - RNA, 19 nt, Artificial Sequence
  Description of Artificial Sequence: Synthetic oligonucleotide
cugugcaacugcuugcugc

SEQ ID NO: 2271768 - RNA, 19 nt, Artificial Sequence
  Description of Artificial Sequence: Synthetic oligonucleotide
guagguuugagcagugucc

SEQ ID NO: 2271769 - RNA, 19 nt, Artificial Sequence
  Description of Artificial Sequence: Synthetic oligonucleotide
ugugcaacugcuugcugca

SEQ ID NO: 2271770 - RNA, 19 nt, Artificial Sequence
  Description of Artificial Sequence: Synthetic oligonucleotide
aauuccagcugugcaacug

SEQ ID NO: 2271771 - RNA, 19 nt, Artificial Sequence
  Description of Artificial Sequence: Synthetic oligonucleotide
uccguucucgcucuaccag

SEQ ID NO: 2271772 - RNA, 19 nt, Artificial Sequence
  Description of Artificial Sequence: Synthetic oligonucleotide
ugugcaccaccuuacuggc

SEQ ID NO: 2271773 - RNA, 19 nt, Artificial Sequence
  Description of Artificial Sequence: Synthetic oligonucleotide
aagguaauccgcagcugcg

SEQ ID NO: 2271774 - RNA, 19 nt, Artificial Sequence
  Description of Artificial Sequence: Synthetic oligonucleotide
ugagccuucucccuccacu

SEQ ID NO: 2271775 - RNA, 19 nt, Artificial Sequence
  Description of Artificial Sequence: Synthetic oligonucleotide
ugcucucccauccugcugu

SEQ ID NO: 2271776 - RNA, 19 nt, Artificial Sequence
  Description of Artificial Sequence: Synthetic oligonucleotide
agcgaucuccugcagacug

SEQ ID NO: 2271777 - RNA, 19 nt, Artificial Sequence
  Description of Artificial Sequence: Synthetic oligonucleotide
agugagacaggcugugaug

SEQ ID NO: 2271778 - RNA, 19 nt, Artificial Sequence
  Description of Artificial Sequence: Synthetic oligonucleotide
uuccgauucccgcucuagg

SEQ ID NO: 2271779 - RNA, 19 nt, Artificial Sequence
  Description of Artificial Sequence: Synthetic oligonucleotide
cagcuuucgggucucagcc

SEQ ID NO: 2271780 - RNA, 19 nt, Artificial Sequence
  Description of Artificial Sequence: Synthetic oligonucleotide
uuguuguuccgauucccgc

SEQ ID NO: 2271781 - RNA, 19 nt, Artificial Sequence
  Description of Artificial Sequence: Synthetic oligonucleotide
ugucugcuaagcaccaacu

SEQ ID NO: 2271782 - RNA, 19 nt, Artificial Sequence
  Description of Artificial Sequence: Synthetic oligonucleotide
uguucugcccuggcuaugg

SEQ ID NO: 2271783 - RNA, 19 nt, Artificial Sequence
  Description of Artificial Sequence: Synthetic oligonucleotide
cacggaucgugcaauguag

SEQ ID NO: 2271784 - RNA, 19 nt, Artificial Sequence
  Description of Artificial Sequence: Synthetic oligonucleotide
ggcuuguaggagcauagcg

SEQ ID NO: 2271785 - RNA, 19 nt, Artificial Sequence
  Description of Artificial Sequence: Synthetic oligonucleotide
uauccgaggaaccccucug

SEQ ID NO: 2271786 - RNA, 19 nt, Artificial Sequence
  Description of Artificial Sequence: Synthetic oligonucleotide
uucuuucaucuccagugac

SEQ ID NO: 2271787 - RNA, 19 nt, Artificial Sequence
  Description of Artificial Sequence: Synthetic oligonucleotide
caugcuauccgaggaaccc

SEQ ID NO: 2271788 - RNA, 19 nt, Artificial Sequence
  Description of Artificial Sequence: Synthetic oligonucleotide
uccgauucccgcucuagga

SEQ ID NO: 2271789 - RNA, 19 nt, Artificial Sequence
  Description of Artificial Sequence: Synthetic oligonucleotide
guuauugcuggccuugcuc

SEQ ID NO: 2271790 - RNA, 19 nt, Artificial Sequence
  Description of Artificial Sequence: Synthetic oligonucleotide
uagcagaacuggcucuggg

SEQ ID NO: 2271791 - RNA, 19 nt, Artificial Sequence
  Description of Artificial Sequence: Synthetic oligonucleotide
agcauagcgaucuccugca

SEQ ID NO: 2271792 - RNA, 19 nt, Artificial Sequence
  Description of Artificial Sequence: Synthetic oligonucleotide
uucgcuccaaugccaacug

SEQ ID NO: 2271793 - RNA, 19 nt, Artificial Sequence
  Description of Artificial Sequence: Synthetic oligonucleotide
cucuaagguaauccgcagc

SEQ ID NO: 2271794 - RNA, 19 nt, Artificial Sequence
  Description of Artificial Sequence: Synthetic oligonucleotide
ugugcggggacgaagccau

SEQ ID NO: 2271795 - RNA, 19 nt, Artificial Sequence
  Description of Artificial Sequence: Synthetic oligonucleotide
acacgcaugcuauccgagg

SEQ ID NO: 2271796 - RNA, 19 nt, Artificial Sequence
  Description of Artificial Sequence: Synthetic oligonucleotide
uagguuugagcagugucca

SEQ ID NO: 2271797 - RNA, 19 nt, Artificial Sequence
  Description of Artificial Sequence: Synthetic oligonucleotide
uccagagccugucugcuaa

SEQ ID NO: 2271798 - RNA, 19 nt, Artificial Sequence
  Description of Artificial Sequence: Synthetic oligonucleotide
cuccacucgaucucccugg

SEQ ID NO: 2271799 - RNA, 19 nt, Artificial Sequence
  Description of Artificial Sequence: Synthetic oligonucleotide
uucaaccacacgcaugcua

SEQ ID NO: 2271800 - RNA, 19 nt, Artificial Sequence
  Description of Artificial Sequence: Synthetic oligonucleotide
gacugcugcuccuccagag

SEQ ID NO: 2271801 - RNA, 19 nt, Artificial Sequence
  Description of Artificial Sequence: Synthetic oligonucleotide
cagacuguuauugcuggcc

SEQ ID NO: 2271802 - RNA, 19 nt, Artificial Sequence
  Description of Artificial Sequence: Synthetic oligonucleotide
uguagcagaacuggcucug

SEQ ID NO: 2271803 - RNA, 19 nt, Artificial Sequence
  Description of Artificial Sequence: Synthetic oligonucleotide
agacuguuauugcuggccu

SEQ ID NO: 2271804 - RNA, 19 nt, Artificial Sequence
  Description of Artificial Sequence: Synthetic oligonucleotide
cuuuguuguuccgauuccc

SEQ ID NO: 2271805 - RNA, 19 nt, Artificial Sequence
  Description of Artificial Sequence: Synthetic oligonucleotide
aaauuccagcugugcaacu

SEQ ID NO: 2271806 - RNA, 19 nt, Artificial Sequence
  Description of Artificial Sequence: Synthetic oligonucleotide
ugcuuucgcuccaaugcca

SEQ ID NO: 2271807 - RNA, 19 nt, Artificial Sequence
  Description of Artificial Sequence: Synthetic oligonucleotide
augcuauccgaggaacccc

SEQ ID NO: 2271808 - RNA, 19 nt, Artificial Sequence
  Description of Artificial Sequence: Synthetic oligonucleotide
uaccucucucugaaguuca

SEQ ID NO: 2271809 - RNA, 19 nt, Artificial Sequence
  Description of Artificial Sequence: Synthetic oligonucleotide
agguaauccgcagcugcgc

SEQ ID NO: 2271810 - RNA, 19 nt, Artificial Sequence
  Description of Artificial Sequence: Synthetic oligonucleotide
cagacugggauguagcaga

SEQ ID NO: 2271811 - RNA, 19 nt, Artificial Sequence
  Description of Artificial Sequence: Synthetic oligonucleotide
ugcuauccgaggaaccccu

SEQ ID NO: 2271812 - RNA, 19 nt, Artificial Sequence
  Description of Artificial Sequence: Synthetic oligonucleotide
aaguucaaccacacgcaug

SEQ ID NO: 2271813 - RNA, 19 nt, Artificial Sequence
  Description of Artificial Sequence: Synthetic oligonucleotide
uggucugcacggaucgugc

SEQ ID NO: 2271814 - RNA, 19 nt, Artificial Sequence
  Description of Artificial Sequence: Synthetic oligonucleotide
gguguugcagcuugcuccg

SEQ ID NO: 2271815 - RNA, 19 nt, Artificial Sequence
  Description of Artificial Sequence: Synthetic oligonucleotide
cugcagacuguuauugcug

SEQ ID NO: 2271816 - RNA, 19 nt, Artificial Sequence
  Description of Artificial Sequence: Synthetic oligonucleotide
aagccauagcuucuuucau

SEQ ID NO: 2271817 - RNA, 19 nt, Artificial Sequence
  Description of Artificial Sequence: Synthetic oligonucleotide
acgcauggaaucccucuuc

SEQ ID NO: 2271818 - RNA, 19 nt, Artificial Sequence
  Description of Artificial Sequence: Synthetic oligonucleotide
cugcuuucgcuccaaugcc

SEQ ID NO: 2271819 - RNA, 19 nt, Artificial Sequence
  Description of Artificial Sequence: Synthetic oligonucleotide
uguuauugcuggccuugcu

SEQ ID NO: 2271820 - RNA, 19 nt, Artificial Sequence
  Description of Artificial Sequence: Synthetic oligonucleotide
cucugaaguucaaccacac

SEQ ID NO: 2271821 - RNA, 19 nt, Artificial Sequence
  Description of Artificial Sequence: Synthetic oligonucleotide
ggcuauggcugcuaccugg

SEQ ID NO: 2271822 - RNA, 19 nt, Artificial Sequence
  Description of Artificial Sequence: Synthetic oligonucleotide
cuaccuuuccaggauguac

SEQ ID NO: 2271823 - RNA, 19 nt, Artificial Sequence
  Description of Artificial Sequence: Synthetic oligonucleotide
uccugcagacuguuauugc

SEQ ID NO: 2271824 - RNA, 19 nt, Artificial Sequence
  Description of Artificial Sequence: Synthetic oligonucleotide
accgugccaaguccugagc

SEQ ID NO: 2271825 - RNA, 19 nt, Artificial Sequence
  Description of Artificial Sequence: Synthetic oligonucleotide
uguccagacugggauguag

SEQ ID NO: 2271826 - RNA, 19 nt, Artificial Sequence
  Description of Artificial Sequence: Synthetic oligonucleotide
gccucugucugccucaggg

SEQ ID NO: 2271827 - RNA, 19 nt, Artificial Sequence
  Description of Artificial Sequence: Synthetic oligonucleotide
uccgcagcugcgcauugug

SEQ ID NO: 2271828 - RNA, 19 nt, Artificial Sequence
  Description of Artificial Sequence: Synthetic oligonucleotide
cuuacuggccuauguucug

SEQ ID NO: 2271829 - RNA, 19 nt, Artificial Sequence
  Description of Artificial Sequence: Synthetic oligonucleotide
ugacucagggacucaucca

SEQ ID NO: 2271830 - RNA, 19 nt, Artificial Sequence
  Description of Artificial Sequence: Synthetic oligonucleotide
agcgcuaccucucucugaa

SEQ ID NO: 2271831 - RNA, 19 nt, Artificial Sequence
  Description of Artificial Sequence: Synthetic oligonucleotide
uguugcagcuugcuccggu

SEQ ID NO: 2271832 - RNA, 19 nt, Artificial Sequence
  Description of Artificial Sequence: Synthetic oligonucleotide
aacuaccuuuccaggaugu

SEQ ID NO: 2271833 - RNA, 19 nt, Artificial Sequence
  Description of Artificial Sequence: Synthetic oligonucleotide
cugcagucguuccaacucc

SEQ ID NO: 2271834 - RNA, 19 nt, Artificial Sequence
  Description of Artificial Sequence: Synthetic oligonucleotide
cacaacuaccuuuccagga

SEQ ID NO: 2271835 - RNA, 19 nt, Artificial Sequence
  Description of Artificial Sequence: Synthetic oligonucleotide
gaagcacgcauggaauccc

SEQ ID NO: 2271836 - RNA, 19 nt, Artificial Sequence
  Description of Artificial Sequence: Synthetic oligonucleotide
cagccucaagaacuagugg

SEQ ID NO: 2271837 - RNA, 19 nt, Artificial Sequence
  Description of Artificial Sequence: Synthetic oligonucleotide
agagccugucugcuaagca

SEQ ID NO: 2271838 - RNA, 19 nt, Artificial Sequence
  Description of Artificial Sequence: Synthetic oligonucleotide
agucuugccucugcuuucg

SEQ ID NO: 2271839 - RNA, 19 nt, Artificial Sequence
  Description of Artificial Sequence: Synthetic oligonucleotide
gauucccgcucuaggacag

SEQ ID NO: 2271840 - RNA, 19 nt, Artificial Sequence
  Description of Artificial Sequence: Synthetic oligonucleotide
uaggagcauagcgaucucc

SEQ ID NO: 2271841 - RNA, 19 nt, Artificial Sequence
  Description of Artificial Sequence: Synthetic oligonucleotide
gaccgugccaaguccugag

SEQ ID NO: 2271842 - RNA, 19 nt, Artificial Sequence
  Description of Artificial Sequence: Synthetic oligonucleotide
ucgcuccaaugccaacugg

SEQ ID NO: 2271843 - RNA, 19 nt, Artificial Sequence
  Description of Artificial Sequence: Synthetic oligonucleotide
auagcuucuuucaucucca

SEQ ID NO: 2271844 - RNA, 19 nt, Artificial Sequence
  Description of Artificial Sequence: Synthetic oligonucleotide
agcuucuuucaucuccagu

SEQ ID NO: 2271845 - RNA, 19 nt, Artificial Sequence
  Description of Artificial Sequence: Synthetic oligonucleotide
ugugacugcugcuccucca

SEQ ID NO: 2271846 - RNA, 19 nt, Artificial Sequence
  Description of Artificial Sequence: Synthetic oligonucleotide
ucuugccucugcuuucgcu

SEQ ID NO: 2271847 - RNA, 19 nt, Artificial Sequence
  Description of Artificial Sequence: Synthetic oligonucleotide
gggacgaagccauagcuuc

SEQ ID NO: 2271848 - RNA, 19 nt, Artificial Sequence
  Description of Artificial Sequence: Synthetic oligonucleotide
acucgaucucccuggccuc

SEQ ID NO: 2271849 - RNA, 19 nt, Artificial Sequence
  Description of Artificial Sequence: Synthetic oligonucleotide
ucucccuccacucgaucuc

SEQ ID NO: 2271850 - RNA, 19 nt, Artificial Sequence
  Description of Artificial Sequence: Synthetic oligonucleotide
cugcucugcugguugaaug

SEQ ID NO: 2271851 - RNA, 19 nt, Artificial Sequence
  Description of Artificial Sequence: Synthetic oligonucleotide
ugggcucagccacaacuac

SEQ ID NO: 2271852 - RNA, 19 nt, Artificial Sequence
  Description of Artificial Sequence: Synthetic oligonucleotide
uggccuauguucugcccug

SEQ ID NO: 2271853 - RNA, 19 nt, Artificial Sequence
  Description of Artificial Sequence: Synthetic oligonucleotide
guugaaugugagccaugug

SEQ ID NO: 2271854 - RNA, 19 nt, Artificial Sequence
  Description of Artificial Sequence: Synthetic oligonucleotide
gaucgugcaauguagucuu

SEQ ID NO: 2271855 - RNA, 19 nt, Artificial Sequence
  Description of Artificial Sequence: Synthetic oligonucleotide
ggacucauccagcuuucgg

SEQ ID NO: 2271856 - RNA, 19 nt, Artificial Sequence
  Description of Artificial Sequence: Synthetic oligonucleotide
ugcagucguuccaacuccu

SEQ ID NO: 2271857 - RNA, 19 nt, Artificial Sequence
  Description of Artificial Sequence: Synthetic oligonucleotide
ggcuggucugcacggaucg

SEQ ID NO: 2271858 - RNA, 19 nt, Artificial Sequence
  Description of Artificial Sequence: Synthetic oligonucleotide
uccagugacccugcucggg

SEQ ID NO: 2271859 - RNA, 19 nt, Artificial Sequence
  Description of Artificial Sequence: Synthetic oligonucleotide
caacuaccuuuccaggaug

SEQ ID NO: 2271860 - RNA, 19 nt, Artificial Sequence
  Description of Artificial Sequence: Synthetic oligonucleotide
ucccgcucuaggacagagg

SEQ ID NO: 2271861 - RNA, 19 nt, Artificial Sequence
  Description of Artificial Sequence: Synthetic oligonucleotide
ugcuccggucaaauuccag

SEQ ID NO: 2271862 - RNA, 19 nt, Artificial Sequence
  Description of Artificial Sequence: Synthetic oligonucleotide
gacguucaagccuuugugu

SEQ ID NO: 2271863 - RNA, 19 nt, Artificial Sequence
  Description of Artificial Sequence: Synthetic oligonucleotide
ucugacucagggacucauc

SEQ ID NO: 2271864 - RNA, 19 nt, Artificial Sequence
  Description of Artificial Sequence: Synthetic oligonucleotide
aauccgcagcugcgcauug

SEQ ID NO: 2271865 - RNA, 19 nt, Artificial Sequence
  Description of Artificial Sequence: Synthetic oligonucleotide
aggcuuguaggagcauagc

SEQ ID NO: 2271866 - RNA, 19 nt, Artificial Sequence
  Description of Artificial Sequence: Synthetic oligonucleotide
cacacgcaugcuauccgag

SEQ ID NO: 2271867 - RNA, 19 nt, Artificial Sequence
  Description of Artificial Sequence: Synthetic oligonucleotide
guuguuccgauucccgcuc

SEQ ID NO: 2271868 - RNA, 19 nt, Artificial Sequence
  Description of Artificial Sequence: Synthetic oligonucleotide
agccuucucccuccacucg

SEQ ID NO: 2271869 - RNA, 19 nt, Artificial Sequence
  Description of Artificial Sequence: Synthetic oligonucleotide
ugguugaaugugagccaug

SEQ ID NO: 2271870 - RNA, 19 nt, Artificial Sequence
  Description of Artificial Sequence: Synthetic oligonucleotide
uagccuuuguuguuccgau

SEQ ID NO: 2271871 - RNA, 19 nt, Artificial Sequence
  Description of Artificial Sequence: Synthetic oligonucleotide
caccaacuccuccuguagc

SEQ ID NO: 2271872 - RNA, 19 nt, Artificial Sequence
  Description of Artificial Sequence: Synthetic oligonucleotide
cuuguaggagcauagcgau

SEQ ID NO: 2271873 - RNA, 19 nt, Artificial Sequence
  Description of Artificial Sequence: Synthetic oligonucleotide
ucgcucuaccagcucuaag

SEQ ID NO: 2271874 - RNA, 19 nt, Artificial Sequence
  Description of Artificial Sequence: Synthetic oligonucleotide
ugcggggacgaagccauag

SEQ ID NO: 2271875 - RNA, 19 nt, Artificial Sequence
  Description of Artificial Sequence: Synthetic oligonucleotide
cagcugugcaacugcuugc

SEQ ID NO: 2271876 - RNA, 19 nt, Artificial Sequence
  Description of Artificial Sequence: Synthetic oligonucleotide
gccuuuguuguuccgauuc

SEQ ID NO: 2271877 - RNA, 19 nt, Artificial Sequence
  Description of Artificial Sequence: Synthetic oligonucleotide
cugccucagggcauucugc

SEQ ID NO: 2271878 - RNA, 19 nt, Artificial Sequence
  Description of Artificial Sequence: Synthetic oligonucleotide
cccgcucuaggacagaggc

SEQ ID NO: 2271879 - RNA, 19 nt, Artificial Sequence
  Description of Artificial Sequence: Synthetic oligonucleotide
aggagcauagcgaucuccu

SEQ ID NO: 2271880 - RNA, 19 nt, Artificial Sequence
  Description of Artificial Sequence: Synthetic oligonucleotide
uuguaggagcauagcgauc

SEQ ID NO: 2271881 - RNA, 19 nt, Artificial Sequence
  Description of Artificial Sequence: Synthetic oligonucleotide
gacucugacucagggacuc

SEQ ID NO: 2271882 - RNA, 19 nt, Artificial Sequence
  Description of Artificial Sequence: Synthetic oligonucleotide
ucugcacggaucgugcaau

SEQ ID NO: 2271883 - RNA, 19 nt, Artificial Sequence
  Description of Artificial Sequence: Synthetic oligonucleotide
ugcgcauugugguguugca

SEQ ID NO: 2271884 - RNA, 19 nt, Artificial Sequence
  Description of Artificial Sequence: Synthetic oligonucleotide
ugcuaagcaccaacuccuc

SEQ ID NO: 2271885 - RNA, 19 nt, Artificial Sequence
  Description of Artificial Sequence: Synthetic oligonucleotide
cugcuaagcaccaacuccu

SEQ ID NO: 2271886 - RNA, 19 nt, Artificial Sequence
  Description of Artificial Sequence: Synthetic oligonucleotide
ggaagcacgcauggaaucc

SEQ ID NO: 2271887 - RNA, 19 nt, Artificial Sequence
  Description of Artificial Sequence: Synthetic oligonucleotide
guucaagccuuugugucca

SEQ ID NO: 2271888 - RNA, 19 nt, Artificial Sequence
  Description of Artificial Sequence: Synthetic oligonucleotide
uucccgcucuaggacagag

SEQ ID NO: 2271889 - RNA, 19 nt, Artificial Sequence
  Description of Artificial Sequence: Synthetic oligonucleotide
cauagcgaucuccugcaga

SEQ ID NO: 2271890 - RNA, 19 nt, Artificial Sequence
  Description of Artificial Sequence: Synthetic oligonucleotide
cugcgcauugugguguugc

SEQ ID NO: 2271891 - RNA, 19 nt, Artificial Sequence
  Description of Artificial Sequence: Synthetic oligonucleotide
cacgcaugcuauccgagga

SEQ ID NO: 2271892 - RNA, 19 nt, Artificial Sequence
  Description of Artificial Sequence: Synthetic oligonucleotide
guagccuuuguuguuccga

SEQ ID NO: 2271893 - RNA, 19 nt, Artificial Sequence
  Description of Artificial Sequence: Synthetic oligonucleotide
cgcauugugguguugcagc

SEQ ID NO: 2271894 - RNA, 19 nt, Artificial Sequence
  Description of Artificial Sequence: Synthetic oligonucleotide
gcuuguaggagcauagcga

SEQ ID NO: 2271895 - RNA, 19 nt, Artificial Sequence
  Description of Artificial Sequence: Synthetic oligonucleotide
uugugguguugcagcuugc

SEQ ID NO: 2271896 - RNA, 19 nt, Artificial Sequence
  Description of Artificial Sequence: Synthetic oligonucleotide
cagggaccgugccaagucc

SEQ ID NO: 2271897 - RNA, 19 nt, Artificial Sequence
  Description of Artificial Sequence: Synthetic oligonucleotide
ugugagccaugugacugcu

SEQ ID NO: 2271898 - RNA, 19 nt, Artificial Sequence
  Description of Artificial Sequence: Synthetic oligonucleotide
guagcagaacuggcucugg

SEQ ID NO: 2271899 - RNA, 19 nt, Artificial Sequence
  Description of Artificial Sequence: Synthetic oligonucleotide
ucucagccucaagaacuag

SEQ ID NO: 2271900 - RNA, 19 nt, Artificial Sequence
  Description of Artificial Sequence: Synthetic oligonucleotide
cuagcucgcggcuggucug

SEQ ID NO: 2271901 - RNA, 19 nt, Artificial Sequence
  Description of Artificial Sequence: Synthetic oligonucleotide
uugcuccggucaaauucca

SEQ ID NO: 2271902 - RNA, 19 nt, Artificial Sequence
  Description of Artificial Sequence: Synthetic oligonucleotide
guccagacugggauguagc

SEQ ID NO: 2271903 - RNA, 19 nt, Artificial Sequence
  Description of Artificial Sequence: Synthetic oligonucleotide
guuccgauucccgcucuag

SEQ ID NO: 2271904 - RNA, 19 nt, Artificial Sequence
  Description of Artificial Sequence: Synthetic oligonucleotide
ccacaacuaccuuuccagg

SEQ ID NO: 2271905 - RNA, 19 nt, Artificial Sequence
  Description of Artificial Sequence: Synthetic oligonucleotide
guagucuugccucugcuuu

SEQ ID NO: 2271906 - RNA, 19 nt, Artificial Sequence
  Description of Artificial Sequence: Synthetic oligonucleotide
ggucaaauuccagcugugc

SEQ ID NO: 2271907 - RNA, 19 nt, Artificial Sequence
  Description of Artificial Sequence: Synthetic oligonucleotide
accuuuccaggauguacau

SEQ ID NO: 2271908 - RNA, 19 nt, Artificial Sequence
  Description of Artificial Sequence: Synthetic oligonucleotide
caagaacuaguggccucgg

SEQ ID NO: 2271909 - RNA, 19 nt, Artificial Sequence
  Description of Artificial Sequence: Synthetic oligonucleotide
gcucuaagguaauccgcag

SEQ ID NO: 2271910 - RNA, 19 nt, Artificial Sequence
  Description of Artificial Sequence: Synthetic oligonucleotide
uuguuccgauucccgcucu

SEQ ID NO: 2271911 - RNA, 19 nt, Artificial Sequence
  Description of Artificial Sequence: Synthetic oligonucleotide
uggaaucccucuucagcuu

SEQ ID NO: 2271912 - RNA, 19 nt, Artificial Sequence
  Description of Artificial Sequence: Synthetic oligonucleotide
gcuaagcaccaacuccucc

SEQ ID NO: 2271913 - RNA, 19 nt, Artificial Sequence
  Description of Artificial Sequence: Synthetic oligonucleotide
ugcacggaucgugcaaugu

SEQ ID NO: 2271914 - RNA, 19 nt, Artificial Sequence
  Description of Artificial Sequence: Synthetic oligonucleotide
aaucccucuucagcuuccu

SEQ ID NO: 2271915 - RNA, 19 nt, Artificial Sequence
  Description of Artificial Sequence: Synthetic oligonucleotide
cuuucgcuccaaugccaac

SEQ ID NO: 2271916 - RNA, 19 nt, Artificial Sequence
  Description of Artificial Sequence: Synthetic oligonucleotide
cuguuauugcuggccuugc

SEQ ID NO: 2271917 - RNA, 19 nt, Artificial Sequence
  Description of Artificial Sequence: Synthetic oligonucleotide
gagugagacaggcugugau

SEQ ID NO: 2271918 - RNA, 19 nt, Artificial Sequence
  Description of Artificial Sequence: Synthetic oligonucleotide
ucaagccuuuguguccacu

SEQ ID NO: 2271919 - RNA, 19 nt, Artificial Sequence
  Description of Artificial Sequence: Synthetic oligonucleotide
uuguguccacugcuccuuc

SEQ ID NO: 2271920 - RNA, 19 nt, Artificial Sequence
  Description of Artificial Sequence: Synthetic oligonucleotide
cgcuccaaugccaacuggg

SEQ ID NO: 2271921 - RNA, 19 nt, Artificial Sequence
  Description of Artificial Sequence: Synthetic oligonucleotide
ggaaucccucuucagcuuc

SEQ ID NO: 2271922 - RNA, 19 nt, Artificial Sequence
  Description of Artificial Sequence: Synthetic oligonucleotide
ccagcuuucgggucucagc

SEQ ID NO: 2271923 - RNA, 19 nt, Artificial Sequence
  Description of Artificial Sequence: Synthetic oligonucleotide
cguucaagccuuugugucc

SEQ ID NO: 2271924 - RNA, 19 nt, Artificial Sequence
  Description of Artificial Sequence: Synthetic oligonucleotide
gugguguugcagcuugcuc

SEQ ID NO: 2271925 - RNA, 19 nt, Artificial Sequence
  Description of Artificial Sequence: Synthetic oligonucleotide
uaauccgcagcugcgcauu

SEQ ID NO: 2271926 - RNA, 19 nt, Artificial Sequence
  Description of Artificial Sequence: Synthetic oligonucleotide
aagcacgcauggaaucccu

SEQ ID NO: 2271927 - RNA, 19 nt, Artificial Sequence
  Description of Artificial Sequence: Synthetic oligonucleotide
ccuuuguuguuccgauucc

SEQ ID NO: 2271928 - RNA, 19 nt, Artificial Sequence
  Description of Artificial Sequence: Synthetic oligonucleotide
caauguagucuugccucug

SEQ ID NO: 2271929 - RNA, 19 nt, Artificial Sequence
  Description of Artificial Sequence: Synthetic oligonucleotide
caugugacugcugcuccuc

SEQ ID NO: 2271930 - RNA, 19 nt, Artificial Sequence
  Description of Artificial Sequence: Synthetic oligonucleotide
gcauggaaucccucuucag

SEQ ID NO: 2271931 - RNA, 19 nt, Artificial Sequence
  Description of Artificial Sequence: Synthetic oligonucleotide
gguaauccgcagcugcgca

SEQ ID NO: 2271932 - RNA, 19 nt, Artificial Sequence
  Description of Artificial Sequence: Synthetic oligonucleotide
acgcaugcuauccgaggaa

SEQ ID NO: 2271933 - RNA, 19 nt, Artificial Sequence
  Description of Artificial Sequence: Synthetic oligonucleotide
caacugcuugcugcagacg

SEQ ID NO: 2271934 - RNA, 19 nt, Artificial Sequence
  Description of Artificial Sequence: Synthetic oligonucleotide
gggaagcacgcauggaauc

SEQ ID NO: 2271935 - RNA, 19 nt, Artificial Sequence
  Description of Artificial Sequence: Synthetic oligonucleotide
acccugcucgggaagcacg

SEQ ID NO: 2271936 - RNA, 19 nt, Artificial Sequence
  Description of Artificial Sequence: Synthetic oligonucleotide
uguuccgauucccgcucua

SEQ ID NO: 2271937 - RNA, 19 nt, Artificial Sequence
  Description of Artificial Sequence: Synthetic oligonucleotide
cuggcuauggcugcuaccu

SEQ ID NO: 2271938 - RNA, 19 nt, Artificial Sequence
  Description of Artificial Sequence: Synthetic oligonucleotide
ccugcuagcucgcggcugg

SEQ ID NO: 2271939 - RNA, 19 nt, Artificial Sequence
  Description of Artificial Sequence: Synthetic oligonucleotide
ggucucagccucaagaacu

SEQ ID NO: 2271940 - RNA, 19 nt, Artificial Sequence
  Description of Artificial Sequence: Synthetic oligonucleotide
gcugguugaaugugagcca

SEQ ID NO: 2271941 - RNA, 19 nt, Artificial Sequence
  Description of Artificial Sequence: Synthetic oligonucleotide
cucccuccacucgaucucc

SEQ ID NO: 2271942 - RNA, 19 nt, Artificial Sequence
  Description of Artificial Sequence: Synthetic oligonucleotide
cuccguucucgcucuacca

SEQ ID NO: 2271943 - RNA, 19 nt, Artificial Sequence
  Description of Artificial Sequence: Synthetic oligonucleotide
gugacccugcucgggaagc

SEQ ID NO: 2271944 - RNA, 19 nt, Artificial Sequence
  Description of Artificial Sequence: Synthetic oligonucleotide
gggauguagcagaacuggc

SEQ ID NO: 2271945 - RNA, 19 nt, Artificial Sequence
  Description of Artificial Sequence: Synthetic oligonucleotide
agcacgcauggaaucccuc

SEQ ID NO: 2271946 - RNA, 19 nt, Artificial Sequence
  Description of Artificial Sequence: Synthetic oligonucleotide
caaccacacgcaugcuauc

SEQ ID NO: 2271947 - RNA, 19 nt, Artificial Sequence
  Description of Artificial Sequence: Synthetic oligonucleotide
cucagccucaagaacuagu

SEQ ID NO: 2271948 - RNA, 19 nt, Artificial Sequence
  Description of Artificial Sequence: Synthetic oligonucleotide
gcagcugcgcauuguggug

SEQ ID NO: 2271949 - RNA, 19 nt, Artificial Sequence
  Description of Artificial Sequence: Synthetic oligonucleotide
agcuuccuccguucucgcu

SEQ ID NO: 2271950 - RNA, 19 nt, Artificial Sequence
  Description of Artificial Sequence: Synthetic oligonucleotide
cugcacggaucgugcaaug

SEQ ID NO: 2271951 - RNA, 19 nt, Artificial Sequence
  Description of Artificial Sequence: Synthetic oligonucleotide
acggaucgugcaauguagu

SEQ ID NO: 2271952 - RNA, 19 nt, Artificial Sequence
  Description of Artificial Sequence: Synthetic oligonucleotide
ccgugccaaguccugagcc

SEQ ID NO: 2271953 - RNA, 19 nt, Artificial Sequence
  Description of Artificial Sequence: Synthetic oligonucleotide
agcaguguccagacuggga

SEQ ID NO: 2271954 - RNA, 19 nt, Artificial Sequence
  Description of Artificial Sequence: Synthetic oligonucleotide
agggagugagacaggcugu

SEQ ID NO: 2271955 - RNA, 19 nt, Artificial Sequence
  Description of Artificial Sequence: Synthetic oligonucleotide
ccaggauguacaucuuguc

SEQ ID NO: 2271956 - RNA, 19 nt, Artificial Sequence
  Description of Artificial Sequence: Synthetic oligonucleotide
cucagggacucauccagcu

SEQ ID NO: 2271957 - RNA, 19 nt, Artificial Sequence
  Description of Artificial Sequence: Synthetic oligonucleotide
ccgaggaaccccucugagc

SEQ ID NO: 2271958 - RNA, 19 nt, Artificial Sequence
  Description of Artificial Sequence: Synthetic oligonucleotide
ggaucgugcaauguagucu

SEQ ID NO: 2271959 - RNA, 19 nt, Artificial Sequence
  Description of Artificial Sequence: Synthetic oligonucleotide
uccugcugugcggggacga

SEQ ID NO: 2271960 - RNA, 19 nt, Artificial Sequence
  Description of Artificial Sequence: Synthetic oligonucleotide
cagacguucaagccuuugu

SEQ ID NO: 2271961 - RNA, 19 nt, Artificial Sequence
  Description of Artificial Sequence: Synthetic oligonucleotide
gucugcacggaucgugcaa

SEQ ID NO: 2271962 - RNA, 19 nt, Artificial Sequence
  Description of Artificial Sequence: Synthetic oligonucleotide
gacugggauguagcagaac

SEQ ID NO: 2271963 - RNA, 19 nt, Artificial Sequence
  Description of Artificial Sequence: Synthetic oligonucleotide
uuucgggucucagccucaa

SEQ ID NO: 2271964 - RNA, 19 nt, Artificial Sequence
  Description of Artificial Sequence: Synthetic oligonucleotide
ccgauucccgcucuaggac

SEQ ID NO: 2271965 - RNA, 19 nt, Artificial Sequence
  Description of Artificial Sequence: Synthetic oligonucleotide
cucuaccagcucuaaggua

SEQ ID NO: 2271966 - RNA, 19 nt, Artificial Sequence
  Description of Artificial Sequence: Synthetic oligonucleotide
uagcucgcggcuggucugc

SEQ ID NO: 2271967 - RNA, 19 nt, Artificial Sequence
  Description of Artificial Sequence: Synthetic oligonucleotide
gguugaaugugagccaugu

SEQ ID NO: 2271968 - RNA, 19 nt, Artificial Sequence
  Description of Artificial Sequence: Synthetic oligonucleotide
uggcucuggggaugccaga

SEQ ID NO: 2271969 - RNA, 19 nt, Artificial Sequence
  Description of Artificial Sequence: Synthetic oligonucleotide
agccuuuguuguuccgauu

SEQ ID NO: 2271970 - RNA, 19 nt, Artificial Sequence
  Description of Artificial Sequence: Synthetic oligonucleotide
guaggagcauagcgaucuc

SEQ ID NO: 2271971 - RNA, 19 nt, Artificial Sequence
  Description of Artificial Sequence: Synthetic oligonucleotide
gcaugcuauccgaggaacc

SEQ ID NO: 2271972 - RNA, 19 nt, Artificial Sequence
  Description of Artificial Sequence: Synthetic oligonucleotide
ggauguagcagaacuggcu

SEQ ID NO: 2271973 - RNA, 19 nt, Artificial Sequence
  Description of Artificial Sequence: Synthetic oligonucleotide
cuggccuauguucugcccu

SEQ ID NO: 2271974 - RNA, 19 nt, Artificial Sequence
  Description of Artificial Sequence: Synthetic oligonucleotide
accaccuuacuggccuaug

SEQ ID NO: 2271975 - RNA, 19 nt, Artificial Sequence
  Description of Artificial Sequence: Synthetic oligonucleotide
ccuccguucucgcucuacc

SEQ ID NO: 2271976 - RNA, 19 nt, Artificial Sequence
  Description of Artificial Sequence: Synthetic oligonucleotide
agggaccgugccaaguccu

SEQ ID NO: 2271977 - RNA, 19 nt, Artificial Sequence
  Description of Artificial Sequence: Synthetic oligonucleotide
cuuucgggucucagccuca

SEQ ID NO: 2271978 - RNA, 19 nt, Artificial Sequence
  Description of Artificial Sequence: Synthetic oligonucleotide
ccccggucugcucugcugg

SEQ ID NO: 2271979 - RNA, 19 nt, Artificial Sequence
  Description of Artificial Sequence: Synthetic oligonucleotide
gggagugagacaggcugug

SEQ ID NO: 2271980 - RNA, 19 nt, Artificial Sequence
  Description of Artificial Sequence: Synthetic oligonucleotide
ucgaucucccuggccucug

SEQ ID NO: 2271981 - RNA, 19 nt, Artificial Sequence
  Description of Artificial Sequence: Synthetic oligonucleotide
uccuccguucucgcucuac

SEQ ID NO: 2271982 - RNA, 19 nt, Artificial Sequence
  Description of Artificial Sequence: Synthetic oligonucleotide
cagggacucauccagcuuu

SEQ ID NO: 2271983 - RNA, 19 nt, Artificial Sequence
  Description of Artificial Sequence: Synthetic oligonucleotide
uaccagcucuaagguaauc

SEQ ID NO: 2271984 - RNA, 19 nt, Artificial Sequence
  Description of Artificial Sequence: Synthetic oligonucleotide
gcagcgcuaccucucucug

SEQ ID NO: 2271985 - RNA, 19 nt, Artificial Sequence
  Description of Artificial Sequence: Synthetic oligonucleotide
agcuugcuccggucaaauu

SEQ ID NO: 2271986 - RNA, 19 nt, Artificial Sequence
  Description of Artificial Sequence: Synthetic oligonucleotide
auguucugcccuggcuaug

SEQ ID NO: 2271987 - RNA, 19 nt, Artificial Sequence
  Description of Artificial Sequence: Synthetic oligonucleotide
gucuugccucugcuuucgc

SEQ ID NO: 2271988 - RNA, 19 nt, Artificial Sequence
  Description of Artificial Sequence: Synthetic oligonucleotide
cgaagccauagcuucuuuc

SEQ ID NO: 2271989 - RNA, 19 nt, Artificial Sequence
  Description of Artificial Sequence: Synthetic oligonucleotide
cuauccgaggaaccccucu

SEQ ID NO: 2271990 - RNA, 19 nt, Artificial Sequence
  Description of Artificial Sequence: Synthetic oligonucleotide
gugcaacugcuugcugcag

SEQ ID NO: 2271991 - RNA, 19 nt, Artificial Sequence
  Description of Artificial Sequence: Synthetic oligonucleotide
gacuguuauugcuggccuu

SEQ ID NO: 2271992 - RNA, 19 nt, Artificial Sequence
  Description of Artificial Sequence: Synthetic oligonucleotide
gcaauguagucuugccucu

SEQ ID NO: 2271993 - RNA, 19 nt, Artificial Sequence
  Description of Artificial Sequence: Synthetic oligonucleotide
gcauagcgaucuccugcag

SEQ ID NO: 2271994 - RNA, 19 nt, Artificial Sequence
  Description of Artificial Sequence: Synthetic oligonucleotide
ccuuacuggccuauguucu

SEQ ID NO: 2271995 - RNA, 19 nt, Artificial Sequence
  Description of Artificial Sequence: Synthetic oligonucleotide
gcggggacgaagccauagc

SEQ ID NO: 2271996 - RNA, 19 nt, Artificial Sequence
  Description of Artificial Sequence: Synthetic oligonucleotide
ccagggaccgugccaaguc

SEQ ID NO: 2271997 - RNA, 19 nt, Artificial Sequence
  Description of Artificial Sequence: Synthetic oligonucleotide
gcgcauugugguguugcag

SEQ ID NO: 2271998 - RNA, 19 nt, Artificial Sequence
  Description of Artificial Sequence: Synthetic oligonucleotide
agacugggauguagcagaa

SEQ ID NO: 2271999 - RNA, 19 nt, Artificial Sequence
  Description of Artificial Sequence: Synthetic oligonucleotide
ugcagacguucaagccuuu

SEQ ID NO: 2272000 - RNA, 19 nt, Artificial Sequence
  Description of Artificial Sequence: Synthetic oligonucleotide
cugagccuucucccuccac

SEQ ID NO: 2272001 - RNA, 19 nt, Artificial Sequence
  Description of Artificial Sequence: Synthetic oligonucleotide
gacugggcucagccacaac

SEQ ID NO: 2272002 - RNA, 19 nt, Artificial Sequence
  Description of Artificial Sequence: Synthetic oligonucleotide
cagggcauucugcagucgu

SEQ ID NO: 2272003 - RNA, 19 nt, Artificial Sequence
  Description of Artificial Sequence: Synthetic oligonucleotide
guaauccgcagcugcgcau

SEQ ID NO: 2272004 - RNA, 19 nt, Artificial Sequence
  Description of Artificial Sequence: Synthetic oligonucleotide
gccuauguucugcccuggc

SEQ ID NO: 2272005 - RNA, 19 nt, Artificial Sequence
  Description of Artificial Sequence: Synthetic oligonucleotide
cugugcggggacgaagcca

SEQ ID NO: 2272006 - RNA, 19 nt, Artificial Sequence
  Description of Artificial Sequence: Synthetic oligonucleotide
gcacggaucgugcaaugua

SEQ ID NO: 2272007 - RNA, 19 nt, Artificial Sequence
  Description of Artificial Sequence: Synthetic oligonucleotide
aucgugcaauguagucuug

SEQ ID NO: 2272008 - RNA, 19 nt, Artificial Sequence
  Description of Artificial Sequence: Synthetic oligonucleotide
guguugcagcuugcuccgg

SEQ ID NO: 2272009 - RNA, 19 nt, Artificial Sequence
  Description of Artificial Sequence: Synthetic oligonucleotide
ccgcagcugcgcauugugg

SEQ ID NO: 2272010 - RNA, 19 nt, Artificial Sequence
  Description of Artificial Sequence: Synthetic oligonucleotide
cugguugaaugugagccau

SEQ ID NO: 2272011 - RNA, 19 nt, Artificial Sequence
  Description of Artificial Sequence: Synthetic oligonucleotide
gcuagcucgcggcuggucu

SEQ ID NO: 2272012 - RNA, 19 nt, Artificial Sequence
  Description of Artificial Sequence: Synthetic oligonucleotide
ggucugcacggaucgugca

SEQ ID NO: 2272013 - RNA, 19 nt, Artificial Sequence
  Description of Artificial Sequence: Synthetic oligonucleotide
cagcgcuaccucucucuga

SEQ ID NO: 2272014 - RNA, 19 nt, Artificial Sequence
  Description of Artificial Sequence: Synthetic oligonucleotide
ugcuagcucgcggcugguc

SEQ ID NO: 2272015 - RNA, 19 nt, Artificial Sequence
  Description of Artificial Sequence: Synthetic oligonucleotide
ggucugcucugcugguuga

SEQ ID NO: 2272016 - RNA, 19 nt, Artificial Sequence
  Description of Artificial Sequence: Synthetic oligonucleotide
gacgaagccauagcuucuu

SEQ ID NO: 2272017 - RNA, 19 nt, Artificial Sequence
  Description of Artificial Sequence: Synthetic oligonucleotide
cugugaugcaggccugcua

SEQ ID NO: 2272018 - RNA, 19 nt, Artificial Sequence
  Description of Artificial Sequence: Synthetic oligonucleotide
cggaucgugcaauguaguc

SEQ ID NO: 2272019 - RNA, 19 nt, Artificial Sequence
  Description of Artificial Sequence: Synthetic oligonucleotide
ggccacggugaggagggag

SEQ ID NO: 2272020 - RNA, 19 nt, Artificial Sequence
  Description of Artificial Sequence: Synthetic oligonucleotide
gcauugugguguugcagcu

SEQ ID NO: 2272021 - RNA, 19 nt, Artificial Sequence
  Description of Artificial Sequence: Synthetic oligonucleotide
gcagacguucaagccuuug

SEQ ID NO: 2272022 - RNA, 19 nt, Artificial Sequence
  Description of Artificial Sequence: Synthetic oligonucleotide
gcacgcauggaaucccucu

SEQ ID NO: 2272023 - RNA, 19 nt, Artificial Sequence
  Description of Artificial Sequence: Synthetic oligonucleotide
gccuuuguguccacugcuc

SEQ ID NO: 2272024 - RNA, 19 nt, Artificial Sequence
  Description of Artificial Sequence: Synthetic oligonucleotide
auccgcagcugcgcauugu

SEQ ID NO: 2272025 - RNA, 19 nt, Artificial Sequence
  Description of Artificial Sequence: Synthetic oligonucleotide
gugagccaugugacugcug

SEQ ID NO: 2272026 - RNA, 19 nt, Artificial Sequence
  Description of Artificial Sequence: Synthetic oligonucleotide
gcagucguuccaacuccug

SEQ ID NO: 2272027 - RNA, 19 nt, Artificial Sequence
  Description of Artificial Sequence: Synthetic oligonucleotide
ccacacgcaugcuauccga

SEQ ID NO: 2272028 - RNA, 19 nt, Artificial Sequence
  Description of Artificial Sequence: Synthetic oligonucleotide
ggcugugaugcaggccugc

SEQ ID NO: 2272029 - RNA, 19 nt, Artificial Sequence
  Description of Artificial Sequence: Synthetic oligonucleotide
ccucucucugaaguucaac

SEQ ID NO: 2272030 - RNA, 19 nt, Artificial Sequence
  Description of Artificial Sequence: Synthetic oligonucleotide
caccuuacuggccuauguu

SEQ ID NO: 2272031 - RNA, 19 nt, Artificial Sequence
  Description of Artificial Sequence: Synthetic oligonucleotide
ccaacugggcucgcagcag

SEQ ID NO: 2272032 - RNA, 19 nt, Artificial Sequence
  Description of Artificial Sequence: Synthetic oligonucleotide
gcuuucgcuccaaugccaa

SEQ ID NO: 2272033 - RNA, 19 nt, Artificial Sequence
  Description of Artificial Sequence: Synthetic oligonucleotide
aggcugugaugcaggccug

SEQ ID NO: 2272034 - RNA, 19 nt, Artificial Sequence
  Description of Artificial Sequence: Synthetic oligonucleotide
auucccgcucuaggacaga

SEQ ID NO: 2272035 - RNA, 19 nt, Artificial Sequence
  Description of Artificial Sequence: Synthetic oligonucleotide
cgauucccgcucuaggaca

SEQ ID NO: 2272036 - RNA, 19 nt, Artificial Sequence
  Description of Artificial Sequence: Synthetic oligonucleotide
ccagugacccugcucggga

SEQ ID NO: 2272037 - RNA, 19 nt, Artificial Sequence
  Description of Artificial Sequence: Synthetic oligonucleotide
cgcaugcuauccgaggaac

SEQ ID NO: 2272038 - RNA, 19 nt, Artificial Sequence
  Description of Artificial Sequence: Synthetic oligonucleotide
ugucugccucagggcauuc

SEQ ID NO: 2272039 - RNA, 19 nt, Artificial Sequence
  Description of Artificial Sequence: Synthetic oligonucleotide
gggaccgugccaaguccug

SEQ ID NO: 2272040 - RNA, 19 nt, Artificial Sequence
  Description of Artificial Sequence: Synthetic oligonucleotide
ccacucgaucucccuggcc

SEQ ID NO: 2272041 - RNA, 19 nt, Artificial Sequence
  Description of Artificial Sequence: Synthetic oligonucleotide
cggucaaauuccagcugug

SEQ ID NO: 2272042 - RNA, 19 nt, Artificial Sequence
  Description of Artificial Sequence: Synthetic oligonucleotide
cacggugaggagggaguga

SEQ ID NO: 2272043 - RNA, 19 nt, Artificial Sequence
  Description of Artificial Sequence: Synthetic oligonucleotide
cggucugcucugcugguug

SEQ ID NO: 2272044 - RNA, 19 nt, Artificial Sequence
  Description of Artificial Sequence: Synthetic oligonucleotide
gcucuaggacagaggcuug

SEQ ID NO: 2272045 - RNA, 19 nt, Artificial Sequence
  Description of Artificial Sequence: Synthetic oligonucleotide
cacgcauggaaucccucuu

SEQ ID NO: 2272046 - RNA, 19 nt, Artificial Sequence
  Description of Artificial Sequence: Synthetic oligonucleotide
caaugccaacugggcucgc

SEQ ID NO: 2272047 - RNA, 19 nt, Artificial Sequence
  Description of Artificial Sequence: Synthetic oligonucleotide
cucgcucuaccagcucuaa

SEQ ID NO: 2272048 - RNA, 19 nt, Artificial Sequence
  Description of Artificial Sequence: Synthetic oligonucleotide
ggaccgugccaaguccuga

SEQ ID NO: 2272049 - RNA, 19 nt, Artificial Sequence
  Description of Artificial Sequence: Synthetic oligonucleotide
gcgcuaccucucucugaag

SEQ ID NO: 2272050 - RNA, 19 nt, Artificial Sequence
  Description of Artificial Sequence: Synthetic oligonucleotide
gccuugcucugggccaggg

SEQ ID NO: 2272051 - RNA, 19 nt, Artificial Sequence
  Description of Artificial Sequence: Synthetic oligonucleotide
ccacggugaggagggagug

SEQ ID NO: 2272052 - RNA, 19 nt, Artificial Sequence
  Description of Artificial Sequence: Synthetic oligonucleotide
gggaugccagacucugacu

SEQ ID NO: 2272053 - RNA, 19 nt, Artificial Sequence
  Description of Artificial Sequence: Synthetic oligonucleotide
gcaggccugcuagcucgcg

SEQ ID NO: 2272054 - RNA, 19 nt, Artificial Sequence
  Description of Artificial Sequence: Synthetic oligonucleotide
gccugcuagcucgcggcug

SEQ ID NO: 2272055 - RNA, 19 nt, Artificial Sequence
  Description of Artificial Sequence: Synthetic oligonucleotide
gcucgcagcagcgcuaccu

SEQ ID NO: 2272056 - RNA, 19 nt, Artificial Sequence
  Description of Artificial Sequence: Synthetic oligonucleotide
ccuccaccccaggacuggg

SEQ ID NO: 2272057 - RNA, 19 nt, Artificial Sequence
  Description of Artificial Sequence: Synthetic oligonucleotide
ggccagggaccgugccaag

SEQ ID NO: 2272058 - RNA, 19 nt, Artificial Sequence
  Description of Artificial Sequence: Synthetic oligonucleotide
guucaaccacacgcaugcu

SEQ ID NO: 2272059 - RNA, 19 nt, Artificial Sequence
  Description of Artificial Sequence: Synthetic oligonucleotide
ggacgaagccauagcuucu

SEQ ID NO: 2272060 - RNA, 19 nt, Artificial Sequence
  Description of Artificial Sequence: Synthetic oligonucleotide
cucgaucucccuggccucu

SEQ ID NO: 2272061 - RNA, 19 nt, Artificial Sequence
  Description of Artificial Sequence: Synthetic oligonucleotide
agcucgcggcuggucugca

SEQ ID NO: 2272062 - RNA, 19 nt, Artificial Sequence
  Description of Artificial Sequence: Synthetic oligonucleotide
cgcuaccucucucugaagu

SEQ ID NO: 2272063 - RNA, 19 nt, Artificial Sequence
  Description of Artificial Sequence: Synthetic oligonucleotide
ccaccuuacuggccuaugu

SEQ ID NO: 2272064 - RNA, 19 nt, Artificial Sequence
  Description of Artificial Sequence: Synthetic oligonucleotide
gcuauccgaggaaccccuc

SEQ ID NO: 2272065 - RNA, 19 nt, Artificial Sequence
  Description of Artificial Sequence: Synthetic oligonucleotide
gccacggugaggagggagu

SEQ ID NO: 2272066 - RNA, 19 nt, Artificial Sequence
  Description of Artificial Sequence: Synthetic oligonucleotide
ggggacgaagccauagcuu

SEQ ID NO: 2272067 - RNA, 19 nt, Artificial Sequence
  Description of Artificial Sequence: Synthetic oligonucleotide
cgcagcugcgcauuguggu

SEQ ID NO: 2272068 - RNA, 19 nt, Artificial Sequence
  Description of Artificial Sequence: Synthetic oligonucleotide
ccaugugacugcugcuccu

SEQ ID NO: 2272069 - RNA, 19 nt, Artificial Sequence
  Description of Artificial Sequence: Synthetic oligonucleotide
cguucucgcucuaccagcu

SEQ ID NO: 2272070 - RNA, 19 nt, Artificial Sequence
  Description of Artificial Sequence: Synthetic oligonucleotide
gcugugaugcaggccugcu

SEQ ID NO: 2272071 - RNA, 19 nt, Artificial Sequence
  Description of Artificial Sequence: Synthetic oligonucleotide
guguccagacugggaugua

SEQ ID NO: 2272072 - RNA, 19 nt, Artificial Sequence
  Description of Artificial Sequence: Synthetic oligonucleotide
cugucugccucagggcauu

SEQ ID NO: 2272073 - RNA, 19 nt, Artificial Sequence
  Description of Artificial Sequence: Synthetic oligonucleotide
cgggaagcacgcauggaau

SEQ ID NO: 2272074 - RNA, 19 nt, Artificial Sequence
  Description of Artificial Sequence: Synthetic oligonucleotide
ggccugcuagcucgcggcu

SEQ ID NO: 2272075 - RNA, 19 nt, Artificial Sequence
  Description of Artificial Sequence: Synthetic oligonucleotide
caccaccuuacuggccuau

SEQ ID NO: 2272076 - RNA, 19 nt, Artificial Sequence
  Description of Artificial Sequence: Synthetic oligonucleotide
gcggcuggucugcacggau

SEQ ID NO: 2272077 - RNA, 19 nt, Artificial Sequence
  Description of Artificial Sequence: Synthetic oligonucleotide
ccgcucuaggacagaggcu

SEQ ID NO: 2272078 - RNA, 19 nt, Artificial Sequence
  Description of Artificial Sequence: Synthetic oligonucleotide
cagaggcuuguaggagcau

SEQ ID NO: 2272079 - RNA, 19 nt, Artificial Sequence
  Description of Artificial Sequence: Synthetic oligonucleotide
gcuggucugcacggaucgu

SEQ ID NO: 2272080 - RNA, 19 nt, Artificial Sequence
  Description of Artificial Sequence: Synthetic oligonucleotide
ccugcugugcggggacgaa

SEQ ID NO: 2272081 - RNA, 19 nt, Artificial Sequence
  Description of Artificial Sequence: Synthetic oligonucleotide
gugcggggacgaagccaua

SEQ ID NO: 2272082 - RNA, 19 nt, Artificial Sequence
  Description of Artificial Sequence: Synthetic oligonucleotide
cugcuagcucgcggcuggu

SEQ ID NO: 2272083 - RNA, 19 nt, Artificial Sequence
  Description of Artificial Sequence: Synthetic oligonucleotide
cccggucugcucugcuggu

SEQ ID NO: 2272084 - RNA, 19 nt, Artificial Sequence
  Description of Artificial Sequence: Synthetic oligonucleotide
gcccuggcuauggcugcua

SEQ ID NO: 2272085 - RNA, 19 nt, Artificial Sequence
  Description of Artificial Sequence: Synthetic oligonucleotide
ccggucugcucugcugguu

SEQ ID NO: 2272086 - RNA, 19 nt, Artificial Sequence
  Description of Artificial Sequence: Synthetic oligonucleotide
aaaguaggaauccaguagg

SEQ ID NO: 2272087 - RNA, 19 nt, Artificial Sequence
  Description of Artificial Sequence: Synthetic oligonucleotide
cagaucaucaagaagaugg

SEQ ID NO: 2272088 - RNA, 19 nt, Artificial Sequence
  Description of Artificial Sequence: Synthetic oligonucleotide
cuuuauagguaaaugacag

SEQ ID NO: 2272089 - RNA, 19 nt, Artificial Sequence
  Description of Artificial Sequence: Synthetic oligonucleotide
aaaacgauaggccuguaga

SEQ ID NO: 2272090 - RNA, 19 nt, Artificial Sequence
  Description of Artificial Sequence: Synthetic oligonucleotide
uguagaaugucuuucacgu

SEQ ID NO: 2272091 - RNA, 19 nt, Artificial Sequence
  Description of Artificial Sequence: Synthetic oligonucleotide
ucugcaaagguccagugag

SEQ ID NO: 2272092 - RNA, 19 nt, Artificial Sequence
  Description of Artificial Sequence: Synthetic oligonucleotide
cuggauaucagucuguagg

SEQ ID NO: 2272093 - RNA, 19 nt, Artificial Sequence
  Description of Artificial Sequence: Synthetic oligonucleotide
ucuguuugggucuucauug

SEQ ID NO: 2272094 - RNA, 19 nt, Artificial Sequence
  Description of Artificial Sequence: Synthetic oligonucleotide
aaguugguccgucugguac

SEQ ID NO: 2272095 - RNA, 19 nt, Artificial Sequence
  Description of Artificial Sequence: Synthetic oligonucleotide
auagguaaaugacagcaag

SEQ ID NO: 2272096 - RNA, 19 nt, Artificial Sequence
  Description of Artificial Sequence: Synthetic oligonucleotide
aaggaucuaucucagccuc

SEQ ID NO: 2272097 - RNA, 19 nt, Artificial Sequence
  Description of Artificial Sequence: Synthetic oligonucleotide
agaccauccguacacagcg

SEQ ID NO: 2272098 - RNA, 19 nt, Artificial Sequence
  Description of Artificial Sequence: Synthetic oligonucleotide
uggugaugaauccugagug

SEQ ID NO: 2272099 - RNA, 19 nt, Artificial Sequence
  Description of Artificial Sequence: Synthetic oligonucleotide
ucggaagagcauuucaugg

SEQ ID NO: 2272100 - RNA, 19 nt, Artificial Sequence
  Description of Artificial Sequence: Synthetic oligonucleotide
ugcaccuucaccgagacca

SEQ ID NO: 2272101 - RNA, 19 nt, Artificial Sequence
  Description of Artificial Sequence: Synthetic oligonucleotide
ucuguagguauucuguggc

SEQ ID NO: 2272102 - RNA, 19 nt, Artificial Sequence
  Description of Artificial Sequence: Synthetic oligonucleotide
caauguggcacuaaaggag

SEQ ID NO: 2272103 - RNA, 19 nt, Artificial Sequence
  Description of Artificial Sequence: Synthetic oligonucleotide
uucaacuuguuuugaaaag

SEQ ID NO: 2272104 - RNA, 19 nt, Artificial Sequence
  Description of Artificial Sequence: Synthetic oligonucleotide
uacacagcggcuuaucucc

SEQ ID NO: 2272105 - RNA, 19 nt, Artificial Sequence
  Description of Artificial Sequence: Synthetic oligonucleotide
aaauccaggauuucaacuu

SEQ ID NO: 2272106 - RNA, 19 nt, Artificial Sequence
  Description of Artificial Sequence: Synthetic oligonucleotide
cacuuuauagguaaaugac

SEQ ID NO: 2272107 - RNA, 19 nt, Artificial Sequence
  Description of Artificial Sequence: Synthetic oligonucleotide
ucagucucaaguugguccg

SEQ ID NO: 2272108 - RNA, 19 nt, Artificial Sequence
  Description of Artificial Sequence: Synthetic oligonucleotide
caaaguaggaauccaguag

SEQ ID NO: 2272109 - RNA, 19 nt, Artificial Sequence
  Description of Artificial Sequence: Synthetic oligonucleotide
uuaguguuacgcaaggauc

SEQ ID NO: 2272110 - RNA, 19 nt, Artificial Sequence
  Description of Artificial Sequence: Synthetic oligonucleotide
ucccugauccacuuuauag

SEQ ID NO: 2272111 - RNA, 19 nt, Artificial Sequence
  Description of Artificial Sequence: Synthetic oligonucleotide
auggaauggugaugaaucc

SEQ ID NO: 2272112 - RNA, 19 nt, Artificial Sequence
  Description of Artificial Sequence: Synthetic oligonucleotide
acaguacuuaguguuacgc

SEQ ID NO: 2272113 - RNA, 19 nt, Artificial Sequence
  Description of Artificial Sequence: Synthetic oligonucleotide
gaagcaaacaccuggugca

SEQ ID NO: 2272114 - RNA, 19 nt, Artificial Sequence
  Description of Artificial Sequence: Synthetic oligonucleotide
acuuguuuugaaaaggaag

SEQ ID NO: 2272115 - RNA, 19 nt, Artificial Sequence
  Description of Artificial Sequence: Synthetic oligonucleotide
gaagucagucucaaguugg

SEQ ID NO: 2272116 - RNA, 19 nt, Artificial Sequence
  Description of Artificial Sequence: Synthetic oligonucleotide
uaguguuacgcaaggaucu

SEQ ID NO: 2272117 - RNA, 19 nt, Artificial Sequence
  Description of Artificial Sequence: Synthetic oligonucleotide
acaaggucuacaaaguagg

SEQ ID NO: 2272118 - RNA, 19 nt, Artificial Sequence
  Description of Artificial Sequence: Synthetic oligonucleotide
agagcauuucaugggaugc

SEQ ID NO: 2272119 - RNA, 19 nt, Artificial Sequence
  Description of Artificial Sequence: Synthetic oligonucleotide
uacuuaguguuacgcaagg

SEQ ID NO: 2272120 - RNA, 19 nt, Artificial Sequence
  Description of Artificial Sequence: Synthetic oligonucleotide
uaaaacgauaggccuguag

SEQ ID NO: 2272121 - RNA, 19 nt, Artificial Sequence
  Description of Artificial Sequence: Synthetic oligonucleotide
aagauggcaggcucuggcg

SEQ ID NO: 2272122 - RNA, 19 nt, Artificial Sequence
  Description of Artificial Sequence: Synthetic oligonucleotide
aagagcauuucaugggaug

SEQ ID NO: 2272123 - RNA, 19 nt, Artificial Sequence
  Description of Artificial Sequence: Synthetic oligonucleotide
aggucuacaaaguaggaau

SEQ ID NO: 2272124 - RNA, 19 nt, Artificial Sequence
  Description of Artificial Sequence: Synthetic oligonucleotide
ugaguaggcauugagguac

SEQ ID NO: 2272125 - RNA, 19 nt, Artificial Sequence
  Description of Artificial Sequence: Synthetic oligonucleotide
uacaaaguaggaauccagu

SEQ ID NO: 2272126 - RNA, 19 nt, Artificial Sequence
  Description of Artificial Sequence: Synthetic oligonucleotide
uaggcauugagguacucgc

SEQ ID NO: 2272127 - RNA, 19 nt, Artificial Sequence
  Description of Artificial Sequence: Synthetic oligonucleotide
ugauccacuuuauagguaa

SEQ ID NO: 2272128 - RNA, 19 nt, Artificial Sequence
  Description of Artificial Sequence: Synthetic oligonucleotide
aggauuucaacuuguuuug

SEQ ID NO: 2272129 - RNA, 19 nt, Artificial Sequence
  Description of Artificial Sequence: Synthetic oligonucleotide
gacaaggucuacaaaguag

SEQ ID NO: 2272130 - RNA, 19 nt, Artificial Sequence
  Description of Artificial Sequence: Synthetic oligonucleotide
aguacuuaguguuacgcaa

SEQ ID NO: 2272131 - RNA, 19 nt, Artificial Sequence
  Description of Artificial Sequence: Synthetic oligonucleotide
accgagaccauccguacac

SEQ ID NO: 2272132 - RNA, 19 nt, Artificial Sequence
  Description of Artificial Sequence: Synthetic oligonucleotide
uuuuccuggcccacgggcg

SEQ ID NO: 2272133 - RNA, 19 nt, Artificial Sequence
  Description of Artificial Sequence: Synthetic oligonucleotide
uugcuaauccccagcaugc

SEQ ID NO: 2272134 - RNA, 19 nt, Artificial Sequence
  Description of Artificial Sequence: Synthetic oligonucleotide
guaggaauccaguagguuc

SEQ ID NO: 2272135 - RNA, 19 nt, Artificial Sequence
  Description of Artificial Sequence: Synthetic oligonucleotide
uuguacaguacuuaguguu

SEQ ID NO: 2272136 - RNA, 19 nt, Artificial Sequence
  Description of Artificial Sequence: Synthetic oligonucleotide
uucauugcuaauccccagc

SEQ ID NO: 2272137 - RNA, 19 nt, Artificial Sequence
  Description of Artificial Sequence: Synthetic oligonucleotide
aucaucaagaagauggcag

SEQ ID NO: 2272138 - RNA, 19 nt, Artificial Sequence
  Description of Artificial Sequence: Synthetic oligonucleotide
caaagguccagugaggaag

SEQ ID NO: 2272139 - RNA, 19 nt, Artificial Sequence
  Description of Artificial Sequence: Synthetic oligonucleotide
ucauugcuaauccccagca

SEQ ID NO: 2272140 - RNA, 19 nt, Artificial Sequence
  Description of Artificial Sequence: Synthetic oligonucleotide
uguucuucccaacgagcgg

SEQ ID NO: 2272141 - RNA, 19 nt, Artificial Sequence
  Description of Artificial Sequence: Synthetic oligonucleotide
accauccguacacagcggc

SEQ ID NO: 2272142 - RNA, 19 nt, Artificial Sequence
  Description of Artificial Sequence: Synthetic oligonucleotide
uucggaagagcauuucaug

SEQ ID NO: 2272143 - RNA, 19 nt, Artificial Sequence
  Description of Artificial Sequence: Synthetic oligonucleotide
agcggaugauguuucugcc

SEQ ID NO: 2272144 - RNA, 19 nt, Artificial Sequence
  Description of Artificial Sequence: Synthetic oligonucleotide
uacucgcagagacugaaga

SEQ ID NO: 2272145 - RNA, 19 nt, Artificial Sequence
  Description of Artificial Sequence: Synthetic oligonucleotide
auuucaacuuguuuugaaa

SEQ ID NO: 2272146 - RNA, 19 nt, Artificial Sequence
  Description of Artificial Sequence: Synthetic oligonucleotide
acgauaggccuguagaaug

SEQ ID NO: 2272147 - RNA, 19 nt, Artificial Sequence
  Description of Artificial Sequence: Synthetic oligonucleotide
uagguaaaugacagcaagu

SEQ ID NO: 2272148 - RNA, 19 nt, Artificial Sequence
  Description of Artificial Sequence: Synthetic oligonucleotide
uccacuuuauagguaaaug

SEQ ID NO: 2272149 - RNA, 19 nt, Artificial Sequence
  Description of Artificial Sequence: Synthetic oligonucleotide
uggauaucagucuguaggu

SEQ ID NO: 2272150 - RNA, 19 nt, Artificial Sequence
  Description of Artificial Sequence: Synthetic oligonucleotide
uauagguaaaugacagcaa

SEQ ID NO: 2272151 - RNA, 19 nt, Artificial Sequence
  Description of Artificial Sequence: Synthetic oligonucleotide
uguaaaacgauaggccugu

SEQ ID NO: 2272152 - RNA, 19 nt, Artificial Sequence
  Description of Artificial Sequence: Synthetic oligonucleotide
agaucaucaagaagauggc

SEQ ID NO: 2272153 - RNA, 19 nt, Artificial Sequence
  Description of Artificial Sequence: Synthetic oligonucleotide
guggcacuaaaggagaagg

SEQ ID NO: 2272154 - RNA, 19 nt, Artificial Sequence
  Description of Artificial Sequence: Synthetic oligonucleotide
ucaaauccaggauuucaac

SEQ ID NO: 2272155 - RNA, 19 nt, Artificial Sequence
  Description of Artificial Sequence: Synthetic oligonucleotide
aauguggcacuaaaggaga

SEQ ID NO: 2272156 - RNA, 19 nt, Artificial Sequence
  Description of Artificial Sequence: Synthetic oligonucleotide
ugggauggaauggugauga

SEQ ID NO: 2272157 - RNA, 19 nt, Artificial Sequence
  Description of Artificial Sequence: Synthetic oligonucleotide
cacugagcccuguaaaacg

SEQ ID NO: 2272158 - RNA, 19 nt, Artificial Sequence
  Description of Artificial Sequence: Synthetic oligonucleotide
gagcggaugauguuucugc

SEQ ID NO: 2272159 - RNA, 19 nt, Artificial Sequence
  Description of Artificial Sequence: Synthetic oligonucleotide
cauucagaucaucaagaag

SEQ ID NO: 2272160 - RNA, 19 nt, Artificial Sequence
  Description of Artificial Sequence: Synthetic oligonucleotide
cugaugcacacacagacuc

SEQ ID NO: 2272161 - RNA, 19 nt, Artificial Sequence
  Description of Artificial Sequence: Synthetic oligonucleotide
cuuaucuccaggagcuggg

SEQ ID NO: 2272162 - RNA, 19 nt, Artificial Sequence
  Description of Artificial Sequence: Synthetic oligonucleotide
uaauccccagcaugcaccg

SEQ ID NO: 2272163 - RNA, 19 nt, Artificial Sequence
  Description of Artificial Sequence: Synthetic oligonucleotide
gcaaggaucuaucucagcc

SEQ ID NO: 2272164 - RNA, 19 nt, Artificial Sequence
  Description of Artificial Sequence: Synthetic oligonucleotide
ucuacaaaguaggaaucca

SEQ ID NO: 2272165 - RNA, 19 nt, Artificial Sequence
  Description of Artificial Sequence: Synthetic oligonucleotide
ugccuugccagauuccucc

SEQ ID NO: 2272166 - RNA, 19 nt, Artificial Sequence
  Description of Artificial Sequence: Synthetic oligonucleotide
uacaguacuuaguguuacg

SEQ ID NO: 2272167 - RNA, 19 nt, Artificial Sequence
  Description of Artificial Sequence: Synthetic oligonucleotide
acuuuauagguaaaugaca

SEQ ID NO: 2272168 - RNA, 19 nt, Artificial Sequence
  Description of Artificial Sequence: Synthetic oligonucleotide
agguauucuguggcuaucc

SEQ ID NO: 2272169 - RNA, 19 nt, Artificial Sequence
  Description of Artificial Sequence: Synthetic oligonucleotide
cuguaaaacgauaggccug

SEQ ID NO: 2272170 - RNA, 19 nt, Artificial Sequence
  Description of Artificial Sequence: Synthetic oligonucleotide
ggaagcaaacaccuggugc

SEQ ID NO: 2272171 - RNA, 19 nt, Artificial Sequence
  Description of Artificial Sequence: Synthetic oligonucleotide
uguacaguacuuaguguua

SEQ ID NO: 2272172 - RNA, 19 nt, Artificial Sequence
  Description of Artificial Sequence: Synthetic oligonucleotide
ugucuuucacguuucccca

SEQ ID NO: 2272173 - RNA, 19 nt, Artificial Sequence
  Description of Artificial Sequence: Synthetic oligonucleotide
uguuacgcaaggaucuauc

SEQ ID NO: 2272174 - RNA, 19 nt, Artificial Sequence
  Description of Artificial Sequence: Synthetic oligonucleotide
gauggcaggcucuggcgcg

SEQ ID NO: 2272175 - RNA, 19 nt, Artificial Sequence
  Description of Artificial Sequence: Synthetic oligonucleotide
cauugagguacucgcagag

SEQ ID NO: 2272176 - RNA, 19 nt, Artificial Sequence
  Description of Artificial Sequence: Synthetic oligonucleotide
aguugcacagggcauuucu

SEQ ID NO: 2272177 - RNA, 19 nt, Artificial Sequence
  Description of Artificial Sequence: Synthetic oligonucleotide
acaaaguaggaauccagua

SEQ ID NO: 2272178 - RNA, 19 nt, Artificial Sequence
  Description of Artificial Sequence: Synthetic oligonucleotide
guguucuucccaacgagcg

SEQ ID NO: 2272179 - RNA, 19 nt, Artificial Sequence
  Description of Artificial Sequence: Synthetic oligonucleotide
uuuccagagggaugaagac

SEQ ID NO: 2272180 - RNA, 19 nt, Artificial Sequence
  Description of Artificial Sequence: Synthetic oligonucleotide
uuacgcaaggaucuaucuc

SEQ ID NO: 2272181 - RNA, 19 nt, Artificial Sequence
  Description of Artificial Sequence: Synthetic oligonucleotide
aagacugggauggaauggu

SEQ ID NO: 2272182 - RNA, 19 nt, Artificial Sequence
  Description of Artificial Sequence: Synthetic oligonucleotide
ugaugcacacacagacucc

SEQ ID NO: 2272183 - RNA, 19 nt, Artificial Sequence
  Description of Artificial Sequence: Synthetic oligonucleotide
ggugaugaauccugagugg

SEQ ID NO: 2272184 - RNA, 19 nt, Artificial Sequence
  Description of Artificial Sequence: Synthetic oligonucleotide
ccucauacagcaauguggc

SEQ ID NO: 2272185 - RNA, 19 nt, Artificial Sequence
  Description of Artificial Sequence: Synthetic oligonucleotide
agggaugaagacugggaug

SEQ ID NO: 2272186 - RNA, 19 nt, Artificial Sequence
  Description of Artificial Sequence: Synthetic oligonucleotide
uucuguuugggucuucauu

SEQ ID NO: 2272187 - RNA, 19 nt, Artificial Sequence
  Description of Artificial Sequence: Synthetic oligonucleotide
gaugcucuguguucuuccc

SEQ ID NO: 2272188 - RNA, 19 nt, Artificial Sequence
  Description of Artificial Sequence: Synthetic oligonucleotide
guaggcauugagguacucg

SEQ ID NO: 2272189 - RNA, 19 nt, Artificial Sequence
  Description of Artificial Sequence: Synthetic oligonucleotide
uacuuccucccugaguagg

SEQ ID NO: 2272190 - RNA, 19 nt, Artificial Sequence
  Description of Artificial Sequence: Synthetic oligonucleotide
cauuucaugggaugcucug

SEQ ID NO: 2272191 - RNA, 19 nt, Artificial Sequence
  Description of Artificial Sequence: Synthetic oligonucleotide
ugcaaagguccagugagga

SEQ ID NO: 2272192 - RNA, 19 nt, Artificial Sequence
  Description of Artificial Sequence: Synthetic oligonucleotide
uguuugggucuucauugcu

SEQ ID NO: 2272193 - RNA, 19 nt, Artificial Sequence
  Description of Artificial Sequence: Synthetic oligonucleotide
agcgcuggauaucagucug

SEQ ID NO: 2272194 - RNA, 19 nt, Artificial Sequence
  Description of Artificial Sequence: Synthetic oligonucleotide
aacgagcggaugauguuuc

SEQ ID NO: 2272195 - RNA, 19 nt, Artificial Sequence
  Description of Artificial Sequence: Synthetic oligonucleotide
ucccugaguaggcauugag

SEQ ID NO: 2272196 - RNA, 19 nt, Artificial Sequence
  Description of Artificial Sequence: Synthetic oligonucleotide
uggcuauccuuuccagagg

SEQ ID NO: 2272197 - RNA, 19 nt, Artificial Sequence
  Description of Artificial Sequence: Synthetic oligonucleotide
ggcuauccuuuccagaggg

SEQ ID NO: 2272198 - RNA, 19 nt, Artificial Sequence
  Description of Artificial Sequence: Synthetic oligonucleotide
ucuuucacguuuccccacu

SEQ ID NO: 2272199 - RNA, 19 nt, Artificial Sequence
  Description of Artificial Sequence: Synthetic oligonucleotide
ugacaaggucuacaaagua

SEQ ID NO: 2272200 - RNA, 19 nt, Artificial Sequence
  Description of Artificial Sequence: Synthetic oligonucleotide
caacuuguuuugaaaagga

SEQ ID NO: 2272201 - RNA, 19 nt, Artificial Sequence
  Description of Artificial Sequence: Synthetic oligonucleotide
uagguuccccucaaaggca

SEQ ID NO: 2272202 - RNA, 19 nt, Artificial Sequence
  Description of Artificial Sequence: Synthetic oligonucleotide
aacgauaggccuguagaau

SEQ ID NO: 2272203 - RNA, 19 nt, Artificial Sequence
  Description of Artificial Sequence: Synthetic oligonucleotide
uccacuguucuguuugggu

SEQ ID NO: 2272204 - RNA, 19 nt, Artificial Sequence
  Description of Artificial Sequence: Synthetic oligonucleotide
gauaucagucuguagguau

SEQ ID NO: 2272205 - RNA, 19 nt, Artificial Sequence
  Description of Artificial Sequence: Synthetic oligonucleotide
acuaaaggagaaggucugg

SEQ ID NO: 2272206 - RNA, 19 nt, Artificial Sequence
  Description of Artificial Sequence: Synthetic oligonucleotide
gucuacaaaguaggaaucc

SEQ ID NO: 2272207 - RNA, 19 nt, Artificial Sequence
  Description of Artificial Sequence: Synthetic oligonucleotide
ugcaccgcagagucggucc

SEQ ID NO: 2272208 - RNA, 19 nt, Artificial Sequence
  Description of Artificial Sequence: Synthetic oligonucleotide
agaaugucuuucacguuuc

SEQ ID NO: 2272209 - RNA, 19 nt, Artificial Sequence
  Description of Artificial Sequence: Synthetic oligonucleotide
uguggcacuaaaggagaag

SEQ ID NO: 2272210 - RNA, 19 nt, Artificial Sequence
  Description of Artificial Sequence: Synthetic oligonucleotide
ucugccccugggcacauca

SEQ ID NO: 2272211 - RNA, 19 nt, Artificial Sequence
  Description of Artificial Sequence: Synthetic oligonucleotide
ugguccgucugguacuucc

SEQ ID NO: 2272212 - RNA, 19 nt, Artificial Sequence
  Description of Artificial Sequence: Synthetic oligonucleotide
agucgguccggccauucag

SEQ ID NO: 2272213 - RNA, 19 nt, Artificial Sequence
  Description of Artificial Sequence: Synthetic oligonucleotide
agguaaaugacagcaaguu

SEQ ID NO: 2272214 - RNA, 19 nt, Artificial Sequence
  Description of Artificial Sequence: Synthetic oligonucleotide
gguacuuccucccugagua

SEQ ID NO: 2272215 - RNA, 19 nt, Artificial Sequence
  Description of Artificial Sequence: Synthetic oligonucleotide
gaagcgcuggauaucaguc

SEQ ID NO: 2272216 - RNA, 19 nt, Artificial Sequence
  Description of Artificial Sequence: Synthetic oligonucleotide
guacuuaguguuacgcaag

SEQ ID NO: 2272217 - RNA, 19 nt, Artificial Sequence
  Description of Artificial Sequence: Synthetic oligonucleotide
ugucacgccgccaccgcag

SEQ ID NO: 2272218 - RNA, 19 nt, Artificial Sequence
  Description of Artificial Sequence: Synthetic oligonucleotide
cccuguaaaacgauaggcc

SEQ ID NO: 2272219 - RNA, 19 nt, Artificial Sequence
  Description of Artificial Sequence: Synthetic oligonucleotide
acugggauggaauggugau

SEQ ID NO: 2272220 - RNA, 19 nt, Artificial Sequence
  Description of Artificial Sequence: Synthetic oligonucleotide
aacuuguuuugaaaaggaa

SEQ ID NO: 2272221 - RNA, 19 nt, Artificial Sequence
  Description of Artificial Sequence: Synthetic oligonucleotide
aucuaucucagccuccuuu

SEQ ID NO: 2272222 - RNA, 19 nt, Artificial Sequence
  Description of Artificial Sequence: Synthetic oligonucleotide
cugggcacaucacagugac

SEQ ID NO: 2272223 - RNA, 19 nt, Artificial Sequence
  Description of Artificial Sequence: Synthetic oligonucleotide
cccugauccacuuuauagg

SEQ ID NO: 2272224 - RNA, 19 nt, Artificial Sequence
  Description of Artificial Sequence: Synthetic oligonucleotide
aguugguccgucugguacu

SEQ ID NO: 2272225 - RNA, 19 nt, Artificial Sequence
  Description of Artificial Sequence: Synthetic oligonucleotide
gaaugucuuucacguuucc

SEQ ID NO: 2272226 - RNA, 19 nt, Artificial Sequence
  Description of Artificial Sequence: Synthetic oligonucleotide
caucaagaagauggcaggc

SEQ ID NO: 2272227 - RNA, 19 nt, Artificial Sequence
  Description of Artificial Sequence: Synthetic oligonucleotide
agauuccuccugcucacug

SEQ ID NO: 2272228 - RNA, 19 nt, Artificial Sequence
  Description of Artificial Sequence: Synthetic oligonucleotide
gggucuucauugcuaaucc

SEQ ID NO: 2272229 - RNA, 19 nt, Artificial Sequence
  Description of Artificial Sequence: Synthetic oligonucleotide
gaugcacacacagacucca

SEQ ID NO: 2272230 - RNA, 19 nt, Artificial Sequence
  Description of Artificial Sequence: Synthetic oligonucleotide
acagcaaguugcacagggc

SEQ ID NO: 2272231 - RNA, 19 nt, Artificial Sequence
  Description of Artificial Sequence: Synthetic oligonucleotide
uggcacuaaaggagaaggu

SEQ ID NO: 2272232 - RNA, 19 nt, Artificial Sequence
  Description of Artificial Sequence: Synthetic oligonucleotide
uguuucugccccugggcac

SEQ ID NO: 2272233 - RNA, 19 nt, Artificial Sequence
  Description of Artificial Sequence: Synthetic oligonucleotide
cucaaauccaggauuucaa

SEQ ID NO: 2272234 - RNA, 19 nt, Artificial Sequence
  Description of Artificial Sequence: Synthetic oligonucleotide
cacacagacuccacggcug

SEQ ID NO: 2272235 - RNA, 19 nt, Artificial Sequence
  Description of Artificial Sequence: Synthetic oligonucleotide
augacaaggucuacaaagu

SEQ ID NO: 2272236 - RNA, 19 nt, Artificial Sequence
  Description of Artificial Sequence: Synthetic oligonucleotide
ucagaucaucaagaagaug

SEQ ID NO: 2272237 - RNA, 19 nt, Artificial Sequence
  Description of Artificial Sequence: Synthetic oligonucleotide
aagcaaacaccuggugcag

SEQ ID NO: 2272238 - RNA, 19 nt, Artificial Sequence
  Description of Artificial Sequence: Synthetic oligonucleotide
ugagugguuucuccaugac

SEQ ID NO: 2272239 - RNA, 19 nt, Artificial Sequence
  Description of Artificial Sequence: Synthetic oligonucleotide
caugggaugcucuguguuc

SEQ ID NO: 2272240 - RNA, 19 nt, Artificial Sequence
  Description of Artificial Sequence: Synthetic oligonucleotide
acuuccucccugaguaggc

SEQ ID NO: 2272241 - RNA, 19 nt, Artificial Sequence
  Description of Artificial Sequence: Synthetic oligonucleotide
ggaauggugaugaauccug

SEQ ID NO: 2272242 - RNA, 19 nt, Artificial Sequence
  Description of Artificial Sequence: Synthetic oligonucleotide
gagugguuucuccaugaca

SEQ ID NO: 2272243 - RNA, 19 nt, Artificial Sequence
  Description of Artificial Sequence: Synthetic oligonucleotide
gaucaucaagaagauggca

SEQ ID NO: 2272244 - RNA, 19 nt, Artificial Sequence
  Description of Artificial Sequence: Synthetic oligonucleotide
ucaaguugguccgucuggu

SEQ ID NO: 2272245 - RNA, 19 nt, Artificial Sequence
  Description of Artificial Sequence: Synthetic oligonucleotide
cugcaaagguccagugagg

SEQ ID NO: 2272246 - RNA, 19 nt, Artificial Sequence
  Description of Artificial Sequence: Synthetic oligonucleotide
uguagguauucuguggcua

SEQ ID NO: 2272247 - RNA, 19 nt, Artificial Sequence
  Description of Artificial Sequence: Synthetic oligonucleotide
aggaagcaaacaccuggug

SEQ ID NO: 2272248 - RNA, 19 nt, Artificial Sequence
  Description of Artificial Sequence: Synthetic oligonucleotide
gagaccauccguacacagc

SEQ ID NO: 2272249 - RNA, 19 nt, Artificial Sequence
  Description of Artificial Sequence: Synthetic oligonucleotide
accgcagccuugcaccuuc

SEQ ID NO: 2272250 - RNA, 19 nt, Artificial Sequence
  Description of Artificial Sequence: Synthetic oligonucleotide
agcggcuuaucuccaggag

SEQ ID NO: 2272251 - RNA, 19 nt, Artificial Sequence
  Description of Artificial Sequence: Synthetic oligonucleotide
uaggccuguagaaugucuu

SEQ ID NO: 2272252 - RNA, 19 nt, Artificial Sequence
  Description of Artificial Sequence: Synthetic oligonucleotide
gcaauguggcacuaaagga

SEQ ID NO: 2272253 - RNA, 19 nt, Artificial Sequence
  Description of Artificial Sequence: Synthetic oligonucleotide
ugguacuuccucccugagu

SEQ ID NO: 2272254 - RNA, 19 nt, Artificial Sequence
  Description of Artificial Sequence: Synthetic oligonucleotide
ucccacugagcccuguaaa

SEQ ID NO: 2272255 - RNA, 19 nt, Artificial Sequence
  Description of Artificial Sequence: Synthetic oligonucleotide
ugaugaauccugagugguu

SEQ ID NO: 2272256 - RNA, 19 nt, Artificial Sequence
  Description of Artificial Sequence: Synthetic oligonucleotide
cuuaguguuacgcaaggau

SEQ ID NO: 2272257 - RNA, 19 nt, Artificial Sequence
  Description of Artificial Sequence: Synthetic oligonucleotide
ucacugagcuccacuguuc

SEQ ID NO: 2272258 - RNA, 19 nt, Artificial Sequence
  Description of Artificial Sequence: Synthetic oligonucleotide
cuugcaccuucaccgagac

SEQ ID NO: 2272259 - RNA, 19 nt, Artificial Sequence
  Description of Artificial Sequence: Synthetic oligonucleotide
cagcaaguugcacagggca

SEQ ID NO: 2272260 - RNA, 19 nt, Artificial Sequence
  Description of Artificial Sequence: Synthetic oligonucleotide
gaggaagcgcuggauauca

SEQ ID NO: 2272261 - RNA, 19 nt, Artificial Sequence
  Description of Artificial Sequence: Synthetic oligonucleotide
gguagcgcaggcuugucac

SEQ ID NO: 2272262 - RNA, 19 nt, Artificial Sequence
  Description of Artificial Sequence: Synthetic oligonucleotide
guacaguacuuaguguuac

SEQ ID NO: 2272263 - RNA, 19 nt, Artificial Sequence
  Description of Artificial Sequence: Synthetic oligonucleotide
ugguagcgcaggcuuguca

SEQ ID NO: 2272264 - RNA, 19 nt, Artificial Sequence
  Description of Artificial Sequence: Synthetic oligonucleotide
guagcgcaggcuugucacg

SEQ ID NO: 2272265 - RNA, 19 nt, Artificial Sequence
  Description of Artificial Sequence: Synthetic oligonucleotide
caguacuuaguguuacgca

SEQ ID NO: 2272266 - RNA, 19 nt, Artificial Sequence
  Description of Artificial Sequence: Synthetic oligonucleotide
agccgcagauccuuguaca

SEQ ID NO: 2272267 - RNA, 19 nt, Artificial Sequence
  Description of Artificial Sequence: Synthetic oligonucleotide
gaauccaguagguuccccu

SEQ ID NO: 2272268 - RNA, 19 nt, Artificial Sequence
  Description of Artificial Sequence: Synthetic oligonucleotide
gcaugcaccgcagagucgg

SEQ ID NO: 2272269 - RNA, 19 nt, Artificial Sequence
  Description of Artificial Sequence: Synthetic oligonucleotide
cuucccaacgagcggauga

SEQ ID NO: 2272270 - RNA, 19 nt, Artificial Sequence
  Description of Artificial Sequence: Synthetic oligonucleotide
aggaucuaucucagccucc

SEQ ID NO: 2272271 - RNA, 19 nt, Artificial Sequence
  Description of Artificial Sequence: Synthetic oligonucleotide
cacaucacagugacaccug

SEQ ID NO: 2272272 - RNA, 19 nt, Artificial Sequence
  Description of Artificial Sequence: Synthetic oligonucleotide
ugcgcaaggugguucucga

SEQ ID NO: 2272273 - RNA, 19 nt, Artificial Sequence
  Description of Artificial Sequence: Synthetic oligonucleotide
agucagucucaaguugguc

SEQ ID NO: 2272274 - RNA, 19 nt, Artificial Sequence
  Description of Artificial Sequence: Synthetic oligonucleotide
aggaauccaguagguuccc

SEQ ID NO: 2272275 - RNA, 19 nt, Artificial Sequence
  Description of Artificial Sequence: Synthetic oligonucleotide
acugccuugccagauuccu

SEQ ID NO: 2272276 - RNA, 19 nt, Artificial Sequence
  Description of Artificial Sequence: Synthetic oligonucleotide
uucccacugagcccuguaa

SEQ ID NO: 2272277 - RNA, 19 nt, Artificial Sequence
  Description of Artificial Sequence: Synthetic oligonucleotide
gagccgcagauccuuguac

SEQ ID NO: 2272278 - RNA, 19 nt, Artificial Sequence
  Description of Artificial Sequence: Synthetic oligonucleotide
aauccccagcaugcaccgc

SEQ ID NO: 2272279 - RNA, 19 nt, Artificial Sequence
  Description of Artificial Sequence: Synthetic oligonucleotide
guucuucccaacgagcgga

SEQ ID NO: 2272280 - RNA, 19 nt, Artificial Sequence
  Description of Artificial Sequence: Synthetic oligonucleotide
ggaugcucuguguucuucc

SEQ ID NO: 2272281 - RNA, 19 nt, Artificial Sequence
  Description of Artificial Sequence: Synthetic oligonucleotide
augaagacugggauggaau

SEQ ID NO: 2272282 - RNA, 19 nt, Artificial Sequence
  Description of Artificial Sequence: Synthetic oligonucleotide
aaguugcacagggcauuuc

SEQ ID NO: 2272283 - RNA, 19 nt, Artificial Sequence
  Description of Artificial Sequence: Synthetic oligonucleotide
gaugaagacugggauggaa

SEQ ID NO: 2272284 - RNA, 19 nt, Artificial Sequence
  Description of Artificial Sequence: Synthetic oligonucleotide
gauccuuguacaguacuua

SEQ ID NO: 2272285 - RNA, 19 nt, Artificial Sequence
  Description of Artificial Sequence: Synthetic oligonucleotide
uugguucggaagagcauuu

SEQ ID NO: 2272286 - RNA, 19 nt, Artificial Sequence
  Description of Artificial Sequence: Synthetic oligonucleotide
agucucaaguugguccguc

SEQ ID NO: 2272287 - RNA, 19 nt, Artificial Sequence
  Description of Artificial Sequence: Synthetic oligonucleotide
gcuuaucuccaggagcugg

SEQ ID NO: 2272288 - RNA, 19 nt, Artificial Sequence
  Description of Artificial Sequence: Synthetic oligonucleotide
gagggaugaagacugggau

SEQ ID NO: 2272289 - RNA, 19 nt, Artificial Sequence
  Description of Artificial Sequence: Synthetic oligonucleotide
augcgcaaggugguucucg

SEQ ID NO: 2272290 - RNA, 19 nt, Artificial Sequence
  Description of Artificial Sequence: Synthetic oligonucleotide
gaauggugaugaauccuga

SEQ ID NO: 2272291 - RNA, 19 nt, Artificial Sequence
  Description of Artificial Sequence: Synthetic oligonucleotide
uagcgcaggcuugucacgc

SEQ ID NO: 2272292 - RNA, 19 nt, Artificial Sequence
  Description of Artificial Sequence: Synthetic oligonucleotide
agaccaggcucaaauccag

SEQ ID NO: 2272293 - RNA, 19 nt, Artificial Sequence
  Description of Artificial Sequence: Synthetic oligonucleotide
guuacgcaaggaucuaucu

SEQ ID NO: 2272294 - RNA, 19 nt, Artificial Sequence
  Description of Artificial Sequence: Synthetic oligonucleotide
gcccuguaaaacgauaggc

SEQ ID NO: 2272295 - RNA, 19 nt, Artificial Sequence
  Description of Artificial Sequence: Synthetic oligonucleotide
ggcgcggagccgcagaucc

SEQ ID NO: 2272296 - RNA, 19 nt, Artificial Sequence
  Description of Artificial Sequence: Synthetic oligonucleotide
cuugucacgccgccaccgc

SEQ ID NO: 2272297 - RNA, 19 nt, Artificial Sequence
  Description of Artificial Sequence: Synthetic oligonucleotide
ugccagauuccuccugcuc

SEQ ID NO: 2272298 - RNA, 19 nt, Artificial Sequence
  Description of Artificial Sequence: Synthetic oligonucleotide
caccugugggaagagcugc

SEQ ID NO: 2272299 - RNA, 19 nt, Artificial Sequence
  Description of Artificial Sequence: Synthetic oligonucleotide
gucugguacuuccucccug

SEQ ID NO: 2272300 - RNA, 19 nt, Artificial Sequence
  Description of Artificial Sequence: Synthetic oligonucleotide
uugucacgccgccaccgca

SEQ ID NO: 2272301 - RNA, 19 nt, Artificial Sequence
  Description of Artificial Sequence: Synthetic oligonucleotide
gccaccgcagccuugcacc

SEQ ID NO: 2272302 - RNA, 19 nt, Artificial Sequence
  Description of Artificial Sequence: Synthetic oligonucleotide
ucuggcgcggagccgcaga

SEQ ID NO: 2272303 - RNA, 19 nt, Artificial Sequence
  Description of Artificial Sequence: Synthetic oligonucleotide
uuccccucaaaggcagugc

SEQ ID NO: 2272304 - RNA, 19 nt, Artificial Sequence
  Description of Artificial Sequence: Synthetic oligonucleotide
guacuuccucccugaguag

SEQ ID NO: 2272305 - RNA, 19 nt, Artificial Sequence
  Description of Artificial Sequence: Synthetic oligonucleotide
cuuucacguuuccccacug

SEQ ID NO: 2272306 - RNA, 19 nt, Artificial Sequence
  Description of Artificial Sequence: Synthetic oligonucleotide
accgcagagucgguccggc

SEQ ID NO: 2272307 - RNA, 19 nt, Artificial Sequence
  Description of Artificial Sequence: Synthetic oligonucleotide
ugcuaauccccagcaugca

SEQ ID NO: 2272308 - RNA, 19 nt, Artificial Sequence
  Description of Artificial Sequence: Synthetic oligonucleotide
gucuuucacguuuccccac

SEQ ID NO: 2272309 - RNA, 19 nt, Artificial Sequence
  Description of Artificial Sequence: Synthetic oligonucleotide
aaggucuggugucccugau

SEQ ID NO: 2272310 - RNA, 19 nt, Artificial Sequence
  Description of Artificial Sequence: Synthetic oligonucleotide
gacuccacggcuggucagc

SEQ ID NO: 2272311 - RNA, 19 nt, Artificial Sequence
  Description of Artificial Sequence: Synthetic oligonucleotide
cggaugauguuucugcccc

SEQ ID NO: 2272312 - RNA, 19 nt, Artificial Sequence
  Description of Artificial Sequence: Synthetic oligonucleotide
acugguagcgcaggcuugu

SEQ ID NO: 2272313 - RNA, 19 nt, Artificial Sequence
  Description of Artificial Sequence: Synthetic oligonucleotide
caaggaucuaucucagccu

SEQ ID NO: 2272314 - RNA, 19 nt, Artificial Sequence
  Description of Artificial Sequence: Synthetic oligonucleotide
aacaccuggugcaguggcu

SEQ ID NO: 2272315 - RNA, 19 nt, Artificial Sequence
  Description of Artificial Sequence: Synthetic oligonucleotide
cacugaagucagucucaag

SEQ ID NO: 2272316 - RNA, 19 nt, Artificial Sequence
  Description of Artificial Sequence: Synthetic oligonucleotide
gaccauccguacacagcgg

SEQ ID NO: 2272317 - RNA, 19 nt, Artificial Sequence
  Description of Artificial Sequence: Synthetic oligonucleotide
auaucagucuguagguauu

SEQ ID NO: 2272318 - RNA, 19 nt, Artificial Sequence
  Description of Artificial Sequence: Synthetic oligonucleotide
gcggaugauguuucugccc

SEQ ID NO: 2272319 - RNA, 19 nt, Artificial Sequence
  Description of Artificial Sequence: Synthetic oligonucleotide
cgcaaggugguucucgagg

SEQ ID NO: 2272320 - RNA, 19 nt, Artificial Sequence
  Description of Artificial Sequence: Synthetic oligonucleotide
agauccuuguacaguacuu

SEQ ID NO: 2272321 - RNA, 19 nt, Artificial Sequence
  Description of Artificial Sequence: Synthetic oligonucleotide
gugucccugauccacuuua

SEQ ID NO: 2272322 - RNA, 19 nt, Artificial Sequence
  Description of Artificial Sequence: Synthetic oligonucleotide
cagggcauuucucugcaaa

SEQ ID NO: 2272323 - RNA, 19 nt, Artificial Sequence
  Description of Artificial Sequence: Synthetic oligonucleotide
gcuaauccccagcaugcac

SEQ ID NO: 2272324 - RNA, 19 nt, Artificial Sequence
  Description of Artificial Sequence: Synthetic oligonucleotide
uucuucccaacgagcggau

SEQ ID NO: 2272325 - RNA, 19 nt, Artificial Sequence
  Description of Artificial Sequence: Synthetic oligonucleotide
agccuugcaccuucaccga

SEQ ID NO: 2272326 - RNA, 19 nt, Artificial Sequence
  Description of Artificial Sequence: Synthetic oligonucleotide
gaagagcugcugugagguc

SEQ ID NO: 2272327 - RNA, 19 nt, Artificial Sequence
  Description of Artificial Sequence: Synthetic oligonucleotide
uagguauucuguggcuauc

SEQ ID NO: 2272328 - RNA, 19 nt, Artificial Sequence
  Description of Artificial Sequence: Synthetic oligonucleotide
agagucgguccggccauuc

SEQ ID NO: 2272329 - RNA, 19 nt, Artificial Sequence
  Description of Artificial Sequence: Synthetic oligonucleotide
acgcaaggaucuaucucag

SEQ ID NO: 2272330 - RNA, 19 nt, Artificial Sequence
  Description of Artificial Sequence: Synthetic oligonucleotide
auccaggauuucaacuugu

SEQ ID NO: 2272331 - RNA, 19 nt, Artificial Sequence
  Description of Artificial Sequence: Synthetic oligonucleotide
acaccugugggaagagcug

SEQ ID NO: 2272332 - RNA, 19 nt, Artificial Sequence
  Description of Artificial Sequence: Synthetic oligonucleotide
uggcccacgggcgcacugg

SEQ ID NO: 2272333 - RNA, 19 nt, Artificial Sequence
  Description of Artificial Sequence: Synthetic oligonucleotide
guacucgcagagacugaag

SEQ ID NO: 2272334 - RNA, 19 nt, Artificial Sequence
  Description of Artificial Sequence: Synthetic oligonucleotide
caagaagauggcaggcucu

SEQ ID NO: 2272335 - RNA, 19 nt, Artificial Sequence
  Description of Artificial Sequence: Synthetic oligonucleotide
uucccaacgagcggaugau

SEQ ID NO: 2272336 - RNA, 19 nt, Artificial Sequence
  Description of Artificial Sequence: Synthetic oligonucleotide
uggcuugguucggaagagc

SEQ ID NO: 2272337 - RNA, 19 nt, Artificial Sequence
  Description of Artificial Sequence: Synthetic oligonucleotide
guagguauucuguggcuau

SEQ ID NO: 2272338 - RNA, 19 nt, Artificial Sequence
  Description of Artificial Sequence: Synthetic oligonucleotide
guuugggucuucauugcua

SEQ ID NO: 2272339 - RNA, 19 nt, Artificial Sequence
  Description of Artificial Sequence: Synthetic oligonucleotide
ucuucccaacgagcggaug

SEQ ID NO: 2272340 - RNA, 19 nt, Artificial Sequence
  Description of Artificial Sequence: Synthetic oligonucleotide
ugggcacaucacagugaca

SEQ ID NO: 2272341 - RNA, 19 nt, Artificial Sequence
  Description of Artificial Sequence: Synthetic oligonucleotide
gccgcagauccuuguacag

SEQ ID NO: 2272342 - RNA, 19 nt, Artificial Sequence
  Description of Artificial Sequence: Synthetic oligonucleotide
acguuuccccacugccuug

SEQ ID NO: 2272343 - RNA, 19 nt, Artificial Sequence
  Description of Artificial Sequence: Synthetic oligonucleotide
gcuugucacgccgccaccg

SEQ ID NO: 2272344 - RNA, 19 nt, Artificial Sequence
  Description of Artificial Sequence: Synthetic oligonucleotide
augcaccgcagagucgguc

SEQ ID NO: 2272345 - RNA, 19 nt, Artificial Sequence
  Description of Artificial Sequence: Synthetic oligonucleotide
cugaguaggcauugaggua

SEQ ID NO: 2272346 - RNA, 19 nt, Artificial Sequence
  Description of Artificial Sequence: Synthetic oligonucleotide
cacgggcgcacugguagcg

SEQ ID NO: 2272347 - RNA, 19 nt, Artificial Sequence
  Description of Artificial Sequence: Synthetic oligonucleotide
cuggggcgcaugcgcaagg

SEQ ID NO: 2272348 - RNA, 19 nt, Artificial Sequence
  Description of Artificial Sequence: Synthetic oligonucleotide
ucccaacgagcggaugaug

SEQ ID NO: 2272349 - RNA, 19 nt, Artificial Sequence
  Description of Artificial Sequence: Synthetic oligonucleotide
acgagcggaugauguuucu

SEQ ID NO: 2272350 - RNA, 19 nt, Artificial Sequence
  Description of Artificial Sequence: Synthetic oligonucleotide
agcaaacaccuggugcagu

SEQ ID NO: 2272351 - RNA, 19 nt, Artificial Sequence
  Description of Artificial Sequence: Synthetic oligonucleotide
agcaugcaccgcagagucg

SEQ ID NO: 2272352 - RNA, 19 nt, Artificial Sequence
  Description of Artificial Sequence: Synthetic oligonucleotide
acgggcgcacugguagcgc

SEQ ID NO: 2272353 - RNA, 19 nt, Artificial Sequence
  Description of Artificial Sequence: Synthetic oligonucleotide
uugggucuucauugcuaau

SEQ ID NO: 2272354 - RNA, 19 nt, Artificial Sequence
  Description of Artificial Sequence: Synthetic oligonucleotide
agagcugcugugagguccu

SEQ ID NO: 2272355 - RNA, 19 nt, Artificial Sequence
  Description of Artificial Sequence: Synthetic oligonucleotide
ugguucggaagagcauuuc

SEQ ID NO: 2272356 - RNA, 19 nt, Artificial Sequence
  Description of Artificial Sequence: Synthetic oligonucleotide
aguguuacgcaaggaucua

SEQ ID NO: 2272357 - RNA, 19 nt, Artificial Sequence
  Description of Artificial Sequence: Synthetic oligonucleotide
cagauccuuguacaguacu

SEQ ID NO: 2272358 - RNA, 19 nt, Artificial Sequence
  Description of Artificial Sequence: Synthetic oligonucleotide
guucggaagagcauuucau

SEQ ID NO: 2272359 - RNA, 19 nt, Artificial Sequence
  Description of Artificial Sequence: Synthetic oligonucleotide
ccuucaccgagaccauccg

SEQ ID NO: 2272360 - RNA, 19 nt, Artificial Sequence
  Description of Artificial Sequence: Synthetic oligonucleotide
guccgucugguacuuccuc

SEQ ID NO: 2272361 - RNA, 19 nt, Artificial Sequence
  Description of Artificial Sequence: Synthetic oligonucleotide
cugagcuccacuguucugu

SEQ ID NO: 2272362 - RNA, 19 nt, Artificial Sequence
  Description of Artificial Sequence: Synthetic oligonucleotide
gagucgguccggccauuca

SEQ ID NO: 2272363 - RNA, 19 nt, Artificial Sequence
  Description of Artificial Sequence: Synthetic oligonucleotide
gauccacuuuauagguaaa

SEQ ID NO: 2272364 - RNA, 19 nt, Artificial Sequence
  Description of Artificial Sequence: Synthetic oligonucleotide
gugacaccugugggaagag

SEQ ID NO: 2272365 - RNA, 19 nt, Artificial Sequence
  Description of Artificial Sequence: Synthetic oligonucleotide
cuugguucggaagagcauu

SEQ ID NO: 2272366 - RNA, 19 nt, Artificial Sequence
  Description of Artificial Sequence: Synthetic oligonucleotide
ggauuucaacuuguuuuga

SEQ ID NO: 2272367 - RNA, 19 nt, Artificial Sequence
  Description of Artificial Sequence: Synthetic oligonucleotide
gguacucgcagagacugaa

SEQ ID NO: 2272368 - RNA, 19 nt, Artificial Sequence
  Description of Artificial Sequence: Synthetic oligonucleotide
ggagaaggucugguguccc

SEQ ID NO: 2272369 - RNA, 19 nt, Artificial Sequence
  Description of Artificial Sequence: Synthetic oligonucleotide
ccugauccacuuuauaggu

SEQ ID NO: 2272370 - RNA, 19 nt, Artificial Sequence
  Description of Artificial Sequence: Synthetic oligonucleotide
gucacgccgccaccgcagc

SEQ ID NO: 2272371 - RNA, 19 nt, Artificial Sequence
  Description of Artificial Sequence: Synthetic oligonucleotide
ccacugagcccuguaaaac

SEQ ID NO: 2272372 - RNA, 19 nt, Artificial Sequence
  Description of Artificial Sequence: Synthetic oligonucleotide
gcaccgcagagucgguccg

SEQ ID NO: 2272373 - RNA, 19 nt, Artificial Sequence
  Description of Artificial Sequence: Synthetic oligonucleotide
uccguacacagcggcuuau

SEQ ID NO: 2272374 - RNA, 19 nt, Artificial Sequence
  Description of Artificial Sequence: Synthetic oligonucleotide
uggggcgcaugcgcaaggu

SEQ ID NO: 2272375 - RNA, 19 nt, Artificial Sequence
  Description of Artificial Sequence: Synthetic oligonucleotide
gcaggcuugucacgccgcc

SEQ ID NO: 2272376 - RNA, 19 nt, Artificial Sequence
  Description of Artificial Sequence: Synthetic oligonucleotide
acagggcauuucucugcaa

SEQ ID NO: 2272377 - RNA, 19 nt, Artificial Sequence
  Description of Artificial Sequence: Synthetic oligonucleotide
gcacaucacagugacaccu

SEQ ID NO: 2272378 - RNA, 19 nt, Artificial Sequence
  Description of Artificial Sequence: Synthetic oligonucleotide
gccuugcaccuucaccgag

SEQ ID NO: 2272379 - RNA, 19 nt, Artificial Sequence
  Description of Artificial Sequence: Synthetic oligonucleotide
cacugagcuccacuguucu

SEQ ID NO: 2272380 - RNA, 19 nt, Artificial Sequence
  Description of Artificial Sequence: Synthetic oligonucleotide
agcuggggcgcaugcgcaa

SEQ ID NO: 2272381 - RNA, 19 nt, Artificial Sequence
  Description of Artificial Sequence: Synthetic oligonucleotide
cucacugagcuccacuguu

SEQ ID NO: 2272382 - RNA, 19 nt, Artificial Sequence
  Description of Artificial Sequence: Synthetic oligonucleotide
acuccacggcuggucagcu

SEQ ID NO: 2272383 - RNA, 19 nt, Artificial Sequence
  Description of Artificial Sequence: Synthetic oligonucleotide
caccgagaccauccguaca

SEQ ID NO: 2272384 - RNA, 19 nt, Artificial Sequence
  Description of Artificial Sequence: Synthetic oligonucleotide
ggcgcacugguagcgcagg

SEQ ID NO: 2272385 - RNA, 19 nt, Artificial Sequence
  Description of Artificial Sequence: Synthetic oligonucleotide
ggaauccaguagguucccc

SEQ ID NO: 2272386 - RNA, 19 nt, Artificial Sequence
  Description of Artificial Sequence: Synthetic oligonucleotide
gcaaagguccagugaggaa

SEQ ID NO: 2272387 - RNA, 19 nt, Artificial Sequence
  Description of Artificial Sequence: Synthetic oligonucleotide
cugccccugggcacaucac

SEQ ID NO: 2272388 - RNA, 19 nt, Artificial Sequence
  Description of Artificial Sequence: Synthetic oligonucleotide
caccgcagagucgguccgg

SEQ ID NO: 2272389 - RNA, 19 nt, Artificial Sequence
  Description of Artificial Sequence: Synthetic oligonucleotide
cagugcugaugcacacaca

SEQ ID NO: 2272390 - RNA, 19 nt, Artificial Sequence
  Description of Artificial Sequence: Synthetic oligonucleotide
gucuggugucccugaucca

SEQ ID NO: 2272391 - RNA, 19 nt, Artificial Sequence
  Description of Artificial Sequence: Synthetic oligonucleotide
ggaucuaucucagccuccu

SEQ ID NO: 2272392 - RNA, 19 nt, Artificial Sequence
  Description of Artificial Sequence: Synthetic oligonucleotide
gcgcaaggugguucucgag

SEQ ID NO: 2272393 - RNA, 19 nt, Artificial Sequence
  Description of Artificial Sequence: Synthetic oligonucleotide
uccggccauucagaucauc

SEQ ID NO: 2272394 - RNA, 19 nt, Artificial Sequence
  Description of Artificial Sequence: Synthetic oligonucleotide
ccuugcaccuucaccgaga

SEQ ID NO: 2272395 - RNA, 19 nt, Artificial Sequence
  Description of Artificial Sequence: Synthetic oligonucleotide
ggauggaauggugaugaau

SEQ ID NO: 2272396 - RNA, 19 nt, Artificial Sequence
  Description of Artificial Sequence: Synthetic oligonucleotide
cauugcuaauccccagcau

SEQ ID NO: 2272397 - RNA, 19 nt, Artificial Sequence
  Description of Artificial Sequence: Synthetic oligonucleotide
cuucaccgagaccauccgu

SEQ ID NO: 2272398 - RNA, 19 nt, Artificial Sequence
  Description of Artificial Sequence: Synthetic oligonucleotide
agguacucgcagagacuga

SEQ ID NO: 2272399 - RNA, 19 nt, Artificial Sequence
  Description of Artificial Sequence: Synthetic oligonucleotide
cccacugagcccuguaaaa

SEQ ID NO: 2272400 - RNA, 19 nt, Artificial Sequence
  Description of Artificial Sequence: Synthetic oligonucleotide
gcagauccuuguacaguac

SEQ ID NO: 2272401 - RNA, 19 nt, Artificial Sequence
  Description of Artificial Sequence: Synthetic oligonucleotide
ggggcgcaugcgcaaggug

SEQ ID NO: 2272402 - RNA, 19 nt, Artificial Sequence
  Description of Artificial Sequence: Synthetic oligonucleotide
auacagcaauguggcacua

SEQ ID NO: 2272403 - RNA, 19 nt, Artificial Sequence
  Description of Artificial Sequence: Synthetic oligonucleotide
ccccucaaaggcagugcug

SEQ ID NO: 2272404 - RNA, 19 nt, Artificial Sequence
  Description of Artificial Sequence: Synthetic oligonucleotide
caugcgcaaggugguucuc

SEQ ID NO: 2272405 - RNA, 19 nt, Artificial Sequence
  Description of Artificial Sequence: Synthetic oligonucleotide
cccaacgagcggaugaugu

SEQ ID NO: 2272406 - RNA, 19 nt, Artificial Sequence
  Description of Artificial Sequence: Synthetic oligonucleotide
aggcucuggcgcggagccg

SEQ ID NO: 2272407 - RNA, 19 nt, Artificial Sequence
  Description of Artificial Sequence: Synthetic oligonucleotide
caacgagcggaugauguuu

SEQ ID NO: 2272408 - RNA, 19 nt, Artificial Sequence
  Description of Artificial Sequence: Synthetic oligonucleotide
cgcagauccuuguacagua

SEQ ID NO: 2272409 - RNA, 19 nt, Artificial Sequence
  Description of Artificial Sequence: Synthetic oligonucleotide
cgcaaggaucuaucucagc

SEQ ID NO: 2272410 - RNA, 19 nt, Artificial Sequence
  Description of Artificial Sequence: Synthetic oligonucleotide
gcaugcgcaaggugguucu

SEQ ID NO: 2272411 - RNA, 19 nt, Artificial Sequence
  Description of Artificial Sequence: Synthetic oligonucleotide
ggagccgcagauccuugua

SEQ ID NO: 2272412 - RNA, 19 nt, Artificial Sequence
  Description of Artificial Sequence: Synthetic oligonucleotide
ggcuuaucuccaggagcug

SEQ ID NO: 2272413 - RNA, 19 nt, Artificial Sequence
  Description of Artificial Sequence: Synthetic oligonucleotide
cugagcccuguaaaacgau

SEQ ID NO: 2272414 - RNA, 19 nt, Artificial Sequence
  Description of Artificial Sequence: Synthetic oligonucleotide
ccacggcuggucagcuucc

SEQ ID NO: 2272415 - RNA, 19 nt, Artificial Sequence
  Description of Artificial Sequence: Synthetic oligonucleotide
guguuacgcaaggaucuau

SEQ ID NO: 2272416 - RNA, 19 nt, Artificial Sequence
  Description of Artificial Sequence: Synthetic oligonucleotide
gcuggggcgcaugcgcaag

SEQ ID NO: 2272417 - RNA, 19 nt, Artificial Sequence
  Description of Artificial Sequence: Synthetic oligonucleotide
ccacgggcgcacugguagc

SEQ ID NO: 2272418 - RNA, 19 nt, Artificial Sequence
  Description of Artificial Sequence: Synthetic oligonucleotide
uccaggagcuggggcgcau

SEQ ID NO: 2272419 - RNA, 19 nt, Artificial Sequence
  Description of Artificial Sequence: Synthetic oligonucleotide
cauccguacacagcggcuu

SEQ ID NO: 2272420 - RNA, 19 nt, Artificial Sequence
  Description of Artificial Sequence: Synthetic oligonucleotide
uugguccgucugguacuuc

SEQ ID NO: 2272421 - RNA, 19 nt, Artificial Sequence
  Description of Artificial Sequence: Synthetic oligonucleotide
gcauuucaugggaugcucu

SEQ ID NO: 2272422 - RNA, 19 nt, Artificial Sequence
  Description of Artificial Sequence: Synthetic oligonucleotide
guaaaacgauaggccugua

SEQ ID NO: 2272423 - RNA, 19 nt, Artificial Sequence
  Description of Artificial Sequence: Synthetic oligonucleotide
ccaugacaaggucuacaaa

SEQ ID NO: 2272424 - RNA, 19 nt, Artificial Sequence
  Description of Artificial Sequence: Synthetic oligonucleotide
gcgcacugguagcgcaggc

SEQ ID NO: 2272425 - RNA, 19 nt, Artificial Sequence
  Description of Artificial Sequence: Synthetic oligonucleotide
cgcagagucgguccggcca

SEQ ID NO: 2272426 - RNA, 19 nt, Artificial Sequence
  Description of Artificial Sequence: Synthetic oligonucleotide
uggcgcggagccgcagauc

SEQ ID NO: 2272427 - RNA, 19 nt, Artificial Sequence
  Description of Artificial Sequence: Synthetic oligonucleotide
cgcaggcuugucacgccgc

SEQ ID NO: 2272428 - RNA, 19 nt, Artificial Sequence
  Description of Artificial Sequence: Synthetic oligonucleotide
cgagcggaugauguuucug

SEQ ID NO: 2272429 - RNA, 19 nt, Artificial Sequence
  Description of Artificial Sequence: Synthetic oligonucleotide
cucccugaguaggcauuga

SEQ ID NO: 2272430 - RNA, 19 nt, Artificial Sequence
  Description of Artificial Sequence: Synthetic oligonucleotide
gggauggaauggugaugaa

SEQ ID NO: 2272431 - RNA, 19 nt, Artificial Sequence
  Description of Artificial Sequence: Synthetic oligonucleotide
cugcugugagguccucaua

SEQ ID NO: 2272432 - RNA, 19 nt, Artificial Sequence
  Description of Artificial Sequence: Synthetic oligonucleotide
cucuggcgcggagccgcag

SEQ ID NO: 2272433 - RNA, 19 nt, Artificial Sequence
  Description of Artificial Sequence: Synthetic oligonucleotide
guugguccgucugguacuu

SEQ ID NO: 2272434 - RNA, 19 nt, Artificial Sequence
  Description of Artificial Sequence: Synthetic oligonucleotide
cggccauucagaucaucaa

SEQ ID NO: 2272435 - RNA, 19 nt, Artificial Sequence
  Description of Artificial Sequence: Synthetic oligonucleotide
cgcaugcgcaaggugguuc

SEQ ID NO: 2272436 - RNA, 19 nt, Artificial Sequence
  Description of Artificial Sequence: Synthetic oligonucleotide
ccguacacagcggcuuauc

SEQ ID NO: 2272437 - RNA, 19 nt, Artificial Sequence
  Description of Artificial Sequence: Synthetic oligonucleotide
caugcaccgcagagucggu

SEQ ID NO: 2272438 - RNA, 19 nt, Artificial Sequence
  Description of Artificial Sequence: Synthetic oligonucleotide
ccauccguacacagcggcu

SEQ ID NO: 2272439 - RNA, 19 nt, Artificial Sequence
  Description of Artificial Sequence: Synthetic oligonucleotide
ccugcucacugagcuccac

SEQ ID NO: 2272440 - RNA, 19 nt, Artificial Sequence
  Description of Artificial Sequence: Synthetic oligonucleotide
gguccgucugguacuuccu

SEQ ID NO: 2272441 - RNA, 19 nt, Artificial Sequence
  Description of Artificial Sequence: Synthetic oligonucleotide
cgccaccgcagccuugcac

SEQ ID NO: 2272442 - RNA, 19 nt, Artificial Sequence
  Description of Artificial Sequence: Synthetic oligonucleotide
cuggcgcggagccgcagau

SEQ ID NO: 2272443 - RNA, 19 nt, Artificial Sequence
  Description of Artificial Sequence: Synthetic oligonucleotide
cagauuccuccugcucacu

SEQ ID NO: 2272444 - RNA, 19 nt, Artificial Sequence
  Description of Artificial Sequence: Synthetic oligonucleotide
cagucucaaguugguccgu

SEQ ID NO: 2272445 - RNA, 19 nt, Artificial Sequence
  Description of Artificial Sequence: Synthetic oligonucleotide
ccaacgagcggaugauguu

SEQ ID NO: 2272446 - RNA, 19 nt, Artificial Sequence
  Description of Artificial Sequence: Synthetic oligonucleotide
cgguccggccauucagauc

SEQ ID NO: 2272447 - RNA, 19 nt, Artificial Sequence
  Description of Artificial Sequence: Synthetic oligonucleotide
cgcagccuugcaccuucac

SEQ ID NO: 2272448 - RNA, 19 nt, Artificial Sequence
  Description of Artificial Sequence: Synthetic oligonucleotide
ccgagaccauccguacaca

SEQ ID NO: 2272449 - RNA, 19 nt, Artificial Sequence
  Description of Artificial Sequence: Synthetic oligonucleotide
ccgcagauccuuguacagu

SEQ ID NO: 2272450 - RNA, 19 nt, Artificial Sequence
  Description of Artificial Sequence: Synthetic oligonucleotide
cgcuggauaucagucugua

SEQ ID NO: 2272451 - RNA, 19 nt, Artificial Sequence
  Description of Artificial Sequence: Synthetic oligonucleotide
gcgcuggauaucagucugu

SEQ ID NO: 2272452 - RNA, 19 nt, Artificial Sequence
  Description of Artificial Sequence: Synthetic oligonucleotide
ggcccacgggcgcacuggu

SEQ ID NO: 2272453 - RNA, 19 nt, Artificial Sequence
  Description of Artificial Sequence: Synthetic oligonucleotide
cgggcgcacugguagcgca

SEQ ID NO: 2272454 - RNA, 19 nt, Artificial Sequence
  Description of Artificial Sequence: Synthetic oligonucleotide
ccccugggcacaucacagu

SEQ ID NO: 2272455 - RNA, 19 nt, Artificial Sequence
  Description of Artificial Sequence: Synthetic oligonucleotide
cuccacggcuggucagcuu

SEQ ID NO: 2272456 - RNA, 19 nt, Artificial Sequence
  Description of Artificial Sequence: Synthetic oligonucleotide
ccaccgcagccuugcaccu

SEQ ID NO: 2272457 - RNA, 19 nt, Artificial Sequence
  Description of Artificial Sequence: Synthetic oligonucleotide
cgucugguacuuccucccu

SEQ ID NO: 2272458 - RNA, 19 nt, Artificial Sequence
  Description of Artificial Sequence: Synthetic oligonucleotide
ccgcagccuugcaccuuca

SEQ ID NO: 2272459 - RNA, 19 nt, Artificial Sequence
  Description of Artificial Sequence: Synthetic oligonucleotide
caccgcagccuugcaccuu

SEQ ID NO: 2272460 - RNA, 19 nt, Artificial Sequence
  Description of Artificial Sequence: Synthetic oligonucleotide
gcccacgggcgcacuggua

SEQ ID NO: 2272461 - RNA, 19 nt, Artificial Sequence
  Description of Artificial Sequence: Synthetic oligonucleotide
ccgccaccgcagccuugca

SEQ ID NO: 2272462 - RNA, 19 nt, Artificial Sequence
  Description of Artificial Sequence: Synthetic oligonucleotide
gcgcggagccgcagauccu

SEQ ID NO: 2272463 - RNA, 19 nt, Artificial Sequence
  Description of Artificial Sequence: Synthetic oligonucleotide
gcgcaugcgcaaggugguu

SEQ ID NO: 2272464 - RNA, 19 nt, Artificial Sequence
  Description of Artificial Sequence: Synthetic oligonucleotide
cgcggagccgcagauccuu

SEQ ID NO: 2272465 - RNA, 19 nt, Artificial Sequence
  Description of Artificial Sequence: Synthetic oligonucleotide
agucauugaauucaguucc

SEQ ID NO: 2272466 - RNA, 19 nt, Artificial Sequence
  Description of Artificial Sequence: Synthetic oligonucleotide
uuugcaaguacaacaaccg

SEQ ID NO: 2272467 - RNA, 19 nt, Artificial Sequence
  Description of Artificial Sequence: Synthetic oligonucleotide
aaugauuaacccuagacua

SEQ ID NO: 2272468 - RNA, 19 nt, Artificial Sequence
  Description of Artificial Sequence: Synthetic oligonucleotide
aaaugauuaacccuagacu

SEQ ID NO: 2272469 - RNA, 19 nt, Artificial Sequence
  Description of Artificial Sequence: Synthetic oligonucleotide
uguauuuucccucugcucc

SEQ ID NO: 2272470 - RNA, 19 nt, Artificial Sequence
  Description of Artificial Sequence: Synthetic oligonucleotide
gaggguaaaagucagacgc

SEQ ID NO: 2272471 - RNA, 19 nt, Artificial Sequence
  Description of Artificial Sequence: Synthetic oligonucleotide
uuagauuaagauaauagau

SEQ ID NO: 2272472 - RNA, 19 nt, Artificial Sequence
  Description of Artificial Sequence: Synthetic oligonucleotide
aagauaauagauauuaucu

SEQ ID NO: 2272473 - RNA, 19 nt, Artificial Sequence
  Description of Artificial Sequence: Synthetic oligonucleotide
uugagagucaaacuguggg

SEQ ID NO: 2272474 - RNA, 19 nt, Artificial Sequence
  Description of Artificial Sequence: Synthetic oligonucleotide
uacaacaaccguaagaaug

SEQ ID NO: 2272475 - RNA, 19 nt, Artificial Sequence
  Description of Artificial Sequence: Synthetic oligonucleotide
uuuguguguagcuugagag

SEQ ID NO: 2272476 - RNA, 19 nt, Artificial Sequence
  Description of Artificial Sequence: Synthetic oligonucleotide
aauagauauuaucuuaggu

SEQ ID NO: 2272477 - RNA, 19 nt, Artificial Sequence
  Description of Artificial Sequence: Synthetic oligonucleotide
auaacguggauuuuggguc

SEQ ID NO: 2272478 - RNA, 19 nt, Artificial Sequence
  Description of Artificial Sequence: Synthetic oligonucleotide
uuaucuuagguuuugcaag

SEQ ID NO: 2272479 - RNA, 19 nt, Artificial Sequence
  Description of Artificial Sequence: Synthetic oligonucleotide
aaaguccccaaaugaagcc

SEQ ID NO: 2272480 - RNA, 19 nt, Artificial Sequence
  Description of Artificial Sequence: Synthetic oligonucleotide
uuaacccuagacuagagug

SEQ ID NO: 2272481 - RNA, 19 nt, Artificial Sequence
  Description of Artificial Sequence: Synthetic oligonucleotide
ucuuaucugguuuaugccg

SEQ ID NO: 2272482 - RNA, 19 nt, Artificial Sequence
  Description of Artificial Sequence: Synthetic oligonucleotide
uguacaauccaguuuaucu

SEQ ID NO: 2272483 - RNA, 19 nt, Artificial Sequence
  Description of Artificial Sequence: Synthetic oligonucleotide
uguuugugaggccacaacg

SEQ ID NO: 2272484 - RNA, 19 nt, Artificial Sequence
  Description of Artificial Sequence: Synthetic oligonucleotide
gaauuaacaggugaugucg

SEQ ID NO: 2272485 - RNA, 19 nt, Artificial Sequence
  Description of Artificial Sequence: Synthetic oligonucleotide
uuggcagacuaacagaggg

SEQ ID NO: 2272486 - RNA, 19 nt, Artificial Sequence
  Description of Artificial Sequence: Synthetic oligonucleotide
agauuaagauaauagauau

SEQ ID NO: 2272487 - RNA, 19 nt, Artificial Sequence
  Description of Artificial Sequence: Synthetic oligonucleotide
cuuggaauaguucuugagg

SEQ ID NO: 2272488 - RNA, 19 nt, Artificial Sequence
  Description of Artificial Sequence: Synthetic oligonucleotide
agucuugcaauauagcaag

SEQ ID NO: 2272489 - RNA, 19 nt, Artificial Sequence
  Description of Artificial Sequence: Synthetic oligonucleotide
ucggagaggagcuuuaccg

SEQ ID NO: 2272490 - RNA, 19 nt, Artificial Sequence
  Description of Artificial Sequence: Synthetic oligonucleotide
uguguuaacucuucaaaca

SEQ ID NO: 2272491 - RNA, 19 nt, Artificial Sequence
  Description of Artificial Sequence: Synthetic oligonucleotide
auagauauuaucuuagguu

SEQ ID NO: 2272492 - RNA, 19 nt, Artificial Sequence
  Description of Artificial Sequence: Synthetic oligonucleotide
gaagccaaaugauuaaccc

SEQ ID NO: 2272493 - RNA, 19 nt, Artificial Sequence
  Description of Artificial Sequence: Synthetic oligonucleotide
aguuuaucuucuuagucag

SEQ ID NO: 2272494 - RNA, 19 nt, Artificial Sequence
  Description of Artificial Sequence: Synthetic oligonucleotide
uauaacguggauuuugggu

SEQ ID NO: 2272495 - RNA, 19 nt, Artificial Sequence
  Description of Artificial Sequence: Synthetic oligonucleotide
uggauuuugggucuggaca

SEQ ID NO: 2272496 - RNA, 19 nt, Artificial Sequence
  Description of Artificial Sequence: Synthetic oligonucleotide
ucaguaacaguauugguaa

SEQ ID NO: 2272497 - RNA, 19 nt, Artificial Sequence
  Description of Artificial Sequence: Synthetic oligonucleotide
uuggaauaguucuugagga

SEQ ID NO: 2272498 - RNA, 19 nt, Artificial Sequence
  Description of Artificial Sequence: Synthetic oligonucleotide
ucugcuauaacguggauuu

SEQ ID NO: 2272499 - RNA, 19 nt, Artificial Sequence
  Description of Artificial Sequence: Synthetic oligonucleotide
aaguacaacaaccguaaga

SEQ ID NO: 2272500 - RNA, 19 nt, Artificial Sequence
  Description of Artificial Sequence: Synthetic oligonucleotide
uagauauuaucuuagguuu

SEQ ID NO: 2272501 - RNA, 19 nt, Artificial Sequence
  Description of Artificial Sequence: Synthetic oligonucleotide
guauugguaaaaguuaggg

SEQ ID NO: 2272502 - RNA, 19 nt, Artificial Sequence
  Description of Artificial Sequence: Synthetic oligonucleotide
ugugcauacuguacaaucc

SEQ ID NO: 2272503 - RNA, 19 nt, Artificial Sequence
  Description of Artificial Sequence: Synthetic oligonucleotide
uucaucaagagucauugaa

SEQ ID NO: 2272504 - RNA, 19 nt, Artificial Sequence
  Description of Artificial Sequence: Synthetic oligonucleotide
aguacuuuggcacuugaga

SEQ ID NO: 2272505 - RNA, 19 nt, Artificial Sequence
  Description of Artificial Sequence: Synthetic oligonucleotide
ucugucaguaacaguauug

SEQ ID NO: 2272506 - RNA, 19 nt, Artificial Sequence
  Description of Artificial Sequence: Synthetic oligonucleotide
ggaguaauuucuuaucugg

SEQ ID NO: 2272507 - RNA, 19 nt, Artificial Sequence
  Description of Artificial Sequence: Synthetic oligonucleotide
acuaacagaggguaaaagu

SEQ ID NO: 2272508 - RNA, 19 nt, Artificial Sequence
  Description of Artificial Sequence: Synthetic oligonucleotide
ucaaauguguucgagguac

SEQ ID NO: 2272509 - RNA, 19 nt, Artificial Sequence
  Description of Artificial Sequence: Synthetic oligonucleotide
guaaaagucagacgcuacg

SEQ ID NO: 2272510 - RNA, 19 nt, Artificial Sequence
  Description of Artificial Sequence: Synthetic oligonucleotide
aaacacuuccuggauuugc

SEQ ID NO: 2272511 - RNA, 19 nt, Artificial Sequence
  Description of Artificial Sequence: Synthetic oligonucleotide
cuuaucugguuuaugccgg

SEQ ID NO: 2272512 - RNA, 19 nt, Artificial Sequence
  Description of Artificial Sequence: Synthetic oligonucleotide
cuugcaauauagcaagccc

SEQ ID NO: 2272513 - RNA, 19 nt, Artificial Sequence
  Description of Artificial Sequence: Synthetic oligonucleotide
aguacaacaaccguaagaa

SEQ ID NO: 2272514 - RNA, 19 nt, Artificial Sequence
  Description of Artificial Sequence: Synthetic oligonucleotide
agguuuugcaaguacaaca

SEQ ID NO: 2272515 - RNA, 19 nt, Artificial Sequence
  Description of Artificial Sequence: Synthetic oligonucleotide
caauauagcaagcccaaag

SEQ ID NO: 2272516 - RNA, 19 nt, Artificial Sequence
  Description of Artificial Sequence: Synthetic oligonucleotide
aagccaaaugauuaacccu

SEQ ID NO: 2272517 - RNA, 19 nt, Artificial Sequence
  Description of Artificial Sequence: Synthetic oligonucleotide
acaacaaccguaagaaugg

SEQ ID NO: 2272518 - RNA, 19 nt, Artificial Sequence
  Description of Artificial Sequence: Synthetic oligonucleotide
cucgauagcagcucagacg

SEQ ID NO: 2272519 - RNA, 19 nt, Artificial Sequence
  Description of Artificial Sequence: Synthetic oligonucleotide
uuguuuaugggcaggugug

SEQ ID NO: 2272520 - RNA, 19 nt, Artificial Sequence
  Description of Artificial Sequence: Synthetic oligonucleotide
guaaaaguuagggaggggc

SEQ ID NO: 2272521 - RNA, 19 nt, Artificial Sequence
  Description of Artificial Sequence: Synthetic oligonucleotide
auaacuuucuucaaaugug

SEQ ID NO: 2272522 - RNA, 19 nt, Artificial Sequence
  Description of Artificial Sequence: Synthetic oligonucleotide
uuuaccguccgguuccgcg

SEQ ID NO: 2272523 - RNA, 19 nt, Artificial Sequence
  Description of Artificial Sequence: Synthetic oligonucleotide
aucaagagucauugaauuc

SEQ ID NO: 2272524 - RNA, 19 nt, Artificial Sequence
  Description of Artificial Sequence: Synthetic oligonucleotide
uuguguguagcuugagagg

SEQ ID NO: 2272525 - RNA, 19 nt, Artificial Sequence
  Description of Artificial Sequence: Synthetic oligonucleotide
uucuuaucugguuuaugcc

SEQ ID NO: 2272526 - RNA, 19 nt, Artificial Sequence
  Description of Artificial Sequence: Synthetic oligonucleotide
caguauugguaaaaguuag

SEQ ID NO: 2272527 - RNA, 19 nt, Artificial Sequence
  Description of Artificial Sequence: Synthetic oligonucleotide
auccuuauuuugugcauac

SEQ ID NO: 2272528 - RNA, 19 nt, Artificial Sequence
  Description of Artificial Sequence: Synthetic oligonucleotide
ugggaguaauuucuuaucu

SEQ ID NO: 2272529 - RNA, 19 nt, Artificial Sequence
  Description of Artificial Sequence: Synthetic oligonucleotide
aacccuagacuagagugac

SEQ ID NO: 2272530 - RNA, 19 nt, Artificial Sequence
  Description of Artificial Sequence: Synthetic oligonucleotide
ucaucaagagucauugaau

SEQ ID NO: 2272531 - RNA, 19 nt, Artificial Sequence
  Description of Artificial Sequence: Synthetic oligonucleotide
ucuguauuuucccucugcu

SEQ ID NO: 2272532 - RNA, 19 nt, Artificial Sequence
  Description of Artificial Sequence: Synthetic oligonucleotide
agauaauagauauuaucuu

SEQ ID NO: 2272533 - RNA, 19 nt, Artificial Sequence
  Description of Artificial Sequence: Synthetic oligonucleotide
ugcaaguacaacaaccgua

SEQ ID NO: 2272534 - RNA, 19 nt, Artificial Sequence
  Description of Artificial Sequence: Synthetic oligonucleotide
gauauuaucuuagguuuug

SEQ ID NO: 2272535 - RNA, 19 nt, Artificial Sequence
  Description of Artificial Sequence: Synthetic oligonucleotide
agaggguaaaagucagacg

SEQ ID NO: 2272536 - RNA, 19 nt, Artificial Sequence
  Description of Artificial Sequence: Synthetic oligonucleotide
uagucagcggcucggagag

SEQ ID NO: 2272537 - RNA, 19 nt, Artificial Sequence
  Description of Artificial Sequence: Synthetic oligonucleotide
uuuguauucaguuguucua

SEQ ID NO: 2272538 - RNA, 19 nt, Artificial Sequence
  Description of Artificial Sequence: Synthetic oligonucleotide
cucacacacacacacacac

SEQ ID NO: 2272539 - RNA, 19 nt, Artificial Sequence
  Description of Artificial Sequence: Synthetic oligonucleotide
ugcauacuguacaauccag

SEQ ID NO: 2272540 - RNA, 19 nt, Artificial Sequence
  Description of Artificial Sequence: Synthetic oligonucleotide
agguacacaugcuuggcag

SEQ ID NO: 2272541 - RNA, 19 nt, Artificial Sequence
  Description of Artificial Sequence: Synthetic oligonucleotide
agagucuuucucuuggacu

SEQ ID NO: 2272542 - RNA, 19 nt, Artificial Sequence
  Description of Artificial Sequence: Synthetic oligonucleotide
uggaauaguucuugaggag

SEQ ID NO: 2272543 - RNA, 19 nt, Artificial Sequence
  Description of Artificial Sequence: Synthetic oligonucleotide
agcuaucccuuucacagag

SEQ ID NO: 2272544 - RNA, 19 nt, Artificial Sequence
  Description of Artificial Sequence: Synthetic oligonucleotide
uugugcauacuguacaauc

SEQ ID NO: 2272545 - RNA, 19 nt, Artificial Sequence
  Description of Artificial Sequence: Synthetic oligonucleotide
uaacccuagacuagaguga

SEQ ID NO: 2272546 - RNA, 19 nt, Artificial Sequence
  Description of Artificial Sequence: Synthetic oligonucleotide
ugagagucaaacuguggga

SEQ ID NO: 2272547 - RNA, 19 nt, Artificial Sequence
  Description of Artificial Sequence: Synthetic oligonucleotide
cacacacacacacacacac

SEQ ID NO: 2272548 - RNA, 19 nt, Artificial Sequence
  Description of Artificial Sequence: Synthetic oligonucleotide
ugugggaguaauuucuuau

SEQ ID NO: 2272549 - RNA, 19 nt, Artificial Sequence
  Description of Artificial Sequence: Synthetic oligonucleotide
cacacacacacacacacug

SEQ ID NO: 2272550 - RNA, 19 nt, Artificial Sequence
  Description of Artificial Sequence: Synthetic oligonucleotide
aacugugggaguaauuucu

SEQ ID NO: 2272551 - RNA, 19 nt, Artificial Sequence
  Description of Artificial Sequence: Synthetic oligonucleotide
aacagaggguaaaagucag

SEQ ID NO: 2272552 - RNA, 19 nt, Artificial Sequence
  Description of Artificial Sequence: Synthetic oligonucleotide
aacaaccguaagaauggac

SEQ ID NO: 2272553 - RNA, 19 nt, Artificial Sequence
  Description of Artificial Sequence: Synthetic oligonucleotide
guguucgagguacacaugc

SEQ ID NO: 2272554 - RNA, 19 nt, Artificial Sequence
  Description of Artificial Sequence: Synthetic oligonucleotide
uagggaggggcauuuagug

SEQ ID NO: 2272555 - RNA, 19 nt, Artificial Sequence
  Description of Artificial Sequence: Synthetic oligonucleotide
uuagucagcggcucggaga

SEQ ID NO: 2272556 - RNA, 19 nt, Artificial Sequence
  Description of Artificial Sequence: Synthetic oligonucleotide
ugcuauaacguggauuuug

SEQ ID NO: 2272557 - RNA, 19 nt, Artificial Sequence
  Description of Artificial Sequence: Synthetic oligonucleotide
cugguuguguuugugaggc

SEQ ID NO: 2272558 - RNA, 19 nt, Artificial Sequence
  Description of Artificial Sequence: Synthetic oligonucleotide
uaacaguauugguaaaagu

SEQ ID NO: 2272559 - RNA, 19 nt, Artificial Sequence
  Description of Artificial Sequence: Synthetic oligonucleotide
caguuuaucuucuuaguca

SEQ ID NO: 2272560 - RNA, 19 nt, Artificial Sequence
  Description of Artificial Sequence: Synthetic oligonucleotide
acaaccguaagaauggacu

SEQ ID NO: 2272561 - RNA, 19 nt, Artificial Sequence
  Description of Artificial Sequence: Synthetic oligonucleotide
aaaagucagacgcuacguu

SEQ ID NO: 2272562 - RNA, 19 nt, Artificial Sequence
  Description of Artificial Sequence: Synthetic oligonucleotide
agacgcuacguucaguuca

SEQ ID NO: 2272563 - RNA, 19 nt, Artificial Sequence
  Description of Artificial Sequence: Synthetic oligonucleotide
acauucucuggaccagagc

SEQ ID NO: 2272564 - RNA, 19 nt, Artificial Sequence
  Description of Artificial Sequence: Synthetic oligonucleotide
caaaauucuuuguguguag

SEQ ID NO: 2272565 - RNA, 19 nt, Artificial Sequence
  Description of Artificial Sequence: Synthetic oligonucleotide
uuccucucugcuauaacgu

SEQ ID NO: 2272566 - RNA, 19 nt, Artificial Sequence
  Description of Artificial Sequence: Synthetic oligonucleotide
uaaaagucagacgcuacgu

SEQ ID NO: 2272567 - RNA, 19 nt, Artificial Sequence
  Description of Artificial Sequence: Synthetic oligonucleotide
aucccuuucacagaguacu

SEQ ID NO: 2272568 - RNA, 19 nt, Artificial Sequence
  Description of Artificial Sequence: Synthetic oligonucleotide
uucaguuguuuaugggcag

SEQ ID NO: 2272569 - RNA, 19 nt, Artificial Sequence
  Description of Artificial Sequence: Synthetic oligonucleotide
aauguguucgagguacaca

SEQ ID NO: 2272570 - RNA, 19 nt, Artificial Sequence
  Description of Artificial Sequence: Synthetic oligonucleotide
ucugguuuaugccggaauu

SEQ ID NO: 2272571 - RNA, 19 nt, Artificial Sequence
  Description of Artificial Sequence: Synthetic oligonucleotide
gugaccucgguccugcccg

SEQ ID NO: 2272572 - RNA, 19 nt, Artificial Sequence
  Description of Artificial Sequence: Synthetic oligonucleotide
aguauugguaaaaguuagg

SEQ ID NO: 2272573 - RNA, 19 nt, Artificial Sequence
  Description of Artificial Sequence: Synthetic oligonucleotide
cuauaacguggauuuuggg

SEQ ID NO: 2272574 - RNA, 19 nt, Artificial Sequence
  Description of Artificial Sequence: Synthetic oligonucleotide
auagcaagcccaaagucug

SEQ ID NO: 2272575 - RNA, 19 nt, Artificial Sequence
  Description of Artificial Sequence: Synthetic oligonucleotide
gucucacacacacacacac

SEQ ID NO: 2272576 - RNA, 19 nt, Artificial Sequence
  Description of Artificial Sequence: Synthetic oligonucleotide
gcauuuagugacuauaaga

SEQ ID NO: 2272577 - RNA, 19 nt, Artificial Sequence
  Description of Artificial Sequence: Synthetic oligonucleotide
acacacacacacugaacag

SEQ ID NO: 2272578 - RNA, 19 nt, Artificial Sequence
  Description of Artificial Sequence: Synthetic oligonucleotide
uagacuagagugaccuucu

SEQ ID NO: 2272579 - RNA, 19 nt, Artificial Sequence
  Description of Artificial Sequence: Synthetic oligonucleotide
gacuauaacuuucuucaaa

SEQ ID NO: 2272580 - RNA, 19 nt, Artificial Sequence
  Description of Artificial Sequence: Synthetic oligonucleotide
augucugucaguaacagua

SEQ ID NO: 2272581 - RNA, 19 nt, Artificial Sequence
  Description of Artificial Sequence: Synthetic oligonucleotide
uuaccguccgguuccgcgg

SEQ ID NO: 2272582 - RNA, 19 nt, Artificial Sequence
  Description of Artificial Sequence: Synthetic oligonucleotide
cacacacacacacugaaca

SEQ ID NO: 2272583 - RNA, 19 nt, Artificial Sequence
  Description of Artificial Sequence: Synthetic oligonucleotide
ucaguuguuuaugggcagg

SEQ ID NO: 2272584 - RNA, 19 nt, Artificial Sequence
  Description of Artificial Sequence: Synthetic oligonucleotide
ucagacgcuacguucaguu

SEQ ID NO: 2272585 - RNA, 19 nt, Artificial Sequence
  Description of Artificial Sequence: Synthetic oligonucleotide
ugccggaauuaacagguga

SEQ ID NO: 2272586 - RNA, 19 nt, Artificial Sequence
  Description of Artificial Sequence: Synthetic oligonucleotide
cuugagaggccaccggugc

SEQ ID NO: 2272587 - RNA, 19 nt, Artificial Sequence
  Description of Artificial Sequence: Synthetic oligonucleotide
gcuacguucaguucaguug

SEQ ID NO: 2272588 - RNA, 19 nt, Artificial Sequence
  Description of Artificial Sequence: Synthetic oligonucleotide
cuagacuagagugaccuuc

SEQ ID NO: 2272589 - RNA, 19 nt, Artificial Sequence
  Description of Artificial Sequence: Synthetic oligonucleotide
uugcaaguacaacaaccgu

SEQ ID NO: 2272590 - RNA, 19 nt, Artificial Sequence
  Description of Artificial Sequence: Synthetic oligonucleotide
gaggccacaacgcaucuga

SEQ ID NO: 2272591 - RNA, 19 nt, Artificial Sequence
  Description of Artificial Sequence: Synthetic oligonucleotide
uucuuagucagcggcucgg

SEQ ID NO: 2272592 - RNA, 19 nt, Artificial Sequence
  Description of Artificial Sequence: Synthetic oligonucleotide
acugaacaguagcaauguc

SEQ ID NO: 2272593 - RNA, 19 nt, Artificial Sequence
  Description of Artificial Sequence: Synthetic oligonucleotide
gaccuucuuuauuagauua

SEQ ID NO: 2272594 - RNA, 19 nt, Artificial Sequence
  Description of Artificial Sequence: Synthetic oligonucleotide
ucccucugcuccaaaauuc

SEQ ID NO: 2272595 - RNA, 19 nt, Artificial Sequence
  Description of Artificial Sequence: Synthetic oligonucleotide
aagucagacgcuacguuca

SEQ ID NO: 2272596 - RNA, 19 nt, Artificial Sequence
  Description of Artificial Sequence: Synthetic oligonucleotide
cuucuuuauuagauuaaga

SEQ ID NO: 2272597 - RNA, 19 nt, Artificial Sequence
  Description of Artificial Sequence: Synthetic oligonucleotide
augauuaacccuagacuag

SEQ ID NO: 2272598 - RNA, 19 nt, Artificial Sequence
  Description of Artificial Sequence: Synthetic oligonucleotide
aauggacuauaacuuucuu

SEQ ID NO: 2272599 - RNA, 19 nt, Artificial Sequence
  Description of Artificial Sequence: Synthetic oligonucleotide
aguaacaguauugguaaaa

SEQ ID NO: 2272600 - RNA, 19 nt, Artificial Sequence
  Description of Artificial Sequence: Synthetic oligonucleotide
uguguagcuugagaggcca

SEQ ID NO: 2272601 - RNA, 19 nt, Artificial Sequence
  Description of Artificial Sequence: Synthetic oligonucleotide
uggacuugguguguuaacu

SEQ ID NO: 2272602 - RNA, 19 nt, Artificial Sequence
  Description of Artificial Sequence: Synthetic oligonucleotide
uguagcuugagaggccacc

SEQ ID NO: 2272603 - RNA, 19 nt, Artificial Sequence
  Description of Artificial Sequence: Synthetic oligonucleotide
uccucucugcuauaacgug

SEQ ID NO: 2272604 - RNA, 19 nt, Artificial Sequence
  Description of Artificial Sequence: Synthetic oligonucleotide
uaacguggauuuugggucu

SEQ ID NO: 2272605 - RNA, 19 nt, Artificial Sequence
  Description of Artificial Sequence: Synthetic oligonucleotide
aacgcaucugagucuugca

SEQ ID NO: 2272606 - RNA, 19 nt, Artificial Sequence
  Description of Artificial Sequence: Synthetic oligonucleotide
aauuucuuaucugguuuau

SEQ ID NO: 2272607 - RNA, 19 nt, Artificial Sequence
  Description of Artificial Sequence: Synthetic oligonucleotide
aacacuuccuggauuugcu

SEQ ID NO: 2272608 - RNA, 19 nt, Artificial Sequence
  Description of Artificial Sequence: Synthetic oligonucleotide
uaacaggugaugucgggua

SEQ ID NO: 2272609 - RNA, 19 nt, Artificial Sequence
  Description of Artificial Sequence: Synthetic oligonucleotide
aggcaugguaacuuggaau

SEQ ID NO: 2272610 - RNA, 19 nt, Artificial Sequence
  Description of Artificial Sequence: Synthetic oligonucleotide
uguuggagcuuuguauuca

SEQ ID NO: 2272611 - RNA, 19 nt, Artificial Sequence
  Description of Artificial Sequence: Synthetic oligonucleotide
ucucacacacacacacaca

SEQ ID NO: 2272612 - RNA, 19 nt, Artificial Sequence
  Description of Artificial Sequence: Synthetic oligonucleotide
uagcuugagaggccaccgg

SEQ ID NO: 2272613 - RNA, 19 nt, Artificial Sequence
  Description of Artificial Sequence: Synthetic oligonucleotide
gagcuuuguauucaguugu

SEQ ID NO: 2272614 - RNA, 19 nt, Artificial Sequence
  Description of Artificial Sequence: Synthetic oligonucleotide
uguucgagguacacaugcu

SEQ ID NO: 2272615 - RNA, 19 nt, Artificial Sequence
  Description of Artificial Sequence: Synthetic oligonucleotide
caaugucugucaguaacag

SEQ ID NO: 2272616 - RNA, 19 nt, Artificial Sequence
  Description of Artificial Sequence: Synthetic oligonucleotide
guucaguuguuuaugggca

SEQ ID NO: 2272617 - RNA, 19 nt, Artificial Sequence
  Description of Artificial Sequence: Synthetic oligonucleotide
cauucucuggaccagagcu

SEQ ID NO: 2272618 - RNA, 19 nt, Artificial Sequence
  Description of Artificial Sequence: Synthetic oligonucleotide
guagcuugagaggccaccg

SEQ ID NO: 2272619 - RNA, 19 nt, Artificial Sequence
  Description of Artificial Sequence: Synthetic oligonucleotide
gucaguaacaguauuggua

SEQ ID NO: 2272620 - RNA, 19 nt, Artificial Sequence
  Description of Artificial Sequence: Synthetic oligonucleotide
gauagcagcucagacgcca

SEQ ID NO: 2272621 - RNA, 19 nt, Artificial Sequence
  Description of Artificial Sequence: Synthetic oligonucleotide
uugguguguuaacucuuca

SEQ ID NO: 2272622 - RNA, 19 nt, Artificial Sequence
  Description of Artificial Sequence: Synthetic oligonucleotide
guuguuuaugggcaggugu

SEQ ID NO: 2272623 - RNA, 19 nt, Artificial Sequence
  Description of Artificial Sequence: Synthetic oligonucleotide
gagucuugcaauauagcaa

SEQ ID NO: 2272624 - RNA, 19 nt, Artificial Sequence
  Description of Artificial Sequence: Synthetic oligonucleotide
uaucccuuucacagaguac

SEQ ID NO: 2272625 - RNA, 19 nt, Artificial Sequence
  Description of Artificial Sequence: Synthetic oligonucleotide
ucacacacacacacacaca

SEQ ID NO: 2272626 - RNA, 19 nt, Artificial Sequence
  Description of Artificial Sequence: Synthetic oligonucleotide
ugucucacacacacacaca

SEQ ID NO: 2272627 - RNA, 19 nt, Artificial Sequence
  Description of Artificial Sequence: Synthetic oligonucleotide
gcuauaacguggauuuugg

SEQ ID NO: 2272628 - RNA, 19 nt, Artificial Sequence
  Description of Artificial Sequence: Synthetic oligonucleotide
aacaggugaugucggguau

SEQ ID NO: 2272629 - RNA, 19 nt, Artificial Sequence
  Description of Artificial Sequence: Synthetic oligonucleotide
ugguguguuaacucuucaa

SEQ ID NO: 2272630 - RNA, 19 nt, Artificial Sequence
  Description of Artificial Sequence: Synthetic oligonucleotide
ugguuuaugccggaauuaa

SEQ ID NO: 2272631 - RNA, 19 nt, Artificial Sequence
  Description of Artificial Sequence: Synthetic oligonucleotide
guagcaaugucugucagua

SEQ ID NO: 2272632 - RNA, 19 nt, Artificial Sequence
  Description of Artificial Sequence: Synthetic oligonucleotide
ucagacgccaaagagucuu

SEQ ID NO: 2272633 - RNA, 19 nt, Artificial Sequence
  Description of Artificial Sequence: Synthetic oligonucleotide
agagucaaacugugggagu

SEQ ID NO: 2272634 - RNA, 19 nt, Artificial Sequence
  Description of Artificial Sequence: Synthetic oligonucleotide
ggaauuaacaggugauguc

SEQ ID NO: 2272635 - RNA, 19 nt, Artificial Sequence
  Description of Artificial Sequence: Synthetic oligonucleotide
uguguucgagguacacaug

SEQ ID NO: 2272636 - RNA, 19 nt, Artificial Sequence
  Description of Artificial Sequence: Synthetic oligonucleotide
uggaccagagcucgucucu

SEQ ID NO: 2272637 - RNA, 19 nt, Artificial Sequence
  Description of Artificial Sequence: Synthetic oligonucleotide
ugucugucaguaacaguau

SEQ ID NO: 2272638 - RNA, 19 nt, Artificial Sequence
  Description of Artificial Sequence: Synthetic oligonucleotide
cagcucagacgccaaagag

SEQ ID NO: 2272639 - RNA, 19 nt, Artificial Sequence
  Description of Artificial Sequence: Synthetic oligonucleotide
uuuggcacuugagagucaa

SEQ ID NO: 2272640 - RNA, 19 nt, Artificial Sequence
  Description of Artificial Sequence: Synthetic oligonucleotide
gggaguaauuucuuaucug

SEQ ID NO: 2272641 - RNA, 19 nt, Artificial Sequence
  Description of Artificial Sequence: Synthetic oligonucleotide
gugggaguaauuucuuauc

SEQ ID NO: 2272642 - RNA, 19 nt, Artificial Sequence
  Description of Artificial Sequence: Synthetic oligonucleotide
gugcauacuguacaaucca

SEQ ID NO: 2272643 - RNA, 19 nt, Artificial Sequence
  Description of Artificial Sequence: Synthetic oligonucleotide
uguuuaugggcagguguga

SEQ ID NO: 2272644 - RNA, 19 nt, Artificial Sequence
  Description of Artificial Sequence: Synthetic oligonucleotide
agccaaaugauuaacccua

SEQ ID NO: 2272645 - RNA, 19 nt, Artificial Sequence
  Description of Artificial Sequence: Synthetic oligonucleotide
agcuugagaggccaccggu

SEQ ID NO: 2272646 - RNA, 19 nt, Artificial Sequence
  Description of Artificial Sequence: Synthetic oligonucleotide
gccacaacgcaucugaguc

SEQ ID NO: 2272647 - RNA, 19 nt, Artificial Sequence
  Description of Artificial Sequence: Synthetic oligonucleotide
aaccguaagaauggacuau

SEQ ID NO: 2272648 - RNA, 19 nt, Artificial Sequence
  Description of Artificial Sequence: Synthetic oligonucleotide
ugaccuucuuuauuagauu

SEQ ID NO: 2272649 - RNA, 19 nt, Artificial Sequence
  Description of Artificial Sequence: Synthetic oligonucleotide
uggcagacuaacagagggu

SEQ ID NO: 2272650 - RNA, 19 nt, Artificial Sequence
  Description of Artificial Sequence: Synthetic oligonucleotide
uuaucugguuuaugccgga

SEQ ID NO: 2272651 - RNA, 19 nt, Artificial Sequence
  Description of Artificial Sequence: Synthetic oligonucleotide
cccaaaugaagccaaauga

SEQ ID NO: 2272652 - RNA, 19 nt, Artificial Sequence
  Description of Artificial Sequence: Synthetic oligonucleotide
auuucuuaucugguuuaug

SEQ ID NO: 2272653 - RNA, 19 nt, Artificial Sequence
  Description of Artificial Sequence: Synthetic oligonucleotide
gggaggggcauuuagugac

SEQ ID NO: 2272654 - RNA, 19 nt, Artificial Sequence
  Description of Artificial Sequence: Synthetic oligonucleotide
uugugaggccacaacgcau

SEQ ID NO: 2272655 - RNA, 19 nt, Artificial Sequence
  Description of Artificial Sequence: Synthetic oligonucleotide
ucaaacugugggaguaauu

SEQ ID NO: 2272656 - RNA, 19 nt, Artificial Sequence
  Description of Artificial Sequence: Synthetic oligonucleotide
uuggacuugguguguuaac

SEQ ID NO: 2272657 - RNA, 19 nt, Artificial Sequence
  Description of Artificial Sequence: Synthetic oligonucleotide
acacacacacacacugaac

SEQ ID NO: 2272658 - RNA, 19 nt, Artificial Sequence
  Description of Artificial Sequence: Synthetic oligonucleotide
cucggagaggagcuuuacc

SEQ ID NO: 2272659 - RNA, 19 nt, Artificial Sequence
  Description of Artificial Sequence: Synthetic oligonucleotide
guggauuuugggucuggac

SEQ ID NO: 2272660 - RNA, 19 nt, Artificial Sequence
  Description of Artificial Sequence: Synthetic oligonucleotide
agaguacuuuggcacuuga

SEQ ID NO: 2272661 - RNA, 19 nt, Artificial Sequence
  Description of Artificial Sequence: Synthetic oligonucleotide
cuuagucagcggcucggag

SEQ ID NO: 2272662 - RNA, 19 nt, Artificial Sequence
  Description of Artificial Sequence: Synthetic oligonucleotide
ggcaugguaacuuggaaua

SEQ ID NO: 2272663 - RNA, 19 nt, Artificial Sequence
  Description of Artificial Sequence: Synthetic oligonucleotide
uaccguccgguuccgcggg

SEQ ID NO: 2272664 - RNA, 19 nt, Artificial Sequence
  Description of Artificial Sequence: Synthetic oligonucleotide
gagucuuucucuuggacuu

SEQ ID NO: 2272665 - RNA, 19 nt, Artificial Sequence
  Description of Artificial Sequence: Synthetic oligonucleotide
cuacguucaguucaguugu

SEQ ID NO: 2272666 - RNA, 19 nt, Artificial Sequence
  Description of Artificial Sequence: Synthetic oligonucleotide
gagcuuuaccguccgguuc

SEQ ID NO: 2272667 - RNA, 19 nt, Artificial Sequence
  Description of Artificial Sequence: Synthetic oligonucleotide
cuguuggagcuuuguauuc

SEQ ID NO: 2272668 - RNA, 19 nt, Artificial Sequence
  Description of Artificial Sequence: Synthetic oligonucleotide
agucagacgcuacguucag

SEQ ID NO: 2272669 - RNA, 19 nt, Artificial Sequence
  Description of Artificial Sequence: Synthetic oligonucleotide
caacgcaucugagucuugc

SEQ ID NO: 2272670 - RNA, 19 nt, Artificial Sequence
  Description of Artificial Sequence: Synthetic oligonucleotide
cucucugcuauaacgugga

SEQ ID NO: 2272671 - RNA, 19 nt, Artificial Sequence
  Description of Artificial Sequence: Synthetic oligonucleotide
ccucucugcuauaacgugg

SEQ ID NO: 2272672 - RNA, 19 nt, Artificial Sequence
  Description of Artificial Sequence: Synthetic oligonucleotide
caaguacaacaaccguaag

SEQ ID NO: 2272673 - RNA, 19 nt, Artificial Sequence
  Description of Artificial Sequence: Synthetic oligonucleotide
aaaguuagggaggggcauu

SEQ ID NO: 2272674 - RNA, 19 nt, Artificial Sequence
  Description of Artificial Sequence: Synthetic oligonucleotide
aggagcuuuaccguccggu

SEQ ID NO: 2272675 - RNA, 19 nt, Artificial Sequence
  Description of Artificial Sequence: Synthetic oligonucleotide
caugcuuggcagacuaaca

SEQ ID NO: 2272676 - RNA, 19 nt, Artificial Sequence
  Description of Artificial Sequence: Synthetic oligonucleotide
guguuugugaggccacaac

SEQ ID NO: 2272677 - RNA, 19 nt, Artificial Sequence
  Description of Artificial Sequence: Synthetic oligonucleotide
uuggaacacucagaaucca

SEQ ID NO: 2272678 - RNA, 19 nt, Artificial Sequence
  Description of Artificial Sequence: Synthetic oligonucleotide
acgcaucugagucuugcaa

SEQ ID NO: 2272679 - RNA, 19 nt, Artificial Sequence
  Description of Artificial Sequence: Synthetic oligonucleotide
guacacaugcuuggcagac

SEQ ID NO: 2272680 - RNA, 19 nt, Artificial Sequence
  Description of Artificial Sequence: Synthetic oligonucleotide
cuaucccuuucacagagua

SEQ ID NO: 2272681 - RNA, 19 nt, Artificial Sequence
  Description of Artificial Sequence: Synthetic oligonucleotide
ugcucgauagcagcucaga

SEQ ID NO: 2272682 - RNA, 19 nt, Artificial Sequence
  Description of Artificial Sequence: Synthetic oligonucleotide
aguuguuuaugggcaggug

SEQ ID NO: 2272683 - RNA, 19 nt, Artificial Sequence
  Description of Artificial Sequence: Synthetic oligonucleotide
caguagcaaugucugucag

SEQ ID NO: 2272684 - RNA, 19 nt, Artificial Sequence
  Description of Artificial Sequence: Synthetic oligonucleotide
agucuguauuuucccucug

SEQ ID NO: 2272685 - RNA, 19 nt, Artificial Sequence
  Description of Artificial Sequence: Synthetic oligonucleotide
caucaagagucauugaauu

SEQ ID NO: 2272686 - RNA, 19 nt, Artificial Sequence
  Description of Artificial Sequence: Synthetic oligonucleotide
augguaacuuggaauaguu

SEQ ID NO: 2272687 - RNA, 19 nt, Artificial Sequence
  Description of Artificial Sequence: Synthetic oligonucleotide
cacacacacacacacugaa

SEQ ID NO: 2272688 - RNA, 19 nt, Artificial Sequence
  Description of Artificial Sequence: Synthetic oligonucleotide
acaauccaguuuaucuucu

SEQ ID NO: 2272689 - RNA, 19 nt, Artificial Sequence
  Description of Artificial Sequence: Synthetic oligonucleotide
agacgccaaagagucuuuc

SEQ ID NO: 2272690 - RNA, 19 nt, Artificial Sequence
  Description of Artificial Sequence: Synthetic oligonucleotide
acacacugaacaguagcaa

SEQ ID NO: 2272691 - RNA, 19 nt, Artificial Sequence
  Description of Artificial Sequence: Synthetic oligonucleotide
agauauuaucuuagguuuu

SEQ ID NO: 2272692 - RNA, 19 nt, Artificial Sequence
  Description of Artificial Sequence: Synthetic oligonucleotide
agcugcucgauagcagcuc

SEQ ID NO: 2272693 - RNA, 19 nt, Artificial Sequence
  Description of Artificial Sequence: Synthetic oligonucleotide
gaguaauuucuuaucuggu

SEQ ID NO: 2272694 - RNA, 19 nt, Artificial Sequence
  Description of Artificial Sequence: Synthetic oligonucleotide
ucuuagucagcggcucgga

SEQ ID NO: 2272695 - RNA, 19 nt, Artificial Sequence
  Description of Artificial Sequence: Synthetic oligonucleotide
aaguuagggaggggcauuu

SEQ ID NO: 2272696 - RNA, 19 nt, Artificial Sequence
  Description of Artificial Sequence: Synthetic oligonucleotide
gguaaaaguuagggagggg

SEQ ID NO: 2272697 - RNA, 19 nt, Artificial Sequence
  Description of Artificial Sequence: Synthetic oligonucleotide
aacguggauuuugggucug

SEQ ID NO: 2272698 - RNA, 19 nt, Artificial Sequence
  Description of Artificial Sequence: Synthetic oligonucleotide
caaccguaagaauggacua

SEQ ID NO: 2272699 - RNA, 19 nt, Artificial Sequence
  Description of Artificial Sequence: Synthetic oligonucleotide
ccugguuguguuugugagg

SEQ ID NO: 2272700 - RNA, 19 nt, Artificial Sequence
  Description of Artificial Sequence: Synthetic oligonucleotide
ggucuggacauucucugga

SEQ ID NO: 2272701 - RNA, 19 nt, Artificial Sequence
  Description of Artificial Sequence: Synthetic oligonucleotide
acuugcaggcaugguaacu

SEQ ID NO: 2272702 - RNA, 19 nt, Artificial Sequence
  Description of Artificial Sequence: Synthetic oligonucleotide
ggacuugguguguuaacuc

SEQ ID NO: 2272703 - RNA, 19 nt, Artificial Sequence
  Description of Artificial Sequence: Synthetic oligonucleotide
gguaaaagucagacgcuac

SEQ ID NO: 2272704 - RNA, 19 nt, Artificial Sequence
  Description of Artificial Sequence: Synthetic oligonucleotide
aggguaaaagucagacgcu

SEQ ID NO: 2272705 - RNA, 19 nt, Artificial Sequence
  Description of Artificial Sequence: Synthetic oligonucleotide
accguaagaauggacuaua

SEQ ID NO: 2272706 - RNA, 19 nt, Artificial Sequence
  Description of Artificial Sequence: Synthetic oligonucleotide
caaauccauauccuuauuu

SEQ ID NO: 2272707 - RNA, 19 nt, Artificial Sequence
  Description of Artificial Sequence: Synthetic oligonucleotide
cagacuaacagaggguaaa

SEQ ID NO: 2272708 - RNA, 19 nt, Artificial Sequence
  Description of Artificial Sequence: Synthetic oligonucleotide
cguaagaauggacuauaac

SEQ ID NO: 2272709 - RNA, 19 nt, Artificial Sequence
  Description of Artificial Sequence: Synthetic oligonucleotide
cuggaccagagcucgucuc

SEQ ID NO: 2272710 - RNA, 19 nt, Artificial Sequence
  Description of Artificial Sequence: Synthetic oligonucleotide
cuguacaauccaguuuauc

SEQ ID NO: 2272711 - RNA, 19 nt, Artificial Sequence
  Description of Artificial Sequence: Synthetic oligonucleotide
gacgccaaagagucuuucu

SEQ ID NO: 2272712 - RNA, 19 nt, Artificial Sequence
  Description of Artificial Sequence: Synthetic oligonucleotide
ucagcggcucggagaggag

SEQ ID NO: 2272713 - RNA, 19 nt, Artificial Sequence
  Description of Artificial Sequence: Synthetic oligonucleotide
ugguuguguuugugaggcc

SEQ ID NO: 2272714 - RNA, 19 nt, Artificial Sequence
  Description of Artificial Sequence: Synthetic oligonucleotide
accuucuuuauuagauuaa

SEQ ID NO: 2272715 - RNA, 19 nt, Artificial Sequence
  Description of Artificial Sequence: Synthetic oligonucleotide
gauuaagauaauagauauu

SEQ ID NO: 2272716 - RNA, 19 nt, Artificial Sequence
  Description of Artificial Sequence: Synthetic oligonucleotide
uacacaugcuuggcagacu

SEQ ID NO: 2272717 - RNA, 19 nt, Artificial Sequence
  Description of Artificial Sequence: Synthetic oligonucleotide
cugcucgauagcagcucag

SEQ ID NO: 2272718 - RNA, 19 nt, Artificial Sequence
  Description of Artificial Sequence: Synthetic oligonucleotide
agucuuucucuuggacuug

SEQ ID NO: 2272719 - RNA, 19 nt, Artificial Sequence
  Description of Artificial Sequence: Synthetic oligonucleotide
agagcucgucucuucuuuu

SEQ ID NO: 2272720 - RNA, 19 nt, Artificial Sequence
  Description of Artificial Sequence: Synthetic oligonucleotide
cagacgcuacguucaguuc

SEQ ID NO: 2272721 - RNA, 19 nt, Artificial Sequence
  Description of Artificial Sequence: Synthetic oligonucleotide
acccuagacuagagugacc

SEQ ID NO: 2272722 - RNA, 19 nt, Artificial Sequence
  Description of Artificial Sequence: Synthetic oligonucleotide
uagcaaugucugucaguaa

SEQ ID NO: 2272723 - RNA, 19 nt, Artificial Sequence
  Description of Artificial Sequence: Synthetic oligonucleotide
ggauuuugggucuggacau

SEQ ID NO: 2272724 - RNA, 19 nt, Artificial Sequence
  Description of Artificial Sequence: Synthetic oligonucleotide
gaccagagcucgucucuuc

SEQ ID NO: 2272725 - RNA, 19 nt, Artificial Sequence
  Description of Artificial Sequence: Synthetic oligonucleotide
gguacacaugcuuggcaga

SEQ ID NO: 2272726 - RNA, 19 nt, Artificial Sequence
  Description of Artificial Sequence: Synthetic oligonucleotide
gcucgauagcagcucagac

SEQ ID NO: 2272727 - RNA, 19 nt, Artificial Sequence
  Description of Artificial Sequence: Synthetic oligonucleotide
gguuuaugccggaauuaac

SEQ ID NO: 2272728 - RNA, 19 nt, Artificial Sequence
  Description of Artificial Sequence: Synthetic oligonucleotide
gacuagagugaccuucuuu

SEQ ID NO: 2272729 - RNA, 19 nt, Artificial Sequence
  Description of Artificial Sequence: Synthetic oligonucleotide
ggaacacucagaauccaaa

SEQ ID NO: 2272730 - RNA, 19 nt, Artificial Sequence
  Description of Artificial Sequence: Synthetic oligonucleotide
gucagcggcucggagagga

SEQ ID NO: 2272731 - RNA, 19 nt, Artificial Sequence
  Description of Artificial Sequence: Synthetic oligonucleotide
acacacacacacacacuga

SEQ ID NO: 2272732 - RNA, 19 nt, Artificial Sequence
  Description of Artificial Sequence: Synthetic oligonucleotide
cacacugaacaguagcaau

SEQ ID NO: 2272733 - RNA, 19 nt, Artificial Sequence
  Description of Artificial Sequence: Synthetic oligonucleotide
ucucugcuauaacguggau

SEQ ID NO: 2272734 - RNA, 19 nt, Artificial Sequence
  Description of Artificial Sequence: Synthetic oligonucleotide
gcaugguaacuuggaauag

SEQ ID NO: 2272735 - RNA, 19 nt, Artificial Sequence
  Description of Artificial Sequence: Synthetic oligonucleotide
cuuggacuugguguguuaa

SEQ ID NO: 2272736 - RNA, 19 nt, Artificial Sequence
  Description of Artificial Sequence: Synthetic oligonucleotide
acagaguacuuuggcacuu

SEQ ID NO: 2272737 - RNA, 19 nt, Artificial Sequence
  Description of Artificial Sequence: Synthetic oligonucleotide
ggugugaccucgguccugc

SEQ ID NO: 2272738 - RNA, 19 nt, Artificial Sequence
  Description of Artificial Sequence: Synthetic oligonucleotide
acuugguguguuaacucuu

SEQ ID NO: 2272739 - RNA, 19 nt, Artificial Sequence
  Description of Artificial Sequence: Synthetic oligonucleotide
agcccaaagucuguauuuu

SEQ ID NO: 2272740 - RNA, 19 nt, Artificial Sequence
  Description of Artificial Sequence: Synthetic oligonucleotide
uagcagcucagacgccaaa

SEQ ID NO: 2272741 - RNA, 19 nt, Artificial Sequence
  Description of Artificial Sequence: Synthetic oligonucleotide
uuggcacuugagagucaaa

SEQ ID NO: 2272742 - RNA, 19 nt, Artificial Sequence
  Description of Artificial Sequence: Synthetic oligonucleotide
acacacacacacacacaca

SEQ ID NO: 2272743 - RNA, 19 nt, Artificial Sequence
  Description of Artificial Sequence: Synthetic oligonucleotide
acacacacacacacacacu

SEQ ID NO: 2272744 - RNA, 19 nt, Artificial Sequence
  Description of Artificial Sequence: Synthetic oligonucleotide
ggugcucccagcuaucccu

SEQ ID NO: 2272745 - RNA, 19 nt, Artificial Sequence
  Description of Artificial Sequence: Synthetic oligonucleotide
gccaaaugauuaacccuag

SEQ ID NO: 2272746 - RNA, 19 nt, Artificial Sequence
  Description of Artificial Sequence: Synthetic oligonucleotide
cagaguacuuuggcacuug

SEQ ID NO: 2272747 - RNA, 19 nt, Artificial Sequence
  Description of Artificial Sequence: Synthetic oligonucleotide
cacagaguacuuuggcacu

SEQ ID NO: 2272748 - RNA, 19 nt, Artificial Sequence
  Description of Artificial Sequence: Synthetic oligonucleotide
guaacuuggaauaguucuu

SEQ ID NO: 2272749 - RNA, 19 nt, Artificial Sequence
  Description of Artificial Sequence: Synthetic oligonucleotide
ggcagacuaacagagggua

SEQ ID NO: 2272750 - RNA, 19 nt, Artificial Sequence
  Description of Artificial Sequence: Synthetic oligonucleotide
caugguaacuuggaauagu

SEQ ID NO: 2272751 - RNA, 19 nt, Artificial Sequence
  Description of Artificial Sequence: Synthetic oligonucleotide
caggcaugguaacuuggaa

SEQ ID NO: 2272752 - RNA, 19 nt, Artificial Sequence
  Description of Artificial Sequence: Synthetic oligonucleotide
agacuagagugaccuucuu

SEQ ID NO: 2272753 - RNA, 19 nt, Artificial Sequence
  Description of Artificial Sequence: Synthetic oligonucleotide
agcaagcccaaagucugua

SEQ ID NO: 2272754 - RNA, 19 nt, Artificial Sequence
  Description of Artificial Sequence: Synthetic oligonucleotide
ccaaaauucuuugugugua

SEQ ID NO: 2272755 - RNA, 19 nt, Artificial Sequence
  Description of Artificial Sequence: Synthetic oligonucleotide
cugguuuaugccggaauua

SEQ ID NO: 2272756 - RNA, 19 nt, Artificial Sequence
  Description of Artificial Sequence: Synthetic oligonucleotide
cacugaacaguagcaaugu

SEQ ID NO: 2272757 - RNA, 19 nt, Artificial Sequence
  Description of Artificial Sequence: Synthetic oligonucleotide
cugugggaguaauuucuua

SEQ ID NO: 2272758 - RNA, 19 nt, Artificial Sequence
  Description of Artificial Sequence: Synthetic oligonucleotide
ggacuauaacuuucuucaa

SEQ ID NO: 2272759 - RNA, 19 nt, Artificial Sequence
  Description of Artificial Sequence: Synthetic oligonucleotide
cagcuaucccuuucacaga

SEQ ID NO: 2272760 - RNA, 19 nt, Artificial Sequence
  Description of Artificial Sequence: Synthetic oligonucleotide
gcccgucccacuugcaggc

SEQ ID NO: 2272761 - RNA, 19 nt, Artificial Sequence
  Description of Artificial Sequence: Synthetic oligonucleotide
ccggaauuaacaggugaug

SEQ ID NO: 2272762 - RNA, 19 nt, Artificial Sequence
  Description of Artificial Sequence: Synthetic oligonucleotide
gcuugagaggccaccggug

SEQ ID NO: 2272763 - RNA, 19 nt, Artificial Sequence
  Description of Artificial Sequence: Synthetic oligonucleotide
guacaacaaccguaagaau

SEQ ID NO: 2272764 - RNA, 19 nt, Artificial Sequence
  Description of Artificial Sequence: Synthetic oligonucleotide
gcugcucgauagcagcuca

SEQ ID NO: 2272765 - RNA, 19 nt, Artificial Sequence
  Description of Artificial Sequence: Synthetic oligonucleotide
uccgguuccgcgggccgcc

SEQ ID NO: 2272766 - RNA, 19 nt, Artificial Sequence
  Description of Artificial Sequence: Synthetic oligonucleotide
caguaacaguauugguaaa

SEQ ID NO: 2272767 - RNA, 19 nt, Artificial Sequence
  Description of Artificial Sequence: Synthetic oligonucleotide
agcuuuguauucaguuguu

SEQ ID NO: 2272768 - RNA, 19 nt, Artificial Sequence
  Description of Artificial Sequence: Synthetic oligonucleotide
ggggcauuuagugacuaua

SEQ ID NO: 2272769 - RNA, 19 nt, Artificial Sequence
  Description of Artificial Sequence: Synthetic oligonucleotide
acuguacaauccaguuuau

SEQ ID NO: 2272770 - RNA, 19 nt, Artificial Sequence
  Description of Artificial Sequence: Synthetic oligonucleotide
ugaccucgguccugcccgu

SEQ ID NO: 2272771 - RNA, 19 nt, Artificial Sequence
  Description of Artificial Sequence: Synthetic oligonucleotide
cuuuaccguccgguuccgc

SEQ ID NO: 2272772 - RNA, 19 nt, Artificial Sequence
  Description of Artificial Sequence: Synthetic oligonucleotide
cuuuggcacuugagaguca

SEQ ID NO: 2272773 - RNA, 19 nt, Artificial Sequence
  Description of Artificial Sequence: Synthetic oligonucleotide
caacaaccguaagaaugga

SEQ ID NO: 2272774 - RNA, 19 nt, Artificial Sequence
  Description of Artificial Sequence: Synthetic oligonucleotide
auagcagcucagacgccaa

SEQ ID NO: 2272775 - RNA, 19 nt, Artificial Sequence
  Description of Artificial Sequence: Synthetic oligonucleotide
guccgcgcgccacgauccg

SEQ ID NO: 2272776 - RNA, 19 nt, Artificial Sequence
  Description of Artificial Sequence: Synthetic oligonucleotide
ccaaaugauuaacccuaga

SEQ ID NO: 2272777 - RNA, 19 nt, Artificial Sequence
  Description of Artificial Sequence: Synthetic oligonucleotide
gucugucaguaacaguauu

SEQ ID NO: 2272778 - RNA, 19 nt, Artificial Sequence
  Description of Artificial Sequence: Synthetic oligonucleotide
ucgguccugcccgucccac

SEQ ID NO: 2272779 - RNA, 19 nt, Artificial Sequence
  Description of Artificial Sequence: Synthetic oligonucleotide
aggugugaccucgguccug

SEQ ID NO: 2272780 - RNA, 19 nt, Artificial Sequence
  Description of Artificial Sequence: Synthetic oligonucleotide
guccugcccgucccacuug

SEQ ID NO: 2272781 - RNA, 19 nt, Artificial Sequence
  Description of Artificial Sequence: Synthetic oligonucleotide
cucugcuauaacguggauu

SEQ ID NO: 2272782 - RNA, 19 nt, Artificial Sequence
  Description of Artificial Sequence: Synthetic oligonucleotide
cguccgcgcgccacgaucc

SEQ ID NO: 2272783 - RNA, 19 nt, Artificial Sequence
  Description of Artificial Sequence: Synthetic oligonucleotide
aguuagggaggggcauuua

SEQ ID NO: 2272784 - RNA, 19 nt, Artificial Sequence
  Description of Artificial Sequence: Synthetic oligonucleotide
cccacuugcaggcauggua

SEQ ID NO: 2272785 - RNA, 19 nt, Artificial Sequence
  Description of Artificial Sequence: Synthetic oligonucleotide
caguuccucucugcuauaa

SEQ ID NO: 2272786 - RNA, 19 nt, Artificial Sequence
  Description of Artificial Sequence: Synthetic oligonucleotide
gucaaacugugggaguaau

SEQ ID NO: 2272787 - RNA, 19 nt, Artificial Sequence
  Description of Artificial Sequence: Synthetic oligonucleotide
gcucccagcuaucccuuuc

SEQ ID NO: 2272788 - RNA, 19 nt, Artificial Sequence
  Description of Artificial Sequence: Synthetic oligonucleotide
cccuagacuagagugaccu

SEQ ID NO: 2272789 - RNA, 19 nt, Artificial Sequence
  Description of Artificial Sequence: Synthetic oligonucleotide
acaacgcaucugagucuug

SEQ ID NO: 2272790 - RNA, 19 nt, Artificial Sequence
  Description of Artificial Sequence: Synthetic oligonucleotide
gcuuuaccguccgguuccg

SEQ ID NO: 2272791 - RNA, 19 nt, Artificial Sequence
  Description of Artificial Sequence: Synthetic oligonucleotide
caguuguuuaugggcaggu

SEQ ID NO: 2272792 - RNA, 19 nt, Artificial Sequence
  Description of Artificial Sequence: Synthetic oligonucleotide
gugugaccucgguccugcc

SEQ ID NO: 2272793 - RNA, 19 nt, Artificial Sequence
  Description of Artificial Sequence: Synthetic oligonucleotide
ggccacaacgcaucugagu

SEQ ID NO: 2272794 - RNA, 19 nt, Artificial Sequence
  Description of Artificial Sequence: Synthetic oligonucleotide
cccagcuaucccuuucaca

SEQ ID NO: 2272795 - RNA, 19 nt, Artificial Sequence
  Description of Artificial Sequence: Synthetic oligonucleotide
cacaacgcaucugagucuu

SEQ ID NO: 2272796 - RNA, 19 nt, Artificial Sequence
  Description of Artificial Sequence: Synthetic oligonucleotide
guuccgcgggccgccgucc

SEQ ID NO: 2272797 - RNA, 19 nt, Artificial Sequence
  Description of Artificial Sequence: Synthetic oligonucleotide
gcaauauagcaagcccaaa

SEQ ID NO: 2272798 - RNA, 19 nt, Artificial Sequence
  Description of Artificial Sequence: Synthetic oligonucleotide
ggagcuuuaccguccgguu

SEQ ID NO: 2272799 - RNA, 19 nt, Artificial Sequence
  Description of Artificial Sequence: Synthetic oligonucleotide
ccguaagaauggacuauaa

SEQ ID NO: 2272800 - RNA, 19 nt, Artificial Sequence
  Description of Artificial Sequence: Synthetic oligonucleotide
gcagacuaacagaggguaa

SEQ ID NO: 2272801 - RNA, 19 nt, Artificial Sequence
  Description of Artificial Sequence: Synthetic oligonucleotide
caauccaguuuaucuucuu

SEQ ID NO: 2272802 - RNA, 19 nt, Artificial Sequence
  Description of Artificial Sequence: Synthetic oligonucleotide
guccgguuccgcgggccgc

SEQ ID NO: 2272803 - RNA, 19 nt, Artificial Sequence
  Description of Artificial Sequence: Synthetic oligonucleotide
aggugaugucggguauuuu

SEQ ID NO: 2272804 - RNA, 19 nt, Artificial Sequence
  Description of Artificial Sequence: Synthetic oligonucleotide
cucagacgccaaagagucu

SEQ ID NO: 2272805 - RNA, 19 nt, Artificial Sequence
  Description of Artificial Sequence: Synthetic oligonucleotide
gguuccgcgggccgccguc

SEQ ID NO: 2272806 - RNA, 19 nt, Artificial Sequence
  Description of Artificial Sequence: Synthetic oligonucleotide
gccggaauuaacaggugau

SEQ ID NO: 2272807 - RNA, 19 nt, Artificial Sequence
  Description of Artificial Sequence: Synthetic oligonucleotide
cuacuucaucaagagucau

SEQ ID NO: 2272808 - RNA, 19 nt, Artificial Sequence
  Description of Artificial Sequence: Synthetic oligonucleotide
caccggugcucccagcuau

SEQ ID NO: 2272809 - RNA, 19 nt, Artificial Sequence
  Description of Artificial Sequence: Synthetic oligonucleotide
gcucggagaggagcuuuac

SEQ ID NO: 2272810 - RNA, 19 nt, Artificial Sequence
  Description of Artificial Sequence: Synthetic oligonucleotide
cucgguccugcccguccca

SEQ ID NO: 2272811 - RNA, 19 nt, Artificial Sequence
  Description of Artificial Sequence: Synthetic oligonucleotide
ccggugcucccagcuaucc

SEQ ID NO: 2272812 - RNA, 19 nt, Artificial Sequence
  Description of Artificial Sequence: Synthetic oligonucleotide
acgcuacguucaguucagu

SEQ ID NO: 2272813 - RNA, 19 nt, Artificial Sequence
  Description of Artificial Sequence: Synthetic oligonucleotide
gcaagcccaaagucuguau

SEQ ID NO: 2272814 - RNA, 19 nt, Artificial Sequence
  Description of Artificial Sequence: Synthetic oligonucleotide
gucagacgcuacguucagu

SEQ ID NO: 2272815 - RNA, 19 nt, Artificial Sequence
  Description of Artificial Sequence: Synthetic oligonucleotide
ccguccgcgcgccacgauc

SEQ ID NO: 2272816 - RNA, 19 nt, Artificial Sequence
  Description of Artificial Sequence: Synthetic oligonucleotide
caggugaugucggguauuu

SEQ ID NO: 2272817 - RNA, 19 nt, Artificial Sequence
  Description of Artificial Sequence: Synthetic oligonucleotide
gaccucgguccugcccguc

SEQ ID NO: 2272818 - RNA, 19 nt, Artificial Sequence
  Description of Artificial Sequence: Synthetic oligonucleotide
cggugcucccagcuauccc

SEQ ID NO: 2272819 - RNA, 19 nt, Artificial Sequence
  Description of Artificial Sequence: Synthetic oligonucleotide
cguccgguuccgcgggccg

SEQ ID NO: 2272820 - RNA, 19 nt, Artificial Sequence
  Description of Artificial Sequence: Synthetic oligonucleotide
gguccugcccgucccacuu

SEQ ID NO: 2272821 - RNA, 19 nt, Artificial Sequence
  Description of Artificial Sequence: Synthetic oligonucleotide
cgcaucugagucuugcaau

SEQ ID NO: 2272822 - RNA, 19 nt, Artificial Sequence
  Description of Artificial Sequence: Synthetic oligonucleotide
cagacgccaaagagucuuu

SEQ ID NO: 2272823 - RNA, 19 nt, Artificial Sequence
  Description of Artificial Sequence: Synthetic oligonucleotide
ggaggggcauuuagugacu

SEQ ID NO: 2272824 - RNA, 19 nt, Artificial Sequence
  Description of Artificial Sequence: Synthetic oligonucleotide
ggcucggagaggagcuuua

SEQ ID NO: 2272825 - RNA, 19 nt, Artificial Sequence
  Description of Artificial Sequence: Synthetic oligonucleotide
ccguccgguuccgcgggcc

SEQ ID NO: 2272826 - RNA, 19 nt, Artificial Sequence
  Description of Artificial Sequence: Synthetic oligonucleotide
cguggauuuugggucugga

SEQ ID NO: 2272827 - RNA, 19 nt, Artificial Sequence
  Description of Artificial Sequence: Synthetic oligonucleotide
cugcuauaacguggauuuu

SEQ ID NO: 2272828 - RNA, 19 nt, Artificial Sequence
  Description of Artificial Sequence: Synthetic oligonucleotide
ggaccagagcucgucucuu

SEQ ID NO: 2272829 - RNA, 19 nt, Artificial Sequence
  Description of Artificial Sequence: Synthetic oligonucleotide
cgcuacguucaguucaguu

SEQ ID NO: 2272830 - RNA, 19 nt, Artificial Sequence
  Description of Artificial Sequence: Synthetic oligonucleotide
ccuagacuagagugaccuu

SEQ ID NO: 2272831 - RNA, 19 nt, Artificial Sequence
  Description of Artificial Sequence: Synthetic oligonucleotide
cccuuucacagaguacuuu

SEQ ID NO: 2272832 - RNA, 19 nt, Artificial Sequence
  Description of Artificial Sequence: Synthetic oligonucleotide
ccgucccacuugcaggcau

SEQ ID NO: 2272833 - RNA, 19 nt, Artificial Sequence
  Description of Artificial Sequence: Synthetic oligonucleotide
cccgucccacuugcaggca

SEQ ID NO: 2272834 - RNA, 19 nt, Artificial Sequence
  Description of Artificial Sequence: Synthetic oligonucleotide
cggcucggagaggagcuuu

SEQ ID NO: 2272835 - RNA, 19 nt, Artificial Sequence
  Description of Artificial Sequence: Synthetic oligonucleotide
cgguuccgcgggccgccgu

SEQ ID NO: 2272836 - RNA, 19 nt, Artificial Sequence
  Description of Artificial Sequence: Synthetic oligonucleotide
aagauuuuagggaaugagc

SEQ ID NO: 2272837 - RNA, 19 nt, Artificial Sequence
  Description of Artificial Sequence: Synthetic oligonucleotide
aaugagcaagaguuuaggg

SEQ ID NO: 2272838 - RNA, 19 nt, Artificial Sequence
  Description of Artificial Sequence: Synthetic oligonucleotide
ugagcaagaguuuagggug

SEQ ID NO: 2272839 - RNA, 19 nt, Artificial Sequence
  Description of Artificial Sequence: Synthetic oligonucleotide
  modified_base (10)..(10): a, c, u, g, unknown or other
ucggcuuugngaaucugcg

SEQ ID NO: 2272840 - RNA, 19 nt, Artificial Sequence
  Description of Artificial Sequence: Synthetic oligonucleotide
cacuuugaagauuuuaggg

SEQ ID NO: 2272841 - RNA, 19 nt, Artificial Sequence
  Description of Artificial Sequence: Synthetic oligonucleotide
ugacccgcuaugaagaagg

SEQ ID NO: 2272842 - RNA, 19 nt, Artificial Sequence
  Description of Artificial Sequence: Synthetic oligonucleotide
gaacucaagccucugaagc

SEQ ID NO: 2272843 - RNA, 19 nt, Artificial Sequence
  Description of Artificial Sequence: Synthetic oligonucleotide
aaggugacaaaguugucca

SEQ ID NO: 2272844 - RNA, 19 nt, Artificial Sequence
  Description of Artificial Sequence: Synthetic oligonucleotide
gaugacaggaagcacugag

SEQ ID NO: 2272845 - RNA, 19 nt, Artificial Sequence
  Description of Artificial Sequence: Synthetic oligonucleotide
agagguucaggagagaagg

SEQ ID NO: 2272846 - RNA, 19 nt, Artificial Sequence
  Description of Artificial Sequence: Synthetic oligonucleotide
gaagauuuuagggaaugag

SEQ ID NO: 2272847 - RNA, 19 nt, Artificial Sequence
  Description of Artificial Sequence: Synthetic oligonucleotide
  modified_base (4)..(4): a, c, u, g, unknown or other
uugngaaucugcgugagga

SEQ ID NO: 2272848 - RNA, 19 nt, Artificial Sequence
  Description of Artificial Sequence: Synthetic oligonucleotide
auuuuagggaaugagcaag

SEQ ID NO: 2272849 - RNA, 19 nt, Artificial Sequence
  Description of Artificial Sequence: Synthetic oligonucleotide
agcuccaucacugugaaug

SEQ ID NO: 2272850 - RNA, 19 nt, Artificial Sequence
  Description of Artificial Sequence: Synthetic oligonucleotide
augagcaagaguuuagggu

SEQ ID NO: 2272851 - RNA, 19 nt, Artificial Sequence
  Description of Artificial Sequence: Synthetic oligonucleotide
aaguucagagguucaggag

SEQ ID NO: 2272852 - RNA, 19 nt, Artificial Sequence
  Description of Artificial Sequence: Synthetic oligonucleotide
ucuccccagauccucauag

SEQ ID NO: 2272853 - RNA, 19 nt, Artificial Sequence
  Description of Artificial Sequence: Synthetic oligonucleotide
gucacuuugaagauuuuag

SEQ ID NO: 2272854 - RNA, 19 nt, Artificial Sequence
  Description of Artificial Sequence: Synthetic oligonucleotide
ggaaccgacaaccucaucc

SEQ ID NO: 2272855 - RNA, 19 nt, Artificial Sequence
  Description of Artificial Sequence: Synthetic oligonucleotide
gaaugagcaagaguuuagg

SEQ ID NO: 2272856 - RNA, 19 nt, Artificial Sequence
  Description of Artificial Sequence: Synthetic oligonucleotide
aacucaagccucugaagca

SEQ ID NO: 2272857 - RNA, 19 nt, Artificial Sequence
  Description of Artificial Sequence: Synthetic oligonucleotide
uuuuagggaaugagcaaga

SEQ ID NO: 2272858 - RNA, 19 nt, Artificial Sequence
  Description of Artificial Sequence: Synthetic oligonucleotide
agcggaugaggguacaggg

SEQ ID NO: 2272859 - RNA, 19 nt, Artificial Sequence
  Description of Artificial Sequence: Synthetic oligonucleotide
  modified_base (5)..(5): a, c, u, g, unknown or other
uuugngaaucugcgugagg

SEQ ID NO: 2272860 - RNA, 19 nt, Artificial Sequence
  Description of Artificial Sequence: Synthetic oligonucleotide
gaaguucagagguucagga

SEQ ID NO: 2272861 - RNA, 19 nt, Artificial Sequence
  Description of Artificial Sequence: Synthetic oligonucleotide
aagaguuuagggugucucu

SEQ ID NO: 2272862 - RNA, 19 nt, Artificial Sequence
  Description of Artificial Sequence: Synthetic oligonucleotide
uuagggaaugagcaagagu

SEQ ID NO: 2272863 - RNA, 19 nt, Artificial Sequence
  Description of Artificial Sequence: Synthetic oligonucleotide
uccaucacugugaaugcca

SEQ ID NO: 2272864 - RNA, 19 nt, Artificial Sequence
  Description of Artificial Sequence: Synthetic oligonucleotide
gaaagggcugaaaagccag

SEQ ID NO: 2272865 - RNA, 19 nt, Artificial Sequence
  Description of Artificial Sequence: Synthetic oligonucleotide
caaaacgcugcccaggcac

SEQ ID NO: 2272866 - RNA, 19 nt, Artificial Sequence
  Description of Artificial Sequence: Synthetic oligonucleotide
uuucuggcuggcgagacag

SEQ ID NO: 2272867 - RNA, 19 nt, Artificial Sequence
  Description of Artificial Sequence: Synthetic oligonucleotide
ugcucuugcagcccaaaac

SEQ ID NO: 2272868 - RNA, 19 nt, Artificial Sequence
  Description of Artificial Sequence: Synthetic oligonucleotide
uugaagauuuuagggaaug

SEQ ID NO: 2272869 - RNA, 19 nt, Artificial Sequence
  Description of Artificial Sequence: Synthetic oligonucleotide
gcucuugcagcccaaaacg

SEQ ID NO: 2272870 - RNA, 19 nt, Artificial Sequence
  Description of Artificial Sequence: Synthetic oligonucleotide
ugcgugaggaugucggcgg

SEQ ID NO: 2272871 - RNA, 19 nt, Artificial Sequence
  Description of Artificial Sequence: Synthetic oligonucleotide
guggcugggagucaggcag

SEQ ID NO: 2272872 - RNA, 19 nt, Artificial Sequence
  Description of Artificial Sequence: Synthetic oligonucleotide
ucgugacccgcuaugaaga

SEQ ID NO: 2272873 - RNA, 19 nt, Artificial Sequence
  Description of Artificial Sequence: Synthetic oligonucleotide
aagugguuggcagaagucu

SEQ ID NO: 2272874 - RNA, 19 nt, Artificial Sequence
  Description of Artificial Sequence: Synthetic oligonucleotide
ucuugcagcccaaaacgcu

SEQ ID NO: 2272875 - RNA, 19 nt, Artificial Sequence
  Description of Artificial Sequence: Synthetic oligonucleotide
aaccgacaaccucauccac

SEQ ID NO: 2272876 - RNA, 19 nt, Artificial Sequence
  Description of Artificial Sequence: Synthetic oligonucleotide
cugcagucuccccagaucc

SEQ ID NO: 2272877 - RNA, 19 nt, Artificial Sequence
  Description of Artificial Sequence: Synthetic oligonucleotide
caugggcaagcaaaugggg

SEQ ID NO: 2272878 - RNA, 19 nt, Artificial Sequence
  Description of Artificial Sequence: Synthetic oligonucleotide
uuugaagauuuuagggaau

SEQ ID NO: 2272879 - RNA, 19 nt, Artificial Sequence
  Description of Artificial Sequence: Synthetic oligonucleotide
cugggguagagccucagag

SEQ ID NO: 2272880 - RNA, 19 nt, Artificial Sequence
  Description of Artificial Sequence: Synthetic oligonucleotide
gggucgagcggcuugagcg

SEQ ID NO: 2272881 - RNA, 19 nt, Artificial Sequence
  Description of Artificial Sequence: Synthetic oligonucleotide
acugcagucuccccagauc

SEQ ID NO: 2272882 - RNA, 19 nt, Artificial Sequence
  Description of Artificial Sequence: Synthetic oligonucleotide
uuuagggaaugagcaagag

SEQ ID NO: 2272883 - RNA, 19 nt, Artificial Sequence
  Description of Artificial Sequence: Synthetic oligonucleotide
cucgugacccgcuaugaag

SEQ ID NO: 2272884 - RNA, 19 nt, Artificial Sequence
  Description of Artificial Sequence: Synthetic oligonucleotide
  modified_base (2)..(2): a, c, u, g, unknown or other
gngaaucugcgugaggaug

SEQ ID NO: 2272885 - RNA, 19 nt, Artificial Sequence
  Description of Artificial Sequence: Synthetic oligonucleotide
aagcggaugaggguacagg

SEQ ID NO: 2272886 - RNA, 19 nt, Artificial Sequence
  Description of Artificial Sequence: Synthetic oligonucleotide
  modified_base (11)..(11): a, c, u, g, unknown or other
cucggcuuugngaaucugc

SEQ ID NO: 2272887 - RNA, 19 nt, Artificial Sequence
  Description of Artificial Sequence: Synthetic oligonucleotide
gauuuuagggaaugagcaa

SEQ ID NO: 2272888 - RNA, 19 nt, Artificial Sequence
  Description of Artificial Sequence: Synthetic oligonucleotide
  modified_base (8)..(8): a, c, u, g, unknown or other
ggcuuugngaaucugcgug

SEQ ID NO: 2272889 - RNA, 19 nt, Artificial Sequence
  Description of Artificial Sequence: Synthetic oligonucleotide
gccaugggcaagcaaaugg

SEQ ID NO: 2272890 - RNA, 19 nt, Artificial Sequence
  Description of Artificial Sequence: Synthetic oligonucleotide
auccuuccccaccuggcgc

SEQ ID NO: 2272891 - RNA, 19 nt, Artificial Sequence
  Description of Artificial Sequence: Synthetic oligonucleotide
uccucauaguccaggugcc

SEQ ID NO: 2272892 - RNA, 19 nt, Artificial Sequence
  Description of Artificial Sequence: Synthetic oligonucleotide
uucaccuccaucuggggua

SEQ ID NO: 2272893 - RNA, 19 nt, Artificial Sequence
  Description of Artificial Sequence: Synthetic oligonucleotide
ggcagagcccaccagaaag

SEQ ID NO: 2272894 - RNA, 19 nt, Artificial Sequence
  Description of Artificial Sequence: Synthetic oligonucleotide
gaaccgacaaccucaucca

SEQ ID NO: 2272895 - RNA, 19 nt, Artificial Sequence
  Description of Artificial Sequence: Synthetic oligonucleotide
acgauuucuggcuggcgag

SEQ ID NO: 2272896 - RNA, 19 nt, Artificial Sequence
  Description of Artificial Sequence: Synthetic oligonucleotide
uggcgagacagcuccauca

SEQ ID NO: 2272897 - RNA, 19 nt, Artificial Sequence
  Description of Artificial Sequence: Synthetic oligonucleotide
aaugaggcccuggcagggc

SEQ ID NO: 2272898 - RNA, 19 nt, Artificial Sequence
  Description of Artificial Sequence: Synthetic oligonucleotide
uuuugagggguguggccag

SEQ ID NO: 2272899 - RNA, 19 nt, Artificial Sequence
  Description of Artificial Sequence: Synthetic oligonucleotide
uggccagugcagaaguuca

SEQ ID NO: 2272900 - RNA, 19 nt, Artificial Sequence
  Description of Artificial Sequence: Synthetic oligonucleotide
accgacaaccucauccacc

SEQ ID NO: 2272901 - RNA, 19 nt, Artificial Sequence
  Description of Artificial Sequence: Synthetic oligonucleotide
ugaagauuuuagggaauga

SEQ ID NO: 2272902 - RNA, 19 nt, Artificial Sequence
  Description of Artificial Sequence: Synthetic oligonucleotide
gugaggagggcuuccugcg

SEQ ID NO: 2272903 - RNA, 19 nt, Artificial Sequence
  Description of Artificial Sequence: Synthetic oligonucleotide
guagccugcucuugcagcc

SEQ ID NO: 2272904 - RNA, 19 nt, Artificial Sequence
  Description of Artificial Sequence: Synthetic oligonucleotide
ugaggagggcuuccugcgg

SEQ ID NO: 2272905 - RNA, 19 nt, Artificial Sequence
  Description of Artificial Sequence: Synthetic oligonucleotide
ucagagguucaggagagaa

SEQ ID NO: 2272906 - RNA, 19 nt, Artificial Sequence
  Description of Artificial Sequence: Synthetic oligonucleotide
uucaggagagaagguggcg

SEQ ID NO: 2272907 - RNA, 19 nt, Artificial Sequence
  Description of Artificial Sequence: Synthetic oligonucleotide
ugcucucucggaucucccg

SEQ ID NO: 2272908 - RNA, 19 nt, Artificial Sequence
  Description of Artificial Sequence: Synthetic oligonucleotide
aucugcgugaggaugucgg

SEQ ID NO: 2272909 - RNA, 19 nt, Artificial Sequence
  Description of Artificial Sequence: Synthetic oligonucleotide
ugggguagagccucagaga

SEQ ID NO: 2272910 - RNA, 19 nt, Artificial Sequence
  Description of Artificial Sequence: Synthetic oligonucleotide
aaucugcgugaggaugucg

SEQ ID NO: 2272911 - RNA, 19 nt, Artificial Sequence
  Description of Artificial Sequence: Synthetic oligonucleotide
guucagagguucaggagag

SEQ ID NO: 2272912 - RNA, 19 nt, Artificial Sequence
  Description of Artificial Sequence: Synthetic oligonucleotide
agugguuggcagaagucuc

SEQ ID NO: 2272913 - RNA, 19 nt, Artificial Sequence
  Description of Artificial Sequence: Synthetic oligonucleotide
agacucuuugaggaccugg

SEQ ID NO: 2272914 - RNA, 19 nt, Artificial Sequence
  Description of Artificial Sequence: Synthetic oligonucleotide
gaggaugucggcgggcacg

SEQ ID NO: 2272915 - RNA, 19 nt, Artificial Sequence
  Description of Artificial Sequence: Synthetic oligonucleotide
aagggcugaaaagccagca

SEQ ID NO: 2272916 - RNA, 19 nt, Artificial Sequence
  Description of Artificial Sequence: Synthetic oligonucleotide
ugcgggaugucacuuugaa

SEQ ID NO: 2272917 - RNA, 19 nt, Artificial Sequence
  Description of Artificial Sequence: Synthetic oligonucleotide
cacugaggguguugaagcg

SEQ ID NO: 2272918 - RNA, 19 nt, Artificial Sequence
  Description of Artificial Sequence: Synthetic oligonucleotide
uugcagcccaaaacgcugc

SEQ ID NO: 2272919 - RNA, 19 nt, Artificial Sequence
  Description of Artificial Sequence: Synthetic oligonucleotide
gaaaagccagcagaugaca

SEQ ID NO: 2272920 - RNA, 19 nt, Artificial Sequence
  Description of Artificial Sequence: Synthetic oligonucleotide
ucggaucucccgcaguuuc

SEQ ID NO: 2272921 - RNA, 19 nt, Artificial Sequence
  Description of Artificial Sequence: Synthetic oligonucleotide
  modified_base (6)..(6): a, c, u, g, unknown or other
cuuugngaaucugcgugag

SEQ ID NO: 2272922 - RNA, 19 nt, Artificial Sequence
  Description of Artificial Sequence: Synthetic oligonucleotide
caagugguuggcagaaguc

SEQ ID NO: 2272923 - RNA, 19 nt, Artificial Sequence
  Description of Artificial Sequence: Synthetic oligonucleotide
uugaagcggaugaggguac

SEQ ID NO: 2272924 - RNA, 19 nt, Artificial Sequence
  Description of Artificial Sequence: Synthetic oligonucleotide
agucucgugacccgcuaug

SEQ ID NO: 2272925 - RNA, 19 nt, Artificial Sequence
  Description of Artificial Sequence: Synthetic oligonucleotide
ugucacuuugaagauuuua

SEQ ID NO: 2272926 - RNA, 19 nt, Artificial Sequence
  Description of Artificial Sequence: Synthetic oligonucleotide
cccgcuaugaagaagguga

SEQ ID NO: 2272927 - RNA, 19 nt, Artificial Sequence
  Description of Artificial Sequence: Synthetic oligonucleotide
caagaguuuagggugucuc

SEQ ID NO: 2272928 - RNA, 19 nt, Artificial Sequence
  Description of Artificial Sequence: Synthetic oligonucleotide
  modified_base (3)..(3): a, c, u, g, unknown or other
ugngaaucugcgugaggau

SEQ ID NO: 2272929 - RNA, 19 nt, Artificial Sequence
  Description of Artificial Sequence: Synthetic oligonucleotide
ugccacgauuucuggcugg

SEQ ID NO: 2272930 - RNA, 19 nt, Artificial Sequence
  Description of Artificial Sequence: Synthetic oligonucleotide
ucugcgugaggaugucggc

SEQ ID NO: 2272931 - RNA, 19 nt, Artificial Sequence
  Description of Artificial Sequence: Synthetic oligonucleotide
cucaccccucuucagggcc

SEQ ID NO: 2272932 - RNA, 19 nt, Artificial Sequence
  Description of Artificial Sequence: Synthetic oligonucleotide
cuuagccaugaccaccuuc

SEQ ID NO: 2272933 - RNA, 19 nt, Artificial Sequence
  Description of Artificial Sequence: Synthetic oligonucleotide
cgggaugucacuuugaaga

SEQ ID NO: 2272934 - RNA, 19 nt, Artificial Sequence
  Description of Artificial Sequence: Synthetic oligonucleotide
uugccacgauuucuggcug

SEQ ID NO: 2272935 - RNA, 19 nt, Artificial Sequence
  Description of Artificial Sequence: Synthetic oligonucleotide
ugcagccuugccacgauuu

SEQ ID NO: 2272936 - RNA, 19 nt, Artificial Sequence
  Description of Artificial Sequence: Synthetic oligonucleotide
gcuaugaagaaggugacaa

SEQ ID NO: 2272937 - RNA, 19 nt, Artificial Sequence
  Description of Artificial Sequence: Synthetic oligonucleotide
ucucggaucucccgcaguu

SEQ ID NO: 2272938 - RNA, 19 nt, Artificial Sequence
  Description of Artificial Sequence: Synthetic oligonucleotide
guugaagcggaugagggua

SEQ ID NO: 2272939 - RNA, 19 nt, Artificial Sequence
  Description of Artificial Sequence: Synthetic oligonucleotide
aguuuagggugucucuuuu

SEQ ID NO: 2272940 - RNA, 19 nt, Artificial Sequence
  Description of Artificial Sequence: Synthetic oligonucleotide
cuugccacgauuucuggcu

SEQ ID NO: 2272941 - RNA, 19 nt, Artificial Sequence
  Description of Artificial Sequence: Synthetic oligonucleotide
gagcguagccugcucuugc

SEQ ID NO: 2272942 - RNA, 19 nt, Artificial Sequence
  Description of Artificial Sequence: Synthetic oligonucleotide
ggaaugagcaagaguuuag

SEQ ID NO: 2272943 - RNA, 19 nt, Artificial Sequence
  Description of Artificial Sequence: Synthetic oligonucleotide
ccagcagaugacaggaagc

SEQ ID NO: 2272944 - RNA, 19 nt, Artificial Sequence
  Description of Artificial Sequence: Synthetic oligonucleotide
ugcacccaauccuucccca

SEQ ID NO: 2272945 - RNA, 19 nt, Artificial Sequence
  Description of Artificial Sequence: Synthetic oligonucleotide
caggcggaugcucucucgg

SEQ ID NO: 2272946 - RNA, 19 nt, Artificial Sequence
  Description of Artificial Sequence: Synthetic oligonucleotide
cacgauuucuggcuggcga

SEQ ID NO: 2272947 - RNA, 19 nt, Artificial Sequence
  Description of Artificial Sequence: Synthetic oligonucleotide
cacccaauccuuccccacc

SEQ ID NO: 2272948 - RNA, 19 nt, Artificial Sequence
  Description of Artificial Sequence: Synthetic oligonucleotide
ucucgugacccgcuaugaa

SEQ ID NO: 2272949 - RNA, 19 nt, Artificial Sequence
  Description of Artificial Sequence: Synthetic oligonucleotide
ucucccgcaguuucuuccu

SEQ ID NO: 2272950 - RNA, 19 nt, Artificial Sequence
  Description of Artificial Sequence: Synthetic oligonucleotide
acccaauccuuccccaccu

SEQ ID NO: 2272951 - RNA, 19 nt, Artificial Sequence
  Description of Artificial Sequence: Synthetic oligonucleotide
uuggaaccgacaaccucau

SEQ ID NO: 2272952 - RNA, 19 nt, Artificial Sequence
  Description of Artificial Sequence: Synthetic oligonucleotide
cugcgugaggaugucggcg

SEQ ID NO: 2272953 - RNA, 19 nt, Artificial Sequence
  Description of Artificial Sequence: Synthetic oligonucleotide
agucaggcagagcccacca

SEQ ID NO: 2272954 - RNA, 19 nt, Artificial Sequence
  Description of Artificial Sequence: Synthetic oligonucleotide
  modified_base (7)..(7): a, c, u, g, unknown or other
gcuuugngaaucugcguga

SEQ ID NO: 2272955 - RNA, 19 nt, Artificial Sequence
  Description of Artificial Sequence: Synthetic oligonucleotide
aagucucgugacccgcuau

SEQ ID NO: 2272956 - RNA, 19 nt, Artificial Sequence
  Description of Artificial Sequence: Synthetic oligonucleotide
  modified_base (17)..(17): a, c, u, g, unknown or other
ucccuccucggcuuugnga

SEQ ID NO: 2272957 - RNA, 19 nt, Artificial Sequence
  Description of Artificial Sequence: Synthetic oligonucleotide
gaagcggaugaggguacag

SEQ ID NO: 2272958 - RNA, 19 nt, Artificial Sequence
  Description of Artificial Sequence: Synthetic oligonucleotide
ggucaggggugccaguggg

SEQ ID NO: 2272959 - RNA, 19 nt, Artificial Sequence
  Description of Artificial Sequence: Synthetic oligonucleotide
  modified_base (13)..(13): a, c, u, g, unknown or other
uccucggcuuugngaaucu

SEQ ID NO: 2272960 - RNA, 19 nt, Artificial Sequence
  Description of Artificial Sequence: Synthetic oligonucleotide
agcggcuugagcguagccu

SEQ ID NO: 2272961 - RNA, 19 nt, Artificial Sequence
  Description of Artificial Sequence: Synthetic oligonucleotide
augccaagugguuggcaga

SEQ ID NO: 2272962 - RNA, 19 nt, Artificial Sequence
  Description of Artificial Sequence: Synthetic oligonucleotide
agaguuuagggugucucuu

SEQ ID NO: 2272963 - RNA, 19 nt, Artificial Sequence
  Description of Artificial Sequence: Synthetic oligonucleotide
ggagcaggcugccagcccc

SEQ ID NO: 2272964 - RNA, 19 nt, Artificial Sequence
  Description of Artificial Sequence: Synthetic oligonucleotide
caccagccggaacucaagc

SEQ ID NO: 2272965 - RNA, 19 nt, Artificial Sequence
  Description of Artificial Sequence: Synthetic oligonucleotide
cugcacccaauccuucccc

SEQ ID NO: 2272966 - RNA, 19 nt, Artificial Sequence
  Description of Artificial Sequence: Synthetic oligonucleotide
agcaggcggaugcucucuc

SEQ ID NO: 2272967 - RNA, 19 nt, Artificial Sequence
  Description of Artificial Sequence: Synthetic oligonucleotide
ugagcguagccugcucuug

SEQ ID NO: 2272968 - RNA, 19 nt, Artificial Sequence
  Description of Artificial Sequence: Synthetic oligonucleotide
guggccaugggcaagcaaa

SEQ ID NO: 2272969 - RNA, 19 nt, Artificial Sequence
  Description of Artificial Sequence: Synthetic oligonucleotide
uggccaugggcaagcaaau

SEQ ID NO: 2272970 - RNA, 19 nt, Artificial Sequence
  Description of Artificial Sequence: Synthetic oligonucleotide
ccaucauggaagguggcgg

SEQ ID NO: 2272971 - RNA, 19 nt, Artificial Sequence
  Description of Artificial Sequence: Synthetic oligonucleotide
ucaccuccaucugggguag

SEQ ID NO: 2272972 - RNA, 19 nt, Artificial Sequence
  Description of Artificial Sequence: Synthetic oligonucleotide
gaagcagcuuagccaugac

SEQ ID NO: 2272973 - RNA, 19 nt, Artificial Sequence
  Description of Artificial Sequence: Synthetic oligonucleotide
acagcacggggucgagcgg

SEQ ID NO: 2272974 - RNA, 19 nt, Artificial Sequence
  Description of Artificial Sequence: Synthetic oligonucleotide
gcagaagucucgugacccg

SEQ ID NO: 2272975 - RNA, 19 nt, Artificial Sequence
  Description of Artificial Sequence: Synthetic oligonucleotide
ucccgcaguuucuuccucu

SEQ ID NO: 2272976 - RNA, 19 nt, Artificial Sequence
  Description of Artificial Sequence: Synthetic oligonucleotide
  modified_base (14)..(14): a, c, u, g, unknown or other
cuccucggcuuugngaauc

SEQ ID NO: 2272977 - RNA, 19 nt, Artificial Sequence
  Description of Artificial Sequence: Synthetic oligonucleotide
caucauggaagguggcgga

SEQ ID NO: 2272978 - RNA, 19 nt, Artificial Sequence
  Description of Artificial Sequence: Synthetic oligonucleotide
ugccaagugguuggcagaa

SEQ ID NO: 2272979 - RNA, 19 nt, Artificial Sequence
  Description of Artificial Sequence: Synthetic oligonucleotide
ccgccaggagccaucaugg

SEQ ID NO: 2272980 - RNA, 19 nt, Artificial Sequence
  Description of Artificial Sequence: Synthetic oligonucleotide
agccuugccacgauuucug

SEQ ID NO: 2272981 - RNA, 19 nt, Artificial Sequence
  Description of Artificial Sequence: Synthetic oligonucleotide
ugaggguacagggcccgcc

SEQ ID NO: 2272982 - RNA, 19 nt, Artificial Sequence
  Description of Artificial Sequence: Synthetic oligonucleotide
uugagcguagccugcucuu

SEQ ID NO: 2272983 - RNA, 19 nt, Artificial Sequence
  Description of Artificial Sequence: Synthetic oligonucleotide
cauggaagguggcggaaga

SEQ ID NO: 2272984 - RNA, 19 nt, Artificial Sequence
  Description of Artificial Sequence: Synthetic oligonucleotide
cagcccaaaacgcugccca

SEQ ID NO: 2272985 - RNA, 19 nt, Artificial Sequence
  Description of Artificial Sequence: Synthetic oligonucleotide
ucgagcggcuugagcguag

SEQ ID NO: 2272986 - RNA, 19 nt, Artificial Sequence
  Description of Artificial Sequence: Synthetic oligonucleotide
caccuggcgcagcaggcgg

SEQ ID NO: 2272987 - RNA, 19 nt, Artificial Sequence
  Description of Artificial Sequence: Synthetic oligonucleotide
agcguagccugcucuugca

SEQ ID NO: 2272988 - RNA, 19 nt, Artificial Sequence
  Description of Artificial Sequence: Synthetic oligonucleotide
caaaguuguccagcaggac

SEQ ID NO: 2272989 - RNA, 19 nt, Artificial Sequence
  Description of Artificial Sequence: Synthetic oligonucleotide
cuccaucacugugaaugcc

SEQ ID NO: 2272990 - RNA, 19 nt, Artificial Sequence
  Description of Artificial Sequence: Synthetic oligonucleotide
aaacgcugcccaggcacca

SEQ ID NO: 2272991 - RNA, 19 nt, Artificial Sequence
  Description of Artificial Sequence: Synthetic oligonucleotide
gcggcuugagcguagccug

SEQ ID NO: 2272992 - RNA, 19 nt, Artificial Sequence
  Description of Artificial Sequence: Synthetic oligonucleotide
gccaucauggaagguggcg

SEQ ID NO: 2272993 - RNA, 19 nt, Artificial Sequence
  Description of Artificial Sequence: Synthetic oligonucleotide
aguggguggccaugggcaa

SEQ ID NO: 2272994 - RNA, 19 nt, Artificial Sequence
  Description of Artificial Sequence: Synthetic oligonucleotide
uggcggaagaaggggucag

SEQ ID NO: 2272995 - RNA, 19 nt, Artificial Sequence
  Description of Artificial Sequence: Synthetic oligonucleotide
ugaagcggaugaggguaca

SEQ ID NO: 2272996 - RNA, 19 nt, Artificial Sequence
  Description of Artificial Sequence: Synthetic oligonucleotide
gugacccgcuaugaagaag

SEQ ID NO: 2272997 - RNA, 19 nt, Artificial Sequence
  Description of Artificial Sequence: Synthetic oligonucleotide
cacguccucaccccucuuc

SEQ ID NO: 2272998 - RNA, 19 nt, Artificial Sequence
  Description of Artificial Sequence: Synthetic oligonucleotide
gguguggccagugcagaag

SEQ ID NO: 2272999 - RNA, 19 nt, Artificial Sequence
  Description of Artificial Sequence: Synthetic oligonucleotide
aggagggacccuggccgcc

SEQ ID NO: 2273000 - RNA, 19 nt, Artificial Sequence
  Description of Artificial Sequence: Synthetic oligonucleotide
acccgcuaugaagaaggug

SEQ ID NO: 2273001 - RNA, 19 nt, Artificial Sequence
  Description of Artificial Sequence: Synthetic oligonucleotide
aggcggaugcucucucgga

SEQ ID NO: 2273002 - RNA, 19 nt, Artificial Sequence
  Description of Artificial Sequence: Synthetic oligonucleotide
aggagagaagguggcggug

SEQ ID NO: 2273003 - RNA, 19 nt, Artificial Sequence
  Description of Artificial Sequence: Synthetic oligonucleotide
uguggccagugcagaaguu

SEQ ID NO: 2273004 - RNA, 19 nt, Artificial Sequence
  Description of Artificial Sequence: Synthetic oligonucleotide
agaagucucgugacccgcu

SEQ ID NO: 2273005 - RNA, 19 nt, Artificial Sequence
  Description of Artificial Sequence: Synthetic oligonucleotide
cagcacggggucgagcggc

SEQ ID NO: 2273006 - RNA, 19 nt, Artificial Sequence
  Description of Artificial Sequence: Synthetic oligonucleotide
gcgggaugucacuuugaag

SEQ ID NO: 2273007 - RNA, 19 nt, Artificial Sequence
  Description of Artificial Sequence: Synthetic oligonucleotide
agccucugaagcagcuuag

SEQ ID NO: 2273008 - RNA, 19 nt, Artificial Sequence
  Description of Artificial Sequence: Synthetic oligonucleotide
ggguacagggcccgccagg

SEQ ID NO: 2273009 - RNA, 19 nt, Artificial Sequence
  Description of Artificial Sequence: Synthetic oligonucleotide
ggcgagacagcuccaucac

SEQ ID NO: 2273010 - RNA, 19 nt, Artificial Sequence
  Description of Artificial Sequence: Synthetic oligonucleotide
gaaucugcgugaggauguc

SEQ ID NO: 2273011 - RNA, 19 nt, Artificial Sequence
  Description of Artificial Sequence: Synthetic oligonucleotide
gaagucucgugacccgcua

SEQ ID NO: 2273012 - RNA, 19 nt, Artificial Sequence
  Description of Artificial Sequence: Synthetic oligonucleotide
ucucggcgacgcugcaccc

SEQ ID NO: 2273013 - RNA, 19 nt, Artificial Sequence
  Description of Artificial Sequence: Synthetic oligonucleotide
agucuccccagauccucau

SEQ ID NO: 2273014 - RNA, 19 nt, Artificial Sequence
  Description of Artificial Sequence: Synthetic oligonucleotide
cuugagcguagccugcucu

SEQ ID NO: 2273015 - RNA, 19 nt, Artificial Sequence
  Description of Artificial Sequence: Synthetic oligonucleotide
gagcggcuugagcguagcc

SEQ ID NO: 2273016 - RNA, 19 nt, Artificial Sequence
  Description of Artificial Sequence: Synthetic oligonucleotide
aggagggcuuccugcggga

SEQ ID NO: 2273017 - RNA, 19 nt, Artificial Sequence
  Description of Artificial Sequence: Synthetic oligonucleotide
gaguuuagggugucucuuu

SEQ ID NO: 2273018 - RNA, 19 nt, Artificial Sequence
  Description of Artificial Sequence: Synthetic oligonucleotide
caaccucauccaccucggc

SEQ ID NO: 2273019 - RNA, 19 nt, Artificial Sequence
  Description of Artificial Sequence: Synthetic oligonucleotide
cacggggucgagcggcuug

SEQ ID NO: 2273020 - RNA, 19 nt, Artificial Sequence
  Description of Artificial Sequence: Synthetic oligonucleotide
gcagcuuagccaugaccac

SEQ ID NO: 2273021 - RNA, 19 nt, Artificial Sequence
  Description of Artificial Sequence: Synthetic oligonucleotide
cguagccugcucuugcagc

SEQ ID NO: 2273022 - RNA, 19 nt, Artificial Sequence
  Description of Artificial Sequence: Synthetic oligonucleotide
cuggcgagacagcuccauc

SEQ ID NO: 2273023 - RNA, 19 nt, Artificial Sequence
  Description of Artificial Sequence: Synthetic oligonucleotide
gccuugccacgauuucugg

SEQ ID NO: 2273024 - RNA, 19 nt, Artificial Sequence
  Description of Artificial Sequence: Synthetic oligonucleotide
agguggcggaagaaggggu

SEQ ID NO: 2273025 - RNA, 19 nt, Artificial Sequence
  Description of Artificial Sequence: Synthetic oligonucleotide
ugcacagcacggggucgag

SEQ ID NO: 2273026 - RNA, 19 nt, Artificial Sequence
  Description of Artificial Sequence: Synthetic oligonucleotide
ugggcucccuccucggcuu

SEQ ID NO: 2273027 - RNA, 19 nt, Artificial Sequence
  Description of Artificial Sequence: Synthetic oligonucleotide
gcgacgcugcacccaaucc

SEQ ID NO: 2273028 - RNA, 19 nt, Artificial Sequence
  Description of Artificial Sequence: Synthetic oligonucleotide
agggaaugagcaagaguuu

SEQ ID NO: 2273029 - RNA, 19 nt, Artificial Sequence
  Description of Artificial Sequence: Synthetic oligonucleotide
ugggagugaggagggcuuc

SEQ ID NO: 2273030 - RNA, 19 nt, Artificial Sequence
  Description of Artificial Sequence: Synthetic oligonucleotide
auggaagguggcggaagaa

SEQ ID NO: 2273031 - RNA, 19 nt, Artificial Sequence
  Description of Artificial Sequence: Synthetic oligonucleotide
gucucgugacccgcuauga

SEQ ID NO: 2273032 - RNA, 19 nt, Artificial Sequence
  Description of Artificial Sequence: Synthetic oligonucleotide
aggcagagcccaccagaaa

SEQ ID NO: 2273033 - RNA, 19 nt, Artificial Sequence
  Description of Artificial Sequence: Synthetic oligonucleotide
ccugcgggaugucacuuug

SEQ ID NO: 2273034 - RNA, 19 nt, Artificial Sequence
  Description of Artificial Sequence: Synthetic oligonucleotide
gcguagccugcucuugcag

SEQ ID NO: 2273035 - RNA, 19 nt, Artificial Sequence
  Description of Artificial Sequence: Synthetic oligonucleotide
ccgcuaugaagaaggugac

SEQ ID NO: 2273036 - RNA, 19 nt, Artificial Sequence
  Description of Artificial Sequence: Synthetic oligonucleotide
gcggaugaggguacagggc

SEQ ID NO: 2273037 - RNA, 19 nt, Artificial Sequence
  Description of Artificial Sequence: Synthetic oligonucleotide
uccucuucccuggcaugaa

SEQ ID NO: 2273038 - RNA, 19 nt, Artificial Sequence
  Description of Artificial Sequence: Synthetic oligonucleotide
ggcgacgcugcacccaauc

SEQ ID NO: 2273039 - RNA, 19 nt, Artificial Sequence
  Description of Artificial Sequence: Synthetic oligonucleotide
caggugccucuuggaaccg

SEQ ID NO: 2273040 - RNA, 19 nt, Artificial Sequence
  Description of Artificial Sequence: Synthetic oligonucleotide
gguacagggcccgccagga

SEQ ID NO: 2273041 - RNA, 19 nt, Artificial Sequence
  Description of Artificial Sequence: Synthetic oligonucleotide
caggagagaagguggcggu

SEQ ID NO: 2273042 - RNA, 19 nt, Artificial Sequence
  Description of Artificial Sequence: Synthetic oligonucleotide
cucuuggaaccgacaaccu

SEQ ID NO: 2273043 - RNA, 19 nt, Artificial Sequence
  Description of Artificial Sequence: Synthetic oligonucleotide
gcgugaggaugucggcggg

SEQ ID NO: 2273044 - RNA, 19 nt, Artificial Sequence
  Description of Artificial Sequence: Synthetic oligonucleotide
gguggcggaagaagggguc

SEQ ID NO: 2273045 - RNA, 19 nt, Artificial Sequence
  Description of Artificial Sequence: Synthetic oligonucleotide
gacgcugcacccaauccuu

SEQ ID NO: 2273046 - RNA, 19 nt, Artificial Sequence
  Description of Artificial Sequence: Synthetic oligonucleotide
gcggaugcucucucggauc

SEQ ID NO: 2273047 - RNA, 19 nt, Artificial Sequence
  Description of Artificial Sequence: Synthetic oligonucleotide
cagggccucucggcgacgc

SEQ ID NO: 2273048 - RNA, 19 nt, Artificial Sequence
  Description of Artificial Sequence: Synthetic oligonucleotide
gcagccuugccacgauuuc

SEQ ID NO: 2273049 - RNA, 19 nt, Artificial Sequence
  Description of Artificial Sequence: Synthetic oligonucleotide
cuuccugcgggaugucacu

SEQ ID NO: 2273050 - RNA, 19 nt, Artificial Sequence
  Description of Artificial Sequence: Synthetic oligonucleotide
gccgccgugggagugagga

SEQ ID NO: 2273051 - RNA, 19 nt, Artificial Sequence
  Description of Artificial Sequence: Synthetic oligonucleotide
agcaggcugccagccccgg

SEQ ID NO: 2273052 - RNA, 19 nt, Artificial Sequence
  Description of Artificial Sequence: Synthetic oligonucleotide
gcacccaauccuuccccac

SEQ ID NO: 2273053 - RNA, 19 nt, Artificial Sequence
  Description of Artificial Sequence: Synthetic oligonucleotide
ggggucgagcggcuugagc

SEQ ID NO: 2273054 - RNA, 19 nt, Artificial Sequence
  Description of Artificial Sequence: Synthetic oligonucleotide
gagguucaggagagaaggu

SEQ ID NO: 2273055 - RNA, 19 nt, Artificial Sequence
  Description of Artificial Sequence: Synthetic oligonucleotide
cgccgugggagugaggagg

SEQ ID NO: 2273056 - RNA, 19 nt, Artificial Sequence
  Description of Artificial Sequence: Synthetic oligonucleotide
cugcgggaugucacuuuga

SEQ ID NO: 2273057 - RNA, 19 nt, Artificial Sequence
  Description of Artificial Sequence: Synthetic oligonucleotide
acggggucgagcggcuuga

SEQ ID NO: 2273058 - RNA, 19 nt, Artificial Sequence
  Description of Artificial Sequence: Synthetic oligonucleotide
cucccgcaguuucuuccuc

SEQ ID NO: 2273059 - RNA, 19 nt, Artificial Sequence
  Description of Artificial Sequence: Synthetic oligonucleotide
gacccuggccgccguggga

SEQ ID NO: 2273060 - RNA, 19 nt, Artificial Sequence
  Description of Artificial Sequence: Synthetic oligonucleotide
ggagggacccuggccgccg

SEQ ID NO: 2273061 - RNA, 19 nt, Artificial Sequence
  Description of Artificial Sequence: Synthetic oligonucleotide
ggccagugcagaaguucag

SEQ ID NO: 2273062 - RNA, 19 nt, Artificial Sequence
  Description of Artificial Sequence: Synthetic oligonucleotide
cugugaaugccaagugguu

SEQ ID NO: 2273063 - RNA, 19 nt, Artificial Sequence
  Description of Artificial Sequence: Synthetic oligonucleotide
gccacgauuucuggcuggc

SEQ ID NO: 2273064 - RNA, 19 nt, Artificial Sequence
  Description of Artificial Sequence: Synthetic oligonucleotide
cucggccugcagccuugcc

SEQ ID NO: 2273065 - RNA, 19 nt, Artificial Sequence
  Description of Artificial Sequence: Synthetic oligonucleotide
uggccgccgugggagugag

SEQ ID NO: 2273066 - RNA, 19 nt, Artificial Sequence
  Description of Artificial Sequence: Synthetic oligonucleotide
gcgggcacguccucacccc

SEQ ID NO: 2273067 - RNA, 19 nt, Artificial Sequence
  Description of Artificial Sequence: Synthetic oligonucleotide
ccgacaaccucauccaccu

SEQ ID NO: 2273068 - RNA, 19 nt, Artificial Sequence
  Description of Artificial Sequence: Synthetic oligonucleotide
ccucaccccucuucagggc

SEQ ID NO: 2273069 - RNA, 19 nt, Artificial Sequence
  Description of Artificial Sequence: Synthetic oligonucleotide
ccaggcaccagccggaacu

SEQ ID NO: 2273070 - RNA, 19 nt, Artificial Sequence
  Description of Artificial Sequence: Synthetic oligonucleotide
gcaccagccggaacucaag

SEQ ID NO: 2273071 - RNA, 19 nt, Artificial Sequence
  Description of Artificial Sequence: Synthetic oligonucleotide
cuggucguccugggcuccc

SEQ ID NO: 2273072 - RNA, 19 nt, Artificial Sequence
  Description of Artificial Sequence: Synthetic oligonucleotide
gccccggggccucagggug

SEQ ID NO: 2273073 - RNA, 19 nt, Artificial Sequence
  Description of Artificial Sequence: Synthetic oligonucleotide
ggccaugggcaagcaaaug

SEQ ID NO: 2273074 - RNA, 19 nt, Artificial Sequence
  Description of Artificial Sequence: Synthetic oligonucleotide
cgcugcacccaauccuucc

SEQ ID NO: 2273075 - RNA, 19 nt, Artificial Sequence
  Description of Artificial Sequence: Synthetic oligonucleotide
aggugccucuuggaaccga

SEQ ID NO: 2273076 - RNA, 19 nt, Artificial Sequence
  Description of Artificial Sequence: Synthetic oligonucleotide
ccaccuggcgcagcaggcg

SEQ ID NO: 2273077 - RNA, 19 nt, Artificial Sequence
  Description of Artificial Sequence: Synthetic oligonucleotide
gcaggcugccagccccggg

SEQ ID NO: 2273078 - RNA, 19 nt, Artificial Sequence
  Description of Artificial Sequence: Synthetic oligonucleotide
gcuugagcguagccugcuc

SEQ ID NO: 2273079 - RNA, 19 nt, Artificial Sequence
  Description of Artificial Sequence: Synthetic oligonucleotide
gugccucuuggaaccgaca

SEQ ID NO: 2273080 - RNA, 19 nt, Artificial Sequence
  Description of Artificial Sequence: Synthetic oligonucleotide
gccaagugguuggcagaag

SEQ ID NO: 2273081 - RNA, 19 nt, Artificial Sequence
  Description of Artificial Sequence: Synthetic oligonucleotide
gucggcgggcacguccuca

SEQ ID NO: 2273082 - RNA, 19 nt, Artificial Sequence
  Description of Artificial Sequence: Synthetic oligonucleotide
ggucgagcggcuugagcgu

SEQ ID NO: 2273083 - RNA, 19 nt, Artificial Sequence
  Description of Artificial Sequence: Synthetic oligonucleotide
gucuccccagauccucaua

SEQ ID NO: 2273084 - RNA, 19 nt, Artificial Sequence
  Description of Artificial Sequence: Synthetic oligonucleotide
accuggcgcagcaggcgga

SEQ ID NO: 2273085 - RNA, 19 nt, Artificial Sequence
  Description of Artificial Sequence: Synthetic oligonucleotide
ggcggaugcucucucggau

SEQ ID NO: 2273086 - RNA, 19 nt, Artificial Sequence
  Description of Artificial Sequence: Synthetic oligonucleotide
gacccgcuaugaagaaggu

SEQ ID NO: 2273087 - RNA, 19 nt, Artificial Sequence
  Description of Artificial Sequence: Synthetic oligonucleotide
ggagucaggcagagcccac

SEQ ID NO: 2273088 - RNA, 19 nt, Artificial Sequence
  Description of Artificial Sequence: Synthetic oligonucleotide
gucgagcggcuugagcgua

SEQ ID NO: 2273089 - RNA, 19 nt, Artificial Sequence
  Description of Artificial Sequence: Synthetic oligonucleotide
ccaaaacgcugcccaggca

SEQ ID NO: 2273090 - RNA, 19 nt, Artificial Sequence
  Description of Artificial Sequence: Synthetic oligonucleotide
ccggaacucaagccucuga

SEQ ID NO: 2273091 - RNA, 19 nt, Artificial Sequence
  Description of Artificial Sequence: Synthetic oligonucleotide
ggucguccugggcucccuc

SEQ ID NO: 2273092 - RNA, 19 nt, Artificial Sequence
  Description of Artificial Sequence: Synthetic oligonucleotide
caccccucuucagggccuc

SEQ ID NO: 2273093 - RNA, 19 nt, Artificial Sequence
  Description of Artificial Sequence: Synthetic oligonucleotide
ggaugucacuuugaagauu

SEQ ID NO: 2273094 - RNA, 19 nt, Artificial Sequence
  Description of Artificial Sequence: Synthetic oligonucleotide
cgugaggaugucggcgggc

SEQ ID NO: 2273095 - RNA, 19 nt, Artificial Sequence
  Description of Artificial Sequence: Synthetic oligonucleotide
ggagugaggagggcuuccu

SEQ ID NO: 2273096 - RNA, 19 nt, Artificial Sequence
  Description of Artificial Sequence: Synthetic oligonucleotide
gcaagaguuuagggugucu

SEQ ID NO: 2273097 - RNA, 19 nt, Artificial Sequence
  Description of Artificial Sequence: Synthetic oligonucleotide
agggcccgccaggagccau

SEQ ID NO: 2273098 - RNA, 19 nt, Artificial Sequence
  Description of Artificial Sequence: Synthetic oligonucleotide
ccgccgugggagugaggag

SEQ ID NO: 2273099 - RNA, 19 nt, Artificial Sequence
  Description of Artificial Sequence: Synthetic oligonucleotide
ccucucggcgacgcugcac

SEQ ID NO: 2273100 - RNA, 19 nt, Artificial Sequence
  Description of Artificial Sequence: Synthetic oligonucleotide
cgacgcugcacccaauccu

SEQ ID NO: 2273101 - RNA, 19 nt, Artificial Sequence
  Description of Artificial Sequence: Synthetic oligonucleotide
ggcuugagcguagccugcu

SEQ ID NO: 2273102 - RNA, 19 nt, Artificial Sequence
  Description of Artificial Sequence: Synthetic oligonucleotide
cgcuaugaagaaggugaca

SEQ ID NO: 2273103 - RNA, 19 nt, Artificial Sequence
  Description of Artificial Sequence: Synthetic oligonucleotide
gcccaccagaaagggcuga

SEQ ID NO: 2273104 - RNA, 19 nt, Artificial Sequence
  Description of Artificial Sequence: Synthetic oligonucleotide
cgagcggcuugagcguagc

SEQ ID NO: 2273105 - RNA, 19 nt, Artificial Sequence
  Description of Artificial Sequence: Synthetic oligonucleotide
cgugacccgcuaugaagaa

SEQ ID NO: 2273106 - RNA, 19 nt, Artificial Sequence
  Description of Artificial Sequence: Synthetic oligonucleotide
ccaccagaaagggcugaaa

SEQ ID NO: 2273107 - RNA, 19 nt, Artificial Sequence
  Description of Artificial Sequence: Synthetic oligonucleotide
ggcccgccaggagccauca

SEQ ID NO: 2273108 - RNA, 19 nt, Artificial Sequence
  Description of Artificial Sequence: Synthetic oligonucleotide
cucggaucucccgcaguuu

SEQ ID NO: 2273109 - RNA, 19 nt, Artificial Sequence
  Description of Artificial Sequence: Synthetic oligonucleotide
gcuggcgagacagcuccau

SEQ ID NO: 2273110 - RNA, 19 nt, Artificial Sequence
  Description of Artificial Sequence: Synthetic oligonucleotide
ccgugggagugaggagggc

SEQ ID NO: 2273111 - RNA, 19 nt, Artificial Sequence
  Description of Artificial Sequence: Synthetic oligonucleotide
cccaccagaaagggcugaa

SEQ ID NO: 2273112 - RNA, 19 nt, Artificial Sequence
  Description of Artificial Sequence: Synthetic oligonucleotide
cugcagccuugccacgauu

SEQ ID NO: 2273113 - RNA, 19 nt, Artificial Sequence
  Description of Artificial Sequence: Synthetic oligonucleotide
  modified_base (9)..(9): a, c, u, g, unknown or other
cggcuuugngaaucugcgu

SEQ ID NO: 2273114 - RNA, 19 nt, Artificial Sequence
  Description of Artificial Sequence: Synthetic oligonucleotide
cgacaaccucauccaccuc

SEQ ID NO: 2273115 - RNA, 19 nt, Artificial Sequence
  Description of Artificial Sequence: Synthetic oligonucleotide
cagcuccaucacugugaau

SEQ ID NO: 2273116 - RNA, 19 nt, Artificial Sequence
  Description of Artificial Sequence: Synthetic oligonucleotide
ggccgccgugggagugagg

SEQ ID NO: 2273117 - RNA, 19 nt, Artificial Sequence
  Description of Artificial Sequence: Synthetic oligonucleotide
cagggcccgccaggagcca

SEQ ID NO: 2273118 - RNA, 19 nt, Artificial Sequence
  Description of Artificial Sequence: Synthetic oligonucleotide
cccgcaguuucuuccucuu

SEQ ID NO: 2273119 - RNA, 19 nt, Artificial Sequence
  Description of Artificial Sequence: Synthetic oligonucleotide
caccuccaucugggguaga

SEQ ID NO: 2273120 - RNA, 19 nt, Artificial Sequence
  Description of Artificial Sequence: Synthetic oligonucleotide
gcuuagccaugaccaccuu

SEQ ID NO: 2273121 - RNA, 19 nt, Artificial Sequence
  Description of Artificial Sequence: Synthetic oligonucleotide
cccggggccucagggugca

SEQ ID NO: 2273122 - RNA, 19 nt, Artificial Sequence
  Description of Artificial Sequence: Synthetic oligonucleotide
gggcucccuccucggcuuu

SEQ ID NO: 2273123 - RNA, 19 nt, Artificial Sequence
  Description of Artificial Sequence: Synthetic oligonucleotide
ccggggccucagggugcac

SEQ ID NO: 2273124 - RNA, 19 nt, Artificial Sequence
  Description of Artificial Sequence: Synthetic oligonucleotide
gcccgccaggagccaucau

SEQ ID NO: 2273125 - RNA, 19 nt, Artificial Sequence
  Description of Artificial Sequence: Synthetic oligonucleotide
cggcgacgcugcacccaau

SEQ ID NO: 2273126 - RNA, 19 nt, Artificial Sequence
  Description of Artificial Sequence: Synthetic oligonucleotide
  modified_base (1)..(1): a, c, u, g, unknown or other
ngaaucugcgugaggaugu

SEQ ID NO: 2273127 - RNA, 19 nt, Artificial Sequence
  Description of Artificial Sequence: Synthetic oligonucleotide
aauauguagaccuuggaca

SEQ ID NO: 2273128 - RNA, 19 nt, Artificial Sequence
  Description of Artificial Sequence: Synthetic oligonucleotide
aauauccaugcauacaugg

SEQ ID NO: 2273129 - RNA, 19 nt, Artificial Sequence
  Description of Artificial Sequence: Synthetic oligonucleotide
aagguauagaggaugaggc

SEQ ID NO: 2273130 - RNA, 19 nt, Artificial Sequence
  Description of Artificial Sequence: Synthetic oligonucleotide
agacacacaauauccaugc

SEQ ID NO: 2273131 - RNA, 19 nt, Artificial Sequence
  Description of Artificial Sequence: Synthetic oligonucleotide
agaucaagaauauguagac

SEQ ID NO: 2273132 - RNA, 19 nt, Artificial Sequence
  Description of Artificial Sequence: Synthetic oligonucleotide
aucaagaauauguagaccu

SEQ ID NO: 2273133 - RNA, 19 nt, Artificial Sequence
  Description of Artificial Sequence: Synthetic oligonucleotide
augauuacagugaagacac

SEQ ID NO: 2273134 - RNA, 19 nt, Artificial Sequence
  Description of Artificial Sequence: Synthetic oligonucleotide
  modified_base (12)..(12): a, c, u, g, unknown or other
aaaguggauccncuucucc

SEQ ID NO: 2273135 - RNA, 19 nt, Artificial Sequence
  Description of Artificial Sequence: Synthetic oligonucleotide
auauguagaccuuggacac

SEQ ID NO: 2273136 - RNA, 19 nt, Artificial Sequence
  Description of Artificial Sequence: Synthetic oligonucleotide
gaauccgaggcacauaggg

SEQ ID NO: 2273137 - RNA, 19 nt, Artificial Sequence
  Description of Artificial Sequence: Synthetic oligonucleotide
gaagaucaagaauauguag

SEQ ID NO: 2273138 - RNA, 19 nt, Artificial Sequence
  Description of Artificial Sequence: Synthetic oligonucleotide
accauucagaauccgaggc

SEQ ID NO: 2273139 - RNA, 19 nt, Artificial Sequence
  Description of Artificial Sequence: Synthetic oligonucleotide
aaagaaggcgcccuggucu

SEQ ID NO: 2273140 - RNA, 19 nt, Artificial Sequence
  Description of Artificial Sequence: Synthetic oligonucleotide
aagaaauccaggcuaguca

SEQ ID NO: 2273141 - RNA, 19 nt, Artificial Sequence
  Description of Artificial Sequence: Synthetic oligonucleotide
aaaguagagguuguggcgg

SEQ ID NO: 2273142 - RNA, 19 nt, Artificial Sequence
  Description of Artificial Sequence: Synthetic oligonucleotide
uaguucacaaagaaggcgc

SEQ ID NO: 2273143 - RNA, 19 nt, Artificial Sequence
  Description of Artificial Sequence: Synthetic oligonucleotide
aaauccaggcuagucaggc

SEQ ID NO: 2273144 - RNA, 19 nt, Artificial Sequence
  Description of Artificial Sequence: Synthetic oligonucleotide
uguagaugaggccgaaugg

SEQ ID NO: 2273145 - RNA, 19 nt, Artificial Sequence
  Description of Artificial Sequence: Synthetic oligonucleotide
ucaugcgaaagguauagag

SEQ ID NO: 2273146 - RNA, 19 nt, Artificial Sequence
  Description of Artificial Sequence: Synthetic oligonucleotide
aaacucguauucaaaggcc

SEQ ID NO: 2273147 - RNA, 19 nt, Artificial Sequence
  Description of Artificial Sequence: Synthetic oligonucleotide
acagcggcaaaguggaucc

SEQ ID NO: 2273148 - RNA, 19 nt, Artificial Sequence
  Description of Artificial Sequence: Synthetic oligonucleotide
ugauggaaccaucugagga

SEQ ID NO: 2273149 - RNA, 19 nt, Artificial Sequence
  Description of Artificial Sequence: Synthetic oligonucleotide
gaauauguagaccuuggac

SEQ ID NO: 2273150 - RNA, 19 nt, Artificial Sequence
  Description of Artificial Sequence: Synthetic oligonucleotide
aaggugaacagaguggcgg

SEQ ID NO: 2273151 - RNA, 19 nt, Artificial Sequence
  Description of Artificial Sequence: Synthetic oligonucleotide
aagaucaagaauauguaga

SEQ ID NO: 2273152 - RNA, 19 nt, Artificial Sequence
  Description of Artificial Sequence: Synthetic oligonucleotide
augaagaucaagaauaugu

SEQ ID NO: 2273153 - RNA, 19 nt, Artificial Sequence
  Description of Artificial Sequence: Synthetic oligonucleotide
acaauauccaugcauacau

SEQ ID NO: 2273154 - RNA, 19 nt, Artificial Sequence
  Description of Artificial Sequence: Synthetic oligonucleotide
agaaauccaggcuagucag

SEQ ID NO: 2273155 - RNA, 19 nt, Artificial Sequence
  Description of Artificial Sequence: Synthetic oligonucleotide
caaacucguauucaaaggc

SEQ ID NO: 2273156 - RNA, 19 nt, Artificial Sequence
  Description of Artificial Sequence: Synthetic oligonucleotide
caugcgaaagguauagagg

SEQ ID NO: 2273157 - RNA, 19 nt, Artificial Sequence
  Description of Artificial Sequence: Synthetic oligonucleotide
uugucaaagagccaccgga

SEQ ID NO: 2273158 - RNA, 19 nt, Artificial Sequence
  Description of Artificial Sequence: Synthetic oligonucleotide
ucuguuuaacauuccugcg

SEQ ID NO: 2273159 - RNA, 19 nt, Artificial Sequence
  Description of Artificial Sequence: Synthetic oligonucleotide
cauagggugugaauggugg

SEQ ID NO: 2273160 - RNA, 19 nt, Artificial Sequence
  Description of Artificial Sequence: Synthetic oligonucleotide
uauccaugcauacauggcu

SEQ ID NO: 2273161 - RNA, 19 nt, Artificial Sequence
  Description of Artificial Sequence: Synthetic oligonucleotide
aaaccauucagaauccgag

SEQ ID NO: 2273162 - RNA, 19 nt, Artificial Sequence
  Description of Artificial Sequence: Synthetic oligonucleotide
uauucaaaggccugguucu

SEQ ID NO: 2273163 - RNA, 19 nt, Artificial Sequence
  Description of Artificial Sequence: Synthetic oligonucleotide
gauaacgccguccucucgg

SEQ ID NO: 2273164 - RNA, 19 nt, Artificial Sequence
  Description of Artificial Sequence: Synthetic oligonucleotide
  modified_base (2)..(2): a, c, u, g, unknown or other
cncuucuccagcuuggccg

SEQ ID NO: 2273165 - RNA, 19 nt, Artificial Sequence
  Description of Artificial Sequence: Synthetic oligonucleotide
uucacagcggcaaagugga

SEQ ID NO: 2273166 - RNA, 19 nt, Artificial Sequence
  Description of Artificial Sequence: Synthetic oligonucleotide
augcgaaagguauagagga

SEQ ID NO: 2273167 - RNA, 19 nt, Artificial Sequence
  Description of Artificial Sequence: Synthetic oligonucleotide
cuuuagacccagacgaagg

SEQ ID NO: 2273168 - RNA, 19 nt, Artificial Sequence
  Description of Artificial Sequence: Synthetic oligonucleotide
uuggccaugaucaugcgaa

SEQ ID NO: 2273169 - RNA, 19 nt, Artificial Sequence
  Description of Artificial Sequence: Synthetic oligonucleotide
cuugaagcauccaaagcag

SEQ ID NO: 2273170 - RNA, 19 nt, Artificial Sequence
  Description of Artificial Sequence: Synthetic oligonucleotide
caaaguagagguuguggcg

SEQ ID NO: 2273171 - RNA, 19 nt, Artificial Sequence
  Description of Artificial Sequence: Synthetic oligonucleotide
acucuagccugauggaacc

SEQ ID NO: 2273172 - RNA, 19 nt, Artificial Sequence
  Description of Artificial Sequence: Synthetic oligonucleotide
aguaccaugaagaucaaga

SEQ ID NO: 2273173 - RNA, 19 nt, Artificial Sequence
  Description of Artificial Sequence: Synthetic oligonucleotide
cacacugucacuagaauuc

SEQ ID NO: 2273174 - RNA, 19 nt, Artificial Sequence
  Description of Artificial Sequence: Synthetic oligonucleotide
agguauagaggaugaggcc

SEQ ID NO: 2273175 - RNA, 19 nt, Artificial Sequence
  Description of Artificial Sequence: Synthetic oligonucleotide
accaugauccgguuuuccc

SEQ ID NO: 2273176 - RNA, 19 nt, Artificial Sequence
  Description of Artificial Sequence: Synthetic oligonucleotide
ugaagaucaagaauaugua

SEQ ID NO: 2273177 - RNA, 19 nt, Artificial Sequence
  Description of Artificial Sequence: Synthetic oligonucleotide
uuugucaaagagccaccgg

SEQ ID NO: 2273178 - RNA, 19 nt, Artificial Sequence
  Description of Artificial Sequence: Synthetic oligonucleotide
gagguaagcaaaguagagg

SEQ ID NO: 2273179 - RNA, 19 nt, Artificial Sequence
  Description of Artificial Sequence: Synthetic oligonucleotide
ucaaagagccaccggaaga

SEQ ID NO: 2273180 - RNA, 19 nt, Artificial Sequence
  Description of Artificial Sequence: Synthetic oligonucleotide
aauccaggcuagucaggcc

SEQ ID NO: 2273181 - RNA, 19 nt, Artificial Sequence
  Description of Artificial Sequence: Synthetic oligonucleotide
ucugucuuguaguuccggg

SEQ ID NO: 2273182 - RNA, 19 nt, Artificial Sequence
  Description of Artificial Sequence: Synthetic oligonucleotide
acacaauauccaugcauac

SEQ ID NO: 2273183 - RNA, 19 nt, Artificial Sequence
  Description of Artificial Sequence: Synthetic oligonucleotide
aagcauccaaagcaggugu

SEQ ID NO: 2273184 - RNA, 19 nt, Artificial Sequence
  Description of Artificial Sequence: Synthetic oligonucleotide
  modified_base (11)..(11): a, c, u, g, unknown or other
aaguggauccncuucucca

SEQ ID NO: 2273185 - RNA, 19 nt, Artificial Sequence
  Description of Artificial Sequence: Synthetic oligonucleotide
uuuugucaaagagccaccg

SEQ ID NO: 2273186 - RNA, 19 nt, Artificial Sequence
  Description of Artificial Sequence: Synthetic oligonucleotide
gaugaggccgaauggcacg

SEQ ID NO: 2273187 - RNA, 19 nt, Artificial Sequence
  Description of Artificial Sequence: Synthetic oligonucleotide
aacgccguccucucggagg

SEQ ID NO: 2273188 - RNA, 19 nt, Artificial Sequence
  Description of Artificial Sequence: Synthetic oligonucleotide
auuccuggucgauacuggc

SEQ ID NO: 2273189 - RNA, 19 nt, Artificial Sequence
  Description of Artificial Sequence: Synthetic oligonucleotide
gaucaugcgaaagguauag

SEQ ID NO: 2273190 - RNA, 19 nt, Artificial Sequence
  Description of Artificial Sequence: Synthetic oligonucleotide
acgauaauggggcaaguga

SEQ ID NO: 2273191 - RNA, 19 nt, Artificial Sequence
  Description of Artificial Sequence: Synthetic oligonucleotide
caagauuccuggucgauac

SEQ ID NO: 2273192 - RNA, 19 nt, Artificial Sequence
  Description of Artificial Sequence: Synthetic oligonucleotide
gguauagaggaugaggccg

SEQ ID NO: 2273193 - RNA, 19 nt, Artificial Sequence
  Description of Artificial Sequence: Synthetic oligonucleotide
aacauuccugcggucagcg

SEQ ID NO: 2273194 - RNA, 19 nt, Artificial Sequence
  Description of Artificial Sequence: Synthetic oligonucleotide
agucccacugaugugacgg

SEQ ID NO: 2273195 - RNA, 19 nt, Artificial Sequence
  Description of Artificial Sequence: Synthetic oligonucleotide
cagaauccgaggcacauag

SEQ ID NO: 2273196 - RNA, 19 nt, Artificial Sequence
  Description of Artificial Sequence: Synthetic oligonucleotide
aucugaggaaguuuuguca

SEQ ID NO: 2273197 - RNA, 19 nt, Artificial Sequence
  Description of Artificial Sequence: Synthetic oligonucleotide
ugaggaaguuuugucaaag

SEQ ID NO: 2273198 - RNA, 19 nt, Artificial Sequence
  Description of Artificial Sequence: Synthetic oligonucleotide
caugauccgguuuuccccg

SEQ ID NO: 2273199 - RNA, 19 nt, Artificial Sequence
  Description of Artificial Sequence: Synthetic oligonucleotide
aaggugcccaggaagaguc

SEQ ID NO: 2273200 - RNA, 19 nt, Artificial Sequence
  Description of Artificial Sequence: Synthetic oligonucleotide
auauccaugcauacauggc

SEQ ID NO: 2273201 - RNA, 19 nt, Artificial Sequence
  Description of Artificial Sequence: Synthetic oligonucleotide
auccgaggcacauagggug

SEQ ID NO: 2273202 - RNA, 19 nt, Artificial Sequence
  Description of Artificial Sequence: Synthetic oligonucleotide
agcaaaguagagguugugg

SEQ ID NO: 2273203 - RNA, 19 nt, Artificial Sequence
  Description of Artificial Sequence: Synthetic oligonucleotide
ugcuugaagcauccaaagc

SEQ ID NO: 2273204 - RNA, 19 nt, Artificial Sequence
  Description of Artificial Sequence: Synthetic oligonucleotide
uccuggucgauacuggcca

SEQ ID NO: 2273205 - RNA, 19 nt, Artificial Sequence
  Description of Artificial Sequence: Synthetic oligonucleotide
aggaucaguaccaugaaga

SEQ ID NO: 2273206 - RNA, 19 nt, Artificial Sequence
  Description of Artificial Sequence: Synthetic oligonucleotide
ggccaaaccauucagaauc

SEQ ID NO: 2273207 - RNA, 19 nt, Artificial Sequence
  Description of Artificial Sequence: Synthetic oligonucleotide
ugacggauggcaccauagg

SEQ ID NO: 2273208 - RNA, 19 nt, Artificial Sequence
  Description of Artificial Sequence: Synthetic oligonucleotide
aggcuagucaggccgaggg

SEQ ID NO: 2273209 - RNA, 19 nt, Artificial Sequence
  Description of Artificial Sequence: Synthetic oligonucleotide
gaauggcacgauaaugggg

SEQ ID NO: 2273210 - RNA, 19 nt, Artificial Sequence
  Description of Artificial Sequence: Synthetic oligonucleotide
cugguucuguuuaacauuc

SEQ ID NO: 2273211 - RNA, 19 nt, Artificial Sequence
  Description of Artificial Sequence: Synthetic oligonucleotide
guaaaagaagagccagaag

SEQ ID NO: 2273212 - RNA, 19 nt, Artificial Sequence
  Description of Artificial Sequence: Synthetic oligonucleotide
acugaugugacggauggca

SEQ ID NO: 2273213 - RNA, 19 nt, Artificial Sequence
  Description of Artificial Sequence: Synthetic oligonucleotide
uagaugaggccgaauggca

SEQ ID NO: 2273214 - RNA, 19 nt, Artificial Sequence
  Description of Artificial Sequence: Synthetic oligonucleotide
aguaaaagaagagccagaa

SEQ ID NO: 2273215 - RNA, 19 nt, Artificial Sequence
  Description of Artificial Sequence: Synthetic oligonucleotide
cauuccugcggucagcggc

SEQ ID NO: 2273216 - RNA, 19 nt, Artificial Sequence
  Description of Artificial Sequence: Synthetic oligonucleotide
caggaagacacacucuagc

SEQ ID NO: 2273217 - RNA, 19 nt, Artificial Sequence
  Description of Artificial Sequence: Synthetic oligonucleotide
uagaauucugagccacaag

SEQ ID NO: 2273218 - RNA, 19 nt, Artificial Sequence
  Description of Artificial Sequence: Synthetic oligonucleotide
gauggaaccaucugaggaa

SEQ ID NO: 2273219 - RNA, 19 nt, Artificial Sequence
  Description of Artificial Sequence: Synthetic oligonucleotide
gcuugaagcauccaaagca

SEQ ID NO: 2273220 - RNA, 19 nt, Artificial Sequence
  Description of Artificial Sequence: Synthetic oligonucleotide
cugucuuguaguuccgggg

SEQ ID NO: 2273221 - RNA, 19 nt, Artificial Sequence
  Description of Artificial Sequence: Synthetic oligonucleotide
ggaaguuuugucaaagagc

SEQ ID NO: 2273222 - RNA, 19 nt, Artificial Sequence
  Description of Artificial Sequence: Synthetic oligonucleotide
ugaugugacggauggcacc

SEQ ID NO: 2273223 - RNA, 19 nt, Artificial Sequence
  Description of Artificial Sequence: Synthetic oligonucleotide
gaucaagaauauguagacc

SEQ ID NO: 2273224 - RNA, 19 nt, Artificial Sequence
  Description of Artificial Sequence: Synthetic oligonucleotide
ccgaauggcacgauaaugg

SEQ ID NO: 2273225 - RNA, 19 nt, Artificial Sequence
  Description of Artificial Sequence: Synthetic oligonucleotide
ucaggugcuugaagcaucc

SEQ ID NO: 2273226 - RNA, 19 nt, Artificial Sequence
  Description of Artificial Sequence: Synthetic oligonucleotide
gaaggcugaggcgaugacg

SEQ ID NO: 2273227 - RNA, 19 nt, Artificial Sequence
  Description of Artificial Sequence: Synthetic oligonucleotide
  modified_base (6)..(6): a, c, u, g, unknown or other
gauccncuucuccagcuug

SEQ ID NO: 2273228 - RNA, 19 nt, Artificial Sequence
  Description of Artificial Sequence: Synthetic oligonucleotide
gcaaaguagagguuguggc

SEQ ID NO: 2273229 - RNA, 19 nt, Artificial Sequence
  Description of Artificial Sequence: Synthetic oligonucleotide
guggcgguccaccauaugc

SEQ ID NO: 2273230 - RNA, 19 nt, Artificial Sequence
  Description of Artificial Sequence: Synthetic oligonucleotide
agaauauguagaccuugga

SEQ ID NO: 2273231 - RNA, 19 nt, Artificial Sequence
  Description of Artificial Sequence: Synthetic oligonucleotide
aacucguauucaaaggccu

SEQ ID NO: 2273232 - RNA, 19 nt, Artificial Sequence
  Description of Artificial Sequence: Synthetic oligonucleotide
ggaguaaaagaagagccag

SEQ ID NO: 2273233 - RNA, 19 nt, Artificial Sequence
  Description of Artificial Sequence: Synthetic oligonucleotide
ugucaaagagccaccggaa

SEQ ID NO: 2273234 - RNA, 19 nt, Artificial Sequence
  Description of Artificial Sequence: Synthetic oligonucleotide
gauuccuggucgauacugg

SEQ ID NO: 2273235 - RNA, 19 nt, Artificial Sequence
  Description of Artificial Sequence: Synthetic oligonucleotide
uccaaagcagguguagagc

SEQ ID NO: 2273236 - RNA, 19 nt, Artificial Sequence
  Description of Artificial Sequence: Synthetic oligonucleotide
aagaaggcgcccuggucug

SEQ ID NO: 2273237 - RNA, 19 nt, Artificial Sequence
  Description of Artificial Sequence: Synthetic oligonucleotide
uccgguuuuccccgacucg

SEQ ID NO: 2273238 - RNA, 19 nt, Artificial Sequence
  Description of Artificial Sequence: Synthetic oligonucleotide
gugcuugaagcauccaaag

SEQ ID NO: 2273239 - RNA, 19 nt, Artificial Sequence
  Description of Artificial Sequence: Synthetic oligonucleotide
aggugaacagaguggcggg

SEQ ID NO: 2273240 - RNA, 19 nt, Artificial Sequence
  Description of Artificial Sequence: Synthetic oligonucleotide
ggccuuuagacccagacga

SEQ ID NO: 2273241 - RNA, 19 nt, Artificial Sequence
  Description of Artificial Sequence: Synthetic oligonucleotide
uucacaaagaaggcgcccu

SEQ ID NO: 2273242 - RNA, 19 nt, Artificial Sequence
  Description of Artificial Sequence: Synthetic oligonucleotide
gaggccaaaccauucagaa

SEQ ID NO: 2273243 - RNA, 19 nt, Artificial Sequence
  Description of Artificial Sequence: Synthetic oligonucleotide
guauagaggaugaggccgg

SEQ ID NO: 2273244 - RNA, 19 nt, Artificial Sequence
  Description of Artificial Sequence: Synthetic oligonucleotide
augaucaugcgaaagguau

SEQ ID NO: 2273245 - RNA, 19 nt, Artificial Sequence
  Description of Artificial Sequence: Synthetic oligonucleotide
uuccuggucgauacuggcc

SEQ ID NO: 2273246 - RNA, 19 nt, Artificial Sequence
  Description of Artificial Sequence: Synthetic oligonucleotide
ucaagaauauguagaccuu

SEQ ID NO: 2273247 - RNA, 19 nt, Artificial Sequence
  Description of Artificial Sequence: Synthetic oligonucleotide
cucguauucaaaggccugg

SEQ ID NO: 2273248 - RNA, 19 nt, Artificial Sequence
  Description of Artificial Sequence: Synthetic oligonucleotide
acgaaggaaggaguaaaag

SEQ ID NO: 2273249 - RNA, 19 nt, Artificial Sequence
  Description of Artificial Sequence: Synthetic oligonucleotide
uccaugcauacauggcucc

SEQ ID NO: 2273250 - RNA, 19 nt, Artificial Sequence
  Description of Artificial Sequence: Synthetic oligonucleotide
ccaaacucguauucaaagg

SEQ ID NO: 2273251 - RNA, 19 nt, Artificial Sequence
  Description of Artificial Sequence: Synthetic oligonucleotide
cacucuagccugauggaac

SEQ ID NO: 2273252 - RNA, 19 nt, Artificial Sequence
  Description of Artificial Sequence: Synthetic oligonucleotide
caugccacugccgaugaag

SEQ ID NO: 2273253 - RNA, 19 nt, Artificial Sequence
  Description of Artificial Sequence: Synthetic oligonucleotide
caucugaggaaguuuuguc

SEQ ID NO: 2273254 - RNA, 19 nt, Artificial Sequence
  Description of Artificial Sequence: Synthetic oligonucleotide
caagugaugcuguaagcca

SEQ ID NO: 2273255 - RNA, 19 nt, Artificial Sequence
  Description of Artificial Sequence: Synthetic oligonucleotide
cugauggaaccaucugagg

SEQ ID NO: 2273256 - RNA, 19 nt, Artificial Sequence
  Description of Artificial Sequence: Synthetic oligonucleotide
auccgguuuuccccgacuc

SEQ ID NO: 2273257 - RNA, 19 nt, Artificial Sequence
  Description of Artificial Sequence: Synthetic oligonucleotide
agauuccuggucgauacug

SEQ ID NO: 2273258 - RNA, 19 nt, Artificial Sequence
  Description of Artificial Sequence: Synthetic oligonucleotide
uacauggcuccaaacucgu

SEQ ID NO: 2273259 - RNA, 19 nt, Artificial Sequence
  Description of Artificial Sequence: Synthetic oligonucleotide
accggaagaagaaauccag

SEQ ID NO: 2273260 - RNA, 19 nt, Artificial Sequence
  Description of Artificial Sequence: Synthetic oligonucleotide
gaagagucccacugaugug

SEQ ID NO: 2273261 - RNA, 19 nt, Artificial Sequence
  Description of Artificial Sequence: Synthetic oligonucleotide
uagccugauggaaccaucu

SEQ ID NO: 2273262 - RNA, 19 nt, Artificial Sequence
  Description of Artificial Sequence: Synthetic oligonucleotide
ucuggcaggaagacacacu

SEQ ID NO: 2273263 - RNA, 19 nt, Artificial Sequence
  Description of Artificial Sequence: Synthetic oligonucleotide
uguaagccaugauuacagu

SEQ ID NO: 2273264 - RNA, 19 nt, Artificial Sequence
  Description of Artificial Sequence: Synthetic oligonucleotide
gcacauagggugugaaugg

SEQ ID NO: 2273265 - RNA, 19 nt, Artificial Sequence
  Description of Artificial Sequence: Synthetic oligonucleotide
cuagucaggccgagggagg

SEQ ID NO: 2273266 - RNA, 19 nt, Artificial Sequence
  Description of Artificial Sequence: Synthetic oligonucleotide
ccugauggaaccaucugag

SEQ ID NO: 2273267 - RNA, 19 nt, Artificial Sequence
  Description of Artificial Sequence: Synthetic oligonucleotide
ucggaggccaaaccauuca

SEQ ID NO: 2273268 - RNA, 19 nt, Artificial Sequence
  Description of Artificial Sequence: Synthetic oligonucleotide
ugaucaugcgaaagguaua

SEQ ID NO: 2273269 - RNA, 19 nt, Artificial Sequence
  Description of Artificial Sequence: Synthetic oligonucleotide
caaaccauucagaauccga

SEQ ID NO: 2273270 - RNA, 19 nt, Artificial Sequence
  Description of Artificial Sequence: Synthetic oligonucleotide
caauauccaugcauacaug

SEQ ID NO: 2273271 - RNA, 19 nt, Artificial Sequence
  Description of Artificial Sequence: Synthetic oligonucleotide
ugcuguaagccaugauuac

SEQ ID NO: 2273272 - RNA, 19 nt, Artificial Sequence
  Description of Artificial Sequence: Synthetic oligonucleotide
aaguagagguuguggcggu

SEQ ID NO: 2273273 - RNA, 19 nt, Artificial Sequence
  Description of Artificial Sequence: Synthetic oligonucleotide
acaaagaaggcgcccuggu

SEQ ID NO: 2273274 - RNA, 19 nt, Artificial Sequence
  Description of Artificial Sequence: Synthetic oligonucleotide
ggcacauagggugugaaug

SEQ ID NO: 2273275 - RNA, 19 nt, Artificial Sequence
  Description of Artificial Sequence: Synthetic oligonucleotide
uggcgguccaccauaugcu

SEQ ID NO: 2273276 - RNA, 19 nt, Artificial Sequence
  Description of Artificial Sequence: Synthetic oligonucleotide
aauccgaggcacauagggu

SEQ ID NO: 2273277 - RNA, 19 nt, Artificial Sequence
  Description of Artificial Sequence: Synthetic oligonucleotide
gaggaaguuuugucaaaga

SEQ ID NO: 2273278 - RNA, 19 nt, Artificial Sequence
  Description of Artificial Sequence: Synthetic oligonucleotide
ucgauacuggccacacugu

SEQ ID NO: 2273279 - RNA, 19 nt, Artificial Sequence
  Description of Artificial Sequence: Synthetic oligonucleotide
gcaagugaugcuguaagcc

SEQ ID NO: 2273280 - RNA, 19 nt, Artificial Sequence
  Description of Artificial Sequence: Synthetic oligonucleotide
ucacuagaauucugagcca

SEQ ID NO: 2273281 - RNA, 19 nt, Artificial Sequence
  Description of Artificial Sequence: Synthetic oligonucleotide
gaucaguaccaugaagauc

SEQ ID NO: 2273282 - RNA, 19 nt, Artificial Sequence
  Description of Artificial Sequence: Synthetic oligonucleotide
aagauuccuggucgauacu

SEQ ID NO: 2273283 - RNA, 19 nt, Artificial Sequence
  Description of Artificial Sequence: Synthetic oligonucleotide
auguagaccuuggacacca

SEQ ID NO: 2273284 - RNA, 19 nt, Artificial Sequence
  Description of Artificial Sequence: Synthetic oligonucleotide
cacuagaauucugagccac

SEQ ID NO: 2273285 - RNA, 19 nt, Artificial Sequence
  Description of Artificial Sequence: Synthetic oligonucleotide
aagugaugcuguaagccau

SEQ ID NO: 2273286 - RNA, 19 nt, Artificial Sequence
  Description of Artificial Sequence: Synthetic oligonucleotide
  modified_base (18)..(18): a, c, u, g, unknown or other
agcggcaaaguggauccnc

SEQ ID NO: 2273287 - RNA, 19 nt, Artificial Sequence
  Description of Artificial Sequence: Synthetic oligonucleotide
uccucucggaggccaaacc

SEQ ID NO: 2273288 - RNA, 19 nt, Artificial Sequence
  Description of Artificial Sequence: Synthetic oligonucleotide
uguggggauaacgccgucc

SEQ ID NO: 2273289 - RNA, 19 nt, Artificial Sequence
  Description of Artificial Sequence: Synthetic oligonucleotide
guagaccuuggacaccaug

SEQ ID NO: 2273290 - RNA, 19 nt, Artificial Sequence
  Description of Artificial Sequence: Synthetic oligonucleotide
uccuuugucacuggcugac

SEQ ID NO: 2273291 - RNA, 19 nt, Artificial Sequence
  Description of Artificial Sequence: Synthetic oligonucleotide
auagaggaugaggccgggc

SEQ ID NO: 2273292 - RNA, 19 nt, Artificial Sequence
  Description of Artificial Sequence: Synthetic oligonucleotide
uauagaggaugaggccggg

SEQ ID NO: 2273293 - RNA, 19 nt, Artificial Sequence
  Description of Artificial Sequence: Synthetic oligonucleotide
gggcaagugaugcuguaag

SEQ ID NO: 2273294 - RNA, 19 nt, Artificial Sequence
  Description of Artificial Sequence: Synthetic oligonucleotide
cugaugugacggauggcac

SEQ ID NO: 2273295 - RNA, 19 nt, Artificial Sequence
  Description of Artificial Sequence: Synthetic oligonucleotide
ugcgaaagguauagaggau

SEQ ID NO: 2273296 - RNA, 19 nt, Artificial Sequence
  Description of Artificial Sequence: Synthetic oligonucleotide
ugguucuguuuaacauucc

SEQ ID NO: 2273297 - RNA, 19 nt, Artificial Sequence
  Description of Artificial Sequence: Synthetic oligonucleotide
acccagacgaaggaaggag

SEQ ID NO: 2273298 - RNA, 19 nt, Artificial Sequence
  Description of Artificial Sequence: Synthetic oligonucleotide
  modified_base (13)..(13): a, c, u, g, unknown or other
caaaguggauccncuucuc

SEQ ID NO: 2273299 - RNA, 19 nt, Artificial Sequence
  Description of Artificial Sequence: Synthetic oligonucleotide
ucuuggccaugaucaugcg

SEQ ID NO: 2273300 - RNA, 19 nt, Artificial Sequence
  Description of Artificial Sequence: Synthetic oligonucleotide
guuuugucaaagagccacc

SEQ ID NO: 2273301 - RNA, 19 nt, Artificial Sequence
  Description of Artificial Sequence: Synthetic oligonucleotide
  modified_base (8)..(8): a, c, u, g, unknown or other
uggauccncuucuccagcu

SEQ ID NO: 2273302 - RNA, 19 nt, Artificial Sequence
  Description of Artificial Sequence: Synthetic oligonucleotide
cacaaggugcccaggaaga

SEQ ID NO: 2273303 - RNA, 19 nt, Artificial Sequence
  Description of Artificial Sequence: Synthetic oligonucleotide
gagguuguggcgguccacc

SEQ ID NO: 2273304 - RNA, 19 nt, Artificial Sequence
  Description of Artificial Sequence: Synthetic oligonucleotide
uuggccgggagguaagcaa

SEQ ID NO: 2273305 - RNA, 19 nt, Artificial Sequence
  Description of Artificial Sequence: Synthetic oligonucleotide
uuagacccagacgaaggaa

SEQ ID NO: 2273306 - RNA, 19 nt, Artificial Sequence
  Description of Artificial Sequence: Synthetic oligonucleotide
cacaaagaaggcgcccugg

SEQ ID NO: 2273307 - RNA, 19 nt, Artificial Sequence
  Description of Artificial Sequence: Synthetic oligonucleotide
cucaggugcuugaagcauc

SEQ ID NO: 2273308 - RNA, 19 nt, Artificial Sequence
  Description of Artificial Sequence: Synthetic oligonucleotide
gaguaaaagaagagccaga

SEQ ID NO: 2273309 - RNA, 19 nt, Artificial Sequence
  Description of Artificial Sequence: Synthetic oligonucleotide
ucaagauuccuggucgaua

SEQ ID NO: 2273310 - RNA, 19 nt, Artificial Sequence
  Description of Artificial Sequence: Synthetic oligonucleotide
agacgaaggaaggaguaaa

SEQ ID NO: 2273311 - RNA, 19 nt, Artificial Sequence
  Description of Artificial Sequence: Synthetic oligonucleotide
ccaugauccgguuuucccc

SEQ ID NO: 2273312 - RNA, 19 nt, Artificial Sequence
  Description of Artificial Sequence: Synthetic oligonucleotide
gacaccaugauccgguuuu

SEQ ID NO: 2273313 - RNA, 19 nt, Artificial Sequence
  Description of Artificial Sequence: Synthetic oligonucleotide
gugacggauggcaccauag

SEQ ID NO: 2273314 - RNA, 19 nt, Artificial Sequence
  Description of Artificial Sequence: Synthetic oligonucleotide
agccugauggaaccaucug

SEQ ID NO: 2273315 - RNA, 19 nt, Artificial Sequence
  Description of Artificial Sequence: Synthetic oligonucleotide
gggccuuuagacccagacg

SEQ ID NO: 2273316 - RNA, 19 nt, Artificial Sequence
  Description of Artificial Sequence: Synthetic oligonucleotide
gacggauggcaccauaggu

SEQ ID NO: 2273317 - RNA, 19 nt, Artificial Sequence
  Description of Artificial Sequence: Synthetic oligonucleotide
guagagguuguggcggucc

SEQ ID NO: 2273318 - RNA, 19 nt, Artificial Sequence
  Description of Artificial Sequence: Synthetic oligonucleotide
caaagaaggcgcccugguc

SEQ ID NO: 2273319 - RNA, 19 nt, Artificial Sequence
  Description of Artificial Sequence: Synthetic oligonucleotide
gacacacucuagccugaug

SEQ ID NO: 2273320 - RNA, 19 nt, Artificial Sequence
  Description of Artificial Sequence: Synthetic oligonucleotide
  modified_base (5)..(5): a, c, u, g, unknown or other
auccncuucuccagcuugg

SEQ ID NO: 2273321 - RNA, 19 nt, Artificial Sequence
  Description of Artificial Sequence: Synthetic oligonucleotide
  modified_base (9)..(9): a, c, u, g, unknown or other
guggauccncuucuccagc

SEQ ID NO: 2273322 - RNA, 19 nt, Artificial Sequence
  Description of Artificial Sequence: Synthetic oligonucleotide
ucguauucaaaggccuggu

SEQ ID NO: 2273323 - RNA, 19 nt, Artificial Sequence
  Description of Artificial Sequence: Synthetic oligonucleotide
cacgauaauggggcaagug

SEQ ID NO: 2273324 - RNA, 19 nt, Artificial Sequence
  Description of Artificial Sequence: Synthetic oligonucleotide
uaacauuccugcggucagc

SEQ ID NO: 2273325 - RNA, 19 nt, Artificial Sequence
  Description of Artificial Sequence: Synthetic oligonucleotide
ucuagccugauggaaccau

SEQ ID NO: 2273326 - RNA, 19 nt, Artificial Sequence
  Description of Artificial Sequence: Synthetic oligonucleotide
cacaauauccaugcauaca

SEQ ID NO: 2273327 - RNA, 19 nt, Artificial Sequence
  Description of Artificial Sequence: Synthetic oligonucleotide
uggccgggagguaagcaaa

SEQ ID NO: 2273328 - RNA, 19 nt, Artificial Sequence
  Description of Artificial Sequence: Synthetic oligonucleotide
cgggagguaagcaaaguag

SEQ ID NO: 2273329 - RNA, 19 nt, Artificial Sequence
  Description of Artificial Sequence: Synthetic oligonucleotide
gcgaaagguauagaggaug

SEQ ID NO: 2273330 - RNA, 19 nt, Artificial Sequence
  Description of Artificial Sequence: Synthetic oligonucleotide
gcuagucaggccgagggag

SEQ ID NO: 2273331 - RNA, 19 nt, Artificial Sequence
  Description of Artificial Sequence: Synthetic oligonucleotide
ucucggaggccaaaccauu

SEQ ID NO: 2273332 - RNA, 19 nt, Artificial Sequence
  Description of Artificial Sequence: Synthetic oligonucleotide
gaauucugagccacaaggu

SEQ ID NO: 2273333 - RNA, 19 nt, Artificial Sequence
  Description of Artificial Sequence: Synthetic oligonucleotide
ugccacugccgaugaaggc

SEQ ID NO: 2273334 - RNA, 19 nt, Artificial Sequence
  Description of Artificial Sequence: Synthetic oligonucleotide
acauuccugcggucagcgg

SEQ ID NO: 2273335 - RNA, 19 nt, Artificial Sequence
  Description of Artificial Sequence: Synthetic oligonucleotide
uccaggcuagucaggccga

SEQ ID NO: 2273336 - RNA, 19 nt, Artificial Sequence
  Description of Artificial Sequence: Synthetic oligonucleotide
ggcaagugaugcuguaagc

SEQ ID NO: 2273337 - RNA, 19 nt, Artificial Sequence
  Description of Artificial Sequence: Synthetic oligonucleotide
gccgucuuggccaugauca

SEQ ID NO: 2273338 - RNA, 19 nt, Artificial Sequence
  Description of Artificial Sequence: Synthetic oligonucleotide
  modified_base (4)..(4): a, c, u, g, unknown or other
uccncuucuccagcuuggc

SEQ ID NO: 2273339 - RNA, 19 nt, Artificial Sequence
  Description of Artificial Sequence: Synthetic oligonucleotide
uaugcuucagcaggaugua

SEQ ID NO: 2273340 - RNA, 19 nt, Artificial Sequence
  Description of Artificial Sequence: Synthetic oligonucleotide
cacagcggcaaaguggauc

SEQ ID NO: 2273341 - RNA, 19 nt, Artificial Sequence
  Description of Artificial Sequence: Synthetic oligonucleotide
gguuuuccccgacucgucc

SEQ ID NO: 2273342 - RNA, 19 nt, Artificial Sequence
  Description of Artificial Sequence: Synthetic oligonucleotide
ugugacggauggcaccaua

SEQ ID NO: 2273343 - RNA, 19 nt, Artificial Sequence
  Description of Artificial Sequence: Synthetic oligonucleotide
uaacgccguccucucggag

SEQ ID NO: 2273344 - RNA, 19 nt, Artificial Sequence
  Description of Artificial Sequence: Synthetic oligonucleotide
augcauacauggcuccaaa

SEQ ID NO: 2273345 - RNA, 19 nt, Artificial Sequence
  Description of Artificial Sequence: Synthetic oligonucleotide
cugccgaugaaggcugagg

SEQ ID NO: 2273346 - RNA, 19 nt, Artificial Sequence
  Description of Artificial Sequence: Synthetic oligonucleotide
cucggaggccaaaccauuc

SEQ ID NO: 2273347 - RNA, 19 nt, Artificial Sequence
  Description of Artificial Sequence: Synthetic oligonucleotide
gccgaugaaggcugaggcg

SEQ ID NO: 2273348 - RNA, 19 nt, Artificial Sequence
  Description of Artificial Sequence: Synthetic oligonucleotide
acucguauucaaaggccug

SEQ ID NO: 2273349 - RNA, 19 nt, Artificial Sequence
  Description of Artificial Sequence: Synthetic oligonucleotide
aggccaaaccauucagaau

SEQ ID NO: 2273350 - RNA, 19 nt, Artificial Sequence
  Description of Artificial Sequence: Synthetic oligonucleotide
auaacgccguccucucgga

SEQ ID NO: 2273351 - RNA, 19 nt, Artificial Sequence
  Description of Artificial Sequence: Synthetic oligonucleotide
guuuuccccgacucgucca

SEQ ID NO: 2273352 - RNA, 19 nt, Artificial Sequence
  Description of Artificial Sequence: Synthetic oligonucleotide
uggccacacugucacuaga

SEQ ID NO: 2273353 - RNA, 19 nt, Artificial Sequence
  Description of Artificial Sequence: Synthetic oligonucleotide
cauaggucugcugcugcug

SEQ ID NO: 2273354 - RNA, 19 nt, Artificial Sequence
  Description of Artificial Sequence: Synthetic oligonucleotide
cuagaauucugagccacaa

SEQ ID NO: 2273355 - RNA, 19 nt, Artificial Sequence
  Description of Artificial Sequence: Synthetic oligonucleotide
caugaucaugcgaaaggua

SEQ ID NO: 2273356 - RNA, 19 nt, Artificial Sequence
  Description of Artificial Sequence: Synthetic oligonucleotide
cgaauggcacgauaauggg

SEQ ID NO: 2273357 - RNA, 19 nt, Artificial Sequence
  Description of Artificial Sequence: Synthetic oligonucleotide
aagacacacucuagccuga

SEQ ID NO: 2273358 - RNA, 19 nt, Artificial Sequence
  Description of Artificial Sequence: Synthetic oligonucleotide
agaagaaauccaggcuagu

SEQ ID NO: 2273359 - RNA, 19 nt, Artificial Sequence
  Description of Artificial Sequence: Synthetic oligonucleotide
uggcugacucuucugucuu

SEQ ID NO: 2273360 - RNA, 19 nt, Artificial Sequence
  Description of Artificial Sequence: Synthetic oligonucleotide
ugauccgguuuuccccgac

SEQ ID NO: 2273361 - RNA, 19 nt, Artificial Sequence
  Description of Artificial Sequence: Synthetic oligonucleotide
ggcacgauaauggggcaag

SEQ ID NO: 2273362 - RNA, 19 nt, Artificial Sequence
  Description of Artificial Sequence: Synthetic oligonucleotide
uggucgauacuggccacac

SEQ ID NO: 2273363 - RNA, 19 nt, Artificial Sequence
  Description of Artificial Sequence: Synthetic oligonucleotide
gacgaaggaaggaguaaaa

SEQ ID NO: 2273364 - RNA, 19 nt, Artificial Sequence
  Description of Artificial Sequence: Synthetic oligonucleotide
agaauccgaggcacauagg

SEQ ID NO: 2273365 - RNA, 19 nt, Artificial Sequence
  Description of Artificial Sequence: Synthetic oligonucleotide
acuagaauucugagccaca

SEQ ID NO: 2273366 - RNA, 19 nt, Artificial Sequence
  Description of Artificial Sequence: Synthetic oligonucleotide
uguggcgguccaccauaug

SEQ ID NO: 2273367 - RNA, 19 nt, Artificial Sequence
  Description of Artificial Sequence: Synthetic oligonucleotide
ccaccggaagaagaaaucc

SEQ ID NO: 2273368 - RNA, 19 nt, Artificial Sequence
  Description of Artificial Sequence: Synthetic oligonucleotide
guuguggcgguccaccaua

SEQ ID NO: 2273369 - RNA, 19 nt, Artificial Sequence
  Description of Artificial Sequence: Synthetic oligonucleotide
ggggccuuuagacccagac

SEQ ID NO: 2273370 - RNA, 19 nt, Artificial Sequence
  Description of Artificial Sequence: Synthetic oligonucleotide
cccaggaagagucccacug

SEQ ID NO: 2273371 - RNA, 19 nt, Artificial Sequence
  Description of Artificial Sequence: Synthetic oligonucleotide
aggccugguucuguuuaac

SEQ ID NO: 2273372 - RNA, 19 nt, Artificial Sequence
  Description of Artificial Sequence: Synthetic oligonucleotide
cacacucuagccugaugga

SEQ ID NO: 2273373 - RNA, 19 nt, Artificial Sequence
  Description of Artificial Sequence: Synthetic oligonucleotide
cauggcuccaaacucguau

SEQ ID NO: 2273374 - RNA, 19 nt, Artificial Sequence
  Description of Artificial Sequence: Synthetic oligonucleotide
acacucuagccugauggaa

SEQ ID NO: 2273375 - RNA, 19 nt, Artificial Sequence
  Description of Artificial Sequence: Synthetic oligonucleotide
auggcacgauaauggggca

SEQ ID NO: 2273376 - RNA, 19 nt, Artificial Sequence
  Description of Artificial Sequence: Synthetic oligonucleotide
ggugaacagaguggcgggg

SEQ ID NO: 2273377 - RNA, 19 nt, Artificial Sequence
  Description of Artificial Sequence: Synthetic oligonucleotide
aggcacauagggugugaau

SEQ ID NO: 2273378 - RNA, 19 nt, Artificial Sequence
  Description of Artificial Sequence: Synthetic oligonucleotide
ggauaacgccguccucucg

SEQ ID NO: 2273379 - RNA, 19 nt, Artificial Sequence
  Description of Artificial Sequence: Synthetic oligonucleotide
aggaagagucccacugaug

SEQ ID NO: 2273380 - RNA, 19 nt, Artificial Sequence
  Description of Artificial Sequence: Synthetic oligonucleotide
ccuuuagacccagacgaag

SEQ ID NO: 2273381 - RNA, 19 nt, Artificial Sequence
  Description of Artificial Sequence: Synthetic oligonucleotide
caccaugauccgguuuucc

SEQ ID NO: 2273382 - RNA, 19 nt, Artificial Sequence
  Description of Artificial Sequence: Synthetic oligonucleotide
gccgaauggcacgauaaug

SEQ ID NO: 2273383 - RNA, 19 nt, Artificial Sequence
  Description of Artificial Sequence: Synthetic oligonucleotide
agguuguggcgguccacca

SEQ ID NO: 2273384 - RNA, 19 nt, Artificial Sequence
  Description of Artificial Sequence: Synthetic oligonucleotide
ucagaauccgaggcacaua

SEQ ID NO: 2273385 - RNA, 19 nt, Artificial Sequence
  Description of Artificial Sequence: Synthetic oligonucleotide
uuguggcgguccaccauau

SEQ ID NO: 2273386 - RNA, 19 nt, Artificial Sequence
  Description of Artificial Sequence: Synthetic oligonucleotide
caguaccaugaagaucaag

SEQ ID NO: 2273387 - RNA, 19 nt, Artificial Sequence
  Description of Artificial Sequence: Synthetic oligonucleotide
aucaugcgaaagguauaga

SEQ ID NO: 2273388 - RNA, 19 nt, Artificial Sequence
  Description of Artificial Sequence: Synthetic oligonucleotide
gaaggcgcccuggucuggc

SEQ ID NO: 2273389 - RNA, 19 nt, Artificial Sequence
  Description of Artificial Sequence: Synthetic oligonucleotide
aggccgaauggcacgauaa

SEQ ID NO: 2273390 - RNA, 19 nt, Artificial Sequence
  Description of Artificial Sequence: Synthetic oligonucleotide
guggggauaacgccguccu

SEQ ID NO: 2273391 - RNA, 19 nt, Artificial Sequence
  Description of Artificial Sequence: Synthetic oligonucleotide
agccaccggaagaagaaau

SEQ ID NO: 2273392 - RNA, 19 nt, Artificial Sequence
  Description of Artificial Sequence: Synthetic oligonucleotide
uggccaugaucaugcgaaa

SEQ ID NO: 2273393 - RNA, 19 nt, Artificial Sequence
  Description of Artificial Sequence: Synthetic oligonucleotide
gcgaugacguaguucacaa

SEQ ID NO: 2273394 - RNA, 19 nt, Artificial Sequence
  Description of Artificial Sequence: Synthetic oligonucleotide
agccaugauuacagugaag

SEQ ID NO: 2273395 - RNA, 19 nt, Artificial Sequence
  Description of Artificial Sequence: Synthetic oligonucleotide
augaggccgaauggcacga

SEQ ID NO: 2273396 - RNA, 19 nt, Artificial Sequence
  Description of Artificial Sequence: Synthetic oligonucleotide
ggugcccaggaagaguccc

SEQ ID NO: 2273397 - RNA, 19 nt, Artificial Sequence
  Description of Artificial Sequence: Synthetic oligonucleotide
caccauaggucugcugcug

SEQ ID NO: 2273398 - RNA, 19 nt, Artificial Sequence
  Description of Artificial Sequence: Synthetic oligonucleotide
uggggauaacgccguccuc

SEQ ID NO: 2273399 - RNA, 19 nt, Artificial Sequence
  Description of Artificial Sequence: Synthetic oligonucleotide
acugccgaugaaggcugag

SEQ ID NO: 2273400 - RNA, 19 nt, Artificial Sequence
  Description of Artificial Sequence: Synthetic oligonucleotide
cugcuucacuuccuuuguc

SEQ ID NO: 2273401 - RNA, 19 nt, Artificial Sequence
  Description of Artificial Sequence: Synthetic oligonucleotide
augauccgguuuuccccga

SEQ ID NO: 2273402 - RNA, 19 nt, Artificial Sequence
  Description of Artificial Sequence: Synthetic oligonucleotide
ggcaggccucaccagcucc

SEQ ID NO: 2273403 - RNA, 19 nt, Artificial Sequence
  Description of Artificial Sequence: Synthetic oligonucleotide
cagugaagacacacaauau

SEQ ID NO: 2273404 - RNA, 19 nt, Artificial Sequence
  Description of Artificial Sequence: Synthetic oligonucleotide
caggcuagucaggccgagg

SEQ ID NO: 2273405 - RNA, 19 nt, Artificial Sequence
  Description of Artificial Sequence: Synthetic oligonucleotide
agaaggcgcccuggucugg

SEQ ID NO: 2273406 - RNA, 19 nt, Artificial Sequence
  Description of Artificial Sequence: Synthetic oligonucleotide
gggagggcaggaucaguac

SEQ ID NO: 2273407 - RNA, 19 nt, Artificial Sequence
  Description of Artificial Sequence: Synthetic oligonucleotide
gaggccgaauggcacgaua

SEQ ID NO: 2273408 - RNA, 19 nt, Artificial Sequence
  Description of Artificial Sequence: Synthetic oligonucleotide
ggcgcccuggucuggcagg

SEQ ID NO: 2273409 - RNA, 19 nt, Artificial Sequence
  Description of Artificial Sequence: Synthetic oligonucleotide
gucaggccgagggagggca

SEQ ID NO: 2273410 - RNA, 19 nt, Artificial Sequence
  Description of Artificial Sequence: Synthetic oligonucleotide
gauccgguuuuccccgacu

SEQ ID NO: 2273411 - RNA, 19 nt, Artificial Sequence
  Description of Artificial Sequence: Synthetic oligonucleotide
  modified_base (3)..(3): a, c, u, g, unknown or other
ccncuucuccagcuuggcc

SEQ ID NO: 2273412 - RNA, 19 nt, Artificial Sequence
  Description of Artificial Sequence: Synthetic oligonucleotide
gggauaacgccguccucuc

SEQ ID NO: 2273413 - RNA, 19 nt, Artificial Sequence
  Description of Artificial Sequence: Synthetic oligonucleotide
gcggccaaggccugguuca

SEQ ID NO: 2273414 - RNA, 19 nt, Artificial Sequence
  Description of Artificial Sequence: Synthetic oligonucleotide
gaaccaucugaggaaguuu

SEQ ID NO: 2273415 - RNA, 19 nt, Artificial Sequence
  Description of Artificial Sequence: Synthetic oligonucleotide
ggaggccaaaccauucaga

SEQ ID NO: 2273416 - RNA, 19 nt, Artificial Sequence
  Description of Artificial Sequence: Synthetic oligonucleotide
cagacgaaggaaggaguaa

SEQ ID NO: 2273417 - RNA, 19 nt, Artificial Sequence
  Description of Artificial Sequence: Synthetic oligonucleotide
ggggauaacgccguccucu

SEQ ID NO: 2273418 - RNA, 19 nt, Artificial Sequence
  Description of Artificial Sequence: Synthetic oligonucleotide
augaggccgggcaggccuc

SEQ ID NO: 2273419 - RNA, 19 nt, Artificial Sequence
  Description of Artificial Sequence: Synthetic oligonucleotide
agcauccaaagcaggugua

SEQ ID NO: 2273420 - RNA, 19 nt, Artificial Sequence
  Description of Artificial Sequence: Synthetic oligonucleotide
ucacagcggcaaaguggau

SEQ ID NO: 2273421 - RNA, 19 nt, Artificial Sequence
  Description of Artificial Sequence: Synthetic oligonucleotide
guccucucggaggccaaac

SEQ ID NO: 2273422 - RNA, 19 nt, Artificial Sequence
  Description of Artificial Sequence: Synthetic oligonucleotide
caggaagagucccacugau

SEQ ID NO: 2273423 - RNA, 19 nt, Artificial Sequence
  Description of Artificial Sequence: Synthetic oligonucleotide
gggcaggaucaguaccaug

SEQ ID NO: 2273424 - RNA, 19 nt, Artificial Sequence
  Description of Artificial Sequence: Synthetic oligonucleotide
agggcaggaucaguaccau

SEQ ID NO: 2273425 - RNA, 19 nt, Artificial Sequence
  Description of Artificial Sequence: Synthetic oligonucleotide
agacacacucuagccugau

SEQ ID NO: 2273426 - RNA, 19 nt, Artificial Sequence
  Description of Artificial Sequence: Synthetic oligonucleotide
gccaccggaagaagaaauc

SEQ ID NO: 2273427 - RNA, 19 nt, Artificial Sequence
  Description of Artificial Sequence: Synthetic oligonucleotide
ccgagggagggcaggauca

SEQ ID NO: 2273428 - RNA, 19 nt, Artificial Sequence
  Description of Artificial Sequence: Synthetic oligonucleotide
ggcggccaaggccugguuc

SEQ ID NO: 2273429 - RNA, 19 nt, Artificial Sequence
  Description of Artificial Sequence: Synthetic oligonucleotide
ggccgucuuggccaugauc

SEQ ID NO: 2273430 - RNA, 19 nt, Artificial Sequence
  Description of Artificial Sequence: Synthetic oligonucleotide
cggaggccaaaccauucag

SEQ ID NO: 2273431 - RNA, 19 nt, Artificial Sequence
  Description of Artificial Sequence: Synthetic oligonucleotide
ggcuagucaggccgaggga

SEQ ID NO: 2273432 - RNA, 19 nt, Artificial Sequence
  Description of Artificial Sequence: Synthetic oligonucleotide
gccgagggagggcaggauc

SEQ ID NO: 2273433 - RNA, 19 nt, Artificial Sequence
  Description of Artificial Sequence: Synthetic oligonucleotide
cuggucgauacuggccaca

SEQ ID NO: 2273434 - RNA, 19 nt, Artificial Sequence
  Description of Artificial Sequence: Synthetic oligonucleotide
cacgugggccucugcuuca

SEQ ID NO: 2273435 - RNA, 19 nt, Artificial Sequence
  Description of Artificial Sequence: Synthetic oligonucleotide
cacauagggugugaauggu

SEQ ID NO: 2273436 - RNA, 19 nt, Artificial Sequence
  Description of Artificial Sequence: Synthetic oligonucleotide
cgauacuggccacacuguc

SEQ ID NO: 2273437 - RNA, 19 nt, Artificial Sequence
  Description of Artificial Sequence: Synthetic oligonucleotide
ggccgggcaggccucacca

SEQ ID NO: 2273438 - RNA, 19 nt, Artificial Sequence
  Description of Artificial Sequence: Synthetic oligonucleotide
ugaggccgggcaggccuca

SEQ ID NO: 2273439 - RNA, 19 nt, Artificial Sequence
  Description of Artificial Sequence: Synthetic oligonucleotide
cucuagccugauggaacca

SEQ ID NO: 2273440 - RNA, 19 nt, Artificial Sequence
  Description of Artificial Sequence: Synthetic oligonucleotide
ggccacacugucacuagaa

SEQ ID NO: 2273441 - RNA, 19 nt, Artificial Sequence
  Description of Artificial Sequence: Synthetic oligonucleotide
gcggucagcggccgucuug

SEQ ID NO: 2273442 - RNA, 19 nt, Artificial Sequence
  Description of Artificial Sequence: Synthetic oligonucleotide
cuguggggauaacgccguc

SEQ ID NO: 2273443 - RNA, 19 nt, Artificial Sequence
  Description of Artificial Sequence: Synthetic oligonucleotide
ugaggccgaauggcacgau

SEQ ID NO: 2273444 - RNA, 19 nt, Artificial Sequence
  Description of Artificial Sequence: Synthetic oligonucleotide
ccuggucgauacuggccac

SEQ ID NO: 2273445 - RNA, 19 nt, Artificial Sequence
  Description of Artificial Sequence: Synthetic oligonucleotide
ggauggugagcagcaccac

SEQ ID NO: 2273446 - RNA, 19 nt, Artificial Sequence
  Description of Artificial Sequence: Synthetic oligonucleotide
aggcugaggcgaugacgua

SEQ ID NO: 2273447 - RNA, 19 nt, Artificial Sequence
  Description of Artificial Sequence: Synthetic oligonucleotide
cggucagcggccgucuugg

SEQ ID NO: 2273448 - RNA, 19 nt, Artificial Sequence
  Description of Artificial Sequence: Synthetic oligonucleotide
ugcggucagcggccgucuu

SEQ ID NO: 2273449 - RNA, 19 nt, Artificial Sequence
  Description of Artificial Sequence: Synthetic oligonucleotide
ggaaccaucugaggaaguu

SEQ ID NO: 2273450 - RNA, 19 nt, Artificial Sequence
  Description of Artificial Sequence: Synthetic oligonucleotide
cccuggucuggcaggaaga

SEQ ID NO: 2273451 - RNA, 19 nt, Artificial Sequence
  Description of Artificial Sequence: Synthetic oligonucleotide
ccacacugucacuagaauu

SEQ ID NO: 2273452 - RNA, 19 nt, Artificial Sequence
  Description of Artificial Sequence: Synthetic oligonucleotide
cucaagauuccuggucgau

SEQ ID NO: 2273453 - RNA, 19 nt, Artificial Sequence
  Description of Artificial Sequence: Synthetic oligonucleotide
ccgggagguaagcaaagua

SEQ ID NO: 2273454 - RNA, 19 nt, Artificial Sequence
  Description of Artificial Sequence: Synthetic oligonucleotide
cggauggcaccauaggucu

SEQ ID NO: 2273455 - RNA, 19 nt, Artificial Sequence
  Description of Artificial Sequence: Synthetic oligonucleotide
  modified_base (7)..(7): a, c, u, g, unknown or other
ggauccncuucuccagcuu

SEQ ID NO: 2273456 - RNA, 19 nt, Artificial Sequence
  Description of Artificial Sequence: Synthetic oligonucleotide
gcgguccaccauaugcuuc

SEQ ID NO: 2273457 - RNA, 19 nt, Artificial Sequence
  Description of Artificial Sequence: Synthetic oligonucleotide
gguaagcaaaguagagguu

SEQ ID NO: 2273458 - RNA, 19 nt, Artificial Sequence
  Description of Artificial Sequence: Synthetic oligonucleotide
augugacggauggcaccau

SEQ ID NO: 2273459 - RNA, 19 nt, Artificial Sequence
  Description of Artificial Sequence: Synthetic oligonucleotide
cccagacgaaggaaggagu

SEQ ID NO: 2273460 - RNA, 19 nt, Artificial Sequence
  Description of Artificial Sequence: Synthetic oligonucleotide
gccacacugucacuagaau

SEQ ID NO: 2273461 - RNA, 19 nt, Artificial Sequence
  Description of Artificial Sequence: Synthetic oligonucleotide
ggucagcggccgucuuggc

SEQ ID NO: 2273462 - RNA, 19 nt, Artificial Sequence
  Description of Artificial Sequence: Synthetic oligonucleotide
gguuguggcgguccaccau

SEQ ID NO: 2273463 - RNA, 19 nt, Artificial Sequence
  Description of Artificial Sequence: Synthetic oligonucleotide
gccuuuagacccagacgaa

SEQ ID NO: 2273464 - RNA, 19 nt, Artificial Sequence
  Description of Artificial Sequence: Synthetic oligonucleotide
ggccgaauggcacgauaau

SEQ ID NO: 2273465 - RNA, 19 nt, Artificial Sequence
  Description of Artificial Sequence: Synthetic oligonucleotide
gggcaggccucaccagcuc

SEQ ID NO: 2273466 - RNA, 19 nt, Artificial Sequence
  Description of Artificial Sequence: Synthetic oligonucleotide
ccaggcuagucaggccgag

SEQ ID NO: 2273467 - RNA, 19 nt, Artificial Sequence
  Description of Artificial Sequence: Synthetic oligonucleotide
gaggccgggcaggccucac

SEQ ID NO: 2273468 - RNA, 19 nt, Artificial Sequence
  Description of Artificial Sequence: Synthetic oligonucleotide
  modified_base (17)..(17): a, c, u, g, unknown or other
gcggcaaaguggauccncu

SEQ ID NO: 2273469 - RNA, 19 nt, Artificial Sequence
  Description of Artificial Sequence: Synthetic oligonucleotide
ggcacgugggccucugcuu

SEQ ID NO: 2273470 - RNA, 19 nt, Artificial Sequence
  Description of Artificial Sequence: Synthetic oligonucleotide
ggggcacgugggccucugc

SEQ ID NO: 2273471 - RNA, 19 nt, Artificial Sequence
  Description of Artificial Sequence: Synthetic oligonucleotide
ccauaggucugcugcugcu

SEQ ID NO: 2273472 - RNA, 19 nt, Artificial Sequence
  Description of Artificial Sequence: Synthetic oligonucleotide
gcggccgucuuggccauga

SEQ ID NO: 2273473 - RNA, 19 nt, Artificial Sequence
  Description of Artificial Sequence: Synthetic oligonucleotide
  modified_base (19)..(19): a, c, u, g, unknown or other
cagcggcaaaguggauccn

SEQ ID NO: 2273474 - RNA, 19 nt, Artificial Sequence
  Description of Artificial Sequence: Synthetic oligonucleotide
ccgguuuuccccgacucgu

SEQ ID NO: 2273475 - RNA, 19 nt, Artificial Sequence
  Description of Artificial Sequence: Synthetic oligonucleotide
cgaugacguaguucacaaa

SEQ ID NO: 2273476 - RNA, 19 nt, Artificial Sequence
  Description of Artificial Sequence: Synthetic oligonucleotide
agcggccgucuuggccaug

SEQ ID NO: 2273477 - RNA, 19 nt, Artificial Sequence
  Description of Artificial Sequence: Synthetic oligonucleotide
gccgggagguaagcaaagu

SEQ ID NO: 2273478 - RNA, 19 nt, Artificial Sequence
  Description of Artificial Sequence: Synthetic oligonucleotide
gcacgauaauggggcaagu

SEQ ID NO: 2273479 - RNA, 19 nt, Artificial Sequence
  Description of Artificial Sequence: Synthetic oligonucleotide
cugcggucagcggccgucu

SEQ ID NO: 2273480 - RNA, 19 nt, Artificial Sequence
  Description of Artificial Sequence: Synthetic oligonucleotide
cguauucaaaggccugguu

SEQ ID NO: 2273481 - RNA, 19 nt, Artificial Sequence
  Description of Artificial Sequence: Synthetic oligonucleotide
cgaggcacauaggguguga

SEQ ID NO: 2273482 - RNA, 19 nt, Artificial Sequence
  Description of Artificial Sequence: Synthetic oligonucleotide
  modified_base (16)..(16): a, c, u, g, unknown or other
cggcaaaguggauccncuu

SEQ ID NO: 2273483 - RNA, 19 nt, Artificial Sequence
  Description of Artificial Sequence: Synthetic oligonucleotide
ccgucuuggccaugaucau

SEQ ID NO: 2273484 - RNA, 19 nt, Artificial Sequence
  Description of Artificial Sequence: Synthetic oligonucleotide
cgaugaaggcugaggcgau

SEQ ID NO: 2273485 - RNA, 19 nt, Artificial Sequence
  Description of Artificial Sequence: Synthetic oligonucleotide
ggggcggccaaggccuggu

SEQ ID NO: 2273486 - RNA, 19 nt, Artificial Sequence
  Description of Artificial Sequence: Synthetic oligonucleotide
ccguccucucggaggccaa

SEQ ID NO: 2273487 - RNA, 19 nt, Artificial Sequence
  Description of Artificial Sequence: Synthetic oligonucleotide
cguccucucggaggccaaa

SEQ ID NO: 2273488 - RNA, 19 nt, Artificial Sequence
  Description of Artificial Sequence: Synthetic oligonucleotide
cgccguccucucggaggcc

SEQ ID NO: 2273489 - RNA, 19 nt, Artificial Sequence
  Description of Artificial Sequence: Synthetic oligonucleotide
aauucaauuccucaaacug

SEQ ID NO: 2273490 - RNA, 19 nt, Artificial Sequence
  Description of Artificial Sequence: Synthetic oligonucleotide
ugaauguggaaacaggaag

SEQ ID NO: 2273491 - RNA, 19 nt, Artificial Sequence
  Description of Artificial Sequence: Synthetic oligonucleotide
auguaugaaaucuucacag

SEQ ID NO: 2273492 - RNA, 19 nt, Artificial Sequence
  Description of Artificial Sequence: Synthetic oligonucleotide
uguugugucuccaaggugc

SEQ ID NO: 2273493 - RNA, 19 nt, Artificial Sequence
  Description of Artificial Sequence: Synthetic oligonucleotide
aauguaugaaaucuucaca

SEQ ID NO: 2273494 - RNA, 19 nt, Artificial Sequence
  Description of Artificial Sequence: Synthetic oligonucleotide
uccguugacaaaaugugcg

SEQ ID NO: 2273495 - RNA, 19 nt, Artificial Sequence
  Description of Artificial Sequence: Synthetic oligonucleotide
agugcuaacuauuugcuag

SEQ ID NO: 2273496 - RNA, 19 nt, Artificial Sequence
  Description of Artificial Sequence: Synthetic oligonucleotide
cuaacuauuugcuaggcac

SEQ ID NO: 2273497 - RNA, 19 nt, Artificial Sequence
  Description of Artificial Sequence: Synthetic oligonucleotide
agugauuuggggcagaugu

SEQ ID NO: 2273498 - RNA, 19 nt, Artificial Sequence
  Description of Artificial Sequence: Synthetic oligonucleotide
aaaaugugcgggcagagga

SEQ ID NO: 2273499 - RNA, 19 nt, Artificial Sequence
  Description of Artificial Sequence: Synthetic oligonucleotide
uuaguggucauguaugugc

SEQ ID NO: 2273500 - RNA, 19 nt, Artificial Sequence
  Description of Artificial Sequence: Synthetic oligonucleotide
uucaccguaaaauucacca

SEQ ID NO: 2273501 - RNA, 19 nt, Artificial Sequence
  Description of Artificial Sequence: Synthetic oligonucleotide
uaugaaaucuucacagaag

SEQ ID NO: 2273502 - RNA, 19 nt, Artificial Sequence
  Description of Artificial Sequence: Synthetic oligonucleotide
aagaucacgauguugugca

SEQ ID NO: 2273503 - RNA, 19 nt, Artificial Sequence
  Description of Artificial Sequence: Synthetic oligonucleotide
uacuguuuaguucucuggg

SEQ ID NO: 2273504 - RNA, 19 nt, Artificial Sequence
  Description of Artificial Sequence: Synthetic oligonucleotide
uuagcuuccuucuacaggu

SEQ ID NO: 2273505 - RNA, 19 nt, Artificial Sequence
  Description of Artificial Sequence: Synthetic oligonucleotide
augagugagacguuagugg

SEQ ID NO: 2273506 - RNA, 19 nt, Artificial Sequence
  Description of Artificial Sequence: Synthetic oligonucleotide
uugagugcuaacuauuugc

SEQ ID NO: 2273507 - RNA, 19 nt, Artificial Sequence
  Description of Artificial Sequence: Synthetic oligonucleotide
ucuaucaaauccccaauga

SEQ ID NO: 2273508 - RNA, 19 nt, Artificial Sequence
  Description of Artificial Sequence: Synthetic oligonucleotide
gauguugugcaccaggaug

SEQ ID NO: 2273509 - RNA, 19 nt, Artificial Sequence
  Description of Artificial Sequence: Synthetic oligonucleotide
uguuuauuaaaugugacuu

SEQ ID NO: 2273510 - RNA, 19 nt, Artificial Sequence
  Description of Artificial Sequence: Synthetic oligonucleotide
uauuaaaugugacuuucac

SEQ ID NO: 2273511 - RNA, 19 nt, Artificial Sequence
  Description of Artificial Sequence: Synthetic oligonucleotide
aaagccaccaacucauuga

SEQ ID NO: 2273512 - RNA, 19 nt, Artificial Sequence
  Description of Artificial Sequence: Synthetic oligonucleotide
ugaaguacacguaggaaga

SEQ ID NO: 2273513 - RNA, 19 nt, Artificial Sequence
  Description of Artificial Sequence: Synthetic oligonucleotide
uuuucuaucaaauccccaa

SEQ ID NO: 2273514 - RNA, 19 nt, Artificial Sequence
  Description of Artificial Sequence: Synthetic oligonucleotide
gccauuaucauccacgagg

SEQ ID NO: 2273515 - RNA, 19 nt, Artificial Sequence
  Description of Artificial Sequence: Synthetic oligonucleotide
aaaugugacuuucaccacu

SEQ ID NO: 2273516 - RNA, 19 nt, Artificial Sequence
  Description of Artificial Sequence: Synthetic oligonucleotide
uacuauuucucccagugaa

SEQ ID NO: 2273517 - RNA, 19 nt, Artificial Sequence
  Description of Artificial Sequence: Synthetic oligonucleotide
aguccuguuuauuaaaugu

SEQ ID NO: 2273518 - RNA, 19 nt, Artificial Sequence
  Description of Artificial Sequence: Synthetic oligonucleotide
uacagguacagccagugga

SEQ ID NO: 2273519 - RNA, 19 nt, Artificial Sequence
  Description of Artificial Sequence: Synthetic oligonucleotide
cauugaguugcucugcugg

SEQ ID NO: 2273520 - RNA, 19 nt, Artificial Sequence
  Description of Artificial Sequence: Synthetic oligonucleotide
uuuauuaaaugugacuuuc

SEQ ID NO: 2273521 - RNA, 19 nt, Artificial Sequence
  Description of Artificial Sequence: Synthetic oligonucleotide
uccucaaacuguaauugag

SEQ ID NO: 2273522 - RNA, 19 nt, Artificial Sequence
  Description of Artificial Sequence: Synthetic oligonucleotide
uuucaaucaaaacaugguu

SEQ ID NO: 2273523 - RNA, 19 nt, Artificial Sequence
  Description of Artificial Sequence: Synthetic oligonucleotide
cacauaggggaacugagcg

SEQ ID NO: 2273524 - RNA, 19 nt, Artificial Sequence
  Description of Artificial Sequence: Synthetic oligonucleotide
uucaaucaaaacaugguuu

SEQ ID NO: 2273525 - RNA, 19 nt, Artificial Sequence
  Description of Artificial Sequence: Synthetic oligonucleotide
uccuguuuauuaaauguga

SEQ ID NO: 2273526 - RNA, 19 nt, Artificial Sequence
  Description of Artificial Sequence: Synthetic oligonucleotide
uguaauugagugcuaacua

SEQ ID NO: 2273527 - RNA, 19 nt, Artificial Sequence
  Description of Artificial Sequence: Synthetic oligonucleotide
aggacauacuguuuaguuc

SEQ ID NO: 2273528 - RNA, 19 nt, Artificial Sequence
  Description of Artificial Sequence: Synthetic oligonucleotide
ucaaacuguaauugagugc

SEQ ID NO: 2273529 - RNA, 19 nt, Artificial Sequence
  Description of Artificial Sequence: Synthetic oligonucleotide
acacguaggaagauggucc

SEQ ID NO: 2273530 - RNA, 19 nt, Artificial Sequence
  Description of Artificial Sequence: Synthetic oligonucleotide
caauguaugaaaucuucac

SEQ ID NO: 2273531 - RNA, 19 nt, Artificial Sequence
  Description of Artificial Sequence: Synthetic oligonucleotide
ugugacuuucaccacuuug

SEQ ID NO: 2273532 - RNA, 19 nt, Artificial Sequence
  Description of Artificial Sequence: Synthetic oligonucleotide
cuaggcacagacuaggcac

SEQ ID NO: 2273533 - RNA, 19 nt, Artificial Sequence
  Description of Artificial Sequence: Synthetic oligonucleotide
aguacacguaggaagaugg

SEQ ID NO: 2273534 - RNA, 19 nt, Artificial Sequence
  Description of Artificial Sequence: Synthetic oligonucleotide
uggaauucgccccacaauc

SEQ ID NO: 2273535 - RNA, 19 nt, Artificial Sequence
  Description of Artificial Sequence: Synthetic oligonucleotide
ucaccagaugcucacuccg

SEQ ID NO: 2273536 - RNA, 19 nt, Artificial Sequence
  Description of Artificial Sequence: Synthetic oligonucleotide
uucuaucaaauccccaaug

SEQ ID NO: 2273537 - RNA, 19 nt, Artificial Sequence
  Description of Artificial Sequence: Synthetic oligonucleotide
uuauuaaaugugacuuuca

SEQ ID NO: 2273538 - RNA, 19 nt, Artificial Sequence
  Description of Artificial Sequence: Synthetic oligonucleotide
acuguuuaguucucugggg

SEQ ID NO: 2273539 - RNA, 19 nt, Artificial Sequence
  Description of Artificial Sequence: Synthetic oligonucleotide
aagcauuacaagggagucc

SEQ ID NO: 2273540 - RNA, 19 nt, Artificial Sequence
  Description of Artificial Sequence: Synthetic oligonucleotide
cguaaaauucaccagaugc

SEQ ID NO: 2273541 - RNA, 19 nt, Artificial Sequence
  Description of Artificial Sequence: Synthetic oligonucleotide
uacugaaccuggcugaaca

SEQ ID NO: 2273542 - RNA, 19 nt, Artificial Sequence
  Description of Artificial Sequence: Synthetic oligonucleotide
uccuccguugacaaaaugu

SEQ ID NO: 2273543 - RNA, 19 nt, Artificial Sequence
  Description of Artificial Sequence: Synthetic oligonucleotide
auuugcuaggcacagacua

SEQ ID NO: 2273544 - RNA, 19 nt, Artificial Sequence
  Description of Artificial Sequence: Synthetic oligonucleotide
acuguaauugagugcuaac

SEQ ID NO: 2273545 - RNA, 19 nt, Artificial Sequence
  Description of Artificial Sequence: Synthetic oligonucleotide
uaguguugugucuccaagg

SEQ ID NO: 2273546 - RNA, 19 nt, Artificial Sequence
  Description of Artificial Sequence: Synthetic oligonucleotide
uuugcuaggcacagacuag

SEQ ID NO: 2273547 - RNA, 19 nt, Artificial Sequence
  Description of Artificial Sequence: Synthetic oligonucleotide
uucaauuccucaaacugua

SEQ ID NO: 2273548 - RNA, 19 nt, Artificial Sequence
  Description of Artificial Sequence: Synthetic oligonucleotide
gagaacuaaaggcaggcuc

SEQ ID NO: 2273549 - RNA, 19 nt, Artificial Sequence
  Description of Artificial Sequence: Synthetic oligonucleotide
uaacuauuugcuaggcaca

SEQ ID NO: 2273550 - RNA, 19 nt, Artificial Sequence
  Description of Artificial Sequence: Synthetic oligonucleotide
augaagaucacgauguugu

SEQ ID NO: 2273551 - RNA, 19 nt, Artificial Sequence
  Description of Artificial Sequence: Synthetic oligonucleotide
auuuggggcagauguuagc

SEQ ID NO: 2273552 - RNA, 19 nt, Artificial Sequence
  Description of Artificial Sequence: Synthetic oligonucleotide
ugagugagacguuaguggu

SEQ ID NO: 2273553 - RNA, 19 nt, Artificial Sequence
  Description of Artificial Sequence: Synthetic oligonucleotide
uaaaauucaccagaugcuc

SEQ ID NO: 2273554 - RNA, 19 nt, Artificial Sequence
  Description of Artificial Sequence: Synthetic oligonucleotide
auaguguugugucuccaag

SEQ ID NO: 2273555 - RNA, 19 nt, Artificial Sequence
  Description of Artificial Sequence: Synthetic oligonucleotide
aaguuggaguuccugauuu

SEQ ID NO: 2273556 - RNA, 19 nt, Artificial Sequence
  Description of Artificial Sequence: Synthetic oligonucleotide
cuaaaggcaggcucuaaac

SEQ ID NO: 2273557 - RNA, 19 nt, Artificial Sequence
  Description of Artificial Sequence: Synthetic oligonucleotide
auugaguugcucugcuggg

SEQ ID NO: 2273558 - RNA, 19 nt, Artificial Sequence
  Description of Artificial Sequence: Synthetic oligonucleotide
aacagcuguggaauucgcc

SEQ ID NO: 2273559 - RNA, 19 nt, Artificial Sequence
  Description of Artificial Sequence: Synthetic oligonucleotide
acagacuaggcacugggca

SEQ ID NO: 2273560 - RNA, 19 nt, Artificial Sequence
  Description of Artificial Sequence: Synthetic oligonucleotide
guugacaaaaugugcgggc

SEQ ID NO: 2273561 - RNA, 19 nt, Artificial Sequence
  Description of Artificial Sequence: Synthetic oligonucleotide
caggugauacuauuucucc

SEQ ID NO: 2273562 - RNA, 19 nt, Artificial Sequence
  Description of Artificial Sequence: Synthetic oligonucleotide
ugacaucaagcauuacaag

SEQ ID NO: 2273563 - RNA, 19 nt, Artificial Sequence
  Description of Artificial Sequence: Synthetic oligonucleotide
auguugugcaccaggaugg

SEQ ID NO: 2273564 - RNA, 19 nt, Artificial Sequence
  Description of Artificial Sequence: Synthetic oligonucleotide
gaacagguuggucacugcc

SEQ ID NO: 2273565 - RNA, 19 nt, Artificial Sequence
  Description of Artificial Sequence: Synthetic oligonucleotide
ucaccguaaaauucaccag

SEQ ID NO: 2273566 - RNA, 19 nt, Artificial Sequence
  Description of Artificial Sequence: Synthetic oligonucleotide
uggccaauguaugaaaucu

SEQ ID NO: 2273567 - RNA, 19 nt, Artificial Sequence
  Description of Artificial Sequence: Synthetic oligonucleotide
uaauugagugcuaacuauu

SEQ ID NO: 2273568 - RNA, 19 nt, Artificial Sequence
  Description of Artificial Sequence: Synthetic oligonucleotide
ugggcagugauuuggggca

SEQ ID NO: 2273569 - RNA, 19 nt, Artificial Sequence
  Description of Artificial Sequence: Synthetic oligonucleotide
uaguggucauguaugugcc

SEQ ID NO: 2273570 - RNA, 19 nt, Artificial Sequence
  Description of Artificial Sequence: Synthetic oligonucleotide
uguuagcuuccuucuacag

SEQ ID NO: 2273571 - RNA, 19 nt, Artificial Sequence
  Description of Artificial Sequence: Synthetic oligonucleotide
gaagaucacgauguugugc

SEQ ID NO: 2273572 - RNA, 19 nt, Artificial Sequence
  Description of Artificial Sequence: Synthetic oligonucleotide
guaugaaaucuucacagaa

SEQ ID NO: 2273573 - RNA, 19 nt, Artificial Sequence
  Description of Artificial Sequence: Synthetic oligonucleotide
agcauuacaagggaguccu

SEQ ID NO: 2273574 - RNA, 19 nt, Artificial Sequence
  Description of Artificial Sequence: Synthetic oligonucleotide
ccaguggagaacuaaaggc

SEQ ID NO: 2273575 - RNA, 19 nt, Artificial Sequence
  Description of Artificial Sequence: Synthetic oligonucleotide
ugguccucccaccuuagcc

SEQ ID NO: 2273576 - RNA, 19 nt, Artificial Sequence
  Description of Artificial Sequence: Synthetic oligonucleotide
uuucuaucaaauccccaau

SEQ ID NO: 2273577 - RNA, 19 nt, Artificial Sequence
  Description of Artificial Sequence: Synthetic oligonucleotide
uccacgaggacugaaugug

SEQ ID NO: 2273578 - RNA, 19 nt, Artificial Sequence
  Description of Artificial Sequence: Synthetic oligonucleotide
gaccccaugugucaucucc

SEQ ID NO: 2273579 - RNA, 19 nt, Artificial Sequence
  Description of Artificial Sequence: Synthetic oligonucleotide
ugaaaucuucacagaaguc

SEQ ID NO: 2273580 - RNA, 19 nt, Artificial Sequence
  Description of Artificial Sequence: Synthetic oligonucleotide
aauguggaaacaggaagaa

SEQ ID NO: 2273581 - RNA, 19 nt, Artificial Sequence
  Description of Artificial Sequence: Synthetic oligonucleotide
cugacaggaggacauacug

SEQ ID NO: 2273582 - RNA, 19 nt, Artificial Sequence
  Description of Artificial Sequence: Synthetic oligonucleotide
gaguccuguuuauuaaaug

SEQ ID NO: 2273583 - RNA, 19 nt, Artificial Sequence
  Description of Artificial Sequence: Synthetic oligonucleotide
augacaucaagcauuacaa

SEQ ID NO: 2273584 - RNA, 19 nt, Artificial Sequence
  Description of Artificial Sequence: Synthetic oligonucleotide
gcagaugaaguacacguag

SEQ ID NO: 2273585 - RNA, 19 nt, Artificial Sequence
  Description of Artificial Sequence: Synthetic oligonucleotide
cuuucauguacugaaccug

SEQ ID NO: 2273586 - RNA, 19 nt, Artificial Sequence
  Description of Artificial Sequence: Synthetic oligonucleotide
uggagaacuaaaggcaggc

SEQ ID NO: 2273587 - RNA, 19 nt, Artificial Sequence
  Description of Artificial Sequence: Synthetic oligonucleotide
uguggaauucgccccacaa

SEQ ID NO: 2273588 - RNA, 19 nt, Artificial Sequence
  Description of Artificial Sequence: Synthetic oligonucleotide
uugcuaggcacagacuagg

SEQ ID NO: 2273589 - RNA, 19 nt, Artificial Sequence
  Description of Artificial Sequence: Synthetic oligonucleotide
uaggggaacugagcgaugg

SEQ ID NO: 2273590 - RNA, 19 nt, Artificial Sequence
  Description of Artificial Sequence: Synthetic oligonucleotide
gugcuaacuauuugcuagg

SEQ ID NO: 2273591 - RNA, 19 nt, Artificial Sequence
  Description of Artificial Sequence: Synthetic oligonucleotide
aauucgccccacaauccac

SEQ ID NO: 2273592 - RNA, 19 nt, Artificial Sequence
  Description of Artificial Sequence: Synthetic oligonucleotide
uacaagggaguccuguuua

SEQ ID NO: 2273593 - RNA, 19 nt, Artificial Sequence
  Description of Artificial Sequence: Synthetic oligonucleotide
agaacuaaaggcaggcucu

SEQ ID NO: 2273594 - RNA, 19 nt, Artificial Sequence
  Description of Artificial Sequence: Synthetic oligonucleotide
cccaccuuagccuucaccg

SEQ ID NO: 2273595 - RNA, 19 nt, Artificial Sequence
  Description of Artificial Sequence: Synthetic oligonucleotide
acugaauguggaaacagga

SEQ ID NO: 2273596 - RNA, 19 nt, Artificial Sequence
  Description of Artificial Sequence: Synthetic oligonucleotide
agaaguuggaguuccugau

SEQ ID NO: 2273597 - RNA, 19 nt, Artificial Sequence
  Description of Artificial Sequence: Synthetic oligonucleotide
uucaccagaugcucacucc

SEQ ID NO: 2273598 - RNA, 19 nt, Artificial Sequence
  Description of Artificial Sequence: Synthetic oligonucleotide
uugacaaaaugugcgggca

SEQ ID NO: 2273599 - RNA, 19 nt, Artificial Sequence
  Description of Artificial Sequence: Synthetic oligonucleotide
uuccucaaacuguaauuga

SEQ ID NO: 2273600 - RNA, 19 nt, Artificial Sequence
  Description of Artificial Sequence: Synthetic oligonucleotide
cuccguugacaaaaugugc

SEQ ID NO: 2273601 - RNA, 19 nt, Artificial Sequence
  Description of Artificial Sequence: Synthetic oligonucleotide
aaguacacguaggaagaug

SEQ ID NO: 2273602 - RNA, 19 nt, Artificial Sequence
  Description of Artificial Sequence: Synthetic oligonucleotide
agugagacguuagugguca

SEQ ID NO: 2273603 - RNA, 19 nt, Artificial Sequence
  Description of Artificial Sequence: Synthetic oligonucleotide
uguggccaauguaugaaau

SEQ ID NO: 2273604 - RNA, 19 nt, Artificial Sequence
  Description of Artificial Sequence: Synthetic oligonucleotide
aauccacauaguguugugu

SEQ ID NO: 2273605 - RNA, 19 nt, Artificial Sequence
  Description of Artificial Sequence: Synthetic oligonucleotide
aucacgauguugugcacca

SEQ ID NO: 2273606 - RNA, 19 nt, Artificial Sequence
  Description of Artificial Sequence: Synthetic oligonucleotide
caaacuguaauugagugcu

SEQ ID NO: 2273607 - RNA, 19 nt, Artificial Sequence
  Description of Artificial Sequence: Synthetic oligonucleotide
uauuucucccagugaauuc

SEQ ID NO: 2273608 - RNA, 19 nt, Artificial Sequence
  Description of Artificial Sequence: Synthetic oligonucleotide
uaaaugugacuuucaccac

SEQ ID NO: 2273609 - RNA, 19 nt, Artificial Sequence
  Description of Artificial Sequence: Synthetic oligonucleotide
uguuuaguucucugggguc

SEQ ID NO: 2273610 - RNA, 19 nt, Artificial Sequence
  Description of Artificial Sequence: Synthetic oligonucleotide
ugaagaucacgauguugug

SEQ ID NO: 2273611 - RNA, 19 nt, Artificial Sequence
  Description of Artificial Sequence: Synthetic oligonucleotide
uccagguugucauccuucc

SEQ ID NO: 2273612 - RNA, 19 nt, Artificial Sequence
  Description of Artificial Sequence: Synthetic oligonucleotide
aauugagugcuaacuauuu

SEQ ID NO: 2273613 - RNA, 19 nt, Artificial Sequence
  Description of Artificial Sequence: Synthetic oligonucleotide
cacaggauagaaguuggag

SEQ ID NO: 2273614 - RNA, 19 nt, Artificial Sequence
  Description of Artificial Sequence: Synthetic oligonucleotide
acuaaaggcaggcucuaaa

SEQ ID NO: 2273615 - RNA, 19 nt, Artificial Sequence
  Description of Artificial Sequence: Synthetic oligonucleotide
ugugcaccaggauggcagg

SEQ ID NO: 2273616 - RNA, 19 nt, Artificial Sequence
  Description of Artificial Sequence: Synthetic oligonucleotide
cuucuacagguacagccag

SEQ ID NO: 2273617 - RNA, 19 nt, Artificial Sequence
  Description of Artificial Sequence: Synthetic oligonucleotide
aacuguaauugagugcuaa

SEQ ID NO: 2273618 - RNA, 19 nt, Artificial Sequence
  Description of Artificial Sequence: Synthetic oligonucleotide
uauuugcuaggcacagacu

SEQ ID NO: 2273619 - RNA, 19 nt, Artificial Sequence
  Description of Artificial Sequence: Synthetic oligonucleotide
accaggauggcagguaccg

SEQ ID NO: 2273620 - RNA, 19 nt, Artificial Sequence
  Description of Artificial Sequence: Synthetic oligonucleotide
gcagguaccgugcagauga

SEQ ID NO: 2273621 - RNA, 19 nt, Artificial Sequence
  Description of Artificial Sequence: Synthetic oligonucleotide
ucucccagugaauuccaca

SEQ ID NO: 2273622 - RNA, 19 nt, Artificial Sequence
  Description of Artificial Sequence: Synthetic oligonucleotide
gaucacgauguugugcacc

SEQ ID NO: 2273623 - RNA, 19 nt, Artificial Sequence
  Description of Artificial Sequence: Synthetic oligonucleotide
cagacuaggcacugggcag

SEQ ID NO: 2273624 - RNA, 19 nt, Artificial Sequence
  Description of Artificial Sequence: Synthetic oligonucleotide
gauuuggggcagauguuag

SEQ ID NO: 2273625 - RNA, 19 nt, Artificial Sequence
  Description of Artificial Sequence: Synthetic oligonucleotide
augccauuaucauccacga

SEQ ID NO: 2273626 - RNA, 19 nt, Artificial Sequence
  Description of Artificial Sequence: Synthetic oligonucleotide
gccaguggagaacuaaagg

SEQ ID NO: 2273627 - RNA, 19 nt, Artificial Sequence
  Description of Artificial Sequence: Synthetic oligonucleotide
cauguaugugccaaccaca

SEQ ID NO: 2273628 - RNA, 19 nt, Artificial Sequence
  Description of Artificial Sequence: Synthetic oligonucleotide
ggugauacuauuucuccca

SEQ ID NO: 2273629 - RNA, 19 nt, Artificial Sequence
  Description of Artificial Sequence: Synthetic oligonucleotide
auacuauuucucccaguga

SEQ ID NO: 2273630 - RNA, 19 nt, Artificial Sequence
  Description of Artificial Sequence: Synthetic oligonucleotide
aggaggacauacuguuuag

SEQ ID NO: 2273631 - RNA, 19 nt, Artificial Sequence
  Description of Artificial Sequence: Synthetic oligonucleotide
gugauacuauuucucccag

SEQ ID NO: 2273632 - RNA, 19 nt, Artificial Sequence
  Description of Artificial Sequence: Synthetic oligonucleotide
uucaccacuuugaugccau

SEQ ID NO: 2273633 - RNA, 19 nt, Artificial Sequence
  Description of Artificial Sequence: Synthetic oligonucleotide
accacuuugaugccauuau

SEQ ID NO: 2273634 - RNA, 19 nt, Artificial Sequence
  Description of Artificial Sequence: Synthetic oligonucleotide
cugagcgauggcuuccucc

SEQ ID NO: 2273635 - RNA, 19 nt, Artificial Sequence
  Description of Artificial Sequence: Synthetic oligonucleotide
auguaugugccaaccacag

SEQ ID NO: 2273636 - RNA, 19 nt, Artificial Sequence
  Description of Artificial Sequence: Synthetic oligonucleotide
gacguagcccgcuccuugg

SEQ ID NO: 2273637 - RNA, 19 nt, Artificial Sequence
  Description of Artificial Sequence: Synthetic oligonucleotide
uggggcagauguuagcuuc

SEQ ID NO: 2273638 - RNA, 19 nt, Artificial Sequence
  Description of Artificial Sequence: Synthetic oligonucleotide
auagaaguuggaguuccug

SEQ ID NO: 2273639 - RNA, 19 nt, Artificial Sequence
  Description of Artificial Sequence: Synthetic oligonucleotide
uuacaagggaguccuguuu

SEQ ID NO: 2273640 - RNA, 19 nt, Artificial Sequence
  Description of Artificial Sequence: Synthetic oligonucleotide
gaauucgccccacaaucca

SEQ ID NO: 2273641 - RNA, 19 nt, Artificial Sequence
  Description of Artificial Sequence: Synthetic oligonucleotide
ucauccacgaggacugaau

SEQ ID NO: 2273642 - RNA, 19 nt, Artificial Sequence
  Description of Artificial Sequence: Synthetic oligonucleotide
gacauguggccaauguaug

SEQ ID NO: 2273643 - RNA, 19 nt, Artificial Sequence
  Description of Artificial Sequence: Synthetic oligonucleotide
caggauggcagguaccgug

SEQ ID NO: 2273644 - RNA, 19 nt, Artificial Sequence
  Description of Artificial Sequence: Synthetic oligonucleotide
ucauugaguugcucugcug

SEQ ID NO: 2273645 - RNA, 19 nt, Artificial Sequence
  Description of Artificial Sequence: Synthetic oligonucleotide
cacauaguguugugucucc

SEQ ID NO: 2273646 - RNA, 19 nt, Artificial Sequence
  Description of Artificial Sequence: Synthetic oligonucleotide
caccguaaaauucaccaga

SEQ ID NO: 2273647 - RNA, 19 nt, Artificial Sequence
  Description of Artificial Sequence: Synthetic oligonucleotide
uacacguaggaagaugguc

SEQ ID NO: 2273648 - RNA, 19 nt, Artificial Sequence
  Description of Artificial Sequence: Synthetic oligonucleotide
auguuagcuuccuucuaca

SEQ ID NO: 2273649 - RNA, 19 nt, Artificial Sequence
  Description of Artificial Sequence: Synthetic oligonucleotide
ugcugagaccccauguguc

SEQ ID NO: 2273650 - RNA, 19 nt, Artificial Sequence
  Description of Artificial Sequence: Synthetic oligonucleotide
ugccauuaucauccacgag

SEQ ID NO: 2273651 - RNA, 19 nt, Artificial Sequence
  Description of Artificial Sequence: Synthetic oligonucleotide
uagccuucaccguaaaauu

SEQ ID NO: 2273652 - RNA, 19 nt, Artificial Sequence
  Description of Artificial Sequence: Synthetic oligonucleotide
cugaaccuggcugaacagg

SEQ ID NO: 2273653 - RNA, 19 nt, Artificial Sequence
  Description of Artificial Sequence: Synthetic oligonucleotide
acguuaguggucauguaug

SEQ ID NO: 2273654 - RNA, 19 nt, Artificial Sequence
  Description of Artificial Sequence: Synthetic oligonucleotide
gaugaaguacacguaggaa

SEQ ID NO: 2273655 - RNA, 19 nt, Artificial Sequence
  Description of Artificial Sequence: Synthetic oligonucleotide
cauccacgaggacugaaug

SEQ ID NO: 2273656 - RNA, 19 nt, Artificial Sequence
  Description of Artificial Sequence: Synthetic oligonucleotide
aaugugacuuucaccacuu

SEQ ID NO: 2273657 - RNA, 19 nt, Artificial Sequence
  Description of Artificial Sequence: Synthetic oligonucleotide
acauaggggaacugagcga

SEQ ID NO: 2273658 - RNA, 19 nt, Artificial Sequence
  Description of Artificial Sequence: Synthetic oligonucleotide
guuggucacugccacagga

SEQ ID NO: 2273659 - RNA, 19 nt, Artificial Sequence
  Description of Artificial Sequence: Synthetic oligonucleotide
caagcauuacaagggaguc

SEQ ID NO: 2273660 - RNA, 19 nt, Artificial Sequence
  Description of Artificial Sequence: Synthetic oligonucleotide
aggggaacugagcgauggc

SEQ ID NO: 2273661 - RNA, 19 nt, Artificial Sequence
  Description of Artificial Sequence: Synthetic oligonucleotide
cuaucaaauccccaaugaa

SEQ ID NO: 2273662 - RNA, 19 nt, Artificial Sequence
  Description of Artificial Sequence: Synthetic oligonucleotide
agaucacgauguugugcac

SEQ ID NO: 2273663 - RNA, 19 nt, Artificial Sequence
  Description of Artificial Sequence: Synthetic oligonucleotide
guaauugagugcuaacuau

SEQ ID NO: 2273664 - RNA, 19 nt, Artificial Sequence
  Description of Artificial Sequence: Synthetic oligonucleotide
uaccgugcagaugaaguac

SEQ ID NO: 2273665 - RNA, 19 nt, Artificial Sequence
  Description of Artificial Sequence: Synthetic oligonucleotide
ucauccuuccuccguugac

SEQ ID NO: 2273666 - RNA, 19 nt, Artificial Sequence
  Description of Artificial Sequence: Synthetic oligonucleotide
auccacgaggacugaaugu

SEQ ID NO: 2273667 - RNA, 19 nt, Artificial Sequence
  Description of Artificial Sequence: Synthetic oligonucleotide
ugcuaacuauuugcuaggc

SEQ ID NO: 2273668 - RNA, 19 nt, Artificial Sequence
  Description of Artificial Sequence: Synthetic oligonucleotide
cccagugaauuccacauag

SEQ ID NO: 2273669 - RNA, 19 nt, Artificial Sequence
  Description of Artificial Sequence: Synthetic oligonucleotide
caaaaugugcgggcagagg

SEQ ID NO: 2273670 - RNA, 19 nt, Artificial Sequence
  Description of Artificial Sequence: Synthetic oligonucleotide
agccuucaccguaaaauuc

SEQ ID NO: 2273671 - RNA, 19 nt, Artificial Sequence
  Description of Artificial Sequence: Synthetic oligonucleotide
ucuaaacagcuguggaauu

SEQ ID NO: 2273672 - RNA, 19 nt, Artificial Sequence
  Description of Artificial Sequence: Synthetic oligonucleotide
ucccaccuuagccuucacc

SEQ ID NO: 2273673 - RNA, 19 nt, Artificial Sequence
  Description of Artificial Sequence: Synthetic oligonucleotide
uuuaguucucuggggucgc

SEQ ID NO: 2273674 - RNA, 19 nt, Artificial Sequence
  Description of Artificial Sequence: Synthetic oligonucleotide
ugagacguuaguggucaug

SEQ ID NO: 2273675 - RNA, 19 nt, Artificial Sequence
  Description of Artificial Sequence: Synthetic oligonucleotide
cuacagguacagccagugg

SEQ ID NO: 2273676 - RNA, 19 nt, Artificial Sequence
  Description of Artificial Sequence: Synthetic oligonucleotide
gacguuaguggucauguau

SEQ ID NO: 2273677 - RNA, 19 nt, Artificial Sequence
  Description of Artificial Sequence: Synthetic oligonucleotide
guagcccgcuccuuggcag

SEQ ID NO: 2273678 - RNA, 19 nt, Artificial Sequence
  Description of Artificial Sequence: Synthetic oligonucleotide
aauucaccagaugcucacu

SEQ ID NO: 2273679 - RNA, 19 nt, Artificial Sequence
  Description of Artificial Sequence: Synthetic oligonucleotide
cacagacuaggcacugggc

SEQ ID NO: 2273680 - RNA, 19 nt, Artificial Sequence
  Description of Artificial Sequence: Synthetic oligonucleotide
aggcucuaaacagcugugg

SEQ ID NO: 2273681 - RNA, 19 nt, Artificial Sequence
  Description of Artificial Sequence: Synthetic oligonucleotide
ccuccguugacaaaaugug

SEQ ID NO: 2273682 - RNA, 19 nt, Artificial Sequence
  Description of Artificial Sequence: Synthetic oligonucleotide
ugucauccuuccuccguug

SEQ ID NO: 2273683 - RNA, 19 nt, Artificial Sequence
  Description of Artificial Sequence: Synthetic oligonucleotide
cacugggcagugauuuggg

SEQ ID NO: 2273684 - RNA, 19 nt, Artificial Sequence
  Description of Artificial Sequence: Synthetic oligonucleotide
uccucaugaagaucacgau

SEQ ID NO: 2273685 - RNA, 19 nt, Artificial Sequence
  Description of Artificial Sequence: Synthetic oligonucleotide
uucuacagguacagccagu

SEQ ID NO: 2273686 - RNA, 19 nt, Artificial Sequence
  Description of Artificial Sequence: Synthetic oligonucleotide
caaauccccaaugaauuca

SEQ ID NO: 2273687 - RNA, 19 nt, Artificial Sequence
  Description of Artificial Sequence: Synthetic oligonucleotide
uaugugccaaccacagcuu

SEQ ID NO: 2273688 - RNA, 19 nt, Artificial Sequence
  Description of Artificial Sequence: Synthetic oligonucleotide
agggaguccuguuuauuaa

SEQ ID NO: 2273689 - RNA, 19 nt, Artificial Sequence
  Description of Artificial Sequence: Synthetic oligonucleotide
aaggugcucugggacaugu

SEQ ID NO: 2273690 - RNA, 19 nt, Artificial Sequence
  Description of Artificial Sequence: Synthetic oligonucleotide
cacaauccacauaguguug

SEQ ID NO: 2273691 - RNA, 19 nt, Artificial Sequence
  Description of Artificial Sequence: Synthetic oligonucleotide
guggccaauguaugaaauc

SEQ ID NO: 2273692 - RNA, 19 nt, Artificial Sequence
  Description of Artificial Sequence: Synthetic oligonucleotide
agaugguccucccaccuua

SEQ ID NO: 2273693 - RNA, 19 nt, Artificial Sequence
  Description of Artificial Sequence: Synthetic oligonucleotide
uuccuccguugacaaaaug

SEQ ID NO: 2273694 - RNA, 19 nt, Artificial Sequence
  Description of Artificial Sequence: Synthetic oligonucleotide
guuaguggucauguaugug

SEQ ID NO: 2273695 - RNA, 19 nt, Artificial Sequence
  Description of Artificial Sequence: Synthetic oligonucleotide
gaggacauacuguuuaguu

SEQ ID NO: 2273696 - RNA, 19 nt, Artificial Sequence
  Description of Artificial Sequence: Synthetic oligonucleotide
uggccaugacaucaagcau

SEQ ID NO: 2273697 - RNA, 19 nt, Artificial Sequence
  Description of Artificial Sequence: Synthetic oligonucleotide
ggaucaaagccaccaacuc

SEQ ID NO: 2273698 - RNA, 19 nt, Artificial Sequence
  Description of Artificial Sequence: Synthetic oligonucleotide
uugaguugcucugcuggga

SEQ ID NO: 2273699 - RNA, 19 nt, Artificial Sequence
  Description of Artificial Sequence: Synthetic oligonucleotide
ggacugaauguggaaacag

SEQ ID NO: 2273700 - RNA, 19 nt, Artificial Sequence
  Description of Artificial Sequence: Synthetic oligonucleotide
gaaugagugagacguuagu

SEQ ID NO: 2273701 - RNA, 19 nt, Artificial Sequence
  Description of Artificial Sequence: Synthetic oligonucleotide
aagaugguccucccaccuu

SEQ ID NO: 2273702 - RNA, 19 nt, Artificial Sequence
  Description of Artificial Sequence: Synthetic oligonucleotide
caggcucuaaacagcugug

SEQ ID NO: 2273703 - RNA, 19 nt, Artificial Sequence
  Description of Artificial Sequence: Synthetic oligonucleotide
gagacguuaguggucaugu

SEQ ID NO: 2273704 - RNA, 19 nt, Artificial Sequence
  Description of Artificial Sequence: Synthetic oligonucleotide
agccaguggagaacuaaag

SEQ ID NO: 2273705 - RNA, 19 nt, Artificial Sequence
  Description of Artificial Sequence: Synthetic oligonucleotide
agguacagccaguggagaa

SEQ ID NO: 2273706 - RNA, 19 nt, Artificial Sequence
  Description of Artificial Sequence: Synthetic oligonucleotide
aggagacagagcaggacug

SEQ ID NO: 2273707 - RNA, 19 nt, Artificial Sequence
  Description of Artificial Sequence: Synthetic oligonucleotide
guuuauuaaaugugacuuu

SEQ ID NO: 2273708 - RNA, 19 nt, Artificial Sequence
  Description of Artificial Sequence: Synthetic oligonucleotide
cagcuuucauguacugaac

SEQ ID NO: 2273709 - RNA, 19 nt, Artificial Sequence
  Description of Artificial Sequence: Synthetic oligonucleotide
caggauagaaguuggaguu

SEQ ID NO: 2273710 - RNA, 19 nt, Artificial Sequence
  Description of Artificial Sequence: Synthetic oligonucleotide
ccguugacaaaaugugcgg

SEQ ID NO: 2273711 - RNA, 19 nt, Artificial Sequence
  Description of Artificial Sequence: Synthetic oligonucleotide
ggaaugagugagacguuag

SEQ ID NO: 2273712 - RNA, 19 nt, Artificial Sequence
  Description of Artificial Sequence: Synthetic oligonucleotide
ugggacguagcccgcuccu

SEQ ID NO: 2273713 - RNA, 19 nt, Artificial Sequence
  Description of Artificial Sequence: Synthetic oligonucleotide
ggucauguaugugccaacc

SEQ ID NO: 2273714 - RNA, 19 nt, Artificial Sequence
  Description of Artificial Sequence: Synthetic oligonucleotide
aggacugaauguggaaaca

SEQ ID NO: 2273715 - RNA, 19 nt, Artificial Sequence
  Description of Artificial Sequence: Synthetic oligonucleotide
uggggucgcagccucuggu

SEQ ID NO: 2273716 - RNA, 19 nt, Artificial Sequence
  Description of Artificial Sequence: Synthetic oligonucleotide
aacugagcgauggcuuccu

SEQ ID NO: 2273717 - RNA, 19 nt, Artificial Sequence
  Description of Artificial Sequence: Synthetic oligonucleotide
accguaaaauucaccagau

SEQ ID NO: 2273718 - RNA, 19 nt, Artificial Sequence
  Description of Artificial Sequence: Synthetic oligonucleotide
caggugugacaggugauac

SEQ ID NO: 2273719 - RNA, 19 nt, Artificial Sequence
  Description of Artificial Sequence: Synthetic oligonucleotide
uguugugcaccaggauggc

SEQ ID NO: 2273720 - RNA, 19 nt, Artificial Sequence
  Description of Artificial Sequence: Synthetic oligonucleotide
uagcccgcuccuuggcagg

SEQ ID NO: 2273721 - RNA, 19 nt, Artificial Sequence
  Description of Artificial Sequence: Synthetic oligonucleotide
gagacagagcaggacugac

SEQ ID NO: 2273722 - RNA, 19 nt, Artificial Sequence
  Description of Artificial Sequence: Synthetic oligonucleotide
caggaggacauacuguuua

SEQ ID NO: 2273723 - RNA, 19 nt, Artificial Sequence
  Description of Artificial Sequence: Synthetic oligonucleotide
cgccccacaauccacauag

SEQ ID NO: 2273724 - RNA, 19 nt, Artificial Sequence
  Description of Artificial Sequence: Synthetic oligonucleotide
gagugcuaacuauuugcua

SEQ ID NO: 2273725 - RNA, 19 nt, Artificial Sequence
  Description of Artificial Sequence: Synthetic oligonucleotide
cuguaauugagugcuaacu

SEQ ID NO: 2273726 - RNA, 19 nt, Artificial Sequence
  Description of Artificial Sequence: Synthetic oligonucleotide
cauuaucauccacgaggac

SEQ ID NO: 2273727 - RNA, 19 nt, Artificial Sequence
  Description of Artificial Sequence: Synthetic oligonucleotide
auccuuccuccguugacaa

SEQ ID NO: 2273728 - RNA, 19 nt, Artificial Sequence
  Description of Artificial Sequence: Synthetic oligonucleotide
acgauguugugcaccagga

SEQ ID NO: 2273729 - RNA, 19 nt, Artificial Sequence
  Description of Artificial Sequence: Synthetic oligonucleotide
gaugguccucccaccuuag

SEQ ID NO: 2273730 - RNA, 19 nt, Artificial Sequence
  Description of Artificial Sequence: Synthetic oligonucleotide
cauaguguugugucuccaa

SEQ ID NO: 2273731 - RNA, 19 nt, Artificial Sequence
  Description of Artificial Sequence: Synthetic oligonucleotide
ucccagugaauuccacaua

SEQ ID NO: 2273732 - RNA, 19 nt, Artificial Sequence
  Description of Artificial Sequence: Synthetic oligonucleotide
cuguuuaguucucuggggu

SEQ ID NO: 2273733 - RNA, 19 nt, Artificial Sequence
  Description of Artificial Sequence: Synthetic oligonucleotide
cacgaggacugaaugugga

SEQ ID NO: 2273734 - RNA, 19 nt, Artificial Sequence
  Description of Artificial Sequence: Synthetic oligonucleotide
acgaggacugaauguggaa

SEQ ID NO: 2273735 - RNA, 19 nt, Artificial Sequence
  Description of Artificial Sequence: Synthetic oligonucleotide
aacuaaaggcaggcucuaa

SEQ ID NO: 2273736 - RNA, 19 nt, Artificial Sequence
  Description of Artificial Sequence: Synthetic oligonucleotide
gccaauguaugaaaucuuc

SEQ ID NO: 2273737 - RNA, 19 nt, Artificial Sequence
  Description of Artificial Sequence: Synthetic oligonucleotide
acuauuucucccagugaau

SEQ ID NO: 2273738 - RNA, 19 nt, Artificial Sequence
  Description of Artificial Sequence: Synthetic oligonucleotide
ccaauguaugaaaucuuca

SEQ ID NO: 2273739 - RNA, 19 nt, Artificial Sequence
  Description of Artificial Sequence: Synthetic oligonucleotide
ggcucuaaacagcugugga

SEQ ID NO: 2273740 - RNA, 19 nt, Artificial Sequence
  Description of Artificial Sequence: Synthetic oligonucleotide
guaccgugcagaugaagua

SEQ ID NO: 2273741 - RNA, 19 nt, Artificial Sequence
  Description of Artificial Sequence: Synthetic oligonucleotide
caccaggauggcagguacc

SEQ ID NO: 2273742 - RNA, 19 nt, Artificial Sequence
  Description of Artificial Sequence: Synthetic oligonucleotide
ggugugacaggugauacua

SEQ ID NO: 2273743 - RNA, 19 nt, Artificial Sequence
  Description of Artificial Sequence: Synthetic oligonucleotide
ccacauaggggaacugagc

SEQ ID NO: 2273744 - RNA, 19 nt, Artificial Sequence
  Description of Artificial Sequence: Synthetic oligonucleotide
ugagaccccaugugucauc

SEQ ID NO: 2273745 - RNA, 19 nt, Artificial Sequence
  Description of Artificial Sequence: Synthetic oligonucleotide
gcuaacuauuugcuaggca

SEQ ID NO: 2273746 - RNA, 19 nt, Artificial Sequence
  Description of Artificial Sequence: Synthetic oligonucleotide
gagugagacguuagugguc

SEQ ID NO: 2273747 - RNA, 19 nt, Artificial Sequence
  Description of Artificial Sequence: Synthetic oligonucleotide
acuauuugcuaggcacaga

SEQ ID NO: 2273748 - RNA, 19 nt, Artificial Sequence
  Description of Artificial Sequence: Synthetic oligonucleotide
cucuaaacagcuguggaau

SEQ ID NO: 2273749 - RNA, 19 nt, Artificial Sequence
  Description of Artificial Sequence: Synthetic oligonucleotide
ccagaugcucacuccgagg

SEQ ID NO: 2273750 - RNA, 19 nt, Artificial Sequence
  Description of Artificial Sequence: Synthetic oligonucleotide
cauccuuccuccguugaca

SEQ ID NO: 2273751 - RNA, 19 nt, Artificial Sequence
  Description of Artificial Sequence: Synthetic oligonucleotide
cugggacguagcccgcucc

SEQ ID NO: 2273752 - RNA, 19 nt, Artificial Sequence
  Description of Artificial Sequence: Synthetic oligonucleotide
acauaguguugugucucca

SEQ ID NO: 2273753 - RNA, 19 nt, Artificial Sequence
  Description of Artificial Sequence: Synthetic oligonucleotide
gguacagccaguggagaac

SEQ ID NO: 2273754 - RNA, 19 nt, Artificial Sequence
  Description of Artificial Sequence: Synthetic oligonucleotide
gcucuaaacagcuguggaa

SEQ ID NO: 2273755 - RNA, 19 nt, Artificial Sequence
  Description of Artificial Sequence: Synthetic oligonucleotide
uuccuucuacagguacagc

SEQ ID NO: 2273756 - RNA, 19 nt, Artificial Sequence
  Description of Artificial Sequence: Synthetic oligonucleotide
gcuuucauguacugaaccu

SEQ ID NO: 2273757 - RNA, 19 nt, Artificial Sequence
  Description of Artificial Sequence: Synthetic oligonucleotide
ccuucuacagguacagcca

SEQ ID NO: 2273758 - RNA, 19 nt, Artificial Sequence
  Description of Artificial Sequence: Synthetic oligonucleotide
gaaguuggaguuccugauu

SEQ ID NO: 2273759 - RNA, 19 nt, Artificial Sequence
  Description of Artificial Sequence: Synthetic oligonucleotide
aggcaggcucuaaacagcu

SEQ ID NO: 2273760 - RNA, 19 nt, Artificial Sequence
  Description of Artificial Sequence: Synthetic oligonucleotide
cguugacaaaaugugcggg

SEQ ID NO: 2273761 - RNA, 19 nt, Artificial Sequence
  Description of Artificial Sequence: Synthetic oligonucleotide
agguaccgugcagaugaag

SEQ ID NO: 2273762 - RNA, 19 nt, Artificial Sequence
  Description of Artificial Sequence: Synthetic oligonucleotide
ccccacaauccacauagug

SEQ ID NO: 2273763 - RNA, 19 nt, Artificial Sequence
  Description of Artificial Sequence: Synthetic oligonucleotide
acguaggaagaugguccuc

SEQ ID NO: 2273764 - RNA, 19 nt, Artificial Sequence
  Description of Artificial Sequence: Synthetic oligonucleotide
gcuaggcacagacuaggca

SEQ ID NO: 2273765 - RNA, 19 nt, Artificial Sequence
  Description of Artificial Sequence: Synthetic oligonucleotide
gccuucaccguaaaauuca

SEQ ID NO: 2273766 - RNA, 19 nt, Artificial Sequence
  Description of Artificial Sequence: Synthetic oligonucleotide
uuaguucucuggggucgca

SEQ ID NO: 2273767 - RNA, 19 nt, Artificial Sequence
  Description of Artificial Sequence: Synthetic oligonucleotide
ggacguagcccgcuccuug

SEQ ID NO: 2273768 - RNA, 19 nt, Artificial Sequence
  Description of Artificial Sequence: Synthetic oligonucleotide
uucgccccacaauccacau

SEQ ID NO: 2273769 - RNA, 19 nt, Artificial Sequence
  Description of Artificial Sequence: Synthetic oligonucleotide
cauuacaagggaguccugu

SEQ ID NO: 2273770 - RNA, 19 nt, Artificial Sequence
  Description of Artificial Sequence: Synthetic oligonucleotide
uggcagguaccgugcagau

SEQ ID NO: 2273771 - RNA, 19 nt, Artificial Sequence
  Description of Artificial Sequence: Synthetic oligonucleotide
cauaggggaacugagcgau

SEQ ID NO: 2273772 - RNA, 19 nt, Artificial Sequence
  Description of Artificial Sequence: Synthetic oligonucleotide
agaccccaugugucaucuc

SEQ ID NO: 2273773 - RNA, 19 nt, Artificial Sequence
  Description of Artificial Sequence: Synthetic oligonucleotide
ugugcgggcagaggaggaa

SEQ ID NO: 2273774 - RNA, 19 nt, Artificial Sequence
  Description of Artificial Sequence: Synthetic oligonucleotide
gguaccgugcagaugaagu

SEQ ID NO: 2273775 - RNA, 19 nt, Artificial Sequence
  Description of Artificial Sequence: Synthetic oligonucleotide
ccuucaccguaaaauucac

SEQ ID NO: 2273776 - RNA, 19 nt, Artificial Sequence
  Description of Artificial Sequence: Synthetic oligonucleotide
gacuaggcacugggcagug

SEQ ID NO: 2273777 - RNA, 19 nt, Artificial Sequence
  Description of Artificial Sequence: Synthetic oligonucleotide
cagccaguggagaacuaaa

SEQ ID NO: 2273778 - RNA, 19 nt, Artificial Sequence
  Description of Artificial Sequence: Synthetic oligonucleotide
gaacuaaaggcaggcucua

SEQ ID NO: 2273779 - RNA, 19 nt, Artificial Sequence
  Description of Artificial Sequence: Synthetic oligonucleotide
aaacuguaauugagugcua

SEQ ID NO: 2273780 - RNA, 19 nt, Artificial Sequence
  Description of Artificial Sequence: Synthetic oligonucleotide
ggacauguggccaauguau

SEQ ID NO: 2273781 - RNA, 19 nt, Artificial Sequence
  Description of Artificial Sequence: Synthetic oligonucleotide
agacguuaguggucaugua

SEQ ID NO: 2273782 - RNA, 19 nt, Artificial Sequence
  Description of Artificial Sequence: Synthetic oligonucleotide
cuggggucgcagccucugg

SEQ ID NO: 2273783 - RNA, 19 nt, Artificial Sequence
  Description of Artificial Sequence: Synthetic oligonucleotide
cuuagccuucaccguaaaa

SEQ ID NO: 2273784 - RNA, 19 nt, Artificial Sequence
  Description of Artificial Sequence: Synthetic oligonucleotide
ccaccaacucauugaguug

SEQ ID NO: 2273785 - RNA, 19 nt, Artificial Sequence
  Description of Artificial Sequence: Synthetic oligonucleotide
caccuuagccuucaccgua

SEQ ID NO: 2273786 - RNA, 19 nt, Artificial Sequence
  Description of Artificial Sequence: Synthetic oligonucleotide
cagaaguccucaugaagau

SEQ ID NO: 2273787 - RNA, 19 nt, Artificial Sequence
  Description of Artificial Sequence: Synthetic oligonucleotide
cccacaauccacauagugu

SEQ ID NO: 2273788 - RNA, 19 nt, Artificial Sequence
  Description of Artificial Sequence: Synthetic oligonucleotide
guggaauucgccccacaau

SEQ ID NO: 2273789 - RNA, 19 nt, Artificial Sequence
  Description of Artificial Sequence: Synthetic oligonucleotide
gguccucccaccuuagccu

SEQ ID NO: 2273790 - RNA, 19 nt, Artificial Sequence
  Description of Artificial Sequence: Synthetic oligonucleotide
gagaccccaugugucaucu

SEQ ID NO: 2273791 - RNA, 19 nt, Artificial Sequence
  Description of Artificial Sequence: Synthetic oligonucleotide
aucauccacgaggacugaa

SEQ ID NO: 2273792 - RNA, 19 nt, Artificial Sequence
  Description of Artificial Sequence: Synthetic oligonucleotide
cacguaggaagaugguccu

SEQ ID NO: 2273793 - RNA, 19 nt, Artificial Sequence
  Description of Artificial Sequence: Synthetic oligonucleotide
ccguaaaauucaccagaug

SEQ ID NO: 2273794 - RNA, 19 nt, Artificial Sequence
  Description of Artificial Sequence: Synthetic oligonucleotide
cagugauuuggggcagaug

SEQ ID NO: 2273795 - RNA, 19 nt, Artificial Sequence
  Description of Artificial Sequence: Synthetic oligonucleotide
aggcacagacuaggcacug

SEQ ID NO: 2273796 - RNA, 19 nt, Artificial Sequence
  Description of Artificial Sequence: Synthetic oligonucleotide
guacugaaccuggcugaac

SEQ ID NO: 2273797 - RNA, 19 nt, Artificial Sequence
  Description of Artificial Sequence: Synthetic oligonucleotide
gauagaaguuggaguuccu

SEQ ID NO: 2273798 - RNA, 19 nt, Artificial Sequence
  Description of Artificial Sequence: Synthetic oligonucleotide
ccacaauccacauaguguu

SEQ ID NO: 2273799 - RNA, 19 nt, Artificial Sequence
  Description of Artificial Sequence: Synthetic oligonucleotide
ggcacagacuaggcacugg

SEQ ID NO: 2273800 - RNA, 19 nt, Artificial Sequence
  Description of Artificial Sequence: Synthetic oligonucleotide
auaggggaacugagcgaug

SEQ ID NO: 2273801 - RNA, 19 nt, Artificial Sequence
  Description of Artificial Sequence: Synthetic oligonucleotide
augugacuuucaccacuuu

SEQ ID NO: 2273802 - RNA, 19 nt, Artificial Sequence
  Description of Artificial Sequence: Synthetic oligonucleotide
gaaguacacguaggaagau

SEQ ID NO: 2273803 - RNA, 19 nt, Artificial Sequence
  Description of Artificial Sequence: Synthetic oligonucleotide
accuuagccuucaccguaa

SEQ ID NO: 2273804 - RNA, 19 nt, Artificial Sequence
  Description of Artificial Sequence: Synthetic oligonucleotide
ucgccccacaauccacaua

SEQ ID NO: 2273805 - RNA, 19 nt, Artificial Sequence
  Description of Artificial Sequence: Synthetic oligonucleotide
gggacauguggccaaugua

SEQ ID NO: 2273806 - RNA, 19 nt, Artificial Sequence
  Description of Artificial Sequence: Synthetic oligonucleotide
gggaaugagugagacguua

SEQ ID NO: 2273807 - RNA, 19 nt, Artificial Sequence
  Description of Artificial Sequence: Synthetic oligonucleotide
ggucgcagccucuggucac

SEQ ID NO: 2273808 - RNA, 19 nt, Artificial Sequence
  Description of Artificial Sequence: Synthetic oligonucleotide
acaggaggacauacuguuu

SEQ ID NO: 2273809 - RNA, 19 nt, Artificial Sequence
  Description of Artificial Sequence: Synthetic oligonucleotide
ugcugggacguagcccgcu

SEQ ID NO: 2273810 - RNA, 19 nt, Artificial Sequence
  Description of Artificial Sequence: Synthetic oligonucleotide
ccugauuuucaggguggcc

SEQ ID NO: 2273811 - RNA, 19 nt, Artificial Sequence
  Description of Artificial Sequence: Synthetic oligonucleotide
gggucgcagccucugguca

SEQ ID NO: 2273812 - RNA, 19 nt, Artificial Sequence
  Description of Artificial Sequence: Synthetic oligonucleotide
ucaccacuuugaugccauu

SEQ ID NO: 2273813 - RNA, 19 nt, Artificial Sequence
  Description of Artificial Sequence: Synthetic oligonucleotide
guugugucuccaaggugcu

SEQ ID NO: 2273814 - RNA, 19 nt, Artificial Sequence
  Description of Artificial Sequence: Synthetic oligonucleotide
augugcgggcagaggagga

SEQ ID NO: 2273815 - RNA, 19 nt, Artificial Sequence
  Description of Artificial Sequence: Synthetic oligonucleotide
ggccaugacaucaagcauu

SEQ ID NO: 2273816 - RNA, 19 nt, Artificial Sequence
  Description of Artificial Sequence: Synthetic oligonucleotide
ggggucgcagccucugguc

SEQ ID NO: 2273817 - RNA, 19 nt, Artificial Sequence
  Description of Artificial Sequence: Synthetic oligonucleotide
cugggacauguggccaaug

SEQ ID NO: 2273818 - RNA, 19 nt, Artificial Sequence
  Description of Artificial Sequence: Synthetic oligonucleotide
ucgcagccucuggucacug

SEQ ID NO: 2273819 - RNA, 19 nt, Artificial Sequence
  Description of Artificial Sequence: Synthetic oligonucleotide
cuguggaauucgccccaca

SEQ ID NO: 2273820 - RNA, 19 nt, Artificial Sequence
  Description of Artificial Sequence: Synthetic oligonucleotide
acuaggcacugggcaguga

SEQ ID NO: 2273821 - RNA, 19 nt, Artificial Sequence
  Description of Artificial Sequence: Synthetic oligonucleotide
guacacguaggaagauggu

SEQ ID NO: 2273822 - RNA, 19 nt, Artificial Sequence
  Description of Artificial Sequence: Synthetic oligonucleotide
ggaguccuguuuauuaaau

SEQ ID NO: 2273823 - RNA, 19 nt, Artificial Sequence
  Description of Artificial Sequence: Synthetic oligonucleotide
aggguggccaugacaucaa

SEQ ID NO: 2273824 - RNA, 19 nt, Artificial Sequence
  Description of Artificial Sequence: Synthetic oligonucleotide
ggggaacugagcgauggcu

SEQ ID NO: 2273825 - RNA, 19 nt, Artificial Sequence
  Description of Artificial Sequence: Synthetic oligonucleotide
gcgggcagaggaggaaugc

SEQ ID NO: 2273826 - RNA, 19 nt, Artificial Sequence
  Description of Artificial Sequence: Synthetic oligonucleotide
ggcagguaccgugcagaug

SEQ ID NO: 2273827 - RNA, 19 nt, Artificial Sequence
  Description of Artificial Sequence: Synthetic oligonucleotide
ccuuggcaggugugacagg

SEQ ID NO: 2273828 - RNA, 19 nt, Artificial Sequence
  Description of Artificial Sequence: Synthetic oligonucleotide
gcaggugugacaggugaua

SEQ ID NO: 2273829 - RNA, 19 nt, Artificial Sequence
  Description of Artificial Sequence: Synthetic oligonucleotide
ggaggacauacuguuuagu

SEQ ID NO: 2273830 - RNA, 19 nt, Artificial Sequence
  Description of Artificial Sequence: Synthetic oligonucleotide
ggagaacuaaaggcaggcu

SEQ ID NO: 2273831 - RNA, 19 nt, Artificial Sequence
  Description of Artificial Sequence: Synthetic oligonucleotide
cuuccuccguugacaaaau

SEQ ID NO: 2273832 - RNA, 19 nt, Artificial Sequence
  Description of Artificial Sequence: Synthetic oligonucleotide
ccacaggauagaaguugga

SEQ ID NO: 2273833 - RNA, 19 nt, Artificial Sequence
  Description of Artificial Sequence: Synthetic oligonucleotide
cgaggacugaauguggaaa

SEQ ID NO: 2273834 - RNA, 19 nt, Artificial Sequence
  Description of Artificial Sequence: Synthetic oligonucleotide
cguuaguggucauguaugu

SEQ ID NO: 2273835 - RNA, 19 nt, Artificial Sequence
  Description of Artificial Sequence: Synthetic oligonucleotide
cagguaccgugcagaugaa

SEQ ID NO: 2273836 - RNA, 19 nt, Artificial Sequence
  Description of Artificial Sequence: Synthetic oligonucleotide
gugugacaggugauacuau

SEQ ID NO: 2273837 - RNA, 19 nt, Artificial Sequence
  Description of Artificial Sequence: Synthetic oligonucleotide
cugagaccccaugugucau

SEQ ID NO: 2273838 - RNA, 19 nt, Artificial Sequence
  Description of Artificial Sequence: Synthetic oligonucleotide
ggcagugauuuggggcaga

SEQ ID NO: 2273839 - RNA, 19 nt, Artificial Sequence
  Description of Artificial Sequence: Synthetic oligonucleotide
gucgcagccucuggucacu

SEQ ID NO: 2273840 - RNA, 19 nt, Artificial Sequence
  Description of Artificial Sequence: Synthetic oligonucleotide
ggccaauguaugaaaucuu

SEQ ID NO: 2273841 - RNA, 19 nt, Artificial Sequence
  Description of Artificial Sequence: Synthetic oligonucleotide
guugcucugcugggacgua

SEQ ID NO: 2273842 - RNA, 19 nt, Artificial Sequence
  Description of Artificial Sequence: Synthetic oligonucleotide
gugcgggcagaggaggaau

SEQ ID NO: 2273843 - RNA, 19 nt, Artificial Sequence
  Description of Artificial Sequence: Synthetic oligonucleotide
ccaugacaucaagcauuac

SEQ ID NO: 2273844 - RNA, 19 nt, Artificial Sequence
  Description of Artificial Sequence: Synthetic oligonucleotide
ccaccuuagccuucaccgu

SEQ ID NO: 2273845 - RNA, 19 nt, Artificial Sequence
  Description of Artificial Sequence: Synthetic oligonucleotide
ggacugacaggaggacaua

SEQ ID NO: 2273846 - RNA, 19 nt, Artificial Sequence
  Description of Artificial Sequence: Synthetic oligonucleotide
gugagacguuaguggucau

SEQ ID NO: 2273847 - RNA, 19 nt, Artificial Sequence
  Description of Artificial Sequence: Synthetic oligonucleotide
cguagcccgcuccuuggca

SEQ ID NO: 2273848 - RNA, 19 nt, Artificial Sequence
  Description of Artificial Sequence: Synthetic oligonucleotide
ccgcuccuuggcaggugug

SEQ ID NO: 2273849 - RNA, 19 nt, Artificial Sequence
  Description of Artificial Sequence: Synthetic oligonucleotide
ccuuagccuucaccguaaa

SEQ ID NO: 2273850 - RNA, 19 nt, Artificial Sequence
  Description of Artificial Sequence: Synthetic oligonucleotide
gcagugauuuggggcagau

SEQ ID NO: 2273851 - RNA, 19 nt, Artificial Sequence
  Description of Artificial Sequence: Synthetic oligonucleotide
cucuggggucgcagccucu

SEQ ID NO: 2273852 - RNA, 19 nt, Artificial Sequence
  Description of Artificial Sequence: Synthetic oligonucleotide
ggcaggugugacaggugau

SEQ ID NO: 2273853 - RNA, 19 nt, Artificial Sequence
  Description of Artificial Sequence: Synthetic oligonucleotide
cccgcuccuuggcaggugu

SEQ ID NO: 2273854 - RNA, 19 nt, Artificial Sequence
  Description of Artificial Sequence: Synthetic oligonucleotide
ggggaaugagugagacguu

SEQ ID NO: 2273855 - RNA, 19 nt, Artificial Sequence
  Description of Artificial Sequence: Synthetic oligonucleotide
gggacguagcccgcuccuu

SEQ ID NO: 2273856 - RNA, 19 nt, Artificial Sequence
  Description of Artificial Sequence: Synthetic oligonucleotide
gccccacaauccacauagu

SEQ ID NO: 2273857 - RNA, 19 nt, Artificial Sequence
  Description of Artificial Sequence: Synthetic oligonucleotide
acaucguucaccucugucc

SEQ ID NO: 2273858 - RNA, 19 nt, Artificial Sequence
  Description of Artificial Sequence: Synthetic oligonucleotide
ugcuccucguuccagaagg

SEQ ID NO: 2273859 - RNA, 19 nt, Artificial Sequence
  Description of Artificial Sequence: Synthetic oligonucleotide
aagcgaaguggcgauaugc

SEQ ID NO: 2273860 - RNA, 19 nt, Artificial Sequence
  Description of Artificial Sequence: Synthetic oligonucleotide
agaauaugaggcgagcugg

SEQ ID NO: 2273861 - RNA, 19 nt, Artificial Sequence
  Description of Artificial Sequence: Synthetic oligonucleotide
aaugaacucagcagcgcgc

SEQ ID NO: 2273862 - RNA, 19 nt, Artificial Sequence
  Description of Artificial Sequence: Synthetic oligonucleotide
cuugagguacuugagagcc

SEQ ID NO: 2273863 - RNA, 19 nt, Artificial Sequence
  Description of Artificial Sequence: Synthetic oligonucleotide
aguggcgauaugcacgcgc

SEQ ID NO: 2273864 - RNA, 19 nt, Artificial Sequence
  Description of Artificial Sequence: Synthetic oligonucleotide
aucauguauccccugagug

SEQ ID NO: 2273865 - RNA, 19 nt, Artificial Sequence
  Description of Artificial Sequence: Synthetic oligonucleotide
aauaugaggcgagcugggc

SEQ ID NO: 2273866 - RNA, 19 nt, Artificial Sequence
  Description of Artificial Sequence: Synthetic oligonucleotide
ucggcuguaccgaagucgg

SEQ ID NO: 2273867 - RNA, 19 nt, Artificial Sequence
  Description of Artificial Sequence: Synthetic oligonucleotide
auaugaggcgagcugggcg

SEQ ID NO: 2273868 - RNA, 19 nt, Artificial Sequence
  Description of Artificial Sequence: Synthetic oligonucleotide
uguauccccugagugaucg

SEQ ID NO: 2273869 - RNA, 19 nt, Artificial Sequence
  Description of Artificial Sequence: Synthetic oligonucleotide
aaggucaugcgcuguagug

SEQ ID NO: 2273870 - RNA, 19 nt, Artificial Sequence
  Description of Artificial Sequence: Synthetic oligonucleotide
guuucgcagcuucacaucg

SEQ ID NO: 2273871 - RNA, 19 nt, Artificial Sequence
  Description of Artificial Sequence: Synthetic oligonucleotide
ucgacuucaagcugugaag

SEQ ID NO: 2273872 - RNA, 19 nt, Artificial Sequence
  Description of Artificial Sequence: Synthetic oligonucleotide
aaacucaggaaaaccuugg

SEQ ID NO: 2273873 - RNA, 19 nt, Artificial Sequence
  Description of Artificial Sequence: Synthetic oligonucleotide
gaaguggcgauaugcacgc

SEQ ID NO: 2273874 - RNA, 19 nt, Artificial Sequence
  Description of Artificial Sequence: Synthetic oligonucleotide
gacaaugaacucagcagcg

SEQ ID NO: 2273875 - RNA, 19 nt, Artificial Sequence
  Description of Artificial Sequence: Synthetic oligonucleotide
ucauguauccccugaguga

SEQ ID NO: 2273876 - RNA, 19 nt, Artificial Sequence
  Description of Artificial Sequence: Synthetic oligonucleotide
aaugccucugcaaagcuga

SEQ ID NO: 2273877 - RNA, 19 nt, Artificial Sequence
  Description of Artificial Sequence: Synthetic oligonucleotide
guucucaucguacugugug

SEQ ID NO: 2273878 - RNA, 19 nt, Artificial Sequence
  Description of Artificial Sequence: Synthetic oligonucleotide
ucgguggaaacucaggaaa

SEQ ID NO: 2273879 - RNA, 19 nt, Artificial Sequence
  Description of Artificial Sequence: Synthetic oligonucleotide
ucuaccacauaguuucgca

SEQ ID NO: 2273880 - RNA, 19 nt, Artificial Sequence
  Description of Artificial Sequence: Synthetic oligonucleotide
gauaugcacgcgcacauca

SEQ ID NO: 2273881 - RNA, 19 nt, Artificial Sequence
  Description of Artificial Sequence: Synthetic oligonucleotide
gacuucaagcugugaagcg

SEQ ID NO: 2273882 - RNA, 19 nt, Artificial Sequence
  Description of Artificial Sequence: Synthetic oligonucleotide
uucggcuguaccgaagucg

SEQ ID NO: 2273883 - RNA, 19 nt, Artificial Sequence
  Description of Artificial Sequence: Synthetic oligonucleotide
guagaagaagcccuccuug

SEQ ID NO: 2273884 - RNA, 19 nt, Artificial Sequence
  Description of Artificial Sequence: Synthetic oligonucleotide
ucugcggucaucgacuuca

SEQ ID NO: 2273885 - RNA, 19 nt, Artificial Sequence
  Description of Artificial Sequence: Synthetic oligonucleotide
caucacgucucccaggagc

SEQ ID NO: 2273886 - RNA, 19 nt, Artificial Sequence
  Description of Artificial Sequence: Synthetic oligonucleotide
acagccgguacacaaccgg

SEQ ID NO: 2273887 - RNA, 19 nt, Artificial Sequence
  Description of Artificial Sequence: Synthetic oligonucleotide
uggccuuucucccuguggc

SEQ ID NO: 2273888 - RNA, 19 nt, Artificial Sequence
  Description of Artificial Sequence: Synthetic oligonucleotide
ucaucguacugugugaacu

SEQ ID NO: 2273889 - RNA, 19 nt, Artificial Sequence
  Description of Artificial Sequence: Synthetic oligonucleotide
acgcgcacaucauguaucc

SEQ ID NO: 2273890 - RNA, 19 nt, Artificial Sequence
  Description of Artificial Sequence: Synthetic oligonucleotide
aggucaugcgcuguagugc

SEQ ID NO: 2273891 - RNA, 19 nt, Artificial Sequence
  Description of Artificial Sequence: Synthetic oligonucleotide
agcaaugcgcccucgcccg

SEQ ID NO: 2273892 - RNA, 19 nt, Artificial Sequence
  Description of Artificial Sequence: Synthetic oligonucleotide
uccgaccacguauacgagg

SEQ ID NO: 2273893 - RNA, 19 nt, Artificial Sequence
  Description of Artificial Sequence: Synthetic oligonucleotide
aguuucgcagcuucacauc

SEQ ID NO: 2273894 - RNA, 19 nt, Artificial Sequence
  Description of Artificial Sequence: Synthetic oligonucleotide
uucaguagcaccgggccag

SEQ ID NO: 2273895 - RNA, 19 nt, Artificial Sequence
  Description of Artificial Sequence: Synthetic oligonucleotide
uaugcacgcgcacaucaug

SEQ ID NO: 2273896 - RNA, 19 nt, Artificial Sequence
  Description of Artificial Sequence: Synthetic oligonucleotide
uguagugcgggcccgcgug

SEQ ID NO: 2273897 - RNA, 19 nt, Artificial Sequence
  Description of Artificial Sequence: Synthetic oligonucleotide
gauagaauaugaggcgagc

SEQ ID NO: 2273898 - RNA, 19 nt, Artificial Sequence
  Description of Artificial Sequence: Synthetic oligonucleotide
acaaccggcccaugaaggg

SEQ ID NO: 2273899 - RNA, 19 nt, Artificial Sequence
  Description of Artificial Sequence: Synthetic oligonucleotide
cacaaccggcccaugaagg

SEQ ID NO: 2273900 - RNA, 19 nt, Artificial Sequence
  Description of Artificial Sequence: Synthetic oligonucleotide
ugaccuugagguacuugag

SEQ ID NO: 2273901 - RNA, 19 nt, Artificial Sequence
  Description of Artificial Sequence: Synthetic oligonucleotide
ucagguugcccucaccagu

SEQ ID NO: 2273902 - RNA, 19 nt, Artificial Sequence
  Description of Artificial Sequence: Synthetic oligonucleotide
acaucauguauccccugag

SEQ ID NO: 2273903 - RNA, 19 nt, Artificial Sequence
  Description of Artificial Sequence: Synthetic oligonucleotide
aaccggcccaugaagggcc

SEQ ID NO: 2273904 - RNA, 19 nt, Artificial Sequence
  Description of Artificial Sequence: Synthetic oligonucleotide
accaagucugcggucaucg

SEQ ID NO: 2273905 - RNA, 19 nt, Artificial Sequence
  Description of Artificial Sequence: Synthetic oligonucleotide
uaguuucgcagcuucacau

SEQ ID NO: 2273906 - RNA, 19 nt, Artificial Sequence
  Description of Artificial Sequence: Synthetic oligonucleotide
acguauacgaggccagcag

SEQ ID NO: 2273907 - RNA, 19 nt, Artificial Sequence
  Description of Artificial Sequence: Synthetic oligonucleotide
gaauaugaggcgagcuggg

SEQ ID NO: 2273908 - RNA, 19 nt, Artificial Sequence
  Description of Artificial Sequence: Synthetic oligonucleotide
cuaccacauaguuucgcag

SEQ ID NO: 2273909 - RNA, 19 nt, Artificial Sequence
  Description of Artificial Sequence: Synthetic oligonucleotide
aacucagcagcgcgcgcgg

SEQ ID NO: 2273910 - RNA, 19 nt, Artificial Sequence
  Description of Artificial Sequence: Synthetic oligonucleotide
ucguacugugugaacugag

SEQ ID NO: 2273911 - RNA, 19 nt, Artificial Sequence
  Description of Artificial Sequence: Synthetic oligonucleotide
ggccggauagaauaugagg

SEQ ID NO: 2273912 - RNA, 19 nt, Artificial Sequence
  Description of Artificial Sequence: Synthetic oligonucleotide
agaauggccuuucucccug

SEQ ID NO: 2273913 - RNA, 19 nt, Artificial Sequence
  Description of Artificial Sequence: Synthetic oligonucleotide
gugaucgccaccacgggcg

SEQ ID NO: 2273914 - RNA, 19 nt, Artificial Sequence
  Description of Artificial Sequence: Synthetic oligonucleotide
auaguuucgcagcuucaca

SEQ ID NO: 2273915 - RNA, 19 nt, Artificial Sequence
  Description of Artificial Sequence: Synthetic oligonucleotide
ugagguagaagaagcccuc

SEQ ID NO: 2273916 - RNA, 19 nt, Artificial Sequence
  Description of Artificial Sequence: Synthetic oligonucleotide
gaacucagcagcgcgcgcg

SEQ ID NO: 2273917 - RNA, 19 nt, Artificial Sequence
  Description of Artificial Sequence: Synthetic oligonucleotide
acacaaccggcccaugaag

SEQ ID NO: 2273918 - RNA, 19 nt, Artificial Sequence
  Description of Artificial Sequence: Synthetic oligonucleotide
gcggucaucgacuucaagc

SEQ ID NO: 2273919 - RNA, 19 nt, Artificial Sequence
  Description of Artificial Sequence: Synthetic oligonucleotide
uccucguuccagaaggguc

SEQ ID NO: 2273920 - RNA, 19 nt, Artificial Sequence
  Description of Artificial Sequence: Synthetic oligonucleotide
ggucaugcgcuguagugcg

SEQ ID NO: 2273921 - RNA, 19 nt, Artificial Sequence
  Description of Artificial Sequence: Synthetic oligonucleotide
ucucuaccacauaguuucg

SEQ ID NO: 2273922 - RNA, 19 nt, Artificial Sequence
  Description of Artificial Sequence: Synthetic oligonucleotide
gucagcggcggcgagaagg

SEQ ID NO: 2273923 - RNA, 19 nt, Artificial Sequence
  Description of Artificial Sequence: Synthetic oligonucleotide
gccggauagaauaugaggc

SEQ ID NO: 2273924 - RNA, 19 nt, Artificial Sequence
  Description of Artificial Sequence: Synthetic oligonucleotide
ucguucaccucuguccacg

SEQ ID NO: 2273925 - RNA, 19 nt, Artificial Sequence
  Description of Artificial Sequence: Synthetic oligonucleotide
aaccuugguggcugccacg

SEQ ID NO: 2273926 - RNA, 19 nt, Artificial Sequence
  Description of Artificial Sequence: Synthetic oligonucleotide
uucucaucguacuguguga

SEQ ID NO: 2273927 - RNA, 19 nt, Artificial Sequence
  Description of Artificial Sequence: Synthetic oligonucleotide
cacauaguuucgcagcuuc

SEQ ID NO: 2273928 - RNA, 19 nt, Artificial Sequence
  Description of Artificial Sequence: Synthetic oligonucleotide
ugugaagcgaaguggcgau

SEQ ID NO: 2273929 - RNA, 19 nt, Artificial Sequence
  Description of Artificial Sequence: Synthetic oligonucleotide
augaacucagcagcgcgcg

SEQ ID NO: 2273930 - RNA, 19 nt, Artificial Sequence
  Description of Artificial Sequence: Synthetic oligonucleotide
ugugcucaggccugcgaag

SEQ ID NO: 2273931 - RNA, 19 nt, Artificial Sequence
  Description of Artificial Sequence: Synthetic oligonucleotide
agcagcaaugcgcccucgc

SEQ ID NO: 2273932 - RNA, 19 nt, Artificial Sequence
  Description of Artificial Sequence: Synthetic oligonucleotide
guggaaacucaggaaaacc

SEQ ID NO: 2273933 - RNA, 19 nt, Artificial Sequence
  Description of Artificial Sequence: Synthetic oligonucleotide
ugcgcuguagugcgggccc

SEQ ID NO: 2273934 - RNA, 19 nt, Artificial Sequence
  Description of Artificial Sequence: Synthetic oligonucleotide
cucaccaguaagguauucc

SEQ ID NO: 2273935 - RNA, 19 nt, Artificial Sequence
  Description of Artificial Sequence: Synthetic oligonucleotide
caucguacugugugaacug

SEQ ID NO: 2273936 - RNA, 19 nt, Artificial Sequence
  Description of Artificial Sequence: Synthetic oligonucleotide
cauaguuucgcagcuucac

SEQ ID NO: 2273937 - RNA, 19 nt, Artificial Sequence
  Description of Artificial Sequence: Synthetic oligonucleotide
aggaaaaccuugguggcug

SEQ ID NO: 2273938 - RNA, 19 nt, Artificial Sequence
  Description of Artificial Sequence: Synthetic oligonucleotide
ucaucgacuucaagcugug

SEQ ID NO: 2273939 - RNA, 19 nt, Artificial Sequence
  Description of Artificial Sequence: Synthetic oligonucleotide
acuacgcccgugccguccc

SEQ ID NO: 2273940 - RNA, 19 nt, Artificial Sequence
  Description of Artificial Sequence: Synthetic oligonucleotide
cucgaugugcuccucguuc

SEQ ID NO: 2273941 - RNA, 19 nt, Artificial Sequence
  Description of Artificial Sequence: Synthetic oligonucleotide
uaagguauuccaggagugu

SEQ ID NO: 2273942 - RNA, 19 nt, Artificial Sequence
  Description of Artificial Sequence: Synthetic oligonucleotide
caccaguaagguauuccag

SEQ ID NO: 2273943 - RNA, 19 nt, Artificial Sequence
  Description of Artificial Sequence: Synthetic oligonucleotide
uucaagcugugaagcgaag

SEQ ID NO: 2273944 - RNA, 19 nt, Artificial Sequence
  Description of Artificial Sequence: Synthetic oligonucleotide
acuucaagcugugaagcga

SEQ ID NO: 2273945 - RNA, 19 nt, Artificial Sequence
  Description of Artificial Sequence: Synthetic oligonucleotide
ggagaauggccuuucuccc

SEQ ID NO: 2273946 - RNA, 19 nt, Artificial Sequence
  Description of Artificial Sequence: Synthetic oligonucleotide
ucaagcugugaagcgaagu

SEQ ID NO: 2273947 - RNA, 19 nt, Artificial Sequence
  Description of Artificial Sequence: Synthetic oligonucleotide
aauggccuuucucccugug

SEQ ID NO: 2273948 - RNA, 19 nt, Artificial Sequence
  Description of Artificial Sequence: Synthetic oligonucleotide
caguaagguauuccaggag

SEQ ID NO: 2273949 - RNA, 19 nt, Artificial Sequence
  Description of Artificial Sequence: Synthetic oligonucleotide
cagugccugacuacgcccg

SEQ ID NO: 2273950 - RNA, 19 nt, Artificial Sequence
  Description of Artificial Sequence: Synthetic oligonucleotide
gagugaucgccaccacggg

SEQ ID NO: 2273951 - RNA, 19 nt, Artificial Sequence
  Description of Artificial Sequence: Synthetic oligonucleotide
aaugcgcccucgcccgggg

SEQ ID NO: 2273952 - RNA, 19 nt, Artificial Sequence
  Description of Artificial Sequence: Synthetic oligonucleotide
gcuguaccgaagucggucg

SEQ ID NO: 2273953 - RNA, 19 nt, Artificial Sequence
  Description of Artificial Sequence: Synthetic oligonucleotide
ugccugacuacgcccgugc

SEQ ID NO: 2273954 - RNA, 19 nt, Artificial Sequence
  Description of Artificial Sequence: Synthetic oligonucleotide
ccggauagaauaugaggcg

SEQ ID NO: 2273955 - RNA, 19 nt, Artificial Sequence
  Description of Artificial Sequence: Synthetic oligonucleotide
aagcccuccuuggacauca

SEQ ID NO: 2273956 - RNA, 19 nt, Artificial Sequence
  Description of Artificial Sequence: Synthetic oligonucleotide
aguagcaccgggccagaca

SEQ ID NO: 2273957 - RNA, 19 nt, Artificial Sequence
  Description of Artificial Sequence: Synthetic oligonucleotide
gaagggucgguggaaacuc

SEQ ID NO: 2273958 - RNA, 19 nt, Artificial Sequence
  Description of Artificial Sequence: Synthetic oligonucleotide
caaugccucugcaaagcug

SEQ ID NO: 2273959 - RNA, 19 nt, Artificial Sequence
  Description of Artificial Sequence: Synthetic oligonucleotide
cgaaguggcgauaugcacg

SEQ ID NO: 2273960 - RNA, 19 nt, Artificial Sequence
  Description of Artificial Sequence: Synthetic oligonucleotide
guagcaccgggccagacaa

SEQ ID NO: 2273961 - RNA, 19 nt, Artificial Sequence
  Description of Artificial Sequence: Synthetic oligonucleotide
ccucguuccagaagggucg

SEQ ID NO: 2273962 - RNA, 19 nt, Artificial Sequence
  Description of Artificial Sequence: Synthetic oligonucleotide
ugugggcacgcaaugccuc

SEQ ID NO: 2273963 - RNA, 19 nt, Artificial Sequence
  Description of Artificial Sequence: Synthetic oligonucleotide
auucggcuguaccgaaguc

SEQ ID NO: 2273964 - RNA, 19 nt, Artificial Sequence
  Description of Artificial Sequence: Synthetic oligonucleotide
ugaagcgaaguggcgauau

SEQ ID NO: 2273965 - RNA, 19 nt, Artificial Sequence
  Description of Artificial Sequence: Synthetic oligonucleotide
cagcaaugcgcccucgccc

SEQ ID NO: 2273966 - RNA, 19 nt, Artificial Sequence
  Description of Artificial Sequence: Synthetic oligonucleotide
acgcaaugccucugcaaag

SEQ ID NO: 2273967 - RNA, 19 nt, Artificial Sequence
  Description of Artificial Sequence: Synthetic oligonucleotide
accgaagucggucgcucag

SEQ ID NO: 2273968 - RNA, 19 nt, Artificial Sequence
  Description of Artificial Sequence: Synthetic oligonucleotide
gcgcacaucauguaucccc

SEQ ID NO: 2273969 - RNA, 19 nt, Artificial Sequence
  Description of Artificial Sequence: Synthetic oligonucleotide
gagcgccacaugcagggcc

SEQ ID NO: 2273970 - RNA, 19 nt, Artificial Sequence
  Description of Artificial Sequence: Synthetic oligonucleotide
gucagguugcccucaccag

SEQ ID NO: 2273971 - RNA, 19 nt, Artificial Sequence
  Description of Artificial Sequence: Synthetic oligonucleotide
aucguucaccucuguccac

SEQ ID NO: 2273972 - RNA, 19 nt, Artificial Sequence
  Description of Artificial Sequence: Synthetic oligonucleotide
ucucaucguacugugugaa

SEQ ID NO: 2273973 - RNA, 19 nt, Artificial Sequence
  Description of Artificial Sequence: Synthetic oligonucleotide
uuucgcagcuucacaucgu

SEQ ID NO: 2273974 - RNA, 19 nt, Artificial Sequence
  Description of Artificial Sequence: Synthetic oligonucleotide
agccgguacacaaccggcc

SEQ ID NO: 2273975 - RNA, 19 nt, Artificial Sequence
  Description of Artificial Sequence: Synthetic oligonucleotide
agaagggucgguggaaacu

SEQ ID NO: 2273976 - RNA, 19 nt, Artificial Sequence
  Description of Artificial Sequence: Synthetic oligonucleotide
ucuggagaauggccuuucu

SEQ ID NO: 2273977 - RNA, 19 nt, Artificial Sequence
  Description of Artificial Sequence: Synthetic oligonucleotide
ggcgcguucaguagcaccg

SEQ ID NO: 2273978 - RNA, 19 nt, Artificial Sequence
  Description of Artificial Sequence: Synthetic oligonucleotide
uccacguguucucaucgua

SEQ ID NO: 2273979 - RNA, 19 nt, Artificial Sequence
  Description of Artificial Sequence: Synthetic oligonucleotide
caucguucaccucugucca

SEQ ID NO: 2273980 - RNA, 19 nt, Artificial Sequence
  Description of Artificial Sequence: Synthetic oligonucleotide
cacgcgcacaucauguauc

SEQ ID NO: 2273981 - RNA, 19 nt, Artificial Sequence
  Description of Artificial Sequence: Synthetic oligonucleotide
gauucggcuguaccgaagu

SEQ ID NO: 2273982 - RNA, 19 nt, Artificial Sequence
  Description of Artificial Sequence: Synthetic oligonucleotide
ggauagaauaugaggcgag

SEQ ID NO: 2273983 - RNA, 19 nt, Artificial Sequence
  Description of Artificial Sequence: Synthetic oligonucleotide
cuggagaauggccuuucuc

SEQ ID NO: 2273984 - RNA, 19 nt, Artificial Sequence
  Description of Artificial Sequence: Synthetic oligonucleotide
agcaccaagucugcgguca

SEQ ID NO: 2273985 - RNA, 19 nt, Artificial Sequence
  Description of Artificial Sequence: Synthetic oligonucleotide
aggucagguugcccucacc

SEQ ID NO: 2273986 - RNA, 19 nt, Artificial Sequence
  Description of Artificial Sequence: Synthetic oligonucleotide
gaagcgaaguggcgauaug

SEQ ID NO: 2273987 - RNA, 19 nt, Artificial Sequence
  Description of Artificial Sequence: Synthetic oligonucleotide
ugagagccuuguccagugc

SEQ ID NO: 2273988 - RNA, 19 nt, Artificial Sequence
  Description of Artificial Sequence: Synthetic oligonucleotide
ccacgauucggcuguaccg

SEQ ID NO: 2273989 - RNA, 19 nt, Artificial Sequence
  Description of Artificial Sequence: Synthetic oligonucleotide
cuucaagcugugaagcgaa

SEQ ID NO: 2273990 - RNA, 19 nt, Artificial Sequence
  Description of Artificial Sequence: Synthetic oligonucleotide
ccgaccacguauacgaggc

SEQ ID NO: 2273991 - RNA, 19 nt, Artificial Sequence
  Description of Artificial Sequence: Synthetic oligonucleotide
uugagguacuugagagccu

SEQ ID NO: 2273992 - RNA, 19 nt, Artificial Sequence
  Description of Artificial Sequence: Synthetic oligonucleotide
cagccgguacacaaccggc

SEQ ID NO: 2273993 - RNA, 19 nt, Artificial Sequence
  Description of Artificial Sequence: Synthetic oligonucleotide
cacguagugcagcccacgc

SEQ ID NO: 2273994 - RNA, 19 nt, Artificial Sequence
  Description of Artificial Sequence: Synthetic oligonucleotide
ugaacucagcagcgcgcgc

SEQ ID NO: 2273995 - RNA, 19 nt, Artificial Sequence
  Description of Artificial Sequence: Synthetic oligonucleotide
guauacgaggccagcagca

SEQ ID NO: 2273996 - RNA, 19 nt, Artificial Sequence
  Description of Artificial Sequence: Synthetic oligonucleotide
ugggcggucuguguuggag

SEQ ID NO: 2273997 - RNA, 19 nt, Artificial Sequence
  Description of Artificial Sequence: Synthetic oligonucleotide
cucuaccacauaguuucgc

SEQ ID NO: 2273998 - RNA, 19 nt, Artificial Sequence
  Description of Artificial Sequence: Synthetic oligonucleotide
cucaucguacugugugaac

SEQ ID NO: 2273999 - RNA, 19 nt, Artificial Sequence
  Description of Artificial Sequence: Synthetic oligonucleotide
agugcgggcccgcguggcc

SEQ ID NO: 2274000 - RNA, 19 nt, Artificial Sequence
  Description of Artificial Sequence: Synthetic oligonucleotide
cacagccgguacacaaccg

SEQ ID NO: 2274001 - RNA, 19 nt, Artificial Sequence
  Description of Artificial Sequence: Synthetic oligonucleotide
cacaucauguauccccuga

SEQ ID NO: 2274002 - RNA, 19 nt, Artificial Sequence
  Description of Artificial Sequence: Synthetic oligonucleotide
uauacgaggccagcagcaa

SEQ ID NO: 2274003 - RNA, 19 nt, Artificial Sequence
  Description of Artificial Sequence: Synthetic oligonucleotide
ggucgguggaaacucagga

SEQ ID NO: 2274004 - RNA, 19 nt, Artificial Sequence
  Description of Artificial Sequence: Synthetic oligonucleotide
cacaucguucaccucuguc

SEQ ID NO: 2274005 - RNA, 19 nt, Artificial Sequence
  Description of Artificial Sequence: Synthetic oligonucleotide
agcgaaguggcgauaugca

SEQ ID NO: 2274006 - RNA, 19 nt, Artificial Sequence
  Description of Artificial Sequence: Synthetic oligonucleotide
uguaccgaagucggucgcu

SEQ ID NO: 2274007 - RNA, 19 nt, Artificial Sequence
  Description of Artificial Sequence: Synthetic oligonucleotide
aucacgucucccaggagcu

SEQ ID NO: 2274008 - RNA, 19 nt, Artificial Sequence
  Description of Artificial Sequence: Synthetic oligonucleotide
accacgggcgcguucagua

SEQ ID NO: 2274009 - RNA, 19 nt, Artificial Sequence
  Description of Artificial Sequence: Synthetic oligonucleotide
gguauuccaggagugugug

SEQ ID NO: 2274010 - RNA, 19 nt, Artificial Sequence
  Description of Artificial Sequence: Synthetic oligonucleotide
acguagugcagcccacgca

SEQ ID NO: 2274011 - RNA, 19 nt, Artificial Sequence
  Description of Artificial Sequence: Synthetic oligonucleotide
agguauuccaggagugugu

SEQ ID NO: 2274012 - RNA, 19 nt, Artificial Sequence
  Description of Artificial Sequence: Synthetic oligonucleotide
ugcgcccucgcccggggcc

SEQ ID NO: 2274013 - RNA, 19 nt, Artificial Sequence
  Description of Artificial Sequence: Synthetic oligonucleotide
ucuguccacguguucucau

SEQ ID NO: 2274014 - RNA, 19 nt, Artificial Sequence
  Description of Artificial Sequence: Synthetic oligonucleotide
ggccagacaaugaacucag

SEQ ID NO: 2274015 - RNA, 19 nt, Artificial Sequence
  Description of Artificial Sequence: Synthetic oligonucleotide
cacgucucccaggagcugc

SEQ ID NO: 2274016 - RNA, 19 nt, Artificial Sequence
  Description of Artificial Sequence: Synthetic oligonucleotide
ggaguggccgcccucgaug

SEQ ID NO: 2274017 - RNA, 19 nt, Artificial Sequence
  Description of Artificial Sequence: Synthetic oligonucleotide
accacguauacgaggccag

SEQ ID NO: 2274018 - RNA, 19 nt, Artificial Sequence
  Description of Artificial Sequence: Synthetic oligonucleotide
cagccacccacgauucggc

SEQ ID NO: 2274019 - RNA, 19 nt, Artificial Sequence
  Description of Artificial Sequence: Synthetic oligonucleotide
cacgggcgcguucaguagc

SEQ ID NO: 2274020 - RNA, 19 nt, Artificial Sequence
  Description of Artificial Sequence: Synthetic oligonucleotide
agucggucgcucaggcagc

SEQ ID NO: 2274021 - RNA, 19 nt, Artificial Sequence
  Description of Artificial Sequence: Synthetic oligonucleotide
aucguacugugugaacuga

SEQ ID NO: 2274022 - RNA, 19 nt, Artificial Sequence
  Description of Artificial Sequence: Synthetic oligonucleotide
aucuucucuaccacauagu

SEQ ID NO: 2274023 - RNA, 19 nt, Artificial Sequence
  Description of Artificial Sequence: Synthetic oligonucleotide
caaccggcccaugaagggc

SEQ ID NO: 2274024 - RNA, 19 nt, Artificial Sequence
  Description of Artificial Sequence: Synthetic oligonucleotide
cagaagggucgguggaaac

SEQ ID NO: 2274025 - RNA, 19 nt, Artificial Sequence
  Description of Artificial Sequence: Synthetic oligonucleotide
accgggccagacaaugaac

SEQ ID NO: 2274026 - RNA, 19 nt, Artificial Sequence
  Description of Artificial Sequence: Synthetic oligonucleotide
gucgguggaaacucaggaa

SEQ ID NO: 2274027 - RNA, 19 nt, Artificial Sequence
  Description of Artificial Sequence: Synthetic oligonucleotide
guagugcgggcccgcgugg

SEQ ID NO: 2274028 - RNA, 19 nt, Artificial Sequence
  Description of Artificial Sequence: Synthetic oligonucleotide
ugguggcugccacguagug

SEQ ID NO: 2274029 - RNA, 19 nt, Artificial Sequence
  Description of Artificial Sequence: Synthetic oligonucleotide
cuguaccgaagucggucgc

SEQ ID NO: 2274030 - RNA, 19 nt, Artificial Sequence
  Description of Artificial Sequence: Synthetic oligonucleotide
cugugaagcgaaguggcga

SEQ ID NO: 2274031 - RNA, 19 nt, Artificial Sequence
  Description of Artificial Sequence: Synthetic oligonucleotide
cuguccacguguucucauc

SEQ ID NO: 2274032 - RNA, 19 nt, Artificial Sequence
  Description of Artificial Sequence: Synthetic oligonucleotide
guucaguagcaccgggcca

SEQ ID NO: 2274033 - RNA, 19 nt, Artificial Sequence
  Description of Artificial Sequence: Synthetic oligonucleotide
augcacgcgcacaucaugu

SEQ ID NO: 2274034 - RNA, 19 nt, Artificial Sequence
  Description of Artificial Sequence: Synthetic oligonucleotide
ggucaucgacuucaagcug

SEQ ID NO: 2274035 - RNA, 19 nt, Artificial Sequence
  Description of Artificial Sequence: Synthetic oligonucleotide
uccccugagugaucgccac

SEQ ID NO: 2274036 - RNA, 19 nt, Artificial Sequence
  Description of Artificial Sequence: Synthetic oligonucleotide
cguucaguagcaccgggcc

SEQ ID NO: 2274037 - RNA, 19 nt, Artificial Sequence
  Description of Artificial Sequence: Synthetic oligonucleotide
gaagucggucgcucaggca

SEQ ID NO: 2274038 - RNA, 19 nt, Artificial Sequence
  Description of Artificial Sequence: Synthetic oligonucleotide
uguuggaguggccgcccuc

SEQ ID NO: 2274039 - RNA, 19 nt, Artificial Sequence
  Description of Artificial Sequence: Synthetic oligonucleotide
ccuccugcgggucagcggc

SEQ ID NO: 2274040 - RNA, 19 nt, Artificial Sequence
  Description of Artificial Sequence: Synthetic oligonucleotide
gagaauggccuuucucccu

SEQ ID NO: 2274041 - RNA, 19 nt, Artificial Sequence
  Description of Artificial Sequence: Synthetic oligonucleotide
ucacaucguucaccucugu

SEQ ID NO: 2274042 - RNA, 19 nt, Artificial Sequence
  Description of Artificial Sequence: Synthetic oligonucleotide
gucaucgacuucaagcugu

SEQ ID NO: 2274043 - RNA, 19 nt, Artificial Sequence
  Description of Artificial Sequence: Synthetic oligonucleotide
uggcgauaugcacgcgcac

SEQ ID NO: 2274044 - RNA, 19 nt, Artificial Sequence
  Description of Artificial Sequence: Synthetic oligonucleotide
cuuggacaucacgucuccc

SEQ ID NO: 2274045 - RNA, 19 nt, Artificial Sequence
  Description of Artificial Sequence: Synthetic oligonucleotide
gaaggucaugcgcuguagu

SEQ ID NO: 2274046 - RNA, 19 nt, Artificial Sequence
  Description of Artificial Sequence: Synthetic oligonucleotide
gucgcucaggcagcugugg

SEQ ID NO: 2274047 - RNA, 19 nt, Artificial Sequence
  Description of Artificial Sequence: Synthetic oligonucleotide
cguagcccagcuuuucugg

SEQ ID NO: 2274048 - RNA, 19 nt, Artificial Sequence
  Description of Artificial Sequence: Synthetic oligonucleotide
ugugccuguggaacuucuu

SEQ ID NO: 2274049 - RNA, 19 nt, Artificial Sequence
  Description of Artificial Sequence: Synthetic oligonucleotide
ccugacuacgcccgugccg

SEQ ID NO: 2274050 - RNA, 19 nt, Artificial Sequence
  Description of Artificial Sequence: Synthetic oligonucleotide
acguccuugagcgccacau

SEQ ID NO: 2274051 - RNA, 19 nt, Artificial Sequence
  Description of Artificial Sequence: Synthetic oligonucleotide
cacgauucggcuguaccga

SEQ ID NO: 2274052 - RNA, 19 nt, Artificial Sequence
  Description of Artificial Sequence: Synthetic oligonucleotide
acauaguuucgcagcuuca

SEQ ID NO: 2274053 - RNA, 19 nt, Artificial Sequence
  Description of Artificial Sequence: Synthetic oligonucleotide
cucguuccagaagggucgg

SEQ ID NO: 2274054 - RNA, 19 nt, Artificial Sequence
  Description of Artificial Sequence: Synthetic oligonucleotide
aagggucgguggaaacuca

SEQ ID NO: 2274055 - RNA, 19 nt, Artificial Sequence
  Description of Artificial Sequence: Synthetic oligonucleotide
ugcacgcgcacaucaugua

SEQ ID NO: 2274056 - RNA, 19 nt, Artificial Sequence
  Description of Artificial Sequence: Synthetic oligonucleotide
ggcggcgagaaggucaugc

SEQ ID NO: 2274057 - RNA, 19 nt, Artificial Sequence
  Description of Artificial Sequence: Synthetic oligonucleotide
ccacguguucucaucguac

SEQ ID NO: 2274058 - RNA, 19 nt, Artificial Sequence
  Description of Artificial Sequence: Synthetic oligonucleotide
cguauacgaggccagcagc

SEQ ID NO: 2274059 - RNA, 19 nt, Artificial Sequence
  Description of Artificial Sequence: Synthetic oligonucleotide
ccacagccgguacacaacc

SEQ ID NO: 2274060 - RNA, 19 nt, Artificial Sequence
  Description of Artificial Sequence: Synthetic oligonucleotide
gcggcgagaaggucaugcg

SEQ ID NO: 2274061 - RNA, 19 nt, Artificial Sequence
  Description of Artificial Sequence: Synthetic oligonucleotide
gcgaaguggcgauaugcac

SEQ ID NO: 2274062 - RNA, 19 nt, Artificial Sequence
  Description of Artificial Sequence: Synthetic oligonucleotide
cguccgaccacguauacga

SEQ ID NO: 2274063 - RNA, 19 nt, Artificial Sequence
  Description of Artificial Sequence: Synthetic oligonucleotide
ggaaaaccuugguggcugc

SEQ ID NO: 2274064 - RNA, 19 nt, Artificial Sequence
  Description of Artificial Sequence: Synthetic oligonucleotide
guucaccucuguccacgug

SEQ ID NO: 2274065 - RNA, 19 nt, Artificial Sequence
  Description of Artificial Sequence: Synthetic oligonucleotide
cucgcccggggccggauag

SEQ ID NO: 2274066 - RNA, 19 nt, Artificial Sequence
  Description of Artificial Sequence: Synthetic oligonucleotide
gccgguacacaaccggccc

SEQ ID NO: 2274067 - RNA, 19 nt, Artificial Sequence
  Description of Artificial Sequence: Synthetic oligonucleotide
agggucgguggaaacucag

SEQ ID NO: 2274068 - RNA, 19 nt, Artificial Sequence
  Description of Artificial Sequence: Synthetic oligonucleotide
acgauucggcuguaccgaa

SEQ ID NO: 2274069 - RNA, 19 nt, Artificial Sequence
  Description of Artificial Sequence: Synthetic oligonucleotide
cccacgauucggcuguacc

SEQ ID NO: 2274070 - RNA, 19 nt, Artificial Sequence
  Description of Artificial Sequence: Synthetic oligonucleotide
cgugccgucccacagccgg

SEQ ID NO: 2274071 - RNA, 19 nt, Artificial Sequence
  Description of Artificial Sequence: Synthetic oligonucleotide
uccugcgggucagcggcgg

SEQ ID NO: 2274072 - RNA, 19 nt, Artificial Sequence
  Description of Artificial Sequence: Synthetic oligonucleotide
guggcgauaugcacgcgca

SEQ ID NO: 2274073 - RNA, 19 nt, Artificial Sequence
  Description of Artificial Sequence: Synthetic oligonucleotide
agugccugacuacgcccgu

SEQ ID NO: 2274074 - RNA, 19 nt, Artificial Sequence
  Description of Artificial Sequence: Synthetic oligonucleotide
agcugcacggccggccagg

SEQ ID NO: 2274075 - RNA, 19 nt, Artificial Sequence
  Description of Artificial Sequence: Synthetic oligonucleotide
cagcugugggcacgcaaug

SEQ ID NO: 2274076 - RNA, 19 nt, Artificial Sequence
  Description of Artificial Sequence: Synthetic oligonucleotide
ugcccucaccaguaaggua

SEQ ID NO: 2274077 - RNA, 19 nt, Artificial Sequence
  Description of Artificial Sequence: Synthetic oligonucleotide
cauguauccccugagugau

SEQ ID NO: 2274078 - RNA, 19 nt, Artificial Sequence
  Description of Artificial Sequence: Synthetic oligonucleotide
ccagccacccacgauucgg

SEQ ID NO: 2274079 - RNA, 19 nt, Artificial Sequence
  Description of Artificial Sequence: Synthetic oligonucleotide
cacguauacgaggccagca

SEQ ID NO: 2274080 - RNA, 19 nt, Artificial Sequence
  Description of Artificial Sequence: Synthetic oligonucleotide
caucauguauccccugagu

SEQ ID NO: 2274081 - RNA, 19 nt, Artificial Sequence
  Description of Artificial Sequence: Synthetic oligonucleotide
ccuuggacaucacgucucc

SEQ ID NO: 2274082 - RNA, 19 nt, Artificial Sequence
  Description of Artificial Sequence: Synthetic oligonucleotide
ucccuguggcucaggucgu

SEQ ID NO: 2274083 - RNA, 19 nt, Artificial Sequence
  Description of Artificial Sequence: Synthetic oligonucleotide
guagugcagcccacgcagc

SEQ ID NO: 2274084 - RNA, 19 nt, Artificial Sequence
  Description of Artificial Sequence: Synthetic oligonucleotide
uggaguggccgcccucgau

SEQ ID NO: 2274085 - RNA, 19 nt, Artificial Sequence
  Description of Artificial Sequence: Synthetic oligonucleotide
gggccagacaaugaacuca

SEQ ID NO: 2274086 - RNA, 19 nt, Artificial Sequence
  Description of Artificial Sequence: Synthetic oligonucleotide
gagguacuugagagccuug

SEQ ID NO: 2274087 - RNA, 19 nt, Artificial Sequence
  Description of Artificial Sequence: Synthetic oligonucleotide
ggcuguaccgaagucgguc

SEQ ID NO: 2274088 - RNA, 19 nt, Artificial Sequence
  Description of Artificial Sequence: Synthetic oligonucleotide
cacguguucucaucguacu

SEQ ID NO: 2274089 - RNA, 19 nt, Artificial Sequence
  Description of Artificial Sequence: Synthetic oligonucleotide
caugaagggccgccacguc

SEQ ID NO: 2274090 - RNA, 19 nt, Artificial Sequence
  Description of Artificial Sequence: Synthetic oligonucleotide
agccacccacgauucggcu

SEQ ID NO: 2274091 - RNA, 19 nt, Artificial Sequence
  Description of Artificial Sequence: Synthetic oligonucleotide
ugggcacgcaaugccucug

SEQ ID NO: 2274092 - RNA, 19 nt, Artificial Sequence
  Description of Artificial Sequence: Synthetic oligonucleotide
cuuucucccuguggcucag

SEQ ID NO: 2274093 - RNA, 19 nt, Artificial Sequence
  Description of Artificial Sequence: Synthetic oligonucleotide
cugcgggucagcggcggcg

SEQ ID NO: 2274094 - RNA, 19 nt, Artificial Sequence
  Description of Artificial Sequence: Synthetic oligonucleotide
aucgccaccacgggcgcgu

SEQ ID NO: 2274095 - RNA, 19 nt, Artificial Sequence
  Description of Artificial Sequence: Synthetic oligonucleotide
augcgcccucgcccggggc

SEQ ID NO: 2274096 - RNA, 19 nt, Artificial Sequence
  Description of Artificial Sequence: Synthetic oligonucleotide
gggucgguggaaacucagg

SEQ ID NO: 2274097 - RNA, 19 nt, Artificial Sequence
  Description of Artificial Sequence: Synthetic oligonucleotide
auguauccccugagugauc

SEQ ID NO: 2274098 - RNA, 19 nt, Artificial Sequence
  Description of Artificial Sequence: Synthetic oligonucleotide
cccaugaagggccgccacg

SEQ ID NO: 2274099 - RNA, 19 nt, Artificial Sequence
  Description of Artificial Sequence: Synthetic oligonucleotide
guaccgaagucggucgcuc

SEQ ID NO: 2274100 - RNA, 19 nt, Artificial Sequence
  Description of Artificial Sequence: Synthetic oligonucleotide
auaugcacgcgcacaucau

SEQ ID NO: 2274101 - RNA, 19 nt, Artificial Sequence
  Description of Artificial Sequence: Synthetic oligonucleotide
ucaguagcaccgggccaga

SEQ ID NO: 2274102 - RNA, 19 nt, Artificial Sequence
  Description of Artificial Sequence: Synthetic oligonucleotide
agcgccacaugcagggccu

SEQ ID NO: 2274103 - RNA, 19 nt, Artificial Sequence
  Description of Artificial Sequence: Synthetic oligonucleotide
ggcgauaugcacgcgcaca

SEQ ID NO: 2274104 - RNA, 19 nt, Artificial Sequence
  Description of Artificial Sequence: Synthetic oligonucleotide
gucaugcgcuguagugcgg

SEQ ID NO: 2274105 - RNA, 19 nt, Artificial Sequence
  Description of Artificial Sequence: Synthetic oligonucleotide
uccuccgcccagugccuga

SEQ ID NO: 2274106 - RNA, 19 nt, Artificial Sequence
  Description of Artificial Sequence: Synthetic oligonucleotide
gggcgcguucaguagcacc

SEQ ID NO: 2274107 - RNA, 19 nt, Artificial Sequence
  Description of Artificial Sequence: Synthetic oligonucleotide
caaugcgcccucgcccggg

SEQ ID NO: 2274108 - RNA, 19 nt, Artificial Sequence
  Description of Artificial Sequence: Synthetic oligonucleotide
aggucccagccacccacga

SEQ ID NO: 2274109 - RNA, 19 nt, Artificial Sequence
  Description of Artificial Sequence: Synthetic oligonucleotide
cugacuacgcccgugccgu

SEQ ID NO: 2274110 - RNA, 19 nt, Artificial Sequence
  Description of Artificial Sequence: Synthetic oligonucleotide
gaguggccgcccucgaugu

SEQ ID NO: 2274111 - RNA, 19 nt, Artificial Sequence
  Description of Artificial Sequence: Synthetic oligonucleotide
ugcgggucagcggcggcga

SEQ ID NO: 2274112 - RNA, 19 nt, Artificial Sequence
  Description of Artificial Sequence: Synthetic oligonucleotide
caggucguagcccagcuuu

SEQ ID NO: 2274113 - RNA, 19 nt, Artificial Sequence
  Description of Artificial Sequence: Synthetic oligonucleotide
gucccagccacccacgauu

SEQ ID NO: 2274114 - RNA, 19 nt, Artificial Sequence
  Description of Artificial Sequence: Synthetic oligonucleotide
cuccugcgggucagcggcg

SEQ ID NO: 2274115 - RNA, 19 nt, Artificial Sequence
  Description of Artificial Sequence: Synthetic oligonucleotide
gggccggauagaauaugag

SEQ ID NO: 2274116 - RNA, 19 nt, Artificial Sequence
  Description of Artificial Sequence: Synthetic oligonucleotide
auccccugagugaucgcca

SEQ ID NO: 2274117 - RNA, 19 nt, Artificial Sequence
  Description of Artificial Sequence: Synthetic oligonucleotide
acccacgauucggcuguac

SEQ ID NO: 2274118 - RNA, 19 nt, Artificial Sequence
  Description of Artificial Sequence: Synthetic oligonucleotide
gugcgggcccgcguggccg

SEQ ID NO: 2274119 - RNA, 19 nt, Artificial Sequence
  Description of Artificial Sequence: Synthetic oligonucleotide
uagugcgggcccgcguggc

SEQ ID NO: 2274120 - RNA, 19 nt, Artificial Sequence
  Description of Artificial Sequence: Synthetic oligonucleotide
caccgggccagacaaugaa

SEQ ID NO: 2274121 - RNA, 19 nt, Artificial Sequence
  Description of Artificial Sequence: Synthetic oligonucleotide
cuugagagccuuguccagu

SEQ ID NO: 2274122 - RNA, 19 nt, Artificial Sequence
  Description of Artificial Sequence: Synthetic oligonucleotide
guccgaccacguauacgag

SEQ ID NO: 2274123 - RNA, 19 nt, Artificial Sequence
  Description of Artificial Sequence: Synthetic oligonucleotide
caggucagguugcccucac

SEQ ID NO: 2274124 - RNA, 19 nt, Artificial Sequence
  Description of Artificial Sequence: Synthetic oligonucleotide
ugcggcguccgaccacgua

SEQ ID NO: 2274125 - RNA, 19 nt, Artificial Sequence
  Description of Artificial Sequence: Synthetic oligonucleotide
gcugggcggucuguguugg

SEQ ID NO: 2274126 - RNA, 19 nt, Artificial Sequence
  Description of Artificial Sequence: Synthetic oligonucleotide
cccgugccgucccacagcc

SEQ ID NO: 2274127 - RNA, 19 nt, Artificial Sequence
  Description of Artificial Sequence: Synthetic oligonucleotide
agguugcccucaccaguaa

SEQ ID NO: 2274128 - RNA, 19 nt, Artificial Sequence
  Description of Artificial Sequence: Synthetic oligonucleotide
gggcacgcaaugccucugc

SEQ ID NO: 2274129 - RNA, 19 nt, Artificial Sequence
  Description of Artificial Sequence: Synthetic oligonucleotide
cgaagucggucgcucaggc

SEQ ID NO: 2274130 - RNA, 19 nt, Artificial Sequence
  Description of Artificial Sequence: Synthetic oligonucleotide
gcguccgaccacguauacg

SEQ ID NO: 2274131 - RNA, 19 nt, Artificial Sequence
  Description of Artificial Sequence: Synthetic oligonucleotide
gccuccugcgggucagcgg

SEQ ID NO: 2274132 - RNA, 19 nt, Artificial Sequence
  Description of Artificial Sequence: Synthetic oligonucleotide
cugugggcacgcaaugccu

SEQ ID NO: 2274133 - RNA, 19 nt, Artificial Sequence
  Description of Artificial Sequence: Synthetic oligonucleotide
gcccucaccaguaagguau

SEQ ID NO: 2274134 - RNA, 19 nt, Artificial Sequence
  Description of Artificial Sequence: Synthetic oligonucleotide
cugccacguagugcagccc

SEQ ID NO: 2274135 - RNA, 19 nt, Artificial Sequence
  Description of Artificial Sequence: Synthetic oligonucleotide
acgggcgcguucaguagca

SEQ ID NO: 2274136 - RNA, 19 nt, Artificial Sequence
  Description of Artificial Sequence: Synthetic oligonucleotide
gcuguagugcgggcccgcg

SEQ ID NO: 2274137 - RNA, 19 nt, Artificial Sequence
  Description of Artificial Sequence: Synthetic oligonucleotide
cugcaaagcugagguagaa

SEQ ID NO: 2274138 - RNA, 19 nt, Artificial Sequence
  Description of Artificial Sequence: Synthetic oligonucleotide
acggccggccaggucaggu

SEQ ID NO: 2274139 - RNA, 19 nt, Artificial Sequence
  Description of Artificial Sequence: Synthetic oligonucleotide
uagcaccgggccagacaau

SEQ ID NO: 2274140 - RNA, 19 nt, Artificial Sequence
  Description of Artificial Sequence: Synthetic oligonucleotide
gugccugacuacgcccgug

SEQ ID NO: 2274141 - RNA, 19 nt, Artificial Sequence
  Description of Artificial Sequence: Synthetic oligonucleotide
caccucuguccacguguuc

SEQ ID NO: 2274142 - RNA, 19 nt, Artificial Sequence
  Description of Artificial Sequence: Synthetic oligonucleotide
uacgcccgugccgucccac

SEQ ID NO: 2274143 - RNA, 19 nt, Artificial Sequence
  Description of Artificial Sequence: Synthetic oligonucleotide
gcaaugcgcccucgcccgg

SEQ ID NO: 2274144 - RNA, 19 nt, Artificial Sequence
  Description of Artificial Sequence: Synthetic oligonucleotide
ccgaagucggucgcucagg

SEQ ID NO: 2274145 - RNA, 19 nt, Artificial Sequence
  Description of Artificial Sequence: Synthetic oligonucleotide
ccacguagugcagcccacg

SEQ ID NO: 2274146 - RNA, 19 nt, Artificial Sequence
  Description of Artificial Sequence: Synthetic oligonucleotide
gcacgcaaugccucugcaa

SEQ ID NO: 2274147 - RNA, 19 nt, Artificial Sequence
  Description of Artificial Sequence: Synthetic oligonucleotide
cccggggccggauagaaua

SEQ ID NO: 2274148 - RNA, 19 nt, Artificial Sequence
  Description of Artificial Sequence: Synthetic oligonucleotide
augaggcgagcugggcggu

SEQ ID NO: 2274149 - RNA, 19 nt, Artificial Sequence
  Description of Artificial Sequence: Synthetic oligonucleotide
ugacuacgcccgugccguc

SEQ ID NO: 2274150 - RNA, 19 nt, Artificial Sequence
  Description of Artificial Sequence: Synthetic oligonucleotide
guccacguguucucaucgu

SEQ ID NO: 2274151 - RNA, 19 nt, Artificial Sequence
  Description of Artificial Sequence: Synthetic oligonucleotide
gccugacuacgcccgugcc

SEQ ID NO: 2274152 - RNA, 19 nt, Artificial Sequence
  Description of Artificial Sequence: Synthetic oligonucleotide
uggccgucagcagcaccaa

SEQ ID NO: 2274153 - RNA, 19 nt, Artificial Sequence
  Description of Artificial Sequence: Synthetic oligonucleotide
ggcugccacguagugcagc

SEQ ID NO: 2274154 - RNA, 19 nt, Artificial Sequence
  Description of Artificial Sequence: Synthetic oligonucleotide
ggucguagcccagcuuuuc

SEQ ID NO: 2274155 - RNA, 19 nt, Artificial Sequence
  Description of Artificial Sequence: Synthetic oligonucleotide
cggauagaauaugaggcga

SEQ ID NO: 2274156 - RNA, 19 nt, Artificial Sequence
  Description of Artificial Sequence: Synthetic oligonucleotide
cgauucggcuguaccgaag

SEQ ID NO: 2274157 - RNA, 19 nt, Artificial Sequence
  Description of Artificial Sequence: Synthetic oligonucleotide
caggaaaaccuugguggcu

SEQ ID NO: 2274158 - RNA, 19 nt, Artificial Sequence
  Description of Artificial Sequence: Synthetic oligonucleotide
ugccgucccacagccggua

SEQ ID NO: 2274159 - RNA, 19 nt, Artificial Sequence
  Description of Artificial Sequence: Synthetic oligonucleotide
ucggucgcucaggcagcug

SEQ ID NO: 2274160 - RNA, 19 nt, Artificial Sequence
  Description of Artificial Sequence: Synthetic oligonucleotide
ccacgggcgcguucaguag

SEQ ID NO: 2274161 - RNA, 19 nt, Artificial Sequence
  Description of Artificial Sequence: Synthetic oligonucleotide
ccacguauacgaggccagc

SEQ ID NO: 2274162 - RNA, 19 nt, Artificial Sequence
  Description of Artificial Sequence: Synthetic oligonucleotide
ggcagcugugggcacgcaa

SEQ ID NO: 2274163 - RNA, 19 nt, Artificial Sequence
  Description of Artificial Sequence: Synthetic oligonucleotide
ggucgcucaggcagcugug

SEQ ID NO: 2274164 - RNA, 19 nt, Artificial Sequence
  Description of Artificial Sequence: Synthetic oligonucleotide
gcgauaugcacgcgcacau

SEQ ID NO: 2274165 - RNA, 19 nt, Artificial Sequence
  Description of Artificial Sequence: Synthetic oligonucleotide
ggcguccgaccacguauac

SEQ ID NO: 2274166 - RNA, 19 nt, Artificial Sequence
  Description of Artificial Sequence: Synthetic oligonucleotide
gcgcguucaguagcaccgg

SEQ ID NO: 2274167 - RNA, 19 nt, Artificial Sequence
  Description of Artificial Sequence: Synthetic oligonucleotide
ugaggcgagcugggcgguc

SEQ ID NO: 2274168 - RNA, 19 nt, Artificial Sequence
  Description of Artificial Sequence: Synthetic oligonucleotide
ccgggccagacaaugaacu

SEQ ID NO: 2274169 - RNA, 19 nt, Artificial Sequence
  Description of Artificial Sequence: Synthetic oligonucleotide
caucgacuucaagcuguga

SEQ ID NO: 2274170 - RNA, 19 nt, Artificial Sequence
  Description of Artificial Sequence: Synthetic oligonucleotide
caguagcaccgggccagac

SEQ ID NO: 2274171 - RNA, 19 nt, Artificial Sequence
  Description of Artificial Sequence: Synthetic oligonucleotide
aggucguagcccagcuuuu

SEQ ID NO: 2274172 - RNA, 19 nt, Artificial Sequence
  Description of Artificial Sequence: Synthetic oligonucleotide
gagccuuguccagugccau

SEQ ID NO: 2274173 - RNA, 19 nt, Artificial Sequence
  Description of Artificial Sequence: Synthetic oligonucleotide
gaggcgagcugggcggucu

SEQ ID NO: 2274174 - RNA, 19 nt, Artificial Sequence
  Description of Artificial Sequence: Synthetic oligonucleotide
cccacgcagcgccuccugc

SEQ ID NO: 2274175 - RNA, 19 nt, Artificial Sequence
  Description of Artificial Sequence: Synthetic oligonucleotide
gcccgcguggccgucagca

SEQ ID NO: 2274176 - RNA, 19 nt, Artificial Sequence
  Description of Artificial Sequence: Synthetic oligonucleotide
cgucccacagccgguacac

SEQ ID NO: 2274177 - RNA, 19 nt, Artificial Sequence
  Description of Artificial Sequence: Synthetic oligonucleotide
gcggcguccgaccacguau

SEQ ID NO: 2274178 - RNA, 19 nt, Artificial Sequence
  Description of Artificial Sequence: Synthetic oligonucleotide
gccagacaaugaacucagc

SEQ ID NO: 2274179 - RNA, 19 nt, Artificial Sequence
  Description of Artificial Sequence: Synthetic oligonucleotide
cccagccacccacgauucg

SEQ ID NO: 2274180 - RNA, 19 nt, Artificial Sequence
  Description of Artificial Sequence: Synthetic oligonucleotide
cuccucguuccagaagggu

SEQ ID NO: 2274181 - RNA, 19 nt, Artificial Sequence
  Description of Artificial Sequence: Synthetic oligonucleotide
cguacugugugaacugagu

SEQ ID NO: 2274182 - RNA, 19 nt, Artificial Sequence
  Description of Artificial Sequence: Synthetic oligonucleotide
cacgcagcgccuccugccu

SEQ ID NO: 2274183 - RNA, 19 nt, Artificial Sequence
  Description of Artificial Sequence: Synthetic oligonucleotide
gcgagcugggcggucugug

SEQ ID NO: 2274184 - RNA, 19 nt, Artificial Sequence
  Description of Artificial Sequence: Synthetic oligonucleotide
cgguggaaacucaggaaaa

SEQ ID NO: 2274185 - RNA, 19 nt, Artificial Sequence
  Description of Artificial Sequence: Synthetic oligonucleotide
guguuggaguggccgcccu

SEQ ID NO: 2274186 - RNA, 19 nt, Artificial Sequence
  Description of Artificial Sequence: Synthetic oligonucleotide
gcacgcgcacaucauguau

SEQ ID NO: 2274187 - RNA, 19 nt, Artificial Sequence
  Description of Artificial Sequence: Synthetic oligonucleotide
ccacccacgauucggcugu

SEQ ID NO: 2274188 - RNA, 19 nt, Artificial Sequence
  Description of Artificial Sequence: Synthetic oligonucleotide
ccgcccagugccugacuac

SEQ ID NO: 2274189 - RNA, 19 nt, Artificial Sequence
  Description of Artificial Sequence: Synthetic oligonucleotide
cugcggucaucgacuucaa

SEQ ID NO: 2274190 - RNA, 19 nt, Artificial Sequence
  Description of Artificial Sequence: Synthetic oligonucleotide
gggcggucuguguuggagu

SEQ ID NO: 2274191 - RNA, 19 nt, Artificial Sequence
  Description of Artificial Sequence: Synthetic oligonucleotide
gcccagugccugacuacgc

SEQ ID NO: 2274192 - RNA, 19 nt, Artificial Sequence
  Description of Artificial Sequence: Synthetic oligonucleotide
gcagcugugggcacgcaau

SEQ ID NO: 2274193 - RNA, 19 nt, Artificial Sequence
  Description of Artificial Sequence: Synthetic oligonucleotide
cguccuugagcgccacaug

SEQ ID NO: 2274194 - RNA, 19 nt, Artificial Sequence
  Description of Artificial Sequence: Synthetic oligonucleotide
cacguccuugagcgccaca

SEQ ID NO: 2274195 - RNA, 19 nt, Artificial Sequence
  Description of Artificial Sequence: Synthetic oligonucleotide
ccaagucugcggucaucga

SEQ ID NO: 2274196 - RNA, 19 nt, Artificial Sequence
  Description of Artificial Sequence: Synthetic oligonucleotide
ggcugcggcguccgaccac

SEQ ID NO: 2274197 - RNA, 19 nt, Artificial Sequence
  Description of Artificial Sequence: Synthetic oligonucleotide
ccgguacacaaccggccca

SEQ ID NO: 2274198 - RNA, 19 nt, Artificial Sequence
  Description of Artificial Sequence: Synthetic oligonucleotide
gccggccaggucagguugc

SEQ ID NO: 2274199 - RNA, 19 nt, Artificial Sequence
  Description of Artificial Sequence: Synthetic oligonucleotide
cugggcggucuguguugga

SEQ ID NO: 2274200 - RNA, 19 nt, Artificial Sequence
  Description of Artificial Sequence: Synthetic oligonucleotide
gggcccgcguggccgucag

SEQ ID NO: 2274201 - RNA, 19 nt, Artificial Sequence
  Description of Artificial Sequence: Synthetic oligonucleotide
gccgucccacagccgguac

SEQ ID NO: 2274202 - RNA, 19 nt, Artificial Sequence
  Description of Artificial Sequence: Synthetic oligonucleotide
gcaccgggccagacaauga

SEQ ID NO: 2274203 - RNA, 19 nt, Artificial Sequence
  Description of Artificial Sequence: Synthetic oligonucleotide
ccugcgggucagcggcggc

SEQ ID NO: 2274204 - RNA, 19 nt, Artificial Sequence
  Description of Artificial Sequence: Synthetic oligonucleotide
cacggccggccaggucagg

SEQ ID NO: 2274205 - RNA, 19 nt, Artificial Sequence
  Description of Artificial Sequence: Synthetic oligonucleotide
gcacggccggccaggucag

SEQ ID NO: 2274206 - RNA, 19 nt, Artificial Sequence
  Description of Artificial Sequence: Synthetic oligonucleotide
cgauaugcacgcgcacauc

SEQ ID NO: 2274207 - RNA, 19 nt, Artificial Sequence
  Description of Artificial Sequence: Synthetic oligonucleotide
gucggucgcucaggcagcu

SEQ ID NO: 2274208 - RNA, 19 nt, Artificial Sequence
  Description of Artificial Sequence: Synthetic oligonucleotide
cuacgcccgugccguccca

SEQ ID NO: 2274209 - RNA, 19 nt, Artificial Sequence
  Description of Artificial Sequence: Synthetic oligonucleotide
ccgugccgucccacagccg

SEQ ID NO: 2274210 - RNA, 19 nt, Artificial Sequence
  Description of Artificial Sequence: Synthetic oligonucleotide
cgcgcacaucauguauccc

SEQ ID NO: 2274211 - RNA, 19 nt, Artificial Sequence
  Description of Artificial Sequence: Synthetic oligonucleotide
ccaggucagguugcccuca

SEQ ID NO: 2274212 - RNA, 19 nt, Artificial Sequence
  Description of Artificial Sequence: Synthetic oligonucleotide
ccgucccacagccgguaca

SEQ ID NO: 2274213 - RNA, 19 nt, Artificial Sequence
  Description of Artificial Sequence: Synthetic oligonucleotide
cggcccaugaagggccgcc

SEQ ID NO: 2274214 - RNA, 19 nt, Artificial Sequence
  Description of Artificial Sequence: Synthetic oligonucleotide
gccacaugcagggccugcu

SEQ ID NO: 2274215 - RNA, 19 nt, Artificial Sequence
  Description of Artificial Sequence: Synthetic oligonucleotide
cggggccggauagaauaug

SEQ ID NO: 2274216 - RNA, 19 nt, Artificial Sequence
  Description of Artificial Sequence: Synthetic oligonucleotide
cgcuguagugcgggcccgc

SEQ ID NO: 2274217 - RNA, 19 nt, Artificial Sequence
  Description of Artificial Sequence: Synthetic oligonucleotide
ccggcccaugaagggccgc

SEQ ID NO: 2274218 - RNA, 19 nt, Artificial Sequence
  Description of Artificial Sequence: Synthetic oligonucleotide
cuccgcccagugccugacu

SEQ ID NO: 2274219 - RNA, 19 nt, Artificial Sequence
  Description of Artificial Sequence: Synthetic oligonucleotide
gcggcggcgagaaggucau

SEQ ID NO: 2274220 - RNA, 19 nt, Artificial Sequence
  Description of Artificial Sequence: Synthetic oligonucleotide
cguucaccucuguccacgu

SEQ ID NO: 2274221 - RNA, 19 nt, Artificial Sequence
  Description of Artificial Sequence: Synthetic oligonucleotide
cggcguccgaccacguaua

SEQ ID NO: 2274222 - RNA, 19 nt, Artificial Sequence
  Description of Artificial Sequence: Synthetic oligonucleotide
gcguggccgucagcagcac

SEQ ID NO: 2274223 - RNA, 19 nt, Artificial Sequence
  Description of Artificial Sequence: Synthetic oligonucleotide
cugcggcguccgaccacgu

SEQ ID NO: 2274224 - RNA, 19 nt, Artificial Sequence
  Description of Artificial Sequence: Synthetic oligonucleotide
ggcgagcugggcggucugu

SEQ ID NO: 2274225 - RNA, 19 nt, Artificial Sequence
  Description of Artificial Sequence: Synthetic oligonucleotide
ccggggccggauagaauau

SEQ ID NO: 2274226 - RNA, 19 nt, Artificial Sequence
  Description of Artificial Sequence: Synthetic oligonucleotide
cgagaaggucaugcgcugu

SEQ ID NO: 2274227 - RNA, 19 nt, Artificial Sequence
  Description of Artificial Sequence: Synthetic oligonucleotide
ccucgaugugcuccucguu

SEQ ID NO: 2274228 - RNA, 19 nt, Artificial Sequence
  Description of Artificial Sequence: Synthetic oligonucleotide
cccucaccaguaagguauu

SEQ ID NO: 2274229 - RNA, 19 nt, Artificial Sequence
  Description of Artificial Sequence: Synthetic oligonucleotide
gcgcggcagcaggucccag

SEQ ID NO: 2274230 - RNA, 19 nt, Artificial Sequence
  Description of Artificial Sequence: Synthetic oligonucleotide
ccacauaguuucgcagcuu

SEQ ID NO: 2274231 - RNA, 19 nt, Artificial Sequence
  Description of Artificial Sequence: Synthetic oligonucleotide
cacccacgauucggcugua

SEQ ID NO: 2274232 - RNA, 19 nt, Artificial Sequence
  Description of Artificial Sequence: Synthetic oligonucleotide
cgguacacaaccggcccau

SEQ ID NO: 2274233 - RNA, 19 nt, Artificial Sequence
  Description of Artificial Sequence: Synthetic oligonucleotide
cgcccggggccggauagaa

SEQ ID NO: 2274234 - RNA, 19 nt, Artificial Sequence
  Description of Artificial Sequence: Synthetic oligonucleotide
ccucgcccggggccggaua

SEQ ID NO: 2274235 - RNA, 19 nt, Artificial Sequence
  Description of Artificial Sequence: Synthetic oligonucleotide
cggcuguaccgaagucggu

SEQ ID NO: 2274236 - RNA, 19 nt, Artificial Sequence
  Description of Artificial Sequence: Synthetic oligonucleotide
cgcccucgcccggggccgg

SEQ ID NO: 2274237 - RNA, 19 nt, Artificial Sequence
  Description of Artificial Sequence: Synthetic oligonucleotide
gcgggcccgcguggccguc

SEQ ID NO: 2274238 - RNA, 19 nt, Artificial Sequence
  Description of Artificial Sequence: Synthetic oligonucleotide
cggcggcgagaaggucaug

SEQ ID NO: 2274239 - RNA, 19 nt, Artificial Sequence
  Description of Artificial Sequence: Synthetic oligonucleotide
cgggcccgcguggccguca

SEQ ID NO: 2274240 - RNA, 19 nt, Artificial Sequence
  Description of Artificial Sequence: Synthetic oligonucleotide
cccucgcccggggccggau

SEQ ID NO: 2274241 - RNA, 19 nt, Artificial Sequence
  Description of Artificial Sequence: Synthetic oligonucleotide
uuuacuagaagcaugaggc

SEQ ID NO: 2274242 - RNA, 19 nt, Artificial Sequence
  Description of Artificial Sequence: Synthetic oligonucleotide
aaguauaguuuucaaaagc

SEQ ID NO: 2274243 - RNA, 19 nt, Artificial Sequence
  Description of Artificial Sequence: Synthetic oligonucleotide
auauuugcugaucagaagc

SEQ ID NO: 2274244 - RNA, 19 nt, Artificial Sequence
  Description of Artificial Sequence: Synthetic oligonucleotide
aaucuuaauguuuuguagg

SEQ ID NO: 2274245 - RNA, 19 nt, Artificial Sequence
  Description of Artificial Sequence: Synthetic oligonucleotide
aaguauuaaggauagcugg

SEQ ID NO: 2274246 - RNA, 19 nt, Artificial Sequence
  Description of Artificial Sequence: Synthetic oligonucleotide
uuuauuauaccacacacac

SEQ ID NO: 2274247 - RNA, 19 nt, Artificial Sequence
  Description of Artificial Sequence: Synthetic oligonucleotide
uauuauaccacacacacaa

SEQ ID NO: 2274248 - RNA, 19 nt, Artificial Sequence
  Description of Artificial Sequence: Synthetic oligonucleotide
auuuuauuauaccacacac

SEQ ID NO: 2274249 - RNA, 19 nt, Artificial Sequence
  Description of Artificial Sequence: Synthetic oligonucleotide
auaaagauuuuauuauacc

SEQ ID NO: 2274250 - RNA, 19 nt, Artificial Sequence
  Description of Artificial Sequence: Synthetic oligonucleotide
aaagauuuuauuauaccac

SEQ ID NO: 2274251 - RNA, 19 nt, Artificial Sequence
  Description of Artificial Sequence: Synthetic oligonucleotide
aaaucuuaauguuuuguag

SEQ ID NO: 2274252 - RNA, 19 nt, Artificial Sequence
  Description of Artificial Sequence: Synthetic oligonucleotide
uuuacaucaaaauuccagc

SEQ ID NO: 2274253 - RNA, 19 nt, Artificial Sequence
  Description of Artificial Sequence: Synthetic oligonucleotide
agacagaccuucuaaagcc

SEQ ID NO: 2274254 - RNA, 19 nt, Artificial Sequence
  Description of Artificial Sequence: Synthetic oligonucleotide
uacuaagugagacagaccu

SEQ ID NO: 2274255 - RNA, 19 nt, Artificial Sequence
  Description of Artificial Sequence: Synthetic oligonucleotide
gauagcaguuuucagagag

SEQ ID NO: 2274256 - RNA, 19 nt, Artificial Sequence
  Description of Artificial Sequence: Synthetic oligonucleotide
uguaguuguaucagcaggg

SEQ ID NO: 2274257 - RNA, 19 nt, Artificial Sequence
  Description of Artificial Sequence: Synthetic oligonucleotide
aagauuuuauuauaccaca

SEQ ID NO: 2274258 - RNA, 19 nt, Artificial Sequence
  Description of Artificial Sequence: Synthetic oligonucleotide
uucacguuuauucugaauc

SEQ ID NO: 2274259 - RNA, 19 nt, Artificial Sequence
  Description of Artificial Sequence: Synthetic oligonucleotide
ucuaauuaguccuauuucu

SEQ ID NO: 2274260 - RNA, 19 nt, Artificial Sequence
  Description of Artificial Sequence: Synthetic oligonucleotide
uagauagcaguuuucagag

SEQ ID NO: 2274261 - RNA, 19 nt, Artificial Sequence
  Description of Artificial Sequence: Synthetic oligonucleotide
uuagcugaggacuuugggg

SEQ ID NO: 2274262 - RNA, 19 nt, Artificial Sequence
  Description of Artificial Sequence: Synthetic oligonucleotide
uuuucgguuauucugcuga

SEQ ID NO: 2274263 - RNA, 19 nt, Artificial Sequence
  Description of Artificial Sequence: Synthetic oligonucleotide
aauuaguccuauuucuucu

SEQ ID NO: 2274264 - RNA, 19 nt, Artificial Sequence
  Description of Artificial Sequence: Synthetic oligonucleotide
augaguaaaucacauuggg

SEQ ID NO: 2274265 - RNA, 19 nt, Artificial Sequence
  Description of Artificial Sequence: Synthetic oligonucleotide
guuuacuagaagcaugagg

SEQ ID NO: 2274266 - RNA, 19 nt, Artificial Sequence
  Description of Artificial Sequence: Synthetic oligonucleotide
aaaugaugcugcuacuaag

SEQ ID NO: 2274267 - RNA, 19 nt, Artificial Sequence
  Description of Artificial Sequence: Synthetic oligonucleotide
gaugcugcuacuaagugag

SEQ ID NO: 2274268 - RNA, 19 nt, Artificial Sequence
  Description of Artificial Sequence: Synthetic oligonucleotide
uauauuacucaacuacucu

SEQ ID NO: 2274269 - RNA, 19 nt, Artificial Sequence
  Description of Artificial Sequence: Synthetic oligonucleotide
cuuaauguuuuguaggaug

SEQ ID NO: 2274270 - RNA, 19 nt, Artificial Sequence
  Description of Artificial Sequence: Synthetic oligonucleotide
ugauuucuccccauuaaag

SEQ ID NO: 2274271 - RNA, 19 nt, Artificial Sequence
  Description of Artificial Sequence: Synthetic oligonucleotide
guaggaugaguccauaagg

SEQ ID NO: 2274272 - RNA, 19 nt, Artificial Sequence
  Description of Artificial Sequence: Synthetic oligonucleotide
uacucuuugaacuccaaga

SEQ ID NO: 2274273 - RNA, 19 nt, Artificial Sequence
  Description of Artificial Sequence: Synthetic oligonucleotide
caugaguccauaaucgggg

SEQ ID NO: 2274274 - RNA, 19 nt, Artificial Sequence
  Description of Artificial Sequence: Synthetic oligonucleotide
ugacaagaaauucuuaauc

SEQ ID NO: 2274275 - RNA, 19 nt, Artificial Sequence
  Description of Artificial Sequence: Synthetic oligonucleotide
aucaaaauuccagccaucc

SEQ ID NO: 2274276 - RNA, 19 nt, Artificial Sequence
  Description of Artificial Sequence: Synthetic oligonucleotide
guggcuaugcgguagauag

SEQ ID NO: 2274277 - RNA, 19 nt, Artificial Sequence
  Description of Artificial Sequence: Synthetic oligonucleotide
uuacaucaaaauuccagcc

SEQ ID NO: 2274278 - RNA, 19 nt, Artificial Sequence
  Description of Artificial Sequence: Synthetic oligonucleotide
ucagauguucaccaaacgu

SEQ ID NO: 2274279 - RNA, 19 nt, Artificial Sequence
  Description of Artificial Sequence: Synthetic oligonucleotide
ucuucuuauuagcugagga

SEQ ID NO: 2274280 - RNA, 19 nt, Artificial Sequence
  Description of Artificial Sequence: Synthetic oligonucleotide
aaacgugguggcuaugcgg

SEQ ID NO: 2274281 - RNA, 19 nt, Artificial Sequence
  Description of Artificial Sequence: Synthetic oligonucleotide
cuuuccaugauuucucccc

SEQ ID NO: 2274282 - RNA, 19 nt, Artificial Sequence
  Description of Artificial Sequence: Synthetic oligonucleotide
uaggaugaguccauaaggc

SEQ ID NO: 2274283 - RNA, 19 nt, Artificial Sequence
  Description of Artificial Sequence: Synthetic oligonucleotide
cugaucagaagcaugaguc

SEQ ID NO: 2274284 - RNA, 19 nt, Artificial Sequence
  Description of Artificial Sequence: Synthetic oligonucleotide
ugaguaaaucacauugggc

SEQ ID NO: 2274285 - RNA, 19 nt, Artificial Sequence
  Description of Artificial Sequence: Synthetic oligonucleotide
auagcagguguuuacauca

SEQ ID NO: 2274286 - RNA, 19 nt, Artificial Sequence
  Description of Artificial Sequence: Synthetic oligonucleotide
gauccaagaaugcugaaca

SEQ ID NO: 2274287 - RNA, 19 nt, Artificial Sequence
  Description of Artificial Sequence: Synthetic oligonucleotide
aagcaugaguccauaaucg

SEQ ID NO: 2274288 - RNA, 19 nt, Artificial Sequence
  Description of Artificial Sequence: Synthetic oligonucleotide
uuaaggauagcugggagug

SEQ ID NO: 2274289 - RNA, 19 nt, Artificial Sequence
  Description of Artificial Sequence: Synthetic oligonucleotide
uuauauuacucaacuacuc

SEQ ID NO: 2274290 - RNA, 19 nt, Artificial Sequence
  Description of Artificial Sequence: Synthetic oligonucleotide
uccugcaggguuaacaaag

SEQ ID NO: 2274291 - RNA, 19 nt, Artificial Sequence
  Description of Artificial Sequence: Synthetic oligonucleotide
caugaguaaaucacauugg

SEQ ID NO: 2274292 - RNA, 19 nt, Artificial Sequence
  Description of Artificial Sequence: Synthetic oligonucleotide
ucugauccaagaaugcuga

SEQ ID NO: 2274293 - RNA, 19 nt, Artificial Sequence
  Description of Artificial Sequence: Synthetic oligonucleotide
ugaaggcaaaucuuaaugu

SEQ ID NO: 2274294 - RNA, 19 nt, Artificial Sequence
  Description of Artificial Sequence: Synthetic oligonucleotide
gaauccaugaguaaaucac

SEQ ID NO: 2274295 - RNA, 19 nt, Artificial Sequence
  Description of Artificial Sequence: Synthetic oligonucleotide
ucaaaauuccagccauccg

SEQ ID NO: 2274296 - RNA, 19 nt, Artificial Sequence
  Description of Artificial Sequence: Synthetic oligonucleotide
cuguaaaugaugcugcuac

SEQ ID NO: 2274297 - RNA, 19 nt, Artificial Sequence
  Description of Artificial Sequence: Synthetic oligonucleotide
gaagcaugaguccauaauc

SEQ ID NO: 2274298 - RNA, 19 nt, Artificial Sequence
  Description of Artificial Sequence: Synthetic oligonucleotide
uguucaccaaacguggugg

SEQ ID NO: 2274299 - RNA, 19 nt, Artificial Sequence
  Description of Artificial Sequence: Synthetic oligonucleotide
uucuuauuagcugaggacu

SEQ ID NO: 2274300 - RNA, 19 nt, Artificial Sequence
  Description of Artificial Sequence: Synthetic oligonucleotide
aaagcaagcaccacgacaa

SEQ ID NO: 2274301 - RNA, 19 nt, Artificial Sequence
  Description of Artificial Sequence: Synthetic oligonucleotide
ugagacagaccuucuaaag

SEQ ID NO: 2274302 - RNA, 19 nt, Artificial Sequence
  Description of Artificial Sequence: Synthetic oligonucleotide
uguaucagcaggguaauga

SEQ ID NO: 2274303 - RNA, 19 nt, Artificial Sequence
  Description of Artificial Sequence: Synthetic oligonucleotide
uucagauguucaccaaacg

SEQ ID NO: 2274304 - RNA, 19 nt, Artificial Sequence
  Description of Artificial Sequence: Synthetic oligonucleotide
cagauguucaccaaacgug

SEQ ID NO: 2274305 - RNA, 19 nt, Artificial Sequence
  Description of Artificial Sequence: Synthetic oligonucleotide
uaugcauuugggcaucuga

SEQ ID NO: 2274306 - RNA, 19 nt, Artificial Sequence
  Description of Artificial Sequence: Synthetic oligonucleotide
cuaucuucuguaaaugaug

SEQ ID NO: 2274307 - RNA, 19 nt, Artificial Sequence
  Description of Artificial Sequence: Synthetic oligonucleotide
gagacagaccuucuaaagc

SEQ ID NO: 2274308 - RNA, 19 nt, Artificial Sequence
  Description of Artificial Sequence: Synthetic oligonucleotide
caaauggggucccaaaagg

SEQ ID NO: 2274309 - RNA, 19 nt, Artificial Sequence
  Description of Artificial Sequence: Synthetic oligonucleotide
cugaaggcaaaucuuaaug

SEQ ID NO: 2274310 - RNA, 19 nt, Artificial Sequence
  Description of Artificial Sequence: Synthetic oligonucleotide
uuagaaaagucagauauuu

SEQ ID NO: 2274311 - RNA, 19 nt, Artificial Sequence
  Description of Artificial Sequence: Synthetic oligonucleotide
auuaucagcacccguuuug

SEQ ID NO: 2274312 - RNA, 19 nt, Artificial Sequence
  Description of Artificial Sequence: Synthetic oligonucleotide
auuagcugaggacuuuggg

SEQ ID NO: 2274313 - RNA, 19 nt, Artificial Sequence
  Description of Artificial Sequence: Synthetic oligonucleotide
aguaaaucacauugggcug

SEQ ID NO: 2274314 - RNA, 19 nt, Artificial Sequence
  Description of Artificial Sequence: Synthetic oligonucleotide
guagauagcaguuuucaga

SEQ ID NO: 2274315 - RNA, 19 nt, Artificial Sequence
  Description of Artificial Sequence: Synthetic oligonucleotide
uauuugcugaucagaagca

SEQ ID NO: 2274316 - RNA, 19 nt, Artificial Sequence
  Description of Artificial Sequence: Synthetic oligonucleotide
gauucacuacacuggagcc

SEQ ID NO: 2274317 - RNA, 19 nt, Artificial Sequence
  Description of Artificial Sequence: Synthetic oligonucleotide
agcccaaauaugcauuugg

SEQ ID NO: 2274318 - RNA, 19 nt, Artificial Sequence
  Description of Artificial Sequence: Synthetic oligonucleotide
aguauaguuuucaaaagca

SEQ ID NO: 2274319 - RNA, 19 nt, Artificial Sequence
  Description of Artificial Sequence: Synthetic oligonucleotide
uacucaacuacucuuugaa

SEQ ID NO: 2274320 - RNA, 19 nt, Artificial Sequence
  Description of Artificial Sequence: Synthetic oligonucleotide
cuguaguuguaucagcagg

SEQ ID NO: 2274321 - RNA, 19 nt, Artificial Sequence
  Description of Artificial Sequence: Synthetic oligonucleotide
ucuuaaucuguucacguuu

SEQ ID NO: 2274322 - RNA, 19 nt, Artificial Sequence
  Description of Artificial Sequence: Synthetic oligonucleotide
uauuagcugaggacuuugg

SEQ ID NO: 2274323 - RNA, 19 nt, Artificial Sequence
  Description of Artificial Sequence: Synthetic oligonucleotide
ggcaucugaaaauacagcc

SEQ ID NO: 2274324 - RNA, 19 nt, Artificial Sequence
  Description of Artificial Sequence: Synthetic oligonucleotide
ucuucugauccaagaaugc

SEQ ID NO: 2274325 - RNA, 19 nt, Artificial Sequence
  Description of Artificial Sequence: Synthetic oligonucleotide
aguauuaaggauagcuggg

SEQ ID NO: 2274326 - RNA, 19 nt, Artificial Sequence
  Description of Artificial Sequence: Synthetic oligonucleotide
ucagauauuugcugaucag

SEQ ID NO: 2274327 - RNA, 19 nt, Artificial Sequence
  Description of Artificial Sequence: Synthetic oligonucleotide
cuucuuauuagcugaggac

SEQ ID NO: 2274328 - RNA, 19 nt, Artificial Sequence
  Description of Artificial Sequence: Synthetic oligonucleotide
uaaaugaugcugcuacuaa

SEQ ID NO: 2274329 - RNA, 19 nt, Artificial Sequence
  Description of Artificial Sequence: Synthetic oligonucleotide
uaauuaguccuauuucuuc

SEQ ID NO: 2274330 - RNA, 19 nt, Artificial Sequence
  Description of Artificial Sequence: Synthetic oligonucleotide
aaugaugcugcuacuaagu

SEQ ID NO: 2274331 - RNA, 19 nt, Artificial Sequence
  Description of Artificial Sequence: Synthetic oligonucleotide
auuaaggauagcugggagu

SEQ ID NO: 2274332 - RNA, 19 nt, Artificial Sequence
  Description of Artificial Sequence: Synthetic oligonucleotide
auguuuuguaggaugaguc

SEQ ID NO: 2274333 - RNA, 19 nt, Artificial Sequence
  Description of Artificial Sequence: Synthetic oligonucleotide
ucgguuauucugcugagaa

SEQ ID NO: 2274334 - RNA, 19 nt, Artificial Sequence
  Description of Artificial Sequence: Synthetic oligonucleotide
ugcaggguuaacaaaguau

SEQ ID NO: 2274335 - RNA, 19 nt, Artificial Sequence
  Description of Artificial Sequence: Synthetic oligonucleotide
cuucuaaagcccaaauaug

SEQ ID NO: 2274336 - RNA, 19 nt, Artificial Sequence
  Description of Artificial Sequence: Synthetic oligonucleotide
aaauaugcauuugggcauc

SEQ ID NO: 2274337 - RNA, 19 nt, Artificial Sequence
  Description of Artificial Sequence: Synthetic oligonucleotide
uacuagaagcaugaggcag

SEQ ID NO: 2274338 - RNA, 19 nt, Artificial Sequence
  Description of Artificial Sequence: Synthetic oligonucleotide
uacauuaucagcacccguu

SEQ ID NO: 2274339 - RNA, 19 nt, Artificial Sequence
  Description of Artificial Sequence: Synthetic oligonucleotide
ugaucagaagcaugagucc

SEQ ID NO: 2274340 - RNA, 19 nt, Artificial Sequence
  Description of Artificial Sequence: Synthetic oligonucleotide
ugucuuacccucagcagug

SEQ ID NO: 2274341 - RNA, 19 nt, Artificial Sequence
  Description of Artificial Sequence: Synthetic oligonucleotide
agcaugaguccauaaucgg

SEQ ID NO: 2274342 - RNA, 19 nt, Artificial Sequence
  Description of Artificial Sequence: Synthetic oligonucleotide
caaaauuccagccauccga

SEQ ID NO: 2274343 - RNA, 19 nt, Artificial Sequence
  Description of Artificial Sequence: Synthetic oligonucleotide
auuaaaguauaguuuucaa

SEQ ID NO: 2274344 - RNA, 19 nt, Artificial Sequence
  Description of Artificial Sequence: Synthetic oligonucleotide
ucaacuacucuuugaacuc

SEQ ID NO: 2274345 - RNA, 19 nt, Artificial Sequence
  Description of Artificial Sequence: Synthetic oligonucleotide
acuagaagcaugaggcagc

SEQ ID NO: 2274346 - RNA, 19 nt, Artificial Sequence
  Description of Artificial Sequence: Synthetic oligonucleotide
uuauuauaccacacacaca

SEQ ID NO: 2274347 - RNA, 19 nt, Artificial Sequence
  Description of Artificial Sequence: Synthetic oligonucleotide
uauuacucaacuacucuuu

SEQ ID NO: 2274348 - RNA, 19 nt, Artificial Sequence
  Description of Artificial Sequence: Synthetic oligonucleotide
uguggucuggacaacucca

SEQ ID NO: 2274349 - RNA, 19 nt, Artificial Sequence
  Description of Artificial Sequence: Synthetic oligonucleotide
uugacaagaaauucuuaau

SEQ ID NO: 2274350 - RNA, 19 nt, Artificial Sequence
  Description of Artificial Sequence: Synthetic oligonucleotide
auauuacucaacuacucuu

SEQ ID NO: 2274351 - RNA, 19 nt, Artificial Sequence
  Description of Artificial Sequence: Synthetic oligonucleotide
augaguccauaaucggggc

SEQ ID NO: 2274352 - RNA, 19 nt, Artificial Sequence
  Description of Artificial Sequence: Synthetic oligonucleotide
ugaacacaguuuauauuac

SEQ ID NO: 2274353 - RNA, 19 nt, Artificial Sequence
  Description of Artificial Sequence: Synthetic oligonucleotide
ugaugcugcuacuaaguga

SEQ ID NO: 2274354 - RNA, 19 nt, Artificial Sequence
  Description of Artificial Sequence: Synthetic oligonucleotide
acaguuuauauuacucaac

SEQ ID NO: 2274355 - RNA, 19 nt, Artificial Sequence
  Description of Artificial Sequence: Synthetic oligonucleotide
acuuuggggagacccauag

SEQ ID NO: 2274356 - RNA, 19 nt, Artificial Sequence
  Description of Artificial Sequence: Synthetic oligonucleotide
auuacucaacuacucuuug

SEQ ID NO: 2274357 - RNA, 19 nt, Artificial Sequence
  Description of Artificial Sequence: Synthetic oligonucleotide
uuucagagaggcccugaag

SEQ ID NO: 2274358 - RNA, 19 nt, Artificial Sequence
  Description of Artificial Sequence: Synthetic oligonucleotide
agcaggguaaugaacacag

SEQ ID NO: 2274359 - RNA, 19 nt, Artificial Sequence
  Description of Artificial Sequence: Synthetic oligonucleotide
gaguccauaaggcuuccug

SEQ ID NO: 2274360 - RNA, 19 nt, Artificial Sequence
  Description of Artificial Sequence: Synthetic oligonucleotide
auuugguacagaaaaggca

SEQ ID NO: 2274361 - RNA, 19 nt, Artificial Sequence
  Description of Artificial Sequence: Synthetic oligonucleotide
ugggauuagaaaagucaga

SEQ ID NO: 2274362 - RNA, 19 nt, Artificial Sequence
  Description of Artificial Sequence: Synthetic oligonucleotide
uuaguccuauuucuucuga

SEQ ID NO: 2274363 - RNA, 19 nt, Artificial Sequence
  Description of Artificial Sequence: Synthetic oligonucleotide
uccgauucacuacacugga

SEQ ID NO: 2274364 - RNA, 19 nt, Artificial Sequence
  Description of Artificial Sequence: Synthetic oligonucleotide
agugagacagaccuucuaa

SEQ ID NO: 2274365 - RNA, 19 nt, Artificial Sequence
  Description of Artificial Sequence: Synthetic oligonucleotide
uggacaacuccaaaucuau

SEQ ID NO: 2274366 - RNA, 19 nt, Artificial Sequence
  Description of Artificial Sequence: Synthetic oligonucleotide
uuuccaugauuucucccca

SEQ ID NO: 2274367 - RNA, 19 nt, Artificial Sequence
  Description of Artificial Sequence: Synthetic oligonucleotide
aguacauuaucagcacccg

SEQ ID NO: 2274368 - RNA, 19 nt, Artificial Sequence
  Description of Artificial Sequence: Synthetic oligonucleotide
acaucuguaguuguaucag

SEQ ID NO: 2274369 - RNA, 19 nt, Artificial Sequence
  Description of Artificial Sequence: Synthetic oligonucleotide
agaagcaugaguccauaau

SEQ ID NO: 2274370 - RNA, 19 nt, Artificial Sequence
  Description of Artificial Sequence: Synthetic oligonucleotide
uccaagaaugcugaacaca

SEQ ID NO: 2274371 - RNA, 19 nt, Artificial Sequence
  Description of Artificial Sequence: Synthetic oligonucleotide
uugucaacagccuccugca

SEQ ID NO: 2274372 - RNA, 19 nt, Artificial Sequence
  Description of Artificial Sequence: Synthetic oligonucleotide
aaggauagcugggagugug

SEQ ID NO: 2274373 - RNA, 19 nt, Artificial Sequence
  Description of Artificial Sequence: Synthetic oligonucleotide
aguuguaucagcaggguaa

SEQ ID NO: 2274374 - RNA, 19 nt, Artificial Sequence
  Description of Artificial Sequence: Synthetic oligonucleotide
gcauuugguacagaaaagg

SEQ ID NO: 2274375 - RNA, 19 nt, Artificial Sequence
  Description of Artificial Sequence: Synthetic oligonucleotide
acacaucuguaguuguauc

SEQ ID NO: 2274376 - RNA, 19 nt, Artificial Sequence
  Description of Artificial Sequence: Synthetic oligonucleotide
cugcuacuaagugagacag

SEQ ID NO: 2274377 - RNA, 19 nt, Artificial Sequence
  Description of Artificial Sequence: Synthetic oligonucleotide
uuacuagaagcaugaggca

SEQ ID NO: 2274378 - RNA, 19 nt, Artificial Sequence
  Description of Artificial Sequence: Synthetic oligonucleotide
auugggcugucucacuguc

SEQ ID NO: 2274379 - RNA, 19 nt, Artificial Sequence
  Description of Artificial Sequence: Synthetic oligonucleotide
ccaaauaugcauuugggca

SEQ ID NO: 2274380 - RNA, 19 nt, Artificial Sequence
  Description of Artificial Sequence: Synthetic oligonucleotide
gauuucuccccauuaaagu

SEQ ID NO: 2274381 - RNA, 19 nt, Artificial Sequence
  Description of Artificial Sequence: Synthetic oligonucleotide
acccauagcagguguuuac

SEQ ID NO: 2274382 - RNA, 19 nt, Artificial Sequence
  Description of Artificial Sequence: Synthetic oligonucleotide
uaugcgguagauagcaguu

SEQ ID NO: 2274383 - RNA, 19 nt, Artificial Sequence
  Description of Artificial Sequence: Synthetic oligonucleotide
uuauuagcugaggacuuug

SEQ ID NO: 2274384 - RNA, 19 nt, Artificial Sequence
  Description of Artificial Sequence: Synthetic oligonucleotide
uguaaaugaugcugcuacu

SEQ ID NO: 2274385 - RNA, 19 nt, Artificial Sequence
  Description of Artificial Sequence: Synthetic oligonucleotide
caaaguauuaaggauagcu

SEQ ID NO: 2274386 - RNA, 19 nt, Artificial Sequence
  Description of Artificial Sequence: Synthetic oligonucleotide
acaaaggaagcaucuaauu

SEQ ID NO: 2274387 - RNA, 19 nt, Artificial Sequence
  Description of Artificial Sequence: Synthetic oligonucleotide
gaguccauaaucggggccc

SEQ ID NO: 2274388 - RNA, 19 nt, Artificial Sequence
  Description of Artificial Sequence: Synthetic oligonucleotide
aagucagauauuugcugau

SEQ ID NO: 2274389 - RNA, 19 nt, Artificial Sequence
  Description of Artificial Sequence: Synthetic oligonucleotide
auguucaccaaacguggug

SEQ ID NO: 2274390 - RNA, 19 nt, Artificial Sequence
  Description of Artificial Sequence: Synthetic oligonucleotide
ugauccaagaaugcugaac

SEQ ID NO: 2274391 - RNA, 19 nt, Artificial Sequence
  Description of Artificial Sequence: Synthetic oligonucleotide
aggaugaguccauaaggcu

SEQ ID NO: 2274392 - RNA, 19 nt, Artificial Sequence
  Description of Artificial Sequence: Synthetic oligonucleotide
caugaggcagcuuaaaaua

SEQ ID NO: 2274393 - RNA, 19 nt, Artificial Sequence
  Description of Artificial Sequence: Synthetic oligonucleotide
cucaacuacucuuugaacu

SEQ ID NO: 2274394 - RNA, 19 nt, Artificial Sequence
  Description of Artificial Sequence: Synthetic oligonucleotide
acuacacuggagccaaaug

SEQ ID NO: 2274395 - RNA, 19 nt, Artificial Sequence
  Description of Artificial Sequence: Synthetic oligonucleotide
aacgugguggcuaugcggu

SEQ ID NO: 2274396 - RNA, 19 nt, Artificial Sequence
  Description of Artificial Sequence: Synthetic oligonucleotide
augaugcugcuacuaagug

SEQ ID NO: 2274397 - RNA, 19 nt, Artificial Sequence
  Description of Artificial Sequence: Synthetic oligonucleotide
aaauggggucccaaaagga

SEQ ID NO: 2274398 - RNA, 19 nt, Artificial Sequence
  Description of Artificial Sequence: Synthetic oligonucleotide
cuuccugaaauccggggug

SEQ ID NO: 2274399 - RNA, 19 nt, Artificial Sequence
  Description of Artificial Sequence: Synthetic oligonucleotide
cucuuugaacuccaagaac

SEQ ID NO: 2274400 - RNA, 19 nt, Artificial Sequence
  Description of Artificial Sequence: Synthetic oligonucleotide
gaugaguccauaaggcuuc

SEQ ID NO: 2274401 - RNA, 19 nt, Artificial Sequence
  Description of Artificial Sequence: Synthetic oligonucleotide
auccgauucacuacacugg

SEQ ID NO: 2274402 - RNA, 19 nt, Artificial Sequence
  Description of Artificial Sequence: Synthetic oligonucleotide
aguuuauauuacucaacua

SEQ ID NO: 2274403 - RNA, 19 nt, Artificial Sequence
  Description of Artificial Sequence: Synthetic oligonucleotide
uuucgguuauucugcugag

SEQ ID NO: 2274404 - RNA, 19 nt, Artificial Sequence
  Description of Artificial Sequence: Synthetic oligonucleotide
caaaucuuaauguuuugua

SEQ ID NO: 2274405 - RNA, 19 nt, Artificial Sequence
  Description of Artificial Sequence: Synthetic oligonucleotide
ugggaguguggucuggaca

SEQ ID NO: 2274406 - RNA, 19 nt, Artificial Sequence
  Description of Artificial Sequence: Synthetic oligonucleotide
ugcugagaauuucuuucca

SEQ ID NO: 2274407 - RNA, 19 nt, Artificial Sequence
  Description of Artificial Sequence: Synthetic oligonucleotide
caucuguaguuguaucagc

SEQ ID NO: 2274408 - RNA, 19 nt, Artificial Sequence
  Description of Artificial Sequence: Synthetic oligonucleotide
cauagcagguguuuacauc

SEQ ID NO: 2274409 - RNA, 19 nt, Artificial Sequence
  Description of Artificial Sequence: Synthetic oligonucleotide
ggggugguuuacuagaagc

SEQ ID NO: 2274410 - RNA, 19 nt, Artificial Sequence
  Description of Artificial Sequence: Synthetic oligonucleotide
aaggcaaaucuuaauguuu

SEQ ID NO: 2274411 - RNA, 19 nt, Artificial Sequence
  Description of Artificial Sequence: Synthetic oligonucleotide
uuuucagagaggcccugaa

SEQ ID NO: 2274412 - RNA, 19 nt, Artificial Sequence
  Description of Artificial Sequence: Synthetic oligonucleotide
uuaucagcacccguuuuga

SEQ ID NO: 2274413 - RNA, 19 nt, Artificial Sequence
  Description of Artificial Sequence: Synthetic oligonucleotide
aauggggucccaaaaggau

SEQ ID NO: 2274414 - RNA, 19 nt, Artificial Sequence
  Description of Artificial Sequence: Synthetic oligonucleotide
gaucagaagcaugagucca

SEQ ID NO: 2274415 - RNA, 19 nt, Artificial Sequence
  Description of Artificial Sequence: Synthetic oligonucleotide
ugcauuugggcaucugaaa

SEQ ID NO: 2274416 - RNA, 19 nt, Artificial Sequence
  Description of Artificial Sequence: Synthetic oligonucleotide
cauaaggcuuccugaaauc

SEQ ID NO: 2274417 - RNA, 19 nt, Artificial Sequence
  Description of Artificial Sequence: Synthetic oligonucleotide
cugucucacugucuuaccc

SEQ ID NO: 2274418 - RNA, 19 nt, Artificial Sequence
  Description of Artificial Sequence: Synthetic oligonucleotide
guuuuguaggaugagucca

SEQ ID NO: 2274419 - RNA, 19 nt, Artificial Sequence
  Description of Artificial Sequence: Synthetic oligonucleotide
acaacuccaaaucuaucuu

SEQ ID NO: 2274420 - RNA, 19 nt, Artificial Sequence
  Description of Artificial Sequence: Synthetic oligonucleotide
cacaguuuauauuacucaa

SEQ ID NO: 2274421 - RNA, 19 nt, Artificial Sequence
  Description of Artificial Sequence: Synthetic oligonucleotide
aggguuaacaaaguauuaa

SEQ ID NO: 2274422 - RNA, 19 nt, Artificial Sequence
  Description of Artificial Sequence: Synthetic oligonucleotide
agucuuuucugauguucug

SEQ ID NO: 2274423 - RNA, 19 nt, Artificial Sequence
  Description of Artificial Sequence: Synthetic oligonucleotide
cuacuaagugagacagacc

SEQ ID NO: 2274424 - RNA, 19 nt, Artificial Sequence
  Description of Artificial Sequence: Synthetic oligonucleotide
uucacuacacuggagccaa

SEQ ID NO: 2274425 - RNA, 19 nt, Artificial Sequence
  Description of Artificial Sequence: Synthetic oligonucleotide
acaaaguauuaaggauagc

SEQ ID NO: 2274426 - RNA, 19 nt, Artificial Sequence
  Description of Artificial Sequence: Synthetic oligonucleotide
agagguacaaggagauggg

SEQ ID NO: 2274427 - RNA, 19 nt, Artificial Sequence
  Description of Artificial Sequence: Synthetic oligonucleotide
auuccagccauccgauuca

SEQ ID NO: 2274428 - RNA, 19 nt, Artificial Sequence
  Description of Artificial Sequence: Synthetic oligonucleotide
gaaaagucagauauuugcu

SEQ ID NO: 2274429 - RNA, 19 nt, Artificial Sequence
  Description of Artificial Sequence: Synthetic oligonucleotide
agaugggauuagaaaaguc

SEQ ID NO: 2274430 - RNA, 19 nt, Artificial Sequence
  Description of Artificial Sequence: Synthetic oligonucleotide
agucagauauuugcugauc

SEQ ID NO: 2274431 - RNA, 19 nt, Artificial Sequence
  Description of Artificial Sequence: Synthetic oligonucleotide
aggcccugaaggcaaaucu

SEQ ID NO: 2274432 - RNA, 19 nt, Artificial Sequence
  Description of Artificial Sequence: Synthetic oligonucleotide
uuccugaaauccggggugg

SEQ ID NO: 2274433 - RNA, 19 nt, Artificial Sequence
  Description of Artificial Sequence: Synthetic oligonucleotide
uucuuaaucuguucacguu

SEQ ID NO: 2274434 - RNA, 19 nt, Artificial Sequence
  Description of Artificial Sequence: Synthetic oligonucleotide
ucuuacccucagcaguggc

SEQ ID NO: 2274435 - RNA, 19 nt, Artificial Sequence
  Description of Artificial Sequence: Synthetic oligonucleotide
cuauuucuucugauccaag

SEQ ID NO: 2274436 - RNA, 19 nt, Artificial Sequence
  Description of Artificial Sequence: Synthetic oligonucleotide
cacaucuguaguuguauca

SEQ ID NO: 2274437 - RNA, 19 nt, Artificial Sequence
  Description of Artificial Sequence: Synthetic oligonucleotide
uaagugagacagaccuucu

SEQ ID NO: 2274438 - RNA, 19 nt, Artificial Sequence
  Description of Artificial Sequence: Synthetic oligonucleotide
uccauaaggcuuccugaaa

SEQ ID NO: 2274439 - RNA, 19 nt, Artificial Sequence
  Description of Artificial Sequence: Synthetic oligonucleotide
ugcgguagauagcaguuuu

SEQ ID NO: 2274440 - RNA, 19 nt, Artificial Sequence
  Description of Artificial Sequence: Synthetic oligonucleotide
caaacgugguggcuaugcg

SEQ ID NO: 2274441 - RNA, 19 nt, Artificial Sequence
  Description of Artificial Sequence: Synthetic oligonucleotide
aaugcugaacacaucugua

SEQ ID NO: 2274442 - RNA, 19 nt, Artificial Sequence
  Description of Artificial Sequence: Synthetic oligonucleotide
cccaaauaugcauuugggc

SEQ ID NO: 2274443 - RNA, 19 nt, Artificial Sequence
  Description of Artificial Sequence: Synthetic oligonucleotide
aucuguaguuguaucagca

SEQ ID NO: 2274444 - RNA, 19 nt, Artificial Sequence
  Description of Artificial Sequence: Synthetic oligonucleotide
auagcaguuuucagagagg

SEQ ID NO: 2274445 - RNA, 19 nt, Artificial Sequence
  Description of Artificial Sequence: Synthetic oligonucleotide
gugguuuacuagaagcaug

SEQ ID NO: 2274446 - RNA, 19 nt, Artificial Sequence
  Description of Artificial Sequence: Synthetic oligonucleotide
caguuuauauuacucaacu

SEQ ID NO: 2274447 - RNA, 19 nt, Artificial Sequence
  Description of Artificial Sequence: Synthetic oligonucleotide
uuguaggaugaguccauaa

SEQ ID NO: 2274448 - RNA, 19 nt, Artificial Sequence
  Description of Artificial Sequence: Synthetic oligonucleotide
agccauccgauucacuaca

SEQ ID NO: 2274449 - RNA, 19 nt, Artificial Sequence
  Description of Artificial Sequence: Synthetic oligonucleotide
acccguuuugacaagaaau

SEQ ID NO: 2274450 - RNA, 19 nt, Artificial Sequence
  Description of Artificial Sequence: Synthetic oligonucleotide
uacaaggagaugggauuag

SEQ ID NO: 2274451 - RNA, 19 nt, Artificial Sequence
  Description of Artificial Sequence: Synthetic oligonucleotide
uuaaucuguucacguuuau

SEQ ID NO: 2274452 - RNA, 19 nt, Artificial Sequence
  Description of Artificial Sequence: Synthetic oligonucleotide
ucuccccauuaaaguauag

SEQ ID NO: 2274453 - RNA, 19 nt, Artificial Sequence
  Description of Artificial Sequence: Synthetic oligonucleotide
gacagaccuucuaaagccc

SEQ ID NO: 2274454 - RNA, 19 nt, Artificial Sequence
  Description of Artificial Sequence: Synthetic oligonucleotide
agcaugaggcagcuuaaaa

SEQ ID NO: 2274455 - RNA, 19 nt, Artificial Sequence
  Description of Artificial Sequence: Synthetic oligonucleotide
acauuaucagcacccguuu

SEQ ID NO: 2274456 - RNA, 19 nt, Artificial Sequence
  Description of Artificial Sequence: Synthetic oligonucleotide
ugucaacagccuccugcag

SEQ ID NO: 2274457 - RNA, 19 nt, Artificial Sequence
  Description of Artificial Sequence: Synthetic oligonucleotide
cacugucuuacccucagca

SEQ ID NO: 2274458 - RNA, 19 nt, Artificial Sequence
  Description of Artificial Sequence: Synthetic oligonucleotide
uggggucccaaaaggauuu

SEQ ID NO: 2274459 - RNA, 19 nt, Artificial Sequence
  Description of Artificial Sequence: Synthetic oligonucleotide
ucacauugggcugucucac

SEQ ID NO: 2274460 - RNA, 19 nt, Artificial Sequence
  Description of Artificial Sequence: Synthetic oligonucleotide
aauccggggugguuuacua

SEQ ID NO: 2274461 - RNA, 19 nt, Artificial Sequence
  Description of Artificial Sequence: Synthetic oligonucleotide
guauaguuuucaaaagcaa

SEQ ID NO: 2274462 - RNA, 19 nt, Artificial Sequence
  Description of Artificial Sequence: Synthetic oligonucleotide
guauuaaggauagcuggga

SEQ ID NO: 2274463 - RNA, 19 nt, Artificial Sequence
  Description of Artificial Sequence: Synthetic oligonucleotide
gcaugaguccauaaucggg

SEQ ID NO: 2274464 - RNA, 19 nt, Artificial Sequence
  Description of Artificial Sequence: Synthetic oligonucleotide
cgauucacuacacuggagc

SEQ ID NO: 2274465 - RNA, 19 nt, Artificial Sequence
  Description of Artificial Sequence: Synthetic oligonucleotide
aacuacucuuugaacucca

SEQ ID NO: 2274466 - RNA, 19 nt, Artificial Sequence
  Description of Artificial Sequence: Synthetic oligonucleotide
guaucagcaggguaaugaa

SEQ ID NO: 2274467 - RNA, 19 nt, Artificial Sequence
  Description of Artificial Sequence: Synthetic oligonucleotide
auucacuacacuggagcca

SEQ ID NO: 2274468 - RNA, 19 nt, Artificial Sequence
  Description of Artificial Sequence: Synthetic oligonucleotide
cuuaaucuguucacguuua

SEQ ID NO: 2274469 - RNA, 19 nt, Artificial Sequence
  Description of Artificial Sequence: Synthetic oligonucleotide
cagauauuugcugaucaga

SEQ ID NO: 2274470 - RNA, 19 nt, Artificial Sequence
  Description of Artificial Sequence: Synthetic oligonucleotide
gauagcugggagugugguc

SEQ ID NO: 2274471 - RNA, 19 nt, Artificial Sequence
  Description of Artificial Sequence: Synthetic oligonucleotide
aauaugcauuugggcaucu

SEQ ID NO: 2274472 - RNA, 19 nt, Artificial Sequence
  Description of Artificial Sequence: Synthetic oligonucleotide
aggaagcaucuaauuaguc

SEQ ID NO: 2274473 - RNA, 19 nt, Artificial Sequence
  Description of Artificial Sequence: Synthetic oligonucleotide
aggguaaugaacacaguuu

SEQ ID NO: 2274474 - RNA, 19 nt, Artificial Sequence
  Description of Artificial Sequence: Synthetic oligonucleotide
aaauccggggugguuuacu

SEQ ID NO: 2274475 - RNA, 19 nt, Artificial Sequence
  Description of Artificial Sequence: Synthetic oligonucleotide
ugcuacuaagugagacaga

SEQ ID NO: 2274476 - RNA, 19 nt, Artificial Sequence
  Description of Artificial Sequence: Synthetic oligonucleotide
ccaaauggggucccaaaag

SEQ ID NO: 2274477 - RNA, 19 nt, Artificial Sequence
  Description of Artificial Sequence: Synthetic oligonucleotide
cuuacccucagcaguggca

SEQ ID NO: 2274478 - RNA, 19 nt, Artificial Sequence
  Description of Artificial Sequence: Synthetic oligonucleotide
guucaccaaacgugguggc

SEQ ID NO: 2274479 - RNA, 19 nt, Artificial Sequence
  Description of Artificial Sequence: Synthetic oligonucleotide
ucaccaaacgugguggcua

SEQ ID NO: 2274480 - RNA, 19 nt, Artificial Sequence
  Description of Artificial Sequence: Synthetic oligonucleotide
uucuccccauuaaaguaua

SEQ ID NO: 2274481 - RNA, 19 nt, Artificial Sequence
  Description of Artificial Sequence: Synthetic oligonucleotide
accacgacaaaggaagcau

SEQ ID NO: 2274482 - RNA, 19 nt, Artificial Sequence
  Description of Artificial Sequence: Synthetic oligonucleotide
aaucggggcccucuucuua

SEQ ID NO: 2274483 - RNA, 19 nt, Artificial Sequence
  Description of Artificial Sequence: Synthetic oligonucleotide
cccaaaaggauuugaaaca

SEQ ID NO: 2274484 - RNA, 19 nt, Artificial Sequence
  Description of Artificial Sequence: Synthetic oligonucleotide
guaaaugaugcugcuacua

SEQ ID NO: 2274485 - RNA, 19 nt, Artificial Sequence
  Description of Artificial Sequence: Synthetic oligonucleotide
uacagccugaauggaggcc

SEQ ID NO: 2274486 - RNA, 19 nt, Artificial Sequence
  Description of Artificial Sequence: Synthetic oligonucleotide
uggcuaugcgguagauagc

SEQ ID NO: 2274487 - RNA, 19 nt, Artificial Sequence
  Description of Artificial Sequence: Synthetic oligonucleotide
cuuuggggagacccauagc

SEQ ID NO: 2274488 - RNA, 19 nt, Artificial Sequence
  Description of Artificial Sequence: Synthetic oligonucleotide
agauagcaguuuucagaga

SEQ ID NO: 2274489 - RNA, 19 nt, Artificial Sequence
  Description of Artificial Sequence: Synthetic oligonucleotide
auccggggugguuuacuag

SEQ ID NO: 2274490 - RNA, 19 nt, Artificial Sequence
  Description of Artificial Sequence: Synthetic oligonucleotide
caucuaauuaguccuauuu

SEQ ID NO: 2274491 - RNA, 19 nt, Artificial Sequence
  Description of Artificial Sequence: Synthetic oligonucleotide
uguucacguuuauucugaa

SEQ ID NO: 2274492 - RNA, 19 nt, Artificial Sequence
  Description of Artificial Sequence: Synthetic oligonucleotide
cagccauccgauucacuac

SEQ ID NO: 2274493 - RNA, 19 nt, Artificial Sequence
  Description of Artificial Sequence: Synthetic oligonucleotide
caaaagcaagcaccacgac

SEQ ID NO: 2274494 - RNA, 19 nt, Artificial Sequence
  Description of Artificial Sequence: Synthetic oligonucleotide
gucucacugucuuacccuc

SEQ ID NO: 2274495 - RNA, 19 nt, Artificial Sequence
  Description of Artificial Sequence: Synthetic oligonucleotide
augaguccauaaggcuucc

SEQ ID NO: 2274496 - RNA, 19 nt, Artificial Sequence
  Description of Artificial Sequence: Synthetic oligonucleotide
uaucagcacccguuuugac

SEQ ID NO: 2274497 - RNA, 19 nt, Artificial Sequence
  Description of Artificial Sequence: Synthetic oligonucleotide
guccauaaggcuuccugaa

SEQ ID NO: 2274498 - RNA, 19 nt, Artificial Sequence
  Description of Artificial Sequence: Synthetic oligonucleotide
uucaccaaacgugguggcu

SEQ ID NO: 2274499 - RNA, 19 nt, Artificial Sequence
  Description of Artificial Sequence: Synthetic oligonucleotide
uucgguuauucugcugaga

SEQ ID NO: 2274500 - RNA, 19 nt, Artificial Sequence
  Description of Artificial Sequence: Synthetic oligonucleotide
agguacaaggagaugggau

SEQ ID NO: 2274501 - RNA, 19 nt, Artificial Sequence
  Description of Artificial Sequence: Synthetic oligonucleotide
auuugcugaucagaagcau

SEQ ID NO: 2274502 - RNA, 19 nt, Artificial Sequence
  Description of Artificial Sequence: Synthetic oligonucleotide
gcauuugggcaucugaaaa

SEQ ID NO: 2274503 - RNA, 19 nt, Artificial Sequence
  Description of Artificial Sequence: Synthetic oligonucleotide
ggcaaaucuuaauguuuug

SEQ ID NO: 2274504 - RNA, 19 nt, Artificial Sequence
  Description of Artificial Sequence: Synthetic oligonucleotide
cuggacaacuccaaaucua

SEQ ID NO: 2274505 - RNA, 19 nt, Artificial Sequence
  Description of Artificial Sequence: Synthetic oligonucleotide
guuuugacaagaaauucuu

SEQ ID NO: 2274506 - RNA, 19 nt, Artificial Sequence
  Description of Artificial Sequence: Synthetic oligonucleotide
cuaugcgguagauagcagu

SEQ ID NO: 2274507 - RNA, 19 nt, Artificial Sequence
  Description of Artificial Sequence: Synthetic oligonucleotide
augcauuugggcaucugaa

SEQ ID NO: 2274508 - RNA, 19 nt, Artificial Sequence
  Description of Artificial Sequence: Synthetic oligonucleotide
ggcuaugcgguagauagca

SEQ ID NO: 2274509 - RNA, 19 nt, Artificial Sequence
  Description of Artificial Sequence: Synthetic oligonucleotide
cuggagccaaauggggucc

SEQ ID NO: 2274510 - RNA, 19 nt, Artificial Sequence
  Description of Artificial Sequence: Synthetic oligonucleotide
gggaguguggucuggacaa

SEQ ID NO: 2274511 - RNA, 19 nt, Artificial Sequence
  Description of Artificial Sequence: Synthetic oligonucleotide
uagcagguguuuacaucaa

SEQ ID NO: 2274512 - RNA, 19 nt, Artificial Sequence
  Description of Artificial Sequence: Synthetic oligonucleotide
gguuauucugcugagaauu

SEQ ID NO: 2274513 - RNA, 19 nt, Artificial Sequence
  Description of Artificial Sequence: Synthetic oligonucleotide
aggauagcugggagugugg

SEQ ID NO: 2274514 - RNA, 19 nt, Artificial Sequence
  Description of Artificial Sequence: Synthetic oligonucleotide
gaggccucuggaugcuuac

SEQ ID NO: 2274515 - RNA, 19 nt, Artificial Sequence
  Description of Artificial Sequence: Synthetic oligonucleotide
cugucuuacccucagcagu

SEQ ID NO: 2274516 - RNA, 19 nt, Artificial Sequence
  Description of Artificial Sequence: Synthetic oligonucleotide
ucagaagcaugaguccaua

SEQ ID NO: 2274517 - RNA, 19 nt, Artificial Sequence
  Description of Artificial Sequence: Synthetic oligonucleotide
agccaaauggggucccaaa

SEQ ID NO: 2274518 - RNA, 19 nt, Artificial Sequence
  Description of Artificial Sequence: Synthetic oligonucleotide
acguuuauucugaauccau

SEQ ID NO: 2274519 - RNA, 19 nt, Artificial Sequence
  Description of Artificial Sequence: Synthetic oligonucleotide
agcaucuaauuaguccuau

SEQ ID NO: 2274520 - RNA, 19 nt, Artificial Sequence
  Description of Artificial Sequence: Synthetic oligonucleotide
cacgacaaaggaagcaucu

SEQ ID NO: 2274521 - RNA, 19 nt, Artificial Sequence
  Description of Artificial Sequence: Synthetic oligonucleotide
gagaugggauuagaaaagu

SEQ ID NO: 2274522 - RNA, 19 nt, Artificial Sequence
  Description of Artificial Sequence: Synthetic oligonucleotide
cacguuuauucugaaucca

SEQ ID NO: 2274523 - RNA, 19 nt, Artificial Sequence
  Description of Artificial Sequence: Synthetic oligonucleotide
cuccaagaacuguugaagu

SEQ ID NO: 2274524 - RNA, 19 nt, Artificial Sequence
  Description of Artificial Sequence: Synthetic oligonucleotide
uuccaugauuucuccccau

SEQ ID NO: 2274525 - RNA, 19 nt, Artificial Sequence
  Description of Artificial Sequence: Synthetic oligonucleotide
uuguaucagcaggguaaug

SEQ ID NO: 2274526 - RNA, 19 nt, Artificial Sequence
  Description of Artificial Sequence: Synthetic oligonucleotide
cagguguuuacaucaaaau

SEQ ID NO: 2274527 - RNA, 19 nt, Artificial Sequence
  Description of Artificial Sequence: Synthetic oligonucleotide
gaagcaugaggcagcuuaa

SEQ ID NO: 2274528 - RNA, 19 nt, Artificial Sequence
  Description of Artificial Sequence: Synthetic oligonucleotide
gggauuagaaaagucagau

SEQ ID NO: 2274529 - RNA, 19 nt, Artificial Sequence
  Description of Artificial Sequence: Synthetic oligonucleotide
aggcagcuuaaaauacuug

SEQ ID NO: 2274530 - RNA, 19 nt, Artificial Sequence
  Description of Artificial Sequence: Synthetic oligonucleotide
cauuugggcaucugaaaau

SEQ ID NO: 2274531 - RNA, 19 nt, Artificial Sequence
  Description of Artificial Sequence: Synthetic oligonucleotide
ggauuagaaaagucagaua

SEQ ID NO: 2274532 - RNA, 19 nt, Artificial Sequence
  Description of Artificial Sequence: Synthetic oligonucleotide
ccaaacgugguggcuaugc

SEQ ID NO: 2274533 - RNA, 19 nt, Artificial Sequence
  Description of Artificial Sequence: Synthetic oligonucleotide
agcaguggcagagguacaa

SEQ ID NO: 2274534 - RNA, 19 nt, Artificial Sequence
  Description of Artificial Sequence: Synthetic oligonucleotide
caggguaaugaacacaguu

SEQ ID NO: 2274535 - RNA, 19 nt, Artificial Sequence
  Description of Artificial Sequence: Synthetic oligonucleotide
caggguuaacaaaguauua

SEQ ID NO: 2274536 - RNA, 19 nt, Artificial Sequence
  Description of Artificial Sequence: Synthetic oligonucleotide
guacaaggagaugggauua

SEQ ID NO: 2274537 - RNA, 19 nt, Artificial Sequence
  Description of Artificial Sequence: Synthetic oligonucleotide
auaugcauuugggcaucug

SEQ ID NO: 2274538 - RNA, 19 nt, Artificial Sequence
  Description of Artificial Sequence: Synthetic oligonucleotide
gguacaaggagaugggauu

SEQ ID NO: 2274539 - RNA, 19 nt, Artificial Sequence
  Description of Artificial Sequence: Synthetic oligonucleotide
gucuuacccucagcagugg

SEQ ID NO: 2274540 - RNA, 19 nt, Artificial Sequence
  Description of Artificial Sequence: Synthetic oligonucleotide
aucagaagcaugaguccau

SEQ ID NO: 2274541 - RNA, 19 nt, Artificial Sequence
  Description of Artificial Sequence: Synthetic oligonucleotide
gggcccucuucuuauuagc

SEQ ID NO: 2274542 - RNA, 19 nt, Artificial Sequence
  Description of Artificial Sequence: Synthetic oligonucleotide
gguuuacuagaagcaugag

SEQ ID NO: 2274543 - RNA, 19 nt, Artificial Sequence
  Description of Artificial Sequence: Synthetic oligonucleotide
ggcugucucacugucuuac

SEQ ID NO: 2274544 - RNA, 19 nt, Artificial Sequence
  Description of Artificial Sequence: Synthetic oligonucleotide
gggugguuuacuagaagca

SEQ ID NO: 2274545 - RNA, 19 nt, Artificial Sequence
  Description of Artificial Sequence: Synthetic oligonucleotide
agcacccguuuugacaaga

SEQ ID NO: 2274546 - RNA, 19 nt, Artificial Sequence
  Description of Artificial Sequence: Synthetic oligonucleotide
uaaucggggcccucuucuu

SEQ ID NO: 2274547 - RNA, 19 nt, Artificial Sequence
  Description of Artificial Sequence: Synthetic oligonucleotide
auggggucccaaaaggauu

SEQ ID NO: 2274548 - RNA, 19 nt, Artificial Sequence
  Description of Artificial Sequence: Synthetic oligonucleotide
gaaauccggggugguuuac

SEQ ID NO: 2274549 - RNA, 19 nt, Artificial Sequence
  Description of Artificial Sequence: Synthetic oligonucleotide
auuauaccacacacacaaa

SEQ ID NO: 2274550 - RNA, 19 nt, Artificial Sequence
  Description of Artificial Sequence: Synthetic oligonucleotide
agacccauagcagguguuu

SEQ ID NO: 2274551 - RNA, 19 nt, Artificial Sequence
  Description of Artificial Sequence: Synthetic oligonucleotide
uggagccaaaugggguccc

SEQ ID NO: 2274552 - RNA, 19 nt, Artificial Sequence
  Description of Artificial Sequence: Synthetic oligonucleotide
ccguuuugacaagaaauuc

SEQ ID NO: 2274553 - RNA, 19 nt, Artificial Sequence
  Description of Artificial Sequence: Synthetic oligonucleotide
gaggcccugaaggcaaauc

SEQ ID NO: 2274554 - RNA, 19 nt, Artificial Sequence
  Description of Artificial Sequence: Synthetic oligonucleotide
acgacaaaggaagcaucua

SEQ ID NO: 2274555 - RNA, 19 nt, Artificial Sequence
  Description of Artificial Sequence: Synthetic oligonucleotide
gcugaucagaagcaugagu

SEQ ID NO: 2274556 - RNA, 19 nt, Artificial Sequence
  Description of Artificial Sequence: Synthetic oligonucleotide
gccaaauggggucccaaaa

SEQ ID NO: 2274557 - RNA, 19 nt, Artificial Sequence
  Description of Artificial Sequence: Synthetic oligonucleotide
uuccagccauccgauucac

SEQ ID NO: 2274558 - RNA, 19 nt, Artificial Sequence
  Description of Artificial Sequence: Synthetic oligonucleotide
uccugaaauccgggguggu

SEQ ID NO: 2274559 - RNA, 19 nt, Artificial Sequence
  Description of Artificial Sequence: Synthetic oligonucleotide
ugaguccauaaggcuuccu

SEQ ID NO: 2274560 - RNA, 19 nt, Artificial Sequence
  Description of Artificial Sequence: Synthetic oligonucleotide
aguccauaaucggggcccu

SEQ ID NO: 2274561 - RNA, 19 nt, Artificial Sequence
  Description of Artificial Sequence: Synthetic oligonucleotide
caccacgacaaaggaagca

SEQ ID NO: 2274562 - RNA, 19 nt, Artificial Sequence
  Description of Artificial Sequence: Synthetic oligonucleotide
cguuuugacaagaaauucu

SEQ ID NO: 2274563 - RNA, 19 nt, Artificial Sequence
  Description of Artificial Sequence: Synthetic oligonucleotide
ggucuggacaacuccaaau

SEQ ID NO: 2274564 - RNA, 19 nt, Artificial Sequence
  Description of Artificial Sequence: Synthetic oligonucleotide
caagaacuguugaagucuu

SEQ ID NO: 2274565 - RNA, 19 nt, Artificial Sequence
  Description of Artificial Sequence: Synthetic oligonucleotide
ccacgacaaaggaagcauc

SEQ ID NO: 2274566 - RNA, 19 nt, Artificial Sequence
  Description of Artificial Sequence: Synthetic oligonucleotide
guucacguuuauucugaau

SEQ ID NO: 2274567 - RNA, 19 nt, Artificial Sequence
  Description of Artificial Sequence: Synthetic oligonucleotide
acuacucuuugaacuccaa

SEQ ID NO: 2274568 - RNA, 19 nt, Artificial Sequence
  Description of Artificial Sequence: Synthetic oligonucleotide
gcaggguuaacaaaguauu

SEQ ID NO: 2274569 - RNA, 19 nt, Artificial Sequence
  Description of Artificial Sequence: Synthetic oligonucleotide
cacccguuuugacaagaaa

SEQ ID NO: 2274570 - RNA, 19 nt, Artificial Sequence
  Description of Artificial Sequence: Synthetic oligonucleotide
ccgauucacuacacuggag

SEQ ID NO: 2274571 - RNA, 19 nt, Artificial Sequence
  Description of Artificial Sequence: Synthetic oligonucleotide
gacccauagcagguguuua

SEQ ID NO: 2274572 - RNA, 19 nt, Artificial Sequence
  Description of Artificial Sequence: Synthetic oligonucleotide
cugcaggguuaacaaagua

SEQ ID NO: 2274573 - RNA, 19 nt, Artificial Sequence
  Description of Artificial Sequence: Synthetic oligonucleotide
caguuuucagagaggcccu

SEQ ID NO: 2274574 - RNA, 19 nt, Artificial Sequence
  Description of Artificial Sequence: Synthetic oligonucleotide
gaguguggucuggacaacu

SEQ ID NO: 2274575 - RNA, 19 nt, Artificial Sequence
  Description of Artificial Sequence: Synthetic oligonucleotide
ggaugaguccauaaggcuu

SEQ ID NO: 2274576 - RNA, 19 nt, Artificial Sequence
  Description of Artificial Sequence: Synthetic oligonucleotide
augcgguagauagcaguuu

SEQ ID NO: 2274577 - RNA, 19 nt, Artificial Sequence
  Description of Artificial Sequence: Synthetic oligonucleotide
gcaguggcagagguacaag

SEQ ID NO: 2274578 - RNA, 19 nt, Artificial Sequence
  Description of Artificial Sequence: Synthetic oligonucleotide
gcugagaauuucuuuccau

SEQ ID NO: 2274579 - RNA, 19 nt, Artificial Sequence
  Description of Artificial Sequence: Synthetic oligonucleotide
ccuauuucuucugauccaa

SEQ ID NO: 2274580 - RNA, 19 nt, Artificial Sequence
  Description of Artificial Sequence: Synthetic oligonucleotide
cugauccaagaaugcugaa

SEQ ID NO: 2274581 - RNA, 19 nt, Artificial Sequence
  Description of Artificial Sequence: Synthetic oligonucleotide
cagcacccguuuugacaag

SEQ ID NO: 2274582 - RNA, 19 nt, Artificial Sequence
  Description of Artificial Sequence: Synthetic oligonucleotide
cucagcaguggcagaggua

SEQ ID NO: 2274583 - RNA, 19 nt, Artificial Sequence
  Description of Artificial Sequence: Synthetic oligonucleotide
gcuaugcgguagauagcag

SEQ ID NO: 2274584 - RNA, 19 nt, Artificial Sequence
  Description of Artificial Sequence: Synthetic oligonucleotide
ggccucuggaugcuuacua

SEQ ID NO: 2274585 - RNA, 19 nt, Artificial Sequence
  Description of Artificial Sequence: Synthetic oligonucleotide
cgacaaaggaagcaucuaa

SEQ ID NO: 2274586 - RNA, 19 nt, Artificial Sequence
  Description of Artificial Sequence: Synthetic oligonucleotide
gccucuggaugcuuacuaa

SEQ ID NO: 2274587 - RNA, 19 nt, Artificial Sequence
  Description of Artificial Sequence: Synthetic oligonucleotide
agccugaauggaggccucu

SEQ ID NO: 2274588 - RNA, 19 nt, Artificial Sequence
  Description of Artificial Sequence: Synthetic oligonucleotide
accaaacgugguggcuaug

SEQ ID NO: 2274589 - RNA, 19 nt, Artificial Sequence
  Description of Artificial Sequence: Synthetic oligonucleotide
gacuuuggggagacccaua

SEQ ID NO: 2274590 - RNA, 19 nt, Artificial Sequence
  Description of Artificial Sequence: Synthetic oligonucleotide
ccaugauuucuccccauua

SEQ ID NO: 2274591 - RNA, 19 nt, Artificial Sequence
  Description of Artificial Sequence: Synthetic oligonucleotide
cauuaucagcacccguuuu

SEQ ID NO: 2274592 - RNA, 19 nt, Artificial Sequence
  Description of Artificial Sequence: Synthetic oligonucleotide
ugguggcuaugcgguagau

SEQ ID NO: 2274593 - RNA, 19 nt, Artificial Sequence
  Description of Artificial Sequence: Synthetic oligonucleotide
cccguuuugacaagaaauu

SEQ ID NO: 2274594 - RNA, 19 nt, Artificial Sequence
  Description of Artificial Sequence: Synthetic oligonucleotide
gcaccacgacaaaggaagc

SEQ ID NO: 2274595 - RNA, 19 nt, Artificial Sequence
  Description of Artificial Sequence: Synthetic oligonucleotide
ccaaaaggauuugaaacau

SEQ ID NO: 2274596 - RNA, 19 nt, Artificial Sequence
  Description of Artificial Sequence: Synthetic oligonucleotide
ggcagagguacaaggagau

SEQ ID NO: 2274597 - RNA, 19 nt, Artificial Sequence
  Description of Artificial Sequence: Synthetic oligonucleotide
gggucccaaaaggauuuga

SEQ ID NO: 2274598 - RNA, 19 nt, Artificial Sequence
  Description of Artificial Sequence: Synthetic oligonucleotide
cccugaaggcaaaucuuaa

SEQ ID NO: 2274599 - RNA, 19 nt, Artificial Sequence
  Description of Artificial Sequence: Synthetic oligonucleotide
cccauagcagguguuuaca

SEQ ID NO: 2274600 - RNA, 19 nt, Artificial Sequence
  Description of Artificial Sequence: Synthetic oligonucleotide
ggaguguggucuggacaac

SEQ ID NO: 2274601 - RNA, 19 nt, Artificial Sequence
  Description of Artificial Sequence: Synthetic oligonucleotide
ggauagcugggaguguggu

SEQ ID NO: 2274602 - RNA, 19 nt, Artificial Sequence
  Description of Artificial Sequence: Synthetic oligonucleotide
caccaaacgugguggcuau

SEQ ID NO: 2274603 - RNA, 19 nt, Artificial Sequence
  Description of Artificial Sequence: Synthetic oligonucleotide
cacuacacuggagccaaau

SEQ ID NO: 2274604 - RNA, 19 nt, Artificial Sequence
  Description of Artificial Sequence: Synthetic oligonucleotide
ccugaaggcaaaucuuaau

SEQ ID NO: 2274605 - RNA, 19 nt, Artificial Sequence
  Description of Artificial Sequence: Synthetic oligonucleotide
ggggucccaaaaggauuug

SEQ ID NO: 2274606 - RNA, 19 nt, Artificial Sequence
  Description of Artificial Sequence: Synthetic oligonucleotide
gguggcuaugcgguagaua

SEQ ID NO: 2274607 - RNA, 19 nt, Artificial Sequence
  Description of Artificial Sequence: Synthetic oligonucleotide
gccauccgauucacuacac

SEQ ID NO: 2274608 - RNA, 19 nt, Artificial Sequence
  Description of Artificial Sequence: Synthetic oligonucleotide
ggggagacccauagcaggu

SEQ ID NO: 2274609 - RNA, 19 nt, Artificial Sequence
  Description of Artificial Sequence: Synthetic oligonucleotide
gcaucuaauuaguccuauu

SEQ ID NO: 2274610 - RNA, 19 nt, Artificial Sequence
  Description of Artificial Sequence: Synthetic oligonucleotide
guccauaaucggggcccuc

SEQ ID NO: 2274611 - RNA, 19 nt, Artificial Sequence
  Description of Artificial Sequence: Synthetic oligonucleotide
ccauagcagguguuuacau

SEQ ID NO: 2274612 - RNA, 19 nt, Artificial Sequence
  Description of Artificial Sequence: Synthetic oligonucleotide
ggagccaaaugggguccca

SEQ ID NO: 2274613 - RNA, 19 nt, Artificial Sequence
  Description of Artificial Sequence: Synthetic oligonucleotide
ggacuuuggggagacccau

SEQ ID NO: 2274614 - RNA, 19 nt, Artificial Sequence
  Description of Artificial Sequence: Synthetic oligonucleotide
gcacccguuuugacaagaa

SEQ ID NO: 2274615 - RNA, 19 nt, Artificial Sequence
  Description of Artificial Sequence: Synthetic oligonucleotide
ccauccgauucacuacacu

SEQ ID NO: 2274616 - RNA, 19 nt, Artificial Sequence
  Description of Artificial Sequence: Synthetic oligonucleotide
gggcugucucacugucuua

SEQ ID NO: 2274617 - RNA, 19 nt, Artificial Sequence
  Description of Artificial Sequence: Synthetic oligonucleotide
ccauaaucggggcccucuu

SEQ ID NO: 2274618 - RNA, 19 nt, Artificial Sequence
  Description of Artificial Sequence: Synthetic oligonucleotide
cggggcccucuucuuauua

SEQ ID NO: 2274619 - RNA, 19 nt, Artificial Sequence
  Description of Artificial Sequence: Synthetic oligonucleotide
aauagaacaggacucauac

SEQ ID NO: 2274620 - RNA, 19 nt, Artificial Sequence
  Description of Artificial Sequence: Synthetic oligonucleotide
aauacaucuauucuguugg

SEQ ID NO: 2274621 - RNA, 19 nt, Artificial Sequence
  Description of Artificial Sequence: Synthetic oligonucleotide
aauaaaggggauuaacccc

SEQ ID NO: 2274622 - RNA, 19 nt, Artificial Sequence
  Description of Artificial Sequence: Synthetic oligonucleotide
aaccucaaggcuuugaacc

SEQ ID NO: 2274623 - RNA, 19 nt, Artificial Sequence
  Description of Artificial Sequence: Synthetic oligonucleotide
uuuguuaugaccauaguga

SEQ ID NO: 2274624 - RNA, 19 nt, Artificial Sequence
  Description of Artificial Sequence: Synthetic oligonucleotide
ugaguaaaagcuaguaugg

SEQ ID NO: 2274625 - RNA, 19 nt, Artificial Sequence
  Description of Artificial Sequence: Synthetic oligonucleotide
gaugaagugaagcauauug

SEQ ID NO: 2274626 - RNA, 19 nt, Artificial Sequence
  Description of Artificial Sequence: Synthetic oligonucleotide
aagcuaggaaaccagcucc

SEQ ID NO: 2274627 - RNA, 19 nt, Artificial Sequence
  Description of Artificial Sequence: Synthetic oligonucleotide
ugucuuuuaaaguugcacg

SEQ ID NO: 2274628 - RNA, 19 nt, Artificial Sequence
  Description of Artificial Sequence: Synthetic oligonucleotide
acuuuuaaguauuaaagug

SEQ ID NO: 2274629 - RNA, 19 nt, Artificial Sequence
  Description of Artificial Sequence: Synthetic oligonucleotide
uggauaaacacuuuuaagu

SEQ ID NO: 2274630 - RNA, 19 nt, Artificial Sequence
  Description of Artificial Sequence: Synthetic oligonucleotide
uaagacuuuguuaugacca

SEQ ID NO: 2274631 - RNA, 19 nt, Artificial Sequence
  Description of Artificial Sequence: Synthetic oligonucleotide
agaaaauacaucuauucug

SEQ ID NO: 2274632 - RNA, 19 nt, Artificial Sequence
  Description of Artificial Sequence: Synthetic oligonucleotide
aagugaagcauauuggucu

SEQ ID NO: 2274633 - RNA, 19 nt, Artificial Sequence
  Description of Artificial Sequence: Synthetic oligonucleotide
uugacuaaaaucucuuggg

SEQ ID NO: 2274634 - RNA, 19 nt, Artificial Sequence
  Description of Artificial Sequence: Synthetic oligonucleotide
augaaaauagaacaggacu

SEQ ID NO: 2274635 - RNA, 19 nt, Artificial Sequence
  Description of Artificial Sequence: Synthetic oligonucleotide
uuauauuucuacuugacua

SEQ ID NO: 2274636 - RNA, 19 nt, Artificial Sequence
  Description of Artificial Sequence: Synthetic oligonucleotide
aguaaaagcuaguaugggg

SEQ ID NO: 2274637 - RNA, 19 nt, Artificial Sequence
  Description of Artificial Sequence: Synthetic oligonucleotide
aggaguuuuauauuucuac

SEQ ID NO: 2274638 - RNA, 19 nt, Artificial Sequence
  Description of Artificial Sequence: Synthetic oligonucleotide
uuauauauaaugcuggcuu

SEQ ID NO: 2274639 - RNA, 19 nt, Artificial Sequence
  Description of Artificial Sequence: Synthetic oligonucleotide
guacuuacuaaccucaagg

SEQ ID NO: 2274640 - RNA, 19 nt, Artificial Sequence
  Description of Artificial Sequence: Synthetic oligonucleotide
aaagcuaggaaaccagcuc

SEQ ID NO: 2274641 - RNA, 19 nt, Artificial Sequence
  Description of Artificial Sequence: Synthetic oligonucleotide
ugaaaauagaacaggacuc

SEQ ID NO: 2274642 - RNA, 19 nt, Artificial Sequence
  Description of Artificial Sequence: Synthetic oligonucleotide
aaauuucauuauguaaugc

SEQ ID NO: 2274643 - RNA, 19 nt, Artificial Sequence
  Description of Artificial Sequence: Synthetic oligonucleotide
uuguauauucuucauacac

SEQ ID NO: 2274644 - RNA, 19 nt, Artificial Sequence
  Description of Artificial Sequence: Synthetic oligonucleotide
uuaaguauuaaagugacua

SEQ ID NO: 2274645 - RNA, 19 nt, Artificial Sequence
  Description of Artificial Sequence: Synthetic oligonucleotide
uaaaguugcacggugaugc

SEQ ID NO: 2274646 - RNA, 19 nt, Artificial Sequence
  Description of Artificial Sequence: Synthetic oligonucleotide
uaaagugacuacaaaugag

SEQ ID NO: 2274647 - RNA, 19 nt, Artificial Sequence
  Description of Artificial Sequence: Synthetic oligonucleotide
caauaaaggggauuaaccc

SEQ ID NO: 2274648 - RNA, 19 nt, Artificial Sequence
  Description of Artificial Sequence: Synthetic oligonucleotide
ucagaaaagaggaugcuac

SEQ ID NO: 2274649 - RNA, 19 nt, Artificial Sequence
  Description of Artificial Sequence: Synthetic oligonucleotide
cuugacuaaaaucucuugg

SEQ ID NO: 2274650 - RNA, 19 nt, Artificial Sequence
  Description of Artificial Sequence: Synthetic oligonucleotide
agcauauuggucucuauuc

SEQ ID NO: 2274651 - RNA, 19 nt, Artificial Sequence
  Description of Artificial Sequence: Synthetic oligonucleotide
aacccauuauuacugugac

SEQ ID NO: 2274652 - RNA, 19 nt, Artificial Sequence
  Description of Artificial Sequence: Synthetic oligonucleotide
uguauauucuucauacaca

SEQ ID NO: 2274653 - RNA, 19 nt, Artificial Sequence
  Description of Artificial Sequence: Synthetic oligonucleotide
acuacuuucuggcagagca

SEQ ID NO: 2274654 - RNA, 19 nt, Artificial Sequence
  Description of Artificial Sequence: Synthetic oligonucleotide
uguaaugcuaucccuaaac

SEQ ID NO: 2274655 - RNA, 19 nt, Artificial Sequence
  Description of Artificial Sequence: Synthetic oligonucleotide
cuugaaaugaugugggaag

SEQ ID NO: 2274656 - RNA, 19 nt, Artificial Sequence
  Description of Artificial Sequence: Synthetic oligonucleotide
aagugauggugcuuggugg

SEQ ID NO: 2274657 - RNA, 19 nt, Artificial Sequence
  Description of Artificial Sequence: Synthetic oligonucleotide
ugguggagcaauaaagggg

SEQ ID NO: 2274658 - RNA, 19 nt, Artificial Sequence
  Description of Artificial Sequence: Synthetic oligonucleotide
guuaugaccauagugagug

SEQ ID NO: 2274659 - RNA, 19 nt, Artificial Sequence
  Description of Artificial Sequence: Synthetic oligonucleotide
  modified_base (8)..(8): a, c, u, g, unknown or other
uucuuaanacaaaacaaaa

SEQ ID NO: 2274660 - RNA, 19 nt, Artificial Sequence
  Description of Artificial Sequence: Synthetic oligonucleotide
cuauucagagucuuguucc

SEQ ID NO: 2274661 - RNA, 19 nt, Artificial Sequence
  Description of Artificial Sequence: Synthetic oligonucleotide
ucugcuaugagaucuggug

SEQ ID NO: 2274662 - RNA, 19 nt, Artificial Sequence
  Description of Artificial Sequence: Synthetic oligonucleotide
aagccacuaaaguacuuac

SEQ ID NO: 2274663 - RNA, 19 nt, Artificial Sequence
  Description of Artificial Sequence: Synthetic oligonucleotide
ugagucuuucagaaaagag

SEQ ID NO: 2274664 - RNA, 19 nt, Artificial Sequence
  Description of Artificial Sequence: Synthetic oligonucleotide
gucuuuuaaaguugcacgg

SEQ ID NO: 2274665 - RNA, 19 nt, Artificial Sequence
  Description of Artificial Sequence: Synthetic oligonucleotide
uuggucucuauucagaguc

SEQ ID NO: 2274666 - RNA, 19 nt, Artificial Sequence
  Description of Artificial Sequence: Synthetic oligonucleotide
uaaugcuaucccuaaaccc

SEQ ID NO: 2274667 - RNA, 19 nt, Artificial Sequence
  Description of Artificial Sequence: Synthetic oligonucleotide
aaugcuaucccuaaaccca

SEQ ID NO: 2274668 - RNA, 19 nt, Artificial Sequence
  Description of Artificial Sequence: Synthetic oligonucleotide
acacuuuuaaguauuaaag

SEQ ID NO: 2274669 - RNA, 19 nt, Artificial Sequence
  Description of Artificial Sequence: Synthetic oligonucleotide
auuauuacugugacuaugg

SEQ ID NO: 2274670 - RNA, 19 nt, Artificial Sequence
  Description of Artificial Sequence: Synthetic oligonucleotide
agcaaaaccccaucugacc

SEQ ID NO: 2274671 - RNA, 19 nt, Artificial Sequence
  Description of Artificial Sequence: Synthetic oligonucleotide
cuuuuaaguauuaaaguga

SEQ ID NO: 2274672 - RNA, 19 nt, Artificial Sequence
  Description of Artificial Sequence: Synthetic oligonucleotide
aaaagaggaugcuaccaug

SEQ ID NO: 2274673 - RNA, 19 nt, Artificial Sequence
  Description of Artificial Sequence: Synthetic oligonucleotide
guauauucuucauacacac

SEQ ID NO: 2274674 - RNA, 19 nt, Artificial Sequence
  Description of Artificial Sequence: Synthetic oligonucleotide
cauuauguaaugcuauccc

SEQ ID NO: 2274675 - RNA, 19 nt, Artificial Sequence
  Description of Artificial Sequence: Synthetic oligonucleotide
uaccaugaaaauagaacag

SEQ ID NO: 2274676 - RNA, 19 nt, Artificial Sequence
  Description of Artificial Sequence: Synthetic oligonucleotide
cuaaauuaauguagucugg

SEQ ID NO: 2274677 - RNA, 19 nt, Artificial Sequence
  Description of Artificial Sequence: Synthetic oligonucleotide
augucuuggaagaaaauac

SEQ ID NO: 2274678 - RNA, 19 nt, Artificial Sequence
  Description of Artificial Sequence: Synthetic oligonucleotide
gcuaaauuaauguagucug

SEQ ID NO: 2274679 - RNA, 19 nt, Artificial Sequence
  Description of Artificial Sequence: Synthetic oligonucleotide
cuaccaugaaaauagaaca

SEQ ID NO: 2274680 - RNA, 19 nt, Artificial Sequence
  Description of Artificial Sequence: Synthetic oligonucleotide
ugacuaaaaucucuugggc

SEQ ID NO: 2274681 - RNA, 19 nt, Artificial Sequence
  Description of Artificial Sequence: Synthetic oligonucleotide
ugugacuauggcuucagug

SEQ ID NO: 2274682 - RNA, 19 nt, Artificial Sequence
  Description of Artificial Sequence: Synthetic oligonucleotide
aaguauuaaagugacuaca

SEQ ID NO: 2274683 - RNA, 19 nt, Artificial Sequence
  Description of Artificial Sequence: Synthetic oligonucleotide
uuguuaugaccauagugag

SEQ ID NO: 2274684 - RNA, 19 nt, Artificial Sequence
  Description of Artificial Sequence: Synthetic oligonucleotide
agaaggguacuucagcauc

SEQ ID NO: 2274685 - RNA, 19 nt, Artificial Sequence
  Description of Artificial Sequence: Synthetic oligonucleotide
augguagcauuguauauuc

SEQ ID NO: 2274686 - RNA, 19 nt, Artificial Sequence
  Description of Artificial Sequence: Synthetic oligonucleotide
uaagugauggugcuuggug

SEQ ID NO: 2274687 - RNA, 19 nt, Artificial Sequence
  Description of Artificial Sequence: Synthetic oligonucleotide
  modified_base (12)..(12): a, c, u, g, unknown or other
uguguucuuaanacaaaac

SEQ ID NO: 2274688 - RNA, 19 nt, Artificial Sequence
  Description of Artificial Sequence: Synthetic oligonucleotide
uauuggucucuauucagag

SEQ ID NO: 2274689 - RNA, 19 nt, Artificial Sequence
  Description of Artificial Sequence: Synthetic oligonucleotide
uuucauuauguaaugcuau

SEQ ID NO: 2274690 - RNA, 19 nt, Artificial Sequence
  Description of Artificial Sequence: Synthetic oligonucleotide
agugauggugcuugguggc

SEQ ID NO: 2274691 - RNA, 19 nt, Artificial Sequence
  Description of Artificial Sequence: Synthetic oligonucleotide
uacuuacuaaccucaaggc

SEQ ID NO: 2274692 - RNA, 19 nt, Artificial Sequence
  Description of Artificial Sequence: Synthetic oligonucleotide
  modified_base (11)..(11): a, c, u, g, unknown or other
guguucuuaanacaaaaca

SEQ ID NO: 2274693 - RNA, 19 nt, Artificial Sequence
  Description of Artificial Sequence: Synthetic oligonucleotide
cacuaaaguacuuacuaac

SEQ ID NO: 2274694 - RNA, 19 nt, Artificial Sequence
  Description of Artificial Sequence: Synthetic oligonucleotide
uaaaguacuuacuaaccuc

SEQ ID NO: 2274695 - RNA, 19 nt, Artificial Sequence
  Description of Artificial Sequence: Synthetic oligonucleotide
aaaguacuuacuaaccuca

SEQ ID NO: 2274696 - RNA, 19 nt, Artificial Sequence
  Description of Artificial Sequence: Synthetic oligonucleotide
aaccaguugggauaaugug

SEQ ID NO: 2274697 - RNA, 19 nt, Artificial Sequence
  Description of Artificial Sequence: Synthetic oligonucleotide
ugucuuggaagaaaauaca

SEQ ID NO: 2274698 - RNA, 19 nt, Artificial Sequence
  Description of Artificial Sequence: Synthetic oligonucleotide
gaaagguucugcugaacag

SEQ ID NO: 2274699 - RNA, 19 nt, Artificial Sequence
  Description of Artificial Sequence: Synthetic oligonucleotide
aagcuuauauauaaugcug

SEQ ID NO: 2274700 - RNA, 19 nt, Artificial Sequence
  Description of Artificial Sequence: Synthetic oligonucleotide
auuauguaaugcuaucccu

SEQ ID NO: 2274701 - RNA, 19 nt, Artificial Sequence
  Description of Artificial Sequence: Synthetic oligonucleotide
ucauuauguaaugcuaucc

SEQ ID NO: 2274702 - RNA, 19 nt, Artificial Sequence
  Description of Artificial Sequence: Synthetic oligonucleotide
uauauaaugcuggcuuugg

SEQ ID NO: 2274703 - RNA, 19 nt, Artificial Sequence
  Description of Artificial Sequence: Synthetic oligonucleotide
augucuuuuaaaguugcac

SEQ ID NO: 2274704 - RNA, 19 nt, Artificial Sequence
  Description of Artificial Sequence: Synthetic oligonucleotide
gaagccaacuuccuuggag

SEQ ID NO: 2274705 - RNA, 19 nt, Artificial Sequence
  Description of Artificial Sequence: Synthetic oligonucleotide
agcuuauauauaaugcugg

SEQ ID NO: 2274706 - RNA, 19 nt, Artificial Sequence
  Description of Artificial Sequence: Synthetic oligonucleotide
aaagcuaguauggggaugu

SEQ ID NO: 2274707 - RNA, 19 nt, Artificial Sequence
  Description of Artificial Sequence: Synthetic oligonucleotide
caugaaaauagaacaggac

SEQ ID NO: 2274708 - RNA, 19 nt, Artificial Sequence
  Description of Artificial Sequence: Synthetic oligonucleotide
auagaaggguacuucagca

SEQ ID NO: 2274709 - RNA, 19 nt, Artificial Sequence
  Description of Artificial Sequence: Synthetic oligonucleotide
gugacuacaaaugagaaaa

SEQ ID NO: 2274710 - RNA, 19 nt, Artificial Sequence
  Description of Artificial Sequence: Synthetic oligonucleotide
acaggacucauacugcuag

SEQ ID NO: 2274711 - RNA, 19 nt, Artificial Sequence
  Description of Artificial Sequence: Synthetic oligonucleotide
acuauagaaggguacuuca

SEQ ID NO: 2274712 - RNA, 19 nt, Artificial Sequence
  Description of Artificial Sequence: Synthetic oligonucleotide
aaugaugugggaagccaac

SEQ ID NO: 2274713 - RNA, 19 nt, Artificial Sequence
  Description of Artificial Sequence: Synthetic oligonucleotide
uuauguaaugcuaucccua

SEQ ID NO: 2274714 - RNA, 19 nt, Artificial Sequence
  Description of Artificial Sequence: Synthetic oligonucleotide
cauacugcuagcuaaauua

SEQ ID NO: 2274715 - RNA, 19 nt, Artificial Sequence
  Description of Artificial Sequence: Synthetic oligonucleotide
uaaauuaauguagucuggu

SEQ ID NO: 2274716 - RNA, 19 nt, Artificial Sequence
  Description of Artificial Sequence: Synthetic oligonucleotide
uaucagguagguaagugau

SEQ ID NO: 2274717 - RNA, 19 nt, Artificial Sequence
  Description of Artificial Sequence: Synthetic oligonucleotide
cuggauaaacacuuuuaag

SEQ ID NO: 2274718 - RNA, 19 nt, Artificial Sequence
  Description of Artificial Sequence: Synthetic oligonucleotide
aaaggggaaagguucugcu

SEQ ID NO: 2274719 - RNA, 19 nt, Artificial Sequence
  Description of Artificial Sequence: Synthetic oligonucleotide
ugcuaugagaucuggugcc

SEQ ID NO: 2274720 - RNA, 19 nt, Artificial Sequence
  Description of Artificial Sequence: Synthetic oligonucleotide
agcuccauaagccaucuga

SEQ ID NO: 2274721 - RNA, 19 nt, Artificial Sequence
  Description of Artificial Sequence: Synthetic oligonucleotide
uuuaaaguugcacggugau

SEQ ID NO: 2274722 - RNA, 19 nt, Artificial Sequence
  Description of Artificial Sequence: Synthetic oligonucleotide
agacaaaggggaaagguuc

SEQ ID NO: 2274723 - RNA, 19 nt, Artificial Sequence
  Description of Artificial Sequence: Synthetic oligonucleotide
aagccaacuuccuuggaga

SEQ ID NO: 2274724 - RNA, 19 nt, Artificial Sequence
  Description of Artificial Sequence: Synthetic oligonucleotide
aguauggggauguaagacu

SEQ ID NO: 2274725 - RNA, 19 nt, Artificial Sequence
  Description of Artificial Sequence: Synthetic oligonucleotide
guaaugcuaucccuaaacc

SEQ ID NO: 2274726 - RNA, 19 nt, Artificial Sequence
  Description of Artificial Sequence: Synthetic oligonucleotide
gacuuuguuaugaccauag

SEQ ID NO: 2274727 - RNA, 19 nt, Artificial Sequence
  Description of Artificial Sequence: Synthetic oligonucleotide
aaauuaauguagucugguu

SEQ ID NO: 2274728 - RNA, 19 nt, Artificial Sequence
  Description of Artificial Sequence: Synthetic oligonucleotide
cauauuggucucuauucag

SEQ ID NO: 2274729 - RNA, 19 nt, Artificial Sequence
  Description of Artificial Sequence: Synthetic oligonucleotide
aaaggggauuaaccccacc

SEQ ID NO: 2274730 - RNA, 19 nt, Artificial Sequence
  Description of Artificial Sequence: Synthetic oligonucleotide
agugguggagcaauaaagg

SEQ ID NO: 2274731 - RNA, 19 nt, Artificial Sequence
  Description of Artificial Sequence: Synthetic oligonucleotide
guugggauaauguggcaag

SEQ ID NO: 2274732 - RNA, 19 nt, Artificial Sequence
  Description of Artificial Sequence: Synthetic oligonucleotide
acuuacuaaccucaaggcu

SEQ ID NO: 2274733 - RNA, 19 nt, Artificial Sequence
  Description of Artificial Sequence: Synthetic oligonucleotide
cuuuuaaaguugcacggug

SEQ ID NO: 2274734 - RNA, 19 nt, Artificial Sequence
  Description of Artificial Sequence: Synthetic oligonucleotide
uagcauuguauauucuuca

SEQ ID NO: 2274735 - RNA, 19 nt, Artificial Sequence
  Description of Artificial Sequence: Synthetic oligonucleotide
ucccaagaaagcuaggaaa

SEQ ID NO: 2274736 - RNA, 19 nt, Artificial Sequence
  Description of Artificial Sequence: Synthetic oligonucleotide
gugguggagcaauaaaggg

SEQ ID NO: 2274737 - RNA, 19 nt, Artificial Sequence
  Description of Artificial Sequence: Synthetic oligonucleotide
augaagugaagcauauugg

SEQ ID NO: 2274738 - RNA, 19 nt, Artificial Sequence
  Description of Artificial Sequence: Synthetic oligonucleotide
aguacuuacuaaccucaag

SEQ ID NO: 2274739 - RNA, 19 nt, Artificial Sequence
  Description of Artificial Sequence: Synthetic oligonucleotide
  modified_base (15)..(15): a, c, u, g, unknown or other
ugguguguucuuaanacaa

SEQ ID NO: 2274740 - RNA, 19 nt, Artificial Sequence
  Description of Artificial Sequence: Synthetic oligonucleotide
ugcugaacagaugucuugg

SEQ ID NO: 2274741 - RNA, 19 nt, Artificial Sequence
  Description of Artificial Sequence: Synthetic oligonucleotide
gagugguggagcaauaaag

SEQ ID NO: 2274742 - RNA, 19 nt, Artificial Sequence
  Description of Artificial Sequence: Synthetic oligonucleotide
guaagacuuuguuaugacc

SEQ ID NO: 2274743 - RNA, 19 nt, Artificial Sequence
  Description of Artificial Sequence: Synthetic oligonucleotide
uuauuacugugacuauggc

SEQ ID NO: 2274744 - RNA, 19 nt, Artificial Sequence
  Description of Artificial Sequence: Synthetic oligonucleotide
uauguaaugcuaucccuaa

SEQ ID NO: 2274745 - RNA, 19 nt, Artificial Sequence
  Description of Artificial Sequence: Synthetic oligonucleotide
uuuaaguauuaaagugacu

SEQ ID NO: 2274746 - RNA, 19 nt, Artificial Sequence
  Description of Artificial Sequence: Synthetic oligonucleotide
agaaagcuaggaaaccagc

SEQ ID NO: 2274747 - RNA, 19 nt, Artificial Sequence
  Description of Artificial Sequence: Synthetic oligonucleotide
aaacccauuauuacuguga

SEQ ID NO: 2274748 - RNA, 19 nt, Artificial Sequence
  Description of Artificial Sequence: Synthetic oligonucleotide
uguaagacuuuguuaugac

SEQ ID NO: 2274749 - RNA, 19 nt, Artificial Sequence
  Description of Artificial Sequence: Synthetic oligonucleotide
guaaaagcuaguaugggga

SEQ ID NO: 2274750 - RNA, 19 nt, Artificial Sequence
  Description of Artificial Sequence: Synthetic oligonucleotide
aaagguucugcugaacaga

SEQ ID NO: 2274751 - RNA, 19 nt, Artificial Sequence
  Description of Artificial Sequence: Synthetic oligonucleotide
auacaucuauucuguuggc

SEQ ID NO: 2274752 - RNA, 19 nt, Artificial Sequence
  Description of Artificial Sequence: Synthetic oligonucleotide
gaaaauagaacaggacuca

SEQ ID NO: 2274753 - RNA, 19 nt, Artificial Sequence
  Description of Artificial Sequence: Synthetic oligonucleotide
uuaauguagucugguuugg

SEQ ID NO: 2274754 - RNA, 19 nt, Artificial Sequence
  Description of Artificial Sequence: Synthetic oligonucleotide
agaaaauuucuggaugaag

SEQ ID NO: 2274755 - RNA, 19 nt, Artificial Sequence
  Description of Artificial Sequence: Synthetic oligonucleotide
ugaccauagugaguggugg

SEQ ID NO: 2274756 - RNA, 19 nt, Artificial Sequence
  Description of Artificial Sequence: Synthetic oligonucleotide
acuauggcuucagugaguc

SEQ ID NO: 2274757 - RNA, 19 nt, Artificial Sequence
  Description of Artificial Sequence: Synthetic oligonucleotide
cugggucucacuauagaag

SEQ ID NO: 2274758 - RNA, 19 nt, Artificial Sequence
  Description of Artificial Sequence: Synthetic oligonucleotide
uaucccuaaacccauuauu

SEQ ID NO: 2274759 - RNA, 19 nt, Artificial Sequence
  Description of Artificial Sequence: Synthetic oligonucleotide
aaagaggaugcuaccauga

SEQ ID NO: 2274760 - RNA, 19 nt, Artificial Sequence
  Description of Artificial Sequence: Synthetic oligonucleotide
uggcuuugggcuaucaggu

SEQ ID NO: 2274761 - RNA, 19 nt, Artificial Sequence
  Description of Artificial Sequence: Synthetic oligonucleotide
uucauuauguaaugcuauc

SEQ ID NO: 2274762 - RNA, 19 nt, Artificial Sequence
  Description of Artificial Sequence: Synthetic oligonucleotide
aagcauauuggucucuauu

SEQ ID NO: 2274763 - RNA, 19 nt, Artificial Sequence
  Description of Artificial Sequence: Synthetic oligonucleotide
gaugugggaagccaacuuc

SEQ ID NO: 2274764 - RNA, 19 nt, Artificial Sequence
  Description of Artificial Sequence: Synthetic oligonucleotide
ucugggucucacuauagaa

SEQ ID NO: 2274765 - RNA, 19 nt, Artificial Sequence
  Description of Artificial Sequence: Synthetic oligonucleotide
ucucuauucagagucuugu

SEQ ID NO: 2274766 - RNA, 19 nt, Artificial Sequence
  Description of Artificial Sequence: Synthetic oligonucleotide
  modified_base (9)..(9): a, c, u, g, unknown or other
guucuuaanacaaaacaaa

SEQ ID NO: 2274767 - RNA, 19 nt, Artificial Sequence
  Description of Artificial Sequence: Synthetic oligonucleotide
uguuaugaccauagugagu

SEQ ID NO: 2274768 - RNA, 19 nt, Artificial Sequence
  Description of Artificial Sequence: Synthetic oligonucleotide
aggggaaagguucugcuga

SEQ ID NO: 2274769 - RNA, 19 nt, Artificial Sequence
  Description of Artificial Sequence: Synthetic oligonucleotide
acuugacuaaaaucucuug

SEQ ID NO: 2274770 - RNA, 19 nt, Artificial Sequence
  Description of Artificial Sequence: Synthetic oligonucleotide
cuuugggcuaucagguagg

SEQ ID NO: 2274771 - RNA, 19 nt, Artificial Sequence
  Description of Artificial Sequence: Synthetic oligonucleotide
auuguauauucuucauaca

SEQ ID NO: 2274772 - RNA, 19 nt, Artificial Sequence
  Description of Artificial Sequence: Synthetic oligonucleotide
cugcuaugagaucuggugc

SEQ ID NO: 2274773 - RNA, 19 nt, Artificial Sequence
  Description of Artificial Sequence: Synthetic oligonucleotide
ugcaugguagcauuguaua

SEQ ID NO: 2274774 - RNA, 19 nt, Artificial Sequence
  Description of Artificial Sequence: Synthetic oligonucleotide
auaaaggggauuaacccca

SEQ ID NO: 2274775 - RNA, 19 nt, Artificial Sequence
  Description of Artificial Sequence: Synthetic oligonucleotide
aaaagcuaguauggggaug

SEQ ID NO: 2274776 - RNA, 19 nt, Artificial Sequence
  Description of Artificial Sequence: Synthetic oligonucleotide
ugaaaugaugugggaagcc

SEQ ID NO: 2274777 - RNA, 19 nt, Artificial Sequence
  Description of Artificial Sequence: Synthetic oligonucleotide
gggauaauguggcaagagg

SEQ ID NO: 2274778 - RNA, 19 nt, Artificial Sequence
  Description of Artificial Sequence: Synthetic oligonucleotide
gacucauacugcuagcuaa

SEQ ID NO: 2274779 - RNA, 19 nt, Artificial Sequence
  Description of Artificial Sequence: Synthetic oligonucleotide
uaguauggggauguaagac

SEQ ID NO: 2274780 - RNA, 19 nt, Artificial Sequence
  Description of Artificial Sequence: Synthetic oligonucleotide
ccuaaacccauuauuacug

SEQ ID NO: 2274781 - RNA, 19 nt, Artificial Sequence
  Description of Artificial Sequence: Synthetic oligonucleotide
auauauaaugcuggcuuug

SEQ ID NO: 2274782 - RNA, 19 nt, Artificial Sequence
  Description of Artificial Sequence: Synthetic oligonucleotide
cauuauuacugugacuaug

SEQ ID NO: 2274783 - RNA, 19 nt, Artificial Sequence
  Description of Artificial Sequence: Synthetic oligonucleotide
ucccuaaacccauuauuac

SEQ ID NO: 2274784 - RNA, 19 nt, Artificial Sequence
  Description of Artificial Sequence: Synthetic oligonucleotide
agugacuacaaaugagaaa

SEQ ID NO: 2274785 - RNA, 19 nt, Artificial Sequence
  Description of Artificial Sequence: Synthetic oligonucleotide
agaaaagaggaugcuacca

SEQ ID NO: 2274786 - RNA, 19 nt, Artificial Sequence
  Description of Artificial Sequence: Synthetic oligonucleotide
ugaaccaguugggauaaug

SEQ ID NO: 2274787 - RNA, 19 nt, Artificial Sequence
  Description of Artificial Sequence: Synthetic oligonucleotide
cagaaaagaggaugcuacc

SEQ ID NO: 2274788 - RNA, 19 nt, Artificial Sequence
  Description of Artificial Sequence: Synthetic oligonucleotide
aguauuaaagugacuacaa

SEQ ID NO: 2274789 - RNA, 19 nt, Artificial Sequence
  Description of Artificial Sequence: Synthetic oligonucleotide
ugcuagcuaaauuaaugua

SEQ ID NO: 2274790 - RNA, 19 nt, Artificial Sequence
  Description of Artificial Sequence: Synthetic oligonucleotide
uaaaagcuaguauggggau

SEQ ID NO: 2274791 - RNA, 19 nt, Artificial Sequence
  Description of Artificial Sequence: Synthetic oligonucleotide
ugcuaccaugaaaauagaa

SEQ ID NO: 2274792 - RNA, 19 nt, Artificial Sequence
  Description of Artificial Sequence: Synthetic oligonucleotide
gaagugaagcauauugguc

SEQ ID NO: 2274793 - RNA, 19 nt, Artificial Sequence
  Description of Artificial Sequence: Synthetic oligonucleotide
cugaccccucccaagaaag

SEQ ID NO: 2274794 - RNA, 19 nt, Artificial Sequence
  Description of Artificial Sequence: Synthetic oligonucleotide
uaugaccauagugaguggu

SEQ ID NO: 2274795 - RNA, 19 nt, Artificial Sequence
  Description of Artificial Sequence: Synthetic oligonucleotide
gaaaugaugugggaagcca

SEQ ID NO: 2274796 - RNA, 19 nt, Artificial Sequence
  Description of Artificial Sequence: Synthetic oligonucleotide
auaaacacuuuuaaguauu

SEQ ID NO: 2274797 - RNA, 19 nt, Artificial Sequence
  Description of Artificial Sequence: Synthetic oligonucleotide
gcuaccaugaaaauagaac

SEQ ID NO: 2274798 - RNA, 19 nt, Artificial Sequence
  Description of Artificial Sequence: Synthetic oligonucleotide
agguagguaagugauggug

SEQ ID NO: 2274799 - RNA, 19 nt, Artificial Sequence
  Description of Artificial Sequence: Synthetic oligonucleotide
ugggauaauguggcaagag

SEQ ID NO: 2274800 - RNA, 19 nt, Artificial Sequence
  Description of Artificial Sequence: Synthetic oligonucleotide
uggacuacuuucuggcaga

SEQ ID NO: 2274801 - RNA, 19 nt, Artificial Sequence
  Description of Artificial Sequence: Synthetic oligonucleotide
uuaaaguugcacggugaug

SEQ ID NO: 2274802 - RNA, 19 nt, Artificial Sequence
  Description of Artificial Sequence: Synthetic oligonucleotide
uaaccucaaggcuuugaac

SEQ ID NO: 2274803 - RNA, 19 nt, Artificial Sequence
  Description of Artificial Sequence: Synthetic oligonucleotide
uuaugaccauagugagugg

SEQ ID NO: 2274804 - RNA, 19 nt, Artificial Sequence
  Description of Artificial Sequence: Synthetic oligonucleotide
caagcuuauauauaaugcu

SEQ ID NO: 2274805 - RNA, 19 nt, Artificial Sequence
  Description of Artificial Sequence: Synthetic oligonucleotide
cuaucagguagguaaguga

SEQ ID NO: 2274806 - RNA, 19 nt, Artificial Sequence
  Description of Artificial Sequence: Synthetic oligonucleotide
aaaguugcacggugaugca

SEQ ID NO: 2274807 - RNA, 19 nt, Artificial Sequence
  Description of Artificial Sequence: Synthetic oligonucleotide
aauguggcaagaggaaaau

SEQ ID NO: 2274808 - RNA, 19 nt, Artificial Sequence
  Description of Artificial Sequence: Synthetic oligonucleotide
gcuaguauggggauguaag

SEQ ID NO: 2274809 - RNA, 19 nt, Artificial Sequence
  Description of Artificial Sequence: Synthetic oligonucleotide
ggauaaacacuuuuaagua

SEQ ID NO: 2274810 - RNA, 19 nt, Artificial Sequence
  Description of Artificial Sequence: Synthetic oligonucleotide
uuacuaaccucaaggcuuu

SEQ ID NO: 2274811 - RNA, 19 nt, Artificial Sequence
  Description of Artificial Sequence: Synthetic oligonucleotide
auuaaccccaccaagcuua

SEQ ID NO: 2274812 - RNA, 19 nt, Artificial Sequence
  Description of Artificial Sequence: Synthetic oligonucleotide
gcuuauauauaaugcuggc

SEQ ID NO: 2274813 - RNA, 19 nt, Artificial Sequence
  Description of Artificial Sequence: Synthetic oligonucleotide
caaaaccccaucugacccc

SEQ ID NO: 2274814 - RNA, 19 nt, Artificial Sequence
  Description of Artificial Sequence: Synthetic oligonucleotide
gaaaggaguuuuauauuuc

SEQ ID NO: 2274815 - RNA, 19 nt, Artificial Sequence
  Description of Artificial Sequence: Synthetic oligonucleotide
gcaaaaccccaucugaccc

SEQ ID NO: 2274816 - RNA, 19 nt, Artificial Sequence
  Description of Artificial Sequence: Synthetic oligonucleotide
ggauguaagacuuuguuau

SEQ ID NO: 2274817 - RNA, 19 nt, Artificial Sequence
  Description of Artificial Sequence: Synthetic oligonucleotide
cuuacuaaccucaaggcuu

SEQ ID NO: 2274818 - RNA, 19 nt, Artificial Sequence
  Description of Artificial Sequence: Synthetic oligonucleotide
guagcauuguauauucuuc

SEQ ID NO: 2274819 - RNA, 19 nt, Artificial Sequence
  Description of Artificial Sequence: Synthetic oligonucleotide
cuagcuaaauuaauguagu

SEQ ID NO: 2274820 - RNA, 19 nt, Artificial Sequence
  Description of Artificial Sequence: Synthetic oligonucleotide
uucagaaaagaggaugcua

SEQ ID NO: 2274821 - RNA, 19 nt, Artificial Sequence
  Description of Artificial Sequence: Synthetic oligonucleotide
uuggcuggacuacuuucug

SEQ ID NO: 2274822 - RNA, 19 nt, Artificial Sequence
  Description of Artificial Sequence: Synthetic oligonucleotide
agaggaugcuaccaugaaa

SEQ ID NO: 2274823 - RNA, 19 nt, Artificial Sequence
  Description of Artificial Sequence: Synthetic oligonucleotide
aaacacuuuuaaguauuaa

SEQ ID NO: 2274824 - RNA, 19 nt, Artificial Sequence
  Description of Artificial Sequence: Synthetic oligonucleotide
uagcuaaauuaauguaguc

SEQ ID NO: 2274825 - RNA, 19 nt, Artificial Sequence
  Description of Artificial Sequence: Synthetic oligonucleotide
  modified_base (16)..(16): a, c, u, g, unknown or other
cugguguguucuuaanaca

SEQ ID NO: 2274826 - RNA, 19 nt, Artificial Sequence
  Description of Artificial Sequence: Synthetic oligonucleotide
auagaacaggacucauacu

SEQ ID NO: 2274827 - RNA, 19 nt, Artificial Sequence
  Description of Artificial Sequence: Synthetic oligonucleotide
guugcacggugaugcaugg

SEQ ID NO: 2274828 - RNA, 19 nt, Artificial Sequence
  Description of Artificial Sequence: Synthetic oligonucleotide
ggauaauguggcaagagga

SEQ ID NO: 2274829 - RNA, 19 nt, Artificial Sequence
  Description of Artificial Sequence: Synthetic oligonucleotide
cuaaaguacuuacuaaccu

SEQ ID NO: 2274830 - RNA, 19 nt, Artificial Sequence
  Description of Artificial Sequence: Synthetic oligonucleotide
agcauuguauauucuucau

SEQ ID NO: 2274831 - RNA, 19 nt, Artificial Sequence
  Description of Artificial Sequence: Synthetic oligonucleotide
uacaucuauucuguuggcu

SEQ ID NO: 2274832 - RNA, 19 nt, Artificial Sequence
  Description of Artificial Sequence: Synthetic oligonucleotide
gguagguaagugauggugc

SEQ ID NO: 2274833 - RNA, 19 nt, Artificial Sequence
  Description of Artificial Sequence: Synthetic oligonucleotide
aaauagaacaggacucaua

SEQ ID NO: 2274834 - RNA, 19 nt, Artificial Sequence
  Description of Artificial Sequence: Synthetic oligonucleotide
aaaaccccaucugaccccu

SEQ ID NO: 2274835 - RNA, 19 nt, Artificial Sequence
  Description of Artificial Sequence: Synthetic oligonucleotide
gcuuugggcuaucagguag

SEQ ID NO: 2274836 - RNA, 19 nt, Artificial Sequence
  Description of Artificial Sequence: Synthetic oligonucleotide
gcagaaaauuucuggauga

SEQ ID NO: 2274837 - RNA, 19 nt, Artificial Sequence
  Description of Artificial Sequence: Synthetic oligonucleotide
ucugguuuggcuggacuac

SEQ ID NO: 2274838 - RNA, 19 nt, Artificial Sequence
  Description of Artificial Sequence: Synthetic oligonucleotide
cauagugagugguggagca

SEQ ID NO: 2274839 - RNA, 19 nt, Artificial Sequence
  Description of Artificial Sequence: Synthetic oligonucleotide
auaauguggcaagaggaaa

SEQ ID NO: 2274840 - RNA, 19 nt, Artificial Sequence
  Description of Artificial Sequence: Synthetic oligonucleotide
cuaguauggggauguaaga

SEQ ID NO: 2274841 - RNA, 19 nt, Artificial Sequence
  Description of Artificial Sequence: Synthetic oligonucleotide
agucuuguuccagaagaug

SEQ ID NO: 2274842 - RNA, 19 nt, Artificial Sequence
  Description of Artificial Sequence: Synthetic oligonucleotide
ucugaccccucccaagaaa

SEQ ID NO: 2274843 - RNA, 19 nt, Artificial Sequence
  Description of Artificial Sequence: Synthetic oligonucleotide
aggaaugcuuccuucugau

SEQ ID NO: 2274844 - RNA, 19 nt, Artificial Sequence
  Description of Artificial Sequence: Synthetic oligonucleotide
auauuggucucuauucaga

SEQ ID NO: 2274845 - RNA, 19 nt, Artificial Sequence
  Description of Artificial Sequence: Synthetic oligonucleotide
gguacuucagcaucuuuga

SEQ ID NO: 2274846 - RNA, 19 nt, Artificial Sequence
  Description of Artificial Sequence: Synthetic oligonucleotide
caagaaagcuaggaaacca

SEQ ID NO: 2274847 - RNA, 19 nt, Artificial Sequence
  Description of Artificial Sequence: Synthetic oligonucleotide
gaaaagaggaugcuaccau

SEQ ID NO: 2274848 - RNA, 19 nt, Artificial Sequence
  Description of Artificial Sequence: Synthetic oligonucleotide
ggcuggacuacuuucuggc

SEQ ID NO: 2274849 - RNA, 19 nt, Artificial Sequence
  Description of Artificial Sequence: Synthetic oligonucleotide
ggaaagguucugcugaaca

SEQ ID NO: 2274850 - RNA, 19 nt, Artificial Sequence
  Description of Artificial Sequence: Synthetic oligonucleotide
ugaugcaugguagcauugu

SEQ ID NO: 2274851 - RNA, 19 nt, Artificial Sequence
  Description of Artificial Sequence: Synthetic oligonucleotide
gguggagcaauaaagggga

SEQ ID NO: 2274852 - RNA, 19 nt, Artificial Sequence
  Description of Artificial Sequence: Synthetic oligonucleotide
agugagucuuucagaaaag

SEQ ID NO: 2274853 - RNA, 19 nt, Artificial Sequence
  Description of Artificial Sequence: Synthetic oligonucleotide
gauggugcuugguggcuug

SEQ ID NO: 2274854 - RNA, 19 nt, Artificial Sequence
  Description of Artificial Sequence: Synthetic oligonucleotide
uuggagggaaggaaugcuu

SEQ ID NO: 2274855 - RNA, 19 nt, Artificial Sequence
  Description of Artificial Sequence: Synthetic oligonucleotide
aguugggauaauguggcaa

SEQ ID NO: 2274856 - RNA, 19 nt, Artificial Sequence
  Description of Artificial Sequence: Synthetic oligonucleotide
cacuauagaaggguacuuc

SEQ ID NO: 2274857 - RNA, 19 nt, Artificial Sequence
  Description of Artificial Sequence: Synthetic oligonucleotide
uaaaggggauuaaccccac

SEQ ID NO: 2274858 - RNA, 19 nt, Artificial Sequence
  Description of Artificial Sequence: Synthetic oligonucleotide
aucccuaaacccauuauua

SEQ ID NO: 2274859 - RNA, 19 nt, Artificial Sequence
  Description of Artificial Sequence: Synthetic oligonucleotide
gggauuaaccccaccaagc

SEQ ID NO: 2274860 - RNA, 19 nt, Artificial Sequence
  Description of Artificial Sequence: Synthetic oligonucleotide
ugaccccucccaagaaagc

SEQ ID NO: 2274861 - RNA, 19 nt, Artificial Sequence
  Description of Artificial Sequence: Synthetic oligonucleotide
cuucagugagucuuucaga

SEQ ID NO: 2274862 - RNA, 19 nt, Artificial Sequence
  Description of Artificial Sequence: Synthetic oligonucleotide
uggcuuggagggaaggaau

SEQ ID NO: 2274863 - RNA, 19 nt, Artificial Sequence
  Description of Artificial Sequence: Synthetic oligonucleotide
gaaagcuaggaaaccagcu

SEQ ID NO: 2274864 - RNA, 19 nt, Artificial Sequence
  Description of Artificial Sequence: Synthetic oligonucleotide
cagaugucuuggaagaaaa

SEQ ID NO: 2274865 - RNA, 19 nt, Artificial Sequence
  Description of Artificial Sequence: Synthetic oligonucleotide
cuaaccucaaggcuuugaa

SEQ ID NO: 2274866 - RNA, 19 nt, Artificial Sequence
  Description of Artificial Sequence: Synthetic oligonucleotide
aaguucugauuaauauuau

SEQ ID NO: 2274867 - RNA, 19 nt, Artificial Sequence
  Description of Artificial Sequence: Synthetic oligonucleotide
cugcuagcuaaauuaaugu

SEQ ID NO: 2274868 - RNA, 19 nt, Artificial Sequence
  Description of Artificial Sequence: Synthetic oligonucleotide
aggacucauacugcuagcu

SEQ ID NO: 2274869 - RNA, 19 nt, Artificial Sequence
  Description of Artificial Sequence: Synthetic oligonucleotide
ugguagcauuguauauucu

SEQ ID NO: 2274870 - RNA, 19 nt, Artificial Sequence
  Description of Artificial Sequence: Synthetic oligonucleotide
gaugcaugguagcauugua

SEQ ID NO: 2274871 - RNA, 19 nt, Artificial Sequence
  Description of Artificial Sequence: Synthetic oligonucleotide
gccacuaaaguacuuacua

SEQ ID NO: 2274872 - RNA, 19 nt, Artificial Sequence
  Description of Artificial Sequence: Synthetic oligonucleotide
uugggauaauguggcaaga

SEQ ID NO: 2274873 - RNA, 19 nt, Artificial Sequence
  Description of Artificial Sequence: Synthetic oligonucleotide
acugugacuauggcuucag

SEQ ID NO: 2274874 - RNA, 19 nt, Artificial Sequence
  Description of Artificial Sequence: Synthetic oligonucleotide
  modified_base (13)..(13): a, c, u, g, unknown or other
guguguucuuaanacaaaa

SEQ ID NO: 2274875 - RNA, 19 nt, Artificial Sequence
  Description of Artificial Sequence: Synthetic oligonucleotide
ggagggaaggaaugcuucc

SEQ ID NO: 2274876 - RNA, 19 nt, Artificial Sequence
  Description of Artificial Sequence: Synthetic oligonucleotide
gcauauuggucucuauuca

SEQ ID NO: 2274877 - RNA, 19 nt, Artificial Sequence
  Description of Artificial Sequence: Synthetic oligonucleotide
augaccauagugaguggug

SEQ ID NO: 2274878 - RNA, 19 nt, Artificial Sequence
  Description of Artificial Sequence: Synthetic oligonucleotide
uagugagugguggagcaau

SEQ ID NO: 2274879 - RNA, 19 nt, Artificial Sequence
  Description of Artificial Sequence: Synthetic oligonucleotide
uaaugcuggcuuugggcua

SEQ ID NO: 2274880 - RNA, 19 nt, Artificial Sequence
  Description of Artificial Sequence: Synthetic oligonucleotide
cuuauauauaaugcuggcu

SEQ ID NO: 2274881 - RNA, 19 nt, Artificial Sequence
  Description of Artificial Sequence: Synthetic oligonucleotide
gaccauagugaguggugga

SEQ ID NO: 2274882 - RNA, 19 nt, Artificial Sequence
  Description of Artificial Sequence: Synthetic oligonucleotide
gaaccaguugggauaaugu

SEQ ID NO: 2274883 - RNA, 19 nt, Artificial Sequence
  Description of Artificial Sequence: Synthetic oligonucleotide
acccauuauuacugugacu

SEQ ID NO: 2274884 - RNA, 19 nt, Artificial Sequence
  Description of Artificial Sequence: Synthetic oligonucleotide
augaugugggaagccaacu

SEQ ID NO: 2274885 - RNA, 19 nt, Artificial Sequence
  Description of Artificial Sequence: Synthetic oligonucleotide
uugguggcuuggagggaag

SEQ ID NO: 2274886 - RNA, 19 nt, Artificial Sequence
  Description of Artificial Sequence: Synthetic oligonucleotide
cccauuauuacugugacua

SEQ ID NO: 2274887 - RNA, 19 nt, Artificial Sequence
  Description of Artificial Sequence: Synthetic oligonucleotide
aucuuugaagaggcugcag

SEQ ID NO: 2274888 - RNA, 19 nt, Artificial Sequence
  Description of Artificial Sequence: Synthetic oligonucleotide
gugagucuuucagaaaaga

SEQ ID NO: 2274889 - RNA, 19 nt, Artificial Sequence
  Description of Artificial Sequence: Synthetic oligonucleotide
auacugcuagcuaaauuaa

SEQ ID NO: 2274890 - RNA, 19 nt, Artificial Sequence
  Description of Artificial Sequence: Synthetic oligonucleotide
ggagcaauaaaggggauua

SEQ ID NO: 2274891 - RNA, 19 nt, Artificial Sequence
  Description of Artificial Sequence: Synthetic oligonucleotide
cugaacagaugucuuggaa

SEQ ID NO: 2274892 - RNA, 19 nt, Artificial Sequence
  Description of Artificial Sequence: Synthetic oligonucleotide
ucaaggcuuugaaccaguu

SEQ ID NO: 2274893 - RNA, 19 nt, Artificial Sequence
  Description of Artificial Sequence: Synthetic oligonucleotide
guagguaagugauggugcu

SEQ ID NO: 2274894 - RNA, 19 nt, Artificial Sequence
  Description of Artificial Sequence: Synthetic oligonucleotide
uuaaccccaccaagcuuau

SEQ ID NO: 2274895 - RNA, 19 nt, Artificial Sequence
  Description of Artificial Sequence: Synthetic oligonucleotide
uauggggauguaagacuuu

SEQ ID NO: 2274896 - RNA, 19 nt, Artificial Sequence
  Description of Artificial Sequence: Synthetic oligonucleotide
aggaugcuaccaugaaaau

SEQ ID NO: 2274897 - RNA, 19 nt, Artificial Sequence
  Description of Artificial Sequence: Synthetic oligonucleotide
aaguugcacggugaugcau

SEQ ID NO: 2274898 - RNA, 19 nt, Artificial Sequence
  Description of Artificial Sequence: Synthetic oligonucleotide
gcuccauaagccaucugag

SEQ ID NO: 2274899 - RNA, 19 nt, Artificial Sequence
  Description of Artificial Sequence: Synthetic oligonucleotide
gcuaucagguagguaagug

SEQ ID NO: 2274900 - RNA, 19 nt, Artificial Sequence
  Description of Artificial Sequence: Synthetic oligonucleotide
uuugggcuaucagguaggu

SEQ ID NO: 2274901 - RNA, 19 nt, Artificial Sequence
  Description of Artificial Sequence: Synthetic oligonucleotide
uggagcaauaaaggggauu

SEQ ID NO: 2274902 - RNA, 19 nt, Artificial Sequence
  Description of Artificial Sequence: Synthetic oligonucleotide
agggaaggaaugcuuccuu

SEQ ID NO: 2274903 - RNA, 19 nt, Artificial Sequence
  Description of Artificial Sequence: Synthetic oligonucleotide
aaaagccacuaaaguacuu

SEQ ID NO: 2274904 - RNA, 19 nt, Artificial Sequence
  Description of Artificial Sequence: Synthetic oligonucleotide
caucuauucuguuggcucu

SEQ ID NO: 2274905 - RNA, 19 nt, Artificial Sequence
  Description of Artificial Sequence: Synthetic oligonucleotide
gaaggguacuucagcaucu

SEQ ID NO: 2274906 - RNA, 19 nt, Artificial Sequence
  Description of Artificial Sequence: Synthetic oligonucleotide
aacaggacucauacugcua

SEQ ID NO: 2274907 - RNA, 19 nt, Artificial Sequence
  Description of Artificial Sequence: Synthetic oligonucleotide
ggaaugcuuccuucugaug

SEQ ID NO: 2274908 - RNA, 19 nt, Artificial Sequence
  Description of Artificial Sequence: Synthetic oligonucleotide
gacuacuuucuggcagagc

SEQ ID NO: 2274909 - RNA, 19 nt, Artificial Sequence
  Description of Artificial Sequence: Synthetic oligonucleotide
gaagaggcugcagaaaauu

SEQ ID NO: 2274910 - RNA, 19 nt, Artificial Sequence
  Description of Artificial Sequence: Synthetic oligonucleotide
ggauuaaccccaccaagcu

SEQ ID NO: 2274911 - RNA, 19 nt, Artificial Sequence
  Description of Artificial Sequence: Synthetic oligonucleotide
gagacaaaggggaaagguu

SEQ ID NO: 2274912 - RNA, 19 nt, Artificial Sequence
  Description of Artificial Sequence: Synthetic oligonucleotide
cacuugaaaugauguggga

SEQ ID NO: 2274913 - RNA, 19 nt, Artificial Sequence
  Description of Artificial Sequence: Synthetic oligonucleotide
cuaaacccauuauuacugu

SEQ ID NO: 2274914 - RNA, 19 nt, Artificial Sequence
  Description of Artificial Sequence: Synthetic oligonucleotide
agccacuaaaguacuuacu

SEQ ID NO: 2274915 - RNA, 19 nt, Artificial Sequence
  Description of Artificial Sequence: Synthetic oligonucleotide
gauuaaccccaccaagcuu

SEQ ID NO: 2274916 - RNA, 19 nt, Artificial Sequence
  Description of Artificial Sequence: Synthetic oligonucleotide
gugaugcaugguagcauug

SEQ ID NO: 2274917 - RNA, 19 nt, Artificial Sequence
  Description of Artificial Sequence: Synthetic oligonucleotide
  modified_base (14)..(14): a, c, u, g, unknown or other
gguguguucuuaanacaaa

SEQ ID NO: 2274918 - RNA, 19 nt, Artificial Sequence
  Description of Artificial Sequence: Synthetic oligonucleotide
agcuaguauggggauguaa

SEQ ID NO: 2274919 - RNA, 19 nt, Artificial Sequence
  Description of Artificial Sequence: Synthetic oligonucleotide
gcuggcuuugggcuaucag

SEQ ID NO: 2274920 - RNA, 19 nt, Artificial Sequence
  Description of Artificial Sequence: Synthetic oligonucleotide
agcuaggaaaccagcucca

SEQ ID NO: 2274921 - RNA, 19 nt, Artificial Sequence
  Description of Artificial Sequence: Synthetic oligonucleotide
aaaaucucuugggcccuuu

SEQ ID NO: 2274922 - RNA, 19 nt, Artificial Sequence
  Description of Artificial Sequence: Synthetic oligonucleotide
cucugggucucacuauaga

SEQ ID NO: 2274923 - RNA, 19 nt, Artificial Sequence
  Description of Artificial Sequence: Synthetic oligonucleotide
agaugucuuggaagaaaau

SEQ ID NO: 2274924 - RNA, 19 nt, Artificial Sequence
  Description of Artificial Sequence: Synthetic oligonucleotide
gggucucacuauagaaggg

SEQ ID NO: 2274925 - RNA, 19 nt, Artificial Sequence
  Description of Artificial Sequence: Synthetic oligonucleotide
guacuucagcaucuuugaa

SEQ ID NO: 2274926 - RNA, 19 nt, Artificial Sequence
  Description of Artificial Sequence: Synthetic oligonucleotide
cuacuuucuggcagagcaa

SEQ ID NO: 2274927 - RNA, 19 nt, Artificial Sequence
  Description of Artificial Sequence: Synthetic oligonucleotide
aaggguacuucagcaucuu

SEQ ID NO: 2274928 - RNA, 19 nt, Artificial Sequence
  Description of Artificial Sequence: Synthetic oligonucleotide
gcuuggagggaaggaaugc

SEQ ID NO: 2274929 - RNA, 19 nt, Artificial Sequence
  Description of Artificial Sequence: Synthetic oligonucleotide
cugcagaaaauuucuggau

SEQ ID NO: 2274930 - RNA, 19 nt, Artificial Sequence
  Description of Artificial Sequence: Synthetic oligonucleotide
ccauagugagugguggagc

SEQ ID NO: 2274931 - RNA, 19 nt, Artificial Sequence
  Description of Artificial Sequence: Synthetic oligonucleotide
ugcuaucccuaaacccauu

SEQ ID NO: 2274932 - RNA, 19 nt, Artificial Sequence
  Description of Artificial Sequence: Synthetic oligonucleotide
augcuaucccuaaacccau

SEQ ID NO: 2274933 - RNA, 19 nt, Artificial Sequence
  Description of Artificial Sequence: Synthetic oligonucleotide
caugguagcauuguauauu

SEQ ID NO: 2274934 - RNA, 19 nt, Artificial Sequence
  Description of Artificial Sequence: Synthetic oligonucleotide
cuugguggcuuggagggaa

SEQ ID NO: 2274935 - RNA, 19 nt, Artificial Sequence
  Description of Artificial Sequence: Synthetic oligonucleotide
uagguaagugauggugcuu

SEQ ID NO: 2274936 - RNA, 19 nt, Artificial Sequence
  Description of Artificial Sequence: Synthetic oligonucleotide
cagaaaauuucuggaugaa

SEQ ID NO: 2274937 - RNA, 19 nt, Artificial Sequence
  Description of Artificial Sequence: Synthetic oligonucleotide
auagugagugguggagcaa

SEQ ID NO: 2274938 - RNA, 19 nt, Artificial Sequence
  Description of Artificial Sequence: Synthetic oligonucleotide
ccccucccaagaaagcuag

SEQ ID NO: 2274939 - RNA, 19 nt, Artificial Sequence
  Description of Artificial Sequence: Synthetic oligonucleotide
guauggggauguaagacuu

SEQ ID NO: 2274940 - RNA, 19 nt, Artificial Sequence
  Description of Artificial Sequence: Synthetic oligonucleotide
cuccauaagccaucugagu

SEQ ID NO: 2274941 - RNA, 19 nt, Artificial Sequence
  Description of Artificial Sequence: Synthetic oligonucleotide
aggguacuucagcaucuuu

SEQ ID NO: 2274942 - RNA, 19 nt, Artificial Sequence
  Description of Artificial Sequence: Synthetic oligonucleotide
gcacggugaugcaugguag

SEQ ID NO: 2274943 - RNA, 19 nt, Artificial Sequence
  Description of Artificial Sequence: Synthetic oligonucleotide
gucucacuauagaagggua

SEQ ID NO: 2274944 - RNA, 19 nt, Artificial Sequence
  Description of Artificial Sequence: Synthetic oligonucleotide
uacuaaccucaaggcuuug

SEQ ID NO: 2274945 - RNA, 19 nt, Artificial Sequence
  Description of Artificial Sequence: Synthetic oligonucleotide
gggcuaucagguagguaag

SEQ ID NO: 2274946 - RNA, 19 nt, Artificial Sequence
  Description of Artificial Sequence: Synthetic oligonucleotide
gcugaacagaugucuugga

SEQ ID NO: 2274947 - RNA, 19 nt, Artificial Sequence
  Description of Artificial Sequence: Synthetic oligonucleotide
caucugaguaaaagcuagu

SEQ ID NO: 2274948 - RNA, 19 nt, Artificial Sequence
  Description of Artificial Sequence: Synthetic oligonucleotide
gcuuugaaccaguugggau

SEQ ID NO: 2274949 - RNA, 19 nt, Artificial Sequence
  Description of Artificial Sequence: Synthetic oligonucleotide
cuuggagggaaggaaugcu

SEQ ID NO: 2274950 - RNA, 19 nt, Artificial Sequence
  Description of Artificial Sequence: Synthetic oligonucleotide
ggucucacuauagaagggu

SEQ ID NO: 2274951 - RNA, 19 nt, Artificial Sequence
  Description of Artificial Sequence: Synthetic oligonucleotide
gugagugguggagcaauaa

SEQ ID NO: 2274952 - RNA, 19 nt, Artificial Sequence
  Description of Artificial Sequence: Synthetic oligonucleotide
augcuaccaugaaaauaga

SEQ ID NO: 2274953 - RNA, 19 nt, Artificial Sequence
  Description of Artificial Sequence: Synthetic oligonucleotide
ggugaugcaugguagcauu

SEQ ID NO: 2274954 - RNA, 19 nt, Artificial Sequence
  Description of Artificial Sequence: Synthetic oligonucleotide
caguugggauaauguggca

SEQ ID NO: 2274955 - RNA, 19 nt, Artificial Sequence
  Description of Artificial Sequence: Synthetic oligonucleotide
cccuaaacccauuauuacu

SEQ ID NO: 2274956 - RNA, 19 nt, Artificial Sequence
  Description of Artificial Sequence: Synthetic oligonucleotide
cuaucccuaaacccauuau

SEQ ID NO: 2274957 - RNA, 19 nt, Artificial Sequence
  Description of Artificial Sequence: Synthetic oligonucleotide
gcuggacuacuuucuggca

SEQ ID NO: 2274958 - RNA, 19 nt, Artificial Sequence
  Description of Artificial Sequence: Synthetic oligonucleotide
ggcuuugaaccaguuggga

SEQ ID NO: 2274959 - RNA, 19 nt, Artificial Sequence
  Description of Artificial Sequence: Synthetic oligonucleotide
guaagugauggugcuuggu

SEQ ID NO: 2274960 - RNA, 19 nt, Artificial Sequence
  Description of Artificial Sequence: Synthetic oligonucleotide
gagucuuguuccagaagau

SEQ ID NO: 2274961 - RNA, 19 nt, Artificial Sequence
  Description of Artificial Sequence: Synthetic oligonucleotide
uugggcuaucagguaggua

SEQ ID NO: 2274962 - RNA, 19 nt, Artificial Sequence
  Description of Artificial Sequence: Synthetic oligonucleotide
ugcuggcuuugggcuauca

SEQ ID NO: 2274963 - RNA, 19 nt, Artificial Sequence
  Description of Artificial Sequence: Synthetic oligonucleotide
gacuauggcuucagugagu

SEQ ID NO: 2274964 - RNA, 19 nt, Artificial Sequence
  Description of Artificial Sequence: Synthetic oligonucleotide
gcucugggucucacuauag

SEQ ID NO: 2274965 - RNA, 19 nt, Artificial Sequence
  Description of Artificial Sequence: Synthetic oligonucleotide
agugagugguggagcaaua

SEQ ID NO: 2274966 - RNA, 19 nt, Artificial Sequence
  Description of Artificial Sequence: Synthetic oligonucleotide
cucuauucagagucuuguu

SEQ ID NO: 2274967 - RNA, 19 nt, Artificial Sequence
  Description of Artificial Sequence: Synthetic oligonucleotide
ggcucugggucucacuaua

SEQ ID NO: 2274968 - RNA, 19 nt, Artificial Sequence
  Description of Artificial Sequence: Synthetic oligonucleotide
aagcuaguauggggaugua

SEQ ID NO: 2274969 - RNA, 19 nt, Artificial Sequence
  Description of Artificial Sequence: Synthetic oligonucleotide
accccucccaagaaagcua

SEQ ID NO: 2274970 - RNA, 19 nt, Artificial Sequence
  Description of Artificial Sequence: Synthetic oligonucleotide
gcaugguagcauuguauau

SEQ ID NO: 2274971 - RNA, 19 nt, Artificial Sequence
  Description of Artificial Sequence: Synthetic oligonucleotide
gggaaagguucugcugaac

SEQ ID NO: 2274972 - RNA, 19 nt, Artificial Sequence
  Description of Artificial Sequence: Synthetic oligonucleotide
ggaagccaacuuccuugga

SEQ ID NO: 2274973 - RNA, 19 nt, Artificial Sequence
  Description of Artificial Sequence: Synthetic oligonucleotide
cagguagguaagugauggu

SEQ ID NO: 2274974 - RNA, 19 nt, Artificial Sequence
  Description of Artificial Sequence: Synthetic oligonucleotide
uugaaccaguugggauaau

SEQ ID NO: 2274975 - RNA, 19 nt, Artificial Sequence
  Description of Artificial Sequence: Synthetic oligonucleotide
ggcuuugggcuaucaggua

SEQ ID NO: 2274976 - RNA, 19 nt, Artificial Sequence
  Description of Artificial Sequence: Synthetic oligonucleotide
cucauacugcuagcuaaau

SEQ ID NO: 2274977 - RNA, 19 nt, Artificial Sequence
  Description of Artificial Sequence: Synthetic oligonucleotide
uaaccccaccaagcuuaua

SEQ ID NO: 2274978 - RNA, 19 nt, Artificial Sequence
  Description of Artificial Sequence: Synthetic oligonucleotide
cuauggcuucagugagucu

SEQ ID NO: 2274979 - RNA, 19 nt, Artificial Sequence
  Description of Artificial Sequence: Synthetic oligonucleotide
augcuggcuuugggcuauc

SEQ ID NO: 2274980 - RNA, 19 nt, Artificial Sequence
  Description of Artificial Sequence: Synthetic oligonucleotide
cugugacuauggcuucagu

SEQ ID NO: 2274981 - RNA, 19 nt, Artificial Sequence
  Description of Artificial Sequence: Synthetic oligonucleotide
ccccaccaagcuuauauau

SEQ ID NO: 2274982 - RNA, 19 nt, Artificial Sequence
  Description of Artificial Sequence: Synthetic oligonucleotide
ggucucuauucagagucuu

SEQ ID NO: 2274983 - RNA, 19 nt, Artificial Sequence
  Description of Artificial Sequence: Synthetic oligonucleotide
ccauuauuacugugacuau

SEQ ID NO: 2274984 - RNA, 19 nt, Artificial Sequence
  Description of Artificial Sequence: Synthetic oligonucleotide
ccccaucugaccccuccca

SEQ ID NO: 2274985 - RNA, 19 nt, Artificial Sequence
  Description of Artificial Sequence: Synthetic oligonucleotide
cccaucugaccccucccaa

SEQ ID NO: 2274986 - RNA, 19 nt, Artificial Sequence
  Description of Artificial Sequence: Synthetic oligonucleotide
cggugaugcaugguagcau

SEQ ID NO: 2274987 - RNA, 19 nt, Artificial Sequence
  Description of Artificial Sequence: Synthetic oligonucleotide
aagacaggaagcuucaccc

SEQ ID NO: 2274988 - RNA, 19 nt, Artificial Sequence
  Description of Artificial Sequence: Synthetic oligonucleotide
aaacaaggacaccaggagc

SEQ ID NO: 2274989 - RNA, 19 nt, Artificial Sequence
  Description of Artificial Sequence: Synthetic oligonucleotide
aaaacaaggacaccaggag

SEQ ID NO: 2274990 - RNA, 19 nt, Artificial Sequence
  Description of Artificial Sequence: Synthetic oligonucleotide
uucuagagcuccaagaucc

SEQ ID NO: 2274991 - RNA, 19 nt, Artificial Sequence
  Description of Artificial Sequence: Synthetic oligonucleotide
aaugaagucacagucaaca

SEQ ID NO: 2274992 - RNA, 19 nt, Artificial Sequence
  Description of Artificial Sequence: Synthetic oligonucleotide
agucaaugaagucacaguc

SEQ ID NO: 2274993 - RNA, 19 nt, Artificial Sequence
  Description of Artificial Sequence: Synthetic oligonucleotide
aaggcaaaagacaggaagc

SEQ ID NO: 2274994 - RNA, 19 nt, Artificial Sequence
  Description of Artificial Sequence: Synthetic oligonucleotide
gaagucacagucaacaucc

SEQ ID NO: 2274995 - RNA, 19 nt, Artificial Sequence
  Description of Artificial Sequence: Synthetic oligonucleotide
ugaaaggaaaucuuguaga

SEQ ID NO: 2274996 - RNA, 19 nt, Artificial Sequence
  Description of Artificial Sequence: Synthetic oligonucleotide
uuguagugaaacuugcccg

SEQ ID NO: 2274997 - RNA, 19 nt, Artificial Sequence
  Description of Artificial Sequence: Synthetic oligonucleotide
ugaugaucuucucacagag

SEQ ID NO: 2274998 - RNA, 19 nt, Artificial Sequence
  Description of Artificial Sequence: Synthetic oligonucleotide
agaggcuacacccagaaca

SEQ ID NO: 2274999 - RNA, 19 nt, Artificial Sequence
  Description of Artificial Sequence: Synthetic oligonucleotide
uucugguagaauuccaagg

SEQ ID NO: 2275000 - RNA, 19 nt, Artificial Sequence
  Description of Artificial Sequence: Synthetic oligonucleotide
uuucuuguagugaaacuug

SEQ ID NO: 2275001 - RNA, 19 nt, Artificial Sequence
  Description of Artificial Sequence: Synthetic oligonucleotide
uagaauuccaaggacaucu

SEQ ID NO: 2275002 - RNA, 19 nt, Artificial Sequence
  Description of Artificial Sequence: Synthetic oligonucleotide
guaaccacaaaacaaggac

SEQ ID NO: 2275003 - RNA, 19 nt, Artificial Sequence
  Description of Artificial Sequence: Synthetic oligonucleotide
aaaucuuguagagguaggg

SEQ ID NO: 2275004 - RNA, 19 nt, Artificial Sequence
  Description of Artificial Sequence: Synthetic oligonucleotide
gaaagagaaccccaccagg

SEQ ID NO: 2275005 - RNA, 19 nt, Artificial Sequence
  Description of Artificial Sequence: Synthetic oligonucleotide
uagaaagagaaccccacca

SEQ ID NO: 2275006 - RNA, 19 nt, Artificial Sequence
  Description of Artificial Sequence: Synthetic oligonucleotide
aaagagaaccccaccaggg

SEQ ID NO: 2275007 - RNA, 19 nt, Artificial Sequence
  Description of Artificial Sequence: Synthetic oligonucleotide
ucauccugcagccagcacc

SEQ ID NO: 2275008 - RNA, 19 nt, Artificial Sequence
  Description of Artificial Sequence: Synthetic oligonucleotide
cugaaaggaaaucuuguag

SEQ ID NO: 2275009 - RNA, 19 nt, Artificial Sequence
  Description of Artificial Sequence: Synthetic oligonucleotide
aagucaaugaagucacagu

SEQ ID NO: 2275010 - RNA, 19 nt, Artificial Sequence
  Description of Artificial Sequence: Synthetic oligonucleotide
uguagaaagagaaccccac

SEQ ID NO: 2275011 - RNA, 19 nt, Artificial Sequence
  Description of Artificial Sequence: Synthetic oligonucleotide
aaacacguuguccaccucu

SEQ ID NO: 2275012 - RNA, 19 nt, Artificial Sequence
  Description of Artificial Sequence: Synthetic oligonucleotide
uagagcuccaagauccccg

SEQ ID NO: 2275013 - RNA, 19 nt, Artificial Sequence
  Description of Artificial Sequence: Synthetic oligonucleotide
agaaagagaaccccaccag

SEQ ID NO: 2275014 - RNA, 19 nt, Artificial Sequence
  Description of Artificial Sequence: Synthetic oligonucleotide
aacaaggacaccaggagcu

SEQ ID NO: 2275015 - RNA, 19 nt, Artificial Sequence
  Description of Artificial Sequence: Synthetic oligonucleotide
uuccccaacaaccuugcgc

SEQ ID NO: 2275016 - RNA, 19 nt, Artificial Sequence
  Description of Artificial Sequence: Synthetic oligonucleotide
aauuccccaacaaccuugc

SEQ ID NO: 2275017 - RNA, 19 nt, Artificial Sequence
  Description of Artificial Sequence: Synthetic oligonucleotide
gacaguucauccugcagcc

SEQ ID NO: 2275018 - RNA, 19 nt, Artificial Sequence
  Description of Artificial Sequence: Synthetic oligonucleotide
agauucuagagcuccaaga

SEQ ID NO: 2275019 - RNA, 19 nt, Artificial Sequence
  Description of Artificial Sequence: Synthetic oligonucleotide
ugaagucacagucaacauc

SEQ ID NO: 2275020 - RNA, 19 nt, Artificial Sequence
  Description of Artificial Sequence: Synthetic oligonucleotide
uccaccgacacuuccagca

SEQ ID NO: 2275021 - RNA, 19 nt, Artificial Sequence
  Description of Artificial Sequence: Synthetic oligonucleotide
uguagugaaacuugcccgu

SEQ ID NO: 2275022 - RNA, 19 nt, Artificial Sequence
  Description of Artificial Sequence: Synthetic oligonucleotide
uccgugaucugaaaggaaa

SEQ ID NO: 2275023 - RNA, 19 nt, Artificial Sequence
  Description of Artificial Sequence: Synthetic oligonucleotide
cuuccagcacuuccgaucg

SEQ ID NO: 2275024 - RNA, 19 nt, Artificial Sequence
  Description of Artificial Sequence: Synthetic oligonucleotide
gaucugaaaggaaaucuug

SEQ ID NO: 2275025 - RNA, 19 nt, Artificial Sequence
  Description of Artificial Sequence: Synthetic oligonucleotide
guagagguagggcugcacg

SEQ ID NO: 2275026 - RNA, 19 nt, Artificial Sequence
  Description of Artificial Sequence: Synthetic oligonucleotide
cuacacccagaacagaacc

SEQ ID NO: 2275027 - RNA, 19 nt, Artificial Sequence
  Description of Artificial Sequence: Synthetic oligonucleotide
agauccccgcaucagacuc

SEQ ID NO: 2275028 - RNA, 19 nt, Artificial Sequence
  Description of Artificial Sequence: Synthetic oligonucleotide
agacaggaagcuucacccc

SEQ ID NO: 2275029 - RNA, 19 nt, Artificial Sequence
  Description of Artificial Sequence: Synthetic oligonucleotide
gaaaucuuguagagguagg

SEQ ID NO: 2275030 - RNA, 19 nt, Artificial Sequence
  Description of Artificial Sequence: Synthetic oligonucleotide
agugcauccuugaauuccc

SEQ ID NO: 2275031 - RNA, 19 nt, Artificial Sequence
  Description of Artificial Sequence: Synthetic oligonucleotide
acaaccuugcgcaaggcuc

SEQ ID NO: 2275032 - RNA, 19 nt, Artificial Sequence
  Description of Artificial Sequence: Synthetic oligonucleotide
gaaacuugcccgugcugcg

SEQ ID NO: 2275033 - RNA, 19 nt, Artificial Sequence
  Description of Artificial Sequence: Synthetic oligonucleotide
aaagguggcagggucacca

SEQ ID NO: 2275034 - RNA, 19 nt, Artificial Sequence
  Description of Artificial Sequence: Synthetic oligonucleotide
aacaaccuugcgcaaggcu

SEQ ID NO: 2275035 - RNA, 19 nt, Artificial Sequence
  Description of Artificial Sequence: Synthetic oligonucleotide
accuugacuguccacaccu

SEQ ID NO: 2275036 - RNA, 19 nt, Artificial Sequence
  Description of Artificial Sequence: Synthetic oligonucleotide
ugcgugggcaucuugggca

SEQ ID NO: 2275037 - RNA, 19 nt, Artificial Sequence
  Description of Artificial Sequence: Synthetic oligonucleotide
aggagacacgcacauaugu

SEQ ID NO: 2275038 - RNA, 19 nt, Artificial Sequence
  Description of Artificial Sequence: Synthetic oligonucleotide
caagucucaucaagggucc

SEQ ID NO: 2275039 - RNA, 19 nt, Artificial Sequence
  Description of Artificial Sequence: Synthetic oligonucleotide
aaggccuacagggcaaggg

SEQ ID NO: 2275040 - RNA, 19 nt, Artificial Sequence
  Description of Artificial Sequence: Synthetic oligonucleotide
ucuggccuagcccaucacc

SEQ ID NO: 2275041 - RNA, 19 nt, Artificial Sequence
  Description of Artificial Sequence: Synthetic oligonucleotide
agcucgucagaggagacac

SEQ ID NO: 2275042 - RNA, 19 nt, Artificial Sequence
  Description of Artificial Sequence: Synthetic oligonucleotide
aucaccaccugaauuucgc

SEQ ID NO: 2275043 - RNA, 19 nt, Artificial Sequence
  Description of Artificial Sequence: Synthetic oligonucleotide
gaauuccccaacaaccuug

SEQ ID NO: 2275044 - RNA, 19 nt, Artificial Sequence
  Description of Artificial Sequence: Synthetic oligonucleotide
aagggaugcacucgucuga

SEQ ID NO: 2275045 - RNA, 19 nt, Artificial Sequence
  Description of Artificial Sequence: Synthetic oligonucleotide
ugcaccuugacuguccaca

SEQ ID NO: 2275046 - RNA, 19 nt, Artificial Sequence
  Description of Artificial Sequence: Synthetic oligonucleotide
caaccuugcgcaaggcucg

SEQ ID NO: 2275047 - RNA, 19 nt, Artificial Sequence
  Description of Artificial Sequence: Synthetic oligonucleotide
ucucucggcagaucugccg

SEQ ID NO: 2275048 - RNA, 19 nt, Artificial Sequence
  Description of Artificial Sequence: Synthetic oligonucleotide
cugaauuucgcagugcauc

SEQ ID NO: 2275049 - RNA, 19 nt, Artificial Sequence
  Description of Artificial Sequence: Synthetic oligonucleotide
uacacccagaacagaacca

SEQ ID NO: 2275050 - RNA, 19 nt, Artificial Sequence
  Description of Artificial Sequence: Synthetic oligonucleotide
uggagugacccauguaggc

SEQ ID NO: 2275051 - RNA, 19 nt, Artificial Sequence
  Description of Artificial Sequence: Synthetic oligonucleotide
cuagcaaggccuacagggc

SEQ ID NO: 2275052 - RNA, 19 nt, Artificial Sequence
  Description of Artificial Sequence: Synthetic oligonucleotide
gugccgauggaguaagucc

SEQ ID NO: 2275053 - RNA, 19 nt, Artificial Sequence
  Description of Artificial Sequence: Synthetic oligonucleotide
gcauccgugaucugaaagg

SEQ ID NO: 2275054 - RNA, 19 nt, Artificial Sequence
  Description of Artificial Sequence: Synthetic oligonucleotide
ucagaggagacacgcacau

SEQ ID NO: 2275055 - RNA, 19 nt, Artificial Sequence
  Description of Artificial Sequence: Synthetic oligonucleotide
aauuucgcagugcauccuu

SEQ ID NO: 2275056 - RNA, 19 nt, Artificial Sequence
  Description of Artificial Sequence: Synthetic oligonucleotide
agggugucuuugaugagcc

SEQ ID NO: 2275057 - RNA, 19 nt, Artificial Sequence
  Description of Artificial Sequence: Synthetic oligonucleotide
accugaauuucgcagugca

SEQ ID NO: 2275058 - RNA, 19 nt, Artificial Sequence
  Description of Artificial Sequence: Synthetic oligonucleotide
uguccacaccucccaaggg

SEQ ID NO: 2275059 - RNA, 19 nt, Artificial Sequence
  Description of Artificial Sequence: Synthetic oligonucleotide
ucgacaguucauccugcag

SEQ ID NO: 2275060 - RNA, 19 nt, Artificial Sequence
  Description of Artificial Sequence: Synthetic oligonucleotide
caagauccccgcaucagac

SEQ ID NO: 2275061 - RNA, 19 nt, Artificial Sequence
  Description of Artificial Sequence: Synthetic oligonucleotide
agugaaacuugcccgugcu

SEQ ID NO: 2275062 - RNA, 19 nt, Artificial Sequence
  Description of Artificial Sequence: Synthetic oligonucleotide
uguggagaggcuacaccca

SEQ ID NO: 2275063 - RNA, 19 nt, Artificial Sequence
  Description of Artificial Sequence: Synthetic oligonucleotide
ugggcagguacucgugccg

SEQ ID NO: 2275064 - RNA, 19 nt, Artificial Sequence
  Description of Artificial Sequence: Synthetic oligonucleotide
uccgaucgacaguucaucc

SEQ ID NO: 2275065 - RNA, 19 nt, Artificial Sequence
  Description of Artificial Sequence: Synthetic oligonucleotide
uagugaaacuugcccgugc

SEQ ID NO: 2275066 - RNA, 19 nt, Artificial Sequence
  Description of Artificial Sequence: Synthetic oligonucleotide
gauucuagagcuccaagau

SEQ ID NO: 2275067 - RNA, 19 nt, Artificial Sequence
  Description of Artificial Sequence: Synthetic oligonucleotide
gacacgcacauaugugaag

SEQ ID NO: 2275068 - RNA, 19 nt, Artificial Sequence
  Description of Artificial Sequence: Synthetic oligonucleotide
acugcgugggcaucuuggg

SEQ ID NO: 2275069 - RNA, 19 nt, Artificial Sequence
  Description of Artificial Sequence: Synthetic oligonucleotide
gacugcgugggcaucuugg

SEQ ID NO: 2275070 - RNA, 19 nt, Artificial Sequence
  Description of Artificial Sequence: Synthetic oligonucleotide
aggggagguguggagaggc

SEQ ID NO: 2275071 - RNA, 19 nt, Artificial Sequence
  Description of Artificial Sequence: Synthetic oligonucleotide
acuuccgaucgacaguuca

SEQ ID NO: 2275072 - RNA, 19 nt, Artificial Sequence
  Description of Artificial Sequence: Synthetic oligonucleotide
ucuagagcuccaagauccc

SEQ ID NO: 2275073 - RNA, 19 nt, Artificial Sequence
  Description of Artificial Sequence: Synthetic oligonucleotide
ugacuguccacaccuccca

SEQ ID NO: 2275074 - RNA, 19 nt, Artificial Sequence
  Description of Artificial Sequence: Synthetic oligonucleotide
accacaaaacaaggacacc

SEQ ID NO: 2275075 - RNA, 19 nt, Artificial Sequence
  Description of Artificial Sequence: Synthetic oligonucleotide
uacucgugccggcucauca

SEQ ID NO: 2275076 - RNA, 19 nt, Artificial Sequence
  Description of Artificial Sequence: Synthetic oligonucleotide
cuugcgcaaggcucggucc

SEQ ID NO: 2275077 - RNA, 19 nt, Artificial Sequence
  Description of Artificial Sequence: Synthetic oligonucleotide
acagaaccacugcaaaggu

SEQ ID NO: 2275078 - RNA, 19 nt, Artificial Sequence
  Description of Artificial Sequence: Synthetic oligonucleotide
aagauccccgcaucagacu

SEQ ID NO: 2275079 - RNA, 19 nt, Artificial Sequence
  Description of Artificial Sequence: Synthetic oligonucleotide
aacauccuggaugcccacg

SEQ ID NO: 2275080 - RNA, 19 nt, Artificial Sequence
  Description of Artificial Sequence: Synthetic oligonucleotide
caccaccugaauuucgcag

SEQ ID NO: 2275081 - RNA, 19 nt, Artificial Sequence
  Description of Artificial Sequence: Synthetic oligonucleotide
ccgguaaccacaaaacaag

SEQ ID NO: 2275082 - RNA, 19 nt, Artificial Sequence
  Description of Artificial Sequence: Synthetic oligonucleotide
cagugcauccuugaauucc

SEQ ID NO: 2275083 - RNA, 19 nt, Artificial Sequence
  Description of Artificial Sequence: Synthetic oligonucleotide
cagcacuuccgaucgacag

SEQ ID NO: 2275084 - RNA, 19 nt, Artificial Sequence
  Description of Artificial Sequence: Synthetic oligonucleotide
ugcacgucccgcaggcccg

SEQ ID NO: 2275085 - RNA, 19 nt, Artificial Sequence
  Description of Artificial Sequence: Synthetic oligonucleotide
acucgugccggcucaucac

SEQ ID NO: 2275086 - RNA, 19 nt, Artificial Sequence
  Description of Artificial Sequence: Synthetic oligonucleotide
uagagguagggcugcacgu

SEQ ID NO: 2275087 - RNA, 19 nt, Artificial Sequence
  Description of Artificial Sequence: Synthetic oligonucleotide
aucugaaaggaaaucuugu

SEQ ID NO: 2275088 - RNA, 19 nt, Artificial Sequence
  Description of Artificial Sequence: Synthetic oligonucleotide
aggccgguaaccacaaaac

SEQ ID NO: 2275089 - RNA, 19 nt, Artificial Sequence
  Description of Artificial Sequence: Synthetic oligonucleotide
cuucucucggcagaucugc

SEQ ID NO: 2275090 - RNA, 19 nt, Artificial Sequence
  Description of Artificial Sequence: Synthetic oligonucleotide
caucaccaccugaauuucg

SEQ ID NO: 2275091 - RNA, 19 nt, Artificial Sequence
  Description of Artificial Sequence: Synthetic oligonucleotide
acguuguccaccucugacu

SEQ ID NO: 2275092 - RNA, 19 nt, Artificial Sequence
  Description of Artificial Sequence: Synthetic oligonucleotide
uuucgcagugcauccuuga

SEQ ID NO: 2275093 - RNA, 19 nt, Artificial Sequence
  Description of Artificial Sequence: Synthetic oligonucleotide
auggagugacccauguagg

SEQ ID NO: 2275094 - RNA, 19 nt, Artificial Sequence
  Description of Artificial Sequence: Synthetic oligonucleotide
acacgcacauaugugaagu

SEQ ID NO: 2275095 - RNA, 19 nt, Artificial Sequence
  Description of Artificial Sequence: Synthetic oligonucleotide
uugggcagguacucgugcc

SEQ ID NO: 2275096 - RNA, 19 nt, Artificial Sequence
  Description of Artificial Sequence: Synthetic oligonucleotide
gauggaguaaguccccucu

SEQ ID NO: 2275097 - RNA, 19 nt, Artificial Sequence
  Description of Artificial Sequence: Synthetic oligonucleotide
ugaauuccccaacaaccuu

SEQ ID NO: 2275098 - RNA, 19 nt, Artificial Sequence
  Description of Artificial Sequence: Synthetic oligonucleotide
gaggccgguaaccacaaaa

SEQ ID NO: 2275099 - RNA, 19 nt, Artificial Sequence
  Description of Artificial Sequence: Synthetic oligonucleotide
uaccacgugcaccuugacu

SEQ ID NO: 2275100 - RNA, 19 nt, Artificial Sequence
  Description of Artificial Sequence: Synthetic oligonucleotide
aguucauccugcagccagc

SEQ ID NO: 2275101 - RNA, 19 nt, Artificial Sequence
  Description of Artificial Sequence: Synthetic oligonucleotide
aacacguuguccaccucug

SEQ ID NO: 2275102 - RNA, 19 nt, Artificial Sequence
  Description of Artificial Sequence: Synthetic oligonucleotide
auccuugaauuccccaaca

SEQ ID NO: 2275103 - RNA, 19 nt, Artificial Sequence
  Description of Artificial Sequence: Synthetic oligonucleotide
cagauucuagagcuccaag

SEQ ID NO: 2275104 - RNA, 19 nt, Artificial Sequence
  Description of Artificial Sequence: Synthetic oligonucleotide
gagaaccccaccaggggag

SEQ ID NO: 2275105 - RNA, 19 nt, Artificial Sequence
  Description of Artificial Sequence: Synthetic oligonucleotide
cuugggcagguacucgugc

SEQ ID NO: 2275106 - RNA, 19 nt, Artificial Sequence
  Description of Artificial Sequence: Synthetic oligonucleotide
ugaagucaaugaagucaca

SEQ ID NO: 2275107 - RNA, 19 nt, Artificial Sequence
  Description of Artificial Sequence: Synthetic oligonucleotide
agcacuuccgaucgacagu

SEQ ID NO: 2275108 - RNA, 19 nt, Artificial Sequence
  Description of Artificial Sequence: Synthetic oligonucleotide
ucccaagggaugcacucgu

SEQ ID NO: 2275109 - RNA, 19 nt, Artificial Sequence
  Description of Artificial Sequence: Synthetic oligonucleotide
cacguuguccaccucugac

SEQ ID NO: 2275110 - RNA, 19 nt, Artificial Sequence
  Description of Artificial Sequence: Synthetic oligonucleotide
aacuugcccgugcugcggu

SEQ ID NO: 2275111 - RNA, 19 nt, Artificial Sequence
  Description of Artificial Sequence: Synthetic oligonucleotide
aggccuacagggcaagggu

SEQ ID NO: 2275112 - RNA, 19 nt, Artificial Sequence
  Description of Artificial Sequence: Synthetic oligonucleotide
uugcgcaaggcucggucca

SEQ ID NO: 2275113 - RNA, 19 nt, Artificial Sequence
  Description of Artificial Sequence: Synthetic oligonucleotide
ggugucuuugaugagccug

SEQ ID NO: 2275114 - RNA, 19 nt, Artificial Sequence
  Description of Artificial Sequence: Synthetic oligonucleotide
cagaaccacugcaaaggug

SEQ ID NO: 2275115 - RNA, 19 nt, Artificial Sequence
  Description of Artificial Sequence: Synthetic oligonucleotide
uucgcagugcauccuugaa

SEQ ID NO: 2275116 - RNA, 19 nt, Artificial Sequence
  Description of Artificial Sequence: Synthetic oligonucleotide
cacugcaaagguggcaggg

SEQ ID NO: 2275117 - RNA, 19 nt, Artificial Sequence
  Description of Artificial Sequence: Synthetic oligonucleotide
acgcacauaugugaaguca

SEQ ID NO: 2275118 - RNA, 19 nt, Artificial Sequence
  Description of Artificial Sequence: Synthetic oligonucleotide
ggcauccgugaucugaaag

SEQ ID NO: 2275119 - RNA, 19 nt, Artificial Sequence
  Description of Artificial Sequence: Synthetic oligonucleotide
cacaccucccaagggaugc

SEQ ID NO: 2275120 - RNA, 19 nt, Artificial Sequence
  Description of Artificial Sequence: Synthetic oligonucleotide
cugcacgucccgcaggccc

SEQ ID NO: 2275121 - RNA, 19 nt, Artificial Sequence
  Description of Artificial Sequence: Synthetic oligonucleotide
agcuccaagauccccgcau

SEQ ID NO: 2275122 - RNA, 19 nt, Artificial Sequence
  Description of Artificial Sequence: Synthetic oligonucleotide
agucucaucaaggguccag

SEQ ID NO: 2275123 - RNA, 19 nt, Artificial Sequence
  Description of Artificial Sequence: Synthetic oligonucleotide
caaugaagucacagucaac

SEQ ID NO: 2275124 - RNA, 19 nt, Artificial Sequence
  Description of Artificial Sequence: Synthetic oligonucleotide
uucucucggcagaucugcc

SEQ ID NO: 2275125 - RNA, 19 nt, Artificial Sequence
  Description of Artificial Sequence: Synthetic oligonucleotide
ggacaucuggccuagccca

SEQ ID NO: 2275126 - RNA, 19 nt, Artificial Sequence
  Description of Artificial Sequence: Synthetic oligonucleotide
auccccgcaucagacuccc

SEQ ID NO: 2275127 - RNA, 19 nt, Artificial Sequence
  Description of Artificial Sequence: Synthetic oligonucleotide
gaucgacaguucauccugc

SEQ ID NO: 2275128 - RNA, 19 nt, Artificial Sequence
  Description of Artificial Sequence: Synthetic oligonucleotide
uccagcacuuccgaucgac

SEQ ID NO: 2275129 - RNA, 19 nt, Artificial Sequence
  Description of Artificial Sequence: Synthetic oligonucleotide
ucugacugcgugggcaucu

SEQ ID NO: 2275130 - RNA, 19 nt, Artificial Sequence
  Description of Artificial Sequence: Synthetic oligonucleotide
gacccauguaggccucuag

SEQ ID NO: 2275131 - RNA, 19 nt, Artificial Sequence
  Description of Artificial Sequence: Synthetic oligonucleotide
aucgacaguucauccugca

SEQ ID NO: 2275132 - RNA, 19 nt, Artificial Sequence
  Description of Artificial Sequence: Synthetic oligonucleotide
ccuugaauuccccaacaac

SEQ ID NO: 2275133 - RNA, 19 nt, Artificial Sequence
  Description of Artificial Sequence: Synthetic oligonucleotide
uuccgaucgacaguucauc

SEQ ID NO: 2275134 - RNA, 19 nt, Artificial Sequence
  Description of Artificial Sequence: Synthetic oligonucleotide
cucacccaccuucucucgg

SEQ ID NO: 2275135 - RNA, 19 nt, Artificial Sequence
  Description of Artificial Sequence: Synthetic oligonucleotide
cugcaaagguggcaggguc

SEQ ID NO: 2275136 - RNA, 19 nt, Artificial Sequence
  Description of Artificial Sequence: Synthetic oligonucleotide
auuccccaacaaccuugcg

SEQ ID NO: 2275137 - RNA, 19 nt, Artificial Sequence
  Description of Artificial Sequence: Synthetic oligonucleotide
guguagaaagagaacccca

SEQ ID NO: 2275138 - RNA, 19 nt, Artificial Sequence
  Description of Artificial Sequence: Synthetic oligonucleotide
accggagcaaaggcaaaag

SEQ ID NO: 2275139 - RNA, 19 nt, Artificial Sequence
  Description of Artificial Sequence: Synthetic oligonucleotide
agggcaagggugucuuuga

SEQ ID NO: 2275140 - RNA, 19 nt, Artificial Sequence
  Description of Artificial Sequence: Synthetic oligonucleotide
gaguaaguccccucuuucu

SEQ ID NO: 2275141 - RNA, 19 nt, Artificial Sequence
  Description of Artificial Sequence: Synthetic oligonucleotide
acgugcaccuugacugucc

SEQ ID NO: 2275142 - RNA, 19 nt, Artificial Sequence
  Description of Artificial Sequence: Synthetic oligonucleotide
uggagaggcuacacccaga

SEQ ID NO: 2275143 - RNA, 19 nt, Artificial Sequence
  Description of Artificial Sequence: Synthetic oligonucleotide
gucuuugaugagccugcgc

SEQ ID NO: 2275144 - RNA, 19 nt, Artificial Sequence
  Description of Artificial Sequence: Synthetic oligonucleotide
ucggcagaucugccgcucc

SEQ ID NO: 2275145 - RNA, 19 nt, Artificial Sequence
  Description of Artificial Sequence: Synthetic oligonucleotide
gugaaacuugcccgugcug

SEQ ID NO: 2275146 - RNA, 19 nt, Artificial Sequence
  Description of Artificial Sequence: Synthetic oligonucleotide
ggcaagggugucuuugaug

SEQ ID NO: 2275147 - RNA, 19 nt, Artificial Sequence
  Description of Artificial Sequence: Synthetic oligonucleotide
caucauggagugacccaug

SEQ ID NO: 2275148 - RNA, 19 nt, Artificial Sequence
  Description of Artificial Sequence: Synthetic oligonucleotide
aucuggccuagcccaucac

SEQ ID NO: 2275149 - RNA, 19 nt, Artificial Sequence
  Description of Artificial Sequence: Synthetic oligonucleotide
uagggcugcacgucccgca

SEQ ID NO: 2275150 - RNA, 19 nt, Artificial Sequence
  Description of Artificial Sequence: Synthetic oligonucleotide
cgugcugcgguguaggagc

SEQ ID NO: 2275151 - RNA, 19 nt, Artificial Sequence
  Description of Artificial Sequence: Synthetic oligonucleotide
ggagacacgcacauaugug

SEQ ID NO: 2275152 - RNA, 19 nt, Artificial Sequence
  Description of Artificial Sequence: Synthetic oligonucleotide
aaccuugcgcaaggcucgg

SEQ ID NO: 2275153 - RNA, 19 nt, Artificial Sequence
  Description of Artificial Sequence: Synthetic oligonucleotide
guagugaaacuugcccgug

SEQ ID NO: 2275154 - RNA, 19 nt, Artificial Sequence
  Description of Artificial Sequence: Synthetic oligonucleotide
caagggugucuuugaugag

SEQ ID NO: 2275155 - RNA, 19 nt, Artificial Sequence
  Description of Artificial Sequence: Synthetic oligonucleotide
accucugacugcgugggca

SEQ ID NO: 2275156 - RNA, 19 nt, Artificial Sequence
  Description of Artificial Sequence: Synthetic oligonucleotide
cauccgugaucugaaagga

SEQ ID NO: 2275157 - RNA, 19 nt, Artificial Sequence
  Description of Artificial Sequence: Synthetic oligonucleotide
agcaccggagcaaaggcaa

SEQ ID NO: 2275158 - RNA, 19 nt, Artificial Sequence
  Description of Artificial Sequence: Synthetic oligonucleotide
cacgcacauaugugaaguc

SEQ ID NO: 2275159 - RNA, 19 nt, Artificial Sequence
  Description of Artificial Sequence: Synthetic oligonucleotide
agucaacauccuggaugcc

SEQ ID NO: 2275160 - RNA, 19 nt, Artificial Sequence
  Description of Artificial Sequence: Synthetic oligonucleotide
acagagcuucucacccacc

SEQ ID NO: 2275161 - RNA, 19 nt, Artificial Sequence
  Description of Artificial Sequence: Synthetic oligonucleotide
gaaccacugcaaagguggc

SEQ ID NO: 2275162 - RNA, 19 nt, Artificial Sequence
  Description of Artificial Sequence: Synthetic oligonucleotide
ugacugcgugggcaucuug

SEQ ID NO: 2275163 - RNA, 19 nt, Artificial Sequence
  Description of Artificial Sequence: Synthetic oligonucleotide
agguacucgugccggcuca

SEQ ID NO: 2275164 - RNA, 19 nt, Artificial Sequence
  Description of Artificial Sequence: Synthetic oligonucleotide
aaccccaccaggggaggug

SEQ ID NO: 2275165 - RNA, 19 nt, Artificial Sequence
  Description of Artificial Sequence: Synthetic oligonucleotide
uguaggccucuagcaaggc

SEQ ID NO: 2275166 - RNA, 19 nt, Artificial Sequence
  Description of Artificial Sequence: Synthetic oligonucleotide
cagggcaagggugucuuug

SEQ ID NO: 2275167 - RNA, 19 nt, Artificial Sequence
  Description of Artificial Sequence: Synthetic oligonucleotide
caccuugacuguccacacc

SEQ ID NO: 2275168 - RNA, 19 nt, Artificial Sequence
  Description of Artificial Sequence: Synthetic oligonucleotide
ugguggugacugaggugcc

SEQ ID NO: 2275169 - RNA, 19 nt, Artificial Sequence
  Description of Artificial Sequence: Synthetic oligonucleotide
agaaccccaccaggggagg

SEQ ID NO: 2275170 - RNA, 19 nt, Artificial Sequence
  Description of Artificial Sequence: Synthetic oligonucleotide
guagaauuccaaggacauc

SEQ ID NO: 2275171 - RNA, 19 nt, Artificial Sequence
  Description of Artificial Sequence: Synthetic oligonucleotide
aggcccgugucaaacacgu

SEQ ID NO: 2275172 - RNA, 19 nt, Artificial Sequence
  Description of Artificial Sequence: Synthetic oligonucleotide
ggagcuucucuucaagucu

SEQ ID NO: 2275173 - RNA, 19 nt, Artificial Sequence
  Description of Artificial Sequence: Synthetic oligonucleotide
gauccccgcaucagacucc

SEQ ID NO: 2275174 - RNA, 19 nt, Artificial Sequence
  Description of Artificial Sequence: Synthetic oligonucleotide
cgguaaccacaaaacaagg

SEQ ID NO: 2275175 - RNA, 19 nt, Artificial Sequence
  Description of Artificial Sequence: Synthetic oligonucleotide
gagaggcuacacccagaac

SEQ ID NO: 2275176 - RNA, 19 nt, Artificial Sequence
  Description of Artificial Sequence: Synthetic oligonucleotide
gguagggcugcacgucccg

SEQ ID NO: 2275177 - RNA, 19 nt, Artificial Sequence
  Description of Artificial Sequence: Synthetic oligonucleotide
acggugccgauggaguaag

SEQ ID NO: 2275178 - RNA, 19 nt, Artificial Sequence
  Description of Artificial Sequence: Synthetic oligonucleotide
agccugcgcaugguggugg

SEQ ID NO: 2275179 - RNA, 19 nt, Artificial Sequence
  Description of Artificial Sequence: Synthetic oligonucleotide
auggaguaaguccccucuu

SEQ ID NO: 2275180 - RNA, 19 nt, Artificial Sequence
  Description of Artificial Sequence: Synthetic oligonucleotide
ucucggcagaucugccgcu

SEQ ID NO: 2275181 - RNA, 19 nt, Artificial Sequence
  Description of Artificial Sequence: Synthetic oligonucleotide
acaucuggccuagcccauc

SEQ ID NO: 2275182 - RNA, 19 nt, Artificial Sequence
  Description of Artificial Sequence: Synthetic oligonucleotide
accugccgucccuccaccg

SEQ ID NO: 2275183 - RNA, 19 nt, Artificial Sequence
  Description of Artificial Sequence: Synthetic oligonucleotide
aagucacagucaacauccu

SEQ ID NO: 2275184 - RNA, 19 nt, Artificial Sequence
  Description of Artificial Sequence: Synthetic oligonucleotide
cgaucgacaguucauccug

SEQ ID NO: 2275185 - RNA, 19 nt, Artificial Sequence
  Description of Artificial Sequence: Synthetic oligonucleotide
ucaaggguccagggcagau

SEQ ID NO: 2275186 - RNA, 19 nt, Artificial Sequence
  Description of Artificial Sequence: Synthetic oligonucleotide
gucagaggagacacgcaca

SEQ ID NO: 2275187 - RNA, 19 nt, Artificial Sequence
  Description of Artificial Sequence: Synthetic oligonucleotide
agugacccauguaggccuc

SEQ ID NO: 2275188 - RNA, 19 nt, Artificial Sequence
  Description of Artificial Sequence: Synthetic oligonucleotide
ggaagcuucaccccaccua

SEQ ID NO: 2275189 - RNA, 19 nt, Artificial Sequence
  Description of Artificial Sequence: Synthetic oligonucleotide
agggcagauucuagagcuc

SEQ ID NO: 2275190 - RNA, 19 nt, Artificial Sequence
  Description of Artificial Sequence: Synthetic oligonucleotide
ggccgguaaccacaaaaca

SEQ ID NO: 2275191 - RNA, 19 nt, Artificial Sequence
  Description of Artificial Sequence: Synthetic oligonucleotide
ggccuagcccaucaccacc

SEQ ID NO: 2275192 - RNA, 19 nt, Artificial Sequence
  Description of Artificial Sequence: Synthetic oligonucleotide
cugccgucccuccaccgac

SEQ ID NO: 2275193 - RNA, 19 nt, Artificial Sequence
  Description of Artificial Sequence: Synthetic oligonucleotide
gccgguaaccacaaaacaa

SEQ ID NO: 2275194 - RNA, 19 nt, Artificial Sequence
  Description of Artificial Sequence: Synthetic oligonucleotide
cuccaccgacacuuccagc

SEQ ID NO: 2275195 - RNA, 19 nt, Artificial Sequence
  Description of Artificial Sequence: Synthetic oligonucleotide
caccugaauuucgcagugc

SEQ ID NO: 2275196 - RNA, 19 nt, Artificial Sequence
  Description of Artificial Sequence: Synthetic oligonucleotide
ugcgcaaggcucgguccag

SEQ ID NO: 2275197 - RNA, 19 nt, Artificial Sequence
  Description of Artificial Sequence: Synthetic oligonucleotide
cgugucaaacacguugucc

SEQ ID NO: 2275198 - RNA, 19 nt, Artificial Sequence
  Description of Artificial Sequence: Synthetic oligonucleotide
ggugacugaggugcccagg

SEQ ID NO: 2275199 - RNA, 19 nt, Artificial Sequence
  Description of Artificial Sequence: Synthetic oligonucleotide
cgucagaggagacacgcac

SEQ ID NO: 2275200 - RNA, 19 nt, Artificial Sequence
  Description of Artificial Sequence: Synthetic oligonucleotide
cugcgguguaggagcacug

SEQ ID NO: 2275201 - RNA, 19 nt, Artificial Sequence
  Description of Artificial Sequence: Synthetic oligonucleotide
cguuguccaccucugacug

SEQ ID NO: 2275202 - RNA, 19 nt, Artificial Sequence
  Description of Artificial Sequence: Synthetic oligonucleotide
guucauccugcagccagca

SEQ ID NO: 2275203 - RNA, 19 nt, Artificial Sequence
  Description of Artificial Sequence: Synthetic oligonucleotide
ugccgucccuccaccgaca

SEQ ID NO: 2275204 - RNA, 19 nt, Artificial Sequence
  Description of Artificial Sequence: Synthetic oligonucleotide
caaggccuacagggcaagg

SEQ ID NO: 2275205 - RNA, 19 nt, Artificial Sequence
  Description of Artificial Sequence: Synthetic oligonucleotide
ggugccgauggaguaaguc

SEQ ID NO: 2275206 - RNA, 19 nt, Artificial Sequence
  Description of Artificial Sequence: Synthetic oligonucleotide
ggagguguggagaggcuac

SEQ ID NO: 2275207 - RNA, 19 nt, Artificial Sequence
  Description of Artificial Sequence: Synthetic oligonucleotide
ggccagggcuaccacgugc

SEQ ID NO: 2275208 - RNA, 19 nt, Artificial Sequence
  Description of Artificial Sequence: Synthetic oligonucleotide
agggaugcacucgucugaa

SEQ ID NO: 2275209 - RNA, 19 nt, Artificial Sequence
  Description of Artificial Sequence: Synthetic oligonucleotide
ccccgcaucagacucccag

SEQ ID NO: 2275210 - RNA, 19 nt, Artificial Sequence
  Description of Artificial Sequence: Synthetic oligonucleotide
ccgcaucagacucccagag

SEQ ID NO: 2275211 - RNA, 19 nt, Artificial Sequence
  Description of Artificial Sequence: Synthetic oligonucleotide
gcuacacccagaacagaac

SEQ ID NO: 2275212 - RNA, 19 nt, Artificial Sequence
  Description of Artificial Sequence: Synthetic oligonucleotide
uuccagcacuuccgaucga

SEQ ID NO: 2275213 - RNA, 19 nt, Artificial Sequence
  Description of Artificial Sequence: Synthetic oligonucleotide
gaggugcccagggcauccg

SEQ ID NO: 2275214 - RNA, 19 nt, Artificial Sequence
  Description of Artificial Sequence: Synthetic oligonucleotide
gaauuucgcagugcauccu

SEQ ID NO: 2275215 - RNA, 19 nt, Artificial Sequence
  Description of Artificial Sequence: Synthetic oligonucleotide
agggcauccgugaucugaa

SEQ ID NO: 2275216 - RNA, 19 nt, Artificial Sequence
  Description of Artificial Sequence: Synthetic oligonucleotide
aaaaggccagcgagacuuu

SEQ ID NO: 2275217 - RNA, 19 nt, Artificial Sequence
  Description of Artificial Sequence: Synthetic oligonucleotide
ccaccugaauuucgcagug

SEQ ID NO: 2275218 - RNA, 19 nt, Artificial Sequence
  Description of Artificial Sequence: Synthetic oligonucleotide
gggcagguacucgugccgg

SEQ ID NO: 2275219 - RNA, 19 nt, Artificial Sequence
  Description of Artificial Sequence: Synthetic oligonucleotide
ccucccaagggaugcacuc

SEQ ID NO: 2275220 - RNA, 19 nt, Artificial Sequence
  Description of Artificial Sequence: Synthetic oligonucleotide
gcaccuugacuguccacac

SEQ ID NO: 2275221 - RNA, 19 nt, Artificial Sequence
  Description of Artificial Sequence: Synthetic oligonucleotide
cuccaccugccgucccucc

SEQ ID NO: 2275222 - RNA, 19 nt, Artificial Sequence
  Description of Artificial Sequence: Synthetic oligonucleotide
gcaaagguggcagggucac

SEQ ID NO: 2275223 - RNA, 19 nt, Artificial Sequence
  Description of Artificial Sequence: Synthetic oligonucleotide
cuaccacgugcaccuugac

SEQ ID NO: 2275224 - RNA, 19 nt, Artificial Sequence
  Description of Artificial Sequence: Synthetic oligonucleotide
aggaaaucuuguagaggua

SEQ ID NO: 2275225 - RNA, 19 nt, Artificial Sequence
  Description of Artificial Sequence: Synthetic oligonucleotide
cuuccgaucgacaguucau

SEQ ID NO: 2275226 - RNA, 19 nt, Artificial Sequence
  Description of Artificial Sequence: Synthetic oligonucleotide
gguccagggcagauucuag

SEQ ID NO: 2275227 - RNA, 19 nt, Artificial Sequence
  Description of Artificial Sequence: Synthetic oligonucleotide
acaaggacaccaggagcuu

SEQ ID NO: 2275228 - RNA, 19 nt, Artificial Sequence
  Description of Artificial Sequence: Synthetic oligonucleotide
cccaacaaccuugcgcaag

SEQ ID NO: 2275229 - RNA, 19 nt, Artificial Sequence
  Description of Artificial Sequence: Synthetic oligonucleotide
auccgugaucugaaaggaa

SEQ ID NO: 2275230 - RNA, 19 nt, Artificial Sequence
  Description of Artificial Sequence: Synthetic oligonucleotide
ucccgcaggcccgugucaa

SEQ ID NO: 2275231 - RNA, 19 nt, Artificial Sequence
  Description of Artificial Sequence: Synthetic oligonucleotide
gcgugggcaucuugggcag

SEQ ID NO: 2275232 - RNA, 19 nt, Artificial Sequence
  Description of Artificial Sequence: Synthetic oligonucleotide
aucaaggguccagggcaga

SEQ ID NO: 2275233 - RNA, 19 nt, Artificial Sequence
  Description of Artificial Sequence: Synthetic oligonucleotide
ugacccauguaggccucua

SEQ ID NO: 2275234 - RNA, 19 nt, Artificial Sequence
  Description of Artificial Sequence: Synthetic oligonucleotide
ugcccgugcugcgguguag

SEQ ID NO: 2275235 - RNA, 19 nt, Artificial Sequence
  Description of Artificial Sequence: Synthetic oligonucleotide
ccaagauccccgcaucaga

SEQ ID NO: 2275236 - RNA, 19 nt, Artificial Sequence
  Description of Artificial Sequence: Synthetic oligonucleotide
ccaaggacaucuggccuag

SEQ ID NO: 2275237 - RNA, 19 nt, Artificial Sequence
  Description of Artificial Sequence: Synthetic oligonucleotide
gguggugacugaggugccc

SEQ ID NO: 2275238 - RNA, 19 nt, Artificial Sequence
  Description of Artificial Sequence: Synthetic oligonucleotide
cgugaucugaaaggaaauc

SEQ ID NO: 2275239 - RNA, 19 nt, Artificial Sequence
  Description of Artificial Sequence: Synthetic oligonucleotide
uugcccgugcugcggugua

SEQ ID NO: 2275240 - RNA, 19 nt, Artificial Sequence
  Description of Artificial Sequence: Synthetic oligonucleotide
caccucccaagggaugcac

SEQ ID NO: 2275241 - RNA, 19 nt, Artificial Sequence
  Description of Artificial Sequence: Synthetic oligonucleotide
ccacugcaaagguggcagg

SEQ ID NO: 2275242 - RNA, 19 nt, Artificial Sequence
  Description of Artificial Sequence: Synthetic oligonucleotide
gcuaccacgugcaccuuga

SEQ ID NO: 2275243 - RNA, 19 nt, Artificial Sequence
  Description of Artificial Sequence: Synthetic oligonucleotide
ccauguaggccucuagcaa

SEQ ID NO: 2275244 - RNA, 19 nt, Artificial Sequence
  Description of Artificial Sequence: Synthetic oligonucleotide
cagaggccgguaaccacaa

SEQ ID NO: 2275245 - RNA, 19 nt, Artificial Sequence
  Description of Artificial Sequence: Synthetic oligonucleotide
gugcaccuugacuguccac

SEQ ID NO: 2275246 - RNA, 19 nt, Artificial Sequence
  Description of Artificial Sequence: Synthetic oligonucleotide
aggcuacacccagaacaga

SEQ ID NO: 2275247 - RNA, 19 nt, Artificial Sequence
  Description of Artificial Sequence: Synthetic oligonucleotide
accucccaagggaugcacu

SEQ ID NO: 2275248 - RNA, 19 nt, Artificial Sequence
  Description of Artificial Sequence: Synthetic oligonucleotide
cacuuccgaucgacaguuc

SEQ ID NO: 2275249 - RNA, 19 nt, Artificial Sequence
  Description of Artificial Sequence: Synthetic oligonucleotide
cacgugcaccuugacuguc

SEQ ID NO: 2275250 - RNA, 19 nt, Artificial Sequence
  Description of Artificial Sequence: Synthetic oligonucleotide
caccucugacugcgugggc

SEQ ID NO: 2275251 - RNA, 19 nt, Artificial Sequence
  Description of Artificial Sequence: Synthetic oligonucleotide
acaccucccaagggaugca

SEQ ID NO: 2275252 - RNA, 19 nt, Artificial Sequence
  Description of Artificial Sequence: Synthetic oligonucleotide
acgucccgcaggcccgugu

SEQ ID NO: 2275253 - RNA, 19 nt, Artificial Sequence
  Description of Artificial Sequence: Synthetic oligonucleotide
cgcacauaugugaagucaa

SEQ ID NO: 2275254 - RNA, 19 nt, Artificial Sequence
  Description of Artificial Sequence: Synthetic oligonucleotide
gcaaggccuacagggcaag

SEQ ID NO: 2275255 - RNA, 19 nt, Artificial Sequence
  Description of Artificial Sequence: Synthetic oligonucleotide
caccggagcaaaggcaaaa

SEQ ID NO: 2275256 - RNA, 19 nt, Artificial Sequence
  Description of Artificial Sequence: Synthetic oligonucleotide
cacccaccuucucucggca

SEQ ID NO: 2275257 - RNA, 19 nt, Artificial Sequence
  Description of Artificial Sequence: Synthetic oligonucleotide
gcaaggcucgguccagcuc

SEQ ID NO: 2275258 - RNA, 19 nt, Artificial Sequence
  Description of Artificial Sequence: Synthetic oligonucleotide
gcucgucagaggagacacg

SEQ ID NO: 2275259 - RNA, 19 nt, Artificial Sequence
  Description of Artificial Sequence: Synthetic oligonucleotide
cgcaucagacucccagagc

SEQ ID NO: 2275260 - RNA, 19 nt, Artificial Sequence
  Description of Artificial Sequence: Synthetic oligonucleotide
cggcucaucaccuccacaa

SEQ ID NO: 2275261 - RNA, 19 nt, Artificial Sequence
  Description of Artificial Sequence: Synthetic oligonucleotide
ugcugcgguguaggagcac

SEQ ID NO: 2275262 - RNA, 19 nt, Artificial Sequence
  Description of Artificial Sequence: Synthetic oligonucleotide
gcccgugcugcgguguagg

SEQ ID NO: 2275263 - RNA, 19 nt, Artificial Sequence
  Description of Artificial Sequence: Synthetic oligonucleotide
cagcucgucagaggagaca

SEQ ID NO: 2275264 - RNA, 19 nt, Artificial Sequence
  Description of Artificial Sequence: Synthetic oligonucleotide
agaggccgguaaccacaaa

SEQ ID NO: 2275265 - RNA, 19 nt, Artificial Sequence
  Description of Artificial Sequence: Synthetic oligonucleotide
caaggacaucuggccuagc

SEQ ID NO: 2275266 - RNA, 19 nt, Artificial Sequence
  Description of Artificial Sequence: Synthetic oligonucleotide
cccaccaggggaggugugg

SEQ ID NO: 2275267 - RNA, 19 nt, Artificial Sequence
  Description of Artificial Sequence: Synthetic oligonucleotide
ccagcucgucagaggagac

SEQ ID NO: 2275268 - RNA, 19 nt, Artificial Sequence
  Description of Artificial Sequence: Synthetic oligonucleotide
ugcccacggugccgaugga

SEQ ID NO: 2275269 - RNA, 19 nt, Artificial Sequence
  Description of Artificial Sequence: Synthetic oligonucleotide
ccuugacuguccacaccuc

SEQ ID NO: 2275270 - RNA, 19 nt, Artificial Sequence
  Description of Artificial Sequence: Synthetic oligonucleotide
ggcagauucuagagcucca

SEQ ID NO: 2275271 - RNA, 19 nt, Artificial Sequence
  Description of Artificial Sequence: Synthetic oligonucleotide
cacggugccgauggaguaa

SEQ ID NO: 2275272 - RNA, 19 nt, Artificial Sequence
  Description of Artificial Sequence: Synthetic oligonucleotide
gcccacggugccgauggag

SEQ ID NO: 2275273 - RNA, 19 nt, Artificial Sequence
  Description of Artificial Sequence: Synthetic oligonucleotide
gccucuagcaaggccuaca

SEQ ID NO: 2275274 - RNA, 19 nt, Artificial Sequence
  Description of Artificial Sequence: Synthetic oligonucleotide
cccgugucaaacacguugu

SEQ ID NO: 2275275 - RNA, 19 nt, Artificial Sequence
  Description of Artificial Sequence: Synthetic oligonucleotide
gucccgcaggcccguguca

SEQ ID NO: 2275276 - RNA, 19 nt, Artificial Sequence
  Description of Artificial Sequence: Synthetic oligonucleotide
caccgacacuuccagcacu

SEQ ID NO: 2275277 - RNA, 19 nt, Artificial Sequence
  Description of Artificial Sequence: Synthetic oligonucleotide
uccccgcaucagacuccca

SEQ ID NO: 2275278 - RNA, 19 nt, Artificial Sequence
  Description of Artificial Sequence: Synthetic oligonucleotide
cgauggaguaaguccccuc

SEQ ID NO: 2275279 - RNA, 19 nt, Artificial Sequence
  Description of Artificial Sequence: Synthetic oligonucleotide
ccagcacuuccgaucgaca

SEQ ID NO: 2275280 - RNA, 19 nt, Artificial Sequence
  Description of Artificial Sequence: Synthetic oligonucleotide
guacucgugccggcucauc

SEQ ID NO: 2275281 - RNA, 19 nt, Artificial Sequence
  Description of Artificial Sequence: Synthetic oligonucleotide
cccgcaucagacucccaga

SEQ ID NO: 2275282 - RNA, 19 nt, Artificial Sequence
  Description of Artificial Sequence: Synthetic oligonucleotide
ccgugcugcgguguaggag

SEQ ID NO: 2275283 - RNA, 19 nt, Artificial Sequence
  Description of Artificial Sequence: Synthetic oligonucleotide
gacaucuggccuagcccau

SEQ ID NO: 2275284 - RNA, 19 nt, Artificial Sequence
  Description of Artificial Sequence: Synthetic oligonucleotide
ccgugucaaacacguuguc

SEQ ID NO: 2275285 - RNA, 19 nt, Artificial Sequence
  Description of Artificial Sequence: Synthetic oligonucleotide
gugcugcgguguaggagca

SEQ ID NO: 2275286 - RNA, 19 nt, Artificial Sequence
  Description of Artificial Sequence: Synthetic oligonucleotide
aggccucuagcaaggccua

SEQ ID NO: 2275287 - RNA, 19 nt, Artificial Sequence
  Description of Artificial Sequence: Synthetic oligonucleotide
gcacuuccgaucgacaguu

SEQ ID NO: 2275288 - RNA, 19 nt, Artificial Sequence
  Description of Artificial Sequence: Synthetic oligonucleotide
cccaagggaugcacucguc

SEQ ID NO: 2275289 - RNA, 19 nt, Artificial Sequence
  Description of Artificial Sequence: Synthetic oligonucleotide
ggcaaaagacaggaagcuu

SEQ ID NO: 2275290 - RNA, 19 nt, Artificial Sequence
  Description of Artificial Sequence: Synthetic oligonucleotide
accuugcgcaaggcucggu

SEQ ID NO: 2275291 - RNA, 19 nt, Artificial Sequence
  Description of Artificial Sequence: Synthetic oligonucleotide
gccgucccuccaccgacac

SEQ ID NO: 2275292 - RNA, 19 nt, Artificial Sequence
  Description of Artificial Sequence: Synthetic oligonucleotide
cuacagggcaagggugucu

SEQ ID NO: 2275293 - RNA, 19 nt, Artificial Sequence
  Description of Artificial Sequence: Synthetic oligonucleotide
cacagucaacauccuggau

SEQ ID NO: 2275294 - RNA, 19 nt, Artificial Sequence
  Description of Artificial Sequence: Synthetic oligonucleotide
cauccuggaugcccacggu

SEQ ID NO: 2275295 - RNA, 19 nt, Artificial Sequence
  Description of Artificial Sequence: Synthetic oligonucleotide
ccgaucgacaguucauccu

SEQ ID NO: 2275296 - RNA, 19 nt, Artificial Sequence
  Description of Artificial Sequence: Synthetic oligonucleotide
gcugcgguguaggagcacu

SEQ ID NO: 2275297 - RNA, 19 nt, Artificial Sequence
  Description of Artificial Sequence: Synthetic oligonucleotide
ccuagcccaucaccaccug

SEQ ID NO: 2275298 - RNA, 19 nt, Artificial Sequence
  Description of Artificial Sequence: Synthetic oligonucleotide
gccuacagggcaagggugu

SEQ ID NO: 2275299 - RNA, 19 nt, Artificial Sequence
  Description of Artificial Sequence: Synthetic oligonucleotide
cacuuccagcacuuccgau

SEQ ID NO: 2275300 - RNA, 19 nt, Artificial Sequence
  Description of Artificial Sequence: Synthetic oligonucleotide
gaaccccaccaggggaggu

SEQ ID NO: 2275301 - RNA, 19 nt, Artificial Sequence
  Description of Artificial Sequence: Synthetic oligonucleotide
gggaugcacucgucugaaa

SEQ ID NO: 2275302 - RNA, 19 nt, Artificial Sequence
  Description of Artificial Sequence: Synthetic oligonucleotide
ccgcaggcccgugucaaac

SEQ ID NO: 2275303 - RNA, 19 nt, Artificial Sequence
  Description of Artificial Sequence: Synthetic oligonucleotide
gcccaucaccaccugaauu

SEQ ID NO: 2275304 - RNA, 19 nt, Artificial Sequence
  Description of Artificial Sequence: Synthetic oligonucleotide
ggcucaucaccuccacaau

SEQ ID NO: 2275305 - RNA, 19 nt, Artificial Sequence
  Description of Artificial Sequence: Synthetic oligonucleotide
ccgugaucugaaaggaaau

SEQ ID NO: 2275306 - RNA, 19 nt, Artificial Sequence
  Description of Artificial Sequence: Synthetic oligonucleotide
ccugccgucccuccaccga

SEQ ID NO: 2275307 - RNA, 19 nt, Artificial Sequence
  Description of Artificial Sequence: Synthetic oligonucleotide
ccaucauggagugacccau

SEQ ID NO: 2275308 - RNA, 19 nt, Artificial Sequence
  Description of Artificial Sequence: Synthetic oligonucleotide
ccagggcuaccacgugcac

SEQ ID NO: 2275309 - RNA, 19 nt, Artificial Sequence
  Description of Artificial Sequence: Synthetic oligonucleotide
cagagccaucauggaguga

SEQ ID NO: 2275310 - RNA, 19 nt, Artificial Sequence
  Description of Artificial Sequence: Synthetic oligonucleotide
gggcauccgugaucugaaa

SEQ ID NO: 2275311 - RNA, 19 nt, Artificial Sequence
  Description of Artificial Sequence: Synthetic oligonucleotide
ccccucuuucuuguaguga

SEQ ID NO: 2275312 - RNA, 19 nt, Artificial Sequence
  Description of Artificial Sequence: Synthetic oligonucleotide
cgugcaccuugacugucca

SEQ ID NO: 2275313 - RNA, 19 nt, Artificial Sequence
  Description of Artificial Sequence: Synthetic oligonucleotide
caaggguccagggcagauu

SEQ ID NO: 2275314 - RNA, 19 nt, Artificial Sequence
  Description of Artificial Sequence: Synthetic oligonucleotide
gugacccauguaggccucu

SEQ ID NO: 2275315 - RNA, 19 nt, Artificial Sequence
  Description of Artificial Sequence: Synthetic oligonucleotide
ccggcucaucaccuccaca

SEQ ID NO: 2275316 - RNA, 19 nt, Artificial Sequence
  Description of Artificial Sequence: Synthetic oligonucleotide
ccgacacuuccagcacuuc

SEQ ID NO: 2275317 - RNA, 19 nt, Artificial Sequence
  Description of Artificial Sequence: Synthetic oligonucleotide
cacgucccgcaggcccgug

SEQ ID NO: 2275318 - RNA, 19 nt, Artificial Sequence
  Description of Artificial Sequence: Synthetic oligonucleotide
gcaccggagcaaaggcaaa

SEQ ID NO: 2275319 - RNA, 19 nt, Artificial Sequence
  Description of Artificial Sequence: Synthetic oligonucleotide
cgucccuccaccgacacuu

SEQ ID NO: 2275320 - RNA, 19 nt, Artificial Sequence
  Description of Artificial Sequence: Synthetic oligonucleotide
ccccaccaggggaggugug

SEQ ID NO: 2275321 - RNA, 19 nt, Artificial Sequence
  Description of Artificial Sequence: Synthetic oligonucleotide
cccgugcugcgguguagga

SEQ ID NO: 2275322 - RNA, 19 nt, Artificial Sequence
  Description of Artificial Sequence: Synthetic oligonucleotide
gguacucgugccggcucau

SEQ ID NO: 2275323 - RNA, 19 nt, Artificial Sequence
  Description of Artificial Sequence: Synthetic oligonucleotide
cugacugcgugggcaucuu

SEQ ID NO: 2275324 - RNA, 19 nt, Artificial Sequence
  Description of Artificial Sequence: Synthetic oligonucleotide
gccugcgcauggugguggu

SEQ ID NO: 2275325 - RNA, 19 nt, Artificial Sequence
  Description of Artificial Sequence: Synthetic oligonucleotide
gcgcauggugguggugacu

SEQ ID NO: 2275326 - RNA, 19 nt, Artificial Sequence
  Description of Artificial Sequence: Synthetic oligonucleotide
cggcagaucugccgcuccu

SEQ ID NO: 2275327 - RNA, 19 nt, Artificial Sequence
  Description of Artificial Sequence: Synthetic oligonucleotide
gcacgucccgcaggcccgu

SEQ ID NO: 2275328 - RNA, 19 nt, Artificial Sequence
  Description of Artificial Sequence: Synthetic oligonucleotide
ccgucccuccaccgacacu

SEQ ID NO: 2275329 - RNA, 19 nt, Artificial Sequence
  Description of Artificial Sequence: Synthetic oligonucleotide
ggcccgugucaaacacguu

SEQ ID NO: 2275330 - RNA, 19 nt, Artificial Sequence
  Description of Artificial Sequence: Synthetic oligonucleotide
gaagccaaaacccuuuucg

SEQ ID NO: 2275331 - RNA, 19 nt, Artificial Sequence
  Description of Artificial Sequence: Synthetic oligonucleotide
uacaacaucagaucguagg

SEQ ID NO: 2275332 - RNA, 19 nt, Artificial Sequence
  Description of Artificial Sequence: Synthetic oligonucleotide
agcaugaagaaccuugucg

SEQ ID NO: 2275333 - RNA, 19 nt, Artificial Sequence
  Description of Artificial Sequence: Synthetic oligonucleotide
aaauugacacgaauugucc

SEQ ID NO: 2275334 - RNA, 19 nt, Artificial Sequence
  Description of Artificial Sequence: Synthetic oligonucleotide
uuuggaugcggccagcugg

SEQ ID NO: 2275335 - RNA, 19 nt, Artificial Sequence
  Description of Artificial Sequence: Synthetic oligonucleotide
acaccugaggauuugaccg

SEQ ID NO: 2275336 - RNA, 19 nt, Artificial Sequence
  Description of Artificial Sequence: Synthetic oligonucleotide
gaauuguccguccaaagag

SEQ ID NO: 2275337 - RNA, 19 nt, Artificial Sequence
  Description of Artificial Sequence: Synthetic oligonucleotide
aaacuggucuggaagagcc

SEQ ID NO: 2275338 - RNA, 19 nt, Artificial Sequence
  Description of Artificial Sequence: Synthetic oligonucleotide
aauucucauugguuuggcc

SEQ ID NO: 2275339 - RNA, 19 nt, Artificial Sequence
  Description of Artificial Sequence: Synthetic oligonucleotide
ucauucauguugucgauag

SEQ ID NO: 2275340 - RNA, 19 nt, Artificial Sequence
  Description of Artificial Sequence: Synthetic oligonucleotide
aaguuuucaucaucgaacu

SEQ ID NO: 2275341 - RNA, 19 nt, Artificial Sequence
  Description of Artificial Sequence: Synthetic oligonucleotide
ucugugaugucuccaaaag

SEQ ID NO: 2275342 - RNA, 19 nt, Artificial Sequence
  Description of Artificial Sequence: Synthetic oligonucleotide
ucuucaaccagucaucauc

SEQ ID NO: 2275343 - RNA, 19 nt, Artificial Sequence
  Description of Artificial Sequence: Synthetic oligonucleotide
uacagcacacgcuuggugg

SEQ ID NO: 2275344 - RNA, 19 nt, Artificial Sequence
  Description of Artificial Sequence: Synthetic oligonucleotide
ucagauucauucauguugu

SEQ ID NO: 2275345 - RNA, 19 nt, Artificial Sequence
  Description of Artificial Sequence: Synthetic oligonucleotide
aaacccuuuucgugggugc

SEQ ID NO: 2275346 - RNA, 19 nt, Artificial Sequence
  Description of Artificial Sequence: Synthetic oligonucleotide
ugugguuugugaaaucacc

SEQ ID NO: 2275347 - RNA, 19 nt, Artificial Sequence
  Description of Artificial Sequence: Synthetic oligonucleotide
uguguguuugagaaugaag

SEQ ID NO: 2275348 - RNA, 19 nt, Artificial Sequence
  Description of Artificial Sequence: Synthetic oligonucleotide
gaaaucaccgcccuggcac

SEQ ID NO: 2275349 - RNA, 19 nt, Artificial Sequence
  Description of Artificial Sequence: Synthetic oligonucleotide
ugucauggguacaacauca

SEQ ID NO: 2275350 - RNA, 19 nt, Artificial Sequence
  Description of Artificial Sequence: Synthetic oligonucleotide
uuuucgugggugcacaggc

SEQ ID NO: 2275351 - RNA, 19 nt, Artificial Sequence
  Description of Artificial Sequence: Synthetic oligonucleotide
uccauaaauggacuugccc

SEQ ID NO: 2275352 - RNA, 19 nt, Artificial Sequence
  Description of Artificial Sequence: Synthetic oligonucleotide
aacggaaauucucugcugu

SEQ ID NO: 2275353 - RNA, 19 nt, Artificial Sequence
  Description of Artificial Sequence: Synthetic oligonucleotide
auggguacaacaucagauc

SEQ ID NO: 2275354 - RNA, 19 nt, Artificial Sequence
  Description of Artificial Sequence: Synthetic oligonucleotide
caacaaaagcaaauccucg

SEQ ID NO: 2275355 - RNA, 19 nt, Artificial Sequence
  Description of Artificial Sequence: Synthetic oligonucleotide
aaccagucaucaucugacc

SEQ ID NO: 2275356 - RNA, 19 nt, Artificial Sequence
  Description of Artificial Sequence: Synthetic oligonucleotide
uguuugagaaugaaguuuu

SEQ ID NO: 2275357 - RNA, 19 nt, Artificial Sequence
  Description of Artificial Sequence: Synthetic oligonucleotide
auucucauugguuuggcca

SEQ ID NO: 2275358 - RNA, 19 nt, Artificial Sequence
  Description of Artificial Sequence: Synthetic oligonucleotide
augaagaaccuugucgucc

SEQ ID NO: 2275359 - RNA, 19 nt, Artificial Sequence
  Description of Artificial Sequence: Synthetic oligonucleotide
aagcaucacauguacucuc

SEQ ID NO: 2275360 - RNA, 19 nt, Artificial Sequence
  Description of Artificial Sequence: Synthetic oligonucleotide
ugaaguuuucaucaucgaa

SEQ ID NO: 2275361 - RNA, 19 nt, Artificial Sequence
  Description of Artificial Sequence: Synthetic oligonucleotide
uucauaauccagaggaauc

SEQ ID NO: 2275362 - RNA, 19 nt, Artificial Sequence
  Description of Artificial Sequence: Synthetic oligonucleotide
aaccuugucguccaccucu

SEQ ID NO: 2275363 - RNA, 19 nt, Artificial Sequence
  Description of Artificial Sequence: Synthetic oligonucleotide
agcgaagcaucacauguac

SEQ ID NO: 2275364 - RNA, 19 nt, Artificial Sequence
  Description of Artificial Sequence: Synthetic oligonucleotide
caaaagggauaaaagcagc

SEQ ID NO: 2275365 - RNA, 19 nt, Artificial Sequence
  Description of Artificial Sequence: Synthetic oligonucleotide
cauugguuuggccaaauug

SEQ ID NO: 2275366 - RNA, 19 nt, Artificial Sequence
  Description of Artificial Sequence: Synthetic oligonucleotide
ucagcgaugaucaccuucu

SEQ ID NO: 2275367 - RNA, 19 nt, Artificial Sequence
  Description of Artificial Sequence: Synthetic oligonucleotide
ucauguugucgauagcugc

SEQ ID NO: 2275368 - RNA, 19 nt, Artificial Sequence
  Description of Artificial Sequence: Synthetic oligonucleotide
gaccaaacuggucuggaag

SEQ ID NO: 2275369 - RNA, 19 nt, Artificial Sequence
  Description of Artificial Sequence: Synthetic oligonucleotide
agauucauucauguugucg

SEQ ID NO: 2275370 - RNA, 19 nt, Artificial Sequence
  Description of Artificial Sequence: Synthetic oligonucleotide
ugguguuugggccagaauu

SEQ ID NO: 2275371 - RNA, 19 nt, Artificial Sequence
  Description of Artificial Sequence: Synthetic oligonucleotide
ugccaacucaaauucaaca

SEQ ID NO: 2275372 - RNA, 19 nt, Artificial Sequence
  Description of Artificial Sequence: Synthetic oligonucleotide
ucugccguaggacauccag

SEQ ID NO: 2275373 - RNA, 19 nt, Artificial Sequence
  Description of Artificial Sequence: Synthetic oligonucleotide
uuuccauaaauggacuugc

SEQ ID NO: 2275374 - RNA, 19 nt, Artificial Sequence
  Description of Artificial Sequence: Synthetic oligonucleotide
aaauccucggugcuuuucu

SEQ ID NO: 2275375 - RNA, 19 nt, Artificial Sequence
  Description of Artificial Sequence: Synthetic oligonucleotide
ugaauaucugugaugucuc

SEQ ID NO: 2275376 - RNA, 19 nt, Artificial Sequence
  Description of Artificial Sequence: Synthetic oligonucleotide
acagucagcgaugaucacc

SEQ ID NO: 2275377 - RNA, 19 nt, Artificial Sequence
  Description of Artificial Sequence: Synthetic oligonucleotide
uuggugguagccaucuugc

SEQ ID NO: 2275378 - RNA, 19 nt, Artificial Sequence
  Description of Artificial Sequence: Synthetic oligonucleotide
agcgaugaucaccuucugc

SEQ ID NO: 2275379 - RNA, 19 nt, Artificial Sequence
  Description of Artificial Sequence: Synthetic oligonucleotide
uuuuguagugggcucuccc

SEQ ID NO: 2275380 - RNA, 19 nt, Artificial Sequence
  Description of Artificial Sequence: Synthetic oligonucleotide
uucauguugucgauagcug

SEQ ID NO: 2275381 - RNA, 19 nt, Artificial Sequence
  Description of Artificial Sequence: Synthetic oligonucleotide
agaaaacuucuucaaccag

SEQ ID NO: 2275382 - RNA, 19 nt, Artificial Sequence
  Description of Artificial Sequence: Synthetic oligonucleotide
guacucuccacagucagcg

SEQ ID NO: 2275383 - RNA, 19 nt, Artificial Sequence
  Description of Artificial Sequence: Synthetic oligonucleotide
uuugagaaugaaguuuuca

SEQ ID NO: 2275384 - RNA, 19 nt, Artificial Sequence
  Description of Artificial Sequence: Synthetic oligonucleotide
ccauaaauggacuugcccc

SEQ ID NO: 2275385 - RNA, 19 nt, Artificial Sequence
  Description of Artificial Sequence: Synthetic oligonucleotide
auugacacgaauuguccgu

SEQ ID NO: 2275386 - RNA, 19 nt, Artificial Sequence
  Description of Artificial Sequence: Synthetic oligonucleotide
uacaccugaggauuugacc

SEQ ID NO: 2275387 - RNA, 19 nt, Artificial Sequence
  Description of Artificial Sequence: Synthetic oligonucleotide
uuugugaaaucaccgcccu

SEQ ID NO: 2275388 - RNA, 19 nt, Artificial Sequence
  Description of Artificial Sequence: Synthetic oligonucleotide
ucugccaacucaaauucaa

SEQ ID NO: 2275389 - RNA, 19 nt, Artificial Sequence
  Description of Artificial Sequence: Synthetic oligonucleotide
aagaaccuugucguccacc

SEQ ID NO: 2275390 - RNA, 19 nt, Artificial Sequence
  Description of Artificial Sequence: Synthetic oligonucleotide
ccagaaaacuucuucaacc

SEQ ID NO: 2275391 - RNA, 19 nt, Artificial Sequence
  Description of Artificial Sequence: Synthetic oligonucleotide
aagccaaaacccuuuucgu

SEQ ID NO: 2275392 - RNA, 19 nt, Artificial Sequence
  Description of Artificial Sequence: Synthetic oligonucleotide
ugguuugugaaaucaccgc

SEQ ID NO: 2275393 - RNA, 19 nt, Artificial Sequence
  Description of Artificial Sequence: Synthetic oligonucleotide
aucacauguacucuccaca

SEQ ID NO: 2275394 - RNA, 19 nt, Artificial Sequence
  Description of Artificial Sequence: Synthetic oligonucleotide
ucuuacagaggugggagcc

SEQ ID NO: 2275395 - RNA, 19 nt, Artificial Sequence
  Description of Artificial Sequence: Synthetic oligonucleotide
ugccguaggacauccaggc

SEQ ID NO: 2275396 - RNA, 19 nt, Artificial Sequence
  Description of Artificial Sequence: Synthetic oligonucleotide
uguccguccaaagaguuca

SEQ ID NO: 2275397 - RNA, 19 nt, Artificial Sequence
  Description of Artificial Sequence: Synthetic oligonucleotide
uuucauaauccagaggaau

SEQ ID NO: 2275398 - RNA, 19 nt, Artificial Sequence
  Description of Artificial Sequence: Synthetic oligonucleotide
gaagagcccucuuuaauuc

SEQ ID NO: 2275399 - RNA, 19 nt, Artificial Sequence
  Description of Artificial Sequence: Synthetic oligonucleotide
aauaucugugaugucucca

SEQ ID NO: 2275400 - RNA, 19 nt, Artificial Sequence
  Description of Artificial Sequence: Synthetic oligonucleotide
ugaagaaccuugucgucca

SEQ ID NO: 2275401 - RNA, 19 nt, Artificial Sequence
  Description of Artificial Sequence: Synthetic oligonucleotide
uaauccagaggaaucugaa

SEQ ID NO: 2275402 - RNA, 19 nt, Artificial Sequence
  Description of Artificial Sequence: Synthetic oligonucleotide
uuuguagugggcucucccu

SEQ ID NO: 2275403 - RNA, 19 nt, Artificial Sequence
  Description of Artificial Sequence: Synthetic oligonucleotide
auguacucuccacagucag

SEQ ID NO: 2275404 - RNA, 19 nt, Artificial Sequence
  Description of Artificial Sequence: Synthetic oligonucleotide
ucauggguacaacaucaga

SEQ ID NO: 2275405 - RNA, 19 nt, Artificial Sequence
  Description of Artificial Sequence: Synthetic oligonucleotide
ucguaggagcauuuggaug

SEQ ID NO: 2275406 - RNA, 19 nt, Artificial Sequence
  Description of Artificial Sequence: Synthetic oligonucleotide
caucaucgaacuucuuucc

SEQ ID NO: 2275407 - RNA, 19 nt, Artificial Sequence
  Description of Artificial Sequence: Synthetic oligonucleotide
ccaaaagggauaaaagcag

SEQ ID NO: 2275408 - RNA, 19 nt, Artificial Sequence
  Description of Artificial Sequence: Synthetic oligonucleotide
aaaacccuuuucgugggug

SEQ ID NO: 2275409 - RNA, 19 nt, Artificial Sequence
  Description of Artificial Sequence: Synthetic oligonucleotide
ggauaaaagcagcaugaag

SEQ ID NO: 2275410 - RNA, 19 nt, Artificial Sequence
  Description of Artificial Sequence: Synthetic oligonucleotide
uuugggccagaauuggcca

SEQ ID NO: 2275411 - RNA, 19 nt, Artificial Sequence
  Description of Artificial Sequence: Synthetic oligonucleotide
gccaaauugacacgaauug

SEQ ID NO: 2275412 - RNA, 19 nt, Artificial Sequence
  Description of Artificial Sequence: Synthetic oligonucleotide
agaaccuugucguccaccu

SEQ ID NO: 2275413 - RNA, 19 nt, Artificial Sequence
  Description of Artificial Sequence: Synthetic oligonucleotide
agccaaaacccuuuucgug

SEQ ID NO: 2275414 - RNA, 19 nt, Artificial Sequence
  Description of Artificial Sequence: Synthetic oligonucleotide
acguacagcacacgcuugg

SEQ ID NO: 2275415 - RNA, 19 nt, Artificial Sequence
  Description of Artificial Sequence: Synthetic oligonucleotide
uccagaggaaucugaauau

SEQ ID NO: 2275416 - RNA, 19 nt, Artificial Sequence
  Description of Artificial Sequence: Synthetic oligonucleotide
gaauuggccauggagagaa

SEQ ID NO: 2275417 - RNA, 19 nt, Artificial Sequence
  Description of Artificial Sequence: Synthetic oligonucleotide
agcagcaugaagaaccuug

SEQ ID NO: 2275418 - RNA, 19 nt, Artificial Sequence
  Description of Artificial Sequence: Synthetic oligonucleotide
agggauaaaagcagcauga

SEQ ID NO: 2275419 - RNA, 19 nt, Artificial Sequence
  Description of Artificial Sequence: Synthetic oligonucleotide
acuucuucaaccagucauc

SEQ ID NO: 2275420 - RNA, 19 nt, Artificial Sequence
  Description of Artificial Sequence: Synthetic oligonucleotide
uucucauugguuuggccaa

SEQ ID NO: 2275421 - RNA, 19 nt, Artificial Sequence
  Description of Artificial Sequence: Synthetic oligonucleotide
gaugaugcgguggaagcug

SEQ ID NO: 2275422 - RNA, 19 nt, Artificial Sequence
  Description of Artificial Sequence: Synthetic oligonucleotide
ucaaucugccguaggacau

SEQ ID NO: 2275423 - RNA, 19 nt, Artificial Sequence
  Description of Artificial Sequence: Synthetic oligonucleotide
uguacucuccacagucagc

SEQ ID NO: 2275424 - RNA, 19 nt, Artificial Sequence
  Description of Artificial Sequence: Synthetic oligonucleotide
ugucgauagcugcugcagc

SEQ ID NO: 2275425 - RNA, 19 nt, Artificial Sequence
  Description of Artificial Sequence: Synthetic oligonucleotide
uuccauaaauggacuugcc

SEQ ID NO: 2275426 - RNA, 19 nt, Artificial Sequence
  Description of Artificial Sequence: Synthetic oligonucleotide
aagagcccucuuuaauucu

SEQ ID NO: 2275427 - RNA, 19 nt, Artificial Sequence
  Description of Artificial Sequence: Synthetic oligonucleotide
aggacauccaggccuucgg

SEQ ID NO: 2275428 - RNA, 19 nt, Artificial Sequence
  Description of Artificial Sequence: Synthetic oligonucleotide
aauuguccguccaaagagu

SEQ ID NO: 2275429 - RNA, 19 nt, Artificial Sequence
  Description of Artificial Sequence: Synthetic oligonucleotide
acgaauuguccguccaaag

SEQ ID NO: 2275430 - RNA, 19 nt, Artificial Sequence
  Description of Artificial Sequence: Synthetic oligonucleotide
uguugucgauagcugcugc

SEQ ID NO: 2275431 - RNA, 19 nt, Artificial Sequence
  Description of Artificial Sequence: Synthetic oligonucleotide
aauccucggugcuuuucug

SEQ ID NO: 2275432 - RNA, 19 nt, Artificial Sequence
  Description of Artificial Sequence: Synthetic oligonucleotide
uugucgauagcugcugcag

SEQ ID NO: 2275433 - RNA, 19 nt, Artificial Sequence
  Description of Artificial Sequence: Synthetic oligonucleotide
uccucugccaacucaaauu

SEQ ID NO: 2275434 - RNA, 19 nt, Artificial Sequence
  Description of Artificial Sequence: Synthetic oligonucleotide
gaucguaggagcauuugga

SEQ ID NO: 2275435 - RNA, 19 nt, Artificial Sequence
  Description of Artificial Sequence: Synthetic oligonucleotide
acggaaauucucugcuguc

SEQ ID NO: 2275436 - RNA, 19 nt, Artificial Sequence
  Description of Artificial Sequence: Synthetic oligonucleotide
agaaugaaguuuucaucau

SEQ ID NO: 2275437 - RNA, 19 nt, Artificial Sequence
  Description of Artificial Sequence: Synthetic oligonucleotide
aggagcauuuggaugcggc

SEQ ID NO: 2275438 - RNA, 19 nt, Artificial Sequence
  Description of Artificial Sequence: Synthetic oligonucleotide
ugaaaucaccgcccuggca

SEQ ID NO: 2275439 - RNA, 19 nt, Artificial Sequence
  Description of Artificial Sequence: Synthetic oligonucleotide
accgcccuggcacaugaac

SEQ ID NO: 2275440 - RNA, 19 nt, Artificial Sequence
  Description of Artificial Sequence: Synthetic oligonucleotide
aaaucaccgcccuggcaca

SEQ ID NO: 2275441 - RNA, 19 nt, Artificial Sequence
  Description of Artificial Sequence: Synthetic oligonucleotide
guguguuugagaaugaagu

SEQ ID NO: 2275442 - RNA, 19 nt, Artificial Sequence
  Description of Artificial Sequence: Synthetic oligonucleotide
uuggaugcggccagcuggc

SEQ ID NO: 2275443 - RNA, 19 nt, Artificial Sequence
  Description of Artificial Sequence: Synthetic oligonucleotide
uucuagagucuucccagaa

SEQ ID NO: 2275444 - RNA, 19 nt, Artificial Sequence
  Description of Artificial Sequence: Synthetic oligonucleotide
augcgguggaagcugcuuc

SEQ ID NO: 2275445 - RNA, 19 nt, Artificial Sequence
  Description of Artificial Sequence: Synthetic oligonucleotide
aacuggucuggaagagccc

SEQ ID NO: 2275446 - RNA, 19 nt, Artificial Sequence
  Description of Artificial Sequence: Synthetic oligonucleotide
uucgugggugcacaggcaa

SEQ ID NO: 2275447 - RNA, 19 nt, Artificial Sequence
  Description of Artificial Sequence: Synthetic oligonucleotide
caucacauguacucuccac

SEQ ID NO: 2275448 - RNA, 19 nt, Artificial Sequence
  Description of Artificial Sequence: Synthetic oligonucleotide
cucaaucugccguaggaca

SEQ ID NO: 2275449 - RNA, 19 nt, Artificial Sequence
  Description of Artificial Sequence: Synthetic oligonucleotide
guucccaaucuugaugucc

SEQ ID NO: 2275450 - RNA, 19 nt, Artificial Sequence
  Description of Artificial Sequence: Synthetic oligonucleotide
uagagucuucccagaaaac

SEQ ID NO: 2275451 - RNA, 19 nt, Artificial Sequence
  Description of Artificial Sequence: Synthetic oligonucleotide
acaggucaggaagaacugg

SEQ ID NO: 2275452 - RNA, 19 nt, Artificial Sequence
  Description of Artificial Sequence: Synthetic oligonucleotide
aucguaggagcauuuggau

SEQ ID NO: 2275453 - RNA, 19 nt, Artificial Sequence
  Description of Artificial Sequence: Synthetic oligonucleotide
ugucguccaccucuucugc

SEQ ID NO: 2275454 - RNA, 19 nt, Artificial Sequence
  Description of Artificial Sequence: Synthetic oligonucleotide
ucggugaucuccccaaaua

SEQ ID NO: 2275455 - RNA, 19 nt, Artificial Sequence
  Description of Artificial Sequence: Synthetic oligonucleotide
cuuugggagguucgggccc

SEQ ID NO: 2275456 - RNA, 19 nt, Artificial Sequence
  Description of Artificial Sequence: Synthetic oligonucleotide
uguagugggcucucccucu

SEQ ID NO: 2275457 - RNA, 19 nt, Artificial Sequence
  Description of Artificial Sequence: Synthetic oligonucleotide
ugaucuccccaaauaccac

SEQ ID NO: 2275458 - RNA, 19 nt, Artificial Sequence
  Description of Artificial Sequence: Synthetic oligonucleotide
uuguagugggcucucccuc

SEQ ID NO: 2275459 - RNA, 19 nt, Artificial Sequence
  Description of Artificial Sequence: Synthetic oligonucleotide
agcccacccacguacagca

SEQ ID NO: 2275460 - RNA, 19 nt, Artificial Sequence
  Description of Artificial Sequence: Synthetic oligonucleotide
caacaucagaucguaggag

SEQ ID NO: 2275461 - RNA, 19 nt, Artificial Sequence
  Description of Artificial Sequence: Synthetic oligonucleotide
cugccguaggacauccagg

SEQ ID NO: 2275462 - RNA, 19 nt, Artificial Sequence
  Description of Artificial Sequence: Synthetic oligonucleotide
gugaucuccccaaauacca

SEQ ID NO: 2275463 - RNA, 19 nt, Artificial Sequence
  Description of Artificial Sequence: Synthetic oligonucleotide
caucugaccaaacuggucu

SEQ ID NO: 2275464 - RNA, 19 nt, Artificial Sequence
  Description of Artificial Sequence: Synthetic oligonucleotide
ggaaucugaauaucuguga

SEQ ID NO: 2275465 - RNA, 19 nt, Artificial Sequence
  Description of Artificial Sequence: Synthetic oligonucleotide
auuuggaugcggccagcug

SEQ ID NO: 2275466 - RNA, 19 nt, Artificial Sequence
  Description of Artificial Sequence: Synthetic oligonucleotide
guguuugggccagaauugg

SEQ ID NO: 2275467 - RNA, 19 nt, Artificial Sequence
  Description of Artificial Sequence: Synthetic oligonucleotide
cauggguacaacaucagau

SEQ ID NO: 2275468 - RNA, 19 nt, Artificial Sequence
  Description of Artificial Sequence: Synthetic oligonucleotide
cacaggucaggaagaacug

SEQ ID NO: 2275469 - RNA, 19 nt, Artificial Sequence
  Description of Artificial Sequence: Synthetic oligonucleotide
gucgauagcugcugcagca

SEQ ID NO: 2275470 - RNA, 19 nt, Artificial Sequence
  Description of Artificial Sequence: Synthetic oligonucleotide
cugaauaucugugaugucu

SEQ ID NO: 2275471 - RNA, 19 nt, Artificial Sequence
  Description of Artificial Sequence: Synthetic oligonucleotide
uguacaccugaggauuuga

SEQ ID NO: 2275472 - RNA, 19 nt, Artificial Sequence
  Description of Artificial Sequence: Synthetic oligonucleotide
cuuuucgugggugcacagg

SEQ ID NO: 2275473 - RNA, 19 nt, Artificial Sequence
  Description of Artificial Sequence: Synthetic oligonucleotide
cuuacagaggugggagccg

SEQ ID NO: 2275474 - RNA, 19 nt, Artificial Sequence
  Description of Artificial Sequence: Synthetic oligonucleotide
uugugaaaucaccgcccug

SEQ ID NO: 2275475 - RNA, 19 nt, Artificial Sequence
  Description of Artificial Sequence: Synthetic oligonucleotide
gacacgaauuguccgucca

SEQ ID NO: 2275476 - RNA, 19 nt, Artificial Sequence
  Description of Artificial Sequence: Synthetic oligonucleotide
uggccaaauugacacgaau

SEQ ID NO: 2275477 - RNA, 19 nt, Artificial Sequence
  Description of Artificial Sequence: Synthetic oligonucleotide
cugucauggguacaacauc

SEQ ID NO: 2275478 - RNA, 19 nt, Artificial Sequence
  Description of Artificial Sequence: Synthetic oligonucleotide
agagcccucuuuaauucuc

SEQ ID NO: 2275479 - RNA, 19 nt, Artificial Sequence
  Description of Artificial Sequence: Synthetic oligonucleotide
ccagaauuggccauggaga

SEQ ID NO: 2275480 - RNA, 19 nt, Artificial Sequence
  Description of Artificial Sequence: Synthetic oligonucleotide
ucuugucacaggucaggaa

SEQ ID NO: 2275481 - RNA, 19 nt, Artificial Sequence
  Description of Artificial Sequence: Synthetic oligonucleotide
ugagccucaaucugccgua

SEQ ID NO: 2275482 - RNA, 19 nt, Artificial Sequence
  Description of Artificial Sequence: Synthetic oligonucleotide
ugaggauuugaccgugcuu

SEQ ID NO: 2275483 - RNA, 19 nt, Artificial Sequence
  Description of Artificial Sequence: Synthetic oligonucleotide
gaugucuccaaaagggaua

SEQ ID NO: 2275484 - RNA, 19 nt, Artificial Sequence
  Description of Artificial Sequence: Synthetic oligonucleotide
agcuggcuuguucccaauc

SEQ ID NO: 2275485 - RNA, 19 nt, Artificial Sequence
  Description of Artificial Sequence: Synthetic oligonucleotide
cucggugcuuuucuguuuc

SEQ ID NO: 2275486 - RNA, 19 nt, Artificial Sequence
  Description of Artificial Sequence: Synthetic oligonucleotide
uucaaccagucaucaucug

SEQ ID NO: 2275487 - RNA, 19 nt, Artificial Sequence
  Description of Artificial Sequence: Synthetic oligonucleotide
caacggaaauucucugcug

SEQ ID NO: 2275488 - RNA, 19 nt, Artificial Sequence
  Description of Artificial Sequence: Synthetic oligonucleotide
gaggauuugaccgugcuuu

SEQ ID NO: 2275489 - RNA, 19 nt, Artificial Sequence
  Description of Artificial Sequence: Synthetic oligonucleotide
augaugcgguggaagcugc

SEQ ID NO: 2275490 - RNA, 19 nt, Artificial Sequence
  Description of Artificial Sequence: Synthetic oligonucleotide
uucggugaucuccccaaau

SEQ ID NO: 2275491 - RNA, 19 nt, Artificial Sequence
  Description of Artificial Sequence: Synthetic oligonucleotide
ggugaucuccccaaauacc

SEQ ID NO: 2275492 - RNA, 19 nt, Artificial Sequence
  Description of Artificial Sequence: Synthetic oligonucleotide
cgaagcaucacauguacuc

SEQ ID NO: 2275493 - RNA, 19 nt, Artificial Sequence
  Description of Artificial Sequence: Synthetic oligonucleotide
cauucauguugucgauagc

SEQ ID NO: 2275494 - RNA, 19 nt, Artificial Sequence
  Description of Artificial Sequence: Synthetic oligonucleotide
ucagaucguaggagcauuu

SEQ ID NO: 2275495 - RNA, 19 nt, Artificial Sequence
  Description of Artificial Sequence: Synthetic oligonucleotide
ggagcauuuggaugcggcc

SEQ ID NO: 2275496 - RNA, 19 nt, Artificial Sequence
  Description of Artificial Sequence: Synthetic oligonucleotide
ugaccaaacuggucuggaa

SEQ ID NO: 2275497 - RNA, 19 nt, Artificial Sequence
  Description of Artificial Sequence: Synthetic oligonucleotide
ugguccuguguguuugaga

SEQ ID NO: 2275498 - RNA, 19 nt, Artificial Sequence
  Description of Artificial Sequence: Synthetic oligonucleotide
gagcauuuggaugcggcca

SEQ ID NO: 2275499 - RNA, 19 nt, Artificial Sequence
  Description of Artificial Sequence: Synthetic oligonucleotide
ugugccguugugguuugug

SEQ ID NO: 2275500 - RNA, 19 nt, Artificial Sequence
  Description of Artificial Sequence: Synthetic oligonucleotide
uuguccguccaaagaguuc

SEQ ID NO: 2275501 - RNA, 19 nt, Artificial Sequence
  Description of Artificial Sequence: Synthetic oligonucleotide
agaggugggagccgagcga

SEQ ID NO: 2275502 - RNA, 19 nt, Artificial Sequence
  Description of Artificial Sequence: Synthetic oligonucleotide
ugggugcacaggcaacgga

SEQ ID NO: 2275503 - RNA, 19 nt, Artificial Sequence
  Description of Artificial Sequence: Synthetic oligonucleotide
guugucgauagcugcugca

SEQ ID NO: 2275504 - RNA, 19 nt, Artificial Sequence
  Description of Artificial Sequence: Synthetic oligonucleotide
agccgagcgaagcaucaca

SEQ ID NO: 2275505 - RNA, 19 nt, Artificial Sequence
  Description of Artificial Sequence: Synthetic oligonucleotide
auccucggugcuuuucugu

SEQ ID NO: 2275506 - RNA, 19 nt, Artificial Sequence
  Description of Artificial Sequence: Synthetic oligonucleotide
gcaugaagaaccuugucgu

SEQ ID NO: 2275507 - RNA, 19 nt, Artificial Sequence
  Description of Artificial Sequence: Synthetic oligonucleotide
uggaagcugcuucccuuga

SEQ ID NO: 2275508 - RNA, 19 nt, Artificial Sequence
  Description of Artificial Sequence: Synthetic oligonucleotide
gugaaaucaccgcccuggc

SEQ ID NO: 2275509 - RNA, 19 nt, Artificial Sequence
  Description of Artificial Sequence: Synthetic oligonucleotide
ccaaaacccuuuucguggg

SEQ ID NO: 2275510 - RNA, 19 nt, Artificial Sequence
  Description of Artificial Sequence: Synthetic oligonucleotide
ucauugguuuggccaaauu

SEQ ID NO: 2275511 - RNA, 19 nt, Artificial Sequence
  Description of Artificial Sequence: Synthetic oligonucleotide
augucuccaaaagggauaa

SEQ ID NO: 2275512 - RNA, 19 nt, Artificial Sequence
  Description of Artificial Sequence: Synthetic oligonucleotide
cagaggaaucugaauaucu

SEQ ID NO: 2275513 - RNA, 19 nt, Artificial Sequence
  Description of Artificial Sequence: Synthetic oligonucleotide
guaggagcauuuggaugcg

SEQ ID NO: 2275514 - RNA, 19 nt, Artificial Sequence
  Description of Artificial Sequence: Synthetic oligonucleotide
auguugucgauagcugcug

SEQ ID NO: 2275515 - RNA, 19 nt, Artificial Sequence
  Description of Artificial Sequence: Synthetic oligonucleotide
gucauggguacaacaucag

SEQ ID NO: 2275516 - RNA, 19 nt, Artificial Sequence
  Description of Artificial Sequence: Synthetic oligonucleotide
aacccuuuucgugggugca

SEQ ID NO: 2275517 - RNA, 19 nt, Artificial Sequence
  Description of Artificial Sequence: Synthetic oligonucleotide
gaagcaucacauguacucu

SEQ ID NO: 2275518 - RNA, 19 nt, Artificial Sequence
  Description of Artificial Sequence: Synthetic oligonucleotide
ugcacaggcaacggaaauu

SEQ ID NO: 2275519 - RNA, 19 nt, Artificial Sequence
  Description of Artificial Sequence: Synthetic oligonucleotide
gagguucgggcccuucuuc

SEQ ID NO: 2275520 - RNA, 19 nt, Artificial Sequence
  Description of Artificial Sequence: Synthetic oligonucleotide
gagaaggccugguccugug

SEQ ID NO: 2275521 - RNA, 19 nt, Artificial Sequence
  Description of Artificial Sequence: Synthetic oligonucleotide
uccucggugcuuuucuguu

SEQ ID NO: 2275522 - RNA, 19 nt, Artificial Sequence
  Description of Artificial Sequence: Synthetic oligonucleotide
uaggagcauuuggaugcgg

SEQ ID NO: 2275523 - RNA, 19 nt, Artificial Sequence
  Description of Artificial Sequence: Synthetic oligonucleotide
acacgaauuguccguccaa

SEQ ID NO: 2275524 - RNA, 19 nt, Artificial Sequence
  Description of Artificial Sequence: Synthetic oligonucleotide
gcuuugggagguucgggcc

SEQ ID NO: 2275525 - RNA, 19 nt, Artificial Sequence
  Description of Artificial Sequence: Synthetic oligonucleotide
uugguguuugggccagaau

SEQ ID NO: 2275526 - RNA, 19 nt, Artificial Sequence
  Description of Artificial Sequence: Synthetic oligonucleotide
cagucagcgaugaucaccu

SEQ ID NO: 2275527 - RNA, 19 nt, Artificial Sequence
  Description of Artificial Sequence: Synthetic oligonucleotide
cauguugucgauagcugcu

SEQ ID NO: 2275528 - RNA, 19 nt, Artificial Sequence
  Description of Artificial Sequence: Synthetic oligonucleotide
cuucuagagucuucccaga

SEQ ID NO: 2275529 - RNA, 19 nt, Artificial Sequence
  Description of Artificial Sequence: Synthetic oligonucleotide
guacaacaucagaucguag

SEQ ID NO: 2275530 - RNA, 19 nt, Artificial Sequence
  Description of Artificial Sequence: Synthetic oligonucleotide
agcaaauccucggugcuuu

SEQ ID NO: 2275531 - RNA, 19 nt, Artificial Sequence
  Description of Artificial Sequence: Synthetic oligonucleotide
ucgugggugcacaggcaac

SEQ ID NO: 2275532 - RNA, 19 nt, Artificial Sequence
  Description of Artificial Sequence: Synthetic oligonucleotide
ccacagucagcgaugauca

SEQ ID NO: 2275533 - RNA, 19 nt, Artificial Sequence
  Description of Artificial Sequence: Synthetic oligonucleotide
gucguccaccucuucugcc

SEQ ID NO: 2275534 - RNA, 19 nt, Artificial Sequence
  Description of Artificial Sequence: Synthetic oligonucleotide
acccuuuucgugggugcac

SEQ ID NO: 2275535 - RNA, 19 nt, Artificial Sequence
  Description of Artificial Sequence: Synthetic oligonucleotide
gugggcucucccucuuggg

SEQ ID NO: 2275536 - RNA, 19 nt, Artificial Sequence
  Description of Artificial Sequence: Synthetic oligonucleotide
uuugggagguucgggcccu

SEQ ID NO: 2275537 - RNA, 19 nt, Artificial Sequence
  Description of Artificial Sequence: Synthetic oligonucleotide
auuguccguccaaagaguu

SEQ ID NO: 2275538 - RNA, 19 nt, Artificial Sequence
  Description of Artificial Sequence: Synthetic oligonucleotide
cacguacagcacacgcuug

SEQ ID NO: 2275539 - RNA, 19 nt, Artificial Sequence
  Description of Artificial Sequence: Synthetic oligonucleotide
agcacacgcuuggugguag

SEQ ID NO: 2275540 - RNA, 19 nt, Artificial Sequence
  Description of Artificial Sequence: Synthetic oligonucleotide
aagcaaauccucggugcuu

SEQ ID NO: 2275541 - RNA, 19 nt, Artificial Sequence
  Description of Artificial Sequence: Synthetic oligonucleotide
guacaccugaggauuugac

SEQ ID NO: 2275542 - RNA, 19 nt, Artificial Sequence
  Description of Artificial Sequence: Synthetic oligonucleotide
uugggccagaauuggccau

SEQ ID NO: 2275543 - RNA, 19 nt, Artificial Sequence
  Description of Artificial Sequence: Synthetic oligonucleotide
gaagaaccuugucguccac

SEQ ID NO: 2275544 - RNA, 19 nt, Artificial Sequence
  Description of Artificial Sequence: Synthetic oligonucleotide
cagaucguaggagcauuug

SEQ ID NO: 2275545 - RNA, 19 nt, Artificial Sequence
  Description of Artificial Sequence: Synthetic oligonucleotide
auguacaccugaggauuug

SEQ ID NO: 2275546 - RNA, 19 nt, Artificial Sequence
  Description of Artificial Sequence: Synthetic oligonucleotide
cuugucguccaccucuucu

SEQ ID NO: 2275547 - RNA, 19 nt, Artificial Sequence
  Description of Artificial Sequence: Synthetic oligonucleotide
accugaggauuugaccgug

SEQ ID NO: 2275548 - RNA, 19 nt, Artificial Sequence
  Description of Artificial Sequence: Synthetic oligonucleotide
gaaccuugucguccaccuc

SEQ ID NO: 2275549 - RNA, 19 nt, Artificial Sequence
  Description of Artificial Sequence: Synthetic oligonucleotide
gcaacggaaauucucugcu

SEQ ID NO: 2275550 - RNA, 19 nt, Artificial Sequence
  Description of Artificial Sequence: Synthetic oligonucleotide
caaauccucggugcuuuuc

SEQ ID NO: 2275551 - RNA, 19 nt, Artificial Sequence
  Description of Artificial Sequence: Synthetic oligonucleotide
cagauucauucauguuguc

SEQ ID NO: 2275552 - RNA, 19 nt, Artificial Sequence
  Description of Artificial Sequence: Synthetic oligonucleotide
ucggugcuuuucuguuuca

SEQ ID NO: 2275553 - RNA, 19 nt, Artificial Sequence
  Description of Artificial Sequence: Synthetic oligonucleotide
ucgauagcugcugcagcau

SEQ ID NO: 2275554 - RNA, 19 nt, Artificial Sequence
  Description of Artificial Sequence: Synthetic oligonucleotide
uccagccaaucugucuugu

SEQ ID NO: 2275555 - RNA, 19 nt, Artificial Sequence
  Description of Artificial Sequence: Synthetic oligonucleotide
cuugcugcccugagccuca

SEQ ID NO: 2275556 - RNA, 19 nt, Artificial Sequence
  Description of Artificial Sequence: Synthetic oligonucleotide
gccucaaucugccguagga

SEQ ID NO: 2275557 - RNA, 19 nt, Artificial Sequence
  Description of Artificial Sequence: Synthetic oligonucleotide
ggaagagcccucuuuaauu

SEQ ID NO: 2275558 - RNA, 19 nt, Artificial Sequence
  Description of Artificial Sequence: Synthetic oligonucleotide
caaucugccguaggacauc

SEQ ID NO: 2275559 - RNA, 19 nt, Artificial Sequence
  Description of Artificial Sequence: Synthetic oligonucleotide
gagcccucuuuaauucuca

SEQ ID NO: 2275560 - RNA, 19 nt, Artificial Sequence
  Description of Artificial Sequence: Synthetic oligonucleotide
ugggagccgagcgaagcau

SEQ ID NO: 2275561 - RNA, 19 nt, Artificial Sequence
  Description of Artificial Sequence: Synthetic oligonucleotide
ggugggagccgagcgaagc

SEQ ID NO: 2275562 - RNA, 19 nt, Artificial Sequence
  Description of Artificial Sequence: Synthetic oligonucleotide
cacagucagcgaugaucac

SEQ ID NO: 2275563 - RNA, 19 nt, Artificial Sequence
  Description of Artificial Sequence: Synthetic oligonucleotide
gugggagccgagcgaagca

SEQ ID NO: 2275564 - RNA, 19 nt, Artificial Sequence
  Description of Artificial Sequence: Synthetic oligonucleotide
cacgaauuguccguccaaa

SEQ ID NO: 2275565 - RNA, 19 nt, Artificial Sequence
  Description of Artificial Sequence: Synthetic oligonucleotide
cggugaucuccccaaauac

SEQ ID NO: 2275566 - RNA, 19 nt, Artificial Sequence
  Description of Artificial Sequence: Synthetic oligonucleotide
aaucaccgcccuggcacau

SEQ ID NO: 2275567 - RNA, 19 nt, Artificial Sequence
  Description of Artificial Sequence: Synthetic oligonucleotide
ggaaauucucugcugucau

SEQ ID NO: 2275568 - RNA, 19 nt, Artificial Sequence
  Description of Artificial Sequence: Synthetic oligonucleotide
ggcuuguucccaaucuuga

SEQ ID NO: 2275569 - RNA, 19 nt, Artificial Sequence
  Description of Artificial Sequence: Synthetic oligonucleotide
ccagucaucaucugaccaa

SEQ ID NO: 2275570 - RNA, 19 nt, Artificial Sequence
  Description of Artificial Sequence: Synthetic oligonucleotide
cgaauuguccguccaaaga

SEQ ID NO: 2275571 - RNA, 19 nt, Artificial Sequence
  Description of Artificial Sequence: Synthetic oligonucleotide
ccacccacguacagcacac

SEQ ID NO: 2275572 - RNA, 19 nt, Artificial Sequence
  Description of Artificial Sequence: Synthetic oligonucleotide
cugcccugagccucaaucu

SEQ ID NO: 2275573 - RNA, 19 nt, Artificial Sequence
  Description of Artificial Sequence: Synthetic oligonucleotide
cuguguguuugagaaugaa

SEQ ID NO: 2275574 - RNA, 19 nt, Artificial Sequence
  Description of Artificial Sequence: Synthetic oligonucleotide
cagcgaugaucaccuucug

SEQ ID NO: 2275575 - RNA, 19 nt, Artificial Sequence
  Description of Artificial Sequence: Synthetic oligonucleotide
gcuggcuuguucccaaucu

SEQ ID NO: 2275576 - RNA, 19 nt, Artificial Sequence
  Description of Artificial Sequence: Synthetic oligonucleotide
gggauaaaagcagcaugaa

SEQ ID NO: 2275577 - RNA, 19 nt, Artificial Sequence
  Description of Artificial Sequence: Synthetic oligonucleotide
gccguugugguuugugaaa

SEQ ID NO: 2275578 - RNA, 19 nt, Artificial Sequence
  Description of Artificial Sequence: Synthetic oligonucleotide
gagccgagcgaagcaucac

SEQ ID NO: 2275579 - RNA, 19 nt, Artificial Sequence
  Description of Artificial Sequence: Synthetic oligonucleotide
ccuuuucgugggugcacag

SEQ ID NO: 2275580 - RNA, 19 nt, Artificial Sequence
  Description of Artificial Sequence: Synthetic oligonucleotide
cugcuucccuugaagccaa

SEQ ID NO: 2275581 - RNA, 19 nt, Artificial Sequence
  Description of Artificial Sequence: Synthetic oligonucleotide
ugucuccaaaagggauaaa

SEQ ID NO: 2275582 - RNA, 19 nt, Artificial Sequence
  Description of Artificial Sequence: Synthetic oligonucleotide
gccguaggacauccaggcc

SEQ ID NO: 2275583 - RNA, 19 nt, Artificial Sequence
  Description of Artificial Sequence: Synthetic oligonucleotide
cacccacguacagcacacg

SEQ ID NO: 2275584 - RNA, 19 nt, Artificial Sequence
  Description of Artificial Sequence: Synthetic oligonucleotide
guccguccaaagaguucag

SEQ ID NO: 2275585 - RNA, 19 nt, Artificial Sequence
  Description of Artificial Sequence: Synthetic oligonucleotide
gggugcacaggcaacggaa

SEQ ID NO: 2275586 - RNA, 19 nt, Artificial Sequence
  Description of Artificial Sequence: Synthetic oligonucleotide
acgcuuggugguagccauc

SEQ ID NO: 2275587 - RNA, 19 nt, Artificial Sequence
  Description of Artificial Sequence: Synthetic oligonucleotide
cacgcuuggugguagccau

SEQ ID NO: 2275588 - RNA, 19 nt, Artificial Sequence
  Description of Artificial Sequence: Synthetic oligonucleotide
cauguacaccugaggauuu

SEQ ID NO: 2275589 - RNA, 19 nt, Artificial Sequence
  Description of Artificial Sequence: Synthetic oligonucleotide
ccgagcgaagcaucacaug

SEQ ID NO: 2275590 - RNA, 19 nt, Artificial Sequence
  Description of Artificial Sequence: Synthetic oligonucleotide
caccugaggauuugaccgu

SEQ ID NO: 2275591 - RNA, 19 nt, Artificial Sequence
  Description of Artificial Sequence: Synthetic oligonucleotide
ggccaaauugacacgaauu

SEQ ID NO: 2275592 - RNA, 19 nt, Artificial Sequence
  Description of Artificial Sequence: Synthetic oligonucleotide
ggagccgagcgaagcauca

SEQ ID NO: 2275593 - RNA, 19 nt, Artificial Sequence
  Description of Artificial Sequence: Synthetic oligonucleotide
ccuucggugaucuccccaa

SEQ ID NO: 2275594 - RNA, 19 nt, Artificial Sequence
  Description of Artificial Sequence: Synthetic oligonucleotide
cgagcgaagcaucacaugu

SEQ ID NO: 2275595 - RNA, 19 nt, Artificial Sequence
  Description of Artificial Sequence: Synthetic oligonucleotide
gugcacaggcaacggaaau

SEQ ID NO: 2275596 - RNA, 19 nt, Artificial Sequence
  Description of Artificial Sequence: Synthetic oligonucleotide
ccaaauugacacgaauugu

SEQ ID NO: 2275597 - RNA, 19 nt, Artificial Sequence
  Description of Artificial Sequence: Synthetic oligonucleotide
cuucggugaucuccccaaa

SEQ ID NO: 2275598 - RNA, 19 nt, Artificial Sequence
  Description of Artificial Sequence: Synthetic oligonucleotide
ggugcacaggcaacggaaa

SEQ ID NO: 2275599 - RNA, 19 nt, Artificial Sequence
  Description of Artificial Sequence: Synthetic oligonucleotide
gaugcgguggaagcugcuu

SEQ ID NO: 2275600 - RNA, 19 nt, Artificial Sequence
  Description of Artificial Sequence: Synthetic oligonucleotide
cauuuggaugcggccagcu

SEQ ID NO: 2275601 - RNA, 19 nt, Artificial Sequence
  Description of Artificial Sequence: Synthetic oligonucleotide
cacaggcaacggaaauucu

SEQ ID NO: 2275602 - RNA, 19 nt, Artificial Sequence
  Description of Artificial Sequence: Synthetic oligonucleotide
aggccugguccuguguguu

SEQ ID NO: 2275603 - RNA, 19 nt, Artificial Sequence
  Description of Artificial Sequence: Synthetic oligonucleotide
gcagcaugaagaaccuugu

SEQ ID NO: 2275604 - RNA, 19 nt, Artificial Sequence
  Description of Artificial Sequence: Synthetic oligonucleotide
gcacacgcuuggugguagc

SEQ ID NO: 2275605 - RNA, 19 nt, Artificial Sequence
  Description of Artificial Sequence: Synthetic oligonucleotide
gccuucggugaucucccca

SEQ ID NO: 2275606 - RNA, 19 nt, Artificial Sequence
  Description of Artificial Sequence: Synthetic oligonucleotide
caucagaucguaggagcau

SEQ ID NO: 2275607 - RNA, 19 nt, Artificial Sequence
  Description of Artificial Sequence: Synthetic oligonucleotide
caaaacccuuuucgugggu

SEQ ID NO: 2275608 - RNA, 19 nt, Artificial Sequence
  Description of Artificial Sequence: Synthetic oligonucleotide
ccguccaaagaguucagau

SEQ ID NO: 2275609 - RNA, 19 nt, Artificial Sequence
  Description of Artificial Sequence: Synthetic oligonucleotide
cgauagcugcugcagcauc

SEQ ID NO: 2275610 - RNA, 19 nt, Artificial Sequence
  Description of Artificial Sequence: Synthetic oligonucleotide
accuugucguccaccucuu

SEQ ID NO: 2275611 - RNA, 19 nt, Artificial Sequence
  Description of Artificial Sequence: Synthetic oligonucleotide
gcgguggaagcugcuuccc

SEQ ID NO: 2275612 - RNA, 19 nt, Artificial Sequence
  Description of Artificial Sequence: Synthetic oligonucleotide
ccugugccguugugguuug

SEQ ID NO: 2275613 - RNA, 19 nt, Artificial Sequence
  Description of Artificial Sequence: Synthetic oligonucleotide
gggagccgagcgaagcauc

SEQ ID NO: 2275614 - RNA, 19 nt, Artificial Sequence
  Description of Artificial Sequence: Synthetic oligonucleotide
ggccuucggugaucucccc

SEQ ID NO: 2275615 - RNA, 19 nt, Artificial Sequence
  Description of Artificial Sequence: Synthetic oligonucleotide
aucugccguaggacaucca

SEQ ID NO: 2275616 - RNA, 19 nt, Artificial Sequence
  Description of Artificial Sequence: Synthetic oligonucleotide
guagugggcucucccucuu

SEQ ID NO: 2275617 - RNA, 19 nt, Artificial Sequence
  Description of Artificial Sequence: Synthetic oligonucleotide
gggagguucgggcccuucu

SEQ ID NO: 2275618 - RNA, 19 nt, Artificial Sequence
  Description of Artificial Sequence: Synthetic oligonucleotide
ccacguacagcacacgcuu

SEQ ID NO: 2275619 - RNA, 19 nt, Artificial Sequence
  Description of Artificial Sequence: Synthetic oligonucleotide
cauccaggccuucggugau

SEQ ID NO: 2275620 - RNA, 19 nt, Artificial Sequence
  Description of Artificial Sequence: Synthetic oligonucleotide
cucauugguuuggccaaau

SEQ ID NO: 2275621 - RNA, 19 nt, Artificial Sequence
  Description of Artificial Sequence: Synthetic oligonucleotide
ggagguucgggcccuucuu

SEQ ID NO: 2275622 - RNA, 19 nt, Artificial Sequence
  Description of Artificial Sequence: Synthetic oligonucleotide
cccuuuucgugggugcaca

SEQ ID NO: 2275623 - RNA, 19 nt, Artificial Sequence
  Description of Artificial Sequence: Synthetic oligonucleotide
gcccucuuuaauucucauu

SEQ ID NO: 2275624 - RNA, 19 nt, Artificial Sequence
  Description of Artificial Sequence: Synthetic oligonucleotide
ccgcccuggcacaugaacu

SEQ ID NO: 2275625 - RNA, 19 nt, Artificial Sequence
  Description of Artificial Sequence: Synthetic oligonucleotide
gcgaagcaucacauguacu

SEQ ID NO: 2275626 - RNA, 19 nt, Artificial Sequence
  Description of Artificial Sequence: Synthetic oligonucleotide
cagcacacgcuugguggua

SEQ ID NO: 2275627 - RNA, 19 nt, Artificial Sequence
  Description of Artificial Sequence: Synthetic oligonucleotide
gccgagcgaagcaucacau

SEQ ID NO: 2275628 - RNA, 19 nt, Artificial Sequence
  Description of Artificial Sequence: Synthetic oligonucleotide
ggaugcggccagcuggcuu

SEQ ID NO: 2275629 - RNA, 19 nt, Artificial Sequence
  Description of Artificial Sequence: Synthetic oligonucleotide
ccguugugguuugugaaau

SEQ ID NO: 2275630 - RNA, 19 nt, Artificial Sequence
  Description of Artificial Sequence: Synthetic oligonucleotide
gcaaauccucggugcuuuu

SEQ ID NO: 2275631 - RNA, 19 nt, Artificial Sequence
  Description of Artificial Sequence: Synthetic oligonucleotide
ugcggccagcuggcuuguu

SEQ ID NO: 2275632 - RNA, 19 nt, Artificial Sequence
  Description of Artificial Sequence: Synthetic oligonucleotide
ccucggugcuuuucuguuu

SEQ ID NO: 2275633 - RNA, 19 nt, Artificial Sequence
  Description of Artificial Sequence: Synthetic oligonucleotide
cugugccguugugguuugu

SEQ ID NO: 2275634 - RNA, 19 nt, Artificial Sequence
  Description of Artificial Sequence: Synthetic oligonucleotide
  modified_base (7)..(7): a, c, u, g, unknown or other
gauaagnuaaaguagcuag

SEQ ID NO: 2275635 - RNA, 19 nt, Artificial Sequence
  Description of Artificial Sequence: Synthetic oligonucleotide
uuucucaugauucagaaug

SEQ ID NO: 2275636 - RNA, 19 nt, Artificial Sequence
  Description of Artificial Sequence: Synthetic oligonucleotide
uuuaaauuccucauuaccu

SEQ ID NO: 2275637 - RNA, 19 nt, Artificial Sequence
  Description of Artificial Sequence: Synthetic oligonucleotide
aaauugucucuaucaaugc

SEQ ID NO: 2275638 - RNA, 19 nt, Artificial Sequence
  Description of Artificial Sequence: Synthetic oligonucleotide
uuuuccaccucccaguugg

SEQ ID NO: 2275639 - RNA, 19 nt, Artificial Sequence
  Description of Artificial Sequence: Synthetic oligonucleotide
aaggcuuaacuuuuccacc

SEQ ID NO: 2275640 - RNA, 19 nt, Artificial Sequence
  Description of Artificial Sequence: Synthetic oligonucleotide
ugauucagaaugcagaugu

SEQ ID NO: 2275641 - RNA, 19 nt, Artificial Sequence
  Description of Artificial Sequence: Synthetic oligonucleotide
aaagucguaggauagauuu

SEQ ID NO: 2275642 - RNA, 19 nt, Artificial Sequence
  Description of Artificial Sequence: Synthetic oligonucleotide
uguagcucuauuuugaggu

SEQ ID NO: 2275643 - RNA, 19 nt, Artificial Sequence
  Description of Artificial Sequence: Synthetic oligonucleotide
ucuucaagcaguuuggcug

SEQ ID NO: 2275644 - RNA, 19 nt, Artificial Sequence
  Description of Artificial Sequence: Synthetic oligonucleotide
uugcauauuaucacugugg

SEQ ID NO: 2275645 - RNA, 19 nt, Artificial Sequence
  Description of Artificial Sequence: Synthetic oligonucleotide
aaugcaaaccucucgauau

SEQ ID NO: 2275646 - RNA, 19 nt, Artificial Sequence
  Description of Artificial Sequence: Synthetic oligonucleotide
  modified_base (3)..(3): a, c, u, g, unknown or other
agnuaaaguagcuagcugu

SEQ ID NO: 2275647 - RNA, 19 nt, Artificial Sequence
  Description of Artificial Sequence: Synthetic oligonucleotide
uuaagucucuucuugaugu

SEQ ID NO: 2275648 - RNA, 19 nt, Artificial Sequence
  Description of Artificial Sequence: Synthetic oligonucleotide
caaauugucucuaucaaug

SEQ ID NO: 2275649 - RNA, 19 nt, Artificial Sequence
  Description of Artificial Sequence: Synthetic oligonucleotide
ucaugauucagaaugcaga

SEQ ID NO: 2275650 - RNA, 19 nt, Artificial Sequence
  Description of Artificial Sequence: Synthetic oligonucleotide
aagcucuacuucuuuagac

SEQ ID NO: 2275651 - RNA, 19 nt, Artificial Sequence
  Description of Artificial Sequence: Synthetic oligonucleotide
ucuauuuugaggucguggc

SEQ ID NO: 2275652 - RNA, 19 nt, Artificial Sequence
  Description of Artificial Sequence: Synthetic oligonucleotide
auuaucacuguggagaagg

SEQ ID NO: 2275653 - RNA, 19 nt, Artificial Sequence
  Description of Artificial Sequence: Synthetic oligonucleotide
uuaaauuccucauuaccug

SEQ ID NO: 2275654 - RNA, 19 nt, Artificial Sequence
  Description of Artificial Sequence: Synthetic oligonucleotide
  modified_base (16)..(16): a, c, u, g, unknown or other
auagauuuugauaagnuaa

SEQ ID NO: 2275655 - RNA, 19 nt, Artificial Sequence
  Description of Artificial Sequence: Synthetic oligonucleotide
ucuaucaaugcaaaccucu

SEQ ID NO: 2275656 - RNA, 19 nt, Artificial Sequence
  Description of Artificial Sequence: Synthetic oligonucleotide
uuaagaaagaguuuucuuu

SEQ ID NO: 2275657 - RNA, 19 nt, Artificial Sequence
  Description of Artificial Sequence: Synthetic oligonucleotide
ugcauguugcauauuauca

SEQ ID NO: 2275658 - RNA, 19 nt, Artificial Sequence
  Description of Artificial Sequence: Synthetic oligonucleotide
uaucaaugcaaaccucucg

SEQ ID NO: 2275659 - RNA, 19 nt, Artificial Sequence
  Description of Artificial Sequence: Synthetic oligonucleotide
guaggauagauuuugauaa

SEQ ID NO: 2275660 - RNA, 19 nt, Artificial Sequence
  Description of Artificial Sequence: Synthetic oligonucleotide
auaggccuuauucacuugc

SEQ ID NO: 2275661 - RNA, 19 nt, Artificial Sequence
  Description of Artificial Sequence: Synthetic oligonucleotide
cucucgauaugcaugauag

SEQ ID NO: 2275662 - RNA, 19 nt, Artificial Sequence
  Description of Artificial Sequence: Synthetic oligonucleotide
  modified_base (4)..(4): a, c, u, g, unknown or other
aagnuaaaguagcuagcug

SEQ ID NO: 2275663 - RNA, 19 nt, Artificial Sequence
  Description of Artificial Sequence: Synthetic oligonucleotide
uaucaaagucguaggauag

SEQ ID NO: 2275664 - RNA, 19 nt, Artificial Sequence
  Description of Artificial Sequence: Synthetic oligonucleotide
ugaggguggauuuaaauuc

SEQ ID NO: 2275665 - RNA, 19 nt, Artificial Sequence
  Description of Artificial Sequence: Synthetic oligonucleotide
cauauuaucacuguggaga

SEQ ID NO: 2275666 - RNA, 19 nt, Artificial Sequence
  Description of Artificial Sequence: Synthetic oligonucleotide
uucaagucaaggcuuaacu

SEQ ID NO: 2275667 - RNA, 19 nt, Artificial Sequence
  Description of Artificial Sequence: Synthetic oligonucleotide
agagaguggcauuacugcc

SEQ ID NO: 2275668 - RNA, 19 nt, Artificial Sequence
  Description of Artificial Sequence: Synthetic oligonucleotide
uuuaagucucuucuugaug

SEQ ID NO: 2275669 - RNA, 19 nt, Artificial Sequence
  Description of Artificial Sequence: Synthetic oligonucleotide
ugcauauuaucacugugga

SEQ ID NO: 2275670 - RNA, 19 nt, Artificial Sequence
  Description of Artificial Sequence: Synthetic oligonucleotide
uacuuucaaagauucagug

SEQ ID NO: 2275671 - RNA, 19 nt, Artificial Sequence
  Description of Artificial Sequence: Synthetic oligonucleotide
uugaugucuucauaugcgg

SEQ ID NO: 2275672 - RNA, 19 nt, Artificial Sequence
  Description of Artificial Sequence: Synthetic oligonucleotide
uccaauuuguucuucaaau

SEQ ID NO: 2275673 - RNA, 19 nt, Artificial Sequence
  Description of Artificial Sequence: Synthetic oligonucleotide
uucuuuagacuguagcugc

SEQ ID NO: 2275674 - RNA, 19 nt, Artificial Sequence
  Description of Artificial Sequence: Synthetic oligonucleotide
aauugucucuaucaaugca

SEQ ID NO: 2275675 - RNA, 19 nt, Artificial Sequence
  Description of Artificial Sequence: Synthetic oligonucleotide
uguaaguuagacaucucuc

SEQ ID NO: 2275676 - RNA, 19 nt, Artificial Sequence
  Description of Artificial Sequence: Synthetic oligonucleotide
uucuucaucuacucgcgcg

SEQ ID NO: 2275677 - RNA, 19 nt, Artificial Sequence
  Description of Artificial Sequence: Synthetic oligonucleotide
aagcaguuuggcuggaauc

SEQ ID NO: 2275678 - RNA, 19 nt, Artificial Sequence
  Description of Artificial Sequence: Synthetic oligonucleotide
aaagauucaguguugucuu

SEQ ID NO: 2275679 - RNA, 19 nt, Artificial Sequence
  Description of Artificial Sequence: Synthetic oligonucleotide
  modified_base (6)..(6): a, c, u, g, unknown or other
auaagnuaaaguagcuagc

SEQ ID NO: 2275680 - RNA, 19 nt, Artificial Sequence
  Description of Artificial Sequence: Synthetic oligonucleotide
ucuugauugcagcugaggu

SEQ ID NO: 2275681 - RNA, 19 nt, Artificial Sequence
  Description of Artificial Sequence: Synthetic oligonucleotide
auucacuugcucucguccc

SEQ ID NO: 2275682 - RNA, 19 nt, Artificial Sequence
  Description of Artificial Sequence: Synthetic oligonucleotide
aagagcaaagugugaggcg

SEQ ID NO: 2275683 - RNA, 19 nt, Artificial Sequence
  Description of Artificial Sequence: Synthetic oligonucleotide
ucgauaugcaugauaggcc

SEQ ID NO: 2275684 - RNA, 19 nt, Artificial Sequence
  Description of Artificial Sequence: Synthetic oligonucleotide
cucgauaugcaugauaggc

SEQ ID NO: 2275685 - RNA, 19 nt, Artificial Sequence
  Description of Artificial Sequence: Synthetic oligonucleotide
caaaccauggaucuucaag

SEQ ID NO: 2275686 - RNA, 19 nt, Artificial Sequence
  Description of Artificial Sequence: Synthetic oligonucleotide
  modified_base (5)..(5): a, c, u, g, unknown or other
uaagnuaaaguagcuagcu

SEQ ID NO: 2275687 - RNA, 19 nt, Artificial Sequence
  Description of Artificial Sequence: Synthetic oligonucleotide
ugcucauucaauacuuuca

SEQ ID NO: 2275688 - RNA, 19 nt, Artificial Sequence
  Description of Artificial Sequence: Synthetic oligonucleotide
ugcuuaucaaagucguagg

SEQ ID NO: 2275689 - RNA, 19 nt, Artificial Sequence
  Description of Artificial Sequence: Synthetic oligonucleotide
uguuccaaaccauggaucu

SEQ ID NO: 2275690 - RNA, 19 nt, Artificial Sequence
  Description of Artificial Sequence: Synthetic oligonucleotide
auuuccagccagcagugac

SEQ ID NO: 2275691 - RNA, 19 nt, Artificial Sequence
  Description of Artificial Sequence: Synthetic oligonucleotide
ucauaugcggugacaagag

SEQ ID NO: 2275692 - RNA, 19 nt, Artificial Sequence
  Description of Artificial Sequence: Synthetic oligonucleotide
auucaauacuuucaaagau

SEQ ID NO: 2275693 - RNA, 19 nt, Artificial Sequence
  Description of Artificial Sequence: Synthetic oligonucleotide
uuaucaaagucguaggaua

SEQ ID NO: 2275694 - RNA, 19 nt, Artificial Sequence
  Description of Artificial Sequence: Synthetic oligonucleotide
aaguuagacaucucucucu

SEQ ID NO: 2275695 - RNA, 19 nt, Artificial Sequence
  Description of Artificial Sequence: Synthetic oligonucleotide
gaugucuucauaugcggug

SEQ ID NO: 2275696 - RNA, 19 nt, Artificial Sequence
  Description of Artificial Sequence: Synthetic oligonucleotide
caugauaggccuuauucac

SEQ ID NO: 2275697 - RNA, 19 nt, Artificial Sequence
  Description of Artificial Sequence: Synthetic oligonucleotide
  modified_base (14)..(14): a, c, u, g, unknown or other
agauuuugauaagnuaaag

SEQ ID NO: 2275698 - RNA, 19 nt, Artificial Sequence
  Description of Artificial Sequence: Synthetic oligonucleotide
  modified_base (9)..(9): a, c, u, g, unknown or other
uugauaagnuaaaguagcu

SEQ ID NO: 2275699 - RNA, 19 nt, Artificial Sequence
  Description of Artificial Sequence: Synthetic oligonucleotide
guuaccagauguaaguuag

SEQ ID NO: 2275700 - RNA, 19 nt, Artificial Sequence
  Description of Artificial Sequence: Synthetic oligonucleotide
ucuucaguucccaguaugc

SEQ ID NO: 2275701 - RNA, 19 nt, Artificial Sequence
  Description of Artificial Sequence: Synthetic oligonucleotide
caaggcuuaacuuuuccac

SEQ ID NO: 2275702 - RNA, 19 nt, Artificial Sequence
  Description of Artificial Sequence: Synthetic oligonucleotide
auguaaguuagacaucucu

SEQ ID NO: 2275703 - RNA, 19 nt, Artificial Sequence
  Description of Artificial Sequence: Synthetic oligonucleotide
  modified_base (15)..(15): a, c, u, g, unknown or other
uagauuuugauaagnuaaa

SEQ ID NO: 2275704 - RNA, 19 nt, Artificial Sequence
  Description of Artificial Sequence: Synthetic oligonucleotide
aucaaugcaaaccucucga

SEQ ID NO: 2275705 - RNA, 19 nt, Artificial Sequence
  Description of Artificial Sequence: Synthetic oligonucleotide
ugaauacacagagaguggc

SEQ ID NO: 2275706 - RNA, 19 nt, Artificial Sequence
  Description of Artificial Sequence: Synthetic oligonucleotide
uucauaugcggugacaaga

SEQ ID NO: 2275707 - RNA, 19 nt, Artificial Sequence
  Description of Artificial Sequence: Synthetic oligonucleotide
agauguaaguuagacaucu

SEQ ID NO: 2275708 - RNA, 19 nt, Artificial Sequence
  Description of Artificial Sequence: Synthetic oligonucleotide
cucugaaucuuuaagucuc

SEQ ID NO: 2275709 - RNA, 19 nt, Artificial Sequence
  Description of Artificial Sequence: Synthetic oligonucleotide
ucucugaaucuuuaagucu

SEQ ID NO: 2275710 - RNA, 19 nt, Artificial Sequence
  Description of Artificial Sequence: Synthetic oligonucleotide
aaccucucgauaugcauga

SEQ ID NO: 2275711 - RNA, 19 nt, Artificial Sequence
  Description of Artificial Sequence: Synthetic oligonucleotide
agugugaggcgaccgauuc

SEQ ID NO: 2275712 - RNA, 19 nt, Artificial Sequence
  Description of Artificial Sequence: Synthetic oligonucleotide
cucuuguuccaaaccaugg

SEQ ID NO: 2275713 - RNA, 19 nt, Artificial Sequence
  Description of Artificial Sequence: Synthetic oligonucleotide
uucucaugauucagaaugc

SEQ ID NO: 2275714 - RNA, 19 nt, Artificial Sequence
  Description of Artificial Sequence: Synthetic oligonucleotide
agugacuugccuuucuuga

SEQ ID NO: 2275715 - RNA, 19 nt, Artificial Sequence
  Description of Artificial Sequence: Synthetic oligonucleotide
uaaguuagacaucucucuc

SEQ ID NO: 2275716 - RNA, 19 nt, Artificial Sequence
  Description of Artificial Sequence: Synthetic oligonucleotide
cagagaguggcauuacugc

SEQ ID NO: 2275717 - RNA, 19 nt, Artificial Sequence
  Description of Artificial Sequence: Synthetic oligonucleotide
  modified_base (17)..(17): a, c, u, g, unknown or other
gauagauuuugauaagnua

SEQ ID NO: 2275718 - RNA, 19 nt, Artificial Sequence
  Description of Artificial Sequence: Synthetic oligonucleotide
ugaggcgaccgauucaucc

SEQ ID NO: 2275719 - RNA, 19 nt, Artificial Sequence
  Description of Artificial Sequence: Synthetic oligonucleotide
cauucaauacuuucaaaga

SEQ ID NO: 2275720 - RNA, 19 nt, Artificial Sequence
  Description of Artificial Sequence: Synthetic oligonucleotide
ucauccccugaauacacag

SEQ ID NO: 2275721 - RNA, 19 nt, Artificial Sequence
  Description of Artificial Sequence: Synthetic oligonucleotide
cuuaacuuuuccaccuccc

SEQ ID NO: 2275722 - RNA, 19 nt, Artificial Sequence
  Description of Artificial Sequence: Synthetic oligonucleotide
gagaucucuguccugagga

SEQ ID NO: 2275723 - RNA, 19 nt, Artificial Sequence
  Description of Artificial Sequence: Synthetic oligonucleotide
ucuuuaagaaagaguuuuc

SEQ ID NO: 2275724 - RNA, 19 nt, Artificial Sequence
  Description of Artificial Sequence: Synthetic oligonucleotide
ugaaucuuuaagucucuuc

SEQ ID NO: 2275725 - RNA, 19 nt, Artificial Sequence
  Description of Artificial Sequence: Synthetic oligonucleotide
auuuguucuucaaauuguc

SEQ ID NO: 2275726 - RNA, 19 nt, Artificial Sequence
  Description of Artificial Sequence: Synthetic oligonucleotide
ugcggugacaagagcaaag

SEQ ID NO: 2275727 - RNA, 19 nt, Artificial Sequence
  Description of Artificial Sequence: Synthetic oligonucleotide
ucuucaaauugucucuauc

SEQ ID NO: 2275728 - RNA, 19 nt, Artificial Sequence
  Description of Artificial Sequence: Synthetic oligonucleotide
guugcauauuaucacugug

SEQ ID NO: 2275729 - RNA, 19 nt, Artificial Sequence
  Description of Artificial Sequence: Synthetic oligonucleotide
caagagcaaagugugaggc

SEQ ID NO: 2275730 - RNA, 19 nt, Artificial Sequence
  Description of Artificial Sequence: Synthetic oligonucleotide
gugacaagagcaaagugug

SEQ ID NO: 2275731 - RNA, 19 nt, Artificial Sequence
  Description of Artificial Sequence: Synthetic oligonucleotide
aaaccucucgauaugcaug

SEQ ID NO: 2275732 - RNA, 19 nt, Artificial Sequence
  Description of Artificial Sequence: Synthetic oligonucleotide
uuccucauuaccugcugag

SEQ ID NO: 2275733 - RNA, 19 nt, Artificial Sequence
  Description of Artificial Sequence: Synthetic oligonucleotide
cuucuuuagacuguagcug

SEQ ID NO: 2275734 - RNA, 19 nt, Artificial Sequence
  Description of Artificial Sequence: Synthetic oligonucleotide
agaguuuucuuucucugaa

SEQ ID NO: 2275735 - RNA, 19 nt, Artificial Sequence
  Description of Artificial Sequence: Synthetic oligonucleotide
agacuguagcugcucauuc

SEQ ID NO: 2275736 - RNA, 19 nt, Artificial Sequence
  Description of Artificial Sequence: Synthetic oligonucleotide
uguugcauauuaucacugu

SEQ ID NO: 2275737 - RNA, 19 nt, Artificial Sequence
  Description of Artificial Sequence: Synthetic oligonucleotide
ucaguguugucuuuauuua

SEQ ID NO: 2275738 - RNA, 19 nt, Artificial Sequence
  Description of Artificial Sequence: Synthetic oligonucleotide
agucguaggauagauuuug

SEQ ID NO: 2275739 - RNA, 19 nt, Artificial Sequence
  Description of Artificial Sequence: Synthetic oligonucleotide
ccugaauacacagagagug

SEQ ID NO: 2275740 - RNA, 19 nt, Artificial Sequence
  Description of Artificial Sequence: Synthetic oligonucleotide
ucuuccucccucgacaggc

SEQ ID NO: 2275741 - RNA, 19 nt, Artificial Sequence
  Description of Artificial Sequence: Synthetic oligonucleotide
caucucucucuucaguucc

SEQ ID NO: 2275742 - RNA, 19 nt, Artificial Sequence
  Description of Artificial Sequence: Synthetic oligonucleotide
gacuugccuuucuugauug

SEQ ID NO: 2275743 - RNA, 19 nt, Artificial Sequence
  Description of Artificial Sequence: Synthetic oligonucleotide
ucuguucuuagcugcagaa

SEQ ID NO: 2275744 - RNA, 19 nt, Artificial Sequence
  Description of Artificial Sequence: Synthetic oligonucleotide
agaguggcauuacugccuc

SEQ ID NO: 2275745 - RNA, 19 nt, Artificial Sequence
  Description of Artificial Sequence: Synthetic oligonucleotide
cucuauuuugaggucgugg

SEQ ID NO: 2275746 - RNA, 19 nt, Artificial Sequence
  Description of Artificial Sequence: Synthetic oligonucleotide
ucucgauaugcaugauagg

SEQ ID NO: 2275747 - RNA, 19 nt, Artificial Sequence
  Description of Artificial Sequence: Synthetic oligonucleotide
ucuucauaugcggugacaa

SEQ ID NO: 2275748 - RNA, 19 nt, Artificial Sequence
  Description of Artificial Sequence: Synthetic oligonucleotide
ucaagucaaggcuuaacuu

SEQ ID NO: 2275749 - RNA, 19 nt, Artificial Sequence
  Description of Artificial Sequence: Synthetic oligonucleotide
uucuugauugcagcugagg

SEQ ID NO: 2275750 - RNA, 19 nt, Artificial Sequence
  Description of Artificial Sequence: Synthetic oligonucleotide
uaugcggugacaagagcaa

SEQ ID NO: 2275751 - RNA, 19 nt, Artificial Sequence
  Description of Artificial Sequence: Synthetic oligonucleotide
auauuaucacuguggagaa

SEQ ID NO: 2275752 - RNA, 19 nt, Artificial Sequence
  Description of Artificial Sequence: Synthetic oligonucleotide
ugaugucuucauaugcggu

SEQ ID NO: 2275753 - RNA, 19 nt, Artificial Sequence
  Description of Artificial Sequence: Synthetic oligonucleotide
uggauuuaaauuccucauu

SEQ ID NO: 2275754 - RNA, 19 nt, Artificial Sequence
  Description of Artificial Sequence: Synthetic oligonucleotide
uguuaccagauguaaguua

SEQ ID NO: 2275755 - RNA, 19 nt, Artificial Sequence
  Description of Artificial Sequence: Synthetic oligonucleotide
uacucgcgcgccaacaagc

SEQ ID NO: 2275756 - RNA, 19 nt, Artificial Sequence
  Description of Artificial Sequence: Synthetic oligonucleotide
cuguagcucuauuuugagg

SEQ ID NO: 2275757 - RNA, 19 nt, Artificial Sequence
  Description of Artificial Sequence: Synthetic oligonucleotide
auucagaaugcagauguca

SEQ ID NO: 2275758 - RNA, 19 nt, Artificial Sequence
  Description of Artificial Sequence: Synthetic oligonucleotide
guuuucagcuuucugagua

SEQ ID NO: 2275759 - RNA, 19 nt, Artificial Sequence
  Description of Artificial Sequence: Synthetic oligonucleotide
accagauguaaguuagaca

SEQ ID NO: 2275760 - RNA, 19 nt, Artificial Sequence
  Description of Artificial Sequence: Synthetic oligonucleotide
uuaucacuguggagaaggc

SEQ ID NO: 2275761 - RNA, 19 nt, Artificial Sequence
  Description of Artificial Sequence: Synthetic oligonucleotide
gguggauuuaaauuccuca

SEQ ID NO: 2275762 - RNA, 19 nt, Artificial Sequence
  Description of Artificial Sequence: Synthetic oligonucleotide
uaugcauguugcauauuau

SEQ ID NO: 2275763 - RNA, 19 nt, Artificial Sequence
  Description of Artificial Sequence: Synthetic oligonucleotide
aggcgaccgauucaucccc

SEQ ID NO: 2275764 - RNA, 19 nt, Artificial Sequence
  Description of Artificial Sequence: Synthetic oligonucleotide
aucacuguggagaaggccu

SEQ ID NO: 2275765 - RNA, 19 nt, Artificial Sequence
  Description of Artificial Sequence: Synthetic oligonucleotide
agagcaaagugugaggcga

SEQ ID NO: 2275766 - RNA, 19 nt, Artificial Sequence
  Description of Artificial Sequence: Synthetic oligonucleotide
aauguuuuccugaggugga

SEQ ID NO: 2275767 - RNA, 19 nt, Artificial Sequence
  Description of Artificial Sequence: Synthetic oligonucleotide
aggcuuaacuuuuccaccu

SEQ ID NO: 2275768 - RNA, 19 nt, Artificial Sequence
  Description of Artificial Sequence: Synthetic oligonucleotide
uucaguucccaguaugcau

SEQ ID NO: 2275769 - RNA, 19 nt, Artificial Sequence
  Description of Artificial Sequence: Synthetic oligonucleotide
auucauccccugaauacac

SEQ ID NO: 2275770 - RNA, 19 nt, Artificial Sequence
  Description of Artificial Sequence: Synthetic oligonucleotide
ugauaggccuuauucacuu

SEQ ID NO: 2275771 - RNA, 19 nt, Artificial Sequence
  Description of Artificial Sequence: Synthetic oligonucleotide
uaccagauguaaguuagac

SEQ ID NO: 2275772 - RNA, 19 nt, Artificial Sequence
  Description of Artificial Sequence: Synthetic oligonucleotide
aguagcuagcuguucuuca

SEQ ID NO: 2275773 - RNA, 19 nt, Artificial Sequence
  Description of Artificial Sequence: Synthetic oligonucleotide
  modified_base (8)..(8): a, c, u, g, unknown or other
ugauaagnuaaaguagcua

SEQ ID NO: 2275774 - RNA, 19 nt, Artificial Sequence
  Description of Artificial Sequence: Synthetic oligonucleotide
ucccaguuggaugagggug

SEQ ID NO: 2275775 - RNA, 19 nt, Artificial Sequence
  Description of Artificial Sequence: Synthetic oligonucleotide
guaaguuagacaucucucu

SEQ ID NO: 2275776 - RNA, 19 nt, Artificial Sequence
  Description of Artificial Sequence: Synthetic oligonucleotide
ugcaaaccucucgauaugc

SEQ ID NO: 2275777 - RNA, 19 nt, Artificial Sequence
  Description of Artificial Sequence: Synthetic oligonucleotide
cuaucaaugcaaaccucuc

SEQ ID NO: 2275778 - RNA, 19 nt, Artificial Sequence
  Description of Artificial Sequence: Synthetic oligonucleotide
ucaaagucguaggauagau

SEQ ID NO: 2275779 - RNA, 19 nt, Artificial Sequence
  Description of Artificial Sequence: Synthetic oligonucleotide
uagcugcucauucaauacu

SEQ ID NO: 2275780 - RNA, 19 nt, Artificial Sequence
  Description of Artificial Sequence: Synthetic oligonucleotide
gacugaagccaaagcaggg

SEQ ID NO: 2275781 - RNA, 19 nt, Artificial Sequence
  Description of Artificial Sequence: Synthetic oligonucleotide
uuucuucaucuacucgcgc

SEQ ID NO: 2275782 - RNA, 19 nt, Artificial Sequence
  Description of Artificial Sequence: Synthetic oligonucleotide
aaugggugugcagugugca

SEQ ID NO: 2275783 - RNA, 19 nt, Artificial Sequence
  Description of Artificial Sequence: Synthetic oligonucleotide
guaugcauguugcauauua

SEQ ID NO: 2275784 - RNA, 19 nt, Artificial Sequence
  Description of Artificial Sequence: Synthetic oligonucleotide
aguggcauuacugccucuc

SEQ ID NO: 2275785 - RNA, 19 nt, Artificial Sequence
  Description of Artificial Sequence: Synthetic oligonucleotide
uugcucucgucccacagaa

SEQ ID NO: 2275786 - RNA, 19 nt, Artificial Sequence
  Description of Artificial Sequence: Synthetic oligonucleotide
  modified_base (19)..(19): a, c, u, g, unknown or other
aggauagauuuugauaagn

SEQ ID NO: 2275787 - RNA, 19 nt, Artificial Sequence
  Description of Artificial Sequence: Synthetic oligonucleotide
gaggguggauuuaaauucc

SEQ ID NO: 2275788 - RNA, 19 nt, Artificial Sequence
  Description of Artificial Sequence: Synthetic oligonucleotide
ugggcuuucucaugauuca

SEQ ID NO: 2275789 - RNA, 19 nt, Artificial Sequence
  Description of Artificial Sequence: Synthetic oligonucleotide
agcaguuuggcuggaauca

SEQ ID NO: 2275790 - RNA, 19 nt, Artificial Sequence
  Description of Artificial Sequence: Synthetic oligonucleotide
gaggcgaccgauucauccc

SEQ ID NO: 2275791 - RNA, 19 nt, Artificial Sequence
  Description of Artificial Sequence: Synthetic oligonucleotide
acagagaguggcauuacug

SEQ ID NO: 2275792 - RNA, 19 nt, Artificial Sequence
  Description of Artificial Sequence: Synthetic oligonucleotide
gaggucguggcauucuuuc

SEQ ID NO: 2275793 - RNA, 19 nt, Artificial Sequence
  Description of Artificial Sequence: Synthetic oligonucleotide
gacaggcuccgucugauga

SEQ ID NO: 2275794 - RNA, 19 nt, Artificial Sequence
  Description of Artificial Sequence: Synthetic oligonucleotide
cuucauaugcggugacaag

SEQ ID NO: 2275795 - RNA, 19 nt, Artificial Sequence
  Description of Artificial Sequence: Synthetic oligonucleotide
ucuuuagacuguagcugcu

SEQ ID NO: 2275796 - RNA, 19 nt, Artificial Sequence
  Description of Artificial Sequence: Synthetic oligonucleotide
uaccugcugaguuuccacc

SEQ ID NO: 2275797 - RNA, 19 nt, Artificial Sequence
  Description of Artificial Sequence: Synthetic oligonucleotide
aguuagacaucucucucuu

SEQ ID NO: 2275798 - RNA, 19 nt, Artificial Sequence
  Description of Artificial Sequence: Synthetic oligonucleotide
uucacuugcucucguccca

SEQ ID NO: 2275799 - RNA, 19 nt, Artificial Sequence
  Description of Artificial Sequence: Synthetic oligonucleotide
caccucuguucuuagcugc

SEQ ID NO: 2275800 - RNA, 19 nt, Artificial Sequence
  Description of Artificial Sequence: Synthetic oligonucleotide
cucuucaguucccaguaug

SEQ ID NO: 2275801 - RNA, 19 nt, Artificial Sequence
  Description of Artificial Sequence: Synthetic oligonucleotide
agccaaagcagggaauggg

SEQ ID NO: 2275802 - RNA, 19 nt, Artificial Sequence
  Description of Artificial Sequence: Synthetic oligonucleotide
gucaaggcuuaacuuuucc

SEQ ID NO: 2275803 - RNA, 19 nt, Artificial Sequence
  Description of Artificial Sequence: Synthetic oligonucleotide
uuaccugcugaguuuccac

SEQ ID NO: 2275804 - RNA, 19 nt, Artificial Sequence
  Description of Artificial Sequence: Synthetic oligonucleotide
agcaaagugugaggcgacc

SEQ ID NO: 2275805 - RNA, 19 nt, Artificial Sequence
  Description of Artificial Sequence: Synthetic oligonucleotide
agguggacccgucuguuug

SEQ ID NO: 2275806 - RNA, 19 nt, Artificial Sequence
  Description of Artificial Sequence: Synthetic oligonucleotide
ucaaagauucaguguuguc

SEQ ID NO: 2275807 - RNA, 19 nt, Artificial Sequence
  Description of Artificial Sequence: Synthetic oligonucleotide
uguuuuccugagguggacc

SEQ ID NO: 2275808 - RNA, 19 nt, Artificial Sequence
  Description of Artificial Sequence: Synthetic oligonucleotide
ccccugaauacacagagag

SEQ ID NO: 2275809 - RNA, 19 nt, Artificial Sequence
  Description of Artificial Sequence: Synthetic oligonucleotide
ucucgucccacagaacuug

SEQ ID NO: 2275810 - RNA, 19 nt, Artificial Sequence
  Description of Artificial Sequence: Synthetic oligonucleotide
gccaacaagcuuuucuucc

SEQ ID NO: 2275811 - RNA, 19 nt, Artificial Sequence
  Description of Artificial Sequence: Synthetic oligonucleotide
cugcucauucaauacuuuc

SEQ ID NO: 2275812 - RNA, 19 nt, Artificial Sequence
  Description of Artificial Sequence: Synthetic oligonucleotide
uuaccagauguaaguuaga

SEQ ID NO: 2275813 - RNA, 19 nt, Artificial Sequence
  Description of Artificial Sequence: Synthetic oligonucleotide
ugugaggcgaccgauucau

SEQ ID NO: 2275814 - RNA, 19 nt, Artificial Sequence
  Description of Artificial Sequence: Synthetic oligonucleotide
gauguggaccaucuuccuc

SEQ ID NO: 2275815 - RNA, 19 nt, Artificial Sequence
  Description of Artificial Sequence: Synthetic oligonucleotide
uuuuccugagguggacccg

SEQ ID NO: 2275816 - RNA, 19 nt, Artificial Sequence
  Description of Artificial Sequence: Synthetic oligonucleotide
ucaaugcaaaccucucgau

SEQ ID NO: 2275817 - RNA, 19 nt, Artificial Sequence
  Description of Artificial Sequence: Synthetic oligonucleotide
ucguaggauagauuuugau

SEQ ID NO: 2275818 - RNA, 19 nt, Artificial Sequence
  Description of Artificial Sequence: Synthetic oligonucleotide
agccugcuuaucaaagucg

SEQ ID NO: 2275819 - RNA, 19 nt, Artificial Sequence
  Description of Artificial Sequence: Synthetic oligonucleotide
ugucucuaucaaugcaaac

SEQ ID NO: 2275820 - RNA, 19 nt, Artificial Sequence
  Description of Artificial Sequence: Synthetic oligonucleotide
ugaagccaaagcagggaau

SEQ ID NO: 2275821 - RNA, 19 nt, Artificial Sequence
  Description of Artificial Sequence: Synthetic oligonucleotide
aagucaaggcuuaacuuuu

SEQ ID NO: 2275822 - RNA, 19 nt, Artificial Sequence
  Description of Artificial Sequence: Synthetic oligonucleotide
agacaucucucucuucagu

SEQ ID NO: 2275823 - RNA, 19 nt, Artificial Sequence
  Description of Artificial Sequence: Synthetic oligonucleotide
aaagugugaggcgaccgau

SEQ ID NO: 2275824 - RNA, 19 nt, Artificial Sequence
  Description of Artificial Sequence: Synthetic oligonucleotide
caucuuccucccucgacag

SEQ ID NO: 2275825 - RNA, 19 nt, Artificial Sequence
  Description of Artificial Sequence: Synthetic oligonucleotide
gaaucagcauuuccagcca

SEQ ID NO: 2275826 - RNA, 19 nt, Artificial Sequence
  Description of Artificial Sequence: Synthetic oligonucleotide
gcauguugcauauuaucac

SEQ ID NO: 2275827 - RNA, 19 nt, Artificial Sequence
  Description of Artificial Sequence: Synthetic oligonucleotide
uccaaaccauggaucuuca

SEQ ID NO: 2275828 - RNA, 19 nt, Artificial Sequence
  Description of Artificial Sequence: Synthetic oligonucleotide
gcucuacuucuuuagacug

SEQ ID NO: 2275829 - RNA, 19 nt, Artificial Sequence
  Description of Artificial Sequence: Synthetic oligonucleotide
uaggccuuauucacuugcu

SEQ ID NO: 2275830 - RNA, 19 nt, Artificial Sequence
  Description of Artificial Sequence: Synthetic oligonucleotide
cauaugcggugacaagagc

SEQ ID NO: 2275831 - RNA, 19 nt, Artificial Sequence
  Description of Artificial Sequence: Synthetic oligonucleotide
uccucauuacuuccagcuc

SEQ ID NO: 2275832 - RNA, 19 nt, Artificial Sequence
  Description of Artificial Sequence: Synthetic oligonucleotide
uucauccccugaauacaca

SEQ ID NO: 2275833 - RNA, 19 nt, Artificial Sequence
  Description of Artificial Sequence: Synthetic oligonucleotide
ucuacucgcgcgccaacaa

SEQ ID NO: 2275834 - RNA, 19 nt, Artificial Sequence
  Description of Artificial Sequence: Synthetic oligonucleotide
uauuaucacuguggagaag

SEQ ID NO: 2275835 - RNA, 19 nt, Artificial Sequence
  Description of Artificial Sequence: Synthetic oligonucleotide
acaggcuccgucugaugag

SEQ ID NO: 2275836 - RNA, 19 nt, Artificial Sequence
  Description of Artificial Sequence: Synthetic oligonucleotide
ggaucuucaagucaaggcu

SEQ ID NO: 2275837 - RNA, 19 nt, Artificial Sequence
  Description of Artificial Sequence: Synthetic oligonucleotide
ccagauguaaguuagacau

SEQ ID NO: 2275838 - RNA, 19 nt, Artificial Sequence
  Description of Artificial Sequence: Synthetic oligonucleotide
gauaggccuuauucacuug

SEQ ID NO: 2275839 - RNA, 19 nt, Artificial Sequence
  Description of Artificial Sequence: Synthetic oligonucleotide
uuucugaguagcucugcuu

SEQ ID NO: 2275840 - RNA, 19 nt, Artificial Sequence
  Description of Artificial Sequence: Synthetic oligonucleotide
uucaucuacucgcgcgcca

SEQ ID NO: 2275841 - RNA, 19 nt, Artificial Sequence
  Description of Artificial Sequence: Synthetic oligonucleotide
agcugcagaagcucuacuu

SEQ ID NO: 2275842 - RNA, 19 nt, Artificial Sequence
  Description of Artificial Sequence: Synthetic oligonucleotide
augcaaaccucucgauaug

SEQ ID NO: 2275843 - RNA, 19 nt, Artificial Sequence
  Description of Artificial Sequence: Synthetic oligonucleotide
augauucagaaugcagaug

SEQ ID NO: 2275844 - RNA, 19 nt, Artificial Sequence
  Description of Artificial Sequence: Synthetic oligonucleotide
cucuaucaaugcaaaccuc

SEQ ID NO: 2275845 - RNA, 19 nt, Artificial Sequence
  Description of Artificial Sequence: Synthetic oligonucleotide
gaauacacagagaguggca

SEQ ID NO: 2275846 - RNA, 19 nt, Artificial Sequence
  Description of Artificial Sequence: Synthetic oligonucleotide
gaugaggguggauuuaaau

SEQ ID NO: 2275847 - RNA, 19 nt, Artificial Sequence
  Description of Artificial Sequence: Synthetic oligonucleotide
uguggaccaucuuccuccc

SEQ ID NO: 2275848 - RNA, 19 nt, Artificial Sequence
  Description of Artificial Sequence: Synthetic oligonucleotide
ugcacacugcauacagccu

SEQ ID NO: 2275849 - RNA, 19 nt, Artificial Sequence
  Description of Artificial Sequence: Synthetic oligonucleotide
ucgcgcgccaacaagcuuu

SEQ ID NO: 2275850 - RNA, 19 nt, Artificial Sequence
  Description of Artificial Sequence: Synthetic oligonucleotide
cagugacuugccuuucuug

SEQ ID NO: 2275851 - RNA, 19 nt, Artificial Sequence
  Description of Artificial Sequence: Synthetic oligonucleotide
ggaauguuuuccugaggug

SEQ ID NO: 2275852 - RNA, 19 nt, Artificial Sequence
  Description of Artificial Sequence: Synthetic oligonucleotide
gcaugauaggccuuauuca

SEQ ID NO: 2275853 - RNA, 19 nt, Artificial Sequence
  Description of Artificial Sequence: Synthetic oligonucleotide
gaaugggugugcagugugc

SEQ ID NO: 2275854 - RNA, 19 nt, Artificial Sequence
  Description of Artificial Sequence: Synthetic oligonucleotide
gcauauuaucacuguggag

SEQ ID NO: 2275855 - RNA, 19 nt, Artificial Sequence
  Description of Artificial Sequence: Synthetic oligonucleotide
cagauguaaguuagacauc

SEQ ID NO: 2275856 - RNA, 19 nt, Artificial Sequence
  Description of Artificial Sequence: Synthetic oligonucleotide
cuauuuugaggucguggca

SEQ ID NO: 2275857 - RNA, 19 nt, Artificial Sequence
  Description of Artificial Sequence: Synthetic oligonucleotide
cuuccaaagcccuuauucu

SEQ ID NO: 2275858 - RNA, 19 nt, Artificial Sequence
  Description of Artificial Sequence: Synthetic oligonucleotide
uggaugaggguggauuuaa

SEQ ID NO: 2275859 - RNA, 19 nt, Artificial Sequence
  Description of Artificial Sequence: Synthetic oligonucleotide
ugcagaagcucuacuucuu

SEQ ID NO: 2275860 - RNA, 19 nt, Artificial Sequence
  Description of Artificial Sequence: Synthetic oligonucleotide
cuuguguuaccagauguaa

SEQ ID NO: 2275861 - RNA, 19 nt, Artificial Sequence
  Description of Artificial Sequence: Synthetic oligonucleotide
guggauuuaaauuccucau

SEQ ID NO: 2275862 - RNA, 19 nt, Artificial Sequence
  Description of Artificial Sequence: Synthetic oligonucleotide
caugauucagaaugcagau

SEQ ID NO: 2275863 - RNA, 19 nt, Artificial Sequence
  Description of Artificial Sequence: Synthetic oligonucleotide
caagucaaggcuuaacuuu

SEQ ID NO: 2275864 - RNA, 19 nt, Artificial Sequence
  Description of Artificial Sequence: Synthetic oligonucleotide
ggaaugggugugcagugug

SEQ ID NO: 2275865 - RNA, 19 nt, Artificial Sequence
  Description of Artificial Sequence: Synthetic oligonucleotide
cauuaccugcugaguuucc

SEQ ID NO: 2275866 - RNA, 19 nt, Artificial Sequence
  Description of Artificial Sequence: Synthetic oligonucleotide
aucaaagucguaggauaga

SEQ ID NO: 2275867 - RNA, 19 nt, Artificial Sequence
  Description of Artificial Sequence: Synthetic oligonucleotide
cauuacugccucucuucuc

SEQ ID NO: 2275868 - RNA, 19 nt, Artificial Sequence
  Description of Artificial Sequence: Synthetic oligonucleotide
agcccuuauucuuuucuuu

SEQ ID NO: 2275869 - RNA, 19 nt, Artificial Sequence
  Description of Artificial Sequence: Synthetic oligonucleotide
cuacucgcgcgccaacaag

SEQ ID NO: 2275870 - RNA, 19 nt, Artificial Sequence
  Description of Artificial Sequence: Synthetic oligonucleotide
auaugcaugauaggccuua

SEQ ID NO: 2275871 - RNA, 19 nt, Artificial Sequence
  Description of Artificial Sequence: Synthetic oligonucleotide
guagcuagcuguucuucaa

SEQ ID NO: 2275872 - RNA, 19 nt, Artificial Sequence
  Description of Artificial Sequence: Synthetic oligonucleotide
gaccgauucauccccugaa

SEQ ID NO: 2275873 - RNA, 19 nt, Artificial Sequence
  Description of Artificial Sequence: Synthetic oligonucleotide
agucaaggcuuaacuuuuc

SEQ ID NO: 2275874 - RNA, 19 nt, Artificial Sequence
  Description of Artificial Sequence: Synthetic oligonucleotide
gcuuaucaaagucguagga

SEQ ID NO: 2275875 - RNA, 19 nt, Artificial Sequence
  Description of Artificial Sequence: Synthetic oligonucleotide
accgauucauccccugaau

SEQ ID NO: 2275876 - RNA, 19 nt, Artificial Sequence
  Description of Artificial Sequence: Synthetic oligonucleotide
agcagugacuugccuuucu

SEQ ID NO: 2275877 - RNA, 19 nt, Artificial Sequence
  Description of Artificial Sequence: Synthetic oligonucleotide
gcauacagccugcuuauca

SEQ ID NO: 2275878 - RNA, 19 nt, Artificial Sequence
  Description of Artificial Sequence: Synthetic oligonucleotide
  modified_base (2)..(2): a, c, u, g, unknown or other
gnuaaaguagcuagcuguu

SEQ ID NO: 2275879 - RNA, 19 nt, Artificial Sequence
  Description of Artificial Sequence: Synthetic oligonucleotide
uggcauuacugccucucuu

SEQ ID NO: 2275880 - RNA, 19 nt, Artificial Sequence
  Description of Artificial Sequence: Synthetic oligonucleotide
ucccaguaugcauguugca

SEQ ID NO: 2275881 - RNA, 19 nt, Artificial Sequence
  Description of Artificial Sequence: Synthetic oligonucleotide
ccucccaguuggaugaggg

SEQ ID NO: 2275882 - RNA, 19 nt, Artificial Sequence
  Description of Artificial Sequence: Synthetic oligonucleotide
cuuguuccaaaccauggau

SEQ ID NO: 2275883 - RNA, 19 nt, Artificial Sequence
  Description of Artificial Sequence: Synthetic oligonucleotide
gcaaagugugaggcgaccg

SEQ ID NO: 2275884 - RNA, 19 nt, Artificial Sequence
  Description of Artificial Sequence: Synthetic oligonucleotide
gcucauucaauacuuucaa

SEQ ID NO: 2275885 - RNA, 19 nt, Artificial Sequence
  Description of Artificial Sequence: Synthetic oligonucleotide
cuucaucuacucgcgcgcc

SEQ ID NO: 2275886 - RNA, 19 nt, Artificial Sequence
  Description of Artificial Sequence: Synthetic oligonucleotide
cugcuugcacuuguguuac

SEQ ID NO: 2275887 - RNA, 19 nt, Artificial Sequence
  Description of Artificial Sequence: Synthetic oligonucleotide
cgauucauccccugaauac

SEQ ID NO: 2275888 - RNA, 19 nt, Artificial Sequence
  Description of Artificial Sequence: Synthetic oligonucleotide
auacacagagaguggcauu

SEQ ID NO: 2275889 - RNA, 19 nt, Artificial Sequence
  Description of Artificial Sequence: Synthetic oligonucleotide
gcuuucucaugauucagaa

SEQ ID NO: 2275890 - RNA, 19 nt, Artificial Sequence
  Description of Artificial Sequence: Synthetic oligonucleotide
uuuugaggucguggcauuc

SEQ ID NO: 2275891 - RNA, 19 nt, Artificial Sequence
  Description of Artificial Sequence: Synthetic oligonucleotide
uuccaccucuguucuuagc

SEQ ID NO: 2275892 - RNA, 19 nt, Artificial Sequence
  Description of Artificial Sequence: Synthetic oligonucleotide
uugaggucguggcauucuu

SEQ ID NO: 2275893 - RNA, 19 nt, Artificial Sequence
  Description of Artificial Sequence: Synthetic oligonucleotide
ucguggcauucuuuccuca

SEQ ID NO: 2275894 - RNA, 19 nt, Artificial Sequence
  Description of Artificial Sequence: Synthetic oligonucleotide
ucaucuacucgcgcgccaa

SEQ ID NO: 2275895 - RNA, 19 nt, Artificial Sequence
  Description of Artificial Sequence: Synthetic oligonucleotide
ugaggucguggcauucuuu

SEQ ID NO: 2275896 - RNA, 19 nt, Artificial Sequence
  Description of Artificial Sequence: Synthetic oligonucleotide
ucauuacuuccagcucuug

SEQ ID NO: 2275897 - RNA, 19 nt, Artificial Sequence
  Description of Artificial Sequence: Synthetic oligonucleotide
guuagacaucucucucuuc

SEQ ID NO: 2275898 - RNA, 19 nt, Artificial Sequence
  Description of Artificial Sequence: Synthetic oligonucleotide
cacuuguguuaccagaugu

SEQ ID NO: 2275899 - RNA, 19 nt, Artificial Sequence
  Description of Artificial Sequence: Synthetic oligonucleotide
gccuuauucacuugcucuc

SEQ ID NO: 2275900 - RNA, 19 nt, Artificial Sequence
  Description of Artificial Sequence: Synthetic oligonucleotide
gguggacccgucuguuugg

SEQ ID NO: 2275901 - RNA, 19 nt, Artificial Sequence
  Description of Artificial Sequence: Synthetic oligonucleotide
cuuaucaaagucguaggau

SEQ ID NO: 2275902 - RNA, 19 nt, Artificial Sequence
  Description of Artificial Sequence: Synthetic oligonucleotide
ggcuggaaucagcauuucc

SEQ ID NO: 2275903 - RNA, 19 nt, Artificial Sequence
  Description of Artificial Sequence: Synthetic oligonucleotide
aagucguaggauagauuuu

SEQ ID NO: 2275904 - RNA, 19 nt, Artificial Sequence
  Description of Artificial Sequence: Synthetic oligonucleotide
acuuguguuaccagaugua

SEQ ID NO: 2275905 - RNA, 19 nt, Artificial Sequence
  Description of Artificial Sequence: Synthetic oligonucleotide
gucguggcauucuuuccuc

SEQ ID NO: 2275906 - RNA, 19 nt, Artificial Sequence
  Description of Artificial Sequence: Synthetic oligonucleotide
agcugcucauucaauacuu

SEQ ID NO: 2275907 - RNA, 19 nt, Artificial Sequence
  Description of Artificial Sequence: Synthetic oligonucleotide
uuuccaccucccaguugga

SEQ ID NO: 2275908 - RNA, 19 nt, Artificial Sequence
  Description of Artificial Sequence: Synthetic oligonucleotide
ucccucgacaggcuccguc

SEQ ID NO: 2275909 - RNA, 19 nt, Artificial Sequence
  Description of Artificial Sequence: Synthetic oligonucleotide
cuucaguucccaguaugca

SEQ ID NO: 2275910 - RNA, 19 nt, Artificial Sequence
  Description of Artificial Sequence: Synthetic oligonucleotide
gcuagcuguucuucaagca

SEQ ID NO: 2275911 - RNA, 19 nt, Artificial Sequence
  Description of Artificial Sequence: Synthetic oligonucleotide
gaucuucaagucaaggcuu

SEQ ID NO: 2275912 - RNA, 19 nt, Artificial Sequence
  Description of Artificial Sequence: Synthetic oligonucleotide
cuugcucucgucccacaga

SEQ ID NO: 2275913 - RNA, 19 nt, Artificial Sequence
  Description of Artificial Sequence: Synthetic oligonucleotide
cuugauugcagcugagguu

SEQ ID NO: 2275914 - RNA, 19 nt, Artificial Sequence
  Description of Artificial Sequence: Synthetic oligonucleotide
cauuacuuccagcucuugu

SEQ ID NO: 2275915 - RNA, 19 nt, Artificial Sequence
  Description of Artificial Sequence: Synthetic oligonucleotide
ccauggaucuucaagucaa

SEQ ID NO: 2275916 - RNA, 19 nt, Artificial Sequence
  Description of Artificial Sequence: Synthetic oligonucleotide
aucuacucgcgcgccaaca

SEQ ID NO: 2275917 - RNA, 19 nt, Artificial Sequence
  Description of Artificial Sequence: Synthetic oligonucleotide
cuuagcugcagaagcucua

SEQ ID NO: 2275918 - RNA, 19 nt, Artificial Sequence
  Description of Artificial Sequence: Synthetic oligonucleotide
cugcagaagcucuacuucu

SEQ ID NO: 2275919 - RNA, 19 nt, Artificial Sequence
  Description of Artificial Sequence: Synthetic oligonucleotide
gauugcagcugagguuuuc

SEQ ID NO: 2275920 - RNA, 19 nt, Artificial Sequence
  Description of Artificial Sequence: Synthetic oligonucleotide
gagcaaagugugaggcgac

SEQ ID NO: 2275921 - RNA, 19 nt, Artificial Sequence
  Description of Artificial Sequence: Synthetic oligonucleotide
agcucuuguuccaaaccau

SEQ ID NO: 2275922 - RNA, 19 nt, Artificial Sequence
  Description of Artificial Sequence: Synthetic oligonucleotide
gcucucgucccacagaacu

SEQ ID NO: 2275923 - RNA, 19 nt, Artificial Sequence
  Description of Artificial Sequence: Synthetic oligonucleotide
ugcucucgucccacagaac

SEQ ID NO: 2275924 - RNA, 19 nt, Artificial Sequence
  Description of Artificial Sequence: Synthetic oligonucleotide
guucuuagcugcagaagcu

SEQ ID NO: 2275925 - RNA, 19 nt, Artificial Sequence
  Description of Artificial Sequence: Synthetic oligonucleotide
cguaggauagauuuugaua

SEQ ID NO: 2275926 - RNA, 19 nt, Artificial Sequence
  Description of Artificial Sequence: Synthetic oligonucleotide
aggguggauuuaaauuccu

SEQ ID NO: 2275927 - RNA, 19 nt, Artificial Sequence
  Description of Artificial Sequence: Synthetic oligonucleotide
gcagugugcacacugcaua

SEQ ID NO: 2275928 - RNA, 19 nt, Artificial Sequence
  Description of Artificial Sequence: Synthetic oligonucleotide
cuuucugaguagcucugcu

SEQ ID NO: 2275929 - RNA, 19 nt, Artificial Sequence
  Description of Artificial Sequence: Synthetic oligonucleotide
aucuucaagucaaggcuua

SEQ ID NO: 2275930 - RNA, 19 nt, Artificial Sequence
  Description of Artificial Sequence: Synthetic oligonucleotide
aagugugaggcgaccgauu

SEQ ID NO: 2275931 - RNA, 19 nt, Artificial Sequence
  Description of Artificial Sequence: Synthetic oligonucleotide
ugcuugcacuuguguuacc

SEQ ID NO: 2275932 - RNA, 19 nt, Artificial Sequence
  Description of Artificial Sequence: Synthetic oligonucleotide
  modified_base (18)..(18): a, c, u, g, unknown or other
ggauagauuuugauaagnu

SEQ ID NO: 2275933 - RNA, 19 nt, Artificial Sequence
  Description of Artificial Sequence: Synthetic oligonucleotide
ccaacaagcuuuucuucca

SEQ ID NO: 2275934 - RNA, 19 nt, Artificial Sequence
  Description of Artificial Sequence: Synthetic oligonucleotide
uggacccgucuguuuggcu

SEQ ID NO: 2275935 - RNA, 19 nt, Artificial Sequence
  Description of Artificial Sequence: Synthetic oligonucleotide
gucguaggauagauuuuga

SEQ ID NO: 2275936 - RNA, 19 nt, Artificial Sequence
  Description of Artificial Sequence: Synthetic oligonucleotide
ugauugcagcugagguuuu

SEQ ID NO: 2275937 - RNA, 19 nt, Artificial Sequence
  Description of Artificial Sequence: Synthetic oligonucleotide
cugaguagcucugcuugca

SEQ ID NO: 2275938 - RNA, 19 nt, Artificial Sequence
  Description of Artificial Sequence: Synthetic oligonucleotide
gcuugcacuuguguuacca

SEQ ID NO: 2275939 - RNA, 19 nt, Artificial Sequence
  Description of Artificial Sequence: Synthetic oligonucleotide
uucaagcaguuuggcugga

SEQ ID NO: 2275940 - RNA, 19 nt, Artificial Sequence
  Description of Artificial Sequence: Synthetic oligonucleotide
ucgucccacagaacuuguu

SEQ ID NO: 2275941 - RNA, 19 nt, Artificial Sequence
  Description of Artificial Sequence: Synthetic oligonucleotide
cucauuaccugcugaguuu

SEQ ID NO: 2275942 - RNA, 19 nt, Artificial Sequence
  Description of Artificial Sequence: Synthetic oligonucleotide
caucuacucgcgcgccaac

SEQ ID NO: 2275943 - RNA, 19 nt, Artificial Sequence
  Description of Artificial Sequence: Synthetic oligonucleotide
ccaucuuccucccucgaca

SEQ ID NO: 2275944 - RNA, 19 nt, Artificial Sequence
  Description of Artificial Sequence: Synthetic oligonucleotide
ccaguaugcauguugcaua

SEQ ID NO: 2275945 - RNA, 19 nt, Artificial Sequence
  Description of Artificial Sequence: Synthetic oligonucleotide
gcagggaaugggugugcag

SEQ ID NO: 2275946 - RNA, 19 nt, Artificial Sequence
  Description of Artificial Sequence: Synthetic oligonucleotide
agccagcagugacuugccu

SEQ ID NO: 2275947 - RNA, 19 nt, Artificial Sequence
  Description of Artificial Sequence: Synthetic oligonucleotide
ggucguggcauucuuuccu

SEQ ID NO: 2275948 - RNA, 19 nt, Artificial Sequence
  Description of Artificial Sequence: Synthetic oligonucleotide
cagggaaugggugugcagu

SEQ ID NO: 2275949 - RNA, 19 nt, Artificial Sequence
  Description of Artificial Sequence: Synthetic oligonucleotide
uggcuuucuguagcucuau

SEQ ID NO: 2275950 - RNA, 19 nt, Artificial Sequence
  Description of Artificial Sequence: Synthetic oligonucleotide
ugcauacagccugcuuauc

SEQ ID NO: 2275951 - RNA, 19 nt, Artificial Sequence
  Description of Artificial Sequence: Synthetic oligonucleotide
ccucauuacuuccagcucu

SEQ ID NO: 2275952 - RNA, 19 nt, Artificial Sequence
  Description of Artificial Sequence: Synthetic oligonucleotide
acucgcgcgccaacaagcu

SEQ ID NO: 2275953 - RNA, 19 nt, Artificial Sequence
  Description of Artificial Sequence: Synthetic oligonucleotide
cugcauacagccugcuuau

SEQ ID NO: 2275954 - RNA, 19 nt, Artificial Sequence
  Description of Artificial Sequence: Synthetic oligonucleotide
caagcaguuuggcuggaau

SEQ ID NO: 2275955 - RNA, 19 nt, Artificial Sequence
  Description of Artificial Sequence: Synthetic oligonucleotide
guggacccgucuguuuggc

SEQ ID NO: 2275956 - RNA, 19 nt, Artificial Sequence
  Description of Artificial Sequence: Synthetic oligonucleotide
cucgacaggcuccgucuga

SEQ ID NO: 2275957 - RNA, 19 nt, Artificial Sequence
  Description of Artificial Sequence: Synthetic oligonucleotide
ccgucugaugagaucucug

SEQ ID NO: 2275958 - RNA, 19 nt, Artificial Sequence
  Description of Artificial Sequence: Synthetic oligonucleotide
cacagagaguggcauuacu

SEQ ID NO: 2275959 - RNA, 19 nt, Artificial Sequence
  Description of Artificial Sequence: Synthetic oligonucleotide
guggcauuacugccucucu

SEQ ID NO: 2275960 - RNA, 19 nt, Artificial Sequence
  Description of Artificial Sequence: Synthetic oligonucleotide
cgauaugcaugauaggccu

SEQ ID NO: 2275961 - RNA, 19 nt, Artificial Sequence
  Description of Artificial Sequence: Synthetic oligonucleotide
caaagucguaggauagauu

SEQ ID NO: 2275962 - RNA, 19 nt, Artificial Sequence
  Description of Artificial Sequence: Synthetic oligonucleotide
cccuuauucuuuucuuuaa

SEQ ID NO: 2275963 - RNA, 19 nt, Artificial Sequence
  Description of Artificial Sequence: Synthetic oligonucleotide
acccgucuguuuggcuuuc

SEQ ID NO: 2275964 - RNA, 19 nt, Artificial Sequence
  Description of Artificial Sequence: Synthetic oligonucleotide
cucauuacuuccagcucuu

SEQ ID NO: 2275965 - RNA, 19 nt, Artificial Sequence
  Description of Artificial Sequence: Synthetic oligonucleotide
gcaaaccucucgauaugca

SEQ ID NO: 2275966 - RNA, 19 nt, Artificial Sequence
  Description of Artificial Sequence: Synthetic oligonucleotide
gauaugcaugauaggccuu

SEQ ID NO: 2275967 - RNA, 19 nt, Artificial Sequence
  Description of Artificial Sequence: Synthetic oligonucleotide
ccugcugaguuuccaccuc

SEQ ID NO: 2275968 - RNA, 19 nt, Artificial Sequence
  Description of Artificial Sequence: Synthetic oligonucleotide
caguucccaguaugcaugu

SEQ ID NO: 2275969 - RNA, 19 nt, Artificial Sequence
  Description of Artificial Sequence: Synthetic oligonucleotide
guguuaccagauguaaguu

SEQ ID NO: 2275970 - RNA, 19 nt, Artificial Sequence
  Description of Artificial Sequence: Synthetic oligonucleotide
gacccgucuguuuggcuuu

SEQ ID NO: 2275971 - RNA, 19 nt, Artificial Sequence
  Description of Artificial Sequence: Synthetic oligonucleotide
gcgaccgauucauccccug

SEQ ID NO: 2275972 - RNA, 19 nt, Artificial Sequence
  Description of Artificial Sequence: Synthetic oligonucleotide
cauuuccagccagcaguga

SEQ ID NO: 2275973 - RNA, 19 nt, Artificial Sequence
  Description of Artificial Sequence: Synthetic oligonucleotide
ccaauuuguucuucaaauu

SEQ ID NO: 2275974 - RNA, 19 nt, Artificial Sequence
  Description of Artificial Sequence: Synthetic oligonucleotide
ccgucuguuuggcuuucug

SEQ ID NO: 2275975 - RNA, 19 nt, Artificial Sequence
  Description of Artificial Sequence: Synthetic oligonucleotide
ggacccgucuguuuggcuu

SEQ ID NO: 2275976 - RNA, 19 nt, Artificial Sequence
  Description of Artificial Sequence: Synthetic oligonucleotide
cgccaacaagcuuuucuuc

SEQ ID NO: 2275977 - RNA, 19 nt, Artificial Sequence
  Description of Artificial Sequence: Synthetic oligonucleotide
gcucuauuuugaggucgug

SEQ ID NO: 2275978 - RNA, 19 nt, Artificial Sequence
  Description of Artificial Sequence: Synthetic oligonucleotide
cucccaguuggaugagggu

SEQ ID NO: 2275979 - RNA, 19 nt, Artificial Sequence
  Description of Artificial Sequence: Synthetic oligonucleotide
ccgauucauccccugaaua

SEQ ID NO: 2275980 - RNA, 19 nt, Artificial Sequence
  Description of Artificial Sequence: Synthetic oligonucleotide
gcgccaacaagcuuuucuu

SEQ ID NO: 2275981 - RNA, 19 nt, Artificial Sequence
  Description of Artificial Sequence: Synthetic oligonucleotide
gagguggacccgucuguuu

SEQ ID NO: 2275982 - RNA, 19 nt, Artificial Sequence
  Description of Artificial Sequence: Synthetic oligonucleotide
cucucgucccacagaacuu

SEQ ID NO: 2275983 - RNA, 19 nt, Artificial Sequence
  Description of Artificial Sequence: Synthetic oligonucleotide
cucgucccacagaacuugu

SEQ ID NO: 2275984 - RNA, 19 nt, Artificial Sequence
  Description of Artificial Sequence: Synthetic oligonucleotide
ccucauuaccugcugaguu

SEQ ID NO: 2275985 - RNA, 19 nt, Artificial Sequence
  Description of Artificial Sequence: Synthetic oligonucleotide
ccucgacaggcuccgucug

SEQ ID NO: 2275986 - RNA, 19 nt, Artificial Sequence
  Description of Artificial Sequence: Synthetic oligonucleotide
ccucucgauaugcaugaua

SEQ ID NO: 2275987 - RNA, 19 nt, Artificial Sequence
  Description of Artificial Sequence: Synthetic oligonucleotide
gcggugacaagagcaaagu

SEQ ID NO: 2275988 - RNA, 19 nt, Artificial Sequence
  Description of Artificial Sequence: Synthetic oligonucleotide
gccagcagugacuugccuu

SEQ ID NO: 2275989 - RNA, 19 nt, Artificial Sequence
  Description of Artificial Sequence: Synthetic oligonucleotide
cgucugaugagaucucugu

SEQ ID NO: 2275990 - RNA, 19 nt, Artificial Sequence
  Description of Artificial Sequence: Synthetic oligonucleotide
cuuccucccucgacaggcu

SEQ ID NO: 2275991 - RNA, 19 nt, Artificial Sequence
  Description of Artificial Sequence: Synthetic oligonucleotide
ggaugaggguggauuuaaa

SEQ ID NO: 2275992 - RNA, 19 nt, Artificial Sequence
  Description of Artificial Sequence: Synthetic oligonucleotide
accucucgauaugcaugau

SEQ ID NO: 2275993 - RNA, 19 nt, Artificial Sequence
  Description of Artificial Sequence: Synthetic oligonucleotide
gugaggcgaccgauucauc

SEQ ID NO: 2275994 - RNA, 19 nt, Artificial Sequence
  Description of Artificial Sequence: Synthetic oligonucleotide
aggcuccgucugaugagau

SEQ ID NO: 2275995 - RNA, 19 nt, Artificial Sequence
  Description of Artificial Sequence: Synthetic oligonucleotide
cugaaucuuuaagucucuu

SEQ ID NO: 2275996 - RNA, 19 nt, Artificial Sequence
  Description of Artificial Sequence: Synthetic oligonucleotide
cccugaauacacagagagu

SEQ ID NO: 2275997 - RNA, 19 nt, Artificial Sequence
  Description of Artificial Sequence: Synthetic oligonucleotide
gcagugacuugccuuucuu

SEQ ID NO: 2275998 - RNA, 19 nt, Artificial Sequence
  Description of Artificial Sequence: Synthetic oligonucleotide
ccaaaccauggaucuucaa

SEQ ID NO: 2275999 - RNA, 19 nt, Artificial Sequence
  Description of Artificial Sequence: Synthetic oligonucleotide
gggaaugggugugcagugu

SEQ ID NO: 2276000 - RNA, 19 nt, Artificial Sequence
  Description of Artificial Sequence: Synthetic oligonucleotide
cgcgccaacaagcuuuucu

SEQ ID NO: 2276001 - RNA, 19 nt, Artificial Sequence
  Description of Artificial Sequence: Synthetic oligonucleotide
cagcugagguuuucagcuu

SEQ ID NO: 2276002 - RNA, 19 nt, Artificial Sequence
  Description of Artificial Sequence: Synthetic oligonucleotide
cacugcauacagccugcuu

SEQ ID NO: 2276003 - RNA, 19 nt, Artificial Sequence
  Description of Artificial Sequence: Synthetic oligonucleotide
cccucgacaggcuccgucu

SEQ ID NO: 2276004 - RNA, 19 nt, Artificial Sequence
  Description of Artificial Sequence: Synthetic oligonucleotide
guggaccaucuuccucccu

SEQ ID NO: 2276005 - RNA, 19 nt, Artificial Sequence
  Description of Artificial Sequence: Synthetic oligonucleotide
cgaccgauucauccccuga

SEQ ID NO: 2276006 - RNA, 19 nt, Artificial Sequence
  Description of Artificial Sequence: Synthetic oligonucleotide
ccaguuggaugagggugga

SEQ ID NO: 2276007 - RNA, 19 nt, Artificial Sequence
  Description of Artificial Sequence: Synthetic oligonucleotide
cgacaggcuccgucugaug

SEQ ID NO: 2276008 - RNA, 19 nt, Artificial Sequence
  Description of Artificial Sequence: Synthetic oligonucleotide
gcugcucauucaauacuuu

SEQ ID NO: 2276009 - RNA, 19 nt, Artificial Sequence
  Description of Artificial Sequence: Synthetic oligonucleotide
cucgcgcgccaacaagcuu

SEQ ID NO: 2276010 - RNA, 19 nt, Artificial Sequence
  Description of Artificial Sequence: Synthetic oligonucleotide
cguggcauucuuuccucau

SEQ ID NO: 2276011 - RNA, 19 nt, Artificial Sequence
  Description of Artificial Sequence: Synthetic oligonucleotide
ggcgaccgauucauccccu

SEQ ID NO: 2276012 - RNA, 19 nt, Artificial Sequence
  Description of Artificial Sequence: Synthetic oligonucleotide
cccacagaacuuguuucuu

SEQ ID NO: 2276013 - RNA, 19 nt, Artificial Sequence
  Description of Artificial Sequence: Synthetic oligonucleotide
gcgcgccaacaagcuuuuc

SEQ ID NO: 2276014 - RNA, 19 nt, Artificial Sequence
  Description of Artificial Sequence: Synthetic oligonucleotide
cgcgcgccaacaagcuuuu

SEQ ID NO: 2276015 - RNA, 19 nt, Artificial Sequence
  Description of Artificial Sequence: Synthetic oligonucleotide
cccgucuguuuggcuuucu

SEQ ID NO: 2276016 - RNA, 19 nt, Artificial Sequence
  Description of Artificial Sequence: Synthetic oligonucleotide
  modified_base (1)..(1): a, c, u, g, unknown or other
nuaaaguagcuagcuguuc

SEQ ID NO: 2276017 - RNA, 19 nt, Artificial Sequence
  Description of Artificial Sequence: Synthetic oligonucleotide
auaacaaucacacacacac

SEQ ID NO: 2276018 - RNA, 19 nt, Artificial Sequence
  Description of Artificial Sequence: Synthetic oligonucleotide
aacaaucacacacacacac

SEQ ID NO: 2276019 - RNA, 19 nt, Artificial Sequence
  Description of Artificial Sequence: Synthetic oligonucleotide
uccuaggccauaaagaugg

SEQ ID NO: 2276020 - RNA, 19 nt, Artificial Sequence
  Description of Artificial Sequence: Synthetic oligonucleotide
uaaagggcuauuuugagcc

SEQ ID NO: 2276021 - RNA, 19 nt, Artificial Sequence
  Description of Artificial Sequence: Synthetic oligonucleotide
uggagauccaaguaggugg

SEQ ID NO: 2276022 - RNA, 19 nt, Artificial Sequence
  Description of Artificial Sequence: Synthetic oligonucleotide
aaaaggacuccagauuucc

SEQ ID NO: 2276023 - RNA, 19 nt, Artificial Sequence
  Description of Artificial Sequence: Synthetic oligonucleotide
aucacacacacacacacac

SEQ ID NO: 2276024 - RNA, 19 nt, Artificial Sequence
  Description of Artificial Sequence: Synthetic oligonucleotide
aagauaaaggcgucugggg

SEQ ID NO: 2276025 - RNA, 19 nt, Artificial Sequence
  Description of Artificial Sequence: Synthetic oligonucleotide
gaaaucacugcucaaagca

SEQ ID NO: 2276026 - RNA, 19 nt, Artificial Sequence
  Description of Artificial Sequence: Synthetic oligonucleotide
aaucccuacccucaagagg

SEQ ID NO: 2276027 - RNA, 19 nt, Artificial Sequence
  Description of Artificial Sequence: Synthetic oligonucleotide
uaggccauaaagauggacc

SEQ ID NO: 2276028 - RNA, 19 nt, Artificial Sequence
  Description of Artificial Sequence: Synthetic oligonucleotide
uccaccagcuacaugaucc

SEQ ID NO: 2276029 - RNA, 19 nt, Artificial Sequence
  Description of Artificial Sequence: Synthetic oligonucleotide
aaaccccauuuccacaugc

SEQ ID NO: 2276030 - RNA, 19 nt, Artificial Sequence
  Description of Artificial Sequence: Synthetic oligonucleotide
agcuacaugauccucagug

SEQ ID NO: 2276031 - RNA, 19 nt, Artificial Sequence
  Description of Artificial Sequence: Synthetic oligonucleotide
agagaagaagucaagaguc

SEQ ID NO: 2276032 - RNA, 19 nt, Artificial Sequence
  Description of Artificial Sequence: Synthetic oligonucleotide
ucugacaaaccccauuucc

SEQ ID NO: 2276033 - RNA, 19 nt, Artificial Sequence
  Description of Artificial Sequence: Synthetic oligonucleotide
uacugaaagaucaucccag

SEQ ID NO: 2276034 - RNA, 19 nt, Artificial Sequence
  Description of Artificial Sequence: Synthetic oligonucleotide
agaaaucacugcucaaagc

SEQ ID NO: 2276035 - RNA, 19 nt, Artificial Sequence
  Description of Artificial Sequence: Synthetic oligonucleotide
uagagaagaagucaagagu

SEQ ID NO: 2276036 - RNA, 19 nt, Artificial Sequence
  Description of Artificial Sequence: Synthetic oligonucleotide
cagaguaucugacaaaccc

SEQ ID NO: 2276037 - RNA, 19 nt, Artificial Sequence
  Description of Artificial Sequence: Synthetic oligonucleotide
auaaagauggaccugguuu

SEQ ID NO: 2276038 - RNA, 19 nt, Artificial Sequence
  Description of Artificial Sequence: Synthetic oligonucleotide
uagaaaucacugcucaaag

SEQ ID NO: 2276039 - RNA, 19 nt, Artificial Sequence
  Description of Artificial Sequence: Synthetic oligonucleotide
aauggcuacugaaagauca

SEQ ID NO: 2276040 - RNA, 19 nt, Artificial Sequence
  Description of Artificial Sequence: Synthetic oligonucleotide
cuagagaagaagucaagag

SEQ ID NO: 2276041 - RNA, 19 nt, Artificial Sequence
  Description of Artificial Sequence: Synthetic oligonucleotide
aagaagucaagaguccugg

SEQ ID NO: 2276042 - RNA, 19 nt, Artificial Sequence
  Description of Artificial Sequence: Synthetic oligonucleotide
uggcucauaacaaucacac

SEQ ID NO: 2276043 - RNA, 19 nt, Artificial Sequence
  Description of Artificial Sequence: Synthetic oligonucleotide
aagucaagaguccuggccu

SEQ ID NO: 2276044 - RNA, 19 nt, Artificial Sequence
  Description of Artificial Sequence: Synthetic oligonucleotide
uaucuugaguuccaguuca

SEQ ID NO: 2276045 - RNA, 19 nt, Artificial Sequence
  Description of Artificial Sequence: Synthetic oligonucleotide
aucccuacccucaagaggc

SEQ ID NO: 2276046 - RNA, 19 nt, Artificial Sequence
  Description of Artificial Sequence: Synthetic oligonucleotide
ucaagauaaaggcgucugg

SEQ ID NO: 2276047 - RNA, 19 nt, Artificial Sequence
  Description of Artificial Sequence: Synthetic oligonucleotide
gaguaauggcuacugaaag

SEQ ID NO: 2276048 - RNA, 19 nt, Artificial Sequence
  Description of Artificial Sequence: Synthetic oligonucleotide
ugagacugaaguaucuuga

SEQ ID NO: 2276049 - RNA, 19 nt, Artificial Sequence
  Description of Artificial Sequence: Synthetic oligonucleotide
acugaaagaucaucccagc

SEQ ID NO: 2276050 - RNA, 19 nt, Artificial Sequence
  Description of Artificial Sequence: Synthetic oligonucleotide
uuccaguucaagauccagg

SEQ ID NO: 2276051 - RNA, 19 nt, Artificial Sequence
  Description of Artificial Sequence: Synthetic oligonucleotide
ucuagcaucaggcuagaaa

SEQ ID NO: 2276052 - RNA, 19 nt, Artificial Sequence
  Description of Artificial Sequence: Synthetic oligonucleotide
ugagggaucaaucccuacc

SEQ ID NO: 2276053 - RNA, 19 nt, Artificial Sequence
  Description of Artificial Sequence: Synthetic oligonucleotide
ucagcauggagguauugag

SEQ ID NO: 2276054 - RNA, 19 nt, Artificial Sequence
  Description of Artificial Sequence: Synthetic oligonucleotide
gaagucaagaguccuggcc

SEQ ID NO: 2276055 - RNA, 19 nt, Artificial Sequence
  Description of Artificial Sequence: Synthetic oligonucleotide
ucuaaagggcuauuuugag

SEQ ID NO: 2276056 - RNA, 19 nt, Artificial Sequence
  Description of Artificial Sequence: Synthetic oligonucleotide
aaucacugcucaaagcagg

SEQ ID NO: 2276057 - RNA, 19 nt, Artificial Sequence
  Description of Artificial Sequence: Synthetic oligonucleotide
aguaucuugaguuccaguu

SEQ ID NO: 2276058 - RNA, 19 nt, Artificial Sequence
  Description of Artificial Sequence: Synthetic oligonucleotide
gcucauaacaaucacacac

SEQ ID NO: 2276059 - RNA, 19 nt, Artificial Sequence
  Description of Artificial Sequence: Synthetic oligonucleotide
agaguaucugacaaacccc

SEQ ID NO: 2276060 - RNA, 19 nt, Artificial Sequence
  Description of Artificial Sequence: Synthetic oligonucleotide
ucaaucccuacccucaaga

SEQ ID NO: 2276061 - RNA, 19 nt, Artificial Sequence
  Description of Artificial Sequence: Synthetic oligonucleotide
uugaguuccaguucaagau

SEQ ID NO: 2276062 - RNA, 19 nt, Artificial Sequence
  Description of Artificial Sequence: Synthetic oligonucleotide
ugugcuuggagauccaagu

SEQ ID NO: 2276063 - RNA, 19 nt, Artificial Sequence
  Description of Artificial Sequence: Synthetic oligonucleotide
gaaagaucaucccagccuc

SEQ ID NO: 2276064 - RNA, 19 nt, Artificial Sequence
  Description of Artificial Sequence: Synthetic oligonucleotide
uacaugauccucagugucc

SEQ ID NO: 2276065 - RNA, 19 nt, Artificial Sequence
  Description of Artificial Sequence: Synthetic oligonucleotide
gauccaaguagguggaaug

SEQ ID NO: 2276066 - RNA, 19 nt, Artificial Sequence
  Description of Artificial Sequence: Synthetic oligonucleotide
caaucacacacacacacac

SEQ ID NO: 2276067 - RNA, 19 nt, Artificial Sequence
  Description of Artificial Sequence: Synthetic oligonucleotide
uugaguaauggcuacugaa

SEQ ID NO: 2276068 - RNA, 19 nt, Artificial Sequence
  Description of Artificial Sequence: Synthetic oligonucleotide
auuucccaauucaaguucc

SEQ ID NO: 2276069 - RNA, 19 nt, Artificial Sequence
  Description of Artificial Sequence: Synthetic oligonucleotide
gagggaucaaucccuaccc

SEQ ID NO: 2276070 - RNA, 19 nt, Artificial Sequence
  Description of Artificial Sequence: Synthetic oligonucleotide
uccacaugcaucucggugu

SEQ ID NO: 2276071 - RNA, 19 nt, Artificial Sequence
  Description of Artificial Sequence: Synthetic oligonucleotide
caagauaaaggcgucuggg

SEQ ID NO: 2276072 - RNA, 19 nt, Artificial Sequence
  Description of Artificial Sequence: Synthetic oligonucleotide
auccaggggaccuuugugg

SEQ ID NO: 2276073 - RNA, 19 nt, Artificial Sequence
  Description of Artificial Sequence: Synthetic oligonucleotide
cucucuagcaucaggcuag

SEQ ID NO: 2276074 - RNA, 19 nt, Artificial Sequence
  Description of Artificial Sequence: Synthetic oligonucleotide
uuuuagggugggaaguucu

SEQ ID NO: 2276075 - RNA, 19 nt, Artificial Sequence
  Description of Artificial Sequence: Synthetic oligonucleotide
agaaauuccagguccugcu

SEQ ID NO: 2276076 - RNA, 19 nt, Artificial Sequence
  Description of Artificial Sequence: Synthetic oligonucleotide
aguaauggcuacugaaaga

SEQ ID NO: 2276077 - RNA, 19 nt, Artificial Sequence
  Description of Artificial Sequence: Synthetic oligonucleotide
aaaucacugcucaaagcag

SEQ ID NO: 2276078 - RNA, 19 nt, Artificial Sequence
  Description of Artificial Sequence: Synthetic oligonucleotide
uauugaguaauggcuacug

SEQ ID NO: 2276079 - RNA, 19 nt, Artificial Sequence
  Description of Artificial Sequence: Synthetic oligonucleotide
cucggugucacaaucagca

SEQ ID NO: 2276080 - RNA, 19 nt, Artificial Sequence
  Description of Artificial Sequence: Synthetic oligonucleotide
ugaaguaucuugaguucca

SEQ ID NO: 2276081 - RNA, 19 nt, Artificial Sequence
  Description of Artificial Sequence: Synthetic oligonucleotide
gagacugaaguaucuugag

SEQ ID NO: 2276082 - RNA, 19 nt, Artificial Sequence
  Description of Artificial Sequence: Synthetic oligonucleotide
ucaggcuagaaaucacugc

SEQ ID NO: 2276083 - RNA, 19 nt, Artificial Sequence
  Description of Artificial Sequence: Synthetic oligonucleotide
cacacacacacacacacac

SEQ ID NO: 2276084 - RNA, 19 nt, Artificial Sequence
  Description of Artificial Sequence: Synthetic oligonucleotide
gaccuuuguggacaugagg

SEQ ID NO: 2276085 - RNA, 19 nt, Artificial Sequence
  Description of Artificial Sequence: Synthetic oligonucleotide
uaaagauggaccugguuuu

SEQ ID NO: 2276086 - RNA, 19 nt, Artificial Sequence
  Description of Artificial Sequence: Synthetic oligonucleotide
  modified_base (5)..(5): a, c, u, g, unknown or other
aaacnguucugccacgguu

SEQ ID NO: 2276087 - RNA, 19 nt, Artificial Sequence
  Description of Artificial Sequence: Synthetic oligonucleotide
cauuuccacaugcaucucg

SEQ ID NO: 2276088 - RNA, 19 nt, Artificial Sequence
  Description of Artificial Sequence: Synthetic oligonucleotide
ugcagaguaucugacaaac

SEQ ID NO: 2276089 - RNA, 19 nt, Artificial Sequence
  Description of Artificial Sequence: Synthetic oligonucleotide
agaagucaagaguccuggc

SEQ ID NO: 2276090 - RNA, 19 nt, Artificial Sequence
  Description of Artificial Sequence: Synthetic oligonucleotide
ucucuuggucuaaagggcu

SEQ ID NO: 2276091 - RNA, 19 nt, Artificial Sequence
  Description of Artificial Sequence: Synthetic oligonucleotide
ugacaaaccccauuuccac

SEQ ID NO: 2276092 - RNA, 19 nt, Artificial Sequence
  Description of Artificial Sequence: Synthetic oligonucleotide
ugagccggccuucagucag

SEQ ID NO: 2276093 - RNA, 19 nt, Artificial Sequence
  Description of Artificial Sequence: Synthetic oligonucleotide
ugaguuccaguucaagauc

SEQ ID NO: 2276094 - RNA, 19 nt, Artificial Sequence
  Description of Artificial Sequence: Synthetic oligonucleotide
gguggaaugucucugggug

SEQ ID NO: 2276095 - RNA, 19 nt, Artificial Sequence
  Description of Artificial Sequence: Synthetic oligonucleotide
uuuugagccggccuucagu

SEQ ID NO: 2276096 - RNA, 19 nt, Artificial Sequence
  Description of Artificial Sequence: Synthetic oligonucleotide
aagggcuauuuugagccgg

SEQ ID NO: 2276097 - RNA, 19 nt, Artificial Sequence
  Description of Artificial Sequence: Synthetic oligonucleotide
uggagguauugaguaaugg

SEQ ID NO: 2276098 - RNA, 19 nt, Artificial Sequence
  Description of Artificial Sequence: Synthetic oligonucleotide
uggauagcugugcuuggag

SEQ ID NO: 2276099 - RNA, 19 nt, Artificial Sequence
  Description of Artificial Sequence: Synthetic oligonucleotide
ugggaaaaggacuccagau

SEQ ID NO: 2276100 - RNA, 19 nt, Artificial Sequence
  Description of Artificial Sequence: Synthetic oligonucleotide
uuugagccggccuucaguc

SEQ ID NO: 2276101 - RNA, 19 nt, Artificial Sequence
  Description of Artificial Sequence: Synthetic oligonucleotide
uccugagaugggaaaagga

SEQ ID NO: 2276102 - RNA, 19 nt, Artificial Sequence
  Description of Artificial Sequence: Synthetic oligonucleotide
ggagguauugaguaauggc

SEQ ID NO: 2276103 - RNA, 19 nt, Artificial Sequence
  Description of Artificial Sequence: Synthetic oligonucleotide
ucccaauucaaguuccagu

SEQ ID NO: 2276104 - RNA, 19 nt, Artificial Sequence
  Description of Artificial Sequence: Synthetic oligonucleotide
aaguaucuugaguuccagu

SEQ ID NO: 2276105 - RNA, 19 nt, Artificial Sequence
  Description of Artificial Sequence: Synthetic oligonucleotide
uuuguggacaugagggauc

SEQ ID NO: 2276106 - RNA, 19 nt, Artificial Sequence
  Description of Artificial Sequence: Synthetic oligonucleotide
aguucaagauccaggggac

SEQ ID NO: 2276107 - RNA, 19 nt, Artificial Sequence
  Description of Artificial Sequence: Synthetic oligonucleotide
cuugaguuccaguucaaga

SEQ ID NO: 2276108 - RNA, 19 nt, Artificial Sequence
  Description of Artificial Sequence: Synthetic oligonucleotide
cugaaguaucuugaguucc

SEQ ID NO: 2276109 - RNA, 19 nt, Artificial Sequence
  Description of Artificial Sequence: Synthetic oligonucleotide
ugggaaguucuccaccagc

SEQ ID NO: 2276110 - RNA, 19 nt, Artificial Sequence
  Description of Artificial Sequence: Synthetic oligonucleotide
aggccauaaagauggaccu

SEQ ID NO: 2276111 - RNA, 19 nt, Artificial Sequence
  Description of Artificial Sequence: Synthetic oligonucleotide
cugaaagaucaucccagcc

SEQ ID NO: 2276112 - RNA, 19 nt, Artificial Sequence
  Description of Artificial Sequence: Synthetic oligonucleotide
cucauaacaaucacacaca

SEQ ID NO: 2276113 - RNA, 19 nt, Artificial Sequence
  Description of Artificial Sequence: Synthetic oligonucleotide
ggugucacaaucagcaggg

SEQ ID NO: 2276114 - RNA, 19 nt, Artificial Sequence
  Description of Artificial Sequence: Synthetic oligonucleotide
aguuccuaggccauaaaga

SEQ ID NO: 2276115 - RNA, 19 nt, Artificial Sequence
  Description of Artificial Sequence: Synthetic oligonucleotide
cuaccugugagucugugca

SEQ ID NO: 2276116 - RNA, 19 nt, Artificial Sequence
  Description of Artificial Sequence: Synthetic oligonucleotide
uaacaaucacacacacaca

SEQ ID NO: 2276117 - RNA, 19 nt, Artificial Sequence
  Description of Artificial Sequence: Synthetic oligonucleotide
acaaaccccauuuccacau

SEQ ID NO: 2276118 - RNA, 19 nt, Artificial Sequence
  Description of Artificial Sequence: Synthetic oligonucleotide
uagguucugggugugagac

SEQ ID NO: 2276119 - RNA, 19 nt, Artificial Sequence
  Description of Artificial Sequence: Synthetic oligonucleotide
agacugaaguaucuugagu

SEQ ID NO: 2276120 - RNA, 19 nt, Artificial Sequence
  Description of Artificial Sequence: Synthetic oligonucleotide
gagaagaagucaagagucc

SEQ ID NO: 2276121 - RNA, 19 nt, Artificial Sequence
  Description of Artificial Sequence: Synthetic oligonucleotide
uuggagauccaaguaggug

SEQ ID NO: 2276122 - RNA, 19 nt, Artificial Sequence
  Description of Artificial Sequence: Synthetic oligonucleotide
cuacaugauccucaguguc

SEQ ID NO: 2276123 - RNA, 19 nt, Artificial Sequence
  Description of Artificial Sequence: Synthetic oligonucleotide
agucaagaguccuggccuc

SEQ ID NO: 2276124 - RNA, 19 nt, Artificial Sequence
  Description of Artificial Sequence: Synthetic oligonucleotide
caaagcaggaacagcugug

SEQ ID NO: 2276125 - RNA, 19 nt, Artificial Sequence
  Description of Artificial Sequence: Synthetic oligonucleotide
gaagaagucaagaguccug

SEQ ID NO: 2276126 - RNA, 19 nt, Artificial Sequence
  Description of Artificial Sequence: Synthetic oligonucleotide
auugaguaauggcuacuga

SEQ ID NO: 2276127 - RNA, 19 nt, Artificial Sequence
  Description of Artificial Sequence: Synthetic oligonucleotide
aucugacaaaccccauuuc

SEQ ID NO: 2276128 - RNA, 19 nt, Artificial Sequence
  Description of Artificial Sequence: Synthetic oligonucleotide
aaucagcagggccuagaga

SEQ ID NO: 2276129 - RNA, 19 nt, Artificial Sequence
  Description of Artificial Sequence: Synthetic oligonucleotide
cuagcaucaggcuagaaau

SEQ ID NO: 2276130 - RNA, 19 nt, Artificial Sequence
  Description of Artificial Sequence: Synthetic oligonucleotide
gagguauugaguaauggcu

SEQ ID NO: 2276131 - RNA, 19 nt, Artificial Sequence
  Description of Artificial Sequence: Synthetic oligonucleotide
  modified_base (3)..(3): a, c, u, g, unknown or other
acnguucugccacgguuuc

SEQ ID NO: 2276132 - RNA, 19 nt, Artificial Sequence
  Description of Artificial Sequence: Synthetic oligonucleotide
cuggagggcaggcaguucc

SEQ ID NO: 2276133 - RNA, 19 nt, Artificial Sequence
  Description of Artificial Sequence: Synthetic oligonucleotide
uucccuaccugugagucug

SEQ ID NO: 2276134 - RNA, 19 nt, Artificial Sequence
  Description of Artificial Sequence: Synthetic oligonucleotide
cucuggauagcugugcuug

SEQ ID NO: 2276135 - RNA, 19 nt, Artificial Sequence
  Description of Artificial Sequence: Synthetic oligonucleotide
agcaucaggcuagaaauca

SEQ ID NO: 2276136 - RNA, 19 nt, Artificial Sequence
  Description of Artificial Sequence: Synthetic oligonucleotide
uguccugagaugggaaaag

SEQ ID NO: 2276137 - RNA, 19 nt, Artificial Sequence
  Description of Artificial Sequence: Synthetic oligonucleotide
gaguaucugacaaacccca

SEQ ID NO: 2276138 - RNA, 19 nt, Artificial Sequence
  Description of Artificial Sequence: Synthetic oligonucleotide
aauucaaguuccaguggcu

SEQ ID NO: 2276139 - RNA, 19 nt, Artificial Sequence
  Description of Artificial Sequence: Synthetic oligonucleotide
gauccaggggaccuuugug

SEQ ID NO: 2276140 - RNA, 19 nt, Artificial Sequence
  Description of Artificial Sequence: Synthetic oligonucleotide
aguagguggaaugucucug

SEQ ID NO: 2276141 - RNA, 19 nt, Artificial Sequence
  Description of Artificial Sequence: Synthetic oligonucleotide
ugauccucaguguccugag

SEQ ID NO: 2276142 - RNA, 19 nt, Artificial Sequence
  Description of Artificial Sequence: Synthetic oligonucleotide
gcuacugaaagaucauccc

SEQ ID NO: 2276143 - RNA, 19 nt, Artificial Sequence
  Description of Artificial Sequence: Synthetic oligonucleotide
agaagaagucaagaguccu

SEQ ID NO: 2276144 - RNA, 19 nt, Artificial Sequence
  Description of Artificial Sequence: Synthetic oligonucleotide
cccaauucaaguuccagug

SEQ ID NO: 2276145 - RNA, 19 nt, Artificial Sequence
  Description of Artificial Sequence: Synthetic oligonucleotide
gccauaaagauggaccugg

SEQ ID NO: 2276146 - RNA, 19 nt, Artificial Sequence
  Description of Artificial Sequence: Synthetic oligonucleotide
uuagggugggaaguucucc

SEQ ID NO: 2276147 - RNA, 19 nt, Artificial Sequence
  Description of Artificial Sequence: Synthetic oligonucleotide
guaucuugaguuccaguuc

SEQ ID NO: 2276148 - RNA, 19 nt, Artificial Sequence
  Description of Artificial Sequence: Synthetic oligonucleotide
gaaguaucuugaguuccag

SEQ ID NO: 2276149 - RNA, 19 nt, Artificial Sequence
  Description of Artificial Sequence: Synthetic oligonucleotide
cugacaaaccccauuucca

SEQ ID NO: 2276150 - RNA, 19 nt, Artificial Sequence
  Description of Artificial Sequence: Synthetic oligonucleotide
caaucccuacccucaagag

SEQ ID NO: 2276151 - RNA, 19 nt, Artificial Sequence
  Description of Artificial Sequence: Synthetic oligonucleotide
uuuagggugggaaguucuc

SEQ ID NO: 2276152 - RNA, 19 nt, Artificial Sequence
  Description of Artificial Sequence: Synthetic oligonucleotide
cuacugaaagaucauccca

SEQ ID NO: 2276153 - RNA, 19 nt, Artificial Sequence
  Description of Artificial Sequence: Synthetic oligonucleotide
aguuccaguggcucucuug

SEQ ID NO: 2276154 - RNA, 19 nt, Artificial Sequence
  Description of Artificial Sequence: Synthetic oligonucleotide
  modified_base (4)..(4): a, c, u, g, unknown or other
aacnguucugccacgguuu

SEQ ID NO: 2276155 - RNA, 19 nt, Artificial Sequence
  Description of Artificial Sequence: Synthetic oligonucleotide
uggucuaaagggcuauuuu

SEQ ID NO: 2276156 - RNA, 19 nt, Artificial Sequence
  Description of Artificial Sequence: Synthetic oligonucleotide
uuucccaauucaaguucca

SEQ ID NO: 2276157 - RNA, 19 nt, Artificial Sequence
  Description of Artificial Sequence: Synthetic oligonucleotide
ggaggcuugucucagcagc

SEQ ID NO: 2276158 - RNA, 19 nt, Artificial Sequence
  Description of Artificial Sequence: Synthetic oligonucleotide
ucacacacacacacacaca

SEQ ID NO: 2276159 - RNA, 19 nt, Artificial Sequence
  Description of Artificial Sequence: Synthetic oligonucleotide
agggugggaaguucuccac

SEQ ID NO: 2276160 - RNA, 19 nt, Artificial Sequence
  Description of Artificial Sequence: Synthetic oligonucleotide
augagggaucaaucccuac

SEQ ID NO: 2276161 - RNA, 19 nt, Artificial Sequence
  Description of Artificial Sequence: Synthetic oligonucleotide
agccaacucagcagcaccc

SEQ ID NO: 2276162 - RNA, 19 nt, Artificial Sequence
  Description of Artificial Sequence: Synthetic oligonucleotide
ccagauuucccaauucaag

SEQ ID NO: 2276163 - RNA, 19 nt, Artificial Sequence
  Description of Artificial Sequence: Synthetic oligonucleotide
uccaggggaccuuugugga

SEQ ID NO: 2276164 - RNA, 19 nt, Artificial Sequence
  Description of Artificial Sequence: Synthetic oligonucleotide
ggucaguagguucugggug

SEQ ID NO: 2276165 - RNA, 19 nt, Artificial Sequence
  Description of Artificial Sequence: Synthetic oligonucleotide
gucuaaagggcuauuuuga

SEQ ID NO: 2276166 - RNA, 19 nt, Artificial Sequence
  Description of Artificial Sequence: Synthetic oligonucleotide
gguauugaguaauggcuac

SEQ ID NO: 2276167 - RNA, 19 nt, Artificial Sequence
  Description of Artificial Sequence: Synthetic oligonucleotide
cugugcuuggagauccaag

SEQ ID NO: 2276168 - RNA, 19 nt, Artificial Sequence
  Description of Artificial Sequence: Synthetic oligonucleotide
gacaaaccccauuuccaca

SEQ ID NO: 2276169 - RNA, 19 nt, Artificial Sequence
  Description of Artificial Sequence: Synthetic oligonucleotide
uaauggcuacugaaagauc

SEQ ID NO: 2276170 - RNA, 19 nt, Artificial Sequence
  Description of Artificial Sequence: Synthetic oligonucleotide
ggcuacugaaagaucaucc

SEQ ID NO: 2276171 - RNA, 19 nt, Artificial Sequence
  Description of Artificial Sequence: Synthetic oligonucleotide
acugcucaaagcaggaaca

SEQ ID NO: 2276172 - RNA, 19 nt, Artificial Sequence
  Description of Artificial Sequence: Synthetic oligonucleotide
gaaugucucugggugguug

SEQ ID NO: 2276173 - RNA, 19 nt, Artificial Sequence
  Description of Artificial Sequence: Synthetic oligonucleotide
cuagaaaucacugcucaaa

SEQ ID NO: 2276174 - RNA, 19 nt, Artificial Sequence
  Description of Artificial Sequence: Synthetic oligonucleotide
ucugggugugagacugaag

SEQ ID NO: 2276175 - RNA, 19 nt, Artificial Sequence
  Description of Artificial Sequence: Synthetic oligonucleotide
ugggugguuggguggaggc

SEQ ID NO: 2276176 - RNA, 19 nt, Artificial Sequence
  Description of Artificial Sequence: Synthetic oligonucleotide
aaucacacacacacacaca

SEQ ID NO: 2276177 - RNA, 19 nt, Artificial Sequence
  Description of Artificial Sequence: Synthetic oligonucleotide
uccuggccucucaagauaa

SEQ ID NO: 2276178 - RNA, 19 nt, Artificial Sequence
  Description of Artificial Sequence: Synthetic oligonucleotide
acaugagggaucaaucccu

SEQ ID NO: 2276179 - RNA, 19 nt, Artificial Sequence
  Description of Artificial Sequence: Synthetic oligonucleotide
  modified_base (7)..(7): a, c, u, g, unknown or other
ggaaacnguucugccacgg

SEQ ID NO: 2276180 - RNA, 19 nt, Artificial Sequence
  Description of Artificial Sequence: Synthetic oligonucleotide
gcuuggagauccaaguagg

SEQ ID NO: 2276181 - RNA, 19 nt, Artificial Sequence
  Description of Artificial Sequence: Synthetic oligonucleotide
uccugcagaguaucugaca

SEQ ID NO: 2276182 - RNA, 19 nt, Artificial Sequence
  Description of Artificial Sequence: Synthetic oligonucleotide
aucaggcuagaaaucacug

SEQ ID NO: 2276183 - RNA, 19 nt, Artificial Sequence
  Description of Artificial Sequence: Synthetic oligonucleotide
guuccuaggccauaaagau

SEQ ID NO: 2276184 - RNA, 19 nt, Artificial Sequence
  Description of Artificial Sequence: Synthetic oligonucleotide
gauagcugugcuuggagau

SEQ ID NO: 2276185 - RNA, 19 nt, Artificial Sequence
  Description of Artificial Sequence: Synthetic oligonucleotide
aucaaucccuacccucaag

SEQ ID NO: 2276186 - RNA, 19 nt, Artificial Sequence
  Description of Artificial Sequence: Synthetic oligonucleotide
accacugccuggcucauaa

SEQ ID NO: 2276187 - RNA, 19 nt, Artificial Sequence
  Description of Artificial Sequence: Synthetic oligonucleotide
gaguccuggccucucaaga

SEQ ID NO: 2276188 - RNA, 19 nt, Artificial Sequence
  Description of Artificial Sequence: Synthetic oligonucleotide
gagggcaggcaguuccuag

SEQ ID NO: 2276189 - RNA, 19 nt, Artificial Sequence
  Description of Artificial Sequence: Synthetic oligonucleotide
ucucaagauaaaggcgucu

SEQ ID NO: 2276190 - RNA, 19 nt, Artificial Sequence
  Description of Artificial Sequence: Synthetic oligonucleotide
uggaaugucucuggguggu

SEQ ID NO: 2276191 - RNA, 19 nt, Artificial Sequence
  Description of Artificial Sequence: Synthetic oligonucleotide
ucggugucacaaucagcag

SEQ ID NO: 2276192 - RNA, 19 nt, Artificial Sequence
  Description of Artificial Sequence: Synthetic oligonucleotide
auuuugagccggccuucag

SEQ ID NO: 2276193 - RNA, 19 nt, Artificial Sequence
  Description of Artificial Sequence: Synthetic oligonucleotide
cagauuucccaauucaagu

SEQ ID NO: 2276194 - RNA, 19 nt, Artificial Sequence
  Description of Artificial Sequence: Synthetic oligonucleotide
acaugauccucaguguccu

SEQ ID NO: 2276195 - RNA, 19 nt, Artificial Sequence
  Description of Artificial Sequence: Synthetic oligonucleotide
guaauggcuacugaaagau

SEQ ID NO: 2276196 - RNA, 19 nt, Artificial Sequence
  Description of Artificial Sequence: Synthetic oligonucleotide
agauccaggggaccuuugu

SEQ ID NO: 2276197 - RNA, 19 nt, Artificial Sequence
  Description of Artificial Sequence: Synthetic oligonucleotide
guuucccuaccugugaguc

SEQ ID NO: 2276198 - RNA, 19 nt, Artificial Sequence
  Description of Artificial Sequence: Synthetic oligonucleotide
cacgguuucccuaccugug

SEQ ID NO: 2276199 - RNA, 19 nt, Artificial Sequence
  Description of Artificial Sequence: Synthetic oligonucleotide
cuggcucauaacaaucaca

SEQ ID NO: 2276200 - RNA, 19 nt, Artificial Sequence
  Description of Artificial Sequence: Synthetic oligonucleotide
  modified_base (9)..(9): a, c, u, g, unknown or other
gcggaaacnguucugccac

SEQ ID NO: 2276201 - RNA, 19 nt, Artificial Sequence
  Description of Artificial Sequence: Synthetic oligonucleotide
gucucugggugguugggug

SEQ ID NO: 2276202 - RNA, 19 nt, Artificial Sequence
  Description of Artificial Sequence: Synthetic oligonucleotide
cagccaacucagcagcacc

SEQ ID NO: 2276203 - RNA, 19 nt, Artificial Sequence
  Description of Artificial Sequence: Synthetic oligonucleotide
guccugagaugggaaaagg

SEQ ID NO: 2276204 - RNA, 19 nt, Artificial Sequence
  Description of Artificial Sequence: Synthetic oligonucleotide
cucucaagauaaaggcguc

SEQ ID NO: 2276205 - RNA, 19 nt, Artificial Sequence
  Description of Artificial Sequence: Synthetic oligonucleotide
gagaugggaaaaggacucc

SEQ ID NO: 2276206 - RNA, 19 nt, Artificial Sequence
  Description of Artificial Sequence: Synthetic oligonucleotide
uuucccuaccugugagucu

SEQ ID NO: 2276207 - RNA, 19 nt, Artificial Sequence
  Description of Artificial Sequence: Synthetic oligonucleotide
uauuuugagccggccuuca

SEQ ID NO: 2276208 - RNA, 19 nt, Artificial Sequence
  Description of Artificial Sequence: Synthetic oligonucleotide
agaugggaaaaggacucca

SEQ ID NO: 2276209 - RNA, 19 nt, Artificial Sequence
  Description of Artificial Sequence: Synthetic oligonucleotide
cagucaggucaguagguuc

SEQ ID NO: 2276210 - RNA, 19 nt, Artificial Sequence
  Description of Artificial Sequence: Synthetic oligonucleotide
ggcuagaaaucacugcuca

SEQ ID NO: 2276211 - RNA, 19 nt, Artificial Sequence
  Description of Artificial Sequence: Synthetic oligonucleotide
augauccucaguguccuga

SEQ ID NO: 2276212 - RNA, 19 nt, Artificial Sequence
  Description of Artificial Sequence: Synthetic oligonucleotide
uccaaguagguggaauguc

SEQ ID NO: 2276213 - RNA, 19 nt, Artificial Sequence
  Description of Artificial Sequence: Synthetic oligonucleotide
uggaggcuugucucagcag

SEQ ID NO: 2276214 - RNA, 19 nt, Artificial Sequence
  Description of Artificial Sequence: Synthetic oligonucleotide
auccaaguagguggaaugu

SEQ ID NO: 2276215 - RNA, 19 nt, Artificial Sequence
  Description of Artificial Sequence: Synthetic oligonucleotide
caggcuagaaaucacugcu

SEQ ID NO: 2276216 - RNA, 19 nt, Artificial Sequence
  Description of Artificial Sequence: Synthetic oligonucleotide
ccaauucaaguuccagugg

SEQ ID NO: 2276217 - RNA, 19 nt, Artificial Sequence
  Description of Artificial Sequence: Synthetic oligonucleotide
ugugagacugaaguaucuu

SEQ ID NO: 2276218 - RNA, 19 nt, Artificial Sequence
  Description of Artificial Sequence: Synthetic oligonucleotide
aggcuagaaaucacugcuc

SEQ ID NO: 2276219 - RNA, 19 nt, Artificial Sequence
  Description of Artificial Sequence: Synthetic oligonucleotide
agggcuauuuugagccggc

SEQ ID NO: 2276220 - RNA, 19 nt, Artificial Sequence
  Description of Artificial Sequence: Synthetic oligonucleotide
gaacagcuguguccugcag

SEQ ID NO: 2276221 - RNA, 19 nt, Artificial Sequence
  Description of Artificial Sequence: Synthetic oligonucleotide
gaggcuugucucagcagcc

SEQ ID NO: 2276222 - RNA, 19 nt, Artificial Sequence
  Description of Artificial Sequence: Synthetic oligonucleotide
accagcuacaugauccuca

SEQ ID NO: 2276223 - RNA, 19 nt, Artificial Sequence
  Description of Artificial Sequence: Synthetic oligonucleotide
cuaggccauaaagauggac

SEQ ID NO: 2276224 - RNA, 19 nt, Artificial Sequence
  Description of Artificial Sequence: Synthetic oligonucleotide
acgguuucccuaccuguga

SEQ ID NO: 2276225 - RNA, 19 nt, Artificial Sequence
  Description of Artificial Sequence: Synthetic oligonucleotide
aaagaucaucccagccucu

SEQ ID NO: 2276226 - RNA, 19 nt, Artificial Sequence
  Description of Artificial Sequence: Synthetic oligonucleotide
agguauugaguaauggcua

SEQ ID NO: 2276227 - RNA, 19 nt, Artificial Sequence
  Description of Artificial Sequence: Synthetic oligonucleotide
  modified_base (10)..(10): a, c, u, g, unknown or other
ggcggaaacnguucugcca

SEQ ID NO: 2276228 - RNA, 19 nt, Artificial Sequence
  Description of Artificial Sequence: Synthetic oligonucleotide
ugggugugagacugaagua

SEQ ID NO: 2276229 - RNA, 19 nt, Artificial Sequence
  Description of Artificial Sequence: Synthetic oligonucleotide
agggaucaaucccuacccu

SEQ ID NO: 2276230 - RNA, 19 nt, Artificial Sequence
  Description of Artificial Sequence: Synthetic oligonucleotide
acaaucacacacacacaca

SEQ ID NO: 2276231 - RNA, 19 nt, Artificial Sequence
  Description of Artificial Sequence: Synthetic oligonucleotide
agauccaaguagguggaau

SEQ ID NO: 2276232 - RNA, 19 nt, Artificial Sequence
  Description of Artificial Sequence: Synthetic oligonucleotide
ucuuggucuaaagggcuau

SEQ ID NO: 2276233 - RNA, 19 nt, Artificial Sequence
  Description of Artificial Sequence: Synthetic oligonucleotide
uggcucucuuggucuaaag

SEQ ID NO: 2276234 - RNA, 19 nt, Artificial Sequence
  Description of Artificial Sequence: Synthetic oligonucleotide
gccucucaagauaaaggcg

SEQ ID NO: 2276235 - RNA, 19 nt, Artificial Sequence
  Description of Artificial Sequence: Synthetic oligonucleotide
cugcucaaagcaggaacag

SEQ ID NO: 2276236 - RNA, 19 nt, Artificial Sequence
  Description of Artificial Sequence: Synthetic oligonucleotide
aucccagccucucuggaua

SEQ ID NO: 2276237 - RNA, 19 nt, Artificial Sequence
  Description of Artificial Sequence: Synthetic oligonucleotide
ggugggaaguucuccacca

SEQ ID NO: 2276238 - RNA, 19 nt, Artificial Sequence
  Description of Artificial Sequence: Synthetic oligonucleotide
cugugcacagggcucagca

SEQ ID NO: 2276239 - RNA, 19 nt, Artificial Sequence
  Description of Artificial Sequence: Synthetic oligonucleotide
cuauuuugagccggccuuc

SEQ ID NO: 2276240 - RNA, 19 nt, Artificial Sequence
  Description of Artificial Sequence: Synthetic oligonucleotide
caucucggugucacaauca

SEQ ID NO: 2276241 - RNA, 19 nt, Artificial Sequence
  Description of Artificial Sequence: Synthetic oligonucleotide
uuucucuggagggcaggca

SEQ ID NO: 2276242 - RNA, 19 nt, Artificial Sequence
  Description of Artificial Sequence: Synthetic oligonucleotide
accugugagucugugcaca

SEQ ID NO: 2276243 - RNA, 19 nt, Artificial Sequence
  Description of Artificial Sequence: Synthetic oligonucleotide
ugugcacagggcucagcau

SEQ ID NO: 2276244 - RNA, 19 nt, Artificial Sequence
  Description of Artificial Sequence: Synthetic oligonucleotide
uggcuacugaaagaucauc

SEQ ID NO: 2276245 - RNA, 19 nt, Artificial Sequence
  Description of Artificial Sequence: Synthetic oligonucleotide
gugggaaguucuccaccag

SEQ ID NO: 2276246 - RNA, 19 nt, Artificial Sequence
  Description of Artificial Sequence: Synthetic oligonucleotide
ucagucaggucaguagguu

SEQ ID NO: 2276247 - RNA, 19 nt, Artificial Sequence
  Description of Artificial Sequence: Synthetic oligonucleotide
uaccugugagucugugcac

SEQ ID NO: 2276248 - RNA, 19 nt, Artificial Sequence
  Description of Artificial Sequence: Synthetic oligonucleotide
agucugugcacagggcuca

SEQ ID NO: 2276249 - RNA, 19 nt, Artificial Sequence
  Description of Artificial Sequence: Synthetic oligonucleotide
gaucaaucccuacccucaa

SEQ ID NO: 2276250 - RNA, 19 nt, Artificial Sequence
  Description of Artificial Sequence: Synthetic oligonucleotide
gggaucaaucccuacccuc

SEQ ID NO: 2276251 - RNA, 19 nt, Artificial Sequence
  Description of Artificial Sequence: Synthetic oligonucleotide
ugcaucucggugucacaau

SEQ ID NO: 2276252 - RNA, 19 nt, Artificial Sequence
  Description of Artificial Sequence: Synthetic oligonucleotide
ucucuggauagcugugcuu

SEQ ID NO: 2276253 - RNA, 19 nt, Artificial Sequence
  Description of Artificial Sequence: Synthetic oligonucleotide
gcaggcaguuccuaggcca

SEQ ID NO: 2276254 - RNA, 19 nt, Artificial Sequence
  Description of Artificial Sequence: Synthetic oligonucleotide
ggaucaaucccuacccuca

SEQ ID NO: 2276255 - RNA, 19 nt, Artificial Sequence
  Description of Artificial Sequence: Synthetic oligonucleotide
auggagguauugaguaaug

SEQ ID NO: 2276256 - RNA, 19 nt, Artificial Sequence
  Description of Artificial Sequence: Synthetic oligonucleotide
guguccugcagaguaucug

SEQ ID NO: 2276257 - RNA, 19 nt, Artificial Sequence
  Description of Artificial Sequence: Synthetic oligonucleotide
augcaucucggugucacaa

SEQ ID NO: 2276258 - RNA, 19 nt, Artificial Sequence
  Description of Artificial Sequence: Synthetic oligonucleotide
guagguucugggugugaga

SEQ ID NO: 2276259 - RNA, 19 nt, Artificial Sequence
  Description of Artificial Sequence: Synthetic oligonucleotide
caucaggcuagaaaucacu

SEQ ID NO: 2276260 - RNA, 19 nt, Artificial Sequence
  Description of Artificial Sequence: Synthetic oligonucleotide
ccggccuucagucagguca

SEQ ID NO: 2276261 - RNA, 19 nt, Artificial Sequence
  Description of Artificial Sequence: Synthetic oligonucleotide
acccucaagaggcuuuguu

SEQ ID NO: 2276262 - RNA, 19 nt, Artificial Sequence
  Description of Artificial Sequence: Synthetic oligonucleotide
ugccacgguuucccuaccu

SEQ ID NO: 2276263 - RNA, 19 nt, Artificial Sequence
  Description of Artificial Sequence: Synthetic oligonucleotide
ggggcucucuagcaucagg

SEQ ID NO: 2276264 - RNA, 19 nt, Artificial Sequence
  Description of Artificial Sequence: Synthetic oligonucleotide
  modified_base (6)..(6): a, c, u, g, unknown or other
gaaacnguucugccacggu

SEQ ID NO: 2276265 - RNA, 19 nt, Artificial Sequence
  Description of Artificial Sequence: Synthetic oligonucleotide
caaaccccauuuccacaug

SEQ ID NO: 2276266 - RNA, 19 nt, Artificial Sequence
  Description of Artificial Sequence: Synthetic oligonucleotide
gggaccuuuguggacauga

SEQ ID NO: 2276267 - RNA, 19 nt, Artificial Sequence
  Description of Artificial Sequence: Synthetic oligonucleotide
cuacccucaagaggcuuug

SEQ ID NO: 2276268 - RNA, 19 nt, Artificial Sequence
  Description of Artificial Sequence: Synthetic oligonucleotide
ccaguucaagauccagggg

SEQ ID NO: 2276269 - RNA, 19 nt, Artificial Sequence
  Description of Artificial Sequence: Synthetic oligonucleotide
aagauccaggggaccuuug

SEQ ID NO: 2276270 - RNA, 19 nt, Artificial Sequence
  Description of Artificial Sequence: Synthetic oligonucleotide
uucugccacgguuucccua

SEQ ID NO: 2276271 - RNA, 19 nt, Artificial Sequence
  Description of Artificial Sequence: Synthetic oligonucleotide
ccucucaagauaaaggcgu

SEQ ID NO: 2276272 - RNA, 19 nt, Artificial Sequence
  Description of Artificial Sequence: Synthetic oligonucleotide
ggugugagacugaaguauc

SEQ ID NO: 2276273 - RNA, 19 nt, Artificial Sequence
  Description of Artificial Sequence: Synthetic oligonucleotide
  modified_base (12)..(12): a, c, u, g, unknown or other
ggggcggaaacnguucugc

SEQ ID NO: 2276274 - RNA, 19 nt, Artificial Sequence
  Description of Artificial Sequence: Synthetic oligonucleotide
ccuaccugugagucugugc

SEQ ID NO: 2276275 - RNA, 19 nt, Artificial Sequence
  Description of Artificial Sequence: Synthetic oligonucleotide
ucaagauccaggggaccuu

SEQ ID NO: 2276276 - RNA, 19 nt, Artificial Sequence
  Description of Artificial Sequence: Synthetic oligonucleotide
ucucuagcaucaggcuaga

SEQ ID NO: 2276277 - RNA, 19 nt, Artificial Sequence
  Description of Artificial Sequence: Synthetic oligonucleotide
ccugcagaguaucugacaa

SEQ ID NO: 2276278 - RNA, 19 nt, Artificial Sequence
  Description of Artificial Sequence: Synthetic oligonucleotide
ucugugcacagggcucagc

SEQ ID NO: 2276279 - RNA, 19 nt, Artificial Sequence
  Description of Artificial Sequence: Synthetic oligonucleotide
cccauuuccacaugcaucu

SEQ ID NO: 2276280 - RNA, 19 nt, Artificial Sequence
  Description of Artificial Sequence: Synthetic oligonucleotide
ccuagagaagaagucaaga

SEQ ID NO: 2276281 - RNA, 19 nt, Artificial Sequence
  Description of Artificial Sequence: Synthetic oligonucleotide
ucaagaguccuggccucuc

SEQ ID NO: 2276282 - RNA, 19 nt, Artificial Sequence
  Description of Artificial Sequence: Synthetic oligonucleotide
cuuggagauccaaguaggu

SEQ ID NO: 2276283 - RNA, 19 nt, Artificial Sequence
  Description of Artificial Sequence: Synthetic oligonucleotide
acacacacacacacacaca

SEQ ID NO: 2276284 - RNA, 19 nt, Artificial Sequence
  Description of Artificial Sequence: Synthetic oligonucleotide
caugauccucaguguccug

SEQ ID NO: 2276285 - RNA, 19 nt, Artificial Sequence
  Description of Artificial Sequence: Synthetic oligonucleotide
caugagggaucaaucccua

SEQ ID NO: 2276286 - RNA, 19 nt, Artificial Sequence
  Description of Artificial Sequence: Synthetic oligonucleotide
caggggaccuuuguggaca

SEQ ID NO: 2276287 - RNA, 19 nt, Artificial Sequence
  Description of Artificial Sequence: Synthetic oligonucleotide
gugcuuggagauccaagua

SEQ ID NO: 2276288 - RNA, 19 nt, Artificial Sequence
  Description of Artificial Sequence: Synthetic oligonucleotide
gggccuagagaagaaguca

SEQ ID NO: 2276289 - RNA, 19 nt, Artificial Sequence
  Description of Artificial Sequence: Synthetic oligonucleotide
ucugggugguuggguggag

SEQ ID NO: 2276290 - RNA, 19 nt, Artificial Sequence
  Description of Artificial Sequence: Synthetic oligonucleotide
auggcuacugaaagaucau

SEQ ID NO: 2276291 - RNA, 19 nt, Artificial Sequence
  Description of Artificial Sequence: Synthetic oligonucleotide
ggaacagcuguguccugca

SEQ ID NO: 2276292 - RNA, 19 nt, Artificial Sequence
  Description of Artificial Sequence: Synthetic oligonucleotide
aaguuccaguggcucucuu

SEQ ID NO: 2276293 - RNA, 19 nt, Artificial Sequence
  Description of Artificial Sequence: Synthetic oligonucleotide
gacuccagauuucccaauu

SEQ ID NO: 2276294 - RNA, 19 nt, Artificial Sequence
  Description of Artificial Sequence: Synthetic oligonucleotide
  modified_base (11)..(11): a, c, u, g, unknown or other
gggcggaaacnguucugcc

SEQ ID NO: 2276295 - RNA, 19 nt, Artificial Sequence
  Description of Artificial Sequence: Synthetic oligonucleotide
gcagaguaucugacaaacc

SEQ ID NO: 2276296 - RNA, 19 nt, Artificial Sequence
  Description of Artificial Sequence: Synthetic oligonucleotide
cauggagguauugaguaau

SEQ ID NO: 2276297 - RNA, 19 nt, Artificial Sequence
  Description of Artificial Sequence: Synthetic oligonucleotide
ggagauccaaguaggugga

SEQ ID NO: 2276298 - RNA, 19 nt, Artificial Sequence
  Description of Artificial Sequence: Synthetic oligonucleotide
ggcucauaacaaucacaca

SEQ ID NO: 2276299 - RNA, 19 nt, Artificial Sequence
  Description of Artificial Sequence: Synthetic oligonucleotide
gcuauuuugagccggccuu

SEQ ID NO: 2276300 - RNA, 19 nt, Artificial Sequence
  Description of Artificial Sequence: Synthetic oligonucleotide
uggguggaggcagguauuu

SEQ ID NO: 2276301 - RNA, 19 nt, Artificial Sequence
  Description of Artificial Sequence: Synthetic oligonucleotide
gccuagagaagaagucaag

SEQ ID NO: 2276302 - RNA, 19 nt, Artificial Sequence
  Description of Artificial Sequence: Synthetic oligonucleotide
cuuuguggacaugagggau

SEQ ID NO: 2276303 - RNA, 19 nt, Artificial Sequence
  Description of Artificial Sequence: Synthetic oligonucleotide
gcuacaugauccucagugu

SEQ ID NO: 2276304 - RNA, 19 nt, Artificial Sequence
  Description of Artificial Sequence: Synthetic oligonucleotide
  modified_base (2)..(2): a, c, u, g, unknown or other
cnguucugccacgguuucc

SEQ ID NO: 2276305 - RNA, 19 nt, Artificial Sequence
  Description of Artificial Sequence: Synthetic oligonucleotide
gccacgguuucccuaccug

SEQ ID NO: 2276306 - RNA, 19 nt, Artificial Sequence
  Description of Artificial Sequence: Synthetic oligonucleotide
cucuuggucuaaagggcua

SEQ ID NO: 2276307 - RNA, 19 nt, Artificial Sequence
  Description of Artificial Sequence: Synthetic oligonucleotide
guauugaguaauggcuacu

SEQ ID NO: 2276308 - RNA, 19 nt, Artificial Sequence
  Description of Artificial Sequence: Synthetic oligonucleotide
cugcagaguaucugacaaa

SEQ ID NO: 2276309 - RNA, 19 nt, Artificial Sequence
  Description of Artificial Sequence: Synthetic oligonucleotide
ggcaggcaguuccuaggcc

SEQ ID NO: 2276310 - RNA, 19 nt, Artificial Sequence
  Description of Artificial Sequence: Synthetic oligonucleotide
ggaccuuuguggacaugag

SEQ ID NO: 2276311 - RNA, 19 nt, Artificial Sequence
  Description of Artificial Sequence: Synthetic oligonucleotide
guggacaugagggaucaau

SEQ ID NO: 2276312 - RNA, 19 nt, Artificial Sequence
  Description of Artificial Sequence: Synthetic oligonucleotide
gcuagaaaucacugcucaa

SEQ ID NO: 2276313 - RNA, 19 nt, Artificial Sequence
  Description of Artificial Sequence: Synthetic oligonucleotide
aggcuugucucagcagcca

SEQ ID NO: 2276314 - RNA, 19 nt, Artificial Sequence
  Description of Artificial Sequence: Synthetic oligonucleotide
cagcagggccuagagaaga

SEQ ID NO: 2276315 - RNA, 19 nt, Artificial Sequence
  Description of Artificial Sequence: Synthetic oligonucleotide
guccuggccucucaagaua

SEQ ID NO: 2276316 - RNA, 19 nt, Artificial Sequence
  Description of Artificial Sequence: Synthetic oligonucleotide
gggaaaaggacuccagauu

SEQ ID NO: 2276317 - RNA, 19 nt, Artificial Sequence
  Description of Artificial Sequence: Synthetic oligonucleotide
ccuuuguggacaugaggga

SEQ ID NO: 2276318 - RNA, 19 nt, Artificial Sequence
  Description of Artificial Sequence: Synthetic oligonucleotide
caguguccugagaugggaa

SEQ ID NO: 2276319 - RNA, 19 nt, Artificial Sequence
  Description of Artificial Sequence: Synthetic oligonucleotide
ggccuagagaagaagucaa

SEQ ID NO: 2276320 - RNA, 19 nt, Artificial Sequence
  Description of Artificial Sequence: Synthetic oligonucleotide
cuggauagcugugcuugga

SEQ ID NO: 2276321 - RNA, 19 nt, Artificial Sequence
  Description of Artificial Sequence: Synthetic oligonucleotide
ggcuauuuugagccggccu

SEQ ID NO: 2276322 - RNA, 19 nt, Artificial Sequence
  Description of Artificial Sequence: Synthetic oligonucleotide
gcaggaacagcuguguccu

SEQ ID NO: 2276323 - RNA, 19 nt, Artificial Sequence
  Description of Artificial Sequence: Synthetic oligonucleotide
ucuggagggcaggcaguuc

SEQ ID NO: 2276324 - RNA, 19 nt, Artificial Sequence
  Description of Artificial Sequence: Synthetic oligonucleotide
gcaucaggcuagaaaucac

SEQ ID NO: 2276325 - RNA, 19 nt, Artificial Sequence
  Description of Artificial Sequence: Synthetic oligonucleotide
gcagggccuagagaagaag

SEQ ID NO: 2276326 - RNA, 19 nt, Artificial Sequence
  Description of Artificial Sequence: Synthetic oligonucleotide
cucucuggauagcugugcu

SEQ ID NO: 2276327 - RNA, 19 nt, Artificial Sequence
  Description of Artificial Sequence: Synthetic oligonucleotide
cacaaucagcagggccuag

SEQ ID NO: 2276328 - RNA, 19 nt, Artificial Sequence
  Description of Artificial Sequence: Synthetic oligonucleotide
ucccuaccugugagucugu

SEQ ID NO: 2276329 - RNA, 19 nt, Artificial Sequence
  Description of Artificial Sequence: Synthetic oligonucleotide
gggugugagacugaaguau

SEQ ID NO: 2276330 - RNA, 19 nt, Artificial Sequence
  Description of Artificial Sequence: Synthetic oligonucleotide
agcagccaacucagcagca

SEQ ID NO: 2276331 - RNA, 19 nt, Artificial Sequence
  Description of Artificial Sequence: Synthetic oligonucleotide
gcauggagguauugaguaa

SEQ ID NO: 2276332 - RNA, 19 nt, Artificial Sequence
  Description of Artificial Sequence: Synthetic oligonucleotide
gugugagacugaaguaucu

SEQ ID NO: 2276333 - RNA, 19 nt, Artificial Sequence
  Description of Artificial Sequence: Synthetic oligonucleotide
uacccucaagaggcuuugu

SEQ ID NO: 2276334 - RNA, 19 nt, Artificial Sequence
  Description of Artificial Sequence: Synthetic oligonucleotide
ccacaugcaucucgguguc

SEQ ID NO: 2276335 - RNA, 19 nt, Artificial Sequence
  Description of Artificial Sequence: Synthetic oligonucleotide
aguggcucucuuggucuaa

SEQ ID NO: 2276336 - RNA, 19 nt, Artificial Sequence
  Description of Artificial Sequence: Synthetic oligonucleotide
cucugggugguugggugga

SEQ ID NO: 2276337 - RNA, 19 nt, Artificial Sequence
  Description of Artificial Sequence: Synthetic oligonucleotide
gagauccaaguagguggaa

SEQ ID NO: 2276338 - RNA, 19 nt, Artificial Sequence
  Description of Artificial Sequence: Synthetic oligonucleotide
agcagggccuagagaagaa

SEQ ID NO: 2276339 - RNA, 19 nt, Artificial Sequence
  Description of Artificial Sequence: Synthetic oligonucleotide
  modified_base (8)..(8): a, c, u, g, unknown or other
cggaaacnguucugccacg

SEQ ID NO: 2276340 - RNA, 19 nt, Artificial Sequence
  Description of Artificial Sequence: Synthetic oligonucleotide
gcagccaacucagcagcac

SEQ ID NO: 2276341 - RNA, 19 nt, Artificial Sequence
  Description of Artificial Sequence: Synthetic oligonucleotide
ggcuugucucagcagccaa

SEQ ID NO: 2276342 - RNA, 19 nt, Artificial Sequence
  Description of Artificial Sequence: Synthetic oligonucleotide
ccucaagaggcuuuguuuu

SEQ ID NO: 2276343 - RNA, 19 nt, Artificial Sequence
  Description of Artificial Sequence: Synthetic oligonucleotide
cugccuggcucauaacaau

SEQ ID NO: 2276344 - RNA, 19 nt, Artificial Sequence
  Description of Artificial Sequence: Synthetic oligonucleotide
uguggacaugagggaucaa

SEQ ID NO: 2276345 - RNA, 19 nt, Artificial Sequence
  Description of Artificial Sequence: Synthetic oligonucleotide
ggcucucuagcaucaggcu

SEQ ID NO: 2276346 - RNA, 19 nt, Artificial Sequence
  Description of Artificial Sequence: Synthetic oligonucleotide
ggcaguuccuaggccauaa

SEQ ID NO: 2276347 - RNA, 19 nt, Artificial Sequence
  Description of Artificial Sequence: Synthetic oligonucleotide
cgguuucccuaccugugag

SEQ ID NO: 2276348 - RNA, 19 nt, Artificial Sequence
  Description of Artificial Sequence: Synthetic oligonucleotide
gcacccagggguggugggg

SEQ ID NO: 2276349 - RNA, 19 nt, Artificial Sequence
  Description of Artificial Sequence: Synthetic oligonucleotide
gguuucccuaccugugagu

SEQ ID NO: 2276350 - RNA, 19 nt, Artificial Sequence
  Description of Artificial Sequence: Synthetic oligonucleotide
gggcuauuuugagccggcc

SEQ ID NO: 2276351 - RNA, 19 nt, Artificial Sequence
  Description of Artificial Sequence: Synthetic oligonucleotide
caucccagccucucuggau

SEQ ID NO: 2276352 - RNA, 19 nt, Artificial Sequence
  Description of Artificial Sequence: Synthetic oligonucleotide
ccaguggcucucuuggucu

SEQ ID NO: 2276353 - RNA, 19 nt, Artificial Sequence
  Description of Artificial Sequence: Synthetic oligonucleotide
guggcucucuuggucuaaa

SEQ ID NO: 2276354 - RNA, 19 nt, Artificial Sequence
  Description of Artificial Sequence: Synthetic oligonucleotide
caguggcucucuuggucua

SEQ ID NO: 2276355 - RNA, 19 nt, Artificial Sequence
  Description of Artificial Sequence: Synthetic oligonucleotide
gcucagcauggagguauug

SEQ ID NO: 2276356 - RNA, 19 nt, Artificial Sequence
  Description of Artificial Sequence: Synthetic oligonucleotide
gccaacucagcagcaccca

SEQ ID NO: 2276357 - RNA, 19 nt, Artificial Sequence
  Description of Artificial Sequence: Synthetic oligonucleotide
guucugccacgguuucccu

SEQ ID NO: 2276358 - RNA, 19 nt, Artificial Sequence
  Description of Artificial Sequence: Synthetic oligonucleotide
caguagguucuggguguga

SEQ ID NO: 2276359 - RNA, 19 nt, Artificial Sequence
  Description of Artificial Sequence: Synthetic oligonucleotide
gggugguuggguggaggca

SEQ ID NO: 2276360 - RNA, 19 nt, Artificial Sequence
  Description of Artificial Sequence: Synthetic oligonucleotide
ccacgguuucccuaccugu

SEQ ID NO: 2276361 - RNA, 19 nt, Artificial Sequence
  Description of Artificial Sequence: Synthetic oligonucleotide
ggacuccagauuucccaau

SEQ ID NO: 2276362 - RNA, 19 nt, Artificial Sequence
  Description of Artificial Sequence: Synthetic oligonucleotide
ccauaaagauggaccuggu

SEQ ID NO: 2276363 - RNA, 19 nt, Artificial Sequence
  Description of Artificial Sequence: Synthetic oligonucleotide
agggcucagcauggaggua

SEQ ID NO: 2276364 - RNA, 19 nt, Artificial Sequence
  Description of Artificial Sequence: Synthetic oligonucleotide
ccacugccuggcucauaac

SEQ ID NO: 2276365 - RNA, 19 nt, Artificial Sequence
  Description of Artificial Sequence: Synthetic oligonucleotide
cucuagcaucaggcuagaa

SEQ ID NO: 2276366 - RNA, 19 nt, Artificial Sequence
  Description of Artificial Sequence: Synthetic oligonucleotide
ccuaggccauaaagaugga

SEQ ID NO: 2276367 - RNA, 19 nt, Artificial Sequence
  Description of Artificial Sequence: Synthetic oligonucleotide
cuuggucuaaagggcuauu

SEQ ID NO: 2276368 - RNA, 19 nt, Artificial Sequence
  Description of Artificial Sequence: Synthetic oligonucleotide
ccauuuccacaugcaucuc

SEQ ID NO: 2276369 - RNA, 19 nt, Artificial Sequence
  Description of Artificial Sequence: Synthetic oligonucleotide
gccuucagucaggucagua

SEQ ID NO: 2276370 - RNA, 19 nt, Artificial Sequence
  Description of Artificial Sequence: Synthetic oligonucleotide
ccaccagcuacaugauccu

SEQ ID NO: 2276371 - RNA, 19 nt, Artificial Sequence
  Description of Artificial Sequence: Synthetic oligonucleotide
cccuaccugugagucugug

SEQ ID NO: 2276372 - RNA, 19 nt, Artificial Sequence
  Description of Artificial Sequence: Synthetic oligonucleotide
ccuacccucaagaggcuuu

SEQ ID NO: 2276373 - RNA, 19 nt, Artificial Sequence
  Description of Artificial Sequence: Synthetic oligonucleotide
cccagccucucuggauagc

SEQ ID NO: 2276374 - RNA, 19 nt, Artificial Sequence
  Description of Artificial Sequence: Synthetic oligonucleotide
ccagccucucuggauagcu

SEQ ID NO: 2276375 - RNA, 19 nt, Artificial Sequence
  Description of Artificial Sequence: Synthetic oligonucleotide
ccccagcuguuucucugga

SEQ ID NO: 2276376 - RNA, 19 nt, Artificial Sequence
  Description of Artificial Sequence: Synthetic oligonucleotide
gccggccuucagucagguc

SEQ ID NO: 2276377 - RNA, 19 nt, Artificial Sequence
  Description of Artificial Sequence: Synthetic oligonucleotide
cagcuguguccugcagagu

SEQ ID NO: 2276378 - RNA, 19 nt, Artificial Sequence
  Description of Artificial Sequence: Synthetic oligonucleotide
ggaaugucucugggugguu

SEQ ID NO: 2276379 - RNA, 19 nt, Artificial Sequence
  Description of Artificial Sequence: Synthetic oligonucleotide
caccacugccuggcucaua

SEQ ID NO: 2276380 - RNA, 19 nt, Artificial Sequence
  Description of Artificial Sequence: Synthetic oligonucleotide
ggguggaggcagguauuuu

SEQ ID NO: 2276381 - RNA, 19 nt, Artificial Sequence
  Description of Artificial Sequence: Synthetic oligonucleotide
ggcucagcauggagguauu

SEQ ID NO: 2276382 - RNA, 19 nt, Artificial Sequence
  Description of Artificial Sequence: Synthetic oligonucleotide
cccuacccucaagaggcuu

SEQ ID NO: 2276383 - RNA, 19 nt, Artificial Sequence
  Description of Artificial Sequence: Synthetic oligonucleotide
  modified_base (1)..(1): a, c, u, g, unknown or other
nguucugccacgguuuccc

SEQ ID NO: 2276384 - RNA, 19 nt, Artificial Sequence
  Description of Artificial Sequence: Synthetic oligonucleotide
aauugaagaguuuaagugc

SEQ ID NO: 2276385 - RNA, 19 nt, Artificial Sequence
  Description of Artificial Sequence: Synthetic oligonucleotide
cuucauaugaauaucaucg

SEQ ID NO: 2276386 - RNA, 19 nt, Artificial Sequence
  Description of Artificial Sequence: Synthetic oligonucleotide
uuuguuaugaauugaagag

SEQ ID NO: 2276387 - RNA, 19 nt, Artificial Sequence
  Description of Artificial Sequence: Synthetic oligonucleotide
aauauaggaaaccaaaaga

SEQ ID NO: 2276388 - RNA, 19 nt, Artificial Sequence
  Description of Artificial Sequence: Synthetic oligonucleotide
aaauauaggaaaccaaaag

SEQ ID NO: 2276389 - RNA, 19 nt, Artificial Sequence
  Description of Artificial Sequence: Synthetic oligonucleotide
uugagagcaauguugaugg

SEQ ID NO: 2276390 - RNA, 19 nt, Artificial Sequence
  Description of Artificial Sequence: Synthetic oligonucleotide
gaauugaagaguuuaagug

SEQ ID NO: 2276391 - RNA, 19 nt, Artificial Sequence
  Description of Artificial Sequence: Synthetic oligonucleotide
auaaccaccagauauucgg

SEQ ID NO: 2276392 - RNA, 19 nt, Artificial Sequence
  Description of Artificial Sequence: Synthetic oligonucleotide
gaaauuugcauccaccucc

SEQ ID NO: 2276393 - RNA, 19 nt, Artificial Sequence
  Description of Artificial Sequence: Synthetic oligonucleotide
caaaacaacaucugcaucc

SEQ ID NO: 2276394 - RNA, 19 nt, Artificial Sequence
  Description of Artificial Sequence: Synthetic oligonucleotide
aaccaaaagacaucuggac

SEQ ID NO: 2276395 - RNA, 19 nt, Artificial Sequence
  Description of Artificial Sequence: Synthetic oligonucleotide
aaucccuuuguguaauagc

SEQ ID NO: 2276396 - RNA, 19 nt, Artificial Sequence
  Description of Artificial Sequence: Synthetic oligonucleotide
ucuccuacauuauugagag

SEQ ID NO: 2276397 - RNA, 19 nt, Artificial Sequence
  Description of Artificial Sequence: Synthetic oligonucleotide
uguguaauagccugcaaag

SEQ ID NO: 2276398 - RNA, 19 nt, Artificial Sequence
  Description of Artificial Sequence: Synthetic oligonucleotide
acaacagccguccaaauuc

SEQ ID NO: 2276399 - RNA, 19 nt, Artificial Sequence
  Description of Artificial Sequence: Synthetic oligonucleotide
uguacauaaacauacccac

SEQ ID NO: 2276400 - RNA, 19 nt, Artificial Sequence
  Description of Artificial Sequence: Synthetic oligonucleotide
accuuagaaauuugcaucc

SEQ ID NO: 2276401 - RNA, 19 nt, Artificial Sequence
  Description of Artificial Sequence: Synthetic oligonucleotide
guaaucacacuuuucaucc

SEQ ID NO: 2276402 - RNA, 19 nt, Artificial Sequence
  Description of Artificial Sequence: Synthetic oligonucleotide
aguaaucacacuuuucauc

SEQ ID NO: 2276403 - RNA, 19 nt, Artificial Sequence
  Description of Artificial Sequence: Synthetic oligonucleotide
uacuacaaaauucagcagu

SEQ ID NO: 2276404 - RNA, 19 nt, Artificial Sequence
  Description of Artificial Sequence: Synthetic oligonucleotide
ugucaaaacaacaucugca

SEQ ID NO: 2276405 - RNA, 19 nt, Artificial Sequence
  Description of Artificial Sequence: Synthetic oligonucleotide
uauaccuuagaaauuugca

SEQ ID NO: 2276406 - RNA, 19 nt, Artificial Sequence
  Description of Artificial Sequence: Synthetic oligonucleotide
uuagaaauuugcauccacc

SEQ ID NO: 2276407 - RNA, 19 nt, Artificial Sequence
  Description of Artificial Sequence: Synthetic oligonucleotide
uccuacauuauugagagca

SEQ ID NO: 2276408 - RNA, 19 nt, Artificial Sequence
  Description of Artificial Sequence: Synthetic oligonucleotide
aagugaaagccaaacauuc

SEQ ID NO: 2276409 - RNA, 19 nt, Artificial Sequence
  Description of Artificial Sequence: Synthetic oligonucleotide
ugaauaaucacgauuuaua

SEQ ID NO: 2276410 - RNA, 19 nt, Artificial Sequence
  Description of Artificial Sequence: Synthetic oligonucleotide
accaauuugcuucauauga

SEQ ID NO: 2276411 - RNA, 19 nt, Artificial Sequence
  Description of Artificial Sequence: Synthetic oligonucleotide
cuuuacuacaaaauucagc

SEQ ID NO: 2276412 - RNA, 19 nt, Artificial Sequence
  Description of Artificial Sequence: Synthetic oligonucleotide
ugaauugaagaguuuaagu

SEQ ID NO: 2276413 - RNA, 19 nt, Artificial Sequence
  Description of Artificial Sequence: Synthetic oligonucleotide
aauuauaccuuagaaauuu

SEQ ID NO: 2276414 - RNA, 19 nt, Artificial Sequence
  Description of Artificial Sequence: Synthetic oligonucleotide
aaauccauucccauguuuc

SEQ ID NO: 2276415 - RNA, 19 nt, Artificial Sequence
  Description of Artificial Sequence: Synthetic oligonucleotide
uuauaccuuagaaauuugc

SEQ ID NO: 2276416 - RNA, 19 nt, Artificial Sequence
  Description of Artificial Sequence: Synthetic oligonucleotide
auuauugagagcaauguug

SEQ ID NO: 2276417 - RNA, 19 nt, Artificial Sequence
  Description of Artificial Sequence: Synthetic oligonucleotide
uaugaauaucaucgguugg

SEQ ID NO: 2276418 - RNA, 19 nt, Artificial Sequence
  Description of Artificial Sequence: Synthetic oligonucleotide
aagaccuucaguguaacug

SEQ ID NO: 2276419 - RNA, 19 nt, Artificial Sequence
  Description of Artificial Sequence: Synthetic oligonucleotide
ugaggcaucaugaugggga

SEQ ID NO: 2276420 - RNA, 19 nt, Artificial Sequence
  Description of Artificial Sequence: Synthetic oligonucleotide
uucauaugaauaucaucgg

SEQ ID NO: 2276421 - RNA, 19 nt, Artificial Sequence
  Description of Artificial Sequence: Synthetic oligonucleotide
aaugaucuuccuguuuugc

SEQ ID NO: 2276422 - RNA, 19 nt, Artificial Sequence
  Description of Artificial Sequence: Synthetic oligonucleotide
aaaauccucuccuacauua

SEQ ID NO: 2276423 - RNA, 19 nt, Artificial Sequence
  Description of Artificial Sequence: Synthetic oligonucleotide
acaacaucugcauccacac

SEQ ID NO: 2276424 - RNA, 19 nt, Artificial Sequence
  Description of Artificial Sequence: Synthetic oligonucleotide
uucagaaaauauaggaaac

SEQ ID NO: 2276425 - RNA, 19 nt, Artificial Sequence
  Description of Artificial Sequence: Synthetic oligonucleotide
uaaagguugaggcaucaug

SEQ ID NO: 2276426 - RNA, 19 nt, Artificial Sequence
  Description of Artificial Sequence: Synthetic oligonucleotide
guaguaaucacacuuuuca

SEQ ID NO: 2276427 - RNA, 19 nt, Artificial Sequence
  Description of Artificial Sequence: Synthetic oligonucleotide
aaugcuccauuucuucgac

SEQ ID NO: 2276428 - RNA, 19 nt, Artificial Sequence
  Description of Artificial Sequence: Synthetic oligonucleotide
ucuuuguuaugaauugaag

SEQ ID NO: 2276429 - RNA, 19 nt, Artificial Sequence
  Description of Artificial Sequence: Synthetic oligonucleotide
ugaaaaucuuugaauaauc

SEQ ID NO: 2276430 - RNA, 19 nt, Artificial Sequence
  Description of Artificial Sequence: Synthetic oligonucleotide
uauuguaauuggcaguuga

SEQ ID NO: 2276431 - RNA, 19 nt, Artificial Sequence
  Description of Artificial Sequence: Synthetic oligonucleotide
aacaucugcauccacacua

SEQ ID NO: 2276432 - RNA, 19 nt, Artificial Sequence
  Description of Artificial Sequence: Synthetic oligonucleotide
acggcagaaauccauuccc

SEQ ID NO: 2276433 - RNA, 19 nt, Artificial Sequence
  Description of Artificial Sequence: Synthetic oligonucleotide
ugaaagccaaacauucucc

SEQ ID NO: 2276434 - RNA, 19 nt, Artificial Sequence
  Description of Artificial Sequence: Synthetic oligonucleotide
acugauuucaugcuuggcu

SEQ ID NO: 2276435 - RNA, 19 nt, Artificial Sequence
  Description of Artificial Sequence: Synthetic oligonucleotide
uauucggcuaucgugaugc

SEQ ID NO: 2276436 - RNA, 19 nt, Artificial Sequence
  Description of Artificial Sequence: Synthetic oligonucleotide
aguacuuuacuacaaaauu

SEQ ID NO: 2276437 - RNA, 19 nt, Artificial Sequence
  Description of Artificial Sequence: Synthetic oligonucleotide
uguuaugaauugaagaguu

SEQ ID NO: 2276438 - RNA, 19 nt, Artificial Sequence
  Description of Artificial Sequence: Synthetic oligonucleotide
auaaugcuccauuucuucg

SEQ ID NO: 2276439 - RNA, 19 nt, Artificial Sequence
  Description of Artificial Sequence: Synthetic oligonucleotide
gauaaagugaaagccaaac

SEQ ID NO: 2276440 - RNA, 19 nt, Artificial Sequence
  Description of Artificial Sequence: Synthetic oligonucleotide
ugacuuaguauuuucuucu

SEQ ID NO: 2276441 - RNA, 19 nt, Artificial Sequence
  Description of Artificial Sequence: Synthetic oligonucleotide
aaauucaugucuguuagaa

SEQ ID NO: 2276442 - RNA, 19 nt, Artificial Sequence
  Description of Artificial Sequence: Synthetic oligonucleotide
uagaaauuugcauccaccu

SEQ ID NO: 2276443 - RNA, 19 nt, Artificial Sequence
  Description of Artificial Sequence: Synthetic oligonucleotide
uccaugacguguuacaaga

SEQ ID NO: 2276444 - RNA, 19 nt, Artificial Sequence
  Description of Artificial Sequence: Synthetic oligonucleotide
cuuuguuaugaauugaaga

SEQ ID NO: 2276445 - RNA, 19 nt, Artificial Sequence
  Description of Artificial Sequence: Synthetic oligonucleotide
uaauagccugcaaagaccu

SEQ ID NO: 2276446 - RNA, 19 nt, Artificial Sequence
  Description of Artificial Sequence: Synthetic oligonucleotide
ucagugaaaaucuuugaau

SEQ ID NO: 2276447 - RNA, 19 nt, Artificial Sequence
  Description of Artificial Sequence: Synthetic oligonucleotide
uaaacauacccacagcuuu

SEQ ID NO: 2276448 - RNA, 19 nt, Artificial Sequence
  Description of Artificial Sequence: Synthetic oligonucleotide
ucggauaaagugaaagcca

SEQ ID NO: 2276449 - RNA, 19 nt, Artificial Sequence
  Description of Artificial Sequence: Synthetic oligonucleotide
ucauaugaauaucaucggu

SEQ ID NO: 2276450 - RNA, 19 nt, Artificial Sequence
  Description of Artificial Sequence: Synthetic oligonucleotide
agaaauuugcauccaccuc

SEQ ID NO: 2276451 - RNA, 19 nt, Artificial Sequence
  Description of Artificial Sequence: Synthetic oligonucleotide
agaccuucaguguaacugg

SEQ ID NO: 2276452 - RNA, 19 nt, Artificial Sequence
  Description of Artificial Sequence: Synthetic oligonucleotide
auccugacggcagaaaucc

SEQ ID NO: 2276453 - RNA, 19 nt, Artificial Sequence
  Description of Artificial Sequence: Synthetic oligonucleotide
uuuugcucaaucaaauuuu

SEQ ID NO: 2276454 - RNA, 19 nt, Artificial Sequence
  Description of Artificial Sequence: Synthetic oligonucleotide
ugggacauuuucauaacca

SEQ ID NO: 2276455 - RNA, 19 nt, Artificial Sequence
  Description of Artificial Sequence: Synthetic oligonucleotide
agcaauuauaccuuagaaa

SEQ ID NO: 2276456 - RNA, 19 nt, Artificial Sequence
  Description of Artificial Sequence: Synthetic oligonucleotide
aaauuugcauccaccuccc

SEQ ID NO: 2276457 - RNA, 19 nt, Artificial Sequence
  Description of Artificial Sequence: Synthetic oligonucleotide
aaagguugaggcaucauga

SEQ ID NO: 2276458 - RNA, 19 nt, Artificial Sequence
  Description of Artificial Sequence: Synthetic oligonucleotide
aaucacgauuuauauauuu

SEQ ID NO: 2276459 - RNA, 19 nt, Artificial Sequence
  Description of Artificial Sequence: Synthetic oligonucleotide
uuugcauccaccucccuga

SEQ ID NO: 2276460 - RNA, 19 nt, Artificial Sequence
  Description of Artificial Sequence: Synthetic oligonucleotide
ucaugauaaacuucuuugu

SEQ ID NO: 2276461 - RNA, 19 nt, Artificial Sequence
  Description of Artificial Sequence: Synthetic oligonucleotide
cuacuuauuuugaugguac

SEQ ID NO: 2276462 - RNA, 19 nt, Artificial Sequence
  Description of Artificial Sequence: Synthetic oligonucleotide
uaccuuagaaauuugcauc

SEQ ID NO: 2276463 - RNA, 19 nt, Artificial Sequence
  Description of Artificial Sequence: Synthetic oligonucleotide
uuguguaauagccugcaaa

SEQ ID NO: 2276464 - RNA, 19 nt, Artificial Sequence
  Description of Artificial Sequence: Synthetic oligonucleotide
aauaccuugauguccuuuu

SEQ ID NO: 2276465 - RNA, 19 nt, Artificial Sequence
  Description of Artificial Sequence: Synthetic oligonucleotide
aacauacccacagcuuucc

SEQ ID NO: 2276466 - RNA, 19 nt, Artificial Sequence
  Description of Artificial Sequence: Synthetic oligonucleotide
uaugaauugaagaguuuaa

SEQ ID NO: 2276467 - RNA, 19 nt, Artificial Sequence
  Description of Artificial Sequence: Synthetic oligonucleotide
auuggcaguugacaacagc

SEQ ID NO: 2276468 - RNA, 19 nt, Artificial Sequence
  Description of Artificial Sequence: Synthetic oligonucleotide
auaaagugaaagccaaaca

SEQ ID NO: 2276469 - RNA, 19 nt, Artificial Sequence
  Description of Artificial Sequence: Synthetic oligonucleotide
cucggauaaagugaaagcc

SEQ ID NO: 2276470 - RNA, 19 nt, Artificial Sequence
  Description of Artificial Sequence: Synthetic oligonucleotide
ucucggauaaagugaaagc

SEQ ID NO: 2276471 - RNA, 19 nt, Artificial Sequence
  Description of Artificial Sequence: Synthetic oligonucleotide
gguugaggcaucaugaugg

SEQ ID NO: 2276472 - RNA, 19 nt, Artificial Sequence
  Description of Artificial Sequence: Synthetic oligonucleotide
aaaauauaggaaaccaaaa

SEQ ID NO: 2276473 - RNA, 19 nt, Artificial Sequence
  Description of Artificial Sequence: Synthetic oligonucleotide
ucugggguuugucaaaaca

SEQ ID NO: 2276474 - RNA, 19 nt, Artificial Sequence
  Description of Artificial Sequence: Synthetic oligonucleotide
ucaugcuuggcuuuauaca

SEQ ID NO: 2276475 - RNA, 19 nt, Artificial Sequence
  Description of Artificial Sequence: Synthetic oligonucleotide
uaugcucucagugaaaauc

SEQ ID NO: 2276476 - RNA, 19 nt, Artificial Sequence
  Description of Artificial Sequence: Synthetic oligonucleotide
uucugcuugacuuaguauu

SEQ ID NO: 2276477 - RNA, 19 nt, Artificial Sequence
  Description of Artificial Sequence: Synthetic oligonucleotide
acuaaaaguaguaaucaca

SEQ ID NO: 2276478 - RNA, 19 nt, Artificial Sequence
  Description of Artificial Sequence: Synthetic oligonucleotide
uuucaauggagcaauuaua

SEQ ID NO: 2276479 - RNA, 19 nt, Artificial Sequence
  Description of Artificial Sequence: Synthetic oligonucleotide
cagauauucggcuaucgug

SEQ ID NO: 2276480 - RNA, 19 nt, Artificial Sequence
  Description of Artificial Sequence: Synthetic oligonucleotide
caugacguguuacaagagg

SEQ ID NO: 2276481 - RNA, 19 nt, Artificial Sequence
  Description of Artificial Sequence: Synthetic oligonucleotide
agugcaaaucccuuugugu

SEQ ID NO: 2276482 - RNA, 19 nt, Artificial Sequence
  Description of Artificial Sequence: Synthetic oligonucleotide
uuaugaauugaagaguuua

SEQ ID NO: 2276483 - RNA, 19 nt, Artificial Sequence
  Description of Artificial Sequence: Synthetic oligonucleotide
uggagcaaugaacucucgg

SEQ ID NO: 2276484 - RNA, 19 nt, Artificial Sequence
  Description of Artificial Sequence: Synthetic oligonucleotide
uaauuggcaguugacaaca

SEQ ID NO: 2276485 - RNA, 19 nt, Artificial Sequence
  Description of Artificial Sequence: Synthetic oligonucleotide
auaccuuagaaauuugcau

SEQ ID NO: 2276486 - RNA, 19 nt, Artificial Sequence
  Description of Artificial Sequence: Synthetic oligonucleotide
aagaguuuaagugcuuucu

SEQ ID NO: 2276487 - RNA, 19 nt, Artificial Sequence
  Description of Artificial Sequence: Synthetic oligonucleotide
ugcauccacacuaaaagua

SEQ ID NO: 2276488 - RNA, 19 nt, Artificial Sequence
  Description of Artificial Sequence: Synthetic oligonucleotide
auguugaugguaaagguug

SEQ ID NO: 2276489 - RNA, 19 nt, Artificial Sequence
  Description of Artificial Sequence: Synthetic oligonucleotide
uucuucgaccaacucauca

SEQ ID NO: 2276490 - RNA, 19 nt, Artificial Sequence
  Description of Artificial Sequence: Synthetic oligonucleotide
uuacuacaaaauucagcag

SEQ ID NO: 2276491 - RNA, 19 nt, Artificial Sequence
  Description of Artificial Sequence: Synthetic oligonucleotide
ugcuccauuucuucgacca

SEQ ID NO: 2276492 - RNA, 19 nt, Artificial Sequence
  Description of Artificial Sequence: Synthetic oligonucleotide
ugacguguuacaagaggag

SEQ ID NO: 2276493 - RNA, 19 nt, Artificial Sequence
  Description of Artificial Sequence: Synthetic oligonucleotide
cuuuucaugauaaacuucu

SEQ ID NO: 2276494 - RNA, 19 nt, Artificial Sequence
  Description of Artificial Sequence: Synthetic oligonucleotide
agcgcugucuuucagguga

SEQ ID NO: 2276495 - RNA, 19 nt, Artificial Sequence
  Description of Artificial Sequence: Synthetic oligonucleotide
uguccuuuucaugauaaac

SEQ ID NO: 2276496 - RNA, 19 nt, Artificial Sequence
  Description of Artificial Sequence: Synthetic oligonucleotide
gaugguaaagguugaggca

SEQ ID NO: 2276497 - RNA, 19 nt, Artificial Sequence
  Description of Artificial Sequence: Synthetic oligonucleotide
augaauugaagaguuuaag

SEQ ID NO: 2276498 - RNA, 19 nt, Artificial Sequence
  Description of Artificial Sequence: Synthetic oligonucleotide
ucuucgaccaacucaucac

SEQ ID NO: 2276499 - RNA, 19 nt, Artificial Sequence
  Description of Artificial Sequence: Synthetic oligonucleotide
uuguuaugaauugaagagu

SEQ ID NO: 2276500 - RNA, 19 nt, Artificial Sequence
  Description of Artificial Sequence: Synthetic oligonucleotide
uuaguauuuucuucugguc

SEQ ID NO: 2276501 - RNA, 19 nt, Artificial Sequence
  Description of Artificial Sequence: Synthetic oligonucleotide
uaucgugaugccuuucccc

SEQ ID NO: 2276502 - RNA, 19 nt, Artificial Sequence
  Description of Artificial Sequence: Synthetic oligonucleotide
aaaacaacaucugcaucca

SEQ ID NO: 2276503 - RNA, 19 nt, Artificial Sequence
  Description of Artificial Sequence: Synthetic oligonucleotide
uugggacauuuucauaacc

SEQ ID NO: 2276504 - RNA, 19 nt, Artificial Sequence
  Description of Artificial Sequence: Synthetic oligonucleotide
cauaaugcuccauuucuuc

SEQ ID NO: 2276505 - RNA, 19 nt, Artificial Sequence
  Description of Artificial Sequence: Synthetic oligonucleotide
aacaacaucugcauccaca

SEQ ID NO: 2276506 - RNA, 19 nt, Artificial Sequence
  Description of Artificial Sequence: Synthetic oligonucleotide
uaaugcuccauuucuucga

SEQ ID NO: 2276507 - RNA, 19 nt, Artificial Sequence
  Description of Artificial Sequence: Synthetic oligonucleotide
aaacauacccacagcuuuc

SEQ ID NO: 2276508 - RNA, 19 nt, Artificial Sequence
  Description of Artificial Sequence: Synthetic oligonucleotide
auuugcauccaccucccug

SEQ ID NO: 2276509 - RNA, 19 nt, Artificial Sequence
  Description of Artificial Sequence: Synthetic oligonucleotide
ucaaaacaacaucugcauc

SEQ ID NO: 2276510 - RNA, 19 nt, Artificial Sequence
  Description of Artificial Sequence: Synthetic oligonucleotide
ugggguuugucaaaacaac

SEQ ID NO: 2276511 - RNA, 19 nt, Artificial Sequence
  Description of Artificial Sequence: Synthetic oligonucleotide
guaauagccugcaaagacc

SEQ ID NO: 2276512 - RNA, 19 nt, Artificial Sequence
  Description of Artificial Sequence: Synthetic oligonucleotide
aaagugaaagccaaacauu

SEQ ID NO: 2276513 - RNA, 19 nt, Artificial Sequence
  Description of Artificial Sequence: Synthetic oligonucleotide
uucgaccaacucaucacag

SEQ ID NO: 2276514 - RNA, 19 nt, Artificial Sequence
  Description of Artificial Sequence: Synthetic oligonucleotide
cuuugaauaaucacgauuu

SEQ ID NO: 2276515 - RNA, 19 nt, Artificial Sequence
  Description of Artificial Sequence: Synthetic oligonucleotide
acgaccacuugccauaaug

SEQ ID NO: 2276516 - RNA, 19 nt, Artificial Sequence
  Description of Artificial Sequence: Synthetic oligonucleotide
gcaauuauaccuuagaaau

SEQ ID NO: 2276517 - RNA, 19 nt, Artificial Sequence
  Description of Artificial Sequence: Synthetic oligonucleotide
agauauucggcuaucguga

SEQ ID NO: 2276518 - RNA, 19 nt, Artificial Sequence
  Description of Artificial Sequence: Synthetic oligonucleotide
aaguaguaaucacacuuuu

SEQ ID NO: 2276519 - RNA, 19 nt, Artificial Sequence
  Description of Artificial Sequence: Synthetic oligonucleotide
ucgaccaacucaucacagg

SEQ ID NO: 2276520 - RNA, 19 nt, Artificial Sequence
  Description of Artificial Sequence: Synthetic oligonucleotide
acuuauuuugaugguacug

SEQ ID NO: 2276521 - RNA, 19 nt, Artificial Sequence
  Description of Artificial Sequence: Synthetic oligonucleotide
gaauaaucacgauuuauau

SEQ ID NO: 2276522 - RNA, 19 nt, Artificial Sequence
  Description of Artificial Sequence: Synthetic oligonucleotide
ucaggugaguacuuuacua

SEQ ID NO: 2276523 - RNA, 19 nt, Artificial Sequence
  Description of Artificial Sequence: Synthetic oligonucleotide
cacuaaaaguaguaaucac

SEQ ID NO: 2276524 - RNA, 19 nt, Artificial Sequence
  Description of Artificial Sequence: Synthetic oligonucleotide
aggaaaccaaaagacaucu

SEQ ID NO: 2276525 - RNA, 19 nt, Artificial Sequence
  Description of Artificial Sequence: Synthetic oligonucleotide
caauggagcaauuauaccu

SEQ ID NO: 2276526 - RNA, 19 nt, Artificial Sequence
  Description of Artificial Sequence: Synthetic oligonucleotide
uuccaugacguguuacaag

SEQ ID NO: 2276527 - RNA, 19 nt, Artificial Sequence
  Description of Artificial Sequence: Synthetic oligonucleotide
auuucuucgaccaacucau

SEQ ID NO: 2276528 - RNA, 19 nt, Artificial Sequence
  Description of Artificial Sequence: Synthetic oligonucleotide
gugaaagccaaacauucuc

SEQ ID NO: 2276529 - RNA, 19 nt, Artificial Sequence
  Description of Artificial Sequence: Synthetic oligonucleotide
caggugaguacuuuacuac

SEQ ID NO: 2276530 - RNA, 19 nt, Artificial Sequence
  Description of Artificial Sequence: Synthetic oligonucleotide
acuacaaaauucagcagug

SEQ ID NO: 2276531 - RNA, 19 nt, Artificial Sequence
  Description of Artificial Sequence: Synthetic oligonucleotide
cauaaccaccagauauucg

SEQ ID NO: 2276532 - RNA, 19 nt, Artificial Sequence
  Description of Artificial Sequence: Synthetic oligonucleotide
cacacuuuucauccugacg

SEQ ID NO: 2276533 - RNA, 19 nt, Artificial Sequence
  Description of Artificial Sequence: Synthetic oligonucleotide
uuauuuugaugguacugau

SEQ ID NO: 2276534 - RNA, 19 nt, Artificial Sequence
  Description of Artificial Sequence: Synthetic oligonucleotide
aaaauucagcagugcaaau

SEQ ID NO: 2276535 - RNA, 19 nt, Artificial Sequence
  Description of Artificial Sequence: Synthetic oligonucleotide
aaaguaguaaucacacuuu

SEQ ID NO: 2276536 - RNA, 19 nt, Artificial Sequence
  Description of Artificial Sequence: Synthetic oligonucleotide
gacggcagaaauccauucc

SEQ ID NO: 2276537 - RNA, 19 nt, Artificial Sequence
  Description of Artificial Sequence: Synthetic oligonucleotide
guaauuggcaguugacaac

SEQ ID NO: 2276538 - RNA, 19 nt, Artificial Sequence
  Description of Artificial Sequence: Synthetic oligonucleotide
uggagcaauuauaccuuag

SEQ ID NO: 2276539 - RNA, 19 nt, Artificial Sequence
  Description of Artificial Sequence: Synthetic oligonucleotide
acaggcucuuuucagaaaa

SEQ ID NO: 2276540 - RNA, 19 nt, Artificial Sequence
  Description of Artificial Sequence: Synthetic oligonucleotide
cucucggauaaagugaaag

SEQ ID NO: 2276541 - RNA, 19 nt, Artificial Sequence
  Description of Artificial Sequence: Synthetic oligonucleotide
ugaugguacugauuucaug

SEQ ID NO: 2276542 - RNA, 19 nt, Artificial Sequence
  Description of Artificial Sequence: Synthetic oligonucleotide
ucaugucuguuagaaaugu

SEQ ID NO: 2276543 - RNA, 19 nt, Artificial Sequence
  Description of Artificial Sequence: Synthetic oligonucleotide
gacguguuacaagaggagc

SEQ ID NO: 2276544 - RNA, 19 nt, Artificial Sequence
  Description of Artificial Sequence: Synthetic oligonucleotide
uuugaauaaucacgauuua

SEQ ID NO: 2276545 - RNA, 19 nt, Artificial Sequence
  Description of Artificial Sequence: Synthetic oligonucleotide
gauggggacggagcgagcg

SEQ ID NO: 2276546 - RNA, 19 nt, Artificial Sequence
  Description of Artificial Sequence: Synthetic oligonucleotide
ucugccacaggucauuguu

SEQ ID NO: 2276547 - RNA, 19 nt, Artificial Sequence
  Description of Artificial Sequence: Synthetic oligonucleotide
agcaauguugaugguaaag

SEQ ID NO: 2276548 - RNA, 19 nt, Artificial Sequence
  Description of Artificial Sequence: Synthetic oligonucleotide
gagcaauuauaccuuagaa

SEQ ID NO: 2276549 - RNA, 19 nt, Artificial Sequence
  Description of Artificial Sequence: Synthetic oligonucleotide
aauggagcaauuauaccuu

SEQ ID NO: 2276550 - RNA, 19 nt, Artificial Sequence
  Description of Artificial Sequence: Synthetic oligonucleotide
uuacaagaggagcaaugau

SEQ ID NO: 2276551 - RNA, 19 nt, Artificial Sequence
  Description of Artificial Sequence: Synthetic oligonucleotide
caugcuuggcuuuauacaa

SEQ ID NO: 2276552 - RNA, 19 nt, Artificial Sequence
  Description of Artificial Sequence: Synthetic oligonucleotide
cauucuccagaccaauuug

SEQ ID NO: 2276553 - RNA, 19 nt, Artificial Sequence
  Description of Artificial Sequence: Synthetic oligonucleotide
uccucuccuacauuauuga

SEQ ID NO: 2276554 - RNA, 19 nt, Artificial Sequence
  Description of Artificial Sequence: Synthetic oligonucleotide
ugaauaucaucgguuggga

SEQ ID NO: 2276555 - RNA, 19 nt, Artificial Sequence
  Description of Artificial Sequence: Synthetic oligonucleotide
uucuccagaccaauuugcu

SEQ ID NO: 2276556 - RNA, 19 nt, Artificial Sequence
  Description of Artificial Sequence: Synthetic oligonucleotide
ucugcuugacuuaguauuu

SEQ ID NO: 2276557 - RNA, 19 nt, Artificial Sequence
  Description of Artificial Sequence: Synthetic oligonucleotide
gggguauuguaauuggcag

SEQ ID NO: 2276558 - RNA, 19 nt, Artificial Sequence
  Description of Artificial Sequence: Synthetic oligonucleotide
uuuucauaaccaccagaua

SEQ ID NO: 2276559 - RNA, 19 nt, Artificial Sequence
  Description of Artificial Sequence: Synthetic oligonucleotide
auaccuugauguccuuuuc

SEQ ID NO: 2276560 - RNA, 19 nt, Artificial Sequence
  Description of Artificial Sequence: Synthetic oligonucleotide
cauaaacauacccacagcu

SEQ ID NO: 2276561 - RNA, 19 nt, Artificial Sequence
  Description of Artificial Sequence: Synthetic oligonucleotide
uuuaaaguucugggguuug

SEQ ID NO: 2276562 - RNA, 19 nt, Artificial Sequence
  Description of Artificial Sequence: Synthetic oligonucleotide
uauuuugaugguacugauu

SEQ ID NO: 2276563 - RNA, 19 nt, Artificial Sequence
  Description of Artificial Sequence: Synthetic oligonucleotide
acauucuccagaccaauuu

SEQ ID NO: 2276564 - RNA, 19 nt, Artificial Sequence
  Description of Artificial Sequence: Synthetic oligonucleotide
ucggcuaucgugaugccuu

SEQ ID NO: 2276565 - RNA, 19 nt, Artificial Sequence
  Description of Artificial Sequence: Synthetic oligonucleotide
ugcuucauaugaauaucau

SEQ ID NO: 2276566 - RNA, 19 nt, Artificial Sequence
  Description of Artificial Sequence: Synthetic oligonucleotide
cucuccuacauuauugaga

SEQ ID NO: 2276567 - RNA, 19 nt, Artificial Sequence
  Description of Artificial Sequence: Synthetic oligonucleotide
uacuuauuuugaugguacu

SEQ ID NO: 2276568 - RNA, 19 nt, Artificial Sequence
  Description of Artificial Sequence: Synthetic oligonucleotide
gaacucucggauaaaguga

SEQ ID NO: 2276569 - RNA, 19 nt, Artificial Sequence
  Description of Artificial Sequence: Synthetic oligonucleotide
cuucaguguaacuggagca

SEQ ID NO: 2276570 - RNA, 19 nt, Artificial Sequence
  Description of Artificial Sequence: Synthetic oligonucleotide
augguaaagguugaggcau

SEQ ID NO: 2276571 - RNA, 19 nt, Artificial Sequence
  Description of Artificial Sequence: Synthetic oligonucleotide
gguugggacauuuucauaa

SEQ ID NO: 2276572 - RNA, 19 nt, Artificial Sequence
  Description of Artificial Sequence: Synthetic oligonucleotide
guugaggcaucaugauggg

SEQ ID NO: 2276573 - RNA, 19 nt, Artificial Sequence
  Description of Artificial Sequence: Synthetic oligonucleotide
cucccugaaaauccucucc

SEQ ID NO: 2276574 - RNA, 19 nt, Artificial Sequence
  Description of Artificial Sequence: Synthetic oligonucleotide
uugacaacagccguccaaa

SEQ ID NO: 2276575 - RNA, 19 nt, Artificial Sequence
  Description of Artificial Sequence: Synthetic oligonucleotide
agagcaauguugaugguaa

SEQ ID NO: 2276576 - RNA, 19 nt, Artificial Sequence
  Description of Artificial Sequence: Synthetic oligonucleotide
uauuucaauggagcaauua

SEQ ID NO: 2276577 - RNA, 19 nt, Artificial Sequence
  Description of Artificial Sequence: Synthetic oligonucleotide
aacucucggauaaagugaa

SEQ ID NO: 2276578 - RNA, 19 nt, Artificial Sequence
  Description of Artificial Sequence: Synthetic oligonucleotide
augacguguuacaagagga

SEQ ID NO: 2276579 - RNA, 19 nt, Artificial Sequence
  Description of Artificial Sequence: Synthetic oligonucleotide
ucgguugggacauuuucau

SEQ ID NO: 2276580 - RNA, 19 nt, Artificial Sequence
  Description of Artificial Sequence: Synthetic oligonucleotide
uucaguguaacuggagcaa

SEQ ID NO: 2276581 - RNA, 19 nt, Artificial Sequence
  Description of Artificial Sequence: Synthetic oligonucleotide
gguccuacuuauuuugaug

SEQ ID NO: 2276582 - RNA, 19 nt, Artificial Sequence
  Description of Artificial Sequence: Synthetic oligonucleotide
gguuugucaaaacaacauc

SEQ ID NO: 2276583 - RNA, 19 nt, Artificial Sequence
  Description of Artificial Sequence: Synthetic oligonucleotide
cuaucgugaugccuuuccc

SEQ ID NO: 2276584 - RNA, 19 nt, Artificial Sequence
  Description of Artificial Sequence: Synthetic oligonucleotide
aaacauucuccagaccaau

SEQ ID NO: 2276585 - RNA, 19 nt, Artificial Sequence
  Description of Artificial Sequence: Synthetic oligonucleotide
uccagaccaauuugcuuca

SEQ ID NO: 2276586 - RNA, 19 nt, Artificial Sequence
  Description of Artificial Sequence: Synthetic oligonucleotide
ugcuugacuuaguauuuuc

SEQ ID NO: 2276587 - RNA, 19 nt, Artificial Sequence
  Description of Artificial Sequence: Synthetic oligonucleotide
ccaaacauucuccagacca

SEQ ID NO: 2276588 - RNA, 19 nt, Artificial Sequence
  Description of Artificial Sequence: Synthetic oligonucleotide
cucagugaaaaucuuugaa

SEQ ID NO: 2276589 - RNA, 19 nt, Artificial Sequence
  Description of Artificial Sequence: Synthetic oligonucleotide
cauuuucauaaccaccaga

SEQ ID NO: 2276590 - RNA, 19 nt, Artificial Sequence
  Description of Artificial Sequence: Synthetic oligonucleotide
auucagcagugcaaauccc

SEQ ID NO: 2276591 - RNA, 19 nt, Artificial Sequence
  Description of Artificial Sequence: Synthetic oligonucleotide
cacuuuucauccugacggc

SEQ ID NO: 2276592 - RNA, 19 nt, Artificial Sequence
  Description of Artificial Sequence: Synthetic oligonucleotide
auaucaucgguugggacau

SEQ ID NO: 2276593 - RNA, 19 nt, Artificial Sequence
  Description of Artificial Sequence: Synthetic oligonucleotide
uuuuaaaguucugggguuu

SEQ ID NO: 2276594 - RNA, 19 nt, Artificial Sequence
  Description of Artificial Sequence: Synthetic oligonucleotide
uuuguguaauagccugcaa

SEQ ID NO: 2276595 - RNA, 19 nt, Artificial Sequence
  Description of Artificial Sequence: Synthetic oligonucleotide
uccuacuuauuuugauggu

SEQ ID NO: 2276596 - RNA, 19 nt, Artificial Sequence
  Description of Artificial Sequence: Synthetic oligonucleotide
caucgguugggacauuuuc

SEQ ID NO: 2276597 - RNA, 19 nt, Artificial Sequence
  Description of Artificial Sequence: Synthetic oligonucleotide
guugggacauuuucauaac

SEQ ID NO: 2276598 - RNA, 19 nt, Artificial Sequence
  Description of Artificial Sequence: Synthetic oligonucleotide
accagauauucggcuaucg

SEQ ID NO: 2276599 - RNA, 19 nt, Artificial Sequence
  Description of Artificial Sequence: Synthetic oligonucleotide
caguugacaacagccgucc

SEQ ID NO: 2276600 - RNA, 19 nt, Artificial Sequence
  Description of Artificial Sequence: Synthetic oligonucleotide
cauccugacggcagaaauc

SEQ ID NO: 2276601 - RNA, 19 nt, Artificial Sequence
  Description of Artificial Sequence: Synthetic oligonucleotide
uaaucacacuuuucauccu

SEQ ID NO: 2276602 - RNA, 19 nt, Artificial Sequence
  Description of Artificial Sequence: Synthetic oligonucleotide
caaugaucuuccuguuuug

SEQ ID NO: 2276603 - RNA, 19 nt, Artificial Sequence
  Description of Artificial Sequence: Synthetic oligonucleotide
acaaggcugcuccacuaug

SEQ ID NO: 2276604 - RNA, 19 nt, Artificial Sequence
  Description of Artificial Sequence: Synthetic oligonucleotide
gugcaaaucccuuugugua

SEQ ID NO: 2276605 - RNA, 19 nt, Artificial Sequence
  Description of Artificial Sequence: Synthetic oligonucleotide
cagaaauccauucccaugu

SEQ ID NO: 2276606 - RNA, 19 nt, Artificial Sequence
  Description of Artificial Sequence: Synthetic oligonucleotide
ugauguccuuuucaugaua

SEQ ID NO: 2276607 - RNA, 19 nt, Artificial Sequence
  Description of Artificial Sequence: Synthetic oligonucleotide
cauaugaauaucaucgguu

SEQ ID NO: 2276608 - RNA, 19 nt, Artificial Sequence
  Description of Artificial Sequence: Synthetic oligonucleotide
cugggguuugucaaaacaa

SEQ ID NO: 2276609 - RNA, 19 nt, Artificial Sequence
  Description of Artificial Sequence: Synthetic oligonucleotide
ccuucaguguaacuggagc

SEQ ID NO: 2276610 - RNA, 19 nt, Artificial Sequence
  Description of Artificial Sequence: Synthetic oligonucleotide
uaaaguucugggguuuguc

SEQ ID NO: 2276611 - RNA, 19 nt, Artificial Sequence
  Description of Artificial Sequence: Synthetic oligonucleotide
acguguuacaagaggagca

SEQ ID NO: 2276612 - RNA, 19 nt, Artificial Sequence
  Description of Artificial Sequence: Synthetic oligonucleotide
aaaucugccacaggucauu

SEQ ID NO: 2276613 - RNA, 19 nt, Artificial Sequence
  Description of Artificial Sequence: Synthetic oligonucleotide
ugguacugauuucaugcuu

SEQ ID NO: 2276614 - RNA, 19 nt, Artificial Sequence
  Description of Artificial Sequence: Synthetic oligonucleotide
gcagaaauccauucccaug

SEQ ID NO: 2276615 - RNA, 19 nt, Artificial Sequence
  Description of Artificial Sequence: Synthetic oligonucleotide
ugacggcagaaauccauuc

SEQ ID NO: 2276616 - RNA, 19 nt, Artificial Sequence
  Description of Artificial Sequence: Synthetic oligonucleotide
auucggcuaucgugaugcc

SEQ ID NO: 2276617 - RNA, 19 nt, Artificial Sequence
  Description of Artificial Sequence: Synthetic oligonucleotide
aaauaccuugauguccuuu

SEQ ID NO: 2276618 - RNA, 19 nt, Artificial Sequence
  Description of Artificial Sequence: Synthetic oligonucleotide
agccguccaaauucauguc

SEQ ID NO: 2276619 - RNA, 19 nt, Artificial Sequence
  Description of Artificial Sequence: Synthetic oligonucleotide
ggagcaauuauaccuuaga

SEQ ID NO: 2276620 - RNA, 19 nt, Artificial Sequence
  Description of Artificial Sequence: Synthetic oligonucleotide
auaaacauacccacagcuu

SEQ ID NO: 2276621 - RNA, 19 nt, Artificial Sequence
  Description of Artificial Sequence: Synthetic oligonucleotide
aauuggcaguugacaacag

SEQ ID NO: 2276622 - RNA, 19 nt, Artificial Sequence
  Description of Artificial Sequence: Synthetic oligonucleotide
gcuaucgugaugccuuucc

SEQ ID NO: 2276623 - RNA, 19 nt, Artificial Sequence
  Description of Artificial Sequence: Synthetic oligonucleotide
uucugguccuacuuauuuu

SEQ ID NO: 2276624 - RNA, 19 nt, Artificial Sequence
  Description of Artificial Sequence: Synthetic oligonucleotide
agugaaagccaaacauucu

SEQ ID NO: 2276625 - RNA, 19 nt, Artificial Sequence
  Description of Artificial Sequence: Synthetic oligonucleotide
ugguccuacuuauuuugau

SEQ ID NO: 2276626 - RNA, 19 nt, Artificial Sequence
  Description of Artificial Sequence: Synthetic oligonucleotide
aucuuugaauaaucacgau

SEQ ID NO: 2276627 - RNA, 19 nt, Artificial Sequence
  Description of Artificial Sequence: Synthetic oligonucleotide
ccaaaagacaucuggacaa

SEQ ID NO: 2276628 - RNA, 19 nt, Artificial Sequence
  Description of Artificial Sequence: Synthetic oligonucleotide
gcaaugaacucucggauaa

SEQ ID NO: 2276629 - RNA, 19 nt, Artificial Sequence
  Description of Artificial Sequence: Synthetic oligonucleotide
guugacaacagccguccaa

SEQ ID NO: 2276630 - RNA, 19 nt, Artificial Sequence
  Description of Artificial Sequence: Synthetic oligonucleotide
uuauuucaauggagcaauu

SEQ ID NO: 2276631 - RNA, 19 nt, Artificial Sequence
  Description of Artificial Sequence: Synthetic oligonucleotide
cuucgaccaacucaucaca

SEQ ID NO: 2276632 - RNA, 19 nt, Artificial Sequence
  Description of Artificial Sequence: Synthetic oligonucleotide
aucgguugggacauuuuca

SEQ ID NO: 2276633 - RNA, 19 nt, Artificial Sequence
  Description of Artificial Sequence: Synthetic oligonucleotide
aucacgauuuauauauuuu

SEQ ID NO: 2276634 - RNA, 19 nt, Artificial Sequence
  Description of Artificial Sequence: Synthetic oligonucleotide
cuuuguguaauagccugca

SEQ ID NO: 2276635 - RNA, 19 nt, Artificial Sequence
  Description of Artificial Sequence: Synthetic oligonucleotide
uacugauuucaugcuuggc

SEQ ID NO: 2276636 - RNA, 19 nt, Artificial Sequence
  Description of Artificial Sequence: Synthetic oligonucleotide
aaaauaccuugauguccuu

SEQ ID NO: 2276637 - RNA, 19 nt, Artificial Sequence
  Description of Artificial Sequence: Synthetic oligonucleotide
caaacauucuccagaccaa

SEQ ID NO: 2276638 - RNA, 19 nt, Artificial Sequence
  Description of Artificial Sequence: Synthetic oligonucleotide
gaguuuaagugcuuucuuu

SEQ ID NO: 2276639 - RNA, 19 nt, Artificial Sequence
  Description of Artificial Sequence: Synthetic oligonucleotide
ugguaaagguugaggcauc

SEQ ID NO: 2276640 - RNA, 19 nt, Artificial Sequence
  Description of Artificial Sequence: Synthetic oligonucleotide
uggcuucugcuugacuuag

SEQ ID NO: 2276641 - RNA, 19 nt, Artificial Sequence
  Description of Artificial Sequence: Synthetic oligonucleotide
gaccacuugccauaaugcu

SEQ ID NO: 2276642 - RNA, 19 nt, Artificial Sequence
  Description of Artificial Sequence: Synthetic oligonucleotide
ucaguguaacuggagcaau

SEQ ID NO: 2276643 - RNA, 19 nt, Artificial Sequence
  Description of Artificial Sequence: Synthetic oligonucleotide
gugaguacuuuacuacaaa

SEQ ID NO: 2276644 - RNA, 19 nt, Artificial Sequence
  Description of Artificial Sequence: Synthetic oligonucleotide
agcaaugaucuuccuguuu

SEQ ID NO: 2276645 - RNA, 19 nt, Artificial Sequence
  Description of Artificial Sequence: Synthetic oligonucleotide
ggucauuguugagaugggg

SEQ ID NO: 2276646 - RNA, 19 nt, Artificial Sequence
  Description of Artificial Sequence: Synthetic oligonucleotide
uugaagaguuuaagugcuu

SEQ ID NO: 2276647 - RNA, 19 nt, Artificial Sequence
  Description of Artificial Sequence: Synthetic oligonucleotide
gagagcaauguugauggua

SEQ ID NO: 2276648 - RNA, 19 nt, Artificial Sequence
  Description of Artificial Sequence: Synthetic oligonucleotide
ucuggacaaggcugcucca

SEQ ID NO: 2276649 - RNA, 19 nt, Artificial Sequence
  Description of Artificial Sequence: Synthetic oligonucleotide
ucuucugguccuacuuauu

SEQ ID NO: 2276650 - RNA, 19 nt, Artificial Sequence
  Description of Artificial Sequence: Synthetic oligonucleotide
acagccguccaaauucaug

SEQ ID NO: 2276651 - RNA, 19 nt, Artificial Sequence
  Description of Artificial Sequence: Synthetic oligonucleotide
cuugacuuaguauuuucuu

SEQ ID NO: 2276652 - RNA, 19 nt, Artificial Sequence
  Description of Artificial Sequence: Synthetic oligonucleotide
uucggcuaucgugaugccu

SEQ ID NO: 2276653 - RNA, 19 nt, Artificial Sequence
  Description of Artificial Sequence: Synthetic oligonucleotide
cacagcuuuccaugacgug

SEQ ID NO: 2276654 - RNA, 19 nt, Artificial Sequence
  Description of Artificial Sequence: Synthetic oligonucleotide
caauuugcuucauaugaau

SEQ ID NO: 2276655 - RNA, 19 nt, Artificial Sequence
  Description of Artificial Sequence: Synthetic oligonucleotide
ccauguuucuggcuucugc

SEQ ID NO: 2276656 - RNA, 19 nt, Artificial Sequence
  Description of Artificial Sequence: Synthetic oligonucleotide
caugauaaacuucuuuguu

SEQ ID NO: 2276657 - RNA, 19 nt, Artificial Sequence
  Description of Artificial Sequence: Synthetic oligonucleotide
guauuguaauuggcaguug

SEQ ID NO: 2276658 - RNA, 19 nt, Artificial Sequence
  Description of Artificial Sequence: Synthetic oligonucleotide
aucacacuuuucauccuga

SEQ ID NO: 2276659 - RNA, 19 nt, Artificial Sequence
  Description of Artificial Sequence: Synthetic oligonucleotide
ugagagcaauguugauggu

SEQ ID NO: 2276660 - RNA, 19 nt, Artificial Sequence
  Description of Artificial Sequence: Synthetic oligonucleotide
uuucuucgaccaacucauc

SEQ ID NO: 2276661 - RNA, 19 nt, Artificial Sequence
  Description of Artificial Sequence: Synthetic oligonucleotide
ucaucgguugggacauuuu

SEQ ID NO: 2276662 - RNA, 19 nt, Artificial Sequence
  Description of Artificial Sequence: Synthetic oligonucleotide
uuucauccugacggcagaa

SEQ ID NO: 2276663 - RNA, 19 nt, Artificial Sequence
  Description of Artificial Sequence: Synthetic oligonucleotide
ugacaacagccguccaaau

SEQ ID NO: 2276664 - RNA, 19 nt, Artificial Sequence
  Description of Artificial Sequence: Synthetic oligonucleotide
cugauuucaugcuuggcuu

SEQ ID NO: 2276665 - RNA, 19 nt, Artificial Sequence
  Description of Artificial Sequence: Synthetic oligonucleotide
cgaccacuugccauaaugc

SEQ ID NO: 2276666 - RNA, 19 nt, Artificial Sequence
  Description of Artificial Sequence: Synthetic oligonucleotide
gaaauccauucccauguuu

SEQ ID NO: 2276667 - RNA, 19 nt, Artificial Sequence
  Description of Artificial Sequence: Synthetic oligonucleotide
uccugacggcagaaaucca

SEQ ID NO: 2276668 - RNA, 19 nt, Artificial Sequence
  Description of Artificial Sequence: Synthetic oligonucleotide
gcgagcgcugucuuucagg

SEQ ID NO: 2276669 - RNA, 19 nt, Artificial Sequence
  Description of Artificial Sequence: Synthetic oligonucleotide
caacagccguccaaauuca

SEQ ID NO: 2276670 - RNA, 19 nt, Artificial Sequence
  Description of Artificial Sequence: Synthetic oligonucleotide
gcucuuuucagaaaauaua

SEQ ID NO: 2276671 - RNA, 19 nt, Artificial Sequence
  Description of Artificial Sequence: Synthetic oligonucleotide
aguugacaacagccgucca

SEQ ID NO: 2276672 - RNA, 19 nt, Artificial Sequence
  Description of Artificial Sequence: Synthetic oligonucleotide
acauacccacagcuuucca

SEQ ID NO: 2276673 - RNA, 19 nt, Artificial Sequence
  Description of Artificial Sequence: Synthetic oligonucleotide
cugguccuacuuauuuuga

SEQ ID NO: 2276674 - RNA, 19 nt, Artificial Sequence
  Description of Artificial Sequence: Synthetic oligonucleotide
cuugccauaaugcuccauu

SEQ ID NO: 2276675 - RNA, 19 nt, Artificial Sequence
  Description of Artificial Sequence: Synthetic oligonucleotide
agcgagcgcugucuuucag

SEQ ID NO: 2276676 - RNA, 19 nt, Artificial Sequence
  Description of Artificial Sequence: Synthetic oligonucleotide
cuccuacauuauugagagc

SEQ ID NO: 2276677 - RNA, 19 nt, Artificial Sequence
  Description of Artificial Sequence: Synthetic oligonucleotide
caauuauaccuuagaaauu

SEQ ID NO: 2276678 - RNA, 19 nt, Artificial Sequence
  Description of Artificial Sequence: Synthetic oligonucleotide
gacaacagccguccaaauu

SEQ ID NO: 2276679 - RNA, 19 nt, Artificial Sequence
  Description of Artificial Sequence: Synthetic oligonucleotide
cauuauugagagcaauguu

SEQ ID NO: 2276680 - RNA, 19 nt, Artificial Sequence
  Description of Artificial Sequence: Synthetic oligonucleotide
ccucuccuacauuauugag

SEQ ID NO: 2276681 - RNA, 19 nt, Artificial Sequence
  Description of Artificial Sequence: Synthetic oligonucleotide
gguauuguaauuggcaguu

SEQ ID NO: 2276682 - RNA, 19 nt, Artificial Sequence
  Description of Artificial Sequence: Synthetic oligonucleotide
gagcgcugucuuucaggug

SEQ ID NO: 2276683 - RNA, 19 nt, Artificial Sequence
  Description of Artificial Sequence: Synthetic oligonucleotide
caugucuguuagaaaugua

SEQ ID NO: 2276684 - RNA, 19 nt, Artificial Sequence
  Description of Artificial Sequence: Synthetic oligonucleotide
ggugaguacuuuacuacaa

SEQ ID NO: 2276685 - RNA, 19 nt, Artificial Sequence
  Description of Artificial Sequence: Synthetic oligonucleotide
aucaucgguugggacauuu

SEQ ID NO: 2276686 - RNA, 19 nt, Artificial Sequence
  Description of Artificial Sequence: Synthetic oligonucleotide
ccaugacguguuacaagag

SEQ ID NO: 2276687 - RNA, 19 nt, Artificial Sequence
  Description of Artificial Sequence: Synthetic oligonucleotide
aacagccguccaaauucau

SEQ ID NO: 2276688 - RNA, 19 nt, Artificial Sequence
  Description of Artificial Sequence: Synthetic oligonucleotide
aauagccugcaaagaccuu

SEQ ID NO: 2276689 - RNA, 19 nt, Artificial Sequence
  Description of Artificial Sequence: Synthetic oligonucleotide
ggguauuguaauuggcagu

SEQ ID NO: 2276690 - RNA, 19 nt, Artificial Sequence
  Description of Artificial Sequence: Synthetic oligonucleotide
gguaaagguugaggcauca

SEQ ID NO: 2276691 - RNA, 19 nt, Artificial Sequence
  Description of Artificial Sequence: Synthetic oligonucleotide
gacaaggcugcuccacuau

SEQ ID NO: 2276692 - RNA, 19 nt, Artificial Sequence
  Description of Artificial Sequence: Synthetic oligonucleotide
caucuggacaaggcugcuc

SEQ ID NO: 2276693 - RNA, 19 nt, Artificial Sequence
  Description of Artificial Sequence: Synthetic oligonucleotide
caccucccugaaaauccuc

SEQ ID NO: 2276694 - RNA, 19 nt, Artificial Sequence
  Description of Artificial Sequence: Synthetic oligonucleotide
augcuuggcuuuauacaaa

SEQ ID NO: 2276695 - RNA, 19 nt, Artificial Sequence
  Description of Artificial Sequence: Synthetic oligonucleotide
gcaguugacaacagccguc

SEQ ID NO: 2276696 - RNA, 19 nt, Artificial Sequence
  Description of Artificial Sequence: Synthetic oligonucleotide
ggguuugucaaaacaacau

SEQ ID NO: 2276697 - RNA, 19 nt, Artificial Sequence
  Description of Artificial Sequence: Synthetic oligonucleotide
gagcgagcgcugucuuuca

SEQ ID NO: 2276698 - RNA, 19 nt, Artificial Sequence
  Description of Artificial Sequence: Synthetic oligonucleotide
cuacauuauugagagcaau

SEQ ID NO: 2276699 - RNA, 19 nt, Artificial Sequence
  Description of Artificial Sequence: Synthetic oligonucleotide
gccacaggucauuguugag

SEQ ID NO: 2276700 - RNA, 19 nt, Artificial Sequence
  Description of Artificial Sequence: Synthetic oligonucleotide
cggauaaagugaaagccaa

SEQ ID NO: 2276701 - RNA, 19 nt, Artificial Sequence
  Description of Artificial Sequence: Synthetic oligonucleotide
gcaaagaccuucaguguaa

SEQ ID NO: 2276702 - RNA, 19 nt, Artificial Sequence
  Description of Artificial Sequence: Synthetic oligonucleotide
gcuuuccaugacguguuac

SEQ ID NO: 2276703 - RNA, 19 nt, Artificial Sequence
  Description of Artificial Sequence: Synthetic oligonucleotide
guuaugaauugaagaguuu

SEQ ID NO: 2276704 - RNA, 19 nt, Artificial Sequence
  Description of Artificial Sequence: Synthetic oligonucleotide
caccagauauucggcuauc

SEQ ID NO: 2276705 - RNA, 19 nt, Artificial Sequence
  Description of Artificial Sequence: Synthetic oligonucleotide
cacaggcucuuuucagaaa

SEQ ID NO: 2276706 - RNA, 19 nt, Artificial Sequence
  Description of Artificial Sequence: Synthetic oligonucleotide
guauuuucuucugguccua

SEQ ID NO: 2276707 - RNA, 19 nt, Artificial Sequence
  Description of Artificial Sequence: Synthetic oligonucleotide
ggauaaagugaaagccaaa

SEQ ID NO: 2276708 - RNA, 19 nt, Artificial Sequence
  Description of Artificial Sequence: Synthetic oligonucleotide
gcuugacuuaguauuuucu

SEQ ID NO: 2276709 - RNA, 19 nt, Artificial Sequence
  Description of Artificial Sequence: Synthetic oligonucleotide
ccuacuuauuuugauggua

SEQ ID NO: 2276710 - RNA, 19 nt, Artificial Sequence
  Description of Artificial Sequence: Synthetic oligonucleotide
ccacacuaaaaguaguaau

SEQ ID NO: 2276711 - RNA, 19 nt, Artificial Sequence
  Description of Artificial Sequence: Synthetic oligonucleotide
ggcagaaauccauucccau

SEQ ID NO: 2276712 - RNA, 19 nt, Artificial Sequence
  Description of Artificial Sequence: Synthetic oligonucleotide
ccuacauuauugagagcaa

SEQ ID NO: 2276713 - RNA, 19 nt, Artificial Sequence
  Description of Artificial Sequence: Synthetic oligonucleotide
ggacaaggcugcuccacua

SEQ ID NO: 2276714 - RNA, 19 nt, Artificial Sequence
  Description of Artificial Sequence: Synthetic oligonucleotide
cugacggcagaaauccauu

SEQ ID NO: 2276715 - RNA, 19 nt, Artificial Sequence
  Description of Artificial Sequence: Synthetic oligonucleotide
acggagcgagcgcugucuu

SEQ ID NO: 2276716 - RNA, 19 nt, Artificial Sequence
  Description of Artificial Sequence: Synthetic oligonucleotide
caaugaacucucggauaaa

SEQ ID NO: 2276717 - RNA, 19 nt, Artificial Sequence
  Description of Artificial Sequence: Synthetic oligonucleotide
gccugcaaagaccuucagu

SEQ ID NO: 2276718 - RNA, 19 nt, Artificial Sequence
  Description of Artificial Sequence: Synthetic oligonucleotide
caacaucugcauccacacu

SEQ ID NO: 2276719 - RNA, 19 nt, Artificial Sequence
  Description of Artificial Sequence: Synthetic oligonucleotide
acucucggauaaagugaaa

SEQ ID NO: 2276720 - RNA, 19 nt, Artificial Sequence
  Description of Artificial Sequence: Synthetic oligonucleotide
guaaagguugaggcaucau

SEQ ID NO: 2276721 - RNA, 19 nt, Artificial Sequence
  Description of Artificial Sequence: Synthetic oligonucleotide
cccacgaccacuugccaua

SEQ ID NO: 2276722 - RNA, 19 nt, Artificial Sequence
  Description of Artificial Sequence: Synthetic oligonucleotide
ccagauauucggcuaucgu

SEQ ID NO: 2276723 - RNA, 19 nt, Artificial Sequence
  Description of Artificial Sequence: Synthetic oligonucleotide
ccugacggcagaaauccau

SEQ ID NO: 2276724 - RNA, 19 nt, Artificial Sequence
  Description of Artificial Sequence: Synthetic oligonucleotide
cauccaccucccugaaaau

SEQ ID NO: 2276725 - RNA, 19 nt, Artificial Sequence
  Description of Artificial Sequence: Synthetic oligonucleotide
ccauaaugcuccauuucuu

SEQ ID NO: 2276726 - RNA, 19 nt, Artificial Sequence
  Description of Artificial Sequence: Synthetic oligonucleotide
uaucaucgguugggacauu

SEQ ID NO: 2276727 - RNA, 19 nt, Artificial Sequence
  Description of Artificial Sequence: Synthetic oligonucleotide
gcgcugucuuucaggugag

SEQ ID NO: 2276728 - RNA, 19 nt, Artificial Sequence
  Description of Artificial Sequence: Synthetic oligonucleotide
cccugaaaauccucuccua

SEQ ID NO: 2276729 - RNA, 19 nt, Artificial Sequence
  Description of Artificial Sequence: Synthetic oligonucleotide
gcucucagugaaaaucuuu

SEQ ID NO: 2276730 - RNA, 19 nt, Artificial Sequence
  Description of Artificial Sequence: Synthetic oligonucleotide
ggcuaucgugaugccuuuc

SEQ ID NO: 2276731 - RNA, 19 nt, Artificial Sequence
  Description of Artificial Sequence: Synthetic oligonucleotide
cgagcgcugucuuucaggu

SEQ ID NO: 2276732 - RNA, 19 nt, Artificial Sequence
  Description of Artificial Sequence: Synthetic oligonucleotide
ggggacggagcgagcgcug

SEQ ID NO: 2276733 - RNA, 19 nt, Artificial Sequence
  Description of Artificial Sequence: Synthetic oligonucleotide
cccauguuucuggcuucug

SEQ ID NO: 2276734 - RNA, 19 nt, Artificial Sequence
  Description of Artificial Sequence: Synthetic oligonucleotide
ccaccagauauucggcuau

SEQ ID NO: 2276735 - RNA, 19 nt, Artificial Sequence
  Description of Artificial Sequence: Synthetic oligonucleotide
gcuccacuaugcucucagu

SEQ ID NO: 2276736 - RNA, 19 nt, Artificial Sequence
  Description of Artificial Sequence: Synthetic oligonucleotide
cguccaaauucaugucugu

SEQ ID NO: 2276737 - RNA, 19 nt, Artificial Sequence
  Description of Artificial Sequence: Synthetic oligonucleotide
gggacggagcgagcgcugu

SEQ ID NO: 2276738 - RNA, 19 nt, Artificial Sequence
  Description of Artificial Sequence: Synthetic oligonucleotide
ccccacgaccacuugccau

SEQ ID NO: 2276739 - RNA, 19 nt, Artificial Sequence
  Description of Artificial Sequence: Synthetic oligonucleotide
ggcuucugcuugacuuagu

SEQ ID NO: 2276740 - RNA, 19 nt, Artificial Sequence
  Description of Artificial Sequence: Synthetic oligonucleotide
cacgaccacuugccauaau

SEQ ID NO: 2276741 - RNA, 19 nt, Artificial Sequence
  Description of Artificial Sequence: Synthetic oligonucleotide
cggcuaucgugaugccuuu

SEQ ID NO: 2276742 - RNA, 19 nt, Artificial Sequence
  Description of Artificial Sequence: Synthetic oligonucleotide
cggagcgagcgcugucuuu

SEQ ID NO: 2276743 - RNA, 19 nt, Artificial Sequence
  Description of Artificial Sequence: Synthetic oligonucleotide
uuugagaugugaaacauug

SEQ ID NO: 2276744 - RNA, 19 nt, Artificial Sequence
  Description of Artificial Sequence: Synthetic oligonucleotide
aaucaagagagcuccaggg

SEQ ID NO: 2276745 - RNA, 19 nt, Artificial Sequence
  Description of Artificial Sequence: Synthetic oligonucleotide
ugaaauaugaaucccugga

SEQ ID NO: 2276746 - RNA, 19 nt, Artificial Sequence
  Description of Artificial Sequence: Synthetic oligonucleotide
aaauaugaaucccuggacu

SEQ ID NO: 2276747 - RNA, 19 nt, Artificial Sequence
  Description of Artificial Sequence: Synthetic oligonucleotide
ugugaaacauuguagggag
